United States Patent Application Publication US 2011/0014706 A2 - sequence listing, part 46

SEQ ID NO: 141727 - DNA, 480 bp, Arabidopsis thaliana landsberg
gttgatgttagggtttcggctgtattctcaccgctgctgacggagacggccggaatccgcaatttaatcttcgaggttcgattttagtgaagaacaagattcaatagtgatatgcagatctcatgtctcccaatttcgattccttcgatcactcctcgaacctcaattccactcttaccatcactctcctcaaatcctcgccgcattttcaacctcacttcacttcagagcccaaatcactgtttcttcaaaagattacataaatctcagactggtttcagcaatccagttttggctgccatgagaagagaagaagatgttgaagtcgatgattcgttttatatgagaaagtgtgtggagctagcaaaaagagcaattgggtgtacaagtcctaatcctatggtaggttgtgtcattgtcaaagatggtgacattgttggccaagggtttcatcccaaagctggtcagcctcatgctgag

SEQ ID NO: 141728 - DNA, 522 bp, Arabidopsis thaliana landsberg
tcaaaaccggccggcagacgctcacggcgtagatacgtggtcgacgcgcgcataatcacaaatcagaatatattgtttttggatcggaagagagatctagaagaagaagaagaagaagaagaagaagaagaagggggaataatggcattgcaatggctgattctgtcgtatgtggttgccgccgaggtagcgatcgccgtcatcttgactctcccttacccaatgctcctgaagaaacgcatcgtatcacttatctcgctcatactcaatcctgccgcttccatcgtcgccttcgctggatttcaactcctcggtaatcgcctctctatctctctctctctatttcttagatcgtctaatttcccactctttttcttcgtctggatcgattataattaaggtttcgagttgggattaattttggtaccttttttttgttttggtaatggtttattcagatatttactggaagaatgagcataggctattgtgctcatctgaagtttgcactactacagagcg

SEQ ID NO: 141729 - DNA, 1025 bp, Arabidopsis thaliana landsberg
agagtacaggaccaacaaaattacattctctttgcctttgcctatcgcttaattctgcttttattaccagagaaagcaagaatatataagaatcagaaattgggtgaagaagaatggtcttgattactaagatgtctctctctttctacatcattcatcttctcattttctccttgatttccacttgtgttgtctccatccgtacgtattggctatctatctctttcttagtgtatttacattatgtatttgtacaactcgttcttgaataaatatttacatatgtaatacgtgttttgagattacaagatggtttcaccggaaaaaaggattacaagatgatcgttttgtaaatatatgtataataacatttattcaggtctttggtaattacttttaagctcataatattggaatttacaatgtcatccccatgcatgttcatttaaatcgtgtagatggaatttttctcattcatagatcattatttttgtgttttgaatgttgtagaggccgaggataatcttcttcaaggcctaaacagctaccgaactgctcaaagagttcctccatttgccaagaatgagaaggctgattgtgtggctgatgagatcgccgacaagctcgaagatcagccatgcacaaaccacaccacagcgagcacggttactcctggctcggtacctccacggctgacgaactaccaggacattctctctgaatgcaaaatcgacccaaacactacccgtgacggattgatcttacctgtctgtatccctaaccggatcccgactttggctttaactaattacacccaaactgattatgctcggtatcttaatgattcgaggtatgtcggggctggtgttgggtcggagaaagagtggatggtggttgtattgacgacaagtactccaggtggaagctttacagctggtgttgctgctggcaaggcgacgtctgtgagagtaatggctggtttagggctaatggggttgttgttcagttgccttgtgctcttctga

SEQ ID NO: 141730 - DNA, 688 bp, Arabidopsis thaliana landsberg; identical to SEQ ID NO: 13064

SEQ ID NO: 141731 - DNA, 1168 bp, Arabidopsis thaliana landsberg
ttttcttcgtaaattagtttgaaggtataaaaccctaattcgaaaacctcccaaatcaggaaataatgacgacgcaaaagaggaagaaatcatcaaagtctcctccgacgacgtttctttctttaccagacgatgtatatcgctttcaattgtttggctcgtatctcgagattccattatccaactctatcactcgtctccaagggtttccgatcactcatcgcttcgcctgagctcgaggccacacgttccttcattggggaaaccgagaatcacctttgtgtctgcttaaacctcaacaagaacaccaactataatcctcgctggttcacactttccccgatagccaaacagaaattgaaatccatcccttggcatcgtcatcaatatcccaaatcctcaacagttgttgcaaatggttcagatatttacatagtcggaggcttcgtttgcggaacaagtagcaagagagtatttgttttcgatagtcgatctcatcaatggcgtagactccacgacatgcgtttacctcgtgtttctgcagttgtaaatatagttgacaagaagatctatgttattggaggctacaagcccaggaatatcaaaaaagattgtggagaggtttatgatccaaatacccaaacttgggagccattattgcccacgacagtaaatctcaccattcaaaactgtgtggtttcaggtggcttggtaatgggcgggaaacgttatacaacgaatggcacgaaaatgaacacttgctttgtagagttagagaacttgctgttgggtctaagtgaaacgtatagagatctagtgtggcgtgaactgaaggaagatgtttggcgtgtggttaggggacttgaacaactgtctcacaatcaaaattttacttatgtgggaaactccggcggagggagaagagtggccatttggtggaagtcgatggtggtgtttcgccctcgaggtcgtagccactcgactaagaaatgtaaaacggagatttggtgtgcagaaatttcagttgagagacgcggtttaggagagctttggggattggttgaatggtctaagaatggatttagttttagttttcgagatagttttaaatatatttttttgtgggagtttttttgaacatcttgaatctgatttcaagagataatac

SEQ ID NO: 141732 - DNA, 848 bp, Arabidopsis thaliana landsberg
ctgattttggtgggaagccatttgcatcagagactcctcgttcagacaacctgttcccaggaagaagcccctttatgttcgactctgtcccaagtacacccgccgcacacgatgacttctctaacaacagcttctcccgcttcgattcattcaacagcaacaacaacgatgctttctctctatcccgcacagactcgatgcgcagcacaagcgagcctgacccattcgcatcaaggtttgattctttcaactatcaaagatatgattccttcaatgcacaaagctatgattcctctagcaacaacaatgcatcggagacgcctaaagcctcattgacaagattcgactcaattggaagcaccagggactctgattacagtcatgggtttgggttcgacgaccatgacccgttcggttctacaggaccattcaaaacaacgacaactacagcagagacacctcggagttctgataattggaatgctttctagccagaagcccacgtgcgatatgaatatgatcacatatcatatactttgctgcttttatagtttgaatttaccagtcgaagagttatatgtatcttcatttctttggtttcacctgcttgcttcattttttattgttaatatataatagtcttttttgtcattttttcttttaaggatttttcgaagagtgtcctttgttggtctctgcgtagtgtttctttttatttgtgtctttgtttgttaacttgaataatgaattattatttgtccctgtgaaaacttctattgtatctttgtaatcgtatggatacatttcagatgttgttatattagattgattggtaattttgggaataa

SEQ ID NO: 141733 - DNA, 335 bp, Arabidopsis thaliana landsberg
taagacagtcattgacaggagagcgttaaaggtaacgtagtgtttgtatattacatttttaggatatgtaacgcggttcttcttgttaatattctttcttttttaatccacagttggtattgtcaaatccaaaaggagaggtcgtgaagaaattaaccacatccaaattcatcggtgatcatttgggcaaagagtggatgttcttaacggtaggagaagcagtggaggcttgtagctacatgcttcacacgtttaaaaccgaaccggcctccaaaaacgagccttggaacaacgtatagttcctttattttttgctgtcgttctgtgactactcg

SEQ ID NO: 141734 - DNA, 1171 bp, Arabidopsis thaliana landsberg
gctggagccaaagtcgtaacggaggaagaagaagatctgcttctgcaaaaaaccttatcctgctatggcttccactttcgtctgctctctaccaaatcctttctttgcttttccggtcaaagcaactactccttcgacggctaaccatacgcttctcggtacttaactatctgaaagttattttgatgtttcttccttttcggatataaagtttgtctttttgataatttgtttcctcgtgtttatgcaggaagtcgaagaggttgtcttagaatcaaagcgatttccactaaatgggaaccgacaaaggtactgtcttttccgaaaaatgtattggtttctctgtttttaaaaactggtgattaatcttagtgttgaggtgataattgcaggttgttcctcaggcagacagagttcttgttcgtcttgaagatcttcctattgtcagtttagctcctttattgtctgaaatgtcatgattattatcaataagctattaatttgatgaatcactaaattgaattccattgccaaaaacttatgggctcttaaattgttattctgaagaaatcctcaggtggagtattgttgcctaaagcagctgtgaagtttgagagatacctaacagagaggtaagtcatttgctcttatatgctttatataacttgtgttagagcatctttattaagaatagagaatcatttcagattatatctgttggttctgaggttggacaacaagttggacctggaaagatggtaaatgtttcttcttaagtcaaagacatagttatttatccattgtaactaccgtgaatcttgtctttatctctttctcctttgcctttcacaggttttgttctctgatgtgagcgcttatgaggtgaattccgcttctctgcagtgtatttgattagttgttgtcctgtccttgtgtggttttaaggaatatagaatcgaacatctctgaatttgtttctcaggtcgatttgggaaccgatgctaggcattgcttctgtaaagagagtgacttgttggccctcgttgagtgaagtcttgtccaagagggagaaatttgaagattttacaagttttctgtaattttcagacagcaattgttgtttctagttaatccttcaatttaatatcaattgagatcactttcagagata

SEQ ID NO: 141735 - DNA, 642 bp, Arabidopsis thaliana landsberg
aaccgcctcaaccgtcagcactccgtctagtgaaaccaattacggcggtacagttgcggttacgactcctcaacctctagaaggccgtccaattcatcagagaatctcatcttcaattctcaccaactcatcaaacaatctcaacctcgaactccaactttttccattatcgtcgaatcaaaaccctaatcaagaaaaccaacaacaaaaagttaaagaaccatctcatcatcataatcataatcatgataccacaaacttaaacctctccattgcaccatcatcatcatatcaacattacaacaactttgatcgtataaaagagattatggcgagcgagcaaattatgaagatagcgatgaaggagaaagcttacgctgaggaagctaaaagagaagccaagaggcaacgagagatagcggaaaacgagtttgcaaatgccaaaaagattaggcaaaaagcacaagctgaactcgagagagctaagtttttaaaggaacaatctatgaagaagataagttcaacgatcatgcaggtcacttgtcaaacatgtaaaggacagtttcaagcagttgcggttcccgcggctacggctgatgagacgtctcttgtcgtgaagtacatgtcgtcagcgaatactga

SEQ ID NO: 141736 - DNA, 791 bp, Arabidopsis thaliana landsberg
gaacaagtcaacacaatccaacggtggaaaattaagatcgaattgaaacggcggattccgtcgccgtgaagacgatgcgatatcgtcgtcgtcgtcgattacagacgacgacgaatcgcaatcgctgtgacaatcctccggaacaaccggtggagttctcggatatctcttcgtcgtggccggtttcatcgtcgtaggtctcggtccgctaaacgattcaacggtgctgctcatgctgctactagtaggccggttaacaatcggaaactgttgttgatggtcggtgaataaccggtggtccataaacggatcgacttggttttgattttgattacgaatctgattaaatcggagattgggaggaggaggagaagaagaatcgatggggaaattagttttggcctttaggaccacggaggttacgagcggcggagtcgtaagcgcgagcagcttcttcggcggaatcgaaagtacctaaccaaacacgagcttttttccatggatcacggatctcagctgcgaatcgtccccaaggtctcttccttacgcctctgaatctgatttcttttacagatccgttgatggcggcaacgacggtaggtctggcgacggcggaagagcctcttcctctcctcatgatggtggatttaagagaaagccagaggtaatggtaatggagaaaggtctaatagagattgttgagaaagagagaaagagagaggaagatgaagatgagggagatggtgggaggaatggagaagataggaaactctctcttcaacacaaaaagc

SEQ ID NO: 141737 - DNA, 509 bp, Arabidopsis thaliana landsberg
cttcccctactcgacatcctgtcacagcacatcaagtcatgtatgaacttcgtgtgtattctctggaaaaagaatcgtaagtgctacttccaattgtttttcttgttacctttttcaaaattttacacagcacaaaacaaaaaaaactcaagagaaaatgtcttatgtatgtctgcagatttggttcggtacttgtgtcccgggcaattagggctgcacattgcttaacctctatccaggttagccacaatttggttggattaaataaatttgttagacataagtctctgttgcaacttttttctagacataacattgttcaagtacttcataactgcaaagttccttgagatttcacccctaatagtaaatagagttgttcacttgtatttttgtgatgaaatactttataattaaaaatttccgtgcagttctcaccaacctccgagcacattctgcttgcatatggtcgtcgtcatggttctcttttaagagcattgtgagtgatg

SEQ ID NO: 141738 - DNA, 1671 bp, Arabidopsis thaliana landsberg
aagagagaaagaatttaagattcaatctttattagccggagatggattcgccaaactgggaactccgtggttgttgcaaccggaatcaaaatactttcctcatcaccatcggagtcttcaccgtagttatccttctggtcaggtttgcgaccagaaagttatgacctttgcttgattttttcgattatgaaagggtttttgtaaaatctagccaaaagggttccagattgacttataatttcaacgaaatttggtgaattgaggcattttatgtttctaggttaatataattttgattgaagtatcaaagtttctgtttttatgatctttactgagagatttctttgtgggttttggtttgacagctatggaggacatttctattgactccatttaaactcattacggtgtttttgcacgaagctagtcatgccgttgcttgcaagcttacatgtggagatgtaaggagctttctcacttcaactactagtcttcaaatgaacttaaaagggtataagattgattttaggtcacttgaacccttgatttagtttgcaaacatgaatgtgtttccttccatttgtaaaatgttgctgtgtaagagcagagaagatcttctggtttccttagatagaaagatttttactttagcaatatgtcagttcattcttctctctggacatgactgttagtatagccatagataagaggttgcagtatccttatatgtcttgctatctgttttatccctaatcatatttttagacgattcttgcttgcttccattgttaatgtgtaaactactagcttctgtcattagtttaagaacacacagtgagtctacttgaataagtgcagctgctcaagccttagctgtaggtctacattaacttccctaggagtgaatgtaacagattatagctcttttgtgttggttagaaagcttttagtgaggactggttttataaagatgtctctgcagatagttagggtgtagatttgatggcgattttggttctgtaagagtaggagtgttcagcttcaggtcttagtcttactatacttctgcttgtgtttcttctagattgattgatgcatatcacaattttaccttatgcaagtattgcagtgacaatgtgagatctacaaactttcctttgcaagtacttcctgtatgaaacttatctaccagcttctctctatgagtctttatgttttaccccctcataagaattatcttgaataggctatgtaaaggttgaacataaataccaccaaatgtgtgcaccatctctctgtgattctgcaactaacagtcgcatataatgtggataatgtgtttctactaacaaattgtcactcgttttggtaaatcaacttcttattgaatcaaaaggtagaggggatggaggtgaatgcaaatgaagggggttcgaccacaacacgtggtggcatttattggttgatcttacctgctggctgtaatgcacaatctatcgatatatcttatacaaatccaccatttttcaaatttagaactaaaagagataaagttttaacctttttgttgttgaaaatctatagatcttggctcatcattttggggaatggcattgattcttgcatctaccactctgcttacagcaagaatagctgctgctggtcttggtc

SEQ ID NO: 141739 - DNA, 934 bp, Arabidopsis thaliana landsberg
taaatcggtcaccactgatctgaatcttagggtaagttcagtcaccacaggatccggtctcaagaagcatttggatagcaaagatttttctcagccacaatctgtgtcctcctattcctttgataacccaagggacctcaacgcagagagtttcaagattatttacagaagattaaccgatatggtttcaggacaagatgaggctgctagagttatcagctgtgcactgtcacaaccgcctaagagtgtcactcgaagagatgtttggcttaatttggttggtcctgatactgtaggaaagagaagaatgtcgcttgtccttgctgagattgtgtatcaaagcgaacacagatttatggccgttgatcttggtgccgcggagcagggaatgggcggttgtgatgatccgatgaggttgagaggaaagacgatggttgatcatatctttgaagtgatgtgtaggaatcctttctgcgtggttttccttgagaacattgaaaaagctgacgagaagctgcagatgagcttgtcaaaggcaatcgaaactgggaagtttatggattcacacgggagagaagttggtatcggaaacactatttttgttatgacgtcatcttcacaaggttccgcaacaacaacatcttattctgaagagaaactattgagagtcaaaggaaggcaagtggagataaggattgaaactgtatctagtttaccaatggtgcgatcggtttacggcccaacctcggtgaacaagaggaagctgatgggattagggaatcttcaggagacaaaagatactgtggagagcgtaaaacggttaaacagaacaactaatggagttcttgatatgaaccttccggctcaagaaaccgaaatcgaggaaaaatatcattgtgaagagaactcaaacgtttggttaatgagcttgaag

SEQ ID NO: 141740 - DNA, 495 bp, Arabidopsis thaliana landsberg
atgcctagcgagaatgacaaatcattgtccgtgaacatagcactcaatgacgaggcaaagatcaaatatcaccaactccatctcactgctcttctagaagcagtcaggtaattatattaatttcatatacaaagaatttcaaatatccagacttctgtcatagttttacaaaaaaattaataatgttgatgactgatgtgtttttctttcatggaacattgaaacagtcaaggagcagatgtgagaggatattatatatggtcattaatggatgattttgagtgggaatttggttacaaatatagatacggattggtctacgttgattttcaagatggacttaaacgacacctcaagagttctgctctttggtaccatcattttctatccaactcatcctcctatcaaatggactagcaaggaatatctaaaattaatatcttcacttatatacaactttcttatgtattcctaagaataaaatgaagcatgcaa

SEQ ID NO: 141741 - DNA, 616 bp, Arabidopsis thaliana landsberg
atgttttatcagtggagtcacgtagaaagtcttcaaccaggatcttctggcatgactgaactttataaggctctccaggagccaaagtttcgagaacttgattcagaagatctcctgacagagagattgttatcagttaagttctgtcggagttctcggtgccctgtatattgagatgaatggttttaacgtgaaatatttacgctgaagaaataatgaacattttttcataggcagagaaggactggaaatcaacaatcgaactactcaaacacgccacactgaccctgaagatcataaacttgggttctcttgagcaacagtcgaaatacgcttcaacttggtttgaaatttcttcgacctgtgctcaagaattgcgacatgctgcatccatttggaagcaggtgattaaaaatgatgtccaagaagaaatcctatctaaacctcaaggtaccaaccattagcccattaatcctcttgcattgaggccattttcatccgtgacttattctgattctgtgtgaccagggaagagctatgctctctcagtgggagaaatttacagagtagtaaaaattctgagagcatcaaccatattatataaaccgtggatttt

SEQ ID NO: 141742 - DNA, 687 bp, Arabidopsis thaliana landsberg
gcatctatgttggagatgatagagtcatccatttcactagacgaggccaagaagttggaaccgggactgttctagatctcatactagtcagctcaggtccatcccgaaaccacacccactgtccaacctgtgttccacctaacgaaggtcacggtgttgtttcctcatgccttaactgtttcctagccggtggtgtcttgtaccggtttgagtactcagtcaacgctgctcacttcctcgtcaaagccagaggaggaacttgcacactcgctgtcgctgaccctaatgagattgttgttcacgtgggccaaacacctccttcaaaacggatttggatgttatgacgttttcaagaacaactgtgaggatttcgctatatattgcaaaaccgcattgctggttcttgagggaaggacaatgggacagagcggtcaggcggtttcgattataggtgggccgattgctgcggttttgtccacgccaatgcggcttctgactacaaacgtgtatgggatggctgctacagcgattggtgtgtattgtgcgagtagatacgctactgatatcggaatgagagctgacgtcgcgaaagttgaagcagaggacctcacaagaaggctgtcttcaggacttttccaagtacttgatcctccattggcagccatagctttaccaagcacgagttga

SEQ ID NO: 141743 - DNA, 582 bp, Arabidopsis thaliana landsberg
tcgtgatcttaaagctagcaacattcttttggaccaagaaatgaatccgaaaatcgcagattttggattagctaaactctttgacacaggccaaaccatgacacatcgattcacaagcaggattgcaggaacttagtaagtaaattcatttaactaacttataaatccaggaaacaccagtataaaccagttatcatttcaattttaagcggatatatggctccggaatacgcaatgcatggacaattctctgtgaaaacagatgttttcagcttcggtgtattagtcattgagatcattacaggtaaaagaaacaacaatggtggatcgaatggtgacgaagatgcagaagatcttcttagttgggtaagtacagtatccaaaaccaagctagtaaatggggtttcagttttggtcatcttgttgataaaatttgtgattctgtttttcttttcaggtgtggagaagctggagagaagacactatactaagcgtgatcgatccgagtttaaccgcaggatcaagaaatgagatcttgagatgcctacacattggtcttttatgtgttcaagaaagtgcagc

SEQ ID NO: 141744 - DNA, 696 bp, Arabidopsis thaliana landsberg
aattcaagtgcgttgaagttagaggtaaccaccaacttgcattttactctccaaagctctgatttttctgtcaaattcttttgaaaactttgatgcttgttttcttctcatcattgattcttttttgatgataggttagttctacacaaagcttgatcttttaggggttttctctagttattggagagtggtgagaattagaaactgcattatccgatctaaaatgggtgatacagagaagtgtaacagtgatatgatccagagacttcattcatctttcggcactacttcttcttccattcccaaaaatcccatttctcagctcgatttaaaccctaatttcatccgctcatcagctcctcaattctccaagcctttcagtgacagtggcaaacgaatcggtgttcctccgtcgcaccccaacttaatcccaccgacttctccgttttctcagatcccgaccacccgacaacccggttcgcataattttaacccgggaggagctaatcattcacggtcaatgtcacagcccaactctttcttctcttttgactccttacctccgttaagcccttctccgtttcgagatcacgatgtttcaatggaggatagagattccggcgtgtttaacagcaaccattcgttgcctccatcgccgttcacgaggtgtaattcgacctcttctagctccatgag

SEQ ID NO: 141745 - DNA, 381 bp, Arabidopsis thaliana landsberg
ttaaaaaaaaagagggaaaaaaaaaagaagatgagagaaagcaaagtgttgaagactttttagaaagcagaaaaaaaagcagagagtgtattcaaagtcggaaagaaaccctaaagaagaggattatgggtgctgtatcgatggagtcgcttcctttaggtttcagattcagacctaccgatgaagagctcgtcaatcactacctccgtctcaagatcaacggacgtcactccgatgtccgtgtcatccctgatatcgatgtctgcaaatgggaaccttgggatcttcctggttcgtctctttattctctcagaatttgactccttttattctcagattctgttttccctctcaaagattccacctttttttctttactca

SEQ ID NO: 141746 - DNA, 404 bp, Arabidopsis thaliana landsberg
taagatccacattatcaagtattaagtacaccatcttccccatgggtttttcatccggcttatctgatcttgaggttccggaagtagactcgagagtctttatcacactactaagggcttcacgaagcaagttgacaaaatcagatggcttgtcacatcgtttcgcactagaatacccgtttaaagaacacttcctatgtagcaacaactgattcagaatcgactcaaacaagatacggggattgtaacacgtacgacagcttgaataaacaaagggacgattgagatgcctgagcacctgaagaacaacactggtttttcccgtagaagcacctccatagatcattattggaagagtagggcaatctaacggccccataagtcgaataaagtcgaaaatctga

SEQ ID NO: 141747 - DNA, 392 bp, Arabidopsis thaliana landsberg
ataatgctaaccctttttttcctcctcaatttcaatataaactcatatcaccaccaaaccatcattacaaattctaaaaacaaaactctatgaaacacataaaacagaaaaatatatatttagtctcttatatatataacatcactgcatttagaaagtattaggctgtttagcctgagagatcatctggacaacctctctcatggtcggtctctcaacactatgttcttgcacacatagcattgccacaaagaacagttccatggcctctgctaatggaatattgctcaatctctggtcaatgatcttcaccacaccttgtctgttacagtttgtttggatctttgaccattgcacaatgtctatcccttcttccccaaaattatctactg

SEQ ID NO: 141748 - DNA, 935 bp, Arabidopsis thaliana landsberg
tataacaagtattctggaagaaagaaaagagagagaaaatgtcgtccagtaaaatccaggtacgagggcagccacttcttagggttccggcaagaaaccaccgtatgacacacttggttgtttgcggcgtttccacaaaacgccaccaccgtgaaatcaatgcactcagcagtaatagtggtccatcgttggattcggtcccaacaaggaccgacaagaggcagtttcttcgtggtgacggtaacggtaaattcgggaggttcggtgggaagtttgtaccggagacattgatgtctcgcctgatagaacttgaagacgaatttaactttgttaggtgcgatcacgaatttcaggttcggttttctcataatattgagcttcttgcaaaaaaaaccataaacacaaaaccaaaagggcaagttcaaacaaaatggttacttaaatatccaatggatatatattttattttagattctttgcaaaaaaatcatctaactcatttatttttgcaactttacacatcacctttaataaatgcaagttaatcttatcacgcctaaaaaaatctaaaatatgatccttatacgtatattataaacgtttttacggtcatatacattagaattttaaaattttgaaggtagagttgaactctttgtcgaagtggcttcgatttaacattatatgtcaatattttacaaaattgatggtaacaaaaatggtgaaaaagggttatactgcgtattatattagatttcgtagggttaatctaacatgtattagatgtcgaggataaagtcgcaaaaagagatgagttataagttttttgcagaaaacattttttttttgtcttggaaataagcacttgttaaataaaacataattgctttatctttaattataactaggaggagcttaccacagcgttaagagac

SEQ ID NO: 141749 - DNA, 332 bp, Arabidopsis thaliana landsberg
acatctattgtttttcccggtttcaggcgagtcatctctaccgccgcgactcaggcgagtttccacgccgaggttgtgatgagtggtcgcgtctgccaccctatcattaaacatccgtcattttcttcaactctgtatccatctccggtagcgtaaagcgataaaagcatactcgcttgtttaaacgcgctagatccgagatgaatcgggtcaaacccagcggatttcatccgaatcctccactgtgccgccgtctcgtgccgctcgacccgatcggacccttccgccgcaacaacgttgagtatctgtctccctaagtacacttctgacat

SEQ ID NO: 141750 - DNA, 209 bp, Arabidopsis thaliana landsberg
ttttcttcggttgagaaactggtttccagaagcatgaggctgaccagttctctaaccagatcaagtttgagtttggattggatgtatcatatgcgtgtacaggtagcacttttggtgatgaagcgagaagctgtaaacaaaattatccatcaagatctttaaataaaattagagactccatagtataaaagagatattggatacagtga

SEQ ID NO: 141751 - DNA, 203 bp, Arabidopsis thaliana landsberg
aaaaatattatctctgttcgtttcgtttatgaaccatttttttttttaccagctgcacttctatgagatgattactacaacacttgaagaaagcatgctcaagaaacaagcaaggaaaaagtttaattttatttaatgacattaataaacccaaagttgagtgtgagagtagcaaaggacataattagttcaagcagaagcag

SEQ ID NO: 141752 - DNA, 148 bp, Arabidopsis thaliana landsberg
cacaaacacacacacacacacagcctttttccttcgttgatcgattgttaagctcgatccaatggcggataacaccgataatcggagatccttatggggagttccggagaagcttcagcttcacatagcgatgctgacgttgcaattc

SEQ ID NO: 141753 - DNA, 656 bp, Arabidopsis thaliana landsberg
tagatattaagtaggtttaaacaattatgaatctttgaaaaatgcgtatgtcgagtctttctaatacaaaacttcatacaaataatgaccaaagagaatataaaatagtcaattatgaaaatattcaaatgataagcagacaagtaggtgactcagcgcattaagcaacccaaggacaaaatgggaactatatattatttcccttttcttcaccactctccttccgatacccaaaaccggaaccaatgacaacgcataccaatggcgcattctcatacttttccgattttaccctttagttttcccacaattctcgattagaccatttctctccgccgccgaaacctacggagaaggaagagaaaaaccatggaatcgtctccggtaaactgtcttccacctgattctctccaccagatcttctcatctcttcctattcgtgatatcatgatctgcagatccgtctgcaagttcttcaaccagcttttgacctctcagtgtttcatagagattatctcaactcgtccgccgttgaatctactcgctctccgacctcctcatcaccaccacagtcaccgtcacagcggaaacggacacgcaacgaatatccgaccgtacatccatgtatatgatccagagcagaatcaatggttcag

SEQ ID NO: 141754 - DNA, 195 bp, Arabidopsis thaliana landsberg
tctcgttttctcatccatttatatgattgctttcttctccacctcaccaatcactcctcctctaaacttttcttcactctcttgtctcttcaaacttcggttactccgttttagtcgacaacaatggcctctgtttcaaggaggttactgaggagagagacgatcccctgtttcagccacaccgtgaggaaactc

SEQ ID NO: 141755 - DNA, 741 bp, Arabidopsis thaliana landsberg
ggccgggatttacagaaccaccggcgagtcttaatctccgagagccggtaaatcaatcctcttcctcaaatttctagggtttgctcttcgtcggttctttacgcagatttcttcacactggtacggttttactctctttttccctcttgtcgtttttttcgctagaggtttgaatttggatttagctttgttccgtcttttgtagtgtctagataaagctccattgaagtttccgtatctagaaattcgttgttttctgatgaaattatggtagagaagtcttcaatttcatcgctttttgttggaatgatattgttttttctaatttctagatggtttatttggtgataaaatcgaagacattttgatagtttgttaccaatggtcaacatttccatatgagatttcgtttgtgggttatataaggactcaagtttctgttttgtctattgtaggatggaagattggtgaaaccctagctccactgtgtgaggatcaaaacatttgtttaagatgttcatggaggaggcgacaagtaatggtaaaggtacagagcataatcagccaaatggtttggtggaaagtgaagcattgaataattggagtgcaggatgtggtgctatggctaattctgcaaatgctagttccagagatagtaagaagatacaaacatataagcggagaaaacttgggagatcttattctgctaataaatgttcggaaaatgatagattttccatg

SEQ ID NO: 141756 - DNA, 138 bp, Arabidopsis thaliana landsberg
  unsure (1)..(138): unsure at all n locations
gcgtatactcccggcggaagacgangtcttcaggctcctaaggatcagggcatggtttgataagaagacagaggaggagcttgaggatcttgaggacgacaaagatctcgacgatgatcgctttctcgaagaatacag

SEQ ID NO: 141757 - DNA, 357 bp, Arabidopsis thaliana landsberg
ggcgaatcgagtcatggtgctcactgagctcgctgcgttgtattactcaggtactgtagttgctaaccaatggctcaaattctcgtcgaatttaccatcgaaacctagaagtcctgtgttaatgtctagctcggttttcgcattgtgtgatgttggatctccatggagaagtcaatggaagcttttctcatgtaaattgacgaatctcacaatcactcataccaattgggtttgcttggagaaacatgaatggggtgatatattcgatatcatcaaacgaccgcgtttattgcgcggtaacggtgattctaagcttcttatgatcggtggattgaaatcgacgttttcgttgaaccc

SEQ ID NO: 141758 - DNA, 441 bp, Arabidopsis thaliana landsberg
agcaagactacaatcgtatcacattccatttaacagttttacaaacagtctggattacaagaaaacaaacacaaagcacatagagaaacagtgatacaacagcttaagaacagtaacaacaaagaagcagatacattcatacaatcaaatacagaaaatcagtaaataatcataaacagagagatacagattccttccttctatggaataataatgcgcaacgaacacaaacggacctttttttctgttgtcatggcatcaatgtaagcttagcatcaaacacaaaacctggacacaatccatctgcataaccagggacgccctcaatccatctccaaccttgccaacaatcccacattgcaagcttccccatccttttagcagagaagtaaaccctatctccacctccaaaaactttaaacttactcgattcttgaaaac

SEQ ID NO: 141759 - DNA, 419 bp, Arabidopsis thaliana landsberg
cctgcttcttcaactccaaacctcaccctctcaatttccctccttcgccggtccacggcgtcatttcacggtggcgcttcacctctctccgtcacctactctcctaaaaatccaatctttacaaaatccagaccaatatagaaatgactttaatcgcttctctgtctctcccaccaccagctatacaaagacaatcactttctgaatttcataatcttcccgctaaatctcaatccttcaattgtcaattccggtcttctagttcacctttatcttctctccattcttcatcgcttagtaactttctagattttagactaaggcggagaaacagcggattggttccagtggtggcgtgttcaacgacgccgtttatgggcagagttggattacattggagagatgggaatatgtctctg

SEQ ID NO: 141760 - DNA, 419 bp, Arabidopsis thaliana landsberg
agtgaaaatcgaaatactcatgttaacaagccattacaaacaaaagacctttataagaaggcaacttttataggattttttagttaggaagtcttaagagtgtagcaagaatgacaagagactacacgtctacacttacaaaacattaaagttttaaaaccaaagcagatcactaggaaaaaagaaaatctacttggttctaagaccaggaacgtttttgagacccatcttgccaagaacatttttggggatagctggtgggctgtcaagtcccatgctgcggctaaactcattggccagctccaccagtctggtcgtgtctcttgcaatcatcttctgagatttgtagtaacccaaccacgcctgatacgccgcctccttgttcttcatttccacttggctcagccctttctgcacct

SEQ ID NO: 141761 - DNA, 589 bp, Arabidopsis thaliana landsberg
aagaagaggaatttgatggcaatttatcaaggttcaaaaagggtgactaaccatccatgcagacaaaactgttgacacagagtattttttaaacagagaagggccgggccattgatcgaagatgagatcgagaagagacttcaaggtccaagccccgcaggctcgagacacaacttgaaccagcctaattacaaaataaaaccaaatagtagatccgaaaacagagttgtaattaaagttgcgatttgtgcactttatttacaagactcaagagaaccatcatcattgatccatatctcaacaaaaccctaattatgtctactgctgaaatcttcttgtatgttcataccattcttcaagcaatctgctttctagatacgatccagccggaggatacattgggccattgttcatgcctgaagacgtcaatttagtttgtgtatcaggtactgcatatgcttgactctcaagtatcttccctattctttgcatcttttggatctcgtcttggttcatccgataaccaaactgtgagccggtgtaatcgttttgcgtgttattataatgctcgttagccacctgagacgat

SEQ ID NO: 141762 - DNA, 437 bp, Arabidopsis thaliana landsberg
cagaaagagtttcatcaccaaagttactacccttcaaaactgaaggagatcctgccatctgacttgcagccctggctatgcatgcaccaattttaaaggacggcctttcggcaaaagacaccttggcgaatgaaacagtcttcctaccttctcctggtgaatcctcactcaggacatcagcctttcgtttcacaccattggtcttaacatcagaaccagcttcatcatcagcataaacaaaattgttgtgattttcttccatttctgcattttccttttggtttgggtcgaaacttggagcttcatgagtaatgtcatcttcctctatcattgtatcttgtacatctgctgttttcttgtcgaggcattgatgattcttatcttgttggttttcttcagatcccaaagttgcatcagaagtctcttttgaacaatca

SEQ ID NO: 141763 - DNA, 228 bp, Arabidopsis thaliana landsberg
tcgacttgtgagcgttgctttggacggatacatgaaagtcttcgattacgggagagcaaaggtgacttactctatgaggtttcctgctcctctcatgtctcttggcctttcccccgatggttccactcgggtaatcggagggtctaatggcatggtgtttgccggtaagaagaaggtgagagatgttgttggaggacagaagaaaagtttgaatctctggagtctgat

SEQ ID NO: 141764 - DNA, 610 bp, Arabidopsis thaliana landsberg; identical to SEQ ID NO: 51918

SEQ ID NO: 141765 - DNA, 650 bp, Arabidopsis thaliana landsberg
caacggactcctcatcttgatggtaagacagttcgactatacgctagttaagtactgcaaaaattatcatataatgggcgatgttatatatatttgaattatttagtctgttatgttaattgagctatccatataaaagttatgatagcagaagaacaaaatagtttgccagttttggaattgacgtgttgccaaattaattgggaaccatgaataaataattaaatagcgttattttaaatttcagtaaaaaaaactattttgcatttcataaggccagcgcgtccttaattctaatttaatttcagcaacacatgtcacatgaagggtgaaactaatacaaagaactaaactataagctccgatctttttagtttaattaacgatgataaattgttgtttacgctgatatattatagttttcatcgtagaactaaatgtaaaatttcgctttttatgtttacgtgtagggcttctcccaaatgggaactttgagcaaattcctaacaaatcaaacatgagaaagaggcaaataattggcaaatactctcttccacattgggaaatctccggccacgtagagctagtctctggcggtccacagcccggtggtttttacttcgcagtgccacgtggagtccacgcagcta

SEQ ID NO: 141766 - DNA, 246 bp, Arabidopsis thaliana landsberg
aggcaacagctattccattctttcagctcatccatcccttgatagccaagaggtttacccaacagcatgtgctggctccagatacaatactggattcagaaaacaggtcaacctgttccaggaaagctccttcgcaggacccaagcaatacacagaggaagacttcaaggatgagagaaacagtgatttttttgatggatttcttgccattggaacccttggtggagaaacacttcttgatgaaca

SEQ ID NO: 141767 - DNA, 378 bp, Arabidopsis thaliana landsberg
ggaactcaaaccaatggagaagcggaggcgggaagagattccggtggccggagaaaggcgactcatgataggtacgtggcaagggcaaaagcataggaacatgagagaaacaactcgagaaacggttcagggtaatggcggagaatgtggatattttgagatggtgttttggaagtttgcaggaatttggtggacctcgtggattcgtcctcttcttcattgccgaagaggttgaattaaaacttgtgcttcttccatttgattgtgactggattgacacttgagctgcgcgtgcactccacgcgcctttcactttccatctcttcttcttatgaccataaaaagataaggaaaatgattttttttctttctttcaat

SEQ ID NO: 141768 - DNA, 292 bp, Arabidopsis thaliana landsberg
aagttttcttttttcggtcaaaaacaaaagaatctaaaaatagcaagttcatcgtttgatattttagagtttaacaagaagaatcttgaaagccgtcacctacagatctgaagaatattctcaaggatagagagagaaatggcgacggacttcaagtctttaccagtcatcggtactaacgaaaccctaaattcttctaaatctccttatactctctgatcaagcttcactcaaattcgatcatgacgattgtgcagacatctctcgtttacctctcaagtgtgatgatccc

SEQ ID NO: 141769 - DNA, 775 bp, Arabidopsis thaliana landsberg
tggctctgagctactctttattgcttaggccttagtgtgtgtgtgtgaatcttctcagcgaaagccaagttcttttctttgttggtgtttctgggtttattgcgacaatgggagctgagcattttagcctggtgaagttcaatagaggtttctttgtgtgtttatgggtgatgctctcgctatcttgcgcagcagcgagctatggctcttcaaggcaaaagtttgaggtgaagaagcatttgaataggctcaacaaacctcctgttaagactattcaggttctaactctctttcttctttactactttgtgttttctcgttttgagtttgatgggaaactgatgatttctgctctctctcctgttactttttgtatgttaattggcacagtaatgaagttttcactcattcttagtctacaccagtgttttagtaactgttcattagttaattctggataaatcagtagtcctgaagtttttgaattagtgagttcttatgttcttctttgtggttaaacagagtccagatggagatataatcgactgtattcctatttcaaagcagccagcttttgaccaccccttcctcaaagaccacaagattcaggttcaaagaaataaaaaaatactaatgatttagtactttcttgatatgtttggttctaaatctggttttttggtttcttggtgtgttcagatgaggcctagttaccacccagaagggctctttgatgacaataaggtatctgctgaaccaaaggggaaagaaactc

SEQ ID NO: 141770 - DNA, 298 bp, Arabidopsis thaliana landsberg
gagatatcaaacctttcaaggcttgagatattggcaagtgttttgggaatagctccagtgaactgatttgttcccaaaagaagtcttcttagatttggtagaagataaccaaaatcagccctaagattacccgaaaagctattgtcagctagagatagagactcaagagaggagatgttgtacaatgcaggaggaaaaccacctgaaaaactattcagtgctatttggaaaaacaccatttgagtcaatctagctacttcgtctggaatctcacctctcatctggttatatgcaaagt

SEQ ID NO: 141771 - DNA, 683 bp, Arabidopsis thaliana landsberg
aaaataaagaagagtttataacattaaacagagagagtttcaagagtcagacaaagaagagagattctaaaaatgaattctaaggcaatgcaagctttgatctttcttggtttcttggccacttcatgtctcgctcaagctcctgcaccagcaccaaccaccgttactcctccaccaacggcgcttcctccagtgacagcagaaacaccttcaccaattgcttcaccgcctgttccagttaacgagccaactccagctcctaccaccgctcctaccacttctccaacaacatccccggttgcttctcctcctcagaccgatgctcctgctcccggtccttccgctggattaactccaacttcgtctccagctccaggaccagacggtgctgctgatgcaccaagtgccgcatgggctaacaaagctttccttgtgagaacagctgttgccggagctttatacgctgtcgttttggcttagagagcttttgagtttggtggatttggatcctctgctttctattactgttttattttaattacttcttctcgttcatatttgttatttactactattatcattttgacgtggacacttgttgttgttggggatgagatgaacatagagacaatatggtgtaatatctattcttttatataaatcaaaataattcttttatatta

SEQ ID NO: 141772 - DNA, 566 bp, Arabidopsis thaliana landsberg
gtttgttcttcatctttcaatctcaaccgagaagaacaaatccttcttctggtaagtagaatcattacgacatcatttatctctccggctagattaatatcaattcggattcctctgagtttcgcttcggtttcgtaatttagaatctcaatagttgttgttttgtatagtatcgctcaaatgtgtactaaactcattacaattgaaatcatgtattttcactttcagagaaattaacgcttgcaaatggcgaggaagatgtctcttgaagcttttgtgtcaacaatggctccacttatagacatggagaaagaagctgagatctcaatgtctttaacctccggtgcttcaaggaacattgaaactgctcagaagaaaggcacaacgattctcaatttgaaatgtgttgatgttcaaacaggtctaatgggtaaatctcttattgagtttcaatccaacaaaggagatgtgcttcctgctcacaagtttggtaaccatgatgttgttgttttgaaactcaacaaatctgatcttggttcgtctcctcttgcgcaaggagttgttta

SEQ ID NO: 141773 - DNA, 221 bp, Arabidopsis thaliana landsberg
agccaatcgaatccttttcaacccgacgggtcgtgaaattccccaaaagattcctctttctcagctcaatttccaaaagctccgacctttacgatcctctagattctcggcgccggtttctcggagtaaataatggctcagttcacgggtcgggtcgttggagactacttggtgggtcgtcaaatcgggtccggttcgttctctgttgtttgggaagcgag

SEQ ID NO: 141774 - DNA, 214 bp, Arabidopsis thaliana landsberg
actctcactaatacagtatttgcaattccagagcgacgggatctctctccggtaaatatcggaaacttttattctcagcaaagcgagatctcgacgtttctcagatccgtccggcgagttagatccttgagaaatcatggctccggtctcggcactcgctaagtataagctggtgtttctgggagatcaatccgtcggcaaaaccagtatcatt

SEQ ID NO: 141775 - DNA, 582 bp, Arabidopsis thaliana landsberg
caatctctttcactgataaactaagtgacttcagacaatagaaaattcgtgttttcataacaagatgtttacatgaaccaagtatacagacaaatcaagaactgaaaaaggtaaaatctcacactgtttaactgaattaaactagtcttaaagtcgaaaccagatacttaaatgaagcaagcaaagcaaagtaaatgtatatacctttcaggcgtaaaggaaacaaaacaaaacaataaaccgatttcttgttgaatcacgtaaagtgcagaaaaaactcttacttcgccattgaagcaacaatctcctctagctgtctccaggtttctccattcttctttttagtatcttctgctttttgctgatcttcttggaacttgtgcaaacattcttcgaataaatcaggatttgtctcggacaaaaccttgagaacattctctgtcaagttcttcacagcctgattccaatggctgctaccgtttttctccaaagcgggaaacactataggtaaaatgattctactgttctgtctcactaaattagtgacatgatcgttgttccataagtatagagcccgttcca

SEQ ID NO: 141776 - DNA, 5956 bp, Arabidopsis thaliana landsberg
ttattttgcactcttaggcatttaggatcatcttgcatacacattgcatgttttggtgtgttttcagctacagaaggagcttaaaaggattctattcgaccctctactctatccaaccaggaggaaagcagctgggcattctactcgacccactcactcgatccagacagccacagaggaggcagcaattcactcgaccctcttcctcgatcaaggcagcctcataagaagcagctgatcgatctactcgccccttctactcgatcctctactcgacccatttactcgaccaacggcgaccaactctaccagacttgttaatctatcaaagcgtcttcggatcctcctcattctccactcaaccagacatctgagcatacagataagagaggaagaagcatctactcgaccaattgatcactcggagcatagacacaaaggcgcagactttgcagcacccactttactcgatccccaagatcgagcactcgcccaaaccgccttaagtctcttgtcttctagtgaatctagggttttcaacattttactataaatagatcactttgggatttgtccaaaggatctagattttatcctttagtttttctttgtgttcttgaatcttcaaaacttaattactcttaatatatttcatttttgcatttagttctttgagtaaagttgtttagtttgtttagatctacattttggtatgatttcagtaatttctgggtttgtgttattagttatgttgcttgagtagtgattagggttcttgaggatggattagattagggtaatctctaggttagtcaggtggttaagattaggttagatcccttctgaattcgttggcccctatgcggttttcgctggctactgtggaaatttgaccataggtatccagcgttaaaaagacgttcaaatggatgcctggtctacgaattccagagatttgtaggctatagaccaagatattggctagtctgcttattggcttcggtagattgttgcttaaaccctgctctgctatgtttcattaacgagagttgagattaggatgtggtacagttatgggagtctctgtcacgagagtggattgacccagtttttgaatctatcgtctagggtttctgccttttacctgttagccacctgatgaatcctagagttgcccttatcaatgaatacatcgttaggacatctactcctcctagatttatttgtattcaccccctaaaaaaactttatttacctgttatttgtgtcacctgttgattgcatttttaatttttaaatttgttgcctgttggttctactcgacggaatgatcgagtagggcttttaagtttttatttctgttgtcgaatcctgacctacgattgtactagaaaccaacatcatataatctggcttgacttagttgcatttacacatcttgattgctagcaataacagtggaatggattgacaccccctatagctgcatcgacatgttagtgtttaaggggaattgaactgaacctcacttcagcaaataagtaggcctaaaaacctacttatcaatttggcgtcgtagccaattcattgttgcattgttacattcaagatatcagaaaaagttaagatcaagttcttttacatttatcaagttactaactcatcttttcgtctgcttgtttttgtggaataggtactaatgtttgtgcatgaaaactcgatccaaaggttttgcacacctactacctttcaaagacagaatagacagaatagctcgtgagttacaagaagccaaagcaaaggcagcctatgatcagcaaagatcaactgctatggatcaacagaacaaactagttgatgttcaagacccacctaatgttgatcaaccaagaaacattggtgctggtgatgccccaaggaatcatcataaaagacaagggatagtgccaccaacagttcaaaacaacaatttcgagattaagagtggtctcatctcgatgattcagggaaacaagttccatggtctgcctatggaagacccactcgatcacttggataaatttgatatgctctgcagcctaaccaaaatcaacggtgtcagtgaagatggattcaagctccggttgtttccattctccttgggcgacaaagcacacatctgggatgattgcaagaaggcctttctggcaaagttcttctccaacgccagaactgcaagactcagaaatgagatctcttgtttttcacagaagactggtgaaagcttctatgaagcatgagagcgtttcaagggttacaccaaccaatgccctcatcatggcttcaagaaagcctccctactcagtactctataccgaggtgccttaccaaaaatccggatgctcttggacacagcttccaatggtaactttctcaacaaagatgtagctgaaggttgggaacttgttgaaaatctagcacaatctgatgggaattacaatgaggactacgatcgcactaacagaggcagtagcgattctgaggataggcacaagaaggagatcaaagctcttaatgataagattgacaaattggtgcttgctcaacagagaaatgtccactacattacagaagaagagcttacacaactccaagaaggggagaatcttactattgaggaggtgagctacctacagaatcaaggtggctacaacaaaggatacaacaactacaaaccccctcaccctaatctctcttacagaagcaacaatgtggcaaacccacaagatcaagtctaccccccacagaaccaaccgcctcaagctaagccctttataccctataaccaaggctacaaccaaaagcagcactttggacctccaggcttcacccagcagccacagcaaacttctgcacaagactcagagatgaagactctacttcatcagcttttgcaaggacaggcctcatgctccatgaccatggataagaagctagctgagctcaccactaggatcgattgctcttataacgacctgaatataaagatagatgcacttaacactagagtcaagaccatggagggacacattgcttctacttcaactcctaaacaccccggacaacttcctggaaaatctgttcaaaatccaaaggagtatgcccatgctatcaccacagtgagtacttctgccactgaggacagtgggattcaagaaggggaggttttgagaccaaaatcaagacaggagattgaactcgacttctttgctcggcttgtcgaacgagcatatgacccgagcaacccaatccctattccacctgcctatgaacctaaaccatactttccagaaaggattgcacaagttaatgcaaggatcttccagaaacacaagatgatgttcataaagtgtatcaaagagttagaagagaagatacctttggttgatactcccaaggaagtaatcatggaaagaccccaagaagctcagcaaatagttgaattgagttttgagtgcagcgctatcattcaaaggaaggtgataccaaagaagctaggtgatccaggttcctttactctaccttgttcactaggacccttagtgttcaacaatagtctttgtgatttgggagcttcggttagtttgatgcctttgtctgttgcaaagagattgggatttgataagttcaagcctagcagcattcatcttattctagctgatagatcagtgagagtgcctcatgggatgctagaagacttaccggtaaagatcggatcggttgagattccaaccgactttgtggttctagagatggatgaggaaccgaaagaccctctcattcttgggagaccatttttagcaactgcgggcgctcttatcgatgtgcaaatgggtaagatcgacttgaaccttggtaagaatctccatatgagctttgatattgctaagaagatgaagaagtccactatagacgggcagcttttctttattgaagaaggaaatttagatgctgagttgttgagtgggttggaaaatcctattccgtactccattccgactcaccacctaggagagcccgaggagcttcttatgatagaaggaggacctagtttagaggttgagactgagaggaaccattttgatgttggtcctattgctagagagcttatggagctcaggaaacagtatggagctcaaggagagaccatggaaaagttggacctcaagatggaggagctgaactacgctatcctggagcttaaggagatgattaaaggttacccaggtcctgagattgatgaatactttgaggaacccgatcttggaaaagaggactatagtactgatgagaaggaggcttactttgaggaaagatcaaatgagtattccacactcgagctataaagagaaaatgcggaatatgattcagactttggggattcagcaagtgaggatgaggacttctcagttcctctcctcaatctcttctctacctaaacattgtgagagtcaagcttagtgactttaaacaagctcacttgggaggaagtcccatgtctatccttgtatatattgctttcttgttatttttgatgtttttgtttaagtgtttcacggaaaaagacttctggagaatttcaagccacactcgaccgtactactcggctgtaggccgagtgtgggcttcaatcgaccaaaggcccaagattgaatagtactcggaccacaccactcggcccaaggtcgagtatgggcctcactgttcaaaggcccaacaagatgcagcactcggcccgaagccgagtcagaaaaagaagcccatcaggcccaacactgtactcgacacgcgcgtcgagtatgtcggccgagttcacacgtgcgaggtcaacacaattcaaattcgaatttgaattcgaatttgctgggccccaccaatcaaatcctgctccccaaagcccttcaaagattctgctgcaaatagtgagacatgtccccttgaccaaatgaagggtgaggatctaaggtgtttggagggctaggatcaaatcttcttgtctataaaaccacactcaacaagctaagtcactcacactctcttttttgctcaaaaatttcgaattttactccttctctccaaacattttaagttcttactctcacttctctagatttctcagaaactttgccaaaatctcttgttacaaaccttttcaaagcctctcttacactctttgttcatttttaaacatcaatttctcttctactttgacctacctttggttattttgtggtgactatctgcagtaaattaccccaagatcatgaatcccgaagaatcaagaaggagagcctctgctcgagcagtggcaagagggtttgagatgattaacgagaagaatcagtcaaagaatcagaaagctgcgagtcctggttttactcggatgacaggccgagtacaatggccgaatatggccccggagtcctctgtgggtcgttctgccgctgctcaagaggaaatagcaagaggcaagagggtctgggagtccgagccagttgcagaagaagaagtgcctgagatagagaaggaagcatctgaggaagatgtgcaagttgatgaagaggtcccgatagttcctacaagtagaagaaggaacagcatgaggagaaagaaagaacctaccatagaagagcactaccaatatctcatggagctgagttttgaggggacaagatatccccatagacctaccatgcaagctttggggatatgtagagatgttgactacctcatggagatggccaagctggagaccttcttctcctaccagtatgaaggatacaaaactgagagctgccaattcctagccactttgaagctccatttctatgctgaagaaagggagagagagctgcataagggagttggttacatcactttcatggtgtttggaattcaatactcggttcccattagg

SEQ ID NO: 141777 - DNA, 224 bp, Arabidopsis thaliana landsberg
tagtcaaatactcggattcttcacaacaatgcaagaacatcaacgcaacatacaaatttagatctatggacacgaatagaaactacgtttaaaagaagaaagaagatactcagaccatgtatgtcataccgacctgcatcagatgcgactgaggcacactcaaatttgcgatccctctcctgcagtttttcctcaggaatgtgtagaagtagtttatgactaac

SEQ ID NO: 141778 - DNA, 359 bp, Arabidopsis thaliana landsberg
gttggataacaaaattagttgccgacaattaaatgaagggaatggtttctcaaatttggcaagtagagtgtttttatattatacccgtgtgggctaaacagaaaaggatgggcctatggatcaagagaaaagcccaattgtaacgagacattacaatatcaagatatgatgggttgggtatttgcgatgatcatatctctctccaacacattacttttggtcgagctttcttcttcaatgggcccattagcgatctcgacggagctttcttcatctggttgttcttcacctgcctgaaaaaggtcgagaaaaaacccataaatgaatgggaagaaagaaggaaagggagagtagtgttg

SEQ ID NO: 141779 - DNA, 458 bp, Arabidopsis thaliana landsberg
atgggtaccggaaccagtgaagggattcctcgtgtcagctgcctcactaatcctttgaaaacatgttcggtacattttcgcctttgtttgttcttttattatgattcatcttcggtttcaatacaatcatcccattgagaaaaatatccattttgattctctaaggtatgcacaaaagcaacagaaccaggaaacagaaataggagacttaacaccagcattcttgttcggtacattagaccatccggaacaagtaatatcctcattgattgtggcaagtaagtgctatgagattagtaatgtggatgtcattctatttatcacctttttttttgtatgacatttaccatggagcatctcacattcatgttggttattgtatgctgactttttaactcctttggcttggcaggttcttctaccatagtgcccttcgatggtttcccaccttcgggtta

SEQ ID NO: 141780 - DNA, 344 bp, Arabidopsis thaliana landsberg
gaatcatatgcctttcttttcgctatctctctctctctctctctccctttaacccaaacccatctctcaaagacttgacctttctctctctctatctctaatttatttatcgtttcgcgtgtcgccttctctctttctctcattctctctctctctttcccttcgtatctctctctcgtgaggccgtgccctagaagaagaagaagaagaagcccctttctccgggacttcaatccctaacttccgtcgccggatttctcgtccttgattatcggaggactctttaacaactttattccgatttcagattcccagatttgtaagctgctttctcctttctgggt

SEQ ID NO: 141781 - DNA, 413 bp, Arabidopsis thaliana landsberg
aaaaaaaaaaattgacaaacaaatataaaatccctatgaacaactctagagaagaccagtggttacaacactatgagcaacaaaatattcaagagattactccgtgcttcaacgccattaacatcgcgtcatcgtcgggatcttcccttggagacggtggtgccgcggcacatgaagctgctggaaggagatctagggcttcgaggagagccataccaacaaccctcctaaacgcaaaccctagcaatttccgagccctagttcagaaatttaccggacgttctgccggaggtgaatccaaccgcagaaaaggtccggtgactttggatttcgggtctcccactacaatctccaaagaagctatctttccagtctcaagcgatcgaagtaataacaatcttgatcatgtggtc

SEQ ID NO: 141782 - DNA, 281 bp, Arabidopsis thaliana landsberg
gttgagagacacgtcgagatgtcacttagtattcacggtggtggttcggcgcatgagtcgctttgcagagtcacgaaggagtgtcaacggtttttggaatgtgtcggggacttgggacgtggtgcttagtaatggttactgttttctagctctttagtggttgaatttacttgtcgtttcttaatgtgtatttttcattgtaatagaataatcgatgttttgtaatatattaatgtatttgatatttctcaactaatttccattgtaatattgaataatcg

SEQ ID NO: 141783 - DNA, 207 bp, Arabidopsis thaliana landsberg
attacctagaaagctggagacaactctaaagactaagatctgagattgtaagatcattttggccattatgatgaagatgatgactcgagttctttcatcgccttcctcacatgtctcgtcgctcaaatactcacctcgcagagtgattcgagcttcacgagatcatcttcgtgctgaaactctaaagagtcatcaacttccttcagg

SEQ ID NO: 141784 - DNA, 548 bp, Arabidopsis thaliana landsberg
ttattcaatattacaatggaaaattagttgaaaaatatcaaaaacatcattatattacaaagagtaaatcgattattatattatacactaacagaggaacgacacgtataattcaaccactaataataaaagagctagaaaacggtaacaatttctaagcaccacgtgacaagtccacgacacgttccaaaaaccgttgacactccttggtgactctgcaaagcgactcgtgcgccaaaccaccaccgtcaatgctcagtgacatctccgccgagtctctcaacttcttcactttccttctcatcgcttcaccttccttctcagtcataaccttcctcaccaacgcctcaatcttccacctagaaatatcctcctttggatcatccaatctgactgcgattcccagttcgtcgctgagcaacgccgcattcatattctgctcggcaaaaagtggccatgcgatcatcggaacgccgccaacgacgctttccaacgtcgagctccaaccgcaatgggtcaaaaacccaccaacggcccgatgggacagg

SEQ ID NO: 141785 - DNA, 565 bp, Arabidopsis thaliana landsberg
cttcaggtaggttcgttgctcactcacgtcacgccggagaagacacatcggagatcgacaaatcgattcagagagagagagagatagcaattttcttctgtagtgttactttctgagagagtctggagagatcggtgttgagatttgggtaaatggaaacaagggagagagatctagaacgattgatcccgatgcataaatccggagcttctcctcgcgacgtcgttttgtctgttccgccgtctcctctcgcttctccgatccacgtcgccggcaaagaggtatctctctctctctctctctctctctctctctctctctctctttttcatttcctaatctctctcgcgatagtaacaactattacagaggatttctcttattcgctaatttcccacatttggatcacacaatttgatcaacattgtgaaatgttctgcaagtttgacctatagtttgaagttacttgtatgttaagttattcaatgtttcatgtacaaacaggcgatttacaaagtcattagaagctgggcctccaaaaagttcatgaccggatggtaatctc

SEQ ID NO: 141786 - DNA, 347 bp, Arabidopsis thaliana landsberg
gggtcagatcacgagagacgattgtgcctactatctctacgcgtgaaacgcacgctccgccaagcagagagaaagagttggattctgtaggtgactgtgtcaggcgttggatgtcacgcgccacgagttttgcgtgtgtgctttggagggatcgatccatggctgggactggagagaagacaaaagatgaacattagcataacaatgaatattagggcaggaaatcgaagtactagaaagctatattgcgggcaagcgatattagggaattgctgatttttttctaataaaaaatcggatgatgaaaatatattctataactttattgtaaagcatacgtactcaga

SEQ ID NO: 141787 - DNA, 392 bp, Arabidopsis thaliana landsberg
gagggtcccagataagtttgtgagtaaattcaaggatgagctttcggttgctgttgcactcacagtacctgatggtcatgtttggcgtgtaggactaaggaaagctgacaacaaaatttggtttcaagatggttggcaagagtttgttgaccgttactccattcgcattggttatcttttgatttttagatatgaaggaaactctgccttcagcgtctacattttcaatttatcccactctgagatcaattaccattccaccggtctcatggattccgctcacaaccacttcaaacgcgcccgtttgtttgaagaccttgaagatgaagatgccgaggtcatctttccttcttctgtgtacccatcaccacttcctgagtctacagtaccag

SEQ ID NO: 141788 - DNA, 105 bp, Arabidopsis thaliana landsberg
ctgaatggtggaacaaactgtggttagagaacatatcaaagcgagagtcatgtcattagtgaggtctgcagagccatcttcatataggaacccgaagctttacac

SEQ ID NO: 141789 - DNA, 1628 bp, Arabidopsis thaliana landsberg
gatttctttccttatcgatttttctctccgcgaattgttcgttgttttcttctggcacctgattctcatcttctttcttgtggaatctgggttttgttgcggagttttcgaggttcctcattcgttgcttctgttgaaactctctttttttttttgggtggtttactttgttttttttttgttgttgctttcaacctttaaatgccctaattttgaggttctagttgtggtttttaagattaggagcagaagccctttcgactaaagttcatgttagctgcaatttgctgaagtattcacagttttgttctggtaaagttcatctctttactcttttttaagatctttgtgtgttctagtttgtggcgtttttctgtatgtgatgactagagatgggttttcaggaaaaggatttagtgttcagatttcactggattttcaataagagtcttgttcgtgatgtcgttttatagatctgagttacattgtgggtgttgcctttgaaggtcttgagctactttgacttcattttgattgatcttagataatgatgatggaaagaaaatgaattcagagtcattactggtccctgcgttttgcttgataagaagtaatatcaagagatcattcaatcatctgaagtttctctttttctcttagcatcattttctgctgataagagacttcatagtagaaacaagactttgtgttttgtgaaatgtgggtaaaggatgctttttgtgttaatttcggtgcgtcttattgattgtttcgccatcaatctagctttgctcaattcttcttttcccacaagctctctctggttcagtttctctgtacgttttggatgttatggggcttgttttgaatatggtttagtgggttgtctcatttcttgtggagtctgtatcacgtcgtgatgcttattatgtttatgcccaataattctgtggatttagaaactgtttgcttatgaatctcaagtttactgtggtattagggaactgatggatctcaatttctctctttttagttggaagctctatgtgtttccttctgtgattgaaacacagagagaatgattttaccaaagcagtattgttgcacacactcgccgagctgccaatgcaccaaaggccatttaaacgaagacgtgttgttattagtgttccaacatttgaattggaatccgaaattagttgcaacactttcctgtgtatgcagatggtttgatgatttcgccaaacgggtactatggaaagagttttgcaagactcgtgccccaaaaatgatgcttgatttgcagtctagcggtagtcactgcattgacggtaactggcgagcccttgggaagcttctcatctactgctcaggatgtacacaaggtggtcttttcaatagctctgttcaaatcccaggccactttgtttatagaacccggttctcaagaacattaggaagaagcctccttccgcctcagtgtagaactgatgtactctatgtttgtgatccatgcgagcatcttgaccaaggagaagaaggcgacgtgggtttgttccgtgggattttcaagtcattcccaacatcgaaagttcggaaagtgatcattaacaaggcggttccttttc

SEQ ID NO: 141790 - DNA, 359 bp, Arabidopsis thaliana landsberg
cccatctctttttttttttttaacttgtcttctctctttccttaactttgatggcactgtcccttctctcctacaacgtctccgacctctgtctcggcaaacctcctcttcgttgtctttcctcctcttcctcctccgtatccgacgccatcgctgccctcaaatcctctgaagacactttcctctccgtctggaattgcaatcacgacgatgacaataacacagagtgcgagtgcttggggaaaatatcaatggctgacgtcatctgccacttgtccaaagaccatgaccacagtctctgtgccttaaactcatccgtctctgttcttctccccaaaactcgttccattgtcctccat

SEQ ID NO: 141791 - DNA, 264 bp, Arabidopsis thaliana landsberg
caaaatggctcgtcgcgatgttctcctccctttcctcctccttctcgccaccgtctccgccgtagtttcgccgtaaacttcctcaatctctaaccactctcgatcagatttagatttttcgataatttgactttttcagtttctgtttgtttatctaggaagatgatccagactgtgtatacacattctacctcagaaccggatcgatctggaaagccggaaccgattcgatcatcagcgcaagaatctacgataaggacggtg

SEQ ID NO: 141792 - DNA, 115 bp, Arabidopsis thaliana landsberg
gcgacgtgaatggatgatgatgatgcgttttttcacttgtaaaggtttgtactcctgagtttgtggagatgtatcacttcgaagataaatgtatttttgtctgtctatttggtac

SEQ ID NO: 141793 - DNA, 277 bp, Arabidopsis thaliana landsberg
tgtaagaacagatcataactcaaatcaacaatcacaaaacaaacctctgaagataagcaatacagttttccagttcctcctatacatccaatgagaagaaaacaaaatcatttatgtgctaaaaagataacaaaaatagaagatgataaaggaaaagatcaacaagtagttgagccgaagaacctaagaagtagaaaagcttcaaacttagaagacctttttttcactaagatagtttaaaacactaataatcagctcgtagaaatttctcgtactc

SEQ ID NO: 141794 - DNA, 613 bp, Arabidopsis thaliana landsberg
cagatagaagaaacagattatccttttgacatggctaaggtaacgttttgatactaggagagtcatcatttgttgcgtgttaccggtttaatgtaaagttcacttgtggatggtgttcaggaatctgaagcagttaacgataaattaaaaggcttgcctcgtggaatcatacagtctagatcagatcttgaattaaagcctctctggtctagaggtagtctgaggtcaaaggttagaggcatcaagaatcgcggaatatattcttcgaatatctatgtagcttgaggagtttctgatgtttgttgtgattatttaacacagggtgtggaaatgactaaccgtaacttgttggcaatacccgtaggacttaagcaaaagggtaacgtcgacgctcttgtaaagaaggtattgctatttttgctcgagttgatactaatcctaggcattgaagaagaacagaggattcctcttaacgtaaagctcttgtgtctcagtttcttcccgcgaatttcacgattgttcttttccattatgatggaaatatggataaatggtgggatcctggagtggagttcaaaagccatacatatagttgcacaaaaccagactaaat

SEQ ID NO: 141795 - DNA, 203 bp, Arabidopsis thaliana landsberg
ttgctagactttattttacctcttctttgtcttattatgtgcctttactctcaaagttttctgtttttttccgagtttctcttagagttgttgtcgttgatgaaatttgttctaaggggagttctgtaaaactatactgttcctgaaaagaatataatgtaaacacatagattcagtcaaatacttaataggttatataatat

SEQ ID NO: 141796 - DNA, 266 bp, Arabidopsis thaliana landsberg
aggcatccaatgcattgatcttagctttacaggttttcacatatctcatgtctccgcaatatatatatcgctgtgtcgtcttaaaaacagcattacacagacatgtaaagatgtttgtctgcatctctcatctcttgttttcgaaatgtaactctgggatctgatgatgcttctttcttcttcctttacctgagaatcttttgggtaaaaaaaacctcgtagagagtttttatttatctcttaaaaagaaaagagcttaaaacata

SEQ ID NO: 141797 - DNA, 307 bp, Arabidopsis thaliana landsberg; identical to SEQ ID NO: 76316
  unsure (1)..(307): unsure at all n locations

SEQ ID NO: 141798 - DNA, 295 bp, Arabidopsis thaliana landsberg
gggtataagatgagtggcatgggtagagagaaaggtatctacagtctcaacaattacttgcaagtcaaggctgttgttacttcccctcaagaaccctgcctggctctaaaccataccaggtggttacacttatttctcgagtttggtttatgatttgcacttttgctttgaaaacctggagttgtactgtgtctctaggatttctagattttgagagtaatttatcttcaatacattttgcaaataaagctacatgacaatgtgtgattaataaacacaaactcttattagtttc

SEQ ID NO: 141799 - DNA, 378 bp, Arabidopsis thaliana landsberg
ccaaaatatcattattttgatcaaactcaaggggactcaaatttcaaggccaaaggagctcatctactcaatctctcaaggaaaacatgttaaaatttatgcttcaacaagtgctagaaggataaaccaagagcaatttggacattaacaaagtgtatgaagtttaaaacgattatgtgaaatcaattgaataacaagtgtctaaagccgcatcaacatctaagagttcaatggttataccagataaacatgtcttagtctaatggatcattgcaatgaaatcttttgtggcaatgggaaagatcaagatttaagagttctgagaagttggaggaagtcgcttgtgaaaaagaagaataatcatataggataaaccac

SEQ ID NO: 141800 - DNA, 271 bp, Arabidopsis thaliana landsberg
gctgtgcagtaggtcagactcttgtagtgaattcactgcaaagtaagggaaagcttggcttggaaatgggagttgaacaagccatcgattcgggctaatgtgtatagtttgattcgtctggggagcttttgagagatagcaatttagttttccgcttacgaatgatctttttctgatgcgtcattttgattaagtgtgtacttctgcaatggaggcttctctagctgttatacagaggcctcaagctggagcttcgaatacggtaattaca

SEQ ID NO: 141801 - DNA, 395 bp, Arabidopsis thaliana landsberg
tccaaagctaacgttgctttcttcccactccaaatggctcttgtgctctcagaacacacacagatataataaactcttaacgaagaagaagactttttcttttcttgagcaagctctgagaaactcacagagagggacagagagagaaatatttcattcgctactctctttaataccgccattgatgcaacctccttcgcgttaactgtcaaaatactccccaactgacaaaaattaaattcctttttttctctctcgattttaaaagctctaaaaggaacgagttgatcaagtcggtcggttctggttatcactgaatttcattcaactcggtttattccggtttaagtgtgattttcccggctaatggatctgacccaaggtttcagagctag

SEQ ID NO: 141802 - DNA, 510 bp, Arabidopsis thaliana landsberg
aaatttgaggggtttgacggaaaacggcggaggttttaggagaggagagctgaggattagcattgaggaggagatactcaatccaaccaacgtcaccgtttggtccaatccgtttattaccataaccgtacggttcaggtggaccggcccggtttttaagagactgaggcaagccgaagaagccaatagcctcctgctctaaccgagtcatgagttcgggtcggactccgtggtttacgaccttgaagaacccgaactcctcgcaggcttttacgattcgggttttcgcttccggatcggctaggttgacgacggggattgaatgggaagtgagaaccggaaccggtttgtatgtggggattagggagatgtggttatctaaagtgactggctgtggcaaaaccaccatgtttggtttttgtaggtttacacttaacttgcaaaatctttataaaaagaaagttgttgaagattgaagcaaaggttgaggaagaagaaggaaaagttttt

SEQ ID NO: 141803 - DNA, 461 bp, Arabidopsis thaliana landsberg
gagaattaagatttttaactttaaacgagagtttcgtttatttactcaaaaatttacttctgaaatctctatttgaatttcggggaaaaaaatcctaagtaagggaatgcagagagatggtcggagtatcgccggtgaagactaagctgtgtgatcggtttaaccgatccgtcggcggcaggaattgccaccggaaacacgtcgaggacgggtgatccagttttctaaactctcgtctctcgaattcttcgaagatatcgaaaaactgtaaatcttttttttcttctacttttttacaaaattctctaatcatcgttgtaaagtaaaaaaccatggtcggagcaaaaccggtggagaatggatctgacggtggtagtagtacggggctgcttcacggccgttacgagctagggcgtcttctaggtcacggaacattcgcgaaggtgtaccacgctcgaaac

SEQ ID NO: 141804 - DNA, 945 bp, Arabidopsis thaliana landsberg
aggatgatgacgtggcagtgaaagaggaaggacgtcgtgagataaagagtggtgttgatgtgagtcaagcgcttatacgaactagtggatttggagacacagctttgctgatttttgctctttgttttcactccatctttgagggaatcgccattggtctctcaggtaaactatcaatgataaaccctaattgctgttttgcaaaataatcatgtagttaatctagatggaaattgttttcgatgtagttcatcattcattttatatgactataggtaatctactcgttctatttaggttttggacttttggtccatgattattgaactgtattaaaagcagtaaatatgatagtgtatatattcgatacgaactagtttctttgtcatgtcataacttggtttaaatttggtccgtgtgtgagttgtagatgactaaaatactagttataatctagctagttgcatcaaacattattctttagtaacgttttgttatgaatattttggtcagacactaaaagcgacgcttggagaaacctatggacaatatcgttgcacaaggtctttgcggccgtagcaatgggaatagctcttctcaagctaatccctaaacgtccattcttcctcactgtcgtctactccttcgcctttgggatatcgagtcccataggtgtcgggattggcattggaatcaatgccactagccaaggagctggtggtgactggacctacgcgatctctatggggcttgcgtgtggagtttttgtgtacgttgcggttaaccatctcatctcaaaagggtataagcctcttgaggaatgttacttcgacaagccaatctacaagtttattgccgtcttcctcggtgttgctttgctctctgttgtaatgatttgggattgatttttggtgatatttacttagtttcaataattagtttttt

SEQ ID NO: 141805 - DNA, 402 bp, Arabidopsis thaliana landsberg
acaagaagaaccaagatatacactgatgtgggataaagaatgaagctaatcataacattgatatcatgcttgagtagcttgtttaacaaaaagaatctgaaactgaacctaagttgccagattttttttttttttttttcgtatcaagcttgaagattgcactgttgcaagtaggtgtgatggtaagggacgtgtatgttccagtaacgtttgtaattctcttttccaatgtccaaccacggcttcatgaccccatcgtagtgtataactgccgcttgttcgatgtcaaccgctttgactcctgattcgcgacctaaccccatcacatgccatctcttgtccaatgctaatgtttgcctatagaaagtcaaccaacctattggtaagctcccagctttccac

SEQ ID NO: 141806 - DNA, 462 bp, Arabidopsis thaliana landsberg
ccctaaaaccatttccgcggcggcgtttctcggaatcaatggcgagtctccgaagagtcctgctcaaggtaacttcctattgccaacgttctctcactcaatcgtcgtattctacgtcggggatgttatcccgatcggtggtcaagcatgcgaacaatctcggtcaaattcaagctagacatttcacgacaacgcttatgaaatcgggaccaaagcatagtggtacagagcaaggcgtgaagcgaaacagtgcagatcacagacgtagattgctcgcggctagatttgaactgagaagaaagctatacaaagcgttttgcaaagatccagatcttcccagcgaaatgcgagacaagaatcgttataagctctcgaaattgccgagaaacagtgcctttgcgagaatcaggaacagatgtgtgttcactggtcgatctcgttctgtgactgagctgttccgtg

SEQ ID NO: 141807 - DNA, 342 bp, Arabidopsis thaliana landsberg
tctgcattatgtgactgatctatgtaagtgtttttgattctccttatttttctgtgtttgcttagttacttagatgatgatgatgatgatgaatgaatgatggtttgtttcagggaagaagctgattctgaagaaatgggagcaaggaatacaaagaacgtttgtggtaaatacagttaccaaagtagctgtttgtatgatggtggtggaaacattttgacaccatcacaaaacttagtttgcttttcactagtgatgctctctctttgttttacgatcttgctcagctattctagcaattctcgttgaataagttatacaaagtcacaaatcttgcttctt

SEQ ID NO: 141808 - DNA, 205 bp, Arabidopsis thaliana landsberg
gacgcacgggagggagagatggcaccacaaggcttcgtggagaattaatggccgctcctccttcttctctcggatccattgaaatcgatactcttgaagtcttgatcaattcaaagctttggttcctatgtgttcctctctgtttcctcaatgatcctatgtctccgtctctgtctcagagcttcgagatctttcttctctattt

SEQ ID NO: 141809 - DNA, 246 bp, Arabidopsis thaliana landsberg
agcgaaggattgcatcaagtaatcgccgtgtaactaactacttttgcattcaccatcgctcttacgtttgaatctatccagatccaaagctcttcttcttcccggcaattctgagatctcattttcaccggcgacgagctttaatcggagaacgatgaagcagcttcacaagcaaatgagctcgaagcgtgatgaagaaaccattcccatgagccaatccagtccttactctcccaaaactttaaa

SEQ ID NO: 141810 - DNA, 273 bp, Arabidopsis thaliana landsberg
atcttggagctgctttggagagtggtcagttgcaaaagcttcttgctgcaagttgatatttgaggacctcgaatgtggaatctacagtatgtgatttacaggaattagaaatctttgctagttgtagactgaataagcgaattgatatgtatgactcagttatgtaagttatgatggcattgataaagtcttgatcttttgttactgcactgctctggtgattgtttcgcttaaataatccatacttgtgtgccttagtgaatggttcatacg

SEQ ID NO: 141811 - DNA, 394 bp, Arabidopsis thaliana landsberg
gcaggtggtcgttacccgaccgacttaaattcatttctcgaatttcgtggagcattgcatgcaaatatttctcatcaaaaagaaaaaaaagaaaagaaacagttgacatttattttattaaaattctattcctagagtataattttatcgtcaatgtctttcataaccagcttgaaatttttggcacgccttagacttttagataatgcttccttttataaataaaatctatcaataacataaatacctaataaatattagtaaccttgaatatatacattaatacatatggaaatgtcatcaataaaaatactataaaaatagattcttaaatttattttgtatctaaaataatataaatacattaaactaatatgtattgtttgatagtatc

SEQ ID NO: 141812 - DNA, 576 bp, Arabidopsis thaliana landsberg
gtttcactggtgagaaactcgatggcgaggaggcgacgttcatcggcggcggagagtttgaaacggcggaacgacggatacgagtcactgtgtcaagtcgtacaacaagattcagatcggagactcatcaccattttcgtaatcttcttcattgtgattcccgccgtttcgattgctgtgtacaaagtcaaattcgctgatcgagtcatccaaacggaatcatcaatacgtcaaaagggaatcgttaaaactgatattaatttccaagaaatcctcactgtgagttccatagttttgggtcaatgttgcaattcaaagaagaaaagctgaaaactttaggatgaattttcattaaatttggtttgaatttgtttcaggaacattccaaggcttcagagaattcaactaggcactatgattatccagtgttagcttacattactccatggttggtttctttggaacatttttagatttgagatattgaaaatatacaaattgttgtcactgagggcagtagggattggattcatatgctaaaaatgctgtgtaggaactctaaaggctatgatatgg

SEQ ID NO: 141813 - DNA, 819 bp, Arabidopsis thaliana landsberg
aagaaaaatcagcgacatcaaacaaacagatggaatttgatccaatcaagcaacataggcatttctgtccttggatctggtcaacgggtagaagaggccctggatggcgacagactctgtctgcattacaacggcataaaggatcttgtcagactccaccatcatcctcttccctcttcaaggtaacacatcccactacactctttttcatggatccttacactcgcttttagtattagaatggaattaaagctaattacagatgggtagatataactcaactgcgactattgtcatgtattctcgacaagaagatcatagtaacttccttttgtagccagtaatagcaggatctatgactaatagtatttaaactttttttggctgagagtgcaacttatgcccttgtccctgttaaaattatgcatgacgtttccttgatttgatatctttggatactctctgagcatgagataaatgatcaaatcctaacgaacaagaaccacatacatttatatgagttcttatgtcataaatgtccaatttctgatgtctttgatggttctttacgtgatgttgtcaggtagatgatccgttaacatctgttcgaaacctatttaagtcgccatccccgaaaaaacgaaagctgaacggaggatcttcaagctgagacaccagacgattttgtccctgaaaaaaacttgaaccctcttggtctacactgtatcgaaattttggaacttgaaaaactgtgataatcatgtgttatgcgttatttgttgatccctcagaaaagtaatctatgttgttgttgacgta

SEQ ID NO: 141814 - DNA, 413 bp, Arabidopsis thaliana landsberg
tttagcaattgctttgggagaacatttatgaaggaaaaaagacatttgatgcctgaggtttatagattatacggttgatcacttagaaacaagttgcttcgaagcgtgagaacaaaaaacaagaacacagattacataataatatgggtcaagatgtgaacttggggtactggttccgcggagaagcagcatagcttctttcactaagaagatcatcattttcggcttcgtttccgtctaagcacagaatgttgatgttgtcaacactcgggtcagatgagctcacagtgctgctcgtggccaccggagagcttgagacactacccggccgacttctcacactgtacattgatgatgccggaacttttgtcacaagcggccggaggtttccagtcatgcctcgtcttatatcc

SEQ ID NO: 141815 - DNA, 1744 bp, Arabidopsis thaliana landsberg
ggattgatcatactcacaattcaagctcggacaccatccttaatgcctccatcgtgcgatagtcccacatgtgaagaagtgagtggttcgaaggcagcgatgctattcgtggggttgtaccttgtagctttgggtgtgggagggatcaaaggttcattagcatctcacggagcagaacagtttgatgagagtacacctaaaggtcggaaacaaaggtcaacgttctttaactacttcgtgttttgtcttgcttgtggagcactagttgctgtcacgtttgtagtttggttagaagacaacaaaggatgggaatggggattcggtgtttctaccattgctatcttcgtctctattctcatctttctctctggatcaagattttataggaacaagattccatgtggaagtcctctcaccacaatcttgaaggtttgttttgacctctttagctcttattggagattgacgtgtgccctaagttatgtatatgatttctttattcaggttcttcttgcggcttcggttaagtgctgctcgagtggaagttcaagcaatgcggttgcgagtatgtccgtgagtccctcaaatcattgcgtatcaaaggggaaaaaagaagttgaatcacaaggagaattggaaaagccacgtcaagaagaagctttgcctcctcgggcacaactaactaacagtttgaaagtattaaatggagctgcggatgaaaaacctgtccatagattgttagaatgcacagtccaacaagtggaagatgtgaagattgtcttgaaaatgcttccgatatttgcttgcactatcatgcttaactgttgcttagctcagctctctacattctccgtccaacaagctgcttccatgaacacaaagataggaagcctaaagatacctccagcttccttaccgatcttccccgtcgttttcataatgatcctcgcacctatctacgaccatctcattatcccattcgctagaaaagctaccaagaccgaaacaggagtcactcatctacaaagaatcggagtaggtttagttctttcgatattagcaatggcggttgcagctctagttgagattaaacgaaagggagtggctaaagactccggcttgcttgactcgaaagaaaccttacccgtgactttcctatggatcgcacttcagtatcttttcctagggtcagccgatctattcacactagctggactactagagtatttcttcacggaagcaccttcctcaatgagatctctcgcaacatcgctctcgtgggcttctttggctatggggtattacctaagctcagtgatcgtgtccatagtaaacagcatcacaggaagctcagggaacacaccttggctcagaggaaaaagcataaaccgttacaaactagactacttctattggctaatgtgtgttcttagtgcagctaacttcttgcactacctcttttgggcaatgcgttacaagtatagatcaactggttcaagaagctaaaattggatgggcaacttttgagtttttttttttgtttttaattagagcagaaaatgtttttacttgagcggctgttatataagagatgataaatgggggtaagtagtaatgttgtgatcaggtatatattgggtttaagttttatcgttggacaagtaatgtacagcgaatgatattaacttgctttaagtctttcttttgttcttgtggtgtacgaaattgagtcaaggttttgatc

SEQ ID NO: 141816 - DNA, 124 bp, Arabidopsis thaliana landsberg
ctctttctttgcttctctaacaaaccaacttcagcgacaagataacaaaacgctttcacacgatcggataaaatggcggagaagagctttaagtacatcatcctcggcggcggcgtctctgccg

SEQ ID NO: 141817 - DNA, 380 bp, Arabidopsis thaliana landsberg
gagaaccgaatgcgtcgccgtttttatttatatacaaaccacacaggacaaaagcaagccaagagaagaagagatagagcgtttgttatggttgcttcatctacacggaagcttctttgaagctcttggtcaaccagatggccgtctccctcgatgacaccctctcggctccaaagggtttaagcagaaccccgagctcatcgtaccgttcctgctgcaaaagctttgcactgaactccagcagtccctccagagcctccgcacgctgctgatacgatgacgtgtcgaaccttctctgttttacctccgaaactgaccttttctgtacagtacacttgtcctttgtgatcgaaccgttggaattgtcctcaccatgaggc

SEQ ID NO: 141818 - DNA, 273 bp, Arabidopsis thaliana landsberg
cgcttttaaagcgagtatgtccggttacgcctccggtgtagccaaaggtgttgctccaaaagctcgtatcgccgcctacaaagtctgttggaaagattccggttgtctcgattccgatattctcgccgcctttgatgccgctgttagagacggtgtcgacgttatatcgatctcaatcggtggtggagacgggattacttcaccgtattacctcgatccaatcgctataggctcgtacggcgccgcgtcgaaaggaatcttcgtctcttcctc

SEQ ID NO: 141819 - DNA, 420 bp, Arabidopsis thaliana landsberg
aagcaaaggttcagtgactacttgaagccacttgcgtgcgtgaaaaaaatcataaaatccggtaagaaatttgtatgtttctcattttcttatctaacttcttctcttgtgctctgtaagagtagcttggttttgtgttcttttcccaggtattgattggaaagtagtagtaatagtagaagtttatgcaaatgtttgtagagagagagagagagagagagagagtgtgacaatagatccaattcttatccattgtttaagatttccctggattgcgttcttggcattatgctgaccatttaccttcgtagatgtgtttttgtttgggaaattgctgatatactaacaagagtttccaagttgtaagtagaattcatattttgttattgtcactcaatcctattgcactcattcattgaa

SEQ ID NO: 141820 - DNA, 118 bp, Arabidopsis thaliana landsberg
ataaaatgatttacatggattaatggtttttgtgtttcatttcatctgaataaatgagataattctgtttttgagtttagagacactctctaaggaattctagagacattttaatcaa

SEQ ID NO: 141821 - DNA, 373 bp, Arabidopsis thaliana landsberg
gtttcccactccacatccaaaaaaacagtgtaataataatcataatcacctgatcaatctcttacataaaagctacagatctggttttatacaatcatcaccgcaccaagttcctaaaggtttcgactttactgtttctattttcggaaagagagtgcaagattgaaatcgaagatgaaggcggcaacaaggccgatccacgccgtgacgacatgggttcgtcggcaaccaccaaaggttaaaggttttctcggtgttgtctccgccatgactgccctcgttttgttgagagtgattgttcatgaccacgacaatctttttgtcgctgctgaagctgttcattcccttggaatctccgtccttatctataaac

SEQ ID NO: 141822 - DNA, 413 bp, Arabidopsis thaliana landsberg
aaagtattatcttagattataaaaaaaaattagagccaaaaacgatgaatatcatcaagttacttgtggtggtattcattgcagctttgagtggtaatgttggagcacgtaagatcggaggaatggccaataataccaaactcatgaataaaaaacagccaattggaaactctactaacaatgttactggtggagccacaaatggcaccaaagctcctcttagtggtggcattagaggagttgctccgtctcatgtaacagaaggcggatccactaatggcactaaaactcctgttattggtgtcattgtaggagtttctcccatcaaagaaagtggagccactattggcaccaaagttcctcttaatggcgttttaagaccagctcctctacgtgaaggtgaagcaactctt

SEQ ID NO: 141823 - DNA, 589 bp, Arabidopsis thaliana landsberg
ctcttccagaattctcttaaagtttcctactttcctggaatttggtcctcaatctctcaagtttcatcggttttgatttgggtttgatcggaaaagtcatgggtaattgttgcggaacagcaggatcattggctcaaaacgataacaaacccaaaaaaggaaggaagaagcaaaaccctttctcgattgattacggtcttcaccacggtggtggagatggaggtggaagacctcttaagcttatcgttttgaatgatccaacaggtcgtgagatcgagtctaaatacacgttggggagagagctaggtcgtggagaattcggtgttacgtatctatgtactgataaggagacagacgacgtttttgcttgtaaatcgattttgaagaagaagctgaggacagctgttgatattgaagatgttaggagagaggttgagattatgaggcatatgcctgagcatcctaatgttgttactttgaaggagacttatgaggatgagcatgctgttcatttggttatggagctttgtgaaggtggtgaattgtttgtaggattgctgctagagggctttttactgagagagctgct

SEQ ID NO: 141824 - DNA, 231 bp, Arabidopsis thaliana landsberg
caacaagaggaaacatgaagaactcggttccagtgaccttccttcgaagaagaagaataagaagaagaaaaagaagaagaatgtcgaagcaacatcgtcgtcatattaagtctgatatgttttgtatttcactttgtacttgctctatttcagcttgtgtgctcagttttgttataattggtgatggaaaatggtgatttacatattaatgaagcaatttatttttctcac

SEQ ID NO: 141825 - DNA, 310 bp, Arabidopsis thaliana landsberg
tgcctggaatggtatcttctttcatactcagtgatcttcttaagaaggaaggctttagtgcagccgcaaaagacacggtgaaagctaatggaataacagaggaaagtacggagattgatgttttgagtcaagaaaagctagaagaagaaacaatgatggatgtggatacgactacaccagttgctgtagcggccgagaagatcaacggtggtgctaggtgcttttcgaaggagctaagtgggaacatgattgaagaagaaggtggtcactgtggtggttgtggaggttgtggtggatgtggaggtggagg

SEQ ID NO: 141826 - DNA, 779 bp, Arabidopsis thaliana landsberg
ttcctcttctgtttactgtttggggaaagtgaaagcttgtaaacgaaaggtaacgtttttatggaatctagggtttgtatttccctttactgtaacatggtctttgaaagtttcttcctttttaggattctttgcttttttcgggtatgtatttggaattggatatggatactgtagacctaattgatcggtgtgatttgtattggatagttttaacggatcgaattcttagaattaagatactgaatctgagaattggatcttctttaactgcaaattttgtgacttttcttcgttttagtgtcttaagaacttaaacacgaagttattcttgataatttgatgcagcttccaccatttagaaaagtattgtcttttgttctgtgaatttctcaggttcgttggttcttcaagagagatcatatgaagaaattgaatttgagtttcatgtcaaattttgttgttttcaggttgtaaactgtggccaaaggtttacttggactccttctgtttcactggaaactgttcatttgaatggtgagagtttgattctgatgcattagtaaattgtaaggaagagaggattgagcaaacatgggagaacaactagatccattttccgcttctaatcttccggatttcatatcttctcaaaaaattggtagaccggttaattttgaaggacaaactaaccgtgggcatcctttttctggtcttaagaagagaggtcaatatagtcgttcttgggtgaaaattgatcaagatgggaactctgcggt

SEQ ID NO: 141827 - DNA, 427 bp, Arabidopsis thaliana landsberg
cgagttcccgtttcgtgaatttctctctctctgtgtgaacaaagacgaagaagacgaagtaacactgatagaaaccctagttttttttttaaatccgtcgaggcgtaatgtcgtcggagctgcagatttcgccggcgattcacgacccgcaaggtcaagagaagcagcagcaagccgccggagtcgggattttgcttcagatcatgatgcttgtcctctcttttgtactcggtcatgtccttcgccgtcataagttctattatctacctgaagctagtgcttctcttctaattggtttgtcttcttcttactcctcctttgcattgcgatcgtccttttcgttttccatcgattgttttgtttgattccttgtgaaatttgtggaattgaacggctgatcgatggtggtttagcgaacatctagaac

SEQ ID NO: 141828 - DNA, 460 bp, Arabidopsis thaliana landsberg
ggataaacaaacaaccaggcatttgtccacctttcattttaagcattaaccatcttatcttttcgccttggaacttccccataattacaccacagactagtcttgattatcggttatttttcttattacacgagggtaaattagggaaaaacacttctggagcctttatcctcatgtccaaccaaaatctttacacaattcctagttcttaagaaaaaagtggaaattttcctttaaatttagtttaaaactcatacaaatccttctactcgaccactggtactctccgtaagctacttgctgaattcgattattgattttgggcgtagaagaagatgaaggcatcgatgaagtttcgtgaagagcaaaagcctctttttagggctaaagttcctttaagcatcttaggtttaccctttcaatctggaatcgtcgccggagaatccaaggagctcagtct

SEQ ID NO: 141829 - DNA, 436 bp, Arabidopsis thaliana landsberg
ctggcatcatgtctgcttgtttgtccaggcgcctgatggtaacagcgcatgttagagcagttcccaaaccaaaatctgaagataaagtaatagcttctacagataaagtagttcacaatgttacagccgacttgagtagataacagaccacacgatacattcaatacaatgaacaacataaaatatatagagcaacaacgtcatatataattgcacaaccgacctcgacacagctttcagcgtccacgggcttcttggtgtttgtccacgtcaggaaaccattgataataccagtggatccctcaagaagcctgccaagtgagtttttagtaataaacagagcaatgatcaccagaactaacaacaagttgaagttacgaggcatgatcaatgattgattgagtggtttacaagggaagaagataattcagttttt

SEQ ID NO: 141830 - DNA, 554 bp, Arabidopsis thaliana landsberg
gtagagaatggtgacactcgtgaagcttgtagatgcatcagggagttaggtgtctcgtttttccatcacgagatcgtgaagagtggtttggttctagtgatggagtcccgaacatccgagccgctgatactaaaattgttgaaagaagctacagaagaaggtctcattagttcgagtcaaatggcgaaagggttctcccgagtagcagatagtcttgatgatctttctcttgacatcccatctgctaaaactctgtttgagtcaatagttcccaaggctataataggaggttggctcgacgaagattcgtttaaagaacgctctgatcaaaatgggggcagcgaaaatctaaggcggttcaagaaggatgcagagaccataattcaagagtatttcctttctgatgatatccccgagctaatccgcagtcttgaagatttaggattacccgaatataacccggtattcttgaagaaactcatcactcttgctatggataggaagaacaaagagaaagaaatggcttctgtttttctcgcttctcttcacatgga

SEQ ID NO: 141831 - DNA, 378 bp, Arabidopsis thaliana landsberg
gctataagcaaagagcttgggataaaagcttggttgtggagtgttcaggtaaggaaacaagaatcagcaaatgatcttaaagaaaaaacgttcctcctttgtttcatcaaatccaacaacttcagcgtcatctaacaattccgctatagatggaacattgggaaaaagaagagtttccatctctcctatatgctaaattcccagcaaacatgcaagagcgcacgttcaccagacttgatgctggaaacaccaatagctaaaccggccattacttgtatctctgttcatagaggacatttcactccttagtttttaatcttgtttaaagctctgtatactaacataaacatgcatgaatcagctttaaagcaacaaaag

SEQ ID NO: 141832 - DNA, 325 bp, Arabidopsis thaliana landsberg
ccttgaggtctcggatattatgattagtcatatatcgttacgacaggcattgatcgtctgatagtattagatatggaacgactctatacacgaaaatatttagtctttctgtagaatctatccctcttactaaggaaccctttgctttgggtcttgacaacaatatacattagtgattctggttctgtgttggtgtaggatgttcaggtaatcaggtacgaagtgcgactggagcagacagagataagtagttgacgtaaccttcagagaccgagatcacaaaccgatggcaagcaagcgcagtggtggtgagagacatgacaaa

SEQ ID NO: 141833 - DNA, 135 bp, Arabidopsis thaliana landsberg
gctaaactagatcagctatggcgaccggtggtgctgcggcggatttggaagatgttcagacggtggatctcatgtcggagctcctccgccgcctcaagtgttctcagaagcccgacaaacgcctcatcttcattg

SEQ ID NO: 141834 - DNA, 347 bp, Arabidopsis thaliana landsberg
gaagagacagttgagagagagtggtgtttactctggttttgactcttaagagactcaactttgaggtaatgtctttgtatttgatggtaattttatatgaatgtgaagaaactagagcttgaattctcttagtgtcacaaatttgtatggagaataatcagttgcttagcattgtttactcgttctgattcctgaagttctcagctttgaaatgtatcttagtgttcctgaagatctcagctttgaaatgtatcttagtgttcctgatctcagctttgaaatgtatcttagtatatgatgataatttgatatgaatacgaagaatcatggtcttgattttcatggag

SEQ ID NO: 141835 - DNA, 106 bp, Arabidopsis thaliana landsberg
gaaagctagtaagcagccctttaccaatataacatcaacaacttgtctctgtgtattttatataaattttctgcgtgaaacaaaagactccagagcaaatacatat

SEQ ID NO: 141836 - DNA, 349 bp, Arabidopsis thaliana landsberg
gctgctgatctagtacaagagcttgttcttcgtctcgtctcacaaaaccctcaaacccctaatctcgatcccaattctcccgccttcctcaaaacccttcgttacgcttttcgtatcctctctagtcgtcttactccttccgtcctccctgacgccaccgctatcgctgagtctctcaaacgccgtctcgctactcagggtaagtcctccgacgcactcgcttttgccgatctctacactaagttcgcttccaaaactggacctggcagtgtcaataacaaatgggctcttgtttatttgcttaaaattgtttctgaagatcgtaaatcggctataaatggtcttgatt

SEQ ID NO: 141837 - DNA, 590 bp, Arabidopsis thaliana landsberg
  unsure (1)..(590): unsure at all n locations
ggctcatactatctaatcgatcttctttcgattctccctattcctcaggtaacaatgttttctcaaatctgcttttaaagatcttggttgcatatctaatgaatatgaaatactattttgctttgcaatgacaggtagttgttctagctattgttccaaggatgagacgacccgcgtcgctagtagcaaaagagctactgaaatgggtaatcttttgccaatatgttccgaggatagcgagaatctatccgcttttcaaggaagtaacaagaacttctggtttggtaactgaaactgcttgggctggtgctgctttaaacctattcctctacatgttagctagccacgtaagaaaagattattttatttgattctttgctccacttgattaggttatgttagggcaaannnnnnnnnnnnnnnnnnnnnnaaaaatggacaggtttttgggtctttttggtacttgatttcgatagaaaggaaagatagatgttggcgtgaggcgtgtgctaagatacaagattgcagtcatgaaaaactgtactgttcaccaacaggggaagacaataggttatttttgacggttcttg

SEQ ID NO: 141838 - DNA, 421 bp, Arabidopsis thaliana landsberg
cccctaaggcctaacgataacgagttaatacataactacatatagttgtaacatgatggatcacattgcgtgatatctgaaaaaagatttgattatacaaactcaattcatataataaatgaatacttactattggtgggccgaggagggtatagagctttgattgccacaccatcaatgagtggtccacaagcaggatcttcctcctcaccaggattatgaatcacgatctctgccacgttactctcggcttggaacgcccacgcgtaaaggtcccatccactgctactgtacaccgtctgtataggaataacgcctgagtcaggtgccaccgatatgttgagccgttcgtcttgggcacatgtccttgcggcactgaacgtcagtgagtaatacattccttttgtaacgttaagtcttt

SEQ ID NO: 141839 - DNA, 586 bp, Arabidopsis thaliana landsberg
cgaagctctctctcctcagaaatcaaaaaccctaaaaaccctttttgtagcgatgatggtagaaccgaatcaactcgttcaacatctcgaaacttttgttgacactaatcgttcctcttctcaacaggtaccttttgatcaattttgagacttagaacaacagtttcattgattcaccaagtttaattttgttttcaggatgatagtcttaaagcaattgcttcttctttggagaatgattctttatctattacccaattggtaacaatttccactcacttgacaacttctgaatattcttccgtaggctttatttgtgttgttggcttatttctgtattgctaatgtttaggttagagagatggagatgtatttgacaacaaccgataacctcgttcgagcacgaggtatttcgattcactagcttagtttaatgagcttatcaatttgaacgcaattggacattggtgtgttcataactataggtattctcctgcttgcggagattctcgattgtttgaaagcaaagccgttgaacgatacaatagttcatacgctcgttggattcttttccgaactttagagc

SEQ ID NO: 141840 - DNA, 383 bp, Arabidopsis thaliana landsberg
ctaaccttaaatgattcaaacccatatatatcaaggatgcttatagatcttcctgtacgtgatttaccgacttccaatgcaatgtttatttgctcaacaagccagtcaaaaaggtttgcataaataaattttgctattccatccctcatgtcagttgcctgtaagtgaaaacggttcagcaactcatacatcacctaatgatcgatgtatatgaaaacaagtagcaagaacgatgacactattaaacattacctgccgcaatgtcagttttttagcaatacaatccgtaccagcttgaagtttacgggtggacaaaaccaccataagctcttctgtgttgcagcccataaacataacggcattggcgacagctgtaagaaata

SEQ ID NO: 141841 - DNA, 780 bp, Arabidopsis thaliana landsberg
acggtgtaccaacgtctcccgctctgtctctctttctctctttcctccatctctctgtgttcttcttacagacaccgagaatggcggatcctgatctgtcttctcctttgatccaccatcaatcctccgatcaacctgaagttgttatctctatcgccgacgacgacgacgacgagtcaggactcaatcttcttccagccgttgttgaccctcgtgtttcacgaggttttgagtttgaccatcttaatccttatggctttctcagcgagtcagagcctccggttctcggtccgacgacggtggatccattccggaacaatacacctggagttagcggattgtacgaagcgattaagctcgtgatttgtcttccgattgctctgattagacttgttctctttgctgctagcttagctgttggttacttggctacaaaattggcacttgctggctggaaagataaagagaaccctatgcctctttggagatgcagaatcatgtggattactcggatctgtaccagatgtatcctcttctcttttgggtcagtcgattactttgtgattgcatttaaagtttgtgtcttttttaagtcttagattttaaagttactgttttgctgagtattgattgagtcatagagaaatggagttgaggaatggttaatttggtttcaaaggtgtttagatagtttgtttcatgatgtttgctagtttctctaatgttagtatatcttcattggttctgtagctatcagtggataagaaggaaagggaaacc

SEQ ID NO: 141842 - DNA, 456 bp, Arabidopsis thaliana landsberg
acgccatgtttcgttcggacagcttgaattgcttcccatctcacgtcattcgccttgtgaggcttgttgttaccactaaagctgctacatgtgctctcatcactgatatcactgcttgtgcttggtctacatgtgttactcttcccgctctgatcagacttttcattaaatttaacttcacctccagttttactgtcgctgcttggagcaaaagacaaagttgaagatacttgatctgccaaagtgtttactgagacactttgactggaataagatgtttccggggtttccttatcgcccttttccttcttattttctgggagaactccagaaccatacttcgaggccatgaacggttaccttacctatctacttaacactcaagattcaaggagctgcttttgactccagtaaccactattgtcacggatcccgtcagatagtgacctgagctct

SEQ ID NO: 141843 - DNA, 149 bp, Arabidopsis thaliana landsberg
aagcgagagagctgttgttgttcaactctcgccatccatcagacatctctgtgcttctcttcttcttcttcttcttcagctttgagatctattctatcttcaaagatggccaccgatgagccttctcaaactcgctggagctttctggt

SEQ ID NO: 141844 - DNA, 319 bp, Arabidopsis thaliana landsberg
gataggaaagctatgtttgatcacatggctatactttcaccgggtcaaaagattttcaataggtctctttgacccctcatatttttactttttttacttttcttattttcacttttgtattcttgagttttgtggtctttatgtaattttttctgtatttttcttttttcccaagaaaaaaatcagctggttttttataaaaggtggcctacgagtcatgtccaattatgaataacaaaatcacaagaaaaacgtccttgtttggttatcttgaaatgtaatttaaaatttgttatattatgaattaagtaattaatta

SEQ ID NO: 141845 - DNA, 874 bp, Arabidopsis thaliana landsberg
tcaaatccatattctcaaggcgcaaaaacccgcattatttcatctcgtttctaatactacgatgatctagagaaagtacacaacccaaacaaaacaaagaggacaacacgatttgcttcatacaatattaatcaataatttttgtagccaacaatacgtaggaacacattacacaacaatctctcaaagaccgagcgagaaggggaaaccggtcgacgataaccagcctccaccaccaataaactgaccagccgtatatttttgagcttcagcagcagccgtaattaccttaaagcccctccacttcactctatttgcagttccagcccctgctcctgtgttcgaatactctctgtaagtcagagtgttcaacgcaaaagtcccggtccactcggaccacccttcgggtcggatcacgtcggagatagccgactgcattatcaccgtttgtgaatactccttccatggccgacccaagtacgtcggaaaactacctttcaccgactgtaaatccgacgtggcaccgatcctacatttctggataacgatccctgtgttctggttaggatccgttcttccctgagctgttaccatgtttttctgaccggaattagggcggcgagcgtggatgtcacagtcttggagcacgacggcggcgtttccgaagatgaagtcaacggttccggcgatgagacatttgacgaagaattgacggttagagtggacgtatagagtgtcttgataagctaacatgtcgcaattgtagaaggcggagaaatcagaacccacacggagagccaccgcttggtgctttgacggacccgccgtgttttggaaagtgatgtcacgagctaagaatctctcgccgacagca

SEQ ID NO: 141846 - DNA, 220 bp, Arabidopsis thaliana landsberg
tgccgtccttggaaacaggtaataattagttatcaacaataatgctgtctaagaaaaaatatcatagaaaacagaggatcatgtttatgttttcagcttcattcctctgttttttgctctgctctgttttaacagaggatcaagtttatgtcttaagcctcctctgtttttggctttggtctgtttatactcagatggtcacagattgcgtcaaggcttc

SEQ ID NO: 141847 - DNA, 457 bp, Arabidopsis thaliana landsberg
gatgtatccgagaaacataggcttccaatgtggatgccaagtatgacaatgaaggaacgtgaacgtatgaagcaaaagaggtctatcccatctaacaaaggcattgctgttacaagagcaggtcaagttttggttgtctttacgtacgatttaggtacctctgaaagtcacaggatgttccatctgtacaagagggatcctaaagatcttgacccgaaaaccctcgacacccggcttcttgaggtacattctctaggtgatgaggccctcttctatgatttgggtattaccgtgcctgctgaccatacccttggaattgagcctaactccatttatttcactcgtgatgatcgtatctgtcacaataaattgtcatgcctcgacatcggtgtcttcaatcttgcaacaaagaccgtcaaacgcttccacggtctctccaacttcaacttcaacgatg

SEQ ID NO: 141848 - DNA, 189 bp, Arabidopsis thaliana landsberg
caatattcagcgtcgatgttagatgatgatcaagttcagaatttgccttataggaatttgatgggagctcaattacttcatgatattgtttgagattaaaagattaggaccaaagttatcgatacatattttccaaaaccgattcggttatgtaacggtttagttagataaaaaccaaattagatattt

SEQ ID NO: 141849 - DNA, 284 bp, Arabidopsis thaliana landsberg
ttgtgacccgtgtggggacaataagttggtggaacactggctcggcccacgggtcggatctgttgtggcattgttccgggctgcccagtccaagctgtgagtgatccgtgtgtgttaagcgaaggcttggctcaggcggttcttgcagtggagggcaatgcgtgaggctggtttcacagagcagcgatcacctcccgctctcagcagtggacggatcacagctcgacgccactcagattcaccatggcctgctggctcgttcccagctggaccaccaatttttt

SEQ ID NO: 141850 - DNA, 455 bp, Arabidopsis thaliana landsberg
gagatcaatgattctgctaatgatgtttatcaacataatttcaaacatcgtccctatcaggttgcttaatgcttatatatgatataatcaatagaagcattgttacatttgcaaatcatagatgatgctagttctgtgacttagtccatgattagttcttattgttttggttgtttttcataggggaatattcagagtctcactgctgctgatttagataagtataatgcagatgcttggcttctttctcctccttgtcaaccttatactagacaaggtgattcatttcactgtgttttctttactatcaacatgacttgcttttggatactaacagttttttttggttaggccttcagaaacactctggtgatgctcgggctttttcgtttctcaggattcttgagcttataccgcatacaacaaagcctccacaaatgttatttgtagagaat

SEQ ID NO: 141851 - DNA, 117 bp, Arabidopsis thaliana landsberg
cagacaaaatagaataatccttaacaaacgtcttcaaatcaacccaccagagatttccatatcaaagaaaaaaaatcttatgaacaaaaaaatagagtaatcttcaaaaaaaaaaac

SEQ ID NO: 141852 - DNA, 1545 bp, Arabidopsis thaliana landsberg
ggcaaatctctccgtttcttatttttcttctcctttcccatttattttctgtgtcccttgtttggttccagagaaaccgcgagaaacaaaaaaatcagagaagaagaagagaaaacaaaaaaaaaatctgtcttcttcccgtcgtttaacgctttcagtttcgaaagttgtatctgcatttttctcaggtaatcatatcttagcttaaagtttagtgttttataccattttagcataaagtcaccatttttacaatctctgttctttgttatgagctgggattttttagttttggttcaaagttgaagtctttttgggatgtttgttgtatgatgaaatgtctgaaccaaaccagtttaagaaaaaccggattttgttttctgggtttaggaatttggtagtttgtttattatgggttggattttatgtgaagtgacaatgatttgtcaagctttaagcacaacacatttgaaatggtggtggtgggtcaagacaatgtttcattgtctattctctgcaagtgtgttactaaacttttggtaaaaatttatgttttcttcgataccatacaaaatcttctgatgtgcctgtctttgcttatacatttgtggcaatttggtattcaatatttatatatctgaaatgtagttttaccacagtagtttctctccaaaatgtgtttgttttttatgcttgaaatgtagggtttggatttttgctctatcctttagctttagatgtttggttggtaaaaattgtgaaataatcccaaagtaatacagagattttctatatcagtcagaaatttctatttggagaaataatcccaaacttttgttcctttgatagagaggttcaatattggctataatgcgatctctctggcattacccttgaaaattttctattacaaagtaaagtcatttcatgaataatgtgttttcttgattaccttttcgtacaactgtcagcaaactaaagacaaagaaatgttacaaaccttttgtttgtttctcattggctcatagcttaatgtctatgtgtgattttggtatccaatgttttcttgttatagcttgagagaatgttttcaaacttttttcaacagatacaatcttagtaatcacacttgagtatttttcttaactggttttgtttcttggcatcttcatttcagggtctatatttctctgaggaattggattcttatagaagttaaaccgcagagcttcttctatccaatagtcctctgagaatcgtcgatatatataaagtttgctgatatagttgttatggacatgaaatctggtcactcgtctcctgtaatgactgattctccaccaataagcaactcaagattaaccattcgtcagaatagacttccttactcatcagcagcagccacggctatctcacagaacaacaatctcttactaaccgttccaagaaagaaaactgggatccttgatgatgttaagtctaatggttggcttgatgcgatgaaatcttcttctcctcctccaacaatactaacaaagagtaact

SEQ ID NO: 141853 - DNA, 279 bp, Arabidopsis thaliana landsberg
caacgttgcacatttatctcatctatacaatgatacgtttacacacactacacatacatcctctcatcacacatcttacaagcatttgtaaatatccctatactcaaatcattattacccgtctagcaccttcaaattttgatttctctattccgtaacattctcccttcgtgaactccatcatcattactcagtctgtagccagcacctttaaagttatatgaatgtgacggatcggatcagtctccattttcattttgtgttccccataaacctctg

SEQ ID NO: 141854 - DNA, 427 bp, Arabidopsis thaliana landsberg
gatttaagtgacgaagaccggaaaggctcgagatttccggcggaatcggaccggagattagattttcagcgagtgatagattctgaagaagacgtaaatgagaaacatctggggaaagagtaccggagaggttgagaccggagagatcaagagaagtcacgtgacggcgagagacatcgcacgtgacaccaatccatgtacagaagcttgttgagactttccaggaagagagaggcgagtttttgtcatctccggcgccggtgagagaggttttgagtgagaggagagcacggaactcggagattggtcggcttgcggtgaaggtatgagaaatgtggagaagaaaaagaaggagaagaaaaagtttcattgtttctctctatctctcttgtgtgggagagattagggttgtgagatggtgtgagtg

SEQ ID NO: 141855 - DNA, 183 bp, Arabidopsis thaliana landsberg
tcccggacacgattcagtcgaaggtagattcggattcaaggaaagagttataaatgatcagagatccttttcgcaactctgtttaatcgatcatatgatgttatgtgtgtttttatcttaaaagagtgtaatccacgatctatgtagtttatataataaataaagaagtaacttatatcacac

SEQ ID NO: 141856 - DNA, 349 bp, Arabidopsis thaliana landsberg
aaactcaagccgcagcatcagaatggatctccaaagcccttaactctgatcaatgaaaaaggtcatactcgtaaattatgttacatgatttggccaaaactctcccaacaaatctgatttactggattctgcaatttgtttgttcttgtggtcttgttgtcatcttaacccttttgtttattttatttatttgatctccctacaagtctgggttgctcttgttggcttatttgtttgtcactagctgttttaacctttgtaatcggaaaaaaggtcggtctgcgttttctctatttcgaattcagacaattttgtaaaccttttgattgagaagaacgatcttttacct

SEQ ID NO: 141857 - DNA, 992 bp, Arabidopsis thaliana landsberg
cttcatcttcttctcccgtaaagctctcgcgtctatggcggtcaaatgtttctctctttatctgattctggcggcgattgtaatcggcggcgtcacctccgagtacatagagtacaacacaaaaccgagaatcgtccctgagaaaatcaatgttcacttagttcctcactcacacgacgatgtaggttggcttaagaccgttgatcagtactacgtaggctccaataactccattagggtactctccctcttcacacatctctctctctgtctctttccatggattctttagggatttgatttttgttctcaatttgatttgaatcagggagcttgtgttcagaatgtattggattctgtaatcgcttcattgcttgatgatgaaaatagaaagtttatttatgttgaaatggtaagattcagatattaccaaatccggagttttcttttgtcttgcttgatgaaattagtattgttcttaggctttctttcaagatggtggagggcacaaagcaatgctaagaaagttaaagtcaagaagcttgttgactctggtcaacttgagttcatgtgagtttgatttttctcttaccttttttgttttgatgacttgtgtgtatctgtttgtgttgatatgtggtttttgtagaaatggtggaatgtgtatgcatgatgaggcaactccacattatattgacatgattgatcagactacattaggccatcagtttattaaaactgagtttggtcaggttcctagagttggttggcagattgatccctttggacattctgcagtacaagcttacctgcttggtgctgaggtataatttgttcatcgtttttgatcctttcgtttcatagtgagtttagatgagttcagtatgtgaatgattagcttatatcagctctaagttattttgatcggacaacccttcggtttcttctacagtttggctctgattcgctgtttttcgctagaattgactacc

SEQ ID NO: 141858 - DNA, 208 bp, Arabidopsis thaliana landsberg
aatcttcttttttctcaccgattatggcaatcacgagtatggaggacaaaacatcaatatactgagcttttaaccagctaacttaggcgcagaactgtcttgacaactaaatcgaaagaaacatctagatccaacaaagctatcaacacataaccttgttagaggccaccggagcagaactattaatcctcgaaataattgaacaaaa

SEQ ID NO: 141859 - DNA, 589 bp, Arabidopsis thaliana landsberg
actagatttaagcgattaatcaaggatcagaatgatcactctgatcttgaagaaggcatcagaagattggtactttgctccggaaaggtataaataagctttgttcattttataagatgaatcttgccagtcccagatatgtaaagagaaattcttgctttgcttcgttgtaggtctattatgagcttgatgatgaacggaagaaggttggcgcaacagatgttgctatctgtagagttgaacagctttgtcctttcccatatgatctcattcagcgtgagctcaagagatatccaagtacgtacctaaactatctttggattggtttggtttagcttttatgtctacctctataacttgtttttgtattggtccgaaaaagatgcggagatcgtttggtgccaagaagaggcgatgaacatgggagcattcagctacatatctccacggctatggacagcaatgagaagcgtaaacagaggagatatggaagacattaagtatgttggtcgtggtccttctgctgcaactgccacgggtttaaatactttccatgtcaaagagcaagccgggcttgtccagaaagcca

SEQ ID NO: 141860 - DNA, 411 bp, Arabidopsis thaliana landsberg
gagcgaaacgggtcggggaagaagtttagagagctcagggaaattgagaatggctgaagttcctttgatactcatagccgccacgtcgtgagcacgcatagccatctccgccgtcggaaaagtcccgagccagattctcgatttcttcctcggttcgcgaatctccgatacccattttccccagctcctcatacggactccacgatacacgggctgcttattattttccttcttctccttgtcggaagacgaatccgccattggtagtcagaaagtttagagctttttgtgatgccgtccaagtgttcgacaaaatgtcaaacagactgaagtttttttttattgggattttttgtagatttgggttgttgttgaaagaaatattataaggcaaaacgagtgagacatttt

SEQ ID NO: 141861 - DNA, 238 bp, Arabidopsis thaliana landsberg
aaagcaccaatctcattgatgattactggctaagagaagtaacttttataaaaataacttatagagttgtgagagatgatatttgaagtttgataacttaagcttgtctttattaattaattattatagagttgagattttattttattttgacatcgagtttggactttgtataggtgataaaacaatttatgaattattggggtcaataagtaaaaatgtatcatttcgaaaaata

SEQ ID NO: 141862 - DNA, 703 bp, Arabidopsis thaliana landsberg
tgttagtgaaagatcttagtgcaattcaaatttcagtctcttttatgggaccataatactctcatttcaaaatcaaacttcatcacctcctttcctcaatttcaggggttaattctagtgtttttttcattcacatgaatttggtttagcttctttcgtttataccaaagaaatctagtcaaatgttacatacaatatatattacaaatgaacataaacgacaaaccatcatcactccaagcactagacaaaaaagagtaagagaataggctagagactaattaaacatccaaatctaaccccaaacaattcaattctaaaagctaactcaaaatactagattaacttatcggaccaagtagtcaacgccaagaggaaacggtgaggagaggcacattgttccaagccaaggagatgaaacctggctccgattcaacaagtgaatacaatgtactataattgtagttccatagtagcagcttcgcttggctaaccgcgtaattactcggtttaaccggctcaaatccagctttctccatcaacactctccattgttctttctcctccattaacccaaaccgggttcccggtttattattatcatcatctgatcggaccaaatccataatcctcctaccgaacagcactctctccactctcagcctttctttcgaatctcgatccaaattcggttcaagcgatt

SEQ ID NO: 141863 - DNA, 323 bp, Arabidopsis thaliana landsberg
  unsure (1)..(323): unsure at all n locations
nnnnngaaccatataaatcatctcccatggcggaaatcgaagtctttaactaaagaagaagaagaagataaagctttgtaatttatagaatggcgtgtgtatcgacatgcttgattctctcccctaggttaactcaagtgggtttatcatcaaagaagccttttttgattcggctcagatctcctgttgatcgttactcttttcccagaatgttaacggagaggtgtttgagcactcgtcggaagtttaatcgccatggaatcgctgtggtgaaggctgcgagtttagataaagttagcggcgcaatcaaaccaagtggattg

SEQ ID NO: 141864 - DNA, 1488 bp, Arabidopsis thaliana landsberg; identical to SEQ ID NO: 7279

SEQ ID NO: 141865 - DNA, 350 bp, Arabidopsis thaliana landsberg
gcgataacttggtttctctcctctctctcatctctctttgtttcgacccttttttagtatatttccaggaaatatcttcttcctcctttcgttttctctatctcagttttctctcttctcagcattaagtagtcaacggtcagcgatctcggcgttccttctaatcggaaaagtctagcttcagtttcttttttttttgcttttttggtttccgcgattaatcgatttgggtatttcgattttctcttcaaattaagtcaacgggtggatacgcgttgagagggcttttctcgtattctgcttctaatttcatcatcttggtattaccttgtgtgggtggtagcttaatc

SEQ ID NO: 141866 - DNA, 440 bp, Arabidopsis thaliana landsberg
catttacacaaaaaccctagatccacaacaatggcggaagagaagaaatcgaagcagagacatcgagtcatggtcttcgaatccatgtatcccatcctcgctcttatgcttatactcgtcgcttgcgtcgagctttgcgatgcagctactgttgtagatgtttatcgtctaatccagtacgatatctctggtgttccttttggttctcgtttctcttctcttaatcatcatgctgcttctcttagcttccaacgtggagccgatctatctcgttctgtacttatacttcctcttcgtgagcttgacattgcttttgttcaaggtttggattttgtggattagcttaaatcggactttgatttggatttcttttgcttagattttgttactgttggcagattacatctcgcaaagcagtcgcttggtggattgttgatttt

SEQ ID NO: 141867 - DNA, 715 bp, Arabidopsis thaliana landsberg
atctctagctaaccatggcatttctagtagagaaacaactcttcaaagccctcttctcattcttcttattagttttactcttctccgataccgtcttatctttccgaaaaacaatcgaccagaaaaaaccctgcaaacacttctcgttctatttccatgacatcctctacgatggcgacaatgtagcaaacgcaacctccgccgccatcgtgagccctccaggactaggaaacttcaagttcggtaagtttgtgatctttgatgggcccataacaatggacaagaactatctctcaaaacccgtggctcgcgcacaaggcttctatttctatgacatgaagatggacttcaattcgtggttttcctacacgttggtgtttaactcaacggaacacaaagggacattgaacataatgggtgctgatttgatgatggagccaacaagagatctatcggtcgttggtgggacaggtgacttcttcatggctcgtgggatcgctaccttcgtgactgatttatttcaaggggataagtatttccgagttaagatggatattaagctctatgaatgttactaactagcgaataatatttgttttgtttgaaaattggtatgtacacagagataatgtgttactaataagtagtgttttttttgtggcctttttatttggtgttgtctttttgtttatcaatagtcaattatttctgtcaa

SEQ ID NO: 141868 - DNA, 1037 bp, Arabidopsis thaliana landsberg
atgagagcctcatagaagcggcactagttcgtttggtggatcccttaacgcgcttcttcttcttctttcgcgagataacctagaaacccttttcctttcgttcgcttcttcaatccgccatgggtacgggttctcgagctctctctttctagtcattggtctatgtgtcttctttctctctcgatttctcgattatgcgcttactacttttgttggtcgatcggatcttttcttcaatttttgttgaatttttgcgttttactgtgttaacttcgattatgaagctgattgatttgttgctctggtagttaatcttaaatcggaaggagggttatcggcttttggattagaaatcggattagggtttagctgattggttggttttaattggcttgcgtagaactgacctagctatttctctttggaattcgagtgaatttaactctcagttagcgagggattgggtattttgtggaattctttgctaaatgtctgtacgttttttgttggaggtgataattcttatttcctatacatttttacgccgtgcagatcttgaggctgagatccgcgcattacagcttgattcggcaggtaatagagacaactagctttaactgtatttttgtttccttcttatttctatggtaccaaattttggtgttaatatatgcagatgaaaacaatggtgttgtcattccagaagttcataactcacatgaagttgagaatttggataaagcaccggaaggtacctattacaatacatacacaaagccaaatcatttgacaaagagaataaccatgtattttatctttacttacagacttgaaagatgaagtgcaagaatcaattccagttcctgatgagcaagaaggttcctggcatcagtttccttttctttttatttcacttcaaattagtttgctttatcttactttgccataacaaactttttttctttggactttggtggtttcagcttctgaggatcatgatgaagtaatgcttcattcagtccataatccagcgaaag

SEQ ID NO: 141869 - DNA, 292 bp, Arabidopsis thaliana landsberg
agagaaggaaattttgtttacccctaatacaaaatactcgagactcacataattgataacccttcgtgttacaaactaaaggaaacaaacaaagaacaaaagcctacgactctagaagtgttaggatttcagacgaatgacaaaagtcaagattctaggcacgtgatttacatttttcaagtaaagaaatcttactactgactcgtagtcccaccgcaagtgtcctcggacaagcacggcgagtccaccgcagaattgatcccatcattgcacggcgaggcctcagagccac

SEQ ID NO: 141870 - DNA, 406 bp, Arabidopsis thaliana landsberg
ctctggagaaatcagacaacagttagaagaggatgcaaatctgctgaaagagttttcctctttagaggcttaaatattagtatgtatgaaaacatttggtgtatgtggtgtagacccttcaactccatctaaaattatatatgtgtgtcagttactttctcgtgtgattcaatctcatgatttcctgaccttgaagatttctcctttggattcatgtttcattagtattattgaggtgattttcatggccataactgaaaacctttgagaaaagagttaaaagtcactggtcttcataaccttttgtatacaaaacgcaagtacaacagaatcgtccaactgtttagtgtgttcaggctcgggcaagagttttcaaatcttccaaacgaacggttaaaataaaatg

SEQ ID NO: 141871 - DNA, 485 bp, Arabidopsis thaliana landsberg
gccctggaaaagatatcacattgcaggtattactggagagagacatggagggaaggaccgaggtgggacctgtggacgcgccaagatatcctaagactaaagaagaaggtacaagcttctcaaagatgtcatgtgttagttccacctaaacgagaggtattagaagacttactataatcatactactctttcgagactgtgtgattaaattatgtataattagccactacggagagagcaaattaaaaaagaaaacgtcgttgtttgttttcatcctttttctcctttttactttgtgtttatatatatgaaatgaatgtgtgtttggcgtgagcttgtgttttcttaatcaccatataagctattaataactgcaatttgcgtaaaagactcctttttctttaaaacctttcgtaaagatctttattagacttaacatccacgtatatatggtttcaatgttattccccggattctcatggcac

SEQ ID NO: 141872 - DNA, 261 bp, Arabidopsis thaliana landsberg
taaattaagatattatttaattaggaagtctattgagtacataaaaaacactaatgctacataacaaaagcaattgactttctagcatatttttttctccttttttacaaaaaaatgtaacaagaatattcattcacacacacgaacacatgactactacaagtctacaacataacttatacaactcagaaattccaaacgcaatccaattcttctgtaccggacgaatcacgaccgtcgaaaggtttgccggagaattga

SEQ ID NO: 141873 - DNA, 307 bp, Arabidopsis thaliana landsberg
caatttcatcatcgtctacatcgaatgctggattgcagagacatctgaaaagtctaccaatcccctgtaaatgtcaaatcaagaatctaagtttctgtttttacattattattcatagaaatgacttgaaaagtgagaatctattgtacctgagtaagcagaggagttctgtatgaaagtggttgtgaagaatcgtcatcgctgctactgtcatcatcgtcgctgtcatcatcatcttttcttgatgttgtaccgttcttcgattgcttttcttgctgcacaagccaacaacaatcttgaatcagcg

SEQ ID NO: 141874 - DNA, 137 bp, Arabidopsis thaliana landsberg
taagtaagaagacatcaaaacacatgacattgtaaaaataaaaacgcaaaatcagtttaatcaatagtatctgcccaaaagtacgtttagaatcaataataaacaacaaaatcattttcaaccgccggtacaacact

SEQ ID NO: 141875 - DNA, 107 bp, Arabidopsis thaliana landsberg
gttatttaatcccaaaaggatggagaatttatgtatacacgagggaaattaattacgatgcaaatctttatgaagacccattgatctttaatccatgcagatggatg

SEQ ID NO: 141876 - DNA, 506 bp, Arabidopsis thaliana landsberg
agtgtgtcaattcataagttgttgttttctttctcctacctttagctttaagtcatttcacctaaactgaaactctttcactcttggtctatgctttcttcatcataatcttcctcgtcactagcactagcctgttgttgatcatcaggatctattttcatttcgttaatctccaacgggtaatctggacttctctctagctgtgtttccagccatgtagcagtgtctccattctcatctaattcaacattaagatcgaagttccttacttttacctctgagttactactatgatgattgttgtgtgatgcaactttcttccaagatgtatcgtcgtgagaaaggctcccgttttcgggagacggggtcctgctgctttcgggagaaccgtcttctaaatcttcttcaaattttagagacagcccacttcctgttcttccactacttcgtccgcggcctctacctcgccttcctctgccaccactagtatgtttgacatcatgcta

SEQ ID NO: 141877 - DNA, 170 bp, Arabidopsis thaliana landsberg
aaacagagaaaaagaaagagagagagagagagagaagaagaagctctcatcactcatctgttatcttcctcttcttcttcttcttcctcttcttttttccttccacatttatctttattttattttttagtgtacatttatcttattttacacacacgcatctcattttt

SEQ ID NO: 141878 - DNA, 400 bp, Arabidopsis thaliana landsberg
atataatattaattattatttttgggttcgagtcctttttaaaaaacacttatgccaatctttaatccttgaaaaaatgagatgtaataacttttttttttgggcaaaaactgagatgtaatatgtaataactaaataaagaaaagtgtacccaattgtaataaattgttaaccttaatcagacatgaatgaaaaattagtcatcaccggtccaagaccttttgactttgggtccagtgggaccatcttcttcaagcacttcacgagggattttgttaatcagatttctgaattttttccgcaaaagtcccggcaatgactttgcgataccttcaaggttcttttgaatgtcatgtgggacaagtggtccccatttcctgaaatagttgagccacggtgg

SEQ ID NO: 141879 - DNA, 398 bp, Arabidopsis thaliana landsberg
tggcgcaacgattctgaatgagtgggaaaagtatctacctctcttctggcaactggttccaccgagtgaggaagacactcctgaagcttctgctgcttacgtaagaacatccaccggggaagtcacatttcaatcggcttagagatcattcaagagcaggttgtggcagttgaaacacaaggattgatatacatcaatggtggaggactatggagagcagattaatggaaaatcattatcattcacatgtagatcaaatgtgtgggacaatattcttattgtcttgtgatctttacaacaataccatggttgctataactgtacagtaaattcagtaaaataactgctttcaactgtcataatcatatctcataaaaatttgcaatttctctttattg

SEQ ID NO: 141880 - DNA, 219 bp, Arabidopsis thaliana landsberg
catccagaccatcctctaaagctcctcataaatgtcgaaccacgtgcttcttgtagccagtgtccatcttcgtttgaaaatggttatctttgttcgatttgtgacttcaagttggattttcgttgcgcgacgaggttgcctttggaatttattcttgaagaatccactgtccacgagcatccgattcagctctctgatggaacccgtgacggttttgtg

SEQ ID NO: 141881 - DNA, 1072 bp, Arabidopsis thaliana landsberg
gaatttatggcttaagatagtcttcaaagctacacacaaaactatattacaatttcgaagctgcccatggccatggcgttacagattatagcttcttcttcttcatcaccaacgattacaaaatctcaccttttctcttatcctcctctgcaatctcgttataaagcttcgaaacctaacctctcctcatggttttctcttctgggttcttctcgtttctctccttacattggtttaaagcatttgggcttctcaatctcgccgaaatcttcaaacccaggtttcgatttcagagatatgattgcttctttacttctgggttttttgtaaagttgtttaatttctgaagtttgggtggtttttgtgtgcagagaagaagagaagatgtaagagtatgatgattcgtgcgtctctgtttggtgttggagcacctgaggctttggttattggtgttgttgctttgttagtctttggtcctaaaggtcttgctgaggttagtgtctttgtgtgtggcaattttcttgatcattgatttggaatcatagcttttataggtttaagcaacttatgaattagtactgtttagtttcatcttaggagaattggagtatagtgtatagattaggctagagatagatgagctttttgcttaattgtgtttgattctctatggatagctcaagatatcactgttgcttctccatatagtcttttacagttgctttagatctatgaagaagtgttttacttgctgtgatccgtgcaggttgctcggaatcttggaaaaactctgcgtacatttcagccaacgattagagagctacaggtttaatttctatctcaagactttcagaaattatgaggtttgtttgtatatgttgtgcctaactgtttttgattgtttacatgtcgattgttttaggatgtttcaagagattttaaaagtacccttgagcgtgaaattggccttgatgatatctcaacgccaaacgtgtacaaccaaaacagaacgaatcctgttcaacctcctccttcaccaccaccaccatcagttcctagcactgaagctcct

SEQ ID NO: 141882 - DNA, 648 bp, Arabidopsis thaliana landsberg
catccagagcactaagcagtataacgcgtgtcgtaagtagaggtcggtatctctctctctatcatctcgctcgtttaagcattattaaaaaattggcatgaatagaataaatactgaaatttgtaaaacaggatcagagagtccgggagtcgatgggaatactaatgctcttgattacacaacaaagctgctgcatcttgcttggcatccaaacgagaactcaattgcttgcgccgctgcaaatagcttgtacatgtactatgcttaactcaatactcagcaaaaaagaagaagaagcagaaaaggcgcatttccttgctctagactctgtttttcttggttccgtatggtttgattgatggggattgctatatacatcatcatgattgtcactcacacatgatctgtaatcatcatcgtggacttatgggggaatggcatggggagaaggcaagcagtgaaaaaccaatcattttctctctttctttttttcgttttaagtgtagaatttttcacttgtgcacttggaaactactttacaggccaagaaaaaagaacaaagaaaatccgattggaagaaatcgtgattttagtaagctaatcatctcgtatgacttttggatggatatagattagatttttataatc

SEQ ID NO: 141883 - DNA, 162 bp, Arabidopsis thaliana landsberg
ctttttgtatatattaatatctcagtgatacaaatgataatcgataatgtaacaacgatgattataaggaagaaaaataattaaaacagggagtgtgggaggattacaaagaaacacacatcaacttaccattaacatacatcaaaaagactgttggctgac

SEQ ID NO: 141884 - DNA, 265 bp, Arabidopsis thaliana landsberg
gaaggaagaaatataacgctttaatcgttttcgtttgtgacaaataaagcgttttatttgctctgccctttcacatgataaggaagatgtatataactctttattcctttttgtttgtgatttctaaatacaatttagctctaaaaagtaagaaaatagtcgtgaatgtgtttacttatctcgtcaggcctttcctcgtggataaaatgaccaacgcctttaattaccacaacttcgtccaacaacgggacatggctcttaaacc

SEQ ID NO: 141885 - DNA, 231 bp, Arabidopsis thaliana landsberg
gtattcagtcccagggtttttgaaaccgtttccaatgcccttcagaaggctggtgaccaaggtctgagcattgaagaagtccaccgtcttattgatatcccaagtaagcatcaggcaaacctttttaacaggcttttatttttgcatgtgctggcgacttccttcagtgtttttatttaacctttgtgtattcatcaggccaagaaacttgtgactgcattgtagatgtac

SEQ ID NO: 141886 - DNA, 667 bp, Arabidopsis thaliana landsberg; identical to SEQ ID NO: 10293
  unsure (1)..(667): unsure at all n locations

SEQ ID NO: 141887 - DNA, 110 bp, Arabidopsis thaliana landsberg
ctctctctgtgtgtcttctacaaagaccagatctctcatctgtgttttgttggtttatctcgaccaaagcccacacgtcacgttacgttaggttacaaaactagtttttt

SEQ ID NO: 141888 - DNA, 155 bp, Arabidopsis thaliana landsberg
cattcatgtcttacttggaattgagagcctgacattagaacacatcccttattgtgatgcgtcgtcatagcttcagcttctttcgaaataattctatcatctttctacactttggaaaaacttgagaaatttaataatgagtgcctctttctttt

SEQ ID NO: 141889 - DNA, 305 bp, Arabidopsis thaliana landsberg
aactggtggaggaaaaccatgatgatgttcagctagttgaggaagcaggacatgagacacatgcagtagaggggatactagaggacactcagccagttgaggaagtggcacaggaggcaaggccagtggagcaaattcccgaaaacagccaaaacccacaagagtattctcgtgaaggtgaatctgtacaagaagagcagcaatcagagcaacatactcaatcacatgcaatgccacatgaagaagaagcacaacatgattctcagtcacatgcaatgccacaagaagaagccacatttacaatc

SEQ ID NO: 141890 - DNA, 1944 bp, Arabidopsis thaliana landsberg
atggtgacactcaagatgattttatttcaaccaattgcacatacttggtaactacatacttctatttctgcctatccaatttaccctccaatgtcacatgcaaaaaaaaaaaactctccaaagcgagattaaaatttttcaattacctaatataatgaaagataagatcttaacaagtgacaaagggaaaaacagtaggatttagtttggcttcggtcggaaatctatcatcataaccggttcaacagatcaattcattgagccaccatctaattggtggagagtttccaagccgaggtggctatgagcggtcgtgtgtgccaacccaacatgagacagccgtcactctcctccacccgataaccctcaccgccgttgaacagagccaaaagcatactcgcttgcttaaacgcattcgaaccaatatgtgcagccgcaaacccagcagacccgaaccggttcctccactgactcaacgtttcatgacgctcaactcggtcaggtccatcacaagccacaacgttgcagatctgtttacccaagtaaacctccgacatgaccttgtcttgaccactcggtacaccttccaacgagtcaaacaacgtcgagtaataatgcaacgactcagtaaaccgatctaagaaaatcggactattatggttcgattcctgctcaaccacagtgaaaatctccggtttaatctgattcaccacaccaagaaccttatcgatcgcaccaggtcgtcccaagagcttgtgaagctcgaaaacagagttaaccgcaacagattcaatctcacttggtctaagctcaagcatcgaagcatcaagatcagctaaagtgttagccacaaatcctctgtactcaaactcaacgtgaatcgcctcagctaaatgagccagcttacacccaacttcatgaagataatcgaaattatccggtgccggtggaccaattccggttaaccggaaaacaggaggaccaccaggtcgaagcgcaagagcctgcataagcgccggccattgaagaccttgactcatagagaaatcaatgacatgaactcttttcttcccttgaaaagcttcgagaatcgcttgattcgccgtgaagtgagcgaacttgagataaggacaagtctcgtagaagtgcatctgaagagtatcggagagagagtggtcgattggactctgcgacggagagagacggtaaatccgccgcgcgagagcttcggcgaagtaagtagcgacttttctcatagctccgatttgagaaacagctaagaatccgatttgcttcaccagagcttccgccacagtcagattctccttctgagcagcttcagcgcaagccaaaagcgcgtgaacgagacgcacaccgttctcctgcgagtcaaccaggacaacatgccgagttgactcagccgtcgctgtggtggtttccacgacgccgtttgagcatttcaaccgcttgtttgtagtatacgtatctcctccgccgccttggttagacgaagaagccgaatcgatagcgaactgattgagaatcgcgtcaccgggaatagctttaagatcgtactcggcgttagacgacggaggattaaggtcggtgagcatagaatcaagccacgtgtaaagctccgccggattatagtgaacagtctcagtagcgagttgagaaagatcgtcttcttgaacattagacatcataacttcaagctgctcgagtttctgagcaacatcagccatttccgatgacctaaccttgtaaccaagaacagctagaagctcatccatgccgttaccgtcgtcttcttcattcatcatcatagtcttcttatcttgatgatgatgatgatgatctctcttcatggttgggtttttttcagagatggatctaaaaggtttttccttcaatgtcggatctaggttttgctttatttgggag

SEQ ID NO: 141891 - DNA, 1126 bp, Arabidopsis thaliana landsberg
agaaaaaaataaaaagtaaatgcaattgaaacggagggaatattcgccggcgaatttccggtaaatgtctgagtggtttatcagtaggaatcctactttttcgacggcattcccaagtagttgtattacagttgtaaaacccaattttattctcctttcttcagaattcgattcgtatactcctcaatgcctatttaatagtttaaccaccaccatgcgtctctctaaacgccaactctcgcttcctctttctctctgcttctctactttctctcctcgttcccgtttccatcattttcctggaaaatatccagctcctcgaagagaatttctccacactactggttcgtcttccctcttcctcctactacatcgttttgcttgtttcagctaggtttcttcttcatcgtgcttgatttcttgttgtagaccgttttcgtgttcgttgtgctctctcttgttttcgtagtagactaatggtgttaatcgcatattcagtgacttcgctatgactggtttctatcttccgatggattttcgtgttagctaattttgatagtagcttagttttctggaaatcagagtttgttgttagtgaagaatcgtagatcgggaaggaggatgtggtaattagtaggtatctttaatcgtggaagttgcagtttctaggttttgcctggagcataccttggaagatactttaggatcaggacttaacgtggtgcacgctttgatccttttgatcgaggtaagatatgttagtggaatcatgcttgatcaccaaagctttaatggttgtatgactcgtgttgactaatttccaaatcacttatccactcgtagagaacgtgtcatcaggtagcttcgttttcttctgtgtatctaattttagcctaggtgggttctgactaaccagttgtttcttcctagattattttcaaatattcttattatctgtgctggatagagtttgtactattctctacgctaattgtattgtgtgttcaaaaaagctatatcatcatttgaagaacagaaaaaatgatgtttactttatttgataaactctcagggacaagccagctgtgttttaagagttcgatggaagatcagaaaccgagtgctc

SEQ ID NO: 141892 - DNA, 234 bp, Arabidopsis thaliana landsberg
tgatcacacaagttcagattttttttttaaaaatagtgtttttacaaacaaaattcctaacgattattttcatacattctgaaaccacaaattagaagaatactactaattgttcatcatatatgaacaaaatcattttctgggatcccttaaagcaaaacagaagaaaaagaaatattgctagtcatttttcctaggggtgatggtgtcatacatactcaccccagcagcatt

SEQ ID NO: 141893 - DNA, 533 bp, Arabidopsis thaliana landsberg
gtcaactcataatttaccctgcccttgtactaatctatgttaataagccttaaacctgcaacaaaatgtttatcgttgtacagacactgttctcaccgcattctcctgacaagctatgctttggtgttctgattgtggcatgtcctgattggcagctaggtctttggtttcatctgattctcctattatttactccaaagatttggcatcagtctttgtttgcctgattttccatattgaagcgccactgtcatcatcaagttggccttttgtaatggtcaaaagggctaaactctgtggagtcgcattggcatcttctgctatacaactcagatctttgctcttaacttcatcaatttcttgcttcagtatcttctagtgagcaaatgtccttcctgggggcatatcatggtcatgttttccctcgtatgtcgttataagcaacttcgcatcacaagatgacctttctacctgtttcttgaccgcacatccagaacttgaacatctatagtaactcctgattcagcagttac

SEQ ID NO: 141894 - DNA, 201 bp, Arabidopsis thaliana landsberg
tttatcaaccaatttactcaagggtcgttcattaatattatcttatgtagcataacaacttatgggtccatcccattttttaagactctaaaaaagtttaaaacaaaccaaagagaaaacattcgacttttcactattgcagtattttgacagacaacgatcttcagtactttgaaaagtggtttctgaactaattaaact

SEQ ID NO: 141895 - DNA, 164 bp, Arabidopsis thaliana landsberg
  unsure (1)..(164): unsure at all n locations
agaacaagcatatacttacagagnttcttcttattctactctcttcctccaccacctccttgcatgttcactagtctcgttcttggtaatgaactaaggagtcaagtttcagttgaagctgttgagacagaggaagaagttgaagatgaagatgaagataatag

SEQ ID NO: 141896 - DNA, 462 bp, Arabidopsis thaliana landsberg; identical to SEQ ID NO: 47045

SEQ ID NO: 141897 - DNA, 223 bp, Arabidopsis thaliana landsberg
aaaataattggcgtttcccaaattcgtttgtttctctcgatccgaaatatgttaagtttagttataagaggaaattacattacaaacatatacaaatttttagattaagacagatggagaagaaaccagacttgttacatccaaaaggatttgatttttcttctctttaagcaaacaccgacatcaaaatctatcaaccaacacatcaatactatttaaccat

SEQ ID NO: 141898 - DNA, 430 bp, Arabidopsis thaliana landsberg
ctgaaatctccttacctaacacacccttcctcacatacattgacatttgacacattctttgttatttctcaattagtattgtcctttaagtacataaaatgattgtttttgtaacaatgatgggtaatttatagtttacactaatgctgttagtttgttgccatctagggttcatctaaaataataataataaaaaaaaaaaatctagggttcatctttaggaaaaaagcatgtcgacaaaagagaatctaaatggtcgatgtgttcaatgtttagtgcctcatgggatttttcaaacgtagcactatatcaaagattcaaagtgtaacgtttaagacaaggaaaacaattgttagcataagaataactaagtttgtaataaactatatttaaatgcaaatatgcaatatagtccgatacgtcaatcgtt

SEQ ID NO: 141899 - DNA, 434 bp, Arabidopsis thaliana landsberg
tcatattccagcaaaacaatgttgcatagtatatatcatatatgtgaacattatctcattgtggcttgagattctaatctgctttttaaaattcattgcgactaacaaacatacctgacatttttcacatttgaccccacaacatttggaatgattaataatataacacaacttgcttatttatcagatcaaacctagacttctacactgatctttagcaggttaacacagatacagacacacatacataaggcaacagaaacaaaaaaaaaatggcgagttagtcttaagtgatagagagatttctgattctactgaacaaaagggtatcgagcaacgtagaattctcttacacgtgaagccccgtctctagcaagtataccttcaagatctccaataattctagccagccaaatctccaagtttctctgaac

SEQ ID NO: 141900 - DNA, 325 bp, Arabidopsis thaliana landsberg
ggcgagagagagtgactttttttgtttgcctttgttaatggcttgtgtgtgagattcattgaattttttgaaaattctgacgaataaaaaccatatctaccaatcacaaaccctagatttttgttatcttcttcatccgaagattctctttgatctgtgtctccttccttctgattctcccatttcatttcattgattcttttgattcgattctattcgagctcaattttgtagatcagaacccagaatcgaatttgggataacttgaacaatatccttggtaacttggtgatctgaatttgagtgaagaagacatcgaattcaa

SEQ ID NO: 141901 - DNA, 438 bp, Arabidopsis thaliana landsberg
gcattcttatcaacatgtatctcttggtaaaccttgggtgagttatggatcatgacaccagatgtgtgaatgctactaaccgatgacttcactgttgatatacatttgttttgctaatgttttagagctgcgacgtgggctcgtgtatcggtttggctgttcctcggagtggttgtttacattttctatgggagaagaaacagctctcttgtgaatgcagtttatgtctccactgctcatctccaggagattcgtcgcacttctggacattctttggcttaagtctacatgaaaccatcaatggaagctcaaggaagtgggagtttcctttgtaaaatatgttcaacaaaatctgtataataatatatttttgagattggattatcctgtgtaaatacaaagttcaatgccactgctcataggcattgtatttttttt

SEQ ID NO: 141902 - DNA, 108 bp, Arabidopsis thaliana landsberg
tcctctctcgctagggtttctcattccgatccataattctagatgtccgaggtattcttttgattgagctccgcttttaaccaaaccatcttagattcttgttttcat

SEQ ID NO: 141903 - DNA, 707 bp, Arabidopsis thaliana landsberg
gagtcatcatcatcatcatcaccaacatcctagtttgggttcattaaatatttttcatgaatctggaaaaaatgtgatcttgctggtgggttcgtttggtggtggttgtagtgttattttctttccttttaattctcattaaaatttttcttttgggttctccgagttattacggttaggatggtgatgcttggagggtgtggtttcattttcctaagatgagctaattgttttttcttctcattcttcttcttcgccttttggtttgtatagctcttcatgtctattctttttcaatagaacttgtgtacttttctcaatgtgttatgttatgtctaaatttttcctttttgtgaaaacaaacatcaatttggtgttctttttaaacctatttggctatcttctatgctatatggttttggtgtaatcataactccgcacaataaatatgcagttccgcaatttcttcccatcaattgcctgttttgtgagtgattctttcactctttcacaactttttatttttgcataacattgttatcaactcgagcgataataaatgagaggcactgattttattagaaagaaattcaggtccaaaagccagtgttttacatgacaacaaggaaacctaatactacaaactctaacaacatagatcttcctttaattcagaaaggtcaattgaaagagtttctctcccaaac

SEQ ID NO: 141904 - DNA, 685 bp, Arabidopsis thaliana landsberg
tgacaaaaagtaacaagattagaaaatggtaaatgaaagggaacaatatctacaaagaaaataaaagcttgaaaatcctaagaactatttccataattgtcttcaattgcggcaatgacggccccatggaaatacccgagaacttgaccccgatgcgatccgggtcttgacccgttcgaaatctgaatacagacaaggaatagtgatacctccttcgtggcaaaatccgtactctttttcggcttctcgaagcagctcaccgaacaaaggatggttaaagtaaacgatgggtaccaaaactctatgacagtcgccgtctttttgacccacgtagatagctaagtgtccccttggaaccgggtcggctttcttatgatcaacgggtatgtatgcggatcttctcgtagacctgcgtctgaaactttgcttgagacgttggccccaacttttgagtttggctaatggtctcatcagcatgcaagcttgctgggtcgagtgtatccggttgtatcctgaacgttggatccgggttttgcgaaagatccatcttgagactcgtctcccgattctaaaccctatgatcttcctcatcttcttatagctaactttaaaaaacagtttttgtcacaaaactacactttttgagagatctgagaggaaatagagattaagagagtgagacgag

SEQ ID NO: 141905 - DNA, 424 bp, Arabidopsis thaliana landsberg
tattgcaaataaagtagtctctaaaaagcatactcatgaaactaactatcgattctaatggatacaaaactcctctgctcagaaacataaagcaaccatgggaacaacattaatggaacaaaatccataaaatcgagaaatgatgaagtaaaaaaaaaaagcgaagggaaagggaagaagattacataggtattaagctgtctaacgaagctggagaaattattatgcttaaagttcttaggaagaagatcgcgagcgaactccggtggtttccaaacgataaaactgttgttattagcactccaagagacaatcgaatctgtattgtgatcatcaaccatatcataggtcttgctcagaaacggaggaggcgcgtttgaacttagaatcgccgcaggctgaggttgaggaaatgacttagtct

SEQ ID NO: 141906 - DNA, 538 bp, Arabidopsis thaliana landsberg
ctctaaagaaacagccatgaagaacaagcccaacaatttcaaggagaaacttgactcctgtcccaagcaaatgttattgccacagctttttctttttttctgtgctcatcactacatcaggcgataacgcgggctagatatgtaatcgctgtgggagaaaatggaaagaaacacaagaccaagttgttgaaccaggtgagtctacatgtgaatcaaaaatctttacctaggcttctttatttttttgatgtggttagtttatttcgaggttcaggctggtttagagtcatcatcagtcatcagtatagttggtctaagagttgaatttggagaatgcttattgatatcgacaccgtggttagctaacgatgttcctaacgtagatgttcaatcaaaccaatcaagttcttgattcacctgattccctgaagtctttggtcttcctacacttctctatttgttctatatataatatacgaattagtattataacatttggtaatcatatgaccatagtaaaaggttgtttggccgagtc

SEQ ID NO: 141907 - DNA, 403 bp, Arabidopsis thaliana landsberg
gttatgttgctcatgagcacctgcgtttaccgggaactccccaaaacccgtggtgttttgcggttctgaaaccgggactactggaaattcccccaaaccggtggtctttgacggttctgataccgggattactggtaatgccccaaacccagtggtgttttgtggtgctgaaaccgacactactggaaattccccaaaaccggtggtgtttgatggttctgaagccggggttactggtaatgccccaaacccagtgatgttttgtggttctgaaaccggcaccactggaaattccccaaacgcggtggtgtttggcggttctgtaaccgggactactggaatctccccaaagccggtggtgtttgacggctctgaacccggtactggaaatgccccaaaactg

SEQ ID NO: 141908 - DNA, 329 bp, Arabidopsis thaliana landsberg
ttgctcgctctctctctctctctctctctctctatctctctctctctctctctctctgcctagtctagtctttcttctgcacatcttctctctctctctatttccgcagacatcaattcccctttttgactaaaattccgcgacttgggctttgatccattcccagtgaatctcactgcttttctcacagaaaaaaatcactcctttttcctggattttgttttctcgactgatttggggaaaagctatggtggtctgattaatctctgtctgtctttggtgagatgggtttggatgctgttaaagctaaagggaattggaaatcggag

SEQ ID NO: 141909 - DNA, 217 bp, Arabidopsis thaliana landsberg
gggacccaaaaaaagggttaggtggatctctcatgaaatcggtggagctcccccatatcttttttaaatagctttcttcttttggccccttacccagagatagattcttatatactactgagaatcttcaatttctgcaacttttgtatctcttcctggtgagcccttctcttcctctcgccacttttttagggttcgggttttctttaaaatctga

SEQ ID NO: 141910 - DNA, 442 bp, Arabidopsis thaliana landsberg
gggaaatgcttagctaaaataacaccaagcagtgggcctccaaaagatgatgagagcagcagcagtaattgtatgggaaagaactcaaagcaaagaagaaacgctgtagctgaagctttggaagacataaccgctcttttctacgacgaagaacgcaatgagatatacacaggaaacagacacggccttgttcatgtgtggtccaattgatttcacatacatcgtcatcgttagctgctactactactactacgaatgtatcatttggtttccttcaattgtgtgtagcgataaatctttttaacttagtgtctttgagcagccatctgtgttgtaaaccatttgtgggcaagtgtgcgcgtcagaatgccagttgtgtacactaataccattgtacgtaacatttgggttttgacaattctatgaaagaccctttattcca

SEQ ID NO: 141911 - DNA, 352 bp, Arabidopsis thaliana landsberg
gcgataaggaaatatctaaccagaccggcccaaggagcgggcaaaatcagaaagcatttgatcttcaaactcttgggttcttctctgattgaaaatgagcttatcatcgccaaccaggtccgataaagttccaatttttgttctttcgattactgttatgccaattttagtactttgcttttgctcattctgttgtagacagtgcttgtagctcgtccagatgttactcctcgggattatcgtttccgattggatttggatcgaatcccatcaatgtgggattggtttgttacccaaaaagacacagtattgctgctcggaagttcgtagtggcttgctcctcctcctcttc

SEQ ID NO: 141912 - DNA, 692 bp, Arabidopsis thaliana landsberg
ttattattattcactctctcctcttctctccgccgaagtagtcacagttccggccaccaggtaaaatttttctttctcgttatgcagcgattttttctcttaacgattcttgcaaccctagactatgcccggaacttctgaatttagtatttgaaatctgtagcttacgttttttggtttagggcttttgctccatttctagtttctatgcatttgggaattagggtttactgtgttatctggagctcacatgccttttccttctgaccctggtttcaatgtgtgatctttccaaaggcaaagaagagagaaaacgaccctgactccaataatggctcctagttctaggtctccttcaccacgtacgaagagactgagaagagctcgaggagagaaggaaattgggagaagtagagagagagaagatgatggtagagaaagggagaagagaaacagtagggaaatggatagagatataggaagagatagggatagggagagaaaaggagaaggagaaagagatagggaagttggggataagagaagacgatcagggagagaggatactgaaaaaaggagaaggacaagaacagatgatgagagatactctagaggaagacatgagaggtctacttcaccgtcagataggagtcacaggagtagtaggcgttcacctgaaagagctattgccg

SEQ ID NO: 141913 - DNA, 134 bp, Arabidopsis thaliana landsberg
gttccgtgcaagcttcagcgtcaccaagtgaagttggtctctgttgtctattttctgattccctacacacttggtgtatgtaaaaaccatggggattatcatttctcaagttctaataaaattctctttttact

SEQ ID NO: 141914 - DNA, 222 bp, Arabidopsis thaliana landsberg
ttgaaactccaaaaggctaaggagaaagtagcccccaaggcttaagcttttatgttttattcttctctgttttggaattatggctatgttcaagtgataggacttggtgcagtcatgtgaggacatctatgttactcgaccaatttttaagctttgtattctgttatcagttcttaactttgtcgacaattctcttctcttcagttttggaattgttgaatt

SEQ ID NO: 141915 - DNA, 231 bp, Arabidopsis thaliana landsberg
cggaatttagttttgttataacataagtgatgttcttattattctgtgcaagaaatttgtattccacatagtatttcttttgaatatttgtattccacatagtattttattattgatttaatatataattttcaaataaaaatgatgagaaaattcaaatattttcataatctatgtaatttttttaatgtgtacatgtgcaaaactcttaactacaaataaattgatttt

SEQ ID NO: 141916 - DNA, 249 bp, Arabidopsis thaliana landsberg
tttgttttagtgtctctagtttcgatttcttgtgggtttaatgtgatctgaatcctattttcttctaacggtttcttttctaaattctcagatctaaatctgtaaagtctaaatcttttcctcttccggttttgttgcttgtttgtctccttcgtctgcagtttcaattctggccgttccaactatggcagaggcaggttcttttctatccttcaacgcctcagatgcagatctctctccattgaagat

SEQ ID NO: 141917 - DNA, 222 bp, Arabidopsis thaliana landsberg
gaagatgatttttcttcaggaagaaaagactgaagattctttttcaactttttaactagcttgaccattgttagggctatctatctgttttctgttgttttcttgttgttcacgttttctttgtggtttgatgatatgtattcgtaaactaggccttgggcgttttcaatgtaatggcccataaaatattttctttatcaaaattacccgatttgaatcttt

SEQ ID NO: 141918 - DNA, 719 bp, Arabidopsis thaliana landsberg
gtctgtgtgtggcgaggtgtaccgtctgaggctactgggcgattatcatcatccaactcgcatgggcttcgtggagtttgtcatggtaagcaaatacttctgttatctctctttcttccaaccttccatttgtcaactataacgcttatgcattttcattagttaagtatgatcttttcactcttccgcaggctgaaagcgcgatagcggctctcaactgcagtggtgtccttcttggttctttaccgataaggtccaagaacaaaccaacacttactctttaacattctctctaaattgatcatgaatctgaacattgatcgtactttggtggttggattttgcagggtgagtccatcaaagacaccggttcgttcccgtgctatcccgcgacatcaaatgcattaaccgtagctacaagttttatatatatttctgctcctcacagacatgtaaagaatgtttgtctgaaacttctggttcttctgttttcccgtatgtaatgctagaagcttgatgatgcttctgttgccttttgcttttgggtaaatctcttagggagagttttttcgatttgggttcctacgtttagtagtttacacagagcagaagagtaaaacactgagagaggcttttgaagattgtctctgttttttagttatttatactcttacccctgaagttattagaaacttgctttggtgcttaaaagtttcttc

SEQ ID NO: 141919 - DNA, 593 bp, Arabidopsis thaliana landsberg
tctgatccccaacccgaacttacgtctacatgtacctctcatagttgcggctggaagccttactctcattccaatgactttgctgccaacgcgttcctccttctcatcatcctcttctgttctttcatatgcgtcctctctctccacgctgctatccgttgttgcctccgtccagtcctccaacatgtccctaagcccgacccggaccttgaggccacccatccagacgctcccccgacacttgtctactccccgggcctaaacctagcaggcaatgaagcagagtgcatcatttgtttgtctgaattccaagacggtgacaccttacgcgtgttggagagatgcaaacatggattccacgtttattgcatccagaagtggctctcctcatcccattcttcttgtcccacttgccggacaaacatcttctcctccccacctcaacttcactcacaaagcttaccactaacgagtacaccttagtcagatggtagctagttcctggtcttgcccactttttttttatctttattttctttacaacttcacaccactatcatgttttacaagttagtttattttttacctttctc

SEQ ID NO: 141920 - DNA, 254 bp, Arabidopsis thaliana landsberg
ttttcagcttttggctcattcgccactttaggagctgcaattggtgcactgttctgcggtaatctggcaatggtcattggcagaagaggggtaattaatttaaccgtttcacctttcatattcgtaaatttaccattcttctaatttttttggttctttcgtgactataattttcgtatagatgatgcttataataatatttttgctatttatgatataatagacaatgtgggtctccgatttcctatgcatca

SEQ ID NO: 141921 - DNA, 761 bp, Arabidopsis thaliana landsberg
ctcctgcattggagaaactaatttaaggtaagatttggctacttagatggtatgcagcagtttcataaggagtttcattgttcaagctggttgttgtattggggtgttggctcaaggaagacatcagtttattcatattaagaagactttgagtgtgggttttggatttagaactagtgtgattggatttagaacaaccagtggaattggatttagaactagtgcgaagatgatggttgatacttctgctggagagaaacgtatatccttagttgatatgccgcctgagaaagttgatgatggtggatacatcggtggtgggtggaaaaagtgagttgtttctcatttttttagattccgtgtctttgtatcgttgtgctgaatgtagcaaatgccttaggtatatatatagggctgttaaaatattacttgttttgaagatatcaatttatatttaaagtgtgaaatgctagcaagattgtcatttctttcaccaagttattttgttatacggatgattatgtcatgtaagaaactaagttccattatacgttgaagttttatattgttatgtaagcaatcgttaattgtctatatctttggatcaatgtgaaagtattggtttctacttttttcttttgtttttaagtggtctttaatatatgttacgtgcaatgacagtgatgatggaagtttgagctgtgggtactgtagtttcagagggaaaagatctacgatggaagattctatgatatcaaagc

SEQ ID NO: 141922 - DNA, 544 bp, Arabidopsis thaliana landsberg
tagatactcaacaaactcagaactagaattttctaatcttcactcagcgatatttttggctcatactcgaaacaaatggcttctacactctcatttgctgcatcggctctatgttcacctcttgctccatctccttctgtctcatcgaagtccgctacaccgttctcggtttcgttcccacggaagatccctagccggatcagggctcaagaccagagagaaaactccattgatgttgttcagcaaggacaacaaaaagggaaccaaggatcaagtgtcgaaaaaagacctcaacaacgcttaaccatggacgtctctcctttcggtacgttcaactaactaaacggacttcacttgtataaataaaaactacatcctctgcttattacttaaaacattgctctgtttttatgaactcagcttttgtcaatcgaaaactctcgtcctcggctttgaactgagacaatgttctgttataatctatccacaggattgttggatcctttgtcaccaatgagggcgatgcgacaaatgttagatctat

SEQ ID NO: 141923 - DNA, 283 bp, Arabidopsis thaliana landsberg
gggcctgcgaaaatgagtgagagagaacatctcgtatacagttgtttcttataagaacaaggagattagcgaaaaaactcaaaagaggaacagagttagagagagagagagagagagaaataaagagagaagagaggtaaaagatgaaggtgcaggagggtttgttcttggtggctattttcttctcccttgcgtgtacgcagctggggaaggggcaacatcaacctggtgagaattgccaaaataaatgtggcaacatcacaatagagtacccttttggcat

SEQ ID NO: 141924 - DNA, 414 bp, Arabidopsis thaliana landsberg
cgactatgatacgactattggacgactattttacgacgactttacgacgacattttgtttccaaataagaatttggtcttatcttgattttttgttggttggtcatcgattatgagaattcggtttgtttgttgtttgaaatgctataaagtattacaaaaagacaattattattgaaaatcctatcaaatacataaaacacaacttacacttatgttcaaagttctaaaacacacacacacacattattgttcaaagttcaagggaaaagggactgaaatctaaacctattgatcattctgtggagtagctggtagaggctctgtggttgtcgaagattgagaggccatgaagtcaaggaattgcggatctgtttgtcggagatacttctccactaaggacaagtgttcgagc

SEQ ID NO: 141925 - DNA, 374 bp, Arabidopsis thaliana landsberg
cataaatcatatcggcccatgaaaccaagtgtgtgtacttatgtctgtactctttgaccatttcactttcagtgtgattcatgcgtctatagattcacactcgggatttcattcaaagtccatagataatttaaagaatcttaaactaaaagttgacaaaacaaagcgataactagagaacagagaaggtcagatagaaagctaaccagtaactaaaccaaattaaattttaacagatatcttatgatcttggaataggccactacctctcagtttagcaaagcagatgtcatcaaagtttccttgccgatctggcatgatactcatgtttcaggaggttggctcttaacagcatcgccctgacatctctatcg

SEQ ID NO: 141926 - DNA, 171 bp, Arabidopsis thaliana landsberg
ataaaactttggttcctccgaatttcgagttcttgttcttcccaaggcccctacttcggccctagcatcaaccattgtcgttttaaagctccaggttttcatggccaagaaagaagtaactatcgttgagatcttctgaaattaatcagtctcgaagtctctggagattgt

SEQ ID NO: 141927 - DNA, 342 bp, Arabidopsis thaliana landsberg
caataatataatggtctcaaaactgatgtctctatcattgacgctcatcttcgtcctcctcgtatctaccgtatccgtgaactcgacaccaagaaacctctcgcaggctgctgaaaacaaaggagtatggtgcatagcgggtgacaaagcgacagataagcaactgcaagcgaatatagattgggtttgcagcgacgaaggaggattccgtgactgtggagcgctcaattccggtggaccttgctttgaaccaaacacggtaagagatcacgcgtcgttcgcaatgaacttgtattaccagaaccttggtgccaccaaggaacaatgcaatttccataacac

SEQ ID NO: 141928 - DNA, 311 bp, Arabidopsis thaliana landsberg
tgtcttccaaacatctcttacatcagttatcatctattcatatgtgtccaaaatatcttttctttacctaatttttttaggaaacgagaaaactcacaatcttttcttcttcattttcctctgtcatttcagtcttactccgccgtactaaagccttgaacatcgttaacgctgatatcaaagcaatctcccagtgctcagagctgttaagtttcacatttatcttccccattttcctattgttcatgtttatgttgacgtctatgttcgtgccccgggctggtctaaactgagtctgtaaaccatagttc

SEQ ID NO: 141929 - DNA, 247 bp, Arabidopsis thaliana landsberg
atccaaacaaagtcgataacttcattcaaatcaaatgcacgtatgcaatgagtcatcaaatatgttgataataagaacatttgactagagtaattcattgcctacaaaagcttatgttcccctccccatatcctaacgattgcgggtccaacaaatcccgatgcagaagaaaaggaaaagcagaaagcatatgaattgtaagttattgagattgacgggaagagaagagagcaccattcattgttcc

SEQ ID NO: 141930 - DNA, 261 bp, Arabidopsis thaliana landsberg
ggaacaagaaagtttgtaatcactagaataagaataagctgtatatattacaaaaacaactgattaaaagaaaacaacatcaacaacaaggataacatcaaacgacagtaaaagaataacaaacttagacaaaaaaaagaataaaaaacattacaagtttacaacacataatatgcaaacaatagatagatggtatagtggtcatgtgttgtgtggcagtagctagctatagagcttaattagcttctcatttggaaggtg

SEQ ID NO: 141931 - DNA, 229 bp, Arabidopsis thaliana landsberg
gtgacacttgtgaagatggtgaatgaagctactgcgactatccctaattgggacactgctctaactcacatccacacacaaaacacaaaccatagggacaaatccatacagcaacaatattttgcctaatttttttttccttctccctttacttcccttcttgtctgttttttcttgtaatggttaaattatgaacttgagtagtaaattacaaaattatttgtttgac

SEQ ID NO: 141932 - DNA, 271 bp, Arabidopsis thaliana landsberg
ccttaaagatggcgctctggtttaaacgcagtcaatttttacagagtcaataatagagaaaagcaaccacaagattccagaagagaaaacagtgaaatatccttttcataacataaaataaggttttgcataacaatcataaaagtcatgtcccacgtttttttatttatagagacattagtagacgagagcaaactctaagcgtccctcttatcatcaggacaacaatccacttcaagatgatctttaaccaggaggccagttcatttgg

SEQ ID NO: 141933 - DNA, 492 bp, Arabidopsis thaliana landsberg
aaaacaaaaaaaaaaaacttacaccaaaacgatgtctggaggtgtcggtccaacgtacaacgacataaccttacccaaagaagaagaagaagaacatcaaacccaatccacctcaacagtatcatccaccggaaaacccgccggattcttctcattccgacaactaaacatcctcgcaataatcatcgttctctccgcaagtggtctcgtaacaatccaagatttcatattcacgatcctcactctcatctacttcttcttcctctcgaaacttatcttcccaccacacaacaatccaaaccgagacgctcctctcacaagctccacaaacaaaatcttccgtatctatgttacagcggcggggatcgtcgggcttatcattccgatctgttacatcttcgaaggaatcgttgaggatgataagaacggtgttagcgcagctgcaccgcacgtgtttcttttagcgagtcagatttttatggaaggattagc

SEQ ID NO: 141934 - DNA, 411 bp, Arabidopsis thaliana landsberg
gaaaaggatctttgaagtcgcccgaatactttgtttaaccggagctctgtctttgactctacgcttctctctcttcttcttccttcttcgtcttcttaatcgctttctgctctgtttttctcgttcatcaagctacatctactagctctctcagtgattgatttctcacagtttcatcgatttccatgcgtttaagacctaaaaggtaactgggtttgctaaagtttgttactttgaatggtttttatagtttctctgttcgaatctgaagtgggttgttgtgtttttgctggttattgaaacaggacttgttctggggtaaaggacttttcttgttcttgagagagttcattttgaggcttttctgggaattttgagaggttttttagggtttaagggggtttggttttg

SEQ ID NO: 141935 - DNA, 1457 bp, Arabidopsis thaliana landsberg
gtcaaacactaaacacaaagatctagcttttgctttaatcttcaagaaacaatgaagcagaggagtttgttttcagtcctctgttttttcttcataagctttggtgttgcttcagtttcagcacaaacatgcacgacggacaaggggactttcagacccaacggtacttacgacgttaatcgccgtctcatcctctcttctcttccttcaaatgtcacggaccaagacggcttatactacaacggttccataggacaacaaccgaaccgtgtctacgcaatagggatgtgcatcccaggatcaacttcagaagactgttctgattgtatcaagaaagagtctgaattttttttaaagaattgtccgaaccaaacagaggcgtattcatggccaggtgagccaacgctttgctatgtgcgctactccaacacttctttctcaggatctgctgatctgaacccgcgaaatttgctcaccaacactggagacctagactcaaatctaacagagtttacgaaaatatgggaaggattaatgggtcgtatgatttctgcagcttccacagcaaaaagcacaccttcttccagtgataaccattactcagctgattcagcagtcttgacacctctcctgaatatatatgcattgatgcaatgcacgccggatctttcctccggtgattgtgaaaactgtctgcgacaaagcgcaattgactatcagtcgtgctgtagccagaagcgaggaggtgttgttatgcggccaagctgctttttgcggtgggatttgtatacatattctaacgcttttgataatcttacggtggcttctcctcctccagaatctcctgtgactgtgccacaacctgcaggtgatcaggacaacccgaccaacaatggttagtcttccacctgagaaaactatcattgtaacaaaaaaacttaaatatatgacattgtttttctatgtgttgtgagaagatagcaaaggaatctcagctggagttgttgtggcgatcaccgttcccactgttattgccatcttgatactgctggttttaggatttgttcttttccggagaagaaaatccaaccaaagaactaagactgaatgttagtttctttgtgttttacctctttattgtttcctttcgttatcagcatgtatactcccgtagccaagatgggaaacacgaaactaatacacccattctttgcagctgaaagtgatatttcaactacagattcattggtatacgattttaagacaattgaagccgcaactaacaagttttcaacaagtaataagctcggtgaaggtggattcggtgcggtttacaaggtaacaaggtctctgttttccattttttctaagttcatattggtttatggaaataaccaacaatgtttgtttcattcattgtacgtagggtaagctttctaacggaactgatgtagctg

SEQ ID NO: 141936 - DNA, 395 bp, Arabidopsis thaliana landsberg
  unsure (1)..(395): unsure at all n locations
atcgcttctacttcactctcaccttcctcctattctctctctctttctatgtcaagttagcttagccgtctcaccagaaagctaaccttacctcacaaacattgattgtgttacactaatctcttaaatagagagccgtaatttctacacactctgatcgctagatggaaacggagatatcaggaatggataatccagctatgaccttggacgaggtttccatggaacgcaacaagagctnnnnnnnnnnnnnnnnnnnnnnnnattatctatctctctgttactagttcttccttgtccacattttgttgttggttctgatcagttagattctgtagaaattaagagctatgatcacaataaacttggtttagttgaggcagatccatgatctc

SEQ ID NO: 141937 - DNA, 105 bp, Arabidopsis thaliana landsberg
cttgtattgctgctcgattttataaacatcaggagctagttctcgacaaacttcacaccaatatgcatagaactcaacaacagtcggcttcccattcgataacgc

SEQ ID NO: 141938 - DNA, 362 bp, Arabidopsis thaliana landsberg
gccattactggcagctctccttataacagcacgcaacatcattggttccgaatctctgttttttttgaagaacacaggtcggaacaattgatcagcaaaatgattaaaaatcaaaaaggaaggattttttcatcctcatctatagtttgtcagctaaattatatttgaagaactttcaaaccaaagaacaaaactcagattcatatgttttttccgattcagatattttctcgctaccgaaaacaaaaatgaatcaagaaagagcgaaaataaaaaaatcaagcctcaaggctgtggaaacccagaaggactaatcaaaatgttagggtttggaattggagaatcgagaagatcggtaaacg

SEQ ID NO: 141939 - DNA, 603 bp, Arabidopsis thaliana landsberg
tctttttttttcgtcttaaaaacaagatccagatttctgaaagatccattcactacaaagaaagaaatgctgtctacaactcttagtggtaactatggcttccctctgtgcatctctgggatcactcagcaattaagtctgtccaaagagtaatatttctctgtttcacttatgctctctgtcttgagatcttctctgtttatttgacttgtctctttttctctctctctgtggatgttgaagaatggcagatcatgacaagagaaggaaggtgatacagaggagaaggagatcagaaggtaaacatgagtacaagagccatggtgaagaagatgtggagaggcttcaagagaatgaagatgttagagatctagttgctttactacaagatctaggcttgtggagcttttcttctcacacagccaaagctgcttagtgtttttacttttattacaagatgtttgaggtttgtggagcttttcttccccacacagcaaaagctgctgcttagtgtttaagaaatccaaaagccttttcattattagatctcactgagtttatgtttcttgtagaactgcagatcacagaatctttagctggaaa

SEQ ID NO: 141940 - DNA, 717 bp, Arabidopsis thaliana landsberg
  unsure (1)..(717): unsure at all n locations
gtctgtatcttntgagctctccaaaggtaaaaacactcagagatttgatttgtttttttcggtctttaccttggatacgtcattctcagatggtagcgaatttgtagatcttaaggcttgaatctatttcatatgatcaattacttatagatgtgatgatgatgcaactctttctttatttactgctatgagattcaatcaattttttatttttatttttgtgtattccatgtttttgatgttatactcatgtctggatttcgtcaaagttattttcttttagtgattttggtaaagaaacttgttcctgacgtatgaacctaattgtgttggactatgtgctccatcttcatagaaaatgatgttgaaagtgtagattggtgggtgatttttaacaagttttgtctaagtctgataccaagcttctcgtattgttaattgtgtgtggtgttacagatgtttgacgaccaagacctcggcttctttgccaattttctggggattttcatcttcataatggtcattgcataccatttcgtggtggcagagcctaaattcgaatgagaatgaggtttcatctttgttagtttctacaaaaaaaaaacttataaatgtgttggaatcaatatgtctttagcattctataggtcgtgatgtttcgccagtagatgagtaatcaatgtattttgacaatgtggttttggatggattaagagt

SEQ ID NO: 141941 - DNA, 1651 bp, Arabidopsis thaliana landsberg
aaagttcatcgtttctctcgaaaacccagaaatgtttcttcaggttaccggcacggcgactccggctatgcctgcggtagtgtttctcaattcatggagacgaccacttagtattcctctccggagcgtaaaaaccttcaagcctctagcattcttcgatctcaaaggaggcaaagggtatacacatctctctactttcatattttgcatctctaacgaaatcggattccgtcgttgtgaaattgagttttcggattcagtgttgtcgagattctatatctgattcagtgatctaatgattctgattgaaaatcttcgctattgtacagaatgagtgagttccatgaggttgaactcaaagttcgtgattatgaattggatcagtttggtgttgtgaacaatgctgtttacgcaaactactgtcaacacggttagttttcaatgttgctgcttctgattgttgaaagtgttcatacatttgtgaatttagttgataaaatctgaactctgcatgatcaaagttacttctttacttagtttgacagggactttttttgtgaatgtggttgagtagaatttagggctttggattaaatgtgacaagattttgctagtaagtttagagtcttgctagtaattcagttagtttgtgatgttgctgcttcagattgtgtacttttctattgttaaagaggaagtttcagatcgtgttcttgacagaatctggaatgcttgatcaatagttactccttttctgagtctaattggacaattttttgaatgtggctgactagaacttgaggtgatgttgctagtaattcggttgctatgttgctgcttcagattgtgtcaatttctatcgtgaaagagtagtttcatcagatcgtattctttgacagaacctggactgcatgatcaatagtcagctactccttttctgactctagttggaaaccttttcatacattttctgaatgtgactggaagaatgaaatgtgttaagatcttgttcgttaagtttagagtcttgcttttagcattcatcttcagccatatattgggaagtggatggctttgtggtatggctcagtgtgtgttacttataagatatatctcattctgttgcttgttaatatatttctactaaaggtcgacatgagtttctagagagtatcggtatcaactgcgacgaagtagcacgttctggggaagccttagcaatttcagagttgacaatgaagttcctttcacctttacgtgtaataataacgtccctcttcttcctcaacttagttcctgtcctcacattatgccatatattcatttcatctctttgaacagagcggagacaaattcgtggtgaaagcgaggatatcggggacatctgctgcgcgtatttacttcgatcatttcatctttaaacttccaaatcaagaggttaatattctcactaagccttcgtgttttcgttgataagtttctaacttgtgaattactaactaatttcgaatgcttttgattgatatatataaaacagcctatattggaggcaaaaggaatagctgtgtggctcgacaacaagtaccgtcctgttcgcatcccatcttctatacgttctaaatttgttcacttcctacgccaagacgacgcg

SEQ ID NO: 141942 - DNA, 341 bp, Arabidopsis thaliana landsberg
  unsure (1)..(341): unsure at all n locations
tttcttctatatgattcttaaggcagacaagtatgaaataaagacaacaagacattgtagcttgggagaacatattgctgtgaagagtttacaaaataaaaataaagaccaaaactatgacagaaataacaagcaaaatgcttctttttttttgtaaccctatataaagataaacgtatcatcagttaaagaatgccgagaaagacagaaacacatcgatccgaggttacctcttctccctattttttcctctttccggnttgtttgttttcatcgttctctctttagagaccaaaattgcacatctgcacaaactccatttcgttatcaacatatttagt

SEQ ID NO: 141943 - DNA, 1488 bp, Arabidopsis thaliana landsberg
gcaatatctgacgtttactgtgcatgattgttcactgctccgccgtcaatttagattgataaagtttgatacttgtgttgcaatcattgtggaattcaaactcaatgtcactttccgcttttgagcattgttgtctgttttcgcgtatccaaaatctgactagtatctagtgtttttattatattttcgtgtcccttacttttggcttatccttatctggtttctctgttttattttcattttcgtttggataattaagaccaaaatagtcggtaatgtatcgctatagctaggaataattttatcatcaattagtgtgttaatccggcttaatggtttctaagtcatcacatagtgtcttcttctctgtatcttcttttttactagtaacgtgttcaattggatctaaagtaagacttcttaatttaaccattaatgtctttcttgaatatgttatacttttatctaacaattttattttttggttcatgaacctagattggaacatcagtcacgactgggacacaagattctggagaactcaagaagaagtttgatatttttgtaagtctacttgttgacaataaacagtttggctgtcctttatttgattaaagtattcgattctacttgcttatgtttggtttttgtatgtaaatgatttcagcaagagaaagtgaaagaaattgtgaaggtgttgaaggatggagttacaagtgagaatcaagcagtggtgcaagccataaaagatctggaagcactaacagtgacggagaccgttgagccacaagctatggaagaagtgcagccagaggagactgcagcaccacagactgaagctcaacaaactgaagctgctgagacacaaggaggacaagaagaaggacaagaaagagaaggagaaacacagacccagacagaagcagaggcaatgcaagaagctctgttctgaagataaagccttgacataaaaagctagcaagtggtgggtttacttgttgtgtgttacatgaaatttttaatcttataagggtgtttgcaggagaaaaacaaaaaaagaacaatgtgatgaactgatgatgatgattgtgtctctaaccaaacaacaaggagaggtagggtaatgtctgtaaagtgaattaggatgttaccattgttgatgcttcccatctctctccatcgtccatatctgtgtaggcagctttgttctttgttccctcgtgttttttttagactgttgtgtctcttattctattttgtctccttaggctttttaggagttgttgttgatgtttatcaaaaacgcttatgtaatttttatgaccacttctactttttatgatggtttcttcaagtctcttacgttatgtagttagaaaaccattaaataaaagttgcttatgtcagttgctctgttttaatttgaaatccggttttaattttaagtgtacttattgcagaaattaggtagaaggtatagaacggttt

SEQ ID NO: 141944 - DNA, 351 bp, Arabidopsis thaliana landsberg
aatgagaaagaagacaataaaacggaaaatttgtcttttgtgatcattacaaatttcaagaaaaataaaagtttgaatctcaaaaaaagagctgaagactaacccgaatagtttagcaagcaatcctctgtgactgtgaaacttgtacaaataaaaaaaaaaactatatatattgtagaagaacaaatagtgacgatcgatttgattgaacgccaagcaattgatatgtgaaaagaaagaccagtggtggcttaatggttgagatgaccactctgctctctcttgtgacagagcacgagaagaccacaggctctgctattccttaattgtacaaaccttcattcacccatt

SEQ ID NO: 141945 - DNA, 807 bp, Arabidopsis thaliana landsberg
acgtgaaccacctcaccaccagacacacaaaaagacgagaccgatcggcgatcagtagacttaaccaaactcgcggtgaaacagtcggaatccaccgctataaggaacgatgatgatctcccaattcttcgtcttatctcagcgaggagataacatcgtcttccgtgactgtaagctctctttctcgatctgatcctctctgcttcttcctgttttgctttttctcttcagagtcgagtcttatgtcactgtttcatgagaattttccattgaaatcttctctaagctcattgatctgtttgatctaccaacatttcttatccgatgacaaattatgttgagctgaatttccaaatcagattgtacaaatatagcaaaactattcaattagtttgggaagagtatctgtatgtaatgtagtagaagaaagctatttgttttgagattatacgatttggttggatccaatacaagtttcaagatgtgtaacgttttattgctacagaccgggctgaggtacccaaaggaagtacagagacattcttccgtaaagtcaagttctggaaggaggatggcaatgcagaggcgccacctatctttgtaggtattatactttctgtttggttgtgagctgtaatgatttcatctaacttattttttgtgcttatagaatgtcgatggcgtgaactacttccatgtcaaggttgttggtctatattttgttgcgacaacgagagttaacgtgtcaccctctcttgttttggagcttctacaaaggattgctcgtgttattaaggattatccttg

SEQ ID NO: 141946 - DNA, 377 bp, Arabidopsis thaliana landsberg
ccctcctggattaagtctttagcgtaaccatgacaatgaaactaaaacaagtgaagttaacatcttaattttgtagcaaacagcaataacatccaaatctacgttaagttccacagcaaatatacaaaaaactgtgctaggatttgtgaagacgtgaacttgatgtaaagaggcaattataagccataaagggcatggcacgttaccggtgcatcaaacaagtcctgctttgaacacatttggaggagattgaccaatcgttcagccagagcatcaaggttttggaacaagaaatctttgacctgatgtgtgtaaactgtagcttaaaactcggtgtcaaaacaagtcatgaagatctttgagaccatggttcttgc

SEQ ID NO: 141947 - DNA, 242 bp, Arabidopsis thaliana landsberg
cgggcctgcgaaaatgagtgaagagaacatttcatatacagttgtttctaataagaaaaaggagattagcgaaaactcaaaacaggaacaaagttaaaagagtgagagagaaagaaagagagaagatgaaggtacaggagggtttgttcgtggtggctgttttctaccttgcttatacgcaacaagtcaaggggcaacctcgcaaggagtgccaaactagatgtggcaatgtcgcagttgag

SEQ ID NO: 141948 - DNA, 563 bp, Arabidopsis thaliana landsberg
cagcaagggtatccgaaattggacgcacattgcaaaccactttattcttggccgcaaaactatttactctattttttcttcaaaattcgaaatcataatgaaatggcaaccacaaaagaaacatgttctgttttttttttctacataggagtcaccgaaatatgcaaaagtgaatgggtataaaatgatggtttgaataatagtggttggtattaatatatatatacttagcttaaaataaagaagggttaatttattgaatgaagttgaggagtagtggatctgcgccaaatgagctcaagctcacgagcgaactccttctgcctcccaacaacaatggtgatgtggtctttgtcggggacgacgtggatccttgcacgtggcactttcctcttgacgccgtagctgcactccacggggatcagctcgtccctaccgccgtggaagactgcgacctcacagtccacgttgtcacggacatggtccaaataagcctctactttgctccccgatccgaaaatgatgttgtgtagtgtgtgccatgacgcgttatgtgtgtgaca

SEQ ID NO: 141949 - DNA, 311 bp, Arabidopsis thaliana landsberg
agataataatttgcattcattcatagattagtaccaagtggttacaatctaacattatagtcttataaaacacgattatattaatactatttcataattaaaaccctaaggcacatctatacaacgatcatcttagaaaaatcaggccccaaaatccataattaattcttattagcagataaaatacgagattagtaaataaaataatatgaacacactaagatcccttcctctttttcttggaagatatccaaaaaagccaatgagacttcgaaatacggtcagatttttttctttacatgagcaggtca

SEQ ID NO: 141950 - DNA, 444 bp, Arabidopsis thaliana landsberg
gccattatgattaggtcaaaaatacacatccactcaaattatagaaaagcgctttcattcagacaaaattgtaaaaggtgactgtgagtgagaaatcaagagagctttctggagaggttaattaagccacttccagtgcacttgagtataacagtcccagtcaatggatcaggtttgatggcaaacttaactcccagaaactccttaatgttcctcaacgtctccactgcatatggagataatgttccaactcgaacctttgacacgtcttgttcagataacgcacacagtagaaacaacaatccctgtaaaaaacctcagagaatcaacaacacacccacttaaagtctgatcgatcttggtgtctatggttaatgttttcaaattttaaaacgtacctggtgtgttgaatcaacaactccacctttttcaatctcttgaaga

SEQ ID NO: 141951 - DNA, 431 bp, Arabidopsis thaliana landsberg
cacaacaaatttcggtagcatcagatatttgcaagacgtagatttaaatgttatatattgccaaaagaaacattggagatcacatcacactgcatcaacatcaagccagtcgtttgattttttcttctcttttacctcttttagctgaacccaatctggtgattttgtgtctgaagaatcagaaccagagttagtaacgttcttgtaactcaccttcacgtctccttcattatcgtcgtcttcttctagatcactgaatgatacatcttcttcgtctccaccaaaagaatgatttgtggttgatcttcctccgatggcgctaacagatgacgtctcttcatcgttcaaccaatcatctgcatcgtctgcttcttcgtcatccacttgcacattgataaatctagatgaagaagcagttgatgtgcttgttt

SEQ ID NO: 141952 - DNA, 2015 bp, Arabidopsis thaliana landsberg
gagtgagagaagaagatcgatcaatcaatcatcaaactctctgtgtgccacatgcattaaaaatgttgacttgttcaataaaggtaaagtaagatcaatccggcgaatcttctttcgttttccggcaccgatctcggtggatctccgattcacatggcggcggataatgcttatctgatgcagtttgttgacgaaacctctttttacaaccgaatcgttctgagtcatcttttgccggcgaatctatgggaacccttacctcattttctccagacatggctccgaaattacctcgccggaaccctactatacttcatctccggtttcctctggtgcttctacatctattaccttaaaatcaacgtttaccttcccaaaggtctcgactttcacttttgtattcactattgcttaatcgctttctatgttatcgatttttcaatttaaggaagagggtttcttcgtgtactgtacagtaatttggatttgatgtggatagttcatgtttgcatttattgattatttgtgcatattctccatctaagggattgaacagttagtggcttatataagtttttgtgcaaccaatgagaagtcgtacatctttgaagttgaattttctacttgccatttaagtccacttaaattgtttgttgaagtgattgtctactttcagacacattctttttctgcttctctgagactctgtcttagtttgaaatcttttttggtctgttttgcttcagatgcaattcctacaataaaggctatgcgtttgcaaatgtttgtggcaatgaaggctatgccatggtacactcttcttccaactgtctccgagagtatgattgaacgtggttggaccaaatgttttgctagcataggcgaattcggttggattctgtattttgtttacatcgccatctatcttgttttcgttgagtttggtatttattggatgcacagagagcttcatgacattaagcctctctataagtatctccatgccacccatcatatctacaacaagcagaatacactctctccatttgccggtaagtgttttcagtttgttcttctttagttcttgtaaaagattggtagcatttagtttcttaccagaaaagactttgtcagcagctgcttgtactccaaatcacattttgcattccttatccataaagtaaccagaaaggctagaattatataaatgtcagctgcattacttcacatatgtcagagagacttctgacttaaccagagtttagatctttgtgtttctcttctggtctcggactgattggaaatgacgagaagttcttttatctacttccctggagtgtatcttggttaatccaaggatgtgacatctaatattacttgtaacttccttacgtttttgtttacagggcttgcatttcacccagtagacgggatacttcaggctgtaccgcatgtgatagcgctgtttatagtgccaattcatttcacaactcatataggtcttttgttcatggaagcgatatggacggcgaacatccatgactgcatccatggcaacatctggccagttatgggtgcaggatcccatgccatacaccatacaacatacaagcataactatggtcattataccatatggatggactggatgtttggctctcttatggttcctttagcagaaaaagacagtttcaaggagaaagaaaagtgagaatgttcaatgctcacatgtattcttcatatgttgctcttctcgtgactcttattaaaacctttctaatcactttgttggaattaaaaacatgactgcataatttgatgcaaagtttcagacttttattgctaaaaatctctgatgattattaacctcaattatataattgctggatgaagagtttcaaatttggactaaatctgaagggtttaataggtcagttgcggtgtcagttttaccacagaccacagtaatctttgaatcttccaaacttgtaaaataaataattatactcatatgg

SEQ ID NO: 141953 - DNA, 262 bp, Arabidopsis thaliana landsberg
cttcactaaaaaagaatcgacacacaaaaagagagagtttataaaatacacgataatatcaaagttaaacacacaccaaccaagtaaacaagatacaacacaattggaatctttcttctttgacaaaaaaaaaaggaatctctctctttctctgattctctcatgtccatgcaacaagaaacgtctcacatgacggcggctccacagaccaacggccatcaaatcttccctgagattgacatgtccgccggcgattcctccg

SEQ ID NO: 141954 - DNA, 400 bp, Arabidopsis thaliana landsberg
cgacgagattccgagcaacatgggtggagtaagtgaaagtgattcttatcgccataactacgaatttgatgaagaacttgaacaagtaagggtaaatcgaagagtcgtaaagcaacaaactttcagctaaagagagacttagaagaacaagtaacccatttctaatcaaacgatcagtgaattgtaaacagaatctacgaattgaaaggtcggactaagtccgacgagtcaaccggaggaaggtgaattcactccggcgagattgattggattcaggtgagaagcaaaaaaccgtgaaaggtggagactttagagagagaaagatctgggtatgcctaaagagaagatcttttagtttgagattagttgtgcaatcaaaggaaaggaaacttcttggcga

SEQ ID NO: 141955 - DNA, 183 bp, Arabidopsis thaliana landsberg
gatgttaatgttggtgagagtttcttgcaagctcataatcagcctcaaccaccagctcaggtcaatacgagtaatgcaagtcttcaagctcagaatagtcatgttgctgctgaaccgaggatgggaattgtatctggaggtacagttgaagggaagtatcgaaatgatggggggcataatgga

SEQ ID NO: 141956 - DNA, 249 bp, Arabidopsis thaliana landsberg
aaagccaatgagaagctgacgaaaaaccgcgttggttaaattacatataaatgggttttgtgaattcaaataaagacgaagacaaaaagtttgagactttatctctactttgacccgaccagcgaaagtgtaaattgaaagatagatagaaagaaagagccaactttaaaagcttagcggttgatttcgaaatctcgtcgccggcgcgtggagtcttttcgtcggacaacaaccagagaaaagagattt

SEQ ID NO: 141957 - DNA, 223 bp, Arabidopsis thaliana landsberg
gagagcaaaatgactcgtttaaatcacagtcaaattacatatacagctgcataaatattgcaccgtccaaaaaaaaaaaaaaaaggtacacattcgtcactacttttctttttcttgttttcttctataaatatgaaggagacgagagatgagtatagataatggggtcatttattagccttgatgatgatcacaaggaagtatacaaagctcttatgccaaa

SEQ ID NO: 141958 - DNA, 737 bp, Arabidopsis thaliana landsberg
gcgttagccaattgtattcatcatcatcatcgtcatcatcgttggggtgagtatacatacgattaaagaaacccaagaactccggcgtctgtttaccgctatcatcattcttccgggaagaggaaaaggtttcttcgatcgtcgaagagattctttggacaattcccctccttcctggttcaatcttcgattcagctctcttttaatttttttggtaacctcctcctctgcatctactgttttcgatttggaaatagattggttcaattgtgaattggaattgagggtttgattgattggatcatctcaattcataaatcaaatcctttgaatttagatttagaaagctctagagtttatgaagatctgcatcgttcttatgagttatatgattgatggattttttagtgtaaaggaacctactttaatgatcaaagctaacgttttgtttaaattttgaggcaaaattcaaatttattcatatgaatattctcataagctgatgaattctgtatctttgtacattagtgatatagtctacttgtgtgtatccttgttaattcatatttaaagtgtgttttttcttgtaggttttgggaagctgctatgttatttgagaggcttaccaagaaaccaccttcgcttgttgatctttgcgtaaggaaagcgattgataatgtaaagtacattggatatgttggtggggttgattttcagctccttgagcagattcggca

SEQ ID NO: 141959 - DNA, 329 bp, Arabidopsis thaliana landsberg
aaatgacatcatacattgattgataaaacaagatacataaatattcaaactttgataaatttgaagtatccagagatcacaaaaacctaaaatccaaaaattctgctgcgttgattatatgtatttaagctcaaaatacaaatcaataacagtaagagatctagatcgaaacataacaagtacagaaaatcaaatcgtgatagattcagataaatatccaaatttcacgaaaccctagatatcaaaaagaacctataaagcttttcaattcccagattagatctagcacgaagcaattcacaattaagcatcggaaaacaatccgaaat

SEQ ID NO: 141960 - DNA, 266 bp, Arabidopsis thaliana landsberg
attgattaatatagtatttcatttcatttcatttccaaagtgctaaaatccaaaaccctagtgttgtttagacccaagaagtcataaccaatgctactactaatgtcggttgaagaataactgctgctactactgtcctctgtttgacatttcacattattacagctacactccttgccgttcccgaatccaaaacggcacgcactgcacctatgcttcactctcccaaaccttaggttcctctcatcatggaacttgtcttgcca

SEQ ID NO: 141961 - DNA, 182 bp, Arabidopsis thaliana landsberg
aagagaagaaacataagattgaaagtgataacaacaaatctgattggtgtatgtatcaaacacacgaatctatatgctacatgtgccacatgagtagcttcaaattggttgctcatggtcaaaaatatgatctcttacagttaaaaattacgaaactcatcatccacgagtgggagtggttt

SEQ ID NO: 141962 - DNA, 205 bp, Arabidopsis thaliana landsberg
caccgggcctaaaccgtgaggtgatcatgctcatttctccgcctatatatcataatactctacaaacccaacaataatctctttgtattcataaataagactagagattgccacctttattaattatgatgaaagtgctactctttgtgtgatgtctattgttaaataaaataaatgcaataattacgactttaatagtcttttt

SEQ ID NO: 141963 - DNA, 587 bp, Arabidopsis thaliana landsberg
atgaggcttgagaatgtgaaggctggaagaaaggggaatctcaatgtagcgacagaggtatgttatatgagactggacattcaagaaagtgttggtgatggtttattgaatcagtgtgttttttgtttgtatggtgtgacaacaagcagatattccaagtagcgccaagtcttcatatggttcaagtatcgaagtcgaaaggagacactctcgaatttcacaaggtaagtcaaatagcttggtttcgactatatgatagggtaattaactggtttatgagctaagcagagatgatggtttgtttgcagttctataagaagctctctaattctctggagcaagtagtctggacgaataacgaagttaagaaagaaacagcaaagtgatgtatgagagttttcttttgggacaattcttgctttctttgtgtataagagcttttttgctttaccggctactttgtgtggatgatgagaaagggagtgggattggttttgtgtaaaagaaaggtgtaaatatgaactgcattactcgataaggtgctgcaatgccagttataaagtcatatcaaagcttgttggctaaaa

SEQ ID NO: 141964 - DNA, 914 bp, Arabidopsis thaliana landsberg
tccttctatacggcccacatatccactattggcaacaaaattagaaaaatttaggatttagttttaaaatttgttccgcgacattctagaacaatgaagaaaatggatacaaataataaatctatctgcctcttaaaagttccaaatttcaccacgtcactgctttgataatgcaggtcctcgtcgtctctcctccgctcatcgccgccgcatctctctctaaacctctcaattctctctctaaagccgcactctctttctccagagccaaacccatttgtcctttccctcaaacctctcgacgacctatctccgtatacaaatccccaatgaacaaccttttcaacagactcggattcgggtctcgtcctcaagcccaagctgacccatcttccgccgcaatcgcccaaggacccgacgatgatgttccgtcttcaggtcagcaattcgcgcaatttggcgccggttgtttctggggagtggagctagcttaccagagagttcctggtgtgaccaagaccgaggttgggtatagccatggcatcgtgcacaatccgagttacgaggatgtctgtactggcactacgggacataacgaggttgttagagttcagtatgatcccaaagagtgtagctttgagagcttgcttgatgttttctggaatcgtcatgatccaaccaccttgaatcgtcaggtgattgattgctttaaccctaaaaatctagacgttatcagtatcagatcgtaatttgaatcaatagagagctctatgtgtgttctgcatttggggctgaattgtttattagataacaacgactagattcacctgtttagacgaactctctgtcccttagtctttagttctacatacatttggtagtctcaagtaactatttggctaaggtgttatgag

SEQ ID NO: 141965 - DNA, 234 bp, Arabidopsis thaliana landsberg
agcttctctaatttcatagctcctaacaaagcaatatcatttccaatttataaaagttaaagccatggctgcatctttctctgtcccctctatggtaagaaaacgacccataattctcctttgtattatttgattaagttgaatacaatagaattatttcaccagtaaataagactaacatggaaattgatgatcgataaaccaaatcagattatggaaagaagaagggagatt

SEQ ID NO: 141966 - DNA, 321 bp, Arabidopsis thaliana landsberg
aataaggaagacacttttcttaatgatccaagtatatatcagaacaaaaggacaacaatttacttttttactttttaaggataaatggttacgaatcagccaagaagtgaattaattcatgagattcagatttggataagtttttcatccacataaatggaaaaagcagatttagctccaaggatcatcccaaccactgggtccttctcttttgacaaaaccaatgatggcttgaacagcttcatgaactctattggagagagaatgattcccatgctctatctccactttctctgctcctcccattgctttacttaatct

SEQ ID NO: 141967 - DNA, 715 bp, Arabidopsis thaliana landsberg
ggcgagagacagagagcgaagaagaagactcaaaccaaaaaaaaaaatggaagctgcactgctttctcttcagcccttcccttcctccgccactcaacgacgtctctctccgtttaacctccacaatacacttaccagaccttcttcttatgctcctcttcgtgctcaaaaggtttcactttttcatccaattcaatcttcttgtttctatcttatcctcagaattgtatacaatatgtaaatttcagtgctgattcattgattctcaaaattgatgaaaatctatgattcgagagttggtatcaatagcttttcagcttcaggagtttggaatcgatgttaggtaggtcctctctagtatcctggaatcgtttttgtgttgcttgttgaaaaattgtagactttgtgcactttatgaatctgtgatgtttgaagaaattatgtagtcatgttgagaaatgagaactaagtagctttttgttttattgttagtctggaatcacagaaggttctgattcagcattagaggctaaagtaagtgagcaagaagtgggaatgtaccagaatgaagtagttgagagtcaaggtataaggataaggagaagaccacctactggacctccattgcattacgttggaccttttgagttccggcttcagaacgagggaaacacgcctcgtaacatcttggaagagatcgtatggcacaaggata

SEQ ID NO: 141968 - DNA, 1164 bp, Arabidopsis thaliana landsberg; identical to SEQ ID NO: 60547

SEQ ID NO: 141969 - DNA, 387 bp, Arabidopsis thaliana landsberg
aaggaaatcaaagtagattttgaccgcgacgttaaaaacttgagaagacatgttcaattattaatgtcatatacaattatgtaacagggaaaatatatttcaaacaagataattaaccaaccacacatgtaagtttttattcaagattacatatactttcttctaatgatcatgcctccagcctctctttccaaacccggtaggactttgactaggactaaccggtttacgtcggatatccgattttgggttcggactcctaggaccgggataaccagttgttattgctccacctgaacttgacgaatcacaacctgatccattaaccgacccgtttttggtcgaggagttccaatacggcataaacgaagttccttgtagtttgac

SEQ ID NO: 141970 - DNA, 246 bp, Arabidopsis thaliana landsberg
agagagagaagacacttagtaaagaaggtctgtgtgctgttctctccgaaattcctttttttggtctcgagggtttttcagactgtgaagagacatagctgtggcaaagatgagaggacctttaggagcagtgattggaagatatacttcaagtgatgggagtgctccaaatgatgggatcatcaagcacaatagaaagtgcagagacattacgcttctcatcatcttcattgccttttgggtttc

SEQ ID NO: 141971 - DNA, 390 bp, Arabidopsis thaliana landsberg
ctttagcagcgaagcgcacacaaagtttgcttgccttctgggcttcacgattctcacgacatctgtttatcttctccgatttccacgtccatggatctcagtcaatgttccttaatctctcttttcgattagtccaatctccactaatctctgacctcagatcgcttccgacgccgctgaactgtgtccgtcttgatctgtgtttaggagaaagcttctagggtttttgttttggttgctgagtagaatttgttggatctgaaacggaaatcaaaatgggctttttcagtacgatactaggattttgtggatttggagttgggatttcattgggacttgttattggttacgttctcttcgtctacttgctccccaacgacgtcaaggttc

SEQ ID NO: 141972 - DNA, 394 bp, Arabidopsis thaliana landsberg
aatgcgaaagccatgtctacttcatgtttcacggtttgttctaaactttgtttgttggtttttgaagaggatttgttcatgttgatctttttaagagctggaaccaagtgactcacgtatcttcttgcgaaaactgccttagggttcttgtttggttggagagaaaagactcgctttctcttgtttataatttgcctctccatgtgaaattcgtttgcttcgtcggaactctaacagggagatacttatatagagcaaaaactcacgagagagagaaagagaaagagatggtttggtaatgtatgtgaaaggagtaatgctatatatattaactcatgtgatatttgacacgatcgatcacactttatgaagttatttcttttgacataaatga

SEQ ID NO: 141973 - DNA, 457 bp, Arabidopsis thaliana landsberg
gcagagcttcatcatccatgtattagtagaaatgtggggatgcttcttcagcagtataagtgttttggatcatcagcagcttctttaattcagagaaaccctttgttttcgtcgttggattcgaaagatgttagctactttaaggagatattaggtgaaaaaaacgtggttgaagataaagaaaggcttgagactgctaatacagattggatgcataagtacaaaggatctagtaagctgatgctcttgcccaagaatacacaagaggtgttttatttctctctagtctctaccgtattactttgtttggattgcgatgactatttgtgttaaacatagattatttttaatgcaggtgtctcagatacttgagtactgtgattcgaggcgtttagcagttgttcctcaaggaggaaacactggtcttgttggtggaagtgtgcctgtctttgatgag

SEQ ID NO: 141974 - DNA, 102 bp, Arabidopsis thaliana landsberg
cctgtactcatttctcaagctttttctgataagaagaattgaagactaaaagtacattcccatgatttcagataggaaaagtacaacattgcttgaagaccc

SEQ ID NO: 141975 - DNA, 493 bp, Arabidopsis thaliana landsberg
cgactggtgggtttcttgcaccggaccctcctccgtccgggggattaatagtcccggacatgattgctgaaaattagttgcctgcaattgttatcaataaacattatttaaaatatagaaatgaagtaatgactagcttcttaatgtgttaatgaggtatagttttaaaccttagagggagggtattattatttggaggaactgtagattttcttgagagattggaatgttgctgcgtatttatataagttgtgatatatttaaaagtcaactctcaagatcacacaacgtgaatttctttttatttttttgtaagataaaacatgttgcactttgataaattcagcgaaagccaacatgataatactattaaacaatattgaggtgtataaattaatatggttttgtgaggaatgaaatatcaaaaggttgactttggcaatttatgcggtgtgaagataggtacgaaaaaagttatacataaaattactgt

SEQ ID NO: 141976 - DNA, 525 bp, Arabidopsis thaliana landsberg
  unsure (1)..(525): unsure at all n locations
taacttgctcttcacgttcattatcgctcaagctttcctctctatgctttgccatttcaagtttgggatattcatcttcttttctgcatgggttttgattatgtctgtctttgtgatgttcctacttccggagactaagaatattcctatcgaggagatgactgagagagtttggaagaagcattggttctgggctaggttcatggatgatcataatgatcacgagttcgtgaatggtgagaagagtaatggtaaatctaatggctttgatccttcaacacggctttaaagtggtttaagagtccctaaccaaagtagaagcagaagagagtgaacaagaggtggtaaacacaccaaagtagagaagggaaatacagttttcaattctatacagtgtactaaatttcgttactttaagtttgaactgcgtttgtgaataagtgaaagtttttttttgctttgttgtggntcttaatgtcatccctgagttccaatttctacaagtgtgacatgtatatgtcaaac

SEQ ID NO: 141977 - DNA, 189 bp, Arabidopsis thaliana landsberg
ctattaaaatggagacgagagaattgcgagcgtgagggagagatcggaagagttttgaagctgctgagggttttgtaatgtggagaacaaatggcggctaggatagttatgtcggaatttggatgaggaaatgggaagattcaacaatgaacacacgcctttcttgtctgagcgttgacaccaacttgt

SEQ ID NO: 141978 - DNA, 178 bp, Arabidopsis thaliana landsberg
ttttcctcaaagaatgaaatgttgatgttccgtgttactgtcataagctatgatatttaaaacttacaagaggtgtacatgctagctttttttggcttgggaccgtatctacgcggttgaagaaggaaaaaaaacaaaaaaaaaaagtcttggatcagtacttgacgacatggtggcg

SEQ ID NO: 141979 - DNA, 398 bp, Arabidopsis thaliana landsberg
cggtttacgagattaagattaggccgcctagagggactacggtgacggttgagccggagaagctatcgttcagacgggtggggcagaaactgagttttgttgttagggttaagaccacagaggtgaagttgtcaccaggagcgacaaatgtggagactggtcatatagtttggtcagatgggaaacggaatgtgacaagtcccttggtggtcactcttcaacaacctctttgaaggggtttaggatctggtgaccgggaaaattctggtctctgtttgttgtactagtgaaaaagaaagatcataagttgttgttgttgtcgtctatgatctttgtgggtgtaatataaatatgtatcttttgttttgttgttaagaaagatagagcgtctaaagaac

SEQ ID NO: 141980 - DNA, 165 bp, Arabidopsis thaliana landsberg
caagaaaaacaaaacaaaacaagagtctcattatctctataattctaaagatggagaagaatatatcaataagcaagaagctagggaacattgtacgttttgtcttgtacatgttacacaaaggcatttctaagcaaaagctcctagccgactttaatgccactc

SEQ ID NO: 141981 - DNA, 818 bp, Arabidopsis thaliana landsberg
ataatatataagctcgccgtataattttcttgccgggaataatctccgatcatcgtcggaaatttccgaattgttgtaaaagaagtccaatttaggctttggatcctcagtttaatttatctgggacttttggttgctgaaatctctttcgggttttgtcctaatcctcattagtttgggtttcgtgagtctcgttttataaggtatatttttggctaatttgcttccgaattctgctttgttttagctcaattttgcccttaacattggttgatgaacagaggatgatgtggttgtgtttattgtcttcttgcagaacatgggacaaaagagattgttgttcttgctggcagtttttacttttcttgtttcatcttcatatggtagaggtggtaatgcaacttctataatgattctatgtctgtttcctttattgggacttccagtttttttattctcctgagtctctctgagcttaattaagattttaaactttctgtgtaatgtgaagtgcttgggaaattggaaatttaatctggctacagtgatttttcattaaggcctaattacatgttctatcatgtttggaacaaatcaattcataatccttgtagcatcatcatatgcataaggaaccatgaaggtcaaaatattgatttcaaagctttatgttttcgacaatttcatgttcttggtatgagttgtgaggctacgaaggagttaagactgaagcaagtggatttatgttagcttctttcttctaactgcagttctcaagttgaagagcgatgatgatcgacctgtttacaaccatacgc

SEQ ID NO: 141982 - DNA, 555 bp, Arabidopsis thaliana landsberg
cttccttttgattctctctgccactctcatgtgacacaattataccattttttctttgatattttgtacaaaaaacataacattattttctctctattttcattaactcatttctgtattcttcattaactataagaaagtacagaaataaatataatacgcattaaaatgaagaaataataaaacgagagaaaaggtttaaggaaagggaaagggttagtgtagtgttgacaacgccactcttgactctctttctcttcttcttctcgagatcctgaaaatgtgactgacagattcttcaacttcactctcttcttcttccattcactgaactcaattcaccccctttgagctatgacccaccaaacccatcagcgtcgtcgccgtcgtcactccgccgtctgtcaccgtcatccttcttccaaacccaccactggtttttgtgccacctgtctccgtgaacgtctctctaccatcgaagctctatcttcctctgtctcagcttccactgagctccgccgtgttcgctcctactctgttcgtgacgcatccgct

SEQ ID NO: 141983 - DNA, 109 bp, Arabidopsis thaliana landsberg
ttcaccacccaaaagaaaaaacacacacacatcttatagagatgaaagagactaattttggcgagaaaacgcgcgttctggtagttggtgggacgggatcattggggag

SEQ ID NO: 141984 - DNA, 307 bp, Arabidopsis thaliana landsberg
  unsure (1)..(307): unsure at all n locations
atcatcaggattctctcctcatcatcacaatcagatttntaattctacttctactcctcatcaaaattggctgcagacaaatggcttccaacctcctctcatgagaccttcttgaatcttttatatttttaaggtttattattatataagaaaaacaaaaatgaacctttgaaatccccacatgttcttggtcatttcattaatcatcggcttatattttgcttattttcccctaaatcctcttgttaacttaggcgaacaaaaaaaattaatggaaatctttttccctccatcggttacaaaaata

SEQ ID NO: 141985 - DNA, 536 bp, Arabidopsis thaliana landsberg
actgttttagctacggtcagcttttctctagcgtcggggcctcgatctcttgatttgagcttttcttaggtctgtctctctctgtacactctctccgccgtcgtatctcgccgtcgatttcaatttttccgacgatatgaagctcaccgttaaaactctcaagggcagtcattttgaaattagggttttaccctccgatacggttagttctactttcttcgtccatgcgtttacgtaattttcgcctagtatagtagagagaagtaggaatctcacatagaagagactcagatccacaattttgaatgtttggtgatcaaatttttttattctataagtgtttaatagctttattaactgctaaaattatgactcgcgaatccaatctggtttggtcaagttgattatgttagtcttcaaatcattaaatctgggcatgatgtgcttgtttttaagataatgacggtgaagaagaatatagaagattcacaaggaaaagacaattatccatgtgggcagcaattgttgattcacaa

SEQ ID NO: 141986 - DNA, 2005 bp, Arabidopsis thaliana landsberg
atgttaagatctttaggtcttggattgcttctgtttgctcttcttgctctggtttctggtgataacgattacgtgagctgtaattgtgacgacgaaggtttcttaagtgtccacaccatcttagaatgtcaaagagtgagtgatctcttaatagccattgcctatttctcaatacctctcgagcttctctacttcattagcttctccaatgttcctttcaaatgggttcttgttcaattcattgcctttattgtcctatgtggaatgactcatttgcttaacgcttggacgtattacggaccacactctttccagcttatgctttggcttaccatctttaaattcctcacggcgcttgtctcgtgtgccacggctatcacgctcttgactttgattccgttgctgttgaaatggaaagtaagagagctttacttgaagcagaatgtgttggagcttaatgaagaggttggattgatgaagaggcagaaggaaatgagtgtgcaggtgagaatgcttactcgggagatcaggaaatcgctcgataagcatatgattctgcggactactctcgttgagctatccaagattcttgatttacagaactctgctgtttggatgcctaacgagaacagaaccgagatgcatttgactcatgagcttagagcgaatccgatgaggagtttcagggtaatcccgattaatgatcccgatgttgttcaggttagggagaccaaagtagtgacaattttgaggaaaaactctgttcttgcggttgagagcagtggttgtggcggttcggaagagtttggaccggttgctgcaattcggatgccgatgcttcacggattgaatttcaaaggaggcactcccgagtttgtggatactccttatgctataatggttttggtacttccgagtgcgaattcacgggtttggaccgataaagagatcgagatagcggaagttgttgctgatcaagtagcggttgctatctctcatgcctcagttcttgaagaatcacagttaatgagagaaaaactcggtattcaaaaccgagctttacttcgagcaaaacagaacgcgatgatggcaagtcaagcgaggaacacttgccagaaagtgatgagtcatggaatgaggagaccaatgcacacaattcttggtctactctccatgtttcagtccgaaagtatgagtcttgaacagaaaatcatcgttgatgcgctcatgaaaacaagcacagttctctcagctttaatcaacgacgtgattgacatttcgcctaaagataacgcgaaatctgcattagaggttaaacggttccagctacattccttgataagagaagccgcttgtgttgctaaatgcttaagcgtttacaaaggttacggttttgagatggatgttcaaacgcggttgcctaatttagtagtaggagatgaaaagagaacgtttcagcttgtgatgtatatgcttgggtatatcttggatatgactgatggaggcaaaaccgttacgttccgagttatctgtgaaggtactggaacaagtcaggacaagagcaaaagagaaactggaatgtggaagtcccatatgtccgatgattccctcggtgtgaaatttgaagttgagattaatgagattcagaatcctccattggatggttcggctatggctatgagacatattccgaacagaagatatcatagcaatgggattaaggaaggcttgagcttaggcatgtgtagaaaacttgcacaggttagtgatctcatcatgtctctgtttctgtttggtatatagagattctaattataaacagtgtatttgatttgaaatttgttttgcagatgatgcaaggaaacatatggatatcacctaaatcgcatggacaaacacagagtatgcaattagttctgaggtttcagacaagaccatcgattaggagatcaatcttagcaggaaatgctccagagcttcaacatccgaattcaaattccattcc

SEQ ID NO: 141987 - DNA, 749 bp, Arabidopsis thaliana landsberg
ccataacataaaagttaaattctttattaattcatagaatcataatacaaaccaatacaacaatacccccaatggtaagagtatatataataggaaataatgaaactgtaaacttcaggaatcttacggatcaccccaatgaacaccagagcaagcagagtagaagaaaccacagatcaagatatataaagacacaatataagagtatagagaatcaccctgtctctttaaaacaagaagataaattaatacacacataagtgtatttaaattatatatcaatatggtttttagcattggaagccaggaggaagttgtttgctgcaaacattaaggagtagacttaaagatattgggaggttcaagttgattccaagaatgttagccttaagagcggtgcagagacaaacggctgcctcaacatcagcgagtccttggatgaggctgcagcatggctcgaccggtggcttgccaagggtcaagtccaggaggccgttgagcacattagcgcagacaccgagcttgagggtgtctttagggcacttgctcgagccagagctagggcttggggttggtttaggagttggctttggcttgggagaggggcaacctccgccgcacggagtacagctaccacaggcggagattgttgtgaaaaagagaagattgagagccaagaaaagagctatggagcttgaagccatttttggtatatagaaaatactgttcactagctagctaggttgtga

SEQ ID NO: 141988 - DNA, 706 bp, Arabidopsis thaliana landsberg
ggcagaggaatactacagcctccgctcggagagagtaactcagcatcttgtccctaactcggagtctgactcagtgagtgacaaaagcaaagcagagcaaagcgagaagaagactaaacgtgggagagactccggtaaacaccctgtttatcgcggagtaaggatgaggaactggggaaaatgggtgtcggagattcgtgagccgaggaagaaatcacgtatttggctcgtaactttcccgacgccggagatggcggcgcgtgcacacgacgtggcggctctgagcattaaaggaacggctgctatactaaacttccctgaactcgctgactcattccctcgacccgtttcattaagccctcgagacattcagacagcagctcttaaagcagctcacatggaaccgacgacatcgttttcatcttccacgtcttcgtcgtcgtctttgtcttctacgtcttcgcttgagtctcttgtgttggtgatggacctctcgaggactgagtcggaggagctcggtgagattgtggagcttccaagtctcggggcgagttacgacgttgactcggctaaccttgggaacgagtttgtgttctatgactcagttgactactgtttatatccgccgccgtggggacagtcgtccgaagataactatggtcacggaattagccctaattttggccatggcttgtcatgggatctc

SEQ ID NO: 141989 - DNA, 325 bp, Arabidopsis thaliana landsberg
atgtcaagaaagccatgttgtgtgggagaaggactgaagaaaggagcatggactgccgaagaagacaagaaactcatctcttacattcatgaacacggtgaaggaggctggcgtgacattccccaaaaagctggtatatatgtgctttattattatgtatatattttaaaacactttttacatatatataactataattgttgtttttatgacaaatgatggtgtttaggactaaaacgatgtggaaagagttgtagattgcgatgggctaactatttgaaacctgacatcaagagaggagagtttagctatgaggaggaacaga

SEQ ID NO: 141990 - DNA, 261 bp, Arabidopsis thaliana landsberg
tgtctagaggctgttactgaagagttgattcatacggagagaggatagaaatggcagatgggatatcgagcttttggggtcctgtgacttctactatagagtgttgtgagatgaactacgcctactcatcctacattgctgagttctacaacactatatccaatgtccctggaatcctattggctctcattggtcttgtcaatgcattaaggcaaccgtttgagaagaggtttagcattcttcacatttcgaatatgatac

SEQ ID NO: 141991 - DNA, 451 bp, Arabidopsis thaliana landsberg
ggaagaaatacgagagaaagatctcaccgactctaaaccatctccaccgcaaccaccaccgaaacgtggtctcatcagccgcaaaagacagcttgtgtttctctctttcatgattttattagccgcaaaaggactcgttgggatcggagaaatagcgtttgtaatcttgtgttatatctacttgtatgagtttctctcaagatttgccttccctcgcaagcaaacagaacagaagaagagactctcaaaccctaaaaacaaactctttcaagcttacttcctcgccactgcaattataggttactaatcttttctcatcaaatacttatgtaaatgtttttgtaaataataaaactctttctcaggcctactcttccctctttgttacatcggagatggaatataccgtggagacattcacggtgctggagccgccgcaccacatctattt

SEQ ID NO: 141992 - DNA, 357 bp, Arabidopsis thaliana landsberg
caacactaacggaatcgttatcgttaccgaaatcaccaccgctacttccgccgttgacgccgtcagacgatgaataacggagaatcgagcataatcgagtactgagtccatcggatagaagagttctgtgattgtaaataacagaagtaggagccgacagtaacgggatactgcgacggaggagaagagggaagcgggcgtgaaagagagcggcaacggccatgatcgccatggcagaagaaccaccgcgacgggattggtttcgaggtgatgacgtatcgttggcccagcccagaccagcccattagaaactatccatacactgggcttggcccatttaagtgacttcattttttc

SEQ ID NO: 141993 - DNA, 224 bp, Arabidopsis thaliana landsberg
atgactaaacaataacaacgtcccttccttctttgatctatacagagagagagtgcttttgtgtgtacaaaatccaaattcatacccctatatgtatttgtatctgtgtatgtatgtgtgtgtgcagcttgttccgttttctgaattggttttcaaactgaaccaaactgctatatatttggtttctttgaaacagtccaaacatcaaaaacaacaacaatttg

SEQ ID NO: 141994 - DNA, 1697 bp, Arabidopsis thaliana landsberg
atttataaagaagaatgtgattcaggcgtgagtgtgaacaacacacgtacaagaagatcagatcaatagagaacaaaagcaagcacaagtacacactgattctgaatatggcaaatgaaatgtggacttttatatctatggtctataatttgaagcctaaaattgatatatgggcttttagcctaggaccggcctatgattcgttgatttcacagagttacacgtatgagggctttttacatggagctattacttcaaatccgtcgtatggcttgggctaaccatatacttcttagttttggatacgggcacggatcttcctaaaccaacatataggtcggttatgtaattatttagatcttcaggggtaaatctgacaatattgcatgacccgaccgggtgtttcttatagaaacccgtatacccgggcattagttttctcgctatggacgcttggatctcgtctctcaggttcgggtcgggtacgacccatgtcttgtgcttcttgtaagcctcttcgaacgcctcgttgaaccgtctcagagactcctccgcctccgtccccgccgttgaatcaacggggagcgacgctatcacatccccccaggccattttttcgtatttctcgaggtattgattcactttaacctcgtgattcgctacccaatcgtctccgagtacgactctgagattcgatgtacggaccttggtcacaacgtaatggaggttgttcgctaggaagagatacgatagagccgagtcgttgtagagccgagatttggcgtcgattttacagagcaagacgagaatcaaccacgcgagtctcgccgccatcagagaacgatcaccggatcctggattctcttcgccgctgctactgaagtaatcctccggtaaaggtaacgatgactccttgagaatggtggcgagagaatcgctgtagtctgcgaggaagacgatgaagttcatcacatacctcgcgagctgatgaactccgccgccagaaatcgccgatttcgacgattccttcgtaatcgacgattgaaactccgtcatcattgcattcaccgattccgatagcttctctagagattcattcgcctgtaatctaacggcagcggttgaatcgtagctaaaaatctgatcgattttgggagtcagttgcaagatcgtctggtaaacgtcaagcgtagggaagatcttctctgcagtttttctggatttcgctacggttagtgagaagatgaagaggtttaacgcgctctgtagcgttatctcaacgaagcaagattcagcgacggaggaggagaaaatgtgatcggaaaggattcgttctccgttgaacagagtggtgattgctactctcgcaacaatcacccatattttgatcttcttctccagaatctcccattccagtttctgcatctgtgtagaggttagcttctcgaaccctagatgagacaatgtgtcgacgatgatctttttgcgaaacttcttgtagattttaacacaatccttctcgtaaccagaggagatcatgcgatttgctatcatcttcaaatcaacaatagcatcagaattccctcctcctcctatgtctttacctaattccgatgaggattcagagtaaagctctccatctaatgaagaatccgaagcggttccacttgatctcgaaggtatgttggattcagaag

SEQ ID NO: 141995 - DNA, 2736 bp, Arabidopsis thaliana landsberg
atggccaatcgcgatttgatgcttggacaaaatcgtaatatcggtattgggcagggtcaatctttggtgcttggccacagccacagtctagggcttggtcaaaaccatgttgatgtggagctaggccaaggtcacaatatggatttaggacttgctcatcatgatcatgatcatcatgaaattgatttaggaaatcctcatgatgatcatgagctagacttaggaaatagtgaagatcaggatggagaggatcataatcatcatcatcatcatcatcatcatgattatatgaacgagaatgaaatctcggttgatcagaagcctggacacgacgatgttgatcctgatctggttctttcatcgcaaaaccatgagttctcattgtcagataataatcatcagttggttgttggggaaaaccatgaactagatgacaatctggaattagccgttgactcaagtcatgaacttgaaattgatcagcatggtgaaatggttatggttagcactccggttcaagctcgagctctcactgctgacatgacttaccaacttaccgttggacaagagtttccagatgtgaagagttgccgtagagcactgagagatatggcgattgctcttcatttcgaaatgcagactataaaatctgacaaaactcgtttcacagctaagtgttcgagtgacggatgtccatggagagttcacgctgcaaagctccccggggttccaactttcacaatcagaacgatccatgaaagccatagctgtggaggaataaatcacttgggtcatcaacaagcttcagttcaatgggttgctagctcggttgagcagcggcttcgcgagaatccgaactgtaaacctaaagagattcttgaagagatacaccgggttcacggaatcaccttatcgtacaaacaagcttggcgtggtaaagaaagaatcatggcgactatgcgcggatcttttgaagaagggtatcggttacttccgcaatattgtgagcaggttaaaaggacaaatccgggaagcattgcttcggtttatggaagtccagctgataattgcttccagcgtctcttcatatcgtttcaagcttcaatttatgggtttctaaatgcttgtcgaccgcttcttggattggacaggacatatttgaaaagcaagtatttaggtactttgcttctcgctactggatttgatggagatggtgctttgtttccgttggcgtttgggattgtagatgaagagaatgacgagaattggatgtggtttttgtgcgagcttcataatcttcttgaaaccaatactgagaatatgccgagactcacgattttgtcagatagacaaaagggaatagtggaaggtgtggaacagaatttcccaactgcgtttcacggcttttgtatgcgacatttgagcgaaagcttccgcaaggagtttaacaacacactgttagtcaattatctgtgggaagctgcgcaagctctaacagtaattgagtttgaagccaaaatacttgaaattgaagagatttctcaagatgcagcttactggatccggcgaatccctcctcggttatgggctaccgcatattttgaaggacaacggtttggacatttaaccgcaaacatagtcgaatccctgaattcatggatcgctgaagcatctggacttccaatcattcagatgatggaatgcattaggagacaactaatgacttggttcaatgaacggcgtgaaaccagtatgcagtggacttcgatactcgtcccaactgctgaacggcgtgtagccgaggctcttgagcttgcaagaacctatcaggtgcttcgagccaatgaagcggagtttgaagttatttctcatgaaggaaacaacattgtggatatcaggaaccggtgttgtctctgtcggggttggcagttatatggtttaccttgtgcacacgccgtggcagctcttctttcttgtagacagaatgttcatagattcactgagagctgttttactgtggctacttataggaagacatactctcagacgattcatccgattccagataaaagtcattggagagagctttctgaaggagatccaaacgtgaataaagctgctcttgatgctattataaaccctccaaagtctctgagacctcctggtaggccgaggaaaagacgggttagagctgaagatagaggacgagtgaagcgggttgtgcattgtagccggtgtaaccagactggacatttcagaaccacttgtgctgcacctatttgatttgcaacgacagcatgctctctttatgtttcaccagtaagtgtcttggctgttttaggataatgttagtagtacttcattgtattcacagatctgatttgtgtgtggacttctctgacaggaacaatactgcggactcaactgagttatcggaaaagaagccaaaaaactctgctcagtgtactataaaactttgatctttcttgatcaattgctagatttcaggcaaatacctagagaacaattttacattgcctgtttgttgaatcctttccttacttatttaatatgctcagctcgagcagttacgcataaactctttctctatttattcctgaaatcagattttatttcccatttggaatgtattttatttaggtttgttccaaaaaggaatttgcatatgtatttatgtgattgtagtttttacatataatttgattcatgattcat

SEQ ID NO: 141996 - DNA, 260 bp, Arabidopsis thaliana landsberg
aataacacgtgtttgaaaaatccccagaaactttcaagatttgctacaatgaatctaagctcagagcagaaatgtgaacatgccttctcagatattcagtaatcagagggtaactagtttcttacaaagaggaattctgatttaagagactgagaagatgtagagaagagttcatcatccaacagatgcttgagtagctttttgtgttgagtttaaggatgcagctgcggcttcacgctcctgccggattcgctctctct

SEQ ID NO: 141997 - DNA, 186 bp, Arabidopsis thaliana landsberg
cttagttatatcttttagaccatatcgggttttacgatgccttgtatttctgcttgaacctcttttttttatatacaagtgaagcactctgtttcctgatagctagccgcgttaaaaaggtactgcagatgaatctatttcacacatgttattcgatctggtttgtagaacgaattgttttatgta

SEQ ID NO: 141998 - DNA, 382 bp, Arabidopsis thaliana landsberg
tttaaactttatccatgtttttttgttaactcatgaattgaaagagaacaaccaaagtgaatgtagcctgataaaacaggatgaaactattgaaagattcaaactttgtttacagaatcatccttcttggccacttcactactttccaacggtggtaaactctgcacaaaagtaaaaagcaatcagattacaaatctctcatgggcaattcatcgaacaccttatgtgcattacaataaagagagatcacagagccagagaacgaaatgaatggttttaaaccgatcacgcttatgggcattatcaagaacgaagaaagtgagcaaacctaatacatttgagaaccctaacatatgtacagaaagagaaggtgaagcttacg

SEQ ID NO: 141999 - DNA, 523 bp, Arabidopsis thaliana landsberg
ttttgtgtttataggttcttagacattagtccagaggggaaagttccggtggtgaagcttgatggcaaatgggtggctgattctgacgtaattgttggacttcttgaagagaaatatccagagccttctctcaagactcctcctgaatttgcttctgtaggatccaaaatctttggtgcttttgtgactttcttgaagagcaaagacgctaatgacggatccgagaaggctttggttgatgagttagaagcgttggagaatcacttgaagacacattctggtccttttgtagctggagagaagattactgcagtggatttgagtttagcaccaaagctttaccatcttgaggttgctcttggtcattacaagaactggtctgtccctgagagcttgaccagtgttcgtaactacgccaaggctttgttctctagggagtcgtttgagaaaaccaaggctaagaaagagattgtggttgcgggttgggaatcgaaggtgaatgcgtgatgtggatccatgcttc

SEQ ID NO: 142000 - DNA, 442 bp, Arabidopsis thaliana landsberg
cgaatttggcgagcttagtggttgatcctgattttgctaaagagatggttcagaggcaagctgcatggaggagagtggtgggtcttgctatatctgctgggattagcacaccaggaatgtgcgcaagtttagcgtatttcgacacttacaggcgtgctagattacctgcgaatctggttcaggcgcagagagatctctttggagctcatacatatgagagaaccgatcgtcctggtgcataccacactgaatggactaagcttgcaaggaagagtcagtaaagcatggacacagtcccttgatttgaggttattctctctctctctctcacactctgtttttgtgcttattctgaattcaatgtttccatgttgttgtgtagggctttatttcatcatagaacacgaaaacaaattgtttcagcttatttttgttgagttat

SEQ ID NO: 142001 - DNA, 1908 bp, Arabidopsis thaliana landsberg
tcgtgtcaggcttaaaaagaatcaaagagcgacaaaaagctggctctcaaggagctcaacgaaggaggacacctaagaaaatctctgatcaagctcagaggaagaaaatgtctagagctcaagatggtatccttaagtacatgttgaagcttatggaagtctgcaaagttcgcgggtttgtctatggtataataccggaaaagggcaagcctgtgagtggttcctctgacaatataagagcttggtggaaagagaaagtgaagtttgataagaacggtcctgctgctattgctaaatacgaagaggagtgtttagcgtttgggaaatctgatgggaataggaattcacagtttgttctccaggatttgcaagatgctactttagggtctttgttatcttctttgatgcaacattgtgatcctcctcaaaggaagtatccgttggagaaagggacgcctccgccttggtggccaacggggaatgaagaatggtgggtgaaactcggtctgcctaaaagccagagtcctccttaccgaaaacctcatgatctcaagaagatgtggaaggttggagttttaacggcagtgatcaatcatatgttacctgatattgcaaagattaagaggcatgttcgtcagtcgaaatgtttacaggacaagatgacagctaaagagagtgcgatttggttggcggttttgaaccaagaggaatctttgattcagcagcctagcagtgacaatggaaactccaatgtgactgagacacatcgtaggggtaataacgctgacaggaggaaacctgtggtcaacagtgacagtgactatgatgttgatgggacagaggaagcttcaggttcagtttcatctaaagacagtagaagaaatcagattcaaaaagaacaaccaacagccatctcacattcagtaagagatcaagataaagcagagaaacatcgcagaaggaaaagacctcgaattagatccggaactgtcaatcgacaagaggaagaacaacctgaagctcaacaaagaaacatcttacctgatatgaatcatgttgatgcccctctgctagaatataacatcaacggtactcatcaagaggacgatgttgtcgacccaaatattgccttaggaccagaggataatggtctggaactagtggttcctgagttcaataacaactatacttatcttccacttgttaatgaacaaactatgatgcctgtagacgaaaggccaatgctttatggaccaaaccctaaccaagagcttcaatttgggtcagggtacaacttctacaatccctctgcagtgtttgtacataaccaggaagacgacattctccatacacagatagaaatgaatacacaagcaccacctcacaacagtgggttcgaggaggccccaggaggagtacttcaaccccttggtttactcggaaatgaagacggtgtaacagggagtgagttgcctcagtatcagagtggcattctgtctccattgactgacttggactttgactatggtggttttggtgatgatttctcatggtttggagcttagtgtcttgccattttttttgggagattacatagtaagtttttttttattacacaacaccatctcatatatttgatcttagtttatagatttgatgtattttgttttactgttatttttgtaggttcaaaaggacatggcaatagtctggctagtacagttactttctcttcttcatttcttctgatcttatattcttcctctttttttcttataatattttcttagatttgttaagagaaacaattttccttttgaataagttgccagaagaaatgctttgcccgttgtaatggtctctagggaaagcagttagcgtatcatcatttgtaaatttacctgtgag

SEQ ID NO: 142002 - DNA, 257 bp, Arabidopsis thaliana landsberg
gtgcatgagaaggatgtgattggtataacacaccacccgcatagaaacctccttgctacctatagtgaagattgcactatgaagttatggaagccctgagttttctcatcatcaagtcttgttttctgtatgattagtctgtctttatttgatttgcactcttctcgggttagaactagtgtaatgtgaaaccatctttgcaaagatctcagccattttgggaacactacccacagactctaaaaccagcatttcag

SEQ ID NO: 142003 - DNA, 629 bp, Arabidopsis thaliana landsberg
aacaaacaaacatttagaaacacaacttaacaatgtaaaaaacaaaaaaaaaaaggaaaattcttatttcttttcatagattaacctgaagcaatgcttttagatttggtaaaagaactgccattgtcaagctcctcatgcttctttcgcaatgcagattgtctctttcaaaacaatcaaaacacagtaccaattggaatcatcaagattggaattttgcagagctcaatgaaacagaacataatgaatttgctttaccaagaaacgtatgcgatttcgatcttcctcactgagaacaaactgcattttcaattgaacatttccatagccattgaatgaaagtttttcttccaagaaaccactctctattatcattcttgtctctatctctacctccaaaaaccctcaaattcagaaaatctaataaaaccactaatttgatctctagagttgtaaaaagaacacacctttctgtaatatttggtttccattaacatctaacagagtaacaatcaaattctctcggagcctcgtaactggactgtgccacattgaatccaagaagaaacaataaactgtcaaaatttctcaaaaagttccaaactttagaaattcaaaaggatcagtag

SEQ ID NO: 142004 - DNA, 403 bp, Arabidopsis thaliana landsberg
caatcaaatattttttctcattacacaatcaaaaacctcaaatccattaattttcaaaagatggaaaaaaaatatgaattgactatgcaatattacacattttcttattatttatacatcgaattttttcattccttatgggaaaaagggaatcaggttactttgaccgaatcaataacccaatgttgaccatcggttttgacctttaaccggttaatctctgcgaacagattcacggctctcctcactcctctattatccgccgccgtgaaataatcgtgaccaaatataacaccgccgggtcggagtatccgaaccgcccggtttatatccgcccatgccgaattaaaatcgtgacccgcgtctatctccaccaggtccgccgtcactccccactcacaca

SEQ ID NO: 142005 - DNA, 429 bp, Arabidopsis thaliana landsberg
tgtggaaggagctggagaaagagaacaaggaattcttcaaggcgtatgaggagaggcaaagcaaacaagagcaaatgtcggaggaagagacaaaccagatgatccagaagattatctcggattcatctaaagaatccgacgactgatcgcgatgttcgatcgttagatttcgaaaaccttatagtttatatatatgaatctcatgaaaacgatttatccctgacgcatgcatgtttataagtaaatcgttttttcatcttagcatcggtccaacaagcaagacagcaaaaaaaggagtgatgacactctttttggtacgttatacgtacgtggtccacataatattgcctctgtttaattatatataatgaaacggacgctagctcatacatggatcgatggggtggggttttaattgaatgtatcgtg

SEQ ID NO: 142006 - DNA, 196 bp, Arabidopsis thaliana landsberg
ggcgcgtgtaaacggtgacggggctctaatggctaatcttcctcctccgctctccatgaaatctgtcgccctctcaggagcttcttctccttcttcttcctccaacaacgatcggaagctatcatcggcggagcagttaattctcgatctcagcaatcccgaactcagagaaaatgcacttcacgagttgtctaag

SEQ ID NO: 142007 - DNA, 698 bp, Arabidopsis thaliana landsberg
agcttgacaatggcagttcttttaccaaatctaaaagcattgcttcaggttaatctatgaaaagaaataagaattttcctttttttttttgttttttacattgttaagttgtgtttctaaatgtttgtttgtttttgctcttgctcttgatgagatgagagatttgtcatctttaagttcaatgcaatctctagacatcgtggctgttgctagttcaaagacaaatcttggtctgtctcaagaaacaaagctgaaagtaatgattagtagtcattttgatacagttttgtttatacaaaaattcgaaatattttttcttagatcactgatttttccacctgatgtagactaatgcagatagagatccggtttcgtcaaatcttataatgtggaagcctgaagtaaaagattcagtcgagaagacgaatattcaactatcttcttcagatgtttcttcaagcaagaaggttcccgaggttaaaaaactcgaaagtgtatcgttagtgaagcaagaagataagggtttgaacaaaccaagcaagaagcttatagaggccgagagtgtattgttagtgaagcaggaagataagggattgagcaaaccgagaaagaagtttacagaggctaaaacccccgagagtgtatcgttagtgaagcaagaagagacgggtttgagcaaaccggaaagaaagcctaaa

SEQ ID NO: 142008 - DNA, 121 bp, Arabidopsis thaliana landsberg
aaagctgaaagttaaatcctaagcatataaagaaagaatttgcatactagcaacaagacatgctaaacattgagggatcacaatacgtagttccttccttggaccggtatcgggatgcaac

SEQ ID NO: 142009 - DNA, 346 bp, Arabidopsis thaliana landsberg
gacgatcatgattcttctgatcgggctgatgttagagcaaacaactctctttgggcgcctatcttgatggaacttatgaatgatcctgtgcgtcgtaggagaaaccagagtgttgagtctgttgaagataatcaaaacgaggtacagaccgagaacaatgaagacgatggagaaaatgatttggattggcagcttcaagagattctcaggagaaggagaagacattccgctgctgttttgcagttgcttcaggggatacgagcagggttgtctgtagaatctgagagtactggtaatggaggtaataatccgggacgggtgatcttgatcaatacctccaatcaga

SEQ ID NO: 142010 - DNA, 917 bp, Arabidopsis thaliana landsberg
ctcctctgtgatttgctctggtctgatcctgggaaagatgttaaaggatggggaatgaatgatagaggtgttttatactcctttggtccagataaagtttccgagtttcttacgaaacatgatttagatcttgtgtgtcgtgcccatcaggtagatatttttcgatcatgtctctttgatactactgcttttgtgatgttaacaagggagttggattttttatggcaggtcgtggaggatgggtatgagttctttgctgatagacaacttgtgacggtgttttcagctcctaactactgtggtgaatttgataatgctggtgcgatgatgagcgtggacgagaaccttatgtgctcgtttcagattttgaagcccgctgagaagaagaccaagttcatgatgtccacaaagatttgatactttcattgaggttagtcaatagtctgtccttggcggaaaccaaaacgaaactagtgaatgaaaggattctcttgcactgatttgttcatgttattcattacaaagtcaagttcacatttctgttgaacatgatttcttttggattcttccaggctaaactttttacttaaatgggtcttgatttcggcttttccttctttcacagatggatttggtctttcttgagaaattgattgaaaccattgaagatttggctgtgaagtgtgtacttatggtagtgagaactcttggaaaggagcaagaccttcttagtcttctaatctctttcttcccccaaattcactttctgcattttttttctatcttcttttatgggttttacatgattttcatctgcctgttgggatcacatagttggtgtgtacatgcatatggtcgtttcttggattttaggacaccaaatgaaaatgatgttataaaaaaggtttagtatgatg

SEQ ID NO: 142011 - DNA, 1636 bp, Arabidopsis thaliana landsberg
gtccaagaccatacattttgatgaatgcaacttagaaaaatttgttgaatagatagatagattgaaaagatcataactatacttaacaaaaaaatactaagaaaagtccacatgcggcgaaggttttttgttgctgtcggaaaaaggagaagtccaactcctagtaaaataggtactggaagtggaatgaaagggatgatccatgaatattgatatgtatgttccataaaataaaaaatcctttttattttattcttaaattttattttttcttattcactggtttgtatatatatatttttttttcaaaggggacaataaaaaagcacgcgatttcaaatttcaaacctaaatagaaatgttttcgaattaatataatccttcataaatctttgaaaagcaatatatattcaaataaaaaaattagaaatgattaaaaaatattactaagttactgtcaaaagattttatttgtctttttttattactactaaataaaattttattgtgattttatgcaaatacagaaaaagtgaattataattccatattacaataatttatatacatatattaagaatagaacaaagatttccacgacaaaaaaaaacttaatattaattatataaaaaaagcttgacctaaaacaaagttatttgagtttgattatttaggattgttaaggaatggattttcatcgtggaatttagtgattgtctttcagtacactaagtgagctttttttatttatattttttaagaaagattactataatgatatgttttttttacatatgatgtgaagaaatattataatttttttataatataagctatcagtatagattatttaaatgagtactctcatacggatttcaaacgttaaaaaaaaagttgggtttgaaacttttgaatgtcttttttgttttgaaaataatatataataaaatttgaaagaaaaaaactcgtacggagtacgaaagaataaaataataaatgtctttgacatccaattataccactgaaatttttttttcatttttgaatggcagttccaaaaaaacgtacttctatctcgaaaaagcgtattcgtaaaaaaatttggaaaaggaagggatattggacatcgttgaaagctttttcattagggaaatcactttctacaggtaattcaaaaagtttttttgtacagcaaaataaataaaaaacactataataattagaattagcctaacttaaaaaccaatttgtttaaatacatctaaaaaaaataggaagcaaaagaagaaaaaaagacaatatatagataaaatatataaaaaataaaggttcgcatttttttagttccaaaaaggggattcgtatttttcccatcactaccttgagacaataataaaaaaagatcttttatttcctcttaatgaggaaataaaagatcttgaaattaattactttaagtgagcaaaaaatcttatgtttgtacaatataaaaagatacatcaaaaaaaatattttgataatttttttgatttctcttgagcaattaggaaaatctaattttatttaaaattgctaaggattttgaagaagtttttatttttcgaaaaagcatttttttatcaattttttttcatat

SEQ ID NO: 142012 - DNA, 918 bp, Arabidopsis thaliana landsberg
gagaactgtaggctctagatctgtgtctggcgctagttccgttcgaagcaggacttcatctgaaagctcctgggatggatcaactacaagggggtcaaagccagctaaggatagacggaataggaaagttgtgtctggggccgcatctacactgtatggaaaaggaaagagtgttcctgagcactcaatccagattgatgatgataacagagaatggattcctgtatctagcaatgaaataatagatagagatctggggcctcgtcctactgtcccttcatttcaagttcagaggcatcaaatacatggtcatgaactagctcaggcaagtggatcagagtccacagtgtctcttgctccgtttatccttggccatggcatgcaacaaaacgaggttgataattctggatatacgttttatcccacaggaccacctgttccgattgttgcaatgcttccaatgtacaattaccaagctggtggtaatgcaacatcagatgctctggcaagccaccacagtgtggatgaaggagtagagaatcatgaaccctgtaaaagtttcgactcgtccaggggacttgatcagtctgagatagtagtttcttcgcactccactagaatgggctcttctgcagaacaggtggagcgtaagaatgatatactcaatggtgattttataagccattggcaaaatttgcagtatggccgctcttgccagaattctcaacatccgcctgtgttgtatcctgctcctgttgtagtgccacctgcttatctccaggggcgtttaccatgggatggtcctggaagacctctggcttacaccaatgctgtgaatcaactcatgacctacggacctcgtcttgtaccggttgctcctgtacaacctgtttcaaccaggccacccaacatttaccc

SEQ ID NO: 142013 - DNA, 405 bp, Arabidopsis thaliana landsberg
gagaaagaggttttgtctggttgggatattaactctgttgatccttgtacttggaacatggttggttgttcttctgaaggttttgtggtttctctgtgagtatcttttgcacaccacttgttcgactaaatgtctctgacaaacgtttctttgctgagtttattgaaatctttaatgcagagagatggctagtaaaggattatcagggatactatctactagtattggggaattaactcatcttcatactttgtgagttaaatgaatttgtggttaatcttggaattcaagtatgtgttgttgtaactaatggggttacttgttattattgtaggttacttcagaataatcagttaactggtccgattccttctgagttaggccaactctctgagcttgaaacgc

SEQ ID NO: 142014 - DNA, 258 bp, Arabidopsis thaliana landsberg
aggaagtcgtgaacagatttcagatttaaaccaaaagaccagaatacgagaaagtcttgatggcagctattgagtttaaatgacgaaatggtttcaacttctcaagcatataatctaaacccgcagccattttgcaaagtaaaaatccaactaacatcgaaataaaatagttccagcgttacacacacaagccttacatttccattggagccacgtcttggtcacctgcaacaccaccacctcgttctgctggtgcag

SEQ ID NO: 142015 - DNA, 400 bp, Arabidopsis thaliana landsberg
tttactctactctgacttggaacaatggctgctaagagatctatatactgtcttcttcttcttcctctgctcttgtctttactgatctggattccttcgatctccttagctgctactaaccctgatgatggtaagcacttatttttgcttctaaattacattttgtctcactgaattttagagtgagatctgtgcttattggttgaggagttttagattttgttcatgagtttctgagaattaatcagcattgttgtaattgtgactcagttgctgcaattaacggattattcgctgcacttggagcacctgttcttcctggttggattgcttctggtggagacccatgtggtgaagcttggcaaggcattatctgcaatgtttcagatattataagcat

SEQ ID NO: 142016 - DNA, 897 bp, Arabidopsis thaliana landsberg
ctcccatttaatggtttcctcttaaaccattcccttcccttcctcctaactgcaatctactctccacctaacattgctccgttttgactcgctcgactcggctaagtgaccacaggttcgttttcctatttctctaacttttcattggagatttccatgactcagatccgtgttttttttcgaatccgatccggttaatctcaaacaaaacttgtcgatccggtttgggttttagggcctatagaggggatagtgatgagtcgatagtggaatgatttcgtttctacaaagactgagatcttaagtaatatggaattctgtaatgcagtggttgagatttgcagtagtgggtccctggtttcgatcccaaatcgttatcttttaatccagaacaactggaataaagaaacaaagcttcttcttgtttgattcagttctcgatcatggtttgattaaatgaatcaactttattaaagttgtgttagcttgaaaagggagaaactttttgttggtgtgtaaccgatgatctgtttgatctgtttcagtgtttgcttttttcatgtcaatattttattcacgacttctaaatttcacctttttctgattctcagttcctttcgagccaataaaatggctacgggacagctattttcacgcaacacacaagcgttgttctacaattataagcagcttcccattcagcgtatgcttgattttgatttcctctgtggtgagtgtatcttcttttgtatctttcttaatgtcttaatcagttattctctggatttacttcactattaaatttggtttctttaattatcttaactctttacagggcgagaaactccttctgttgctggtatcataaacccaggttccgagggattccaaaagcta

SEQ ID NO: 142017 - DNA, 225 bp, Arabidopsis thaliana landsberg
aaacctctcaccgaagctacaatgagtatcatcgcaggctcctacgagagattcatttggggtttcaagcttaaacccacgaagcacgacgccgaatctcaaaccctaactctctcccctctcttctcctacccctcccacatcttcccaatcaccaccgtcgcttgttccggtcccgccgcagcttccggcggctccgacgatacaatccacctctacgacctt

SEQ ID NO: 142018 - DNA, 292 bp, Arabidopsis thaliana landsberg
aggttatggacataaagcggctaaacaacatgatgagcgaccatggtatttactcaagagacagactgcttatcccaataagcaatcctgaaattctcgcaaacactacgtgttatgttgagctagacaaatatgccaaacgagaagtagccgttctttacctcgaaggtgcaccgaagagagaacaacctgtacctggtacgaatcaacaatccaacttatcagccgatggaaagcgtaggctaaataaaactctaaggagaagcatgcaagttgatgatggaactgctct

SEQ ID NO: 142019 - DNA, 727 bp, Arabidopsis thaliana landsberg
  unsure (1)..(727): unsure at all n locations
agaattcaatagtgcttgatcagaaagttcatcatgggaaaagttcagttattccttctggtatgttttaacttttcactaattttttttcttccatatcccatatagttgtcctataagcttctggtccgatgtttattagagttaatttaatattttttattcctttcttagttgatgatagctgctgctgaacttgtttctaatcttttgagtagatgatcatggagaacaatcaaactccagttcttctggagtcatgatggagaatgccttttccttgaggccaaatagttctcagaatcgtggaaatttgaactgtccaaaccccattatcttggatctctnnnnnnnnnnnnnnnnnnaattgttagacagtttctgttgttctctcggctaacataaatatcctgtcttctaaatcatttttttaatatatgatcatgcagcaatcaggaagcatatcctggtttcaatcctcatcgttatatccacaaagaattgtcagaacttggcaaggaacaaaccctgaaaagcagcacggattctgatgtggctaggatgacaaccaattttgatggtatagacttaatgattcatgccacaacttttaggacatttggtaacattaaatcatttggcaggctctgaagaaggaaacaaacatctgcagggtgcagagacatttcttcagttatctaaagctaggaaattgggcatactggat

SEQ ID NO: 142020 - DNA, 443 bp, Arabidopsis thaliana landsberg
tgcgggttcatccaaaggagtattgaatcagaacaatgagaatcgggggtggtgaggcagctaatgtcagtgtcgataacaaagaggagatagagagagaaacaaaagaaagcagcctacatcttgaaagccatccagcccataaggacaatgtgagagaagccccccataactctagacctttagttgagggacctgggaaagacaactcagaaagagagggtggagagctacaagatgatggtgctgttcataaatctcgaaatgttgatggtgggtgatgccctaatcagccaatcgccaaaagatttgaaattgcttcgagataaggtgaaggctaaacgagagaaagctaagaagttgctaggtgaaagaacgaggaaaaaggatttgatggatgaggatgatttgattgaaagagaactggaagatgtgcaactagc

SEQ ID NO: 142021 - DNA, 429 bp, Arabidopsis thaliana landsberg
cagaaattatgaatcttattaattattattgataattattttacttcactccaccatatgtgtgaactagtggagccttggaggatcactaacaaagaagaaaataagaaacaagatatatcatcactttttgagaacttgctcttcatttaaacggttcatttcttctctttgaagttacgatcatcaaagaacttcttagggttgctctcaaaagcctccctctaaacgctttgtcgtccaccagatccaggagcaaccattgttttaccgatgtcggaagtgctaccagaaccaccgcttccgccactcgtaccaaaattcttggctccatcagctttggtgttcttggcgtccatggcttgattttgggattggaaacgattataaattgaaggtttggttattttgtgaatcatgaattcgact

SEQ ID NO: 142022 - DNA, 277 bp, Arabidopsis thaliana landsberg
caacgcatacacagctctatcaatcgaaacagggtcaccaatctgaatagcagaagcaaatgtagtgtttgcttttaatggattgaaatcttctttaaacccagatttgtaatgcaagtaaagtggatttgcattagcagcttgagcacaaacaagcctagggatacgatcaacaagacctaactctttacacatatgaaaccctttgtaaaacgcatagatgttaccaagattgcctccaggaacaatgacccaatcaggaacttgccaattaaac

SEQ ID NO: 142023 - DNA, 1361 bp, Arabidopsis thaliana landsberg
atgggatccttcttggaggcattttgataatgtaccagttccacaactacatgcagccgattctccttctcatgtactcattttggataccacaaatagtcgccaatgttgtccgggattcaagaaagcctctgcacccatattacatcttgggcatgacagctacacggttagctataccgttatatgtttttggatgcccacacaacttcatgcgtgtagagcccaacaaggtttggtgtatatgcttgtgcacattcatggggttgcaagccgtcattcttcttcttcagcattattttggttcacgctgctttgttccccgtcaggttagtttgttttgtattcatgtaaactacacatgaaacaatatatctaataaagtgaacactaagttttcagttcggtttcagtttggcttgaatatttcaagtctcgttcccattgctaagttgtttttgactaccactaatctctttcttcatcgttttgcctacacgcagatgctaccagagaaatacaactaccaccgaagatttaatcgggatgtaagccgcaccactgattgtgttatctgcatgaccgctattgatctcagacagcataccagtgattgcatggtactgcagttttttcctgcttctcttaactatattttttccccaatagacagaatcatgagtgtggttgttctgaaaacaggtaactccatgtgaacatttctttcactcgggatgcttacagagatggatggatataaaaatggagtgtccaacttgtcggcggtctcttcctccagcatagaggatgttttcggtttgttaggatgtacagacttcactcagattattgcgggtaacaactcaaatctaaattttttattttactttttttccttcgaagtttctttgcctattaggtctatagatagggtcttggttctatctgaagaaaatttgttgctaacagaaatatgatttcataaatgagaattcaaaatgataaaacccaaatctctgtaaatagttagcctacgaggaatcatgcttttatttgagtgtttcaggtttgtcggttcctttttttgtctgactgtgggatgtattacttatttgtcaaacattcctgaagtgtgattgttcacaaaatcgcgaagttaactgctgcaaaatttgatcctgaaacaggtggggctggttctttaatttcaggtccttgcagaggtttagaagatttttagatgaaaacagagcaaaggtggaatctgtaactgcggctagataccgcagatagacaattgtgttctgtataaactgtattacgttataatcttagtgcatattcttcaccccacaactaaa

SEQ ID NO: 142024 - DNA, 337 bp, Arabidopsis thaliana landsberg; identical to SEQ ID NO: 57000

SEQ ID NO: 142025 - DNA, 407 bp, Arabidopsis thaliana landsberg
cacattttcacattcatgtcgaattaattaagttggaaattctgcaaaatcatttcaagaaagaacttgatgagagctggtaggtcttttgattgactttcgtggtctatattctcaatatatagtatatgctttgaaagttgaatatgcactagttcttgttgtgttaagagttaattagcgtgaagtaatataattctcatatcgagtgtttaatttactagctttatgacaaaataatcataatcaaatagaatactaatgaagaaaaaggtaatatatatatgtaagaaagatgaattatgtaaagattgcttttactagccctgtgacaaaaaatgttaaatctttatcaaattgaacgatgattgataattgaaatttaattttaatgaaaaaaagtagaa

SEQ ID NO: 142026 - DNA, 243 bp, Arabidopsis thaliana landsberg
ctcagccgttggtctcgctgtcctccggatcgtcatgtaactccatctgacggtgccggttttaaagaccaactcatcaatcttccctgtcttttaattacgggatgaaaatcttggtcatgttaattatatattcgtatgtttaatgtaattgtatttccccttttttatgtgaaagaaataaagaataaccagtctagtaaatttgaacccttcatgtatatgaatatgatgatgttcttt

SEQ ID NO: 142027 - DNA, 123 bp, Arabidopsis thaliana landsberg
tgttgattaagttgtattctttatttttcctttgcatgtcaaacacagattttttgctgtttaaataagttgctagctaagtctagatgtgagtttgaaaagtcactacaaaactacttaatt

SEQ ID NO: 142028 - DNA, 435 bp, Arabidopsis thaliana landsberg
tactactcacacgaagcaaagaatcacccaaaccaatccaaatgatcaagacagtacacagagatcgaaacacaaaaccaaaccaatgtctctgcaaaagtttaagcttctcgcaactcattgcagcaccgtcgcagagagtccgacacgtagtccagtcatccacctccgccgtcgtaaaacgctgcgtttgttactcactcgatcatcagaccgatggagattaccggagatccaaaacaacgtagatgaatcgaagaaaacggataagagaggtaagatccgatctagccggaagcttggagatctttttgtttcgtcgccaccgtttgaggaaagtggcggtggcggcggcggagataaggggacgaagatggaggtggagatggagagggatgtaccggttaacggcgttagtaataacgcaggttttgg

SEQ ID NO: 142029 - DNA, 255 bp, Arabidopsis thaliana landsberg
aagacgaaagaggagaagaatcagaagggaaagcgaaggtacaagagttgaacgaacagagaatcgtcttcgacccataaatatttttcgatataggagagcttggattggggccgtatgtgtatatatttatacggtttagggttcaaataagaaaaaaataccaaaaagacgttaattactttatccaatttatatgtttttttaacaatgtagctttcagtctatagattttatttcaatccattaataggt

SEQ ID NO: 142030 - DNA, 182 bp, Arabidopsis thaliana landsberg
cccacacacctcattaacattataattgtttttttagttattcttcaatttcaagaaaatgctgcaaggctttctcttcctcctctcagtcgtactcctcttctcctcatctgcagccgcctgcgaccgatgtcttcacagttctaaggcagcttatttctcctctgcatctgctctctcct

SEQ ID NO: 142031 - DNA, 1288 bp, Arabidopsis thaliana landsberg
tcccgctcttgtggctgaagtaacagacacgagtatgaagattgttgatgatccagacttggggaaaccgcctcagactggtgttcttaacctcggtgtttcagagaatacttttaacattggaaagagtaccagagaggagaacaaacccgatccactccgaatgaagagaaccggtttgcaaaagcaaggatcaaaagtgatttttggtgtccctaaacctggaaagaaaaggaagttcatggacgtgagcaaacactatgtttcagaggcaagcactaaaactcaggaacggaaggaaccagttaagcctgtgagatcaattgtgccccaaaattctggaataggtagctggaaaatgccttctaaaactatctccatagagaaacagacaacaatatctaggcccaagactttcaaacctgcgcccaagcccaaagagaaaccgggtgctacggctaggataattccccgcaaggactcgcgtaatacaacagcatcagatatggaatctgatgagagtgcagaaaacaggggtcctggatctggtgtttcatttaagggaacagtagaagagcaaaccacatcatcctctcatgatactggttcgaagaatagttcctccttgagcactaataaagggagagtggctcctactgcaggaaggttagccaaaatcgaagaggacaaggcgttggctgaaaattcttcaaaaacatcggagggaatggagccacgtagatctatccgcaggatccagccaacttctagagtaagtaaatgggagatttacatttatgtgtggaagtttgcatagtgttccctgatttctggtcatgctcgattcatttaaaacctgtatctgtgttctgcagctactcgaaggtctgcaaacgtcgatgatgacctcgaagattccttcggtatcacacagcaaaagtcacctaagtcaaagcaaaaagtagcagtagaggtgatgtttgttgtatataagtgtccaaaagtgaaataacttggacgtaaaccaaatacataactgagactgttgatgatgttgttagcaggcaagtgaaaaggagcagaagaagcaagtgcacataaacgcaagtggaggaaacaaaagcagagcagtatcggctgctattaggttgtttgtaattttagtttcatgcttttgaaaaaaataactctttgttggttgggagagactaaaaaaagtaggggaagagaagaagaaaaatctacatatatatttttggtagactttttggccaaaaatccgttaact

SEQ ID NO: 142032 - DNA, 449 bp, Arabidopsis thaliana landsberg
tctctttctctctctcttcatcttcaacaaatcacgcaccatcataatcatcatcatcttcatcgtcatcaccaacttcttcatcatcaccatcaatggaatttcccaaaccaaaccaccctttaccctaaaaatcgtttcatcttttttccttcttctaattttttttaggtttttaattaacttttgcttcaagttttcttctatagatttcttactcagaaaagtttcgaattcgaccctgtagcttagttgttgtttataatttcttgtgatcattcacagtacaaaaaaactaattcacccaccgacttcttcttcttcttctcttctctgtggcccatccttaaacccacactgcttttgcttttcctttttttttccgggaaatttgatctctttacctttcgtcattattagtagggaatgatcttttagttttttttttg

SEQ ID NO: 142033 - DNA, 212 bp, Arabidopsis thaliana landsberg
gcttcaagtactcttatcaaggtagtttgtgtcttttgttgatacctttcaaatatcaattgtcgtgctctttcctgtattaagctctttgttaacgttccgatataggtagtggaagaaatgcttcttttaaaagggaaaatggagctaatcatgtaacaagaggttctagaactgctcagcctgccactaacaaagcaagcaacatcaca

SEQ ID NO: 142034 - DNA, 283 bp, Arabidopsis thaliana landsberg
caatcttccactattttactacgattttgtttttcctttattcacctgacatttccagtcgcaaacaataagccttagtgaaacacactgcacaaaactgcagcaaatgttgctctcaagacaaaagacattccgggggaaacaaataaaaaaactcaggagagttatttaagataagcaaaaaaagatacatcttaaactgatgccatttcgtttttcagtttcatgtagacacaaccttcttcaccacttttgtaacctcttccggggccttctctgccgg

SEQ ID NO: 142035 - DNA, 433 bp, Arabidopsis thaliana landsberg
tatatgtgaaacaatcaaactatatgttatacaaacaatatacatatactgcttcaacaaagcaattaggcagttcttgtttttgatttctctcttaagagtctgtcttaattactttagagaaggaaaaaaaaagcactttctaatcttctaaacagtccacaacactttcacacaaacgggacaaatcaatagagtccgtatgaagtaataatattattttttcctaatgattttgcattcccctgtaggtcataaacatatatcatgatctgaatggactccatttcgcgctggctttccgatctgtaagcaatcaatcggtggaacggttgcggaattgagctctccaaatgttttccaacaaaatggatcgtacatgtggtattgtagttgcactggttttagctctatgcctgataattgcacgtct

SEQ ID NO: 142036 - DNA, 445 bp, Arabidopsis thaliana landsberg
cacaaaaaatatcttttaatagtggaaaaaagatgttttgatattaataagttacaaactcataacaatctgcagacaagatcttaacatgttcaaccattctacatagcaaaaagatgggtttgcgctgtaccttcaagcaattaccaatggcagtgagatgatcagcagaaaaaaacttcccggaactgaaaggaactggcagtagcttgctaaatataggatgatcgactgaaaccttttcatggagtttcagcgctaagagcaaagcatctgggtttcccacctcggtggcttgttcaaaccatttataaagttctggagcttccataacatgagtaacaacaggttcagtaggcaactgcacaataaaaaagataggatcacaaaaaaacttcacaatgtgtaataaacccgcactaaactttgcacataagaatgaatc

SEQ ID NO: 142037 - DNA, 205 bp, Arabidopsis thaliana landsberg
tcatcttcaattgaaaaaaaaaaaaaaattcaacccaaagctctgcttcgttgagctaaaacaatggcggaaacaactcccaaagtgaaaggccacgtcgtaatcttaccatacccagttcaaggccacctaaacccaatggttcaattcgctaaacgtctagtcttcaaaaacgtcaaagtcacaatcgccaccactacctaca

SEQ ID NO: 142038 - DNA, 717 bp, Arabidopsis thaliana landsberg
atttccttcggagcctggccggcgaatccgacaggtcgtttcagctgtgtccgaaggaaagttccaatttttatctgtttttcttcacggaaatccagttaaggtaattgtctacatttctcgatttactttggtttctctgggttttgctgttttcttttctaatttctcgaatgattcatcatttcttgcatttggggtgatgaagaagcacaagtttacacattttctggtttatatgcttcacaagtgcttctcttataatgttgtttattagtattggttgtttgatttcactgaaaattagtcagtcaacttacagtgtattaattggttcaataaatttttcataattcatttcttaacatgattttacctcattcattatatttatagatttagatcccttgataatgatctgatattctttctgtgaatttgaaagttgcaggtttccacattgcacagctgtaccatttgtcgagatcacaacactcaagtctcttagatttagcaagcttatggcttcattgcagttgtacggagttaaaactccagggcttgctttaagttcaaagaggcttgagtttgcttcaaagggggcatgtttttcagttacgttgccctcaagtagtgctgtctttagagacgtagagcattcttgtaggaatataggtttgagagttagttgtgaagctctaagagtcgatttgcttc

SEQ ID NO: 142039 - DNA, 983 bp, Arabidopsis thaliana landsberg; identical to SEQ ID NO: 9120

SEQ ID NO: 142040 - DNA, 382 bp, Arabidopsis thaliana landsberg
atttcaaatttaggatatatacagtatgttctattgtatatgtattggactaatgcgttaaagctgttatagtgtgagaaggacgtaacgagaggtcttcgtggacctaataataataacgttttacggttttatccaaagaccaaaaagctactagatctacgattcaaaccaacacgcataaagatgaaaattaaattttaaaaacagatctataatcaacatgtcatgtttggttggtctatttttttcaagtttttgaacactcccaactttccctccactcctttagtttaccacaatacccaatctatctaaacatgtaaccaccaaactccaaataatttgcatggcatgtttgagtaatgtgatccatgaattt

SEQ ID NO: 142041 - DNA, 486 bp, Arabidopsis thaliana landsberg
cgatccttttgttctctaaccaccggtttcctctttaaccggtctctggataatcatcataatcattaggatcatcaagataaggaatctttttgagtatatctctacaccaaatcgaatctatggatcaaaaagttagacagtttgaggtttgcactcaagacggtagcgttgatcgtcacggcaatccagctatccgagctaataccggcaaatggctcactgctattctcattctaggtaatgattctctctctctttctctctatatataccactgttctttgtcttaaagtgttgtgttttggattctaaagaaatgggtttttggttgatatagtgaatcaaggactagctacgcttgcgttcttcggtgtaggagtgaatttggttctgtttctgactcgagtgatgggacaagacaatgcagaagcggctaataatgttagtaaatggacaggaactgtctatatcttctctttgcta

SEQ ID NO: 142042 - DNA, 368 bp, Arabidopsis thaliana landsberg
aagctaaacaaacaaccctcctacgctttgcttttaattattttcttctttgcttccatcatattcatgctctctctcacagaccacaaataattttacacgtttatcgattaactaattatataagggtcttttatataaactcctaaattatgatctaagatattgtgattgattggttctgttttttttgtaagacctcatccaaaatagctcatggtcggctggtcgaagatagatatgcaggtcgccaaaaacaaaacaaaaataataagttttgatcctatcggtttggtccaaaatgatcatttcggctcatcaatatcctataatatcatcaaatgtccattcgtattaagcctgaatta

SEQ ID NO: 142043 - DNA, 132 bp, Arabidopsis thaliana landsberg
ctcaacaatggtgtttgaagcattcgaagtcggcacagtcccattcaattccgatggttggggccaccagatgcttccgacacttcctccaccagcgtcgcggcggcgaatctcctcccaaacgtccccttc

SEQ ID NO: 142044 - DNA, 351 bp, Arabidopsis thaliana landsberg
tgtggtattcaacaaatttgtctcgaatttatagagctcgaagcttcaaggtacggtttcaaattttctcgttgattttctgggtagatagcgttttccatacttctcttcaactttatttcatagcatagctctgattttgctaaaacttcatctgattagttccgtggatcctgaaaatcacgattttgcgtgttgtttagggttatactctgtagttgtgtgattagtgtttgaagaagctgggctagtgttcgatgtttacgtcgataacctaattttgcaggaagttataatggctagtgaagatgaatcgattgaacaaaaagctgctgctcgtaaagaggcact

SEQ ID NO: 142045 - DNA, 564 bp, Arabidopsis thaliana landsberg
atatggaaagaaaagtattatttagttacaacgtgaaaacacaggttcgtgctactactccaatgatacgggtctcaaaatactcaaaactctggcatgtctcaattccacaaattattgtttaatcattctgcttcttctgtaagtttatatataaatgtgtatatactcaacgtaaatatttgcttacctcgtatattttctctcttctcaggcttattaattctctgcagataactgcagaagaaagaagaaagaagaagaagaagagattagagcttgagccataatatataatcccttgatcattagtctaaagaaccacataaaaagatgggattctggtcgttgttggaggtggcttctatgccggttattcaagttcttttcatgagtcttgtgggagctttcatggcctctgatcgttgcaagctcttccctgttgaagcccgtaattccatgaaccaggtaaaccaattcaatgatccttgactaattgaaaaaaaacctatcaaacattccagatgtgtttttattgactttggcaataacagatatgtttta

SEQ ID NO: 142046 - DNA, 641 bp, Arabidopsis thaliana landsberg
atcaaagaatcaggaaagcaaacacaacacaactaacaatggatttaggaaggtttccaataatctcaatcctcgaagacatgcttgaagtccccgaagaccacaacaacgagaagacccgcaacaacccttcacgagtttacatgcgagacgctaaggcaatggctgctacacctgctgacgtcatcgagcaccctaacgcatatgcattcgtcgtggacatgcctggaatcaaaggagatgagatcaaggttcaggtcgagaacgacaatgtgcttgtggtgagtggagagaggcagagagagaacaaagaaaacgaaggtgtgaagtatgtgaggatggagagaagaatgggtaagttcatgaggaagtttcagttgcctgaaaatgcagatttggacaagatctctgctgtttgtcatgacggtgtgttgaaggttactgttcagaaacttcctcctccggaaccaaagaaaccaaagacaattcaagttcaagttgcttgagtttgttttgtgattgtgtgttggatttatctattttgttttgatttatggatttgatgaatgtaatcggaatgcgtgagggatatggtgttttgttctaagatgaaataaaagtttgttctgtttctttcattc

SEQ ID NO: 142047 - DNA, 161 bp, Arabidopsis thaliana landsberg
  unsure (1)..(161): unsure at all n locations
ctgattatatccttattgtatatacgcaatagcagatgtaagagttacatatggattgacaaatgttgacgagcccctccaaaatcatatcactgagaaacanagagcaaaaaaagaaacacaattgaagaaagtaatttaccatttgactgcccctcttt

SEQ ID NO: 142048 - DNA, 328 bp, Arabidopsis thaliana landsberg
gtgataaacaagaatggcgactgtacgaatctcctccactagcatgaccaaggccgttcttagaagccagacaaccaacaagctcattactaacaagagctacaacttatctgttggatcaacgaaaagggtttcgagatcttttggtttgaaatgctcagcgaattctggtggtgctacgatgtcggcggtatacaaggtcaagctcttaggacctgatggtcaagaagatgagtttgaggttcaagatgatcagtacatcttggatgcagctgaagaggcaggagttgacttgccttactcttgcagagccggtgcgtgttctact

SEQ ID NO: 142049 - DNA, 387 bp, Arabidopsis thaliana landsberg
aaatatctgatttcgcttttgaatcgccattggttgaacaatttgacgccgatctagatttctgtcgctgtgaaggtagtgtcctgtttttccgatcaattggtttgttccgatcgtttctcgtttacgctttttgttatccttgagaaattttacgttgcaagagagatctttgattcatgggtgttgaagcattcgtgttaaaatgtatgattgatcttaatcagtgagatcggtgagctcaagttctgtgttttgtaattgagattcgaagaggtatgtcaacaaagttatggagatgggtgttagggctgatatacctatttgccgttgccacgatttggattgcggctagttttgtagtccagtctgtggtggaagctggtg

SEQ ID NO: 142050 - DNA, 454 bp, Arabidopsis thaliana landsberg
aaagaagtagagaacactgacacctgtatatctgggagagaatcacgagaagacaggctgtgctgactctgtaaccatgcgcagaccccaaaatatatgacaaaaatgttaaatgagattaaaagaatgagcaagttgaaactcgggaatatgtagcggaagattcacctatctgtaaccatatccaaaacagctccaaatgtagagactgaaaggaaaagagttgtgtgttacgttcaatcgtttctgataatgtagaacaagaataaactgtgtatgggactaaaaatattgatcaatgagacaatgacatgaaatgtcatatttaatcaatgtcaggatcatagaggaagcataagtaatgaattagttgaagctaagaaaagagatggggagaatgaaaagagcaccttggttaaatttacgagcgcaccatccatccacagcatcacaa

SEQ ID NO: 142051 - DNA, 690 bp, Arabidopsis thaliana landsberg
atcttcttcttcgtttcaagccctaaattgtgtatcttctttgttgcaatcttctctacgaagagaatggtgaagagggtcaagaattgagagactccaaagtgaagtctaatcggcacacaaacttgaagcctttccgagctgtcttgcaatctccgtcgtgttaattaaaggaagggttttgcgttttctttcctgattcggtcgcttctatggacatggagaggtaatcttcggaggacaatacatttcagatatgtgtttcgattagtttttttgtctttttttctccctcaaatttcatttctttttagcttcaattaaattcagatacgggttatgattaatctgcacttctctagttgtctgattatatcttctcattgtttcttctttaggagttttccatttttgcgttttttggttacataaaaaaaaaaaagaatgcgaggctaattagagatctaagcttaggtgtgagatacataatctttcagtagctatctgtctttgttttgtatttactgttttctgtgtccaagaatgtgtagtttgatttcgcatcactgacattggttgcatattagataactgtctgtgtacatttggttttatgcagtgcagatactgaacctaccagtttaaattgtgggaacaacatggttgtcaaaacttatccattaggaatgg

SEQ ID NO: 142052 - DNA, 350 bp, Arabidopsis thaliana landsberg
acataaagccaaaatataaacacataagccttttagcatgagttcaacgttgagcgatgtgtttagatcgcatcccattcacatcccactctcaaacccacctgacttcaaatctctcccggattcttacacgtggactcctaaagatgatctcctcttctccgcctccgcctccgacgaaaccctgccgctcatcgacctctccgatatccacgtggccactcttgtgggccatgcttgtaccacgtggggagcgttccagatcaccaaccacggcgtcccctcgcgacttctcgacgacattgagttcctcaccggaagacttttccggcttcccgtcaggggaagct

SEQ ID NO: 142053 - DNA, 405 bp, Arabidopsis thaliana landsberg
cgtcttcttccatcatctgcttaatcattttttgccctaacaccaaaaattatcgatctttttttttgtctactatatacctagatatataggtttttttgtccttctctttggatcatttccacgacgaaacggagaagaggggacgattttgccagccaagaaacaaagaattgttaaggaactgaagattataaccttctgaaggataatgaagtctaagaagaagcttagcttgagacaaagcaaagcttccaataggaacgttaacgaaaccaaacctcttcatcatctcttcccaaatctcaaacctccgatgtctttgctttctctccgtctcttccgccgccacaacatccaaaatctccttaccgaaccaccgttgctctagggttagtctctctc

SEQ ID NO: 142054 - DNA, 469 bp, Arabidopsis thaliana landsberg
agtccattgaggtatctgaagcggttgctgttgagcattaaaaactctgcggtacgatcattactctcaagactcatcatatctcttgcattaagtaaggaggacaagagagaaagaaaccgtataatatttatatatatcttcagccaaaacttatatgagaagagatgggtaaaaagagtggacagaatcatgtggatttggttctaaaggttgctgtgcttttatatattcctatgtttgatggtaatgtttttaatcttttaaggggtttttttctttcttttatgtcaagatcttccttctttttctttttgatgctttcaatcctaaaaggtgaatattcaggagatactgctttcgttctgtctgtgtattcttttcttttccttttttcttatttttgctattatggcttatgtgcaaattcttttgttatataattgattctctgctttccaaaattttg

SEQ ID NO: 142055 - DNA, 642 bp, Arabidopsis thaliana landsberg
gaggatgtttacgtaatccatggacggtgagagccaatgaacactggtgtgttttttctatctgttagatacagtacctgtttaacgtttagagtctttctcctacaggtgggtgttggttttcttgctcaatatatgatcaagccaattctaggttttctcattgcaatggtatgtttccactaatgtctatcacatttacttctatttgcttctctgaaatggatgcttatgcaatattctattttgtttaagatattggttctcttcgtccgtttttacttctatgggctgtatacgctttagccaaatcaaatgttgattggaatattctttctttgattaacttagatccaagagtcgttgcatgtccaaacatcactttttcttgaaacgtttgaatcaaatatttgctttctagttactgtagaaacaattcctggcatactcacttactccttgagggatttctcttgtagagaggattgatatggacatatgctatgtgcatttggaaacactacatttggttaacattaattgttgagcagccaactaatacaaactttttctgtgtgttttattttagactcttaagctttcggcacctcttgcgactggccttatcctagtctcatgctg

SEQ ID NO: 142056 - DNA, 1526 bp, Arabidopsis thaliana landsberg
  unsure (1)..(1526): unsure at all n locations
gagttttcgaaaattttgaagggagcttttctgacagatggctagattctttcttctctgttgcctcttcgcggcggtgctgacgtcatcattgacggaggccggcgacaataatcaagtctactcgccttgttcagattctactgttgcgatcggcgatggattcactttcggcattgccttcgctgcgaaagattctttcttcagtacaaatcgatccaaatccgttcagtactctccctgcgatcatcgccatctctcgctcaacggaaactctgaggtcgccgtgttcagacctaaagtcgatgagatcacactccttaccatcaatacctctagttcctccagtttccgcccggttcgttctcatctctggtttatcttggtgaattagggtttcgattgcaggtttttgatcagattagaatggattaggtcactcttaaggaaatttagtatagatcggaatcatatgcccagattagttgacttgtctaaatcctggcttagaatgttagctctggaattctaagctaattgtcgagattacttggattggtagattcaattttcccgtaggtaacgaaggtttaggttttaagctctgttcttggacgatctggttcctttctgcatttgtttcagtgagatgaaaggttcaaaacagagacttgccatgttagattcctatagattaagagtttggtttctgacgaagtaggtggaaatcaggttaacttgtaatgtgtatatcattagactttcagtgtagatacctctggaaaaagtgattttagtagtagcttcgtcacagtttctcccgaacattactatacgatttttgtttatcctcggaagtagaggtcatgaatgtgttagcctatcaaattatttgtttgtctgatgatactttgtgattccaggatgcttccaagggatatatggtagcattcgctggtgcaaaatacgctgcaagatcactcccaattatggttgcagacagcaatcacatcgtgacaagcttcacccttgtaattggataagctcatatcaaccttcattttcatttttcttatagaaagtttccatctcttattagttatgtaatcgtcatatatcttgggtgaattctaggttcttgagttccagaaaggaaggcttgagaacatgttctggaagaaagacggatgctcgaagtgttctggagattcgaaattcgtgtgcctcaacaaagaagaatgtgcgatcaagccgcaaaactgcaagaaccaaggaggacaagtagattgtagcttggggatccaattggcgttttcgggcacggataagcactacaccgcgttgaattcgtggtatgaggttgcaaatctgaagcagtactcgctctatggcctctactccaatctaaaggactcactaaccaacccattcaagaacatcttctgatgactntctttctcctttgtgtgttgctactcttgtnnatttgattattntttcacctgctttctttggattatttcttc

SEQ ID NO: 142057 - DNA, 404 bp, Arabidopsis thaliana landsberg
aaatttttgtttttatttttctgaattacaatggcagacaagattttcactttcttcctaatcttgtcttcgatctctcctctcttatgctcttctttgatctcacctcttaatctctcacttattagacaagcaaatgtccttatctctctaaagcaaagttttgattcctatgatccttctcttgattcatggaacattccaaatttcaactctctatgttcttggactggtgtttcttgtgacaacttgaatcagtctattactcgtctagacctatctaatctcaacatctccggcactatctctccggaaatatctcgtctttcgccgtcacttgtttttcttgacatttcttctaacagtttctccggtgagcttcctaaagagatctatgagctctc

SEQ ID NO: 142058 - DNA, 518 bp, Arabidopsis thaliana landsberg
agtgtttgcatgtttcagaaagaagataatgaagagatatcgaggtgatttgtttttttagtttcaattttgttcttagaacttacgagattgtctctcaagtattttatattgaaattttggtagttactatttttttacaggtgaaaatttcagaaaagggattgaggaagaggacttggacttgcctatttttgacagaaaaacgatttctatagccactggtgatttttcatacgtgaacttcctaggaagaggaggttttggaccagtttataaggttgaatataatgtaaccatcacatattgcttttatagtactaattaaaaatctttaattgtgattattttctttgtaaattactgcagggtaagttagaagatggacaagagattgcggtgaagaggttatccgcgaactcaggacaaggagtggaagaattcaagaacgaagtaaaactaatcgcaaaacttcaacatcgtaacctcgtgaggcttttaggttgtagtattcaagg

SEQ ID NO: 142059 - DNA, 308 bp, Arabidopsis thaliana landsberg
cgccacttgcaacacttgggaacctgtctggtacgttctccgtgtaaactacaagggagacataatatcaccatctggttcctgttatcatctgaagaattcttgttttcccttccagtgataaaatgatctttataatacatatagatatattaaattgctgtattttaagattatagatatataaggtacatgagagtgtttatttaaaaaaaatcacttggaattcatattttgtgatacgttagattggaatccatttgggaaaagaagaatcatctgttcttatgtctcaaattttgacttca

SEQ ID NO: 142060 - DNA, 685 bp, Arabidopsis thaliana landsberg
ggtaaatttggaatatctttcctgaaaaaacagtacccacaaattccaaatccaaaggatactaacggtaacggcagtaacaataacaacggtccacgaaacccaaacccatctgggtatgacgtcatcagcgcctccgctgacgtaaaaccacgtcatcttaacgataagcaacggcgctagaacgcacctgcagacgctataggacgcgtaaaacggcaccgtaacgaaccggtgcaaactcaccgctagaggcgcgtctttcccacgcgcatccgcgagcgtccacgtgttctgacacgcgctcgtggcctccgcgacgactagcagcgcgagcagagcgcaggcgccgtgagcaaccatgtaacggcaggtgaggaaaacgaaaagcacggcgaggtgatgagcggcgaaaagcgagtctccgccggcgggagaaggaaacacggcaaggtggacgagatcagcgaggaaataagcggagctgaaatcgagaattgagttttgagattgggtgttgacggaggagaatccacggttaggatcggagagtaaggcgttcgtggcgaggacgacggcggagacgccgtggaggagggagattaaacagctggaagctaaaggacgagtctccggagtccattttttgaaaatgaataagtaaccgagaagataaacgaagatg

SEQ ID NO: 142061 - DNA, 265 bp, Arabidopsis thaliana landsberg
gtcaaaaggaaatgacattggcaaatttttaatcagacaggacacctaaacttcaaagtgtttttaactattttgaaagtcttaagagttgcgacttctatgtaaatcaagactattgtataatgaaaaattgttcttgatttcttcttcgaattaaccaagcaatgattatagtaacaatttcatatgtattatattgtccatagtattaagctcaatttcctttggtatcgatcaactcatctgagattttctaattagttag

SEQ ID NO: 142062 - DNA, 524 bp, Arabidopsis thaliana landsberg
ctccaccgctattcaacaacaactccatcgtgaacaccacgcgcctcaacactttcctcggcttgtcttcttcttcgccaaacacttacaacaccaacaatctcttgttacgaccgtttgctcaaaaactcactccagcgactcctctcttatccggatcacaaattcagcaatatcaaaaccctaacaacggtttcgaggatatgaatctgcaagctcttcttcaagctcatatttcaaaccctagaagcaatgagcacgatcagtttggtcttggtatgatgcagactccatctactaatcctcctactacaacggcagcggctaacgggaacataaacaccggtgataatggaagctacggtggctccgatcatgaacataataatgacggtacttggttatcttcgtcttccgaccagagaacataaatatatttatgtatagtccaagtccgaaatcaaagctaatctcttgacatgattactcaacaaattaaacatagcacatatagcatgatgaag

SEQ ID NO: 142063 - DNA, 221 bp, Arabidopsis thaliana landsberg
taatagtcctcataaaactccacaatcttcgtgatacaacaactcttacacttggtctcaatctgaaaagtgaaaccatctttctcttacagggtcactgaaatcaattggttcctgctccgatgtgaagcagctcctcggggattgcagctggatctaagtcccaacagttttcgggaaagccgctggttgcatctttaagaaaccaagacggcacttga

SEQ ID NO: 142064 - DNA, 363 bp, Arabidopsis thaliana landsberg
  unsure (1)..(363): unsure at all n locations
cttcttcttcttctgtaacctcgtcttcttcagcttatactcatagctataccaaagaaaacctcttaaaacccttcttctctcgatccatcgatcagcaacaattcacttctaatcgatcaagagctttccgatctcgtcgatcccaattaacatggcttccaacggcgcttctccggtctttttctctcttgatctctgtgtgctacaatttagtctctttcttttggctgcttttctcattcacactcttaaattgacccattttgtcaatttctgaanatgcgcagagaattgttgatgctactgagaacagcttggataagatcaagcgacaattggcatcttgctctggtcggaact

SEQ ID NO: 142065 - DNA, 362 bp, Arabidopsis thaliana landsberg
gccgggacaagttttgttgtctctctagggaagacgtgatccgcttccttataggtgtccttggagcattagctcctttaccactcacatcaatctccactctgggaatcatcaatcaaaactataacttcattgaagcctctcttccagccattgaagccactcgtaggccactgtgtgaccctagtgcgatcgccgtgttggaacaaaccgaaaacgaacaacagttcaagataataggagaaatctcagcttcaaagctctggaaatgtgattatctagctgcagcttgggctctagctaatctctatgcaggacaatttgtgatgggagttgaggacaacatgtcatcaagatcattc

SEQ ID NO: 142066 - DNA, 950 bp, Arabidopsis thaliana landsberg
tggggtaaatgggttgcagagattcgagaacggaaaataggaactagactttggcttggtacttttcctaccgcggaaaaagctgcttccgcttatgatgaagcggctaccgctatgtacggtccattggctcgtcttaacttccctcagtctgttgggtctgagtttactagtacgtctagtcaatctgaggtgtgtacggttgaaaataaggcggttgtttgtggtgatgtttgtgtgaagcatgaagatactgattgtgaatctaatccatttagtcagattttagatgttagagaagagtcttgtggaaccaggccggacagttgcacggttggacatcaagatatgaattcttcgctgaattacgatttgctgttagagtttgagcagcagtattggggccaagttttgcaggagaaagagaaaccgaagcaggaagaagaggagatacagcaacagcaacaggaacagcaacagcaacagctgcaaccggatttgcttactgttgcagattacggttggccttggtctaatgatattgtaaatgatcagacttcttgggatcctaatgagtgctttgatattaatgaactccttggagatttgaatgaacctggtccccatcagagccaagaccaaaaccacgtaaattctggtagttatgatttgcatccgcttcatctcgagccacacgatggtcacgagttcaatggtttgagttctctggatatttgagagttctgaggcaatggtcctacaagactacaacataatctttggattgatcataggagaaacaagaaataggtgttaatgatttgattcacaatgaaaaaatatttaataactctatagtttttgttctttccttggatcatgaactgttgcttctcatctattgagtaaataagcgaatagcagagtttctctctttcttctctttgtag

SEQ ID NO: 142067 - DNA, 814 bp, Arabidopsis thaliana landsberg
tgaagttaaaagcctaaaattttggtttcaaccttctacaataaatccaaatcactaaccatgatgaagcacttgctaagcatcttcttcataggagctttgttgcttggaaacatcaaaacaagtgaagggtctttgtcttctgcacttgaaactactccaggcagcttgctatccgatctctggctagaccggttccctgatccattcaagatcttggagagaatcccattaggactcgagagggacacaagcgtggctctgtctccagcaagagtagactggaaagaaacagcagaagggcatgagataatgctcgatgtccccggtttgaagaaggatgaagtaaagatagaagtggaggagaacggagttttacgagtcagtggagagaggaaaagagaagaagagaagaaaggagatcaatggcatagagtggagagatcatatggaaaattctggagacagttcaagctacctgataatgtagatatggaatcagtcaaggccaagcttgagaatggtgtgctcactattaacctcacgaaactatctcctgaaaaagttaagggtccaagagttgttaacattgcagctgaagaagaccaaactgcaaaaatcagctcttctgaatccaaagaactctgatattgaagaaactatatattactttctgagtctgaagagagttattataaatccaagagttttgagtttcatattgtgtaagctaaatggagtgtcatgttttgtaacctatctaccaaaatctctgtaaccttctctatatgcaataaaatgttcatttctttat

SEQ ID NO: 142068 - DNA, 280 bp, Arabidopsis thaliana landsberg
ctcgctgtccctccttctttttctcattcattgcaatgggcagaagatgctcacactgtggaaacgtaggacataactcaagaacatgttcttcttaccaaacaagagtagttaggctctttggtgttcatctagacaccacaagctcttctccgccgcctcctcctcctccctcgattttggccgctgcaataaagaaaagtttcagcatggattgcttgccggcatgttcctcctcttcctcttcctttgctggttatctctccgatggtctcgccca

SEQ ID NO: 142069 - DNA, 206 bp, Arabidopsis thaliana landsberg
aggagctcgaacaggtgaggaagacggaggaggagatgatgaagatgatgatgatgatgataatggctttcttctcgagagagcttgttgttgcccggacgtcgacgccaccgtgaaggatcaaattgagatctcgccggagacagtaattggtagctaaattctgttaagtttccgatttgatccttcctcgtgcttttgagagg

SEQ ID NO: 142070 - DNA, 365 bp, Arabidopsis thaliana landsberg
gacccacgcaaataaggaaaaaaaatcgagtacctgtatcttcaaatgcattgctatattacgtcatatcctaaattcctaattatattaatcttgaaatccaaaaaagaaattattaactcacctaaacatcagcacaacaaccacaattgtcattctttcggaatataaagctaatccgccatgatacaaaacccaacaagaagatgatgctccatgcgataatgtttgtggtttcggaactcattttgctcttcacaacgtatcacaacaattgttttcttttttgctttttaagtcaaatgtgttcgtgttttaattcttcttcttttctcgcacaattacattttatatgaagttacaca

SEQ ID NO: 142071 - DNA, 425 bp, Arabidopsis thaliana landsberg
attcgctgtttgaccaaaaaataaaaaattattgtttcgctgagaaatgtatagataattatattatacgttagattggtaactaccaaaaatattactatatgttagattggtcacaaaataagaaaagaaaggtagtgtatatcaatttattaatgacgtatttaataaagttggtctcaagcgaaatgaattgttctttactgctacaaggcatataatcctgtaaagaaaatctgggtggtcgaattgttcttttccctttttctaatttcaacatcaaaagttgttccaccagaagaatttgttctctgcagcagtaaagatcgatccgttcttgcttacaagcagaaaagtcatatcgacagagagagatgagacagaactcagcaactggtggtctttcatggcggcgtttactgttc

SEQ ID NO: 142072 - DNA, 553 bp, Arabidopsis thaliana landsberg
gaaagacgacattaaaagaaaaaagaaaaaaaacagacgagataatggagagatctacgctcaaacgaacatcgagttttccagatattgaggctgttcaggggtgttcgactttgaatttgctgccaaaagccggatctagatctacgctcaaacgaacatcgagtattcctgattttgagcctgttaagtctctgcgttcgactttgattctgcagccaaaagccggatctccattgctgatgctgattgcagaagagtatggttgtcgtatttacaacccaggagatggtagggtttacgagccgaagagtgacttttcagggtatcgattcctgggaagctcaggtaagtggtttctggtggtagattctcgaatgaaactctatattatagatgtatttagcgagaagaggatcgatcttccaccactagaatcatttaagggtagccattttaagatttggcgtgaaggagaggagaatgtcaagcatatgctaatggatgatgaggatccattttgtgatgaaattcctcatgctgccgaagatct

SEQ ID NO: 142073 - DNA, 170 bp, Arabidopsis thaliana landsberg
taggaagaatgagtcagaagcgatctttagtcttcgccattcgagactttccaccaggctgtggaactcacatcgatgtttcgtcgagtttgaatcatccagctgagaaggccttcaagcatccaagaactggtgatgtctctggcgagaatctgagttttgctgaggct

SEQ ID NO: 142074 - DNA, 725 bp, Arabidopsis thaliana landsberg
ataagacgcctctggtgttatccccaatgtcgtcactccacgctaccgtgagcctcccactgttctccaactcaaaccacaaaaagctaacgtgcgcagctacattatcacctccgccatggaaacagagccggcgagttatctccgtctccttttttctctcccgtctcctcctcctccctaacggtacacgcatctctcttcaaattcaccaatccgattctcaatttcacgaactcgattttcaatatcaccaattcgacttttgttcatttcaaatttggttatttatatgttgatgatgatgatcagatgctatggctggtggcttaatggataaattggataaatacgtcaagaggtaacattaaatcgtctccgatgcttattcctttgaattctgaagttagattttgaaatgtttggtgaattatctaaaacttaaaaccagttattgaataggaagaaacttgatccacttgaagcatatgtaccaccagtgattctagctcagttacaaatccaggatcttggtaaaatttctctgtttttttgttacacatttgttcttaaaactcttgctatataaaacttacactcatgtttatttatgatgttggagagggatttttgaatgtggagaaacctgaatttgaggcgtgtagacgccaattgcgatatgagtcctgctagctctcttcgtgtaaacattcgagctgtaagtg

SEQ ID NO: 142075 - DNA, 691 bp, Arabidopsis thaliana landsberg
ttcttagatctatgaattttcaaattcgttgatccatttttccgcttcaatcgtctccgatctgatttcatcagcttcgtaccgctccggtcatgaatccattctcttccggcacgcgtctcaggttaggaatcactttactccgatctccaactagtaatctgctttttctctattgcgactttgcgatacttccattttcgtgcgttttctagtgtctaaatccataatgtagcttgattcttctagtaatcggcaaattcaatcggaaattgacgattatcagaaaaatgttttggctgattgtgtgagattaggcatgttgtatgatagaatcctcttagcatttttgatgaagcttcgattctttataaattgaaatatgtaaatgtaaatgaattcatcattttaatgacaatttgtgttgcagcgacatgatccgagctatacgtgcgagtaaaaccgctgctgaggaacgtgctgttgtgaggaaagaatgtgctgcgatccgtgcttcgattaatgaaaatgaccaggactatagacatcgggatctagcgaagcttatgttcattcatatgcttggttaccctactcattttgggcaaatggaatgcttgaagttaattgcttctcctggatttcctgagaagaggattggttatcttggattaatgttgcttcttgatga

SEQ ID NO: 142076 - DNA, 235 bp, Arabidopsis thaliana landsberg
tgatcactcactgcatcaacaatggccagagagaagattgtggtggctggtggtaccacaaagagctggaaactactcttggggctgagaatatttgcattcatggctactttagctgcagccattgtaatgtcactaaacaaagagacaaagaccttggttgtggccaccattggtactgttcctattaaagccactttaaccgctaagtttcagcacacgccggcttttgtgt

SEQ ID NO: 142077 - DNA, 474 bp, Arabidopsis thaliana landsberg
gaaggtatgtctggaagtgaaggaggtatgtccagtgtggaggaagtaaatccaaaagtaaaaaaagtaaactcaaagctaaattgggaagaaaaaaggtatgtccggaggcatgtcaggaagtgaagaaggtatgtctggaagtgaaggaggtatgtccggaggtggaggaggtaaatccaaaagtagaaaaagtaaactcaaagctaaattgggaaagaaaaaatgtatgtccggaggcatgtcaggaagtgaaggaggtatgtctggaagtgaaggaggtatatccggaggtggtatgtctgggggcagtggaagtaaacacaaaattggaggaggtaaacacggaggtcttggaggtaaattcggaaagaaaagaggcatgtccggaagtggaggaggcatgtcaggaagtgaaggaggtgtgtctggaagtgaaggaagtatgtccggaggtggtatgtctgggggtag

SEQ ID NO: 142078 - DNA, 361 bp, Arabidopsis thaliana landsberg
caaaccaagacaatatttgatcaatttatcaaattctttcaacccctagtctaaacacaaaaatgaactccaatagtttcttaatctcagcagccttaatcttctctctactatcatcaaattctccaacatcgattcttgctcaaatcaatacaccatgttcaccatctatgctctctagcgttacaggttgcacgagttttctaacgggaggtggtagttttccgacctcagattgttgtggggctcttaaatcgttaacaggaaccggtatggactgtttgtgtctgatagtaaccgcaggtgttccaatcagtattcctataaaccgaactttagccatctctctccctcgtgcatg

SEQ ID NO: 142079 - DNA, 444 bp, Arabidopsis thaliana landsberg
tatatatcgggtgatcaaaagctttacagaaagaaagatactcataagagagcaaccatgtaacatatcatggcaagaagaagagaaaatcattcaaaaccaaataaacatttaaagatcaaacatattactatattagtgtcctcccaatttatttgctgatatcggaaaagccatatactacttctcctacctttagaaagattcaacagttccatttttacactcggtatgtttgctagttgagtcccccaagattgcatctgggagtaaagagctgtccccatgttcgtctgccgagcccacgtgctgattgtcccgggtgaataccaatggatccatgcatgcgatccccattaaaccatgtgaaaggagggtctccaatgattcgagggaatcgtatgccgcttcttcccgtggaaatgttccgccttccaagctggt

SEQ ID NO: 142080 - DNA, 1632 bp, Arabidopsis thaliana landsberg
gaaagagcaatattgtagcgcctcagaaacatcctctaacaaatttgtgcaatgagttggctgatgagcagagtgagcacagcagagtaacctctggagggattatagcacctaaaaaaacctgcattgctctttcaaatgaatcctcaacagaaagaccaaaggataatgtagaagcaagtgaaagtgaacctttagcacctgatagtggagctgtaacggtgtcagagaaattatcagccgatgagccaactgaaaaaaacaatgaaggccttaaagatgttaaatttctctgggatttaaatattccttgtgatgtagaagatgaagcgtctcgaagagatgaagagggagaaatcacagagtctattgcccctaaagggagcgaaccttttgatggaagtaaacacagtatggatggggtaattgcatcagatgaacatacaaaattttcatcaccatctaagcctaatgatgaagcagctgctacaaatgacaaggattgccaatctggttatgactcccagtttgaggatggagagttgagggaaccatacccttgggaagaaaatgaagaggttgaacagttggattacggttctgagccagaggatgagagattctactctatgggttctgagaagggaatcttgacagatgagaatttcagtcatgttaagtgtgaatctggtgatgcactgagaattgggcaggctaatgaaggaagtgacatagagaagcaagctgttgtaaacatgagcgattcacatcctaagaagggctcttcttctccttcaaggagttttggttcaaaaccatacaaggaggtgccttcacatgatgcaatccagaggagaaggcaagtttgctttccctgagcctttttttttggtcaaacgcttattaataatttgttagtaactgagtcatggttctttatgattcaggcctgatacttatgaagaggtgagcacgggtccagataggtttgttgggagagacgacaggtcagggatgcgtatgcgtaataggagtcctcggagagggtatattagtggttgggattccaaacgacacttctccccacctaattacaaagatggttcttatagttccgggcgtccatggcataaaagaatggcagatgatcgaggtatggtgaacggctttgatgagtcagggtcaggacaaggaccaggaccagaaccagagggttatgtacgtaggcaattctcaaatggtggatacagaggtcggtttaagagattcccagatggtggggatcgtaaattcagggccccacacagtgatacaaaccaatttcctggtcggatgcacaaccggatgagtggtaataggagagagagaggtggctctccggttgtcaggagattgcccacccgcaatcagagtcaagatccagaagcagttctccagtctcgtggaatggcagtaacagatcatctcctcgtcatccaggtgggattagagcagatgagaggacgacgtgaagagtgaggctgcctttccagaaacggtttcctgcagatcaggagatgggttatatgtcacctccgagaaacagaatgtcgtcgccgaggttctttgaagggaggaataatggtgctggag

SEQ ID NO: 142081 - DNA, 194 bp, Arabidopsis thaliana landsberg
cccaatataaatatatatttactctaatttacaagatagaactccaaaaaaaaaaaaaaaaattgacccagagataagataaaattcaactgtaaataaagctgttgtgtggagttttctttcattcaattcgaataagagaagcaggcatctcatactgcaaagcaaatgcttcgactcggtttctaagctca

SEQ ID NO: 142082 - DNA, 260 bp, Arabidopsis thaliana landsberg
gaatgtgcttcctgaattgatcccaattttcgtcttcgtaaacattctggtaaaatctttcattttctttcaaggatttattcattttttcatgcaaatttttatttttattttaaatttttggtattaacttgttataagaaatcttaaattaaatttggttaggtctacttcggatgttttgcattcggtataggagggctaccttgggtcattatgtctgaggtaaataacatattttaatttatataaatcatata

SEQ ID NO: 142083 - DNA, 441 bp, Arabidopsis thaliana landsberg
tgtcagtcttgctggtgcacagaaagcgtctctccatcccgatgacttgcttctactctcaaattttgtcatgtcatcagaatcattcaggcaagtgctaaatattttgtccatttacccaccgggaaccatacatctgtttgtgtaacttgttctcactgctaacaggacatcagaatctttctcaccaatctgcctaccaagatacaacgctcaggcctttttgcatgcctatgtccacttctttgatgtgagtcaaatacttgtaaagagcttcttaaattcatccacagtgcacaatgtgaaatattaacttactcgatggtgtaggatgatacatatgtaatattgcttaccacacgttcagatgcgttccatcatctcaaagattgcaggtaataaaagctatatcatacttgaaggtactcgtgttttttacat

SEQ ID NO: 142084 - DNA, 323 bp, Arabidopsis thaliana landsberg
ataaaaagagcataaagaatcgaaagtatggtagagtaaatgtggatgatgatgatagctttgggattccctctcttattataaaatataaaactttgataaatatgcatgattatatatgatgatggtacttgctttcgtttcgtctattggggtcttaattaaatgcttaattaggatttaattaaaaatatctggcactatagctagggctcaaccttgaataattacttcttttagtttaataacttaaaccaattcactaatcaattggttttgtactataaattaattattgtagattgcagtctactcccacctag

SEQ ID NO: 142085 - DNA, 419 bp, Arabidopsis thaliana landsberg
gatcatcagagacgatgaatttggtatttctcttcacaaacccactatcagctaccactgaagtgcaagacttggaagtctttggatcaataggattcaaagtaacaactttttgcccttcaccaagcacagataattcaaaacttctggaaaatttgcaaatagaataagggtgacgaaaatagggaattaaacattcatatgctggtgaagggcaactggcaatatcaaggagattcttactgcaagtatagtaacttggaataaaacaattgtaagccaaatgtcttctatacccacatcagcacaaattctttacacatccgataatggtattgtcttcgaagaacgaagacgccgactcgagaggcagaacaagaaaagtgagaagagaatcaatgaagtcttcactgcactca

SEQ ID NO: 142086 - DNA, 359 bp, Arabidopsis thaliana landsberg
aggtcatcttgataacttactgggaaacgataaaccttccaatagaaactggaagaggaacatacccaagagtccagatccaaacacgtataggtaagcagcgactatagtggtgccatgaaacagaaagtgtttcttttattaacaccttcatgttcttgagcacatttagttaacgtgtgattttatttcgtacctgatgctgtctcaacctttgaaaacgctgaggaaagtagaaaggctatggagatttgtagatttatgtagacgaaatagaaactgaattgtaagctgaagtcattaagcagaaagaacttcaatcctgaaaggaaccataactgttatagcaagttctataa

SEQ ID NO: 142087 - DNA, 418 bp, Arabidopsis thaliana landsberg
actcgacgaatcgaggttcttggaaaacgacagatcggtattcctcagttgcaacaaccgccatttcatcaagcaaagcacgccactcgggttttggtgaaatcggagggttcattccgtgctctagagtagctgctgtgaaacgttgaagtgttctaaagcataagtgtgcctccccaaatgattgctcaatgacttcaccctgaaccgtgactcgaagagagccattaactgtatctggtggctgagacaatatagcaagatgagtaggaccacctcctcttccgactgtgccaccacggccatggaacatagttagcttcactccatatttcttagcaaccttcacaagctcttcttgagctttgtatagctcccaagcagctgagagacgccctgcatctttccctgaatctga

SEQ ID NO: 142088 - DNA, 268 bp, Arabidopsis thaliana landsberg
caatttttccagtgatttttcttctcttcagccaaatgaattgagctcacaaaactgagagagtgagagattatggcgatgcctttggaaatggcgatgcttttgacgaaaacggtttggtttgctctgagcggctggattttaacatgtttatccatcgccgacgagattgctggttcactcagaaaccgagaagttggtcctcctttacatctcgcatgatcacatttacattcttcacctctttcctagctcctactcgattttc

SEQ ID NO: 142089 - DNA, 1920 bp, Arabidopsis thaliana landsberg
atgaatcccgaagaatcaagaaggagagcctctgctcgagccgtggcaagagggtttgagatgattaatgagaagaatcagtcaaagaatcaggaagctgcgagtcctggttttactcggatgacaggccgagtacaatggccgagtatggccccggagtcctctgtgggtcgttctgccgctgctcaagaggaaatagcaagaggcaagagggtctgggagtccgagccagttgcagaagaagaagtgcctgagatagagaaggaagcatctgaggaagatgtgcaagttgatgaagaggtcccgatagttcctacaagtagaagaaggaacaccatgaggagaaagaaagaacctaccatagaagagcactaccaatatctcatggagctgagttttgaggggacaagatatccccatagacctaccatgcaagctttggggatatgtagagatgttgactacctcatggagatggccaagctggagaccttcttctcctaccagtatgaaggatacaaaactgagagctgccaattcctagccactttgaagctccatttctatgctgaagaaagggagagagagctgcataagggagttggttacatcactttcatggtgtttggaattcaatactcggttcccattaggcagttggatgctattttcaagttccccaccaagtatggaatccgccaaaacttcagcaaggacgagctccttgatctatggttgacaatcgccggtccactcccctacaagtcatctagggccaagagttcgttgatacggagcccggtgcttaggtatctccacctttgcattgcaagcgccttcttcccgaagaagacaaccggccatgttaatgagggagagctgaagttgcttgatctcaccttatgcttcattttggggcacacgaggaatgggatagagatggaaggggatagggctgatacatccctttcggtggtgttgattgatcacttgattggttttagggagtatgcagccggaatccaccaatccggctatggaggaagcttatgtgctggaggagtgatcacgcccatcctaatagccgctggagttcctcttcatacccccactcacacagcaacctacatcgatatggagtacttgaagaggaagtgctacttggataggtctgctccagcggaccaactctacttcaagttcaagcactccacgctaggtctctctaggctagcactaccttgcaagaagttcaccaccattaggattgggaacaacattgactttgatcctcctcaatcgatcttagtcaatgtccttgcgcctctacaagtagagccgagcataggaagtgagtctcaagaagaaggagcagagtggaatgaagaagaagccgagcaggaagcttatactcggccgagtaactttcagcaggccgagtattgccaggacgagtttgagcaagctgagttcagtcaagctgaacagtttgatgaacaagaagattcgtgcgaagctgcagcggagcagtttttctttgaggattatgctgagtctgatcaagagagagatcccggtcaagttcacaagaagttgggaatgctcaaaggtttgggcaagtttcagaggaagttgttcagtgggttgaagaagaaggtgagaaagatgaagagagcaatggacggcatgacggttcagattcaggagctgcaacgaagacagagatcaccaccacctcgacccgagttcaggagaagtaactcaacgagtgtggcaccgcgaagggacgctcatttcgacccgccaagagcctcaaattatgagctcgggaggagctccaccttctcagatcgccgtttcaacagccgcccacccggtccagtgaaccagttggttttgaacgctgacccaagccgagag

SEQ ID NO: 142090 - DNA, 607 bp, Arabidopsis thaliana landsberg
ctctaataattctccagaacattttgcacattccgtttcactccgtgttgttggatcccccaaaggtaaaacctttttccccagattatttctatttcgttcctctcttctcgatttcgactgattttccgtttttatgctcttctcttttccattttgaactccaattttgattctttaaagaaaatgagttgcttcgggtgttgtggggaggatgatgatatgcataaaactgctgattatggaggtcgtcataaccaagccaaacactttcctccaggtatcaaagttggatcttgctatccaaaaaatcaagactttacttgtttcctgtttcctcattggagttttggttttggtgtgaaggaaatgatgcaaggcaccaccaagtctctgaaactgcacagaagggtcctccagttgtgaagttgcagcctattgaagtacctattatcccttttagtgaactcaaagaagcaactgatgattttggatcgaattctctcatcggtgaaggctcttatggaagagtatactacggggtattaaacaatgatctgccttcagcgattaaaaagttggattctaacaaacagcctgacaatga

SEQ ID NO: 142091 - DNA, 313 bp, Arabidopsis thaliana landsberg
caaagaagattcagaagaaaaagaagcttcttcctggagaaatggggcttccatggattggtaaaacaatggatttctacaaagctcagaaaagcaacagagtttttgaggattttgtaaatccaaggatcatcaaacatgggaacatcttcaagacaagaatcatgggatcaccaacaatagtagtcaatggagctgaagccaataggctcatattatccaacgagtttagcttggtggtgagctcgtggccttcatcttctgttcaactaatgggcatgaactgcatcatggctaaacaaggcgagaagca

SEQ ID NO: 142092 - DNA, 310 bp, Arabidopsis thaliana landsberg
tgatcctccgtccgccacggcggcctcggcctccgccttccacctgcgagcgttttctctcagctccaccgccttttccccaactgtggcctcaagcagcttctctgctacaacctccctcgaaacaatcatctcctcagcggctccgcggcctagtctcactcctgtcttgaaaacatcagccaagtacaccgcatcagtcacttgatctccccattgcggaaaacaaacaacggggactccggcagttaaagcctccattgtcgagttccatccgcagtgacttaagaaacaagcaatcgcaggatga

SEQ ID NO: 142093 - DNA, 415 bp, Arabidopsis thaliana landsberg
ccgattcgagagtagcaaatggggattctatcatggttcacgggaagtcctaagccatcacagtccgagacgtctaagccggagatgattcagatgccgaaatcagaaactccagccccggggatgaatggagccatagaagttcctcggcccgatcgcgcgacggttttcgagttcggctccgttgctgctactggagacagagtcactctcgctggttactgtcccgtttccgatgatctcgaaccttgccgttgggagattcttcccgccgacggcaaagacgctccacagtttcgcgtcgtcttctgaggaatcagtcaataatctgtagaagatgtaaacttgttcaatctcgtcgttgataattgtatttggtctggtaatgtcatctctttcatttgaaatcgaacaa

SEQ ID NO: 142094 - DNA, 1273 bp, Arabidopsis thaliana landsberg
aagctccgatcatatggcgtttgccggcgttttgccgattgttttcttgcttatattatcatcagcggatctagcagcgagtcaatcacagcccggtccaacaaatcaaccgtataactacggcagactaagtccagccatggcagtgatcgtcgtgatcctaatcgctgctctcttcttcatgggcttcttctctatctacttccgtcactgctcaggcgtaccagacagccggtgtttctccagctggtggagctagatccagagcaaccgtcaacgcggcggcgcgtggtctcgacgtttcagttgtcgagacttttcctacgttcttgtactcagatgtgaaaacgcagaagcttggtaaaggagagttagagtgtgcgatatgtttgaacgagttcgaagacgacgaaacgctgcgtttgcttcccaagtgtgatcacgtgtttcatccgcactgcatcgatgcttggctcgaggctcacgtgacttgtcccgtttgcagagcgaatcttgctgaacaggtagctgaaggtgagtcagttgaaccgggaggaactgaaccggatcttgaattgcagcaggttgtggtgaatcctgaaccggtggttactgcaccggtaccggaacaattggtgacgagtgaagtcgattcgaggagattacctggtgtaccggtggatcttaaaagagttaaattctcgagatcgcatacgacgggacattcggtggttcaaccgggagaatgtaccgaacggtttactcttcggttaccggaagatgtgaggaagaggataatgaaggattggaaattgaaccggacgaatagtcttctggttcttcctagaggagggagttcgaggagaggtaaaccgattgatcggtcaagggctcggtctgatcgatggttgtttcgtaaaacgccttcgtttctgtggaggagtcgtgatgatggttcgattaggttaggtgctaccggtagcgttcgagccagtgctgtaccgaattcaaccggtagtgattcggtacgtgcaggagaccggtgggcttttcttagaaacgcgtcgtttttgtggaggaactcttcggtacatgtgccaagaggaggagtcaataaagacggcgaaggaacttcggttaaatcgaccggtgcaagtggctcaactagcggttcggtgagattaccggtttagttgacttttcttttctcatctttttcatttgtttttgtttgggattgttgataaatacgcaaatacattttcaatttttt

SEQ ID NO: 142095 - DNA, 599 bp, Arabidopsis thaliana landsberg
ccttcgtttacagcaaaaaatcgaaaatggttgcctcagccgccgcacgacctcttgtcaccgtccaaggacttgacggtgacatgagcaccgatcaatccaccaccgtcactttaccagacgtcatgactgctccagttcgacctgacattgtcaacttcgtccacgcccaaatctccaacaacagccgtcagccttacgcagtctccaaaaaggccggtcaccaaacctccgccgagtcctggggaaccggaagagccgtgtcacgtatccctcgtgttcctggtggtggaactcaccgtgccggtcaagcagcgttcggaaacatgtgtcgtggtggtcgtatgtttgctccgactaagatctggagacgctggcaccgtcgtgtcaatgtcaacatgaagaggcacgcgattgtttctgcaatcgctgctactgctgttccagctcttgtgatggctcgtggtcacaagatcgagaatgttcctgagatgcctcttgttgttagcgactcagctgaagctgtggagaagacatcagctgcgatcaaggtattgaagcagatcggtgcttacgacgatgcggagaaagctaagaac

SEQ ID NO: 142096 - DNA, 610 bp, Arabidopsis thaliana landsberg
atttaggcataattactgattaaaataaagagcgcgatatttggataagaaatatagtaagagatttgcttattgcataaacttagctaatcaattttatagatagaaaaacattgaaaagcaaaccgaggggatgcgataacatcatgaagcatcacaaagcaaaatagaaaacttacaccaaaaccctaaagaagttcgaccaacgtgccaaaaccctaacttccttcccagccataattattattaattttattaataagtactagccatacttcattaaacaagtccccgacacgataatccatcaagcgaaaccaacattccttggaacagccttgcacttcaacggattcttcatctccatagacagcttcagaacctcagcgagctcaacatcacaagaacccttcacccattcaaaattctgaattagttgaccaatccagagatgaacagtagctagacccattgctttaccgggacaaacccgacgaccggatccgaatggagccaatctaagatccgagcccatgatgctcacatcctcactaatgaacctttcaggcataaacgcttcagggtcggtccagattttagcgttgtgtgt

SEQ ID NO: 142097 - DNA, 383 bp, Arabidopsis thaliana landsberg
acctcaaagaaaacatcgaaatcttagagaagaagaaaagaaaaagaagagaaatgacagagaagaaagagatggaagtggtgaaagggctcaacgtggagagatacatgggccgttggtacgagattgcttctttcccatcaaggtttcagccaaagaacggcgtcgacactcgcgccacctacacccttaaccccgacggtaccatacacgtcttgaacgaaacgtggagcaacgggaagaggggttttatcgaaggcagcgcctataaggccgatcctaaaagcgacgaagccaagctcaaagtcaagttctatgtccctcctttcctcccaatcattcccgtcaccggagactactgggtgctctacatcgatcctgac

SEQ ID NO: 142098 - DNA, 373 bp, Arabidopsis thaliana landsberg
gtgctttgtagaaattagcaatatagtgctttgtagaattttatgaccacaagattggtaagatcatttagtcaaatatatgttttatctcttcttattgattgagatgattatttttctaatgagtcgatccacatgtctcattccaattgatctttgtgatttagtttcatatttgttttctttaacatatgaaatttttttgttagtgtagaaaatctaattttcacacaattaaaaataatttttacaataaattatgattagcaaacacttcaaaaaaatctccattacttaaacacttcagtttcctactactaattaaagttgtttccttttgtttaaattgtgattttgctttaacaataaagat

SEQ ID NO: 142099 - DNA, 1061 bp, Arabidopsis thaliana landsberg
cacgaattttattattaaaaaaggaaaatgttattccttttttgcttctcttgacttggcgtaatcaacttcgccatcttcgtttttgtttcgatcccaatcgagttttctctcaatttgagaaatgggttcactgaaaaaggacggcgagatcggagatgagtttacggaggcgttactgtacgttaacggcgttcgtagagtcttgcctgatggattggctcatatgacacttctcgaatatctcagaggtgcgtatcaacttctttgattaatatccaattgctggggatgatttcaagtactcaaacaagtttaattttcaattcaattttgaactgatactctctatgaagattctgttttttggattcctagtttcttactctagtatgttaaagaaaaaggcttatgtttgacttatagattctggattctaaaaaaatcgagattatgtttgatccactgttcttttgtttttttagaccactgtctttatttgagtaagattatgctccaattgctagattcgcttggggacaaaaaatgacttgcagagatcaatctttttttctaaacgatcatgaagtagtttctaacttacagatgtttcttgtagatttaggattgaccggtacaaagctgggatgcggcgaaggtggttgtggggcttgcacggtgatggtgtctagttatgacaggaagtcaaagacctctgtgtgcgtatctgtccctcctatatgttggctttgtttagtttatatttgcgccttcttattgattctttctctgttcatacggaaacttttattgcaggcattatgctgtcaacgcttgcctagcacctctctattctgtagaagggatgcatgtaatatccattgagggacttgggcatcgcaaacttggcttgcaccctgtccaggtaagatttacttctctcaggttctatttcttcttattttgcggagattcttttgtcactgttatgatcttgattctctcaggagtctttggcatcttcccatggttcccaatgtgggttttgtactcccgggttt

SEQ ID NO: 142100 - DNA, 1736 bp, Arabidopsis thaliana landsberg
cgtcgcgtctcttttctggaaaaaacgagaaactgtgatcttggcccttttattacccctatcctcttcttcttcaatctctccgatcaaaatccttttaagctctgtagacccaggtatgttccttcagcttttctattcgcgagaaaattacgagtaaaggattgcttgaaattgaacttggatcgttctgttactgctttcttattgctatcagattttgattctctaaggaattagatattttctttgttgattgatttgttttgaacacgtattgccaatcctagtctttgtttctacattataggaacgtttcgatttgaattagctaaaaacctcaattttatttgctcttttgcatatctgaaattggaagctgatgatatgtggatgttaattggctctagttacttggatctgtgaataattatttgctaatttggagcatgttcctttgaattatcttctgattgtctaagtatatttggaaatgtgtttatattctcatttgtgtgatcaggttacgcagagaagaagaacagaacaaggaattatataatcattggcttgatcaatctgaattgcagttcatggcgctaaaccctcaattgctacccaatgggatgcctgttccctttgttaatgaaatgttcgtcctagtccgagatggtgttgagtttgaagtcgacaagatccctgggttcgtgttcccttctctcgtcacgcatgttttggatctccttaagtggtttattgatttgatgattattgttggtctccattttagtaccgttttgagtcggtttagatccactcatctagcatatgaaccattaagtttacttgtaaataagataagtctcagaagtgaacagacatatgagctctgggctttaaacacttccctgatgttctttcttgttgtatgatccagagggcatggaggtcatgttaaggccaagggggtgatttacttgtctaatatacggatggtctttgtttcaagcaagcctgttgacaactttgttgcttttgacatgcccctggtacagtaactttatcttatttttgtctctgatttagttaatacatggcacaagtgtagctctgttaaatttggttatggaactacatgctacatattagcttatggattatatgttactctgtagctttacatccatgccgagaaatttaatcagccaatatttcactgcaacaatattgctggacaagtggagcctgtaagtacaaactttcatggagaatttatagtttctttccttgttaggaaactatacatatttacttattggcatgtaacaaaatttccaggtggtgccagaaaatgagcatagagctctatattcaacacacagtttcaagatcctatttaaggaaggtggttgtgggacatttgttcctctcttcttgaatctcatatcatcagtgagacaatacaacagacaaatgcaacaagcagcagaagcagcagcggcagctcctcatgttgatcctcttcaagccgctcagacacctgtggacgaaatgatgagacatgcgtaagtcccatcagaaatcaatcggaaagttttttgatagtagtaaaagctgttgttcctcataaaatcttgtgtggtcgtcattgtgtatgtgcaggtacgtggaccctaatgatccaacgaggatatatctgcaacagccatcaggggaatctcagttgaggcgtagag

SEQ ID NO: 142101 - DNA, 1114 bp, Arabidopsis thaliana landsberg
caattctcggccgtagttagttatcctccgattagatttccgattctctgtttcttctagattgaatttaaaaaccctacttttgaattttcacatgggagaacaatcaccttctcaaccatcgactcaatgccaaagtcatccacaatcacccaaacccgatactcataacctaattccaccggaatccaccgatgaatgtctcgattcagctggagtttcaggctcaatcgtctcatctaccacaatcgacgctcgacggatcactgaactaggcaatgtatcgtctccgccgtccaaaatccctctccgccctcggaaaatcaggaaactcacactcgacggagacgtatccggtgaagattataaggcggaggatatctcctcatctcaagtaaactctccgctctcgacggatggaaaatctcccggctaaggtaaattgtcgcacttacgagctataactgtgccgaggatccaagctcgtcctctgacatgtgaaggtgagctcgaaacagcgattcactatctccgtaacgcggatcctttgctcccggcgttaatcgacgttcatccaccgccgacgtttgagtcgtttaagactccgttcttagctctgatacgaaacatcctctaccaacagcttgcaatgaaagctgggaattcaatctacacacgatttgtttctctctgcggcggcgaaaatttggttgtacctgagacggtcttatcattaaatcctcagcagcttcgtcaaattggtgtctcgggacgtaaagcgagttatcttcatgatttagctagaaagtatcaaaacggaatcttgtcggattcggcgattttgaacatggatgagaagtctttgttcacgatgctaacaatggttaatggaattgggtcatggtctgttcatatgttcatgataaattctcttcatcgaccagatgttttgccggttaatgatctcggtgttaggaaaggagtgcagttgctgtatggcttagatgacctgcctcggccatcgcagatggagcagcattgtgctaagtggagaccgtacagatcagtgggttcgtggtacatgtggcggctcattgaagctaagagtacatca

SEQ ID NO: 142102 - DNA, 260 bp, Arabidopsis thaliana landsberg
tataatcacaggcaaaacatataggctaagaatatcaaacgtgggtctcaaaacatgcttaaacttcagaattcaagaccacgatatgcttctagttgagacagagggtacgtatgttcaaaaacgtgtttactcgagcctggacatccacgtaggccaatcatactctattcttgtcactgccaaaaccgacccggttggaatttaccggtcttactacatattcgccacagctcggttcactgattcctaccttggcg

SEQ ID NO: 142103 - DNA, 761 bp, Arabidopsis thaliana landsberg
gcgttcattacgtgcttcctcaatggcggcacgatccctatggagaacccgtacgaagctcctcgttgttggtaccgccttatgcggtggttccggcgccgccttcattgcttcctccgatgacccatcaacaaccctcaagctttgcacctccatccccgttcgtctctaccgcaataccgttaccgccgcctctattgcttttggtacggaaactaaaccattaaaggataatactttacatgatttgtttcgcttcaatgcctaaatttcacctttttcaattgatttggttctgtgctttgattaatgagactggctttgcactaatcttattggaaagctttaagtttgtggaattaaacattaatcgttttcaatttctgacaattgggatttgcatagttgaatcaatatatatttttgtggtttgtgttgtgttagattatgagtactcattgttgggtttggctgagggaagcagtgagagagctaaggtcaaacatgaagtccacctaaggtcagctcaaaagcttcaagagctctgttttaaaaatggaggaatctatatcaaactcggccaacatataggacaactagtatgtaaagctttttcttctttctgtagcattgaatgtctcaagttgtaataatgattatgttatgttaagaaaaccaacgggttttacggttttcttgattcaaggaatatcttgtgcctgaagagtatgttcgtactatgagggagtccatgttgaaca

SEQ ID NO: 142104 - DNA, 612 bp, Arabidopsis thaliana landsberg
gtttggtttcttgaaacgtgactagggtttataaattgatttgatgtgccttgattgttatactgtggttatcatactttgatcaataaagagattatatcctactctatcttgtgtacaaagttgagaaagatctatcggtaggaagtcttctatcagaggcggccaaactaattagtgatgacgcttttgcactgctctgcatctccaattacttcacttgactcatttggcttcatttctcttccaacacacctcttttaaccccagcaggtccacaaatccaaaaacactaaaagatatcgaaaactatatgttctcgatatcaaagactcgataatatacatttaaaagacctatgaaatgtgttaaaactaatcgcttaacattcgtctgtgtatgcttatggttctgcgtttatggtcttcttttcgagttcttttcctttttccactgtcgataatctctgtattcattttaaaaaaatccggttaacttggttatttttggctaaattcgatttttttccaattaatgaaggtaatttggttcggttatgtttgatttgattattggtgaaaatcggtctaaatttggtataatccgtttaat

SEQ ID NO: 142105 - DNA, 228 bp, Arabidopsis thaliana landsberg
caagcggaggaaggtggttgaggagtttaatgcatcaaacaagtggagaaagagagcgatttcacgtgtgcctgcggtttatgcagtgaacatgcgatcaacaccgggaagagtaagcgttttgggagatgggtcaatagttgtggaggttcaagggattgagataggacaagggctttggacaaaggtgaaacagatggctgcatattcccttggtttgatccagtg

SEQ ID NO: 142106 - DNA, 1610 bp, Arabidopsis thaliana landsberg
caagtttgtttgactttctaaagagaaataaatactccgcatttcctctggccctgttcgggattttggatgccagcttttggaatctgtagcatgtctgtgaattgttcctatctgctgctattttatacaattatcgtacctagcacgtcacctttatgtcccggttcagcagctgtagttcctacctaatgcctctctgttcttaacataattttccttgtctacagatatgcacgagttacagttagttcacaccgacctcaagcctgagaacattctgttggtgtcttctgaaaatgtaaagcttcctgacaataaggtatctagaactgaaataggttaaggttgggtttgggtacactctctgtagttaaagttttgaaagaaaaagaaaaatcttcaagagtttgtactttttgacagtttggtgtttgattttaaataacagaggagtgctgcaaatgagacacatttcaggtgcttaccaaagtcaagcgccattaaactgattgattttggcagtactgtttgtgataaccggattcatcactccattgtccaaacaagacattgcagatcccccgaggtcattttaggtaggctaatcagttacttgctcgtcaatagatgcttgtggattccgtagctgatgcttaacgaatgaacataatttttccctggtaactaatcagtggcatatcattgcaggtctaggatggagttaccagtgtgacttatggagtataggttgtatactatttgaactatgcacggtaaagtctcttcattttgttgtatgaattcttatctccatgtttattagttgttttacttactattgtcaacattttcaaactgtccatcagggtgaggctctctttcagacgcatgataacctagaacatctagctatgatggagagggcgcttggacctttacctgaacatatgactcgaaaagccaggttacttttctgtttccactaacatttgggtgcgtaaaaagtccacagagatataaatgctcatcggttgttgcatgtatggtcgttatgtttttgtagccggggtgctgagaaatatttcaggagagggtgtcggttgaattggccagaaggagccaactctagagaaagtattagggctgtaaaaagacttgatcgtctcaaggtttaatcaccattaattcttgttagtgtctaatgatatatcttttgtttaatatgccgtaatctgaagtagaaactgcttacaattcttgcaggatatggtatcgaaacatgttgacaacacaagatctagatttgcagatctattgtatggtttattggcatatgatccatctgagcgtctcacagcaaacgaagctcttgaccatcctttctttaagagctcaagttgagaagaagcaaaatcagaaccataaaatgtagaattttacttggtaacaagtttttttgttagattcctctaaagctcccgttctcagtagcaccaaacagtagtattcctatttcagttacgagtttggctacgtttattctggaaaatacctctgttgtacattgtgttgttgagaatataaaacttgcatcatattttgaaact

SEQ ID NO: 142107 - DNA, 726 bp, Arabidopsis thaliana landsberg
aatatttcgtaaaaaaaaattctccgtttagacattattgttcgttggtcactttcatctctcttatccctttgcttttccattgattcagctcaaaaaaaaacaaaaaagtctcatcgttttctctggatctgaccgaaagatcattcctttctaaggtaatcaaaatccaatttttctctcttatagtctgtgtcactgttctctctgtttgtgtatctggagactgtggttaaaaacggtttgagtcgatggtgaaatggtaacgttctgctatttatgtctgaatctaacttaactcattgacatctgtgtctatgctctgacgtaatagaatgatgctccgtaattttgctggaattgatgctgtgaatacacccacttgctagacgtttataaatctatgtcctttactgtttttgatctctggatttagctcatttttgttgctgatgagattcttccttcgactttttgcacagatactaaagtaggtttgagtgatcagaatcaattagagtgtgtataagaggaagaaaaagagaaaacagcatgtgtattgccgtataccgtaaagttttgagcttgaatctgtattgccgtgtgatactgtagattgtttcacctttgaagcaacaccttcaagagtcaaatccttttctttcttattcatcttcccttctttttcggtatattataaacacttttgaaaatgggatcacaaca

SEQ ID NO: 142108 - DNA, 377 bp, Arabidopsis thaliana landsberg
gcaggtgagagagagaaacaatggcgaagctacttcttcttcacgcgcctcatgtaatacctaggtttagcagcagtagtagtagatcactggtctccgcagcggctttatacagaagacctctcctcgtgaatccccaattttcccatatcggacctcgtcttcattctccgtacaatcggagattctcggctcgagccttcgacgattcacctgcttcctcggcggagatggagaaagagaaacaggaacagctgctggatggagtttctgggaaaaaagatgaggactatccgaccggagaaatggagtatgagaataggaacgcgtgggagatttttgttgtgaagtttcggatgttatttgcttatccatgg

SEQ ID NO: 142109 - DNA, 258 bp, Arabidopsis thaliana landsberg
aggttatatgtatccgatgttagcgggtgctctagcacatggcgggttgggttctgatatggtacagtctagtcaaatgggtgggattggtgttgatccaagcgttggtgctgctggtctttcagctctaggttcttactttagaggtcagagtctgcctagtacttatcctgattcggatgctggtggaaaaagagggacgggtaaagattcggatgctggtggctcctcctttcatggctactcaaactattcatg

SEQ ID NO: 142110 - DNA, 348 bp, Arabidopsis thaliana landsberg
gcacctgatagagttgtgtatactacgatgattcgaggattctgtgagaagggatggttagggagcgcgaggaagctttggtttgagatgataaagaaagggatgcgaccaaacgagttcgcttacaatgtgatgatacacgggcattttaaaagaggcgaaatttcgcttgttgaagcattctacaatgagatgttgagaaatggctatggaggaacaatgttaagctgcaatacgatgataaagggtttctgctcacatggaaaatcagacgaggccttcgagattttcaagaatatgtctgaaaccggggttagaccgaatgcaatcacgtataacgctttgata

SEQ ID NO: 142111 - DNA, 412 bp, Arabidopsis thaliana landsberg
ccaaaacccatcaaagatcttttttttttctcaattattgtgataatgaattcgatgtttagtgccttcgacgccatgtgtgcagagattatgggaaagaaagtcaccgctgcttcttatgtctaccgctctgaacgcaattctgcttcttcttcttcttccgtcggcggtcaaaacgcgtctttgtctctcaagaaagatgaaaaagcttcaaagaacatggatttaccaacgaagacaccgaggtttgctcttgagctcgatggtcttcattgcttcgagactatagttcgttcttgatcaatatcaagattaccaatttttgctgagtttttttttctttttcttgttttgttctgtttcgattccttttatgtaaatacaattttggaagatttaatttcttgattag

SEQ ID NO: 142112 - DNA, 262 bp, Arabidopsis thaliana landsberg
cacaaacttggtcttgaagaaaccaataccaaaaccccaaaccgcagcgtttaatcaagaatcgactatggcttctactaccttacttccttctacttcaacccaattcctcgaccgaactttctcaacttcatcttcctcttcgagacctaaacttcaatctctatctttttcctcaacacttagaaacaagaaactagtagtcccctgctatgtttcttcctccgtcaacaaaaaatcttccgtctcgtcttctctccaa

SEQ ID NO: 142113 - DNA, 428 bp, Arabidopsis thaliana landsberg
aaaacttttcttttgatgtgtagatatacccattcatcttcatatgagcaggctcagagagcatttcaggctgcacaagctatccatgatttgaatggtgtagcaagtgtccttatacacaatccttaccatattgagtcgctcataactatggcggattactttaagtttgtaggtgagaatgatatggctgcagattccattggaaaatgcttgtacggtttggagcgtgcgtggcatcctatgttcactccgttccagggtaactgccggttggagtttaaccacgatgaaaacaagctgttcttcaagacgcttttcactcacatgagaaacatggacaggcgtggctgtcataggtcagcgttggaggtctgcaaactcttgctttccttggacacgagtaatcctgtgggcgctttgttttg

SEQ ID NO: 142114 - DNA, 890 bp, Arabidopsis thaliana landsberg
gttttctccataagggaaagggaaagggaaagataatcagtactgatccccacaagcggaagctgagtgtagattcttcagaaaaccaatcaccgcagaaaagattgatatccatggatgggccagatggtgtacattcacaagatcaatctggctcagctccaatgcaagtagataatccagtggaaaatgacaatccgccacaaaactctgttcagccatcctcatcagaacaagcctctgatgctaacgaatctgaaagcagaaatggaaaggtgaaagaaagcggcaggagtcgggctattaccatgaaagcaatccttgatcagatatggaaagatgatcttgattccggacggctattggtgaaactgcacgaactctatggtgataggattcttccctttatcccttctacagagatgtcagtattcctctaaccaataagaggtgagctattctattccccaacttcgtgatatttacctcatcgatataaaactcatggttccagtcgtgaatgcaataaatatgtgaaatcaaaagaataatgatactcaatacattaatgctaatgaaatagatgtttgatgattttcaagcagagaaggaggcttggagagattaaagcgccgtctggttggcatacataaactcatttagatccgtgccattgttctcaggtcaactctttagttcttctttttaagcttgagggatttcaaagtccttaggagcctgcagagtgggttgagttgaattgaaccggttgcaatgtatatattaagagaattttaatgattccgtagtggacttatttgtttactctcaaatgtaatccatgaaataatttctcttcaaatctgtatgatctagattgcaatttttga

SEQ ID NO: 142115 - DNA, 1578 bp, Arabidopsis thaliana landsberg
gaaactcagaaatggtggaggatgtgtcctcctatcactaggggattagctgcacgagctcatgaggttatgactcatgagctacctccaactctgagctatctctggatcaagtagttttttttttttttggagcctgttataagtttgtagattagatggaaaataagccaagtgttttgactgataaatatgatgttgggaggttattgggtcaaggtacttttgccaaggtgtattatggaaggagtattcttactaaccagagtgttgctatcaagatgatcgataaggaaaaggttatgaaagttgggcttatcgaacagatcaagagagagatctctgttatgaggattgctagacaccctaacgttgtggagctatatgaggtcatggcaacaaaaacgaggatctactttgttatggagtattgtaaaggtggagagcttttcaacaaggttgccaaagggaaattgagagatgatgttgcttggaaatacttttatcagcttatcaacgcagttgatttttgccacagccgagaggtgtatcatcgtgacataaagccggagaacctattgctagatgataatgagaatctcaaggtatctgatttcgggttaagcgcccttgctgactgcaagagacaagatggcctcctccacactacttgtggtacacctgcatatgttgctccagaagtgatcaatcgaaaaggctatgatggcacaaaagcagatatttggtcttgtggtgtggttttgtttgtcctattggcaggctatctacctttccatgactccaatctgatggagatgtacaggaagataggaaaagcagattttaaggcaccaagctggtttgctccagaagtacggaggctgttgtgtaagatgctagaccctaaccctgaaactagaatcaccatcgcaagaatcagggagagttcttggttcagaaaaggtttacatatgaaacagaaaaagatggagaaacgagtcaaagagataaactctgtggaagctggtactgcaggtacaaatgagaacggagcaggtccaagtgagaatggagcaggtccaagtgaaaacggagacagggtcacggaggaaaaccatacagacgaacctacaaatttgaacgcttttgatttaattgccttgtctgctgggtttgatctggcaggactgtttggagatgataacaagagagaatctagattcacatcacagaaacctgcttcagtgatcatatctaagctggatggaagtagcacagcgattgaaactgagcataagaaagcgagaagcaggtttgttcaaattggaacgattaaaagaaggaagaaaagggattctgtcgatggatgcagaaatatttcaagtgacgccaaactttcatttagtggaagtgaagaaatcaaatggagatactctcgagtatcagaaattagtagcagaggatcttagacctgctctgtcagatattgtatgagtttggcagggtgagaaagatgagcttacttcacagcaagagacagaataccaacaacaagaacaacaagaacaggaagaacca

SEQ ID NO: 142116 - DNA, 203 bp, Arabidopsis thaliana landsberg
ccagagaaggaatcaattgggaatttaaacccaagtaaatccaggagccaaaataaaaagaactaaattcatattcgagaaatactaaatggaacaactaaaatgagaactcacaggaggcccatatatgagaatatgtccaggtgatggaatcttgaacttgctaaaccacattccagctgcaggagacaacaacacggtca

SEQ ID NO: 142117 - DNA, 125 bp, Arabidopsis thaliana landsberg
agtttaacaggcaatgctcgtctctctctctctttatatgtttagattctttatctggaacttggaagctcttttgttagctatatctaatcggtgatctcgaagcttattcaatccctctttct

SEQ ID NO: 142118 - DNA, 414 bp, Arabidopsis thaliana landsberg
ggtttggctctacggcctttgagaggcgatttttttaggtctagccaccaccaaacttttcttctcaaatttctgtcgttacctttctgattatctggtgcccttggccggagtcagagagggtgtgtctgtttgtcttttatttgcttttcctttgttttgggtcttctctggctcctcctatggcggattaaagacgagattctagatggttgtgcttcgattggaaggttggttccgttctagtgatggtgtcgcttggttctccgtgggtggttggtgtttttgtcggagcccgtgtggttcttcactgttacggcagttgtttttggagatggaggtttggtttcttcatcttatacatacctgatctagtggaagctatgtagtctcgattctgtcttaggctaatat

SEQ ID NO: 142119 - DNA, 381 bp, Arabidopsis thaliana landsberg
tctgcaacaaggcaaaggactcttcacttccgaccaagttctcttcaccgatggtcgctcaaagcccacttttaacgattgggccaagaattctgttgctttcaacaaggctttcgtaaccgctatgaccaaactcggccgcgttggcgttaagactagacgcaacggtaacattcgtcgtgactgtggtgcctttaactgattatcctttttgggttttgttttcgagatttgttctttgacatgttatgagtttttgttttgttgtcttctgtttgtttctgcttcttgtatttttgaaaaacacattaacgaatctataccgttgttttatttctcgtgactgtaatattaataatcttatttctattaaacttgttt

SEQ ID NO: 142120 - DNA, 352 bp, Arabidopsis thaliana landsberg
tgttcaaaaactagatacatcaaatatctttaatgtctatcatctatacatgcaatacacttgtctagaatcaagcaatgtgctcttccttctctctgtacacgcagatcacttttgaagtttgtgcttcaccctagcttttcggatagagttgccacgagatcttcccgagctttctctaaggcacttgggagattttcaggctttctgccgcctgcctgagcaaaattgggctttccaccacctcctccgccacacagcttagctatggggccaatgaatttccctgcttgaacacctagggagactactccaggactaaatgcagcaactaaactaaccttgtcttttt

SEQ ID NO: 142121 - DNA, 329 bp, Arabidopsis thaliana landsberg
gaacaaaatagtaatttattaatcccactgtaaataaaacgtatgatgacaggaaaaacgacaattttatgccgatacctcaatatcaaaactgcagacaaagaacaaaacataattatgcaaaaactgaaccaaaacaaaactgtgtatagttttgagacggaagaattgagagatttggtcattttttcacttccaagctttccttcctctaaactggcttccgctgatgctattcttcatcttcttaattcgttttgatttaccagcctttgatcttattgcagcaagaggcatattctttctgtgctccttctgtttattgcttg

SEQ ID NO: 142122 - DNA, 362 bp, Arabidopsis thaliana landsberg
tcaaacaattttctttatataggaaaactcttgaacagtctaaactctaaagattctacttcagttgaacagttgtgtagatcactcaattactcaccaataaccataaagcttctccgctatctagatcttgaatctcatcaatagctcctaaacctaggattaagctaaagtatatattataagctagtgaaattctccttgaggagatagctttgcattgcactcaatatatacacggtttagcaacgatctttcctagattctaggtacatgagatattaacaaagtcttatctaaacttgtaacaaacatatcgagacgaaatattgaatggaatattctatctcctaatatatata

SEQ ID NO: 142123 - DNA, 856 bp, Arabidopsis thaliana landsberg
ctcgactctgttccaagaaattcctctacttaatacagctgattctacagattcctgctacgaaatttctgggtctgggttgatctttgtctcaccagtcaacccaattcaggactttgataaaggttccatttttcttaatttctactctgttttttgttttgtttttcttaattacttttgggtatcccaggttcagaacaggtttgggttgtagtaaaattgggttcctcttgctatagtacgtgttaatgttcgctgattatttatatctttttcatggctgagaatcgttgtgattctcttatcaaatcaataatttagaggtgtcgttgaactcgatggttttgaataggctcaagtatgatttaatggagttctatcactagaaattttgtgttggtcatacttttatagtttagaactttagattatacaaatgatgcttgccgcataattttctccaatgcattccagttttatgaatccagcttattgaattttgttgtttgattgtgtctattcaattggtttcttgtaaattaggtggaaatggcggctttattagcttctcagagctgctgctatggcggtgagaccgcaagagtcaccaaagctattggttttagtagctctttggagaatcatttcactggggaagccactcagtgttatggcagcaagtctaagagatttcgtattgagatgagacagtcggaattgccctctaaggttggaatcaatggacgttcagtcaaaatggttcctgcgagtgaggtggtgaagaggaaagatggtgtgaatggatcggctgggaaaggtgttaatggagcgagtttggttagtagtagaaaca

SEQ ID NO: 142124 - DNA, 630 bp, Arabidopsis thaliana landsberg
tatctcttgttggtaaactcagcaacatttacatggtcaatcatagtcacaggttacactctctaaaacaaatacttgtgcttacaaccaaaatcctactttccattccctaacaaatttaattttcatacattttcctgacaccaatttagaagaaactcactattccatcttctgagcaacctctttgtcagccgagcacattgtttcttcttaaatccagagtcctttgggtttcatgaccacagaatcctgagtaacatacagcttttctctcatccctgtggcattggatgatcatgcgaatatggtggatctccatctgatgagttacaagcagataaatcaattatagattcaacatgaggaagaagtatgcaatcgaggttcaagaagctgggcaactattcagctgtttacgaagttacactgaagtgggcaagtgtgcgttaagaagaagacctatatttcaagctattcaactgtttacaagttacgctgatatcacaagctgagcaagtgtgtattaactctcttattatttttcctaggattaagtttgtaattatgcttgatattatcatcataacacaaaaattcaatggtaaataatatattattctgaggttg

SEQ ID NO: 142125 - DNA, 450 bp, Arabidopsis thaliana landsberg
aagataaacgcgatttctaccatctctaaatctcaaccgtccgatcaaacaacttacacaacttccgtgctggagaaataaaaaaattaggtatttaataattcatcattgccattggattgtgtgtggctgcgtcagtaaaacgtattcttaaaagcaaccattggtgtgattgactctataagagaattcgtcagcgtgaagcaatctccaatctaatcgcagcatatcttctccgattcctattcgtctctgcaattgaatcttccggtaggcgaagatggcgacgtctgcgaggatttgttgcggaggaggaagtgcatgcgccgttcgttgtgatcgtcgcacgttaaatttgaattctcgatcgtcatgtgttgttccagtgacgaatcgacggaatatgtgtgcgatcgggaagatttcgatgtcgatggaggatttgtcacc

SEQ ID NO: 142126 - DNA, 383 bp, Arabidopsis thaliana landsberg
acctgatctagtggaagctatgtagtctcgattctgtcttaggctaatattaggttgcctttggttgggtaatttagtctctgctcatagtttgtccttggttttgctaagtcttggctcgtttgtgttaattttcctagttttaggtttgttttgttgcgtttaaccaattgaattagctaagctcagagatccttcttggtttgtgttttgcgcaagtcagtttctctctggttatggaattgcctttatgtcctttgctcttctgctttgctgggtcctcttgggcgtttggtggttttgtttttggctaggttacgggttgtgcttgtcttttggatggtgtttcgttgcagcgtcatctacaagctcctttctagctt

SEQ ID NO: 142127 - DNA, 580 bp, Arabidopsis thaliana landsberg; identical to SEQ ID NO: 44833

SEQ ID NO: 142128 - DNA, 331 bp, Arabidopsis thaliana landsberg
ctaaaaatcttactcttctcactctaaatcccttctctgaacctcttcgatggctgtatgtgttgattctcacttctctctgagcaagaagctttcgcgtgagagaatgacgaaggtctatggaactggcacgtacgacttcaagcgccacagagtggcggagtatccattggagttacctagccatcctgctgagaagcctctagagtcaaagcctggatctaatttgccgagctccatcactttatcggagattcagcaagataggttaacgaaaatcgctgaggagagctggattaagactggaggtaagctccctgagaaaccgttc

SEQ ID NO: 142129 - DNA, 239 bp, Arabidopsis thaliana landsberg
tcttataaaaagattttcttcttcattaaaattgtttaacataacaacattttttatcaaaacaacatctaatgttacaagtcaacatttcaaacctaaagctgaatgaaatagtttcaaacaaacaaaacagaatatgaattaagatatgatcaagccctaaaaacgaagaagttaccttgaagaagaaggaaaaacaaaggtcccagttttgttgttatatacacgatcaatgaaaa

SEQ ID NO: 142130 - DNA, 230 bp, Arabidopsis thaliana landsberg
caactttggaatcggagtcaccagcgcgtgagtcgccaacatcgtttttattcttaaaagaaaaatatttatccaaaagtctttaaatttataactaattccaaaatcgctttcatcagcaacaacaatggctgcttcgctcgtcaggagttgttgctctcgtgcttcgagagccatcaccaccgtccggtttatgagcaacgtaccggaggacacggtttacggaggac

SEQ ID NO: 142131 - DNA, 270 bp, Arabidopsis thaliana landsberg
gaaatgaaatgtgtggaaagtttcacaggaaacaaacaaccataagaagtatacttaatccaatacacaaggtctattgctggattacacatgatggacacaatttttctagttgaaaacaacacgagagatacagaagtttatgtaccttatttacattagatgagactattttcatcccgattccaaaagcagtaaagtttatgttttctcatgatttgaggctgggactgcatcatgtagtagtagcattgttgaacttttggagga

SEQ ID NO: 142132 - DNA, 1115 bp, Arabidopsis thaliana landsberg
cggctacctttgggcagcgtttagaccagaacaagcatgtcaataaggaaaagatcgaagaactcatgtttgaggtccagaaagttgggtctctaagcagctctgatattttccctgctggtgtgggatggtttatggactttgtgtcaggacgacataagacacttcacaaagttttcgttgaggttgatactttgctaaatcatgtaattgatggtcacttgaagaatcctgaagacaaaacaaatcaagatcgccctgatatcatcgactcgatcttagagactatttataaacaagaacacgatgaatctttcaaactcaccattgatcatctcaaaggaattatccaagtaagcataaaatctagttcacagttctgtcaaaactcagggacttttatctctaaagtatcttatctcttaagataaatatgttcttaaccatcttgtgtcattgttgacctagaatatatatcttgctggagtagacacaagtgccatcaccatgatttgggcaatggcagagcttgttaagaacccacgggtaatgaagaaagctcaagaagagatccgaacatgcattggaatcaaacagaaggagagaatcgaagaagaagatgtcgataagcttcagtacttgaagcttgtgatcaaagaaaccttaagactacacccaccagcacctcttttacttccaagagagacaatggctgatatcaagattcaaggctacgacattcctcggaaaaccattcttttggttaatgcatggtcgataggacgaaaccctgaactctgggaaaaccctgaggaatttaacccggagagatttatcgattgtcctatggattacaaaggaaatagttttgagatgttaccatttggttctggtcggaagatatgtccagggatagcttttggaatagcgaccgttgaactgggactattgaacttgctttactactttgattggagattggctgaggaggataaagatattgacatggaagaggctggtgatgccacaattgttaagaaagttcctcttgaacttgtcccaattattcatcattgaatgatgttccaactctataaataaaaatgaagttatat

SEQ ID NO: 142133 - DNA, 370 bp, Arabidopsis thaliana landsberg
gagagaaattagggaaaaacaaaacaaataaaatctgggtgtaggggagagagagctcgtgctcgtgattttgatatctatctcttcgttatcgattttgaacatccacattgttcttagatctgaagaaaaaaaacacgggttctgttattacgatttgctcggcgattttgacaccaggctttcaattcttttcgttggaggtgattcgatttcagatccatcggatctaatctcggcgagtcgattcgtggtcgacatttttcaaaaactgctcgcgtggatctgaagaagagacattgttgtcttttgtatatcggcactgaatttttctgggaatctgtgtaaagatggatccaatatcagcggt

SEQ ID NO: 142134 - DNA, 354 bp, Arabidopsis thaliana landsberg
attgcaaggctcctggctcagcgcggggtgactataaccattgtcactacacctcaaaacgcaggccggttcaagaacgttcttagccgggctatccaatccggcttgcccatcaatctcgtgcaagtaaagtttccatctcaagaatcgggttcaccggaaggacaggagaatttggacttgctcgattcattgggggcttcattaaccttcttcaaagcatttagcctgctcgaggaaccagtcgagaagctcttgaaagagattcaacctaggccaaactgcataatcgctgacatgtgtttgccttatacaaacagaattgccaagaatcttggtataccaaaaatcatc

SEQ ID NO: 142135 - DNA, 562 bp, Arabidopsis thaliana landsberg
gattgatttgtctactccaaattcgcaagaaaacgtgaataaatttgagaaatcacagaattatttgatattttgtaaattaactaattattgatatagaagaacaaattaatacaatggactaatgtcatagagcaattttttttttgctaaacttcaggatttaactcattcttcttcttgttcaagtggttgctgattctgaaatctcttcttcaataacttaggtcttggtttcataggcttcaagtacttagattgaaatctaaccatctctttcaaaacactaatcagcttcctctctatttcttcaccgtcaggttcaatagctcctaagcaccgtgccacagcctccgccgtagttacacatcctccgaatggttccttgcttagcacaagctctgaatcgtagaagggttcctccactcactgatgcgtctatttccgtatccaaacacactctaaccgctcctgcttctcttaacaccacctcgctagctttgaccatctccttcgcgtgtttccacgtcgcgtcgaatacgattagtctcagcggcggggg

SEQ ID NO: 142136 - DNA, 1553 bp, Arabidopsis thaliana landsberg
gatacagagcacacggagacggagtacatattggtcagcgcaagtgaaagcaagagcctttttgtctattgatgggtgaggagttagctgacacaatgaacctggatttgaatcttgggcctggtcctgagtctgatctccaacctgcaccaaacgagactgtgaatttggctgattggactaatgacccgcctgagagatcttctgaagctgtgacaaggatcaggactcggcataggacacggttcagacagcttaatctcccgatcccggttctatctgaaacccataccatggctatagagctcaaccagttgatgggaaattctgtaaatagagctgctatgcagactggtgagggtagtgaaagaggcaatgaggatttgaaaatgtgtgagaatggcgatggagcccttggggacggtgtattggataagaaagcggatgtcgagaaaagcagtggcagcgacggtaactttttcgattgtaatatatgtttggatttgtcgaaggagccggttctcacctgttgtggtcatctttactgttggccttgtctgtaccaatggttacaaatttcggatgcaaaggaatgtcctgtttgtaaaggagaggtgacctccaaaaccgtgacaccgatctatggacgtggaaaccacaagagagaaattgaagagagtttagatactaaggtccccatgagaccacacgcgagacgcattgagagcttgaggaatacaattcaaaggtcgccttttacaataccaatggaagaaatgattagacgtatacagaataggtttgacagggattcaaccccagtccctgattttagtaaccgagaggcatcagaaagagtcaacgatcgagccaattcgatccttaaccggttgatgacatctaggggagttagatcagagcagaaccaggctagtgctgcagcagcagccattgtcgcagcatcagaggatattgatctaaatccaaacattgctcctgatcttgaaggagaaagcaacacgagattccatcctctcttgatcaggagacagttacagtcgcaccgagttgcaaggatctcgactttcacttctgcgttgagttcagctgagaggcttgtggatgcgtattttaggactcatccgttggggaggaaccaccaagagcaaaaccatcatgctcctgttgtggttgatgatagagactcattctcaagcattgcagctgttataaactctgagagtcaagtggatactgcagttgagatcgattctatggctctttcgacatcgtcctcgaggagaaggaatgagaatggttcgagggtttctgatgtagacagtgcagattctcgtccgcctaggagaagaagatttacttgagaaacataaataagaaaagctttcaacctggaagctgacgatgatgatgattaagaagaagataagaagaagattgtgtaactttatttttcttgtgttgctttgttgtaatttgtttttgtatttttctcgatagggatggttttttttaatcgaaaattttctttcatc

SEQ ID NO: 142137 - DNA, 427 bp, Arabidopsis thaliana landsberg
ccacaaagaggtggttaaaaacaccaaaccaaacaataagcaaactatacactgagaagaaaaataaaagagagctcaatagatgttttatactaacggtagattagatcaaagatccaagctttactctacatagagcagaacccagaatcccttcatatctcttttattctagcaccgataatctactgtaaagaagacacttagagctctgtctctttgtcaaagaagtcccagccgtcatccagaagctccttacgttcattaacagaagcttttgggctcttgttattgctcgaggcttcaggtgtttcataagatgcttccaaaggcttctccgtcaataagctcttcatggatgaggcggaagaagccagtttacagctagtctggcttgaggagattgattggctcaatggcactcggt

SEQ ID NO: 142138 - DNA, 290 bp, Arabidopsis thaliana landsberg
gccaaaaccatcggtgtctatttgattgaacattgctacatccaaatccaagcctccgttgctgcattggtccactattctcacagttactgcagcatttgttcttgtgttcttcacctgaatccatttatacccaccggttaatcacaatttttaccggctatacatcttttgaaatatttcactaacacgttgacgttggtaaatggtaacaaattttatcttgtattcgtcttaattccaacactttctatatgatctccttttgcacaaacatacttatataaaga

SEQ ID NO: 142139 - DNA, 495 bp, Arabidopsis thaliana landsberg
cagccgtgtgtaagcaggacgcaatgaagcagaccaagaagccggtttgtccacctacacaaaatgcctaaagatatacaatgtgtgtgggagggatttgtgcaggtaagttgctaggactatctgtttctaattctttagttttgggatttacttggttcgtctgaaatcaatgacttaaagaaatctgcaccttactaagtgtttctttttgcatttacattagttagaactgcaaaaggttaggttttatgttaaagcctagggtttagaacagagttttatcagtctcttcatcaaatctttgtctccagctctaacaaaacaattttctctttagttcattgtgaaacagatactgaggcagagggattaacagatggagagggatacaaagagagggagagagacagagacagagaaagagaaagagagatcattcctattgaaaacaagaataagtcagacaggaaacattaaaatacaaatcttcct

SEQ ID NO: 142140 - DNA, 489 bp, Arabidopsis thaliana landsberg; identical to SEQ ID NO: 26557

SEQ ID NO: 142141 - DNA, 243 bp, Arabidopsis thaliana landsberg
caggattaaacagattcgctcagttctcaaaacgatgaaagtagcggagaagattgttttcctctggaatgattccgatggatttgctgcaaccatttctgatactttaaaccctagccctagttcccctcttcgcaaactgtaaactcgactcgtcctttctcgatttccgccttttacttactatctccgcctaacattgtaattcctgcagagaagaacagatccagcttccgttggata

SEQ ID NO: 142142 - DNA, 667 bp, Arabidopsis thaliana landsberg; identical to SEQ ID NO: 42333

SEQ ID NO: 142143 - DNA, 240 bp, Arabidopsis thaliana landsberg
aacactgcacttgaccagtacgtaaggagcatctcttagtgtgtgcattacagatttgtccattggaacttctctccttcaacagaactatcgtctgaacaatctctgaaaagaagagagaattgtagtagagagatttatcttgagttcgactgttttctctgcaaatctatgtttcgtttaccctttttattaactccactgtattggcttgctatcaatgatgttcatggtttactc

SEQ ID NO: 142144 - DNA, 362 bp, Arabidopsis thaliana landsberg
aatcataaaacggtgcaaagagaatgacttcatcaccagggtttattaaacccaacatagctgcagctatggcttctgtgcaaccagatgtaacagtaacttctttctcaggatcaacaacaagacccgtatcttcacgaaaccgcgcagctatagcagagttgagctgaggaatgccgtatccacgagcatactggtttttaccatctttaatagcttggatcgcagcttctttaacaaaatcaggaccgtcgaaattgggaaagccttggcctaaattgatcgctccatgtttaactgccaatatgctcatttgagtgaaaatagtagtcttgaacttctctaatctcttcgccacctaa

SEQ ID NO: 142145 - DNA, 351 bp, Arabidopsis thaliana landsberg
tcaacctcagcttcaggtttcacaacctcttccttcttctccttcataggagagctctccttcttcttcgtctttaagagagtgttgtcaacaatagcttcctcaagcttagacttgagatcactcagtgcctttttctcagattctttcaaatcagcaaagaaatcactctcttctttgaaggaagcactcttctccacaccctcaggcttgctctcatcttcttcaaccttagtctcttccacaacagccttaacagtagtctcctcaggaacaacagcaggagcaataacaacctctgactccacctgtttctcctcaaccttaacttcagcagtcatcttaaagcct

SEQ ID NO: 142146 - DNA, 726 bp, Arabidopsis thaliana landsberg
caactctccaccaccaccattgtcaccaccacatttaaacacacactttcacttgtagtgggattcgaaagtgcgttttattcatttgttttactgtttttgataacctcaaaatttgcctaaattttattctctataaatccttatatgttttacttacattcctaaagttttcaactttcttgagcttcaaaaagtacctccaatggcttcttctgcatttgcttttccttcttacataataaccaaaggaggactttcaactgattcttgtaaatcaacttctttgtcttcttctagatctttggttacagatcttccatcaccatgtctgaaacccaacaacaattcccatgtaagttcacttctctcttctctgcttcatcatggaacttgatttaagaactatgagattttgtagcttgcccatttgctgaaatcttgaattaaataatgggtttactttgtttttgacaaaagtcaaacaaatttgactccttttcttagttactttattggaaatctgtggaaaatatagtgaaattagaccaataatattgcttctttggttctgatttctgggaactgattagagaaaatgacagcttttgcgatttgggttttgtgttgtggtacagtcaaacagaagagcaaaagtgtgtgcttcacttgcagagaagggtgaatattatttaaacagaccaccaactccattacttgacacta

SEQ ID NO: 142147 - DNA, 313 bp, Arabidopsis thaliana landsberg
actgagaaaagatattaacaatttttaataatgatgacatccacctctcaaaaaaatggctggctaattcctaacgctatcttaaaaagaaaaaaatagaaaattcaaaccaaaaaaatgtgagtggaagacaactcatgaattggtaaaacgacaaagcgaaacaagtcaaacgacaccaagctggctttgctgtctcagctctttccttagcttgtgtgagaaaagcctgcaagcatccaaactcagatccaccgccgcagctaatgccacgtgcgctgctgcatcctccgtacatgtcacgtgcgtcaca

SEQ ID NO: 142148 - DNA, 595 bp, Arabidopsis thaliana landsberg
tgatggtgattcaatacaaacgaaaacaagagtttcctatggtgaaagaaggaatggtcatgaccgagaagccaaagaggaatctcataagctctaatgagaagcgatacaaaggaataaggatgaggaagtggggcaagtgggtggctgagataagagagcctaataaacgatcacggatctggcttggttcatacaaaaccgccgttgccgcggcacgggcctacgataccgctgtgttttacttacgtggtcttcggcgagactcaatttccctgaagaggtctttaaggatggaaacggcggtgaaggcttaggaggagatatgtctccgacgttgatacggaagaaggcggctgaggtgggagctaaagtcgacgcagagttgcggttagagaataggatggttgagaacttagacatgaataagttgccggaggcatatggattgtaatttatagtttggtagtttataggttggagattgcccggagacagagtcaaacagaggttctctgactcatatgaggcataatatagttaatatagtaatttttgttttgagcatagtaattatgtcataacatggatcctg

SEQ ID NO: 142149 - DNA, 109 bp, Arabidopsis thaliana landsberg
tttctccaccgcgcacgttagcctgctctctttcccactccgagatggagacgacgccggagactcagtcgaagactcaccgtctaccggcgggaagagaggattggtg

SEQ ID NO: 142150 - DNA, 203 bp, Arabidopsis thaliana landsberg
tatggaagtggttggctcatgaaagcaatctgcttgtatatttagaagtccatatggagactgtcctaaaacaaatttatcgcttcattttcgctatttttctcttttaaaaaatattcggtctgtgctttttttttgggatgcaaatttgccttgtggatttttgtttcttaaatattgaatggagatggagaaatggcctt

SEQ ID NO: 142151 - DNA, 2407 bp, Arabidopsis thaliana landsberg; identical to SEQ ID NO: 63670

SEQ ID NO: 142152 - DNA, 421 bp, Arabidopsis thaliana landsberg
acctagaaacgtctttagagacaatcacaggaggaagagttagatcggactccaatccaccgcgatcgagaaacacgacggcgcgtgtagattcaggagagtaccagagacgaacgtacgagctacgacggagccaagagtcgtgagaagcggcgatcgagaagagtaagtgacggcgacgagtggagaacacagataacgatcgagcgattgatgaaatctgttcacggcggaaattggtgccgtaggagaagatgatgtagatgatgaaacaaaagatgagtaataagaagatgtttctgatgcgagaagaagttagcgacggagatttggccggaaagagcatttccggcgaaagagaatcgagtctagagagagatgaatcaggtcgtctcttacgtctcgtttggttcattttgtt

SEQ ID NO: 142153 - DNA, 275 bp, Arabidopsis thaliana landsberg
ggtttcagaggggctctcttgatgaattctcatttgaaggaccgaaactcggcaaaatcagagctttttgggttggtcttgagtctggttagtttctgttggcatagaacttgtcttagtacataaattttgtgattagagatacttagcttttcatatttaggtcaatggagagttggaagagtgagcttgtgggtggttaatcctcgtggtaaagaaaccgaggcaaaaaccttttgttaccgatatgattttgaagttgatgaactcttgct

SEQ ID NO: 142154 - DNA, 410 bp, Arabidopsis thaliana landsberg
aagccaaattgataacttagtaatttaaccccttataatcttcaaccaaataaacatctttttgttttttcagctaacaaagaacaccgactctcacagatcactacattacaagtttccaaatcatttatgtgatcttacatctactgagaaagctgccaatctcttttctcaagcggctaaaagataattacaaatgctagaaccgtcgccgccgtttcccaaccctttgattcggggatgaaccggtataaggagttgaagaagttatgtccggaacaaacacagagtggtggtgaaaatgcttaggccagtttagaccagacgctgtaggtggagactgaatctgtggaaccgcccatgatgtctcacctcccaagcagttattgttatcttctccatcttcttct

SEQ ID NO: 142155 - DNA, 339 bp, Arabidopsis thaliana landsberg
cttcgatccgaaaacttcttcgccaatcttccgtttcttctcacgaatttctccttcaagctccgttcccagcaatgtcatggtacagaagaacaaaactcgtattcgattccctgcgacgcaacataaacccgaagattctacctcgatctcatgttacttcgagaatcaacaatccaattgggtcttctaatccctcagctaagttctcttcaatctcttcgcgagaagtaggattaagatcatggacatctctcggccgaaacacgaacagaatcgcgtataatccgtttctgagtcaacccaagagatattactacgttgatcgataccaagttc

SEQ ID NO: 142156 - DNA, 1154 bp, Arabidopsis thaliana landsberg
tctttcttcttcttccccgacttgagtttttcggcgatgggagacgagcagctggcgattgtgatggccgatcgtgaaagagatcgagaactttgattcgcttcgctgattccggcaacaaagacgatggttagtcgttttctcatttcaagattcatgtgaaatgaacagtagctttggatctggaattggattgtgatcttatgctttaactattttctgcaaactttaagtttgttcattaagggtttggcatcgaagaagttcatgaaaggctggtaagcaaaagtatcaactttgcatttgatcaagttgtcacagattcatgatttgtgctcatagtttgaaatctcaactgctttttgcatataaaactctcaattcaattaccatattcctctttctctctcagattactggcagctctagcgcgatttttaaatcagatcatcccgccatgacctcacaagcttgtctcttcagaatcagctcaaaggtatacacaaaaccacacgaatctttaacaaatctgtttgttgttgttctttgttattaaattcgatttgttttcggatttgttcagatctttattattagcatcatgtcgatggattctctctgctagtctttttttctgatatattgtccgttatttctgatatatctctgaatctgtttaagtagttatgatgtgaaggggctagatttggatttacttcctgtgagtgatttatatccacgtacttaactgttcttgtgaattttattgtcttatgttctaacgtttgtagttttggtcatatgcttttgtgcggttcagcagacaggaaagaggcgttaaagattaagtgcaaacaacgactctgtgatcacaactccacaccaagattctcttacatcgcactcgtcgctcctgcactcgtagtttctgtgaatagccaatgaagagtaaagttcaattatgtgtgtcgtgtttagtaatttgacttgaaaaaagagtttgctagggtctcttgtgaacaagctgttatgtctgcaattcgtgagttttggttaattttggatttgtacttcttgcaatggctgccctcaaaccattgattaatgtattatataggtggtgtggttaatgatcctctttagtttattcgatt

SEQ ID NO: 142157 - DNA, 1123 bp, Arabidopsis thaliana landsberg
agcaaaaatctcaatttcaacctcttaagtctctccaaagtcccataaaccctaaaacaatgtcgagacgtttcaatccgttagaagatccgccgagtgcttcttcaagcgacgaagaaggtaaagaaatcgcacgaaactcttcttcggatgatgaagatgacgtttcctctgaaaacccatcacctttgaagacgactctcgacgccgtttccgattccgaatctggttcggatgaagaaaccgattcagactctgaactcgagaagaagaaagatcaagttgtgacgaatcctgtggatgtgaagagggctaagaaggtgaaaacctccgagaaatctggggctaaacgttctcttgaagtggatgaagcagcagtgtctatggatgtgaagagggctaagaaggtttcaggggaagaggagaagaagaagagtggtggcggaggagaagagacgaagaaaacttatttccagcgactttggactgaagatgatgagattgtggttttacaaggtctgattgatgacaaaaaagatacaggggtaagtaatacgaataaggtttatgagttggtgaaaaaatctattagttttgatgttagtaagaatcagtttatggaaaagcttagggctttaaagaagaagtatgagaacaatcttggtaaagccaaggatggtgttgaacctactttcgtcaaacctcatgatcgcaaggcttttgaattgtctaagttagtttggggaggtattagaatggctcttgcatctggtatgaaatctaatgagaagtcgaagaagagtagtaagtttgagtctgtgaagcatgaacttgattcttctttgcccaacagtaaaaacaactgtgaagatgaggtgatgaatgaaggagaagtctcttttacaaagttttctcttgttagatcgatagtgggtcttggcatggatgaacttactgctcaacaaggattgagtaagcttgcctcaaaggatatgaagagattttacgagcagtggaaagcgatgcaagctagggaatttgagttctttttgcagaagcatggttttctttttgaagtgctatcaaagatatctgaagcatttggatcaaacgcttagatata

SEQ ID NO: 142158 - DNA, 386 bp, Arabidopsis thaliana landsberg
ctcaatggttcgtgtctaacattaaactcaagaagatggtacagagactgtctcacaactttgaagaatgattacaaatctcataactttttccaagacgtgaaaattaaaaagaagaaaaaaaaagaaacacatttgtagaaaacactaaacagaatttgcaaagaaacaataatgagaatcatcaactgtggaaacagtttcttcagaagaaatcaaactcaagataattactctgatcagatcttacactcgaagatgcggctgctggcacagtaggagtaggattcaaagcttcaagatcaaccggtttaggaatctccggtggactggcacatcgaacctaagcccaaatcactccttcaaagaaaggatgttgctttatc

SEQ ID NO: 142159 - DNA, 180 bp, Arabidopsis thaliana landsberg
tcttctttctctatggctaaactctgaaacgttttcagagccgtaacaatggctttggttcattacatgaatgtttcacgtagcacttttcctttgagtagatcttcaaagattaatttgagctcatcttttgcttctttgccacttcagtttcataaaaacattaagagattagaatcc

SEQ ID NO: 142160 - DNA, 159 bp, Arabidopsis thaliana landsberg
ggagctccatcactttccggtgagagttcgagtgcctcgccatcacgaacgtcggactcgacgccggtctatactccggcacgagcctccctgatttgtacctcactccgcaagcgttacaaagcgtcttcggacccataggtcccgtcctccattgcg

SEQ ID NO: 142161 - DNA, 481 bp, Arabidopsis thaliana landsberg
cacaacaacaacaactaagaaatggcacgatatgaattcttccgccaaatattcattgtcttgtctatagtttctccgttggtcagatctttcactgtgatcacctccgactcgacggccccatctgctctgatcgacggcccacaaactggattcacgatgaccaatgacggcgctcgcacggagcctgacgagcaagacgccgtctacgacattatgcgtgcgaccggcaacgactgggctgccgcgattccagacgtttgccgagggagatggcacgggatcgagtgtatgccggaccaggataacgtctaccacgtggtctctctgtcgttcggagcgctctcagacgacacggcgtttccgacttgtgatccacaacgctcttacgtctctgagtccctcacgaggctcaaacacctcaaagccttgttcttctaccgatgtttaggccgcgccccacagcgcataccggcgtttc

SEQ ID NO: 142162 - DNA, 542 bp, Arabidopsis thaliana landsberg
atccccagtccgttgttcttcgcgtcgctccgtgatcgacccgccggttatctgaacactccgttgacggtagttgcagccgggctatcgaaatggctcgatatatacagtggtgttctgatggtcagagttttgctcagttggttcccaaacattccatgggatcgtcagcctttgtcagccattagagatctgtgtgatccttatcttaatctcttcaggaacattatccctccagtctttgatacgcttgacgttagccctttgcttgctttcgccgttttgggaactctaggttcgattctcaacaacagcagaggatagtcaatagccactacttactctgctttgagtgatgatgcaaaggttatggatcgtattccgtttatctttggcgtttatattgtctatagttatagcatttggaagtatttataaggtaatgatgtattagactcttaagtttcagtctttacttctgttatgtgttatttatgtaaatgcacgaatatggtttcaataatagaactggagtttcgagg

SEQ ID NO: 142163 - DNA, 304 bp, Arabidopsis thaliana landsberg
attttatctgtggaagatatactccctattttggatcgttgggtcaaactgataataaagtctgctctatatatatagacgaaataaatttctaattgaagacaaaattaaagtctgtatatagacaaaatctaatatgaaatatagaaaaaatctaatatgaaatataaacaaaatccaatatgaaatatagacaaaatctgaaatttcatgataataaatgtcataataatgaaaatatagacacaatctgagacttaaagtacattccaaataaagtggaaaagctgttttttcatccgat

SEQ ID NO: 142164 - DNA, 201 bp, Arabidopsis thaliana landsberg
tccatacaataatgttataaatttgagtttcttaagaaacgttcatattacatcattttctttgattcttctacacaaagattcttacttttattacaccccaactacacacaataacccacctagaacacaatccggctacaaccaattttacataactgatgtagatcattcatcatctaatacaacttacaggacgtg

SEQ ID NO: 142165 - DNA, 611 bp, Arabidopsis thaliana landsberg
catgataaagagattttattcattacttgtaaaaaaaatgttccttcctttgtataaagattaataatcatacagcttattccaattctataaactaattctggaatggattattcttaatctacttaaaacgaatctaaatttatatgttgatctatattcttggtttcaagattctatgaagaagtagtctgactctcacttcttgttgttccttcgagctgacgttttcttccaccattaacaaaccttttcccaaaacctaaaagaaacgcaggaggaacaaaagcacctccgcttaaactgcagacaaccgcaacagctccaccgataatcaacagtttcttcagatttgcagctcggtttccttggtttaatgtaacgggagtttcagtgacaggcgatgcaccgttgctgagggagatgagatggtcttgtgtgatcttggtgttgatttgagccatgaaagcagaccgagaaagcttggttcctccatctgagagtctatgcgtttggtaagcacgtaaaccgggttccatcttcttcactgctccccacattcctcgtttcactccaagctttgcgatttctctaggtattcccatgtcttc

SEQ ID NO: 142166 - DNA, 402 bp, Arabidopsis thaliana landsberg
gcactccaattcaatcgaatgtgtataacatatagtttatatacacacaacataataatcccaggcaaaatggtaaaactaattaatataacttgtctcaaaaagaaccggccaaaaaaaactaatgccttacagtagttttacatggacacagagatgctccagcttctactctctctttttaacagttcatgttcccggcacagcttttgtgaacaagaagaagccgattctgagcccaacctcttatagtcaacgatcgtttgaggccataccagccaataaatagtcaacgttcagtcttaagtgtgtgtatttcacttgtgaggtcgcagttcaagcttataagctcgtatttccatgggagagatcgagacacgtccttcccgtggcagtgaacta

SEQ ID NO: 142167 - DNA, 380 bp, Arabidopsis thaliana landsberg
cttgtaatcagagaataaatgaatcggcatgcaaaacagcaataaacagaggattctgaaaagagatacacatgtaaaagatagatagattgcatataaatgttaaaagatgagagaaattaaagaagaagaaaagagatctaaacatgaatgcacaattaaacaggggaatatccaaaaaaaggaggaaactttaaaacgaggaatctccagccagatttgaaaggaagccggaaaaagaaaagccctaattaggtctctctctcgcaggtgtaatcaaaatcttacttggtgactgatctgagccgatgaatcaagaacacgcatcagacagagaggagagagaagaaatacaagaagaagagatctcgtgagtgttc

SEQ ID NO: 142168 - DNA, 409 bp, Arabidopsis thaliana landsberg
ctcacagaaaatttggttttcttcttgacatcgaagaatccattgtgatgttttgtttacacagagataggaaaaaaattaagcttttagcttgttctcaaagagaaaataaactctgaaggagagaattgggatacagatacaatagggtttagggtagtgactccttcaagatgaatatgaatgcttaccaaccaccaatggctatgcctctacgtctccgtcttcctttttgcaaccatccaatgtatcaagcaaagatatcctctgtcaacaatggttcttcaccattcacacagccttgaggtgcacactcgatttgctcatagttaagttgtctggacgcttcatacagagcaatccctacactcaccgaaagattcagacatctcacatacgtttctaccat

SEQ ID NO: 142169 - DNA, 198 bp, Arabidopsis thaliana landsberg
gacttcataaatggctcatgagcatcacgagtcatcttagcatccccaccagcggattctagattgttacctgtaacaccggcgaccgctcccataacggttgttgcggcggctgctgtgactgcagcttgtcttttagtggcagagtattgttgaatgactaataccgaagcatgcattgtgaaattcgacgaagct

SEQ ID NO: 142170 - DNA, 462 bp, Arabidopsis thaliana landsberg
aaaagactaaaagtgttttctctaaatatacactttgttatcaaattacaagtaatcaatcaaaagatggaaggcaaaactgtgatattcagtgtactcgtaatgggtctggtcatctcgcaaattcaagtagaagcacaaaaaacttgctgcccgagccagtcaactaggaaggagtttgaagattgcatttcagaaggaaatttgcagatactttgttcagctgaaagtggatgccgagacacttacgtgggttattgtccttcggggtttccttacgggagtctcacaaactctggtaaaaactgaactcacttgggtatatgcttttttaagatacaatatttgttagaatatggatcaagattttattttttatgcaaggtcatgtagtcaatgtatattgtaagttggggtgtgtatcctctctgtgtggtgccttaacgagtctccaaaaatttg

SEQ ID NO: 142171 - DNA, 432 bp, Arabidopsis thaliana landsberg
ggctctagtccaacgcggccctacattcgcttcccggcctccggactcgccgatccggctcatgtttagtgttgggaaatgcgctataaactcggcggagtacggatctttgtggaggactctgaggaggaactttgtgacagagctagtgaccgcgccgagagtgaagcagtgctcgtggataaggagttgggctatgcagaatcatatgaagaggattaaaacggagaatgttgagaaaggtttcgtggaggttatgagccaatgtaggctaacgatttgtagtatcttgatctgtctttgtttcggtgccaagatcagcgaggaaaagattaagaacattgagaatgttcttaaggacgttatgcttataacttctccgacgttacctgactttttgccggttttcactccgttgtttcggcgtcaagt

SEQ ID NO: 142172 - DNA, 206 bp, Arabidopsis thaliana landsberg
agagaatcaaaaatcaaaatgtcttctcctactgcgactaagtacgacgtctttctgagtttcagaggactcgacactcgtcgcaacttcatcagttttctctacaaagaactcgttcgaagaaaaattcgaactttcaaagacgacaaggagctcgagaatggccggaggatttctccggagctcatacgcgccatcgaggagtc

SEQ ID NO: 142173 - DNA, 1178 bp, Arabidopsis thaliana landsberg
  unsure (1)..(1178): unsure at all n locations
ttgatgacatcttgtgtgggaacccgatggtttaggccaccagaactgctctatggatctacgatgtatgggttagaggtcgatctatggtcgcttggttgtgtgtttgcagaactcttgtctcttgagcctttgttcccaggaatttcagatattgatcagatcagcagagtgaccaatgtgctgggaaatttaaatgaagaggtctggcctggttgtgttgatcttccagactacaagtcaatctcatttgctaaagtagaatctcctcttggtattgaaggatgccttcccaaccattcaggggatgtgatatcgctgctcaagaagcttatctgttatgatccagctagtagagctactactatggagatgctgaatgacaaatatttaagtgaagagcctcttccagttccagtttcagagctctatgtgcctccgacaatgagtggaccagatgaggattctccgagaaagtggaatgattacagagaaatggattcagattcagattttgatggctttggacccatgaatgtaaagcctaccagtagtggatttacaatagaattcccctgaccttggcatttaaggtacgcagtcaaaagctctggctcgcttaaacacataaatcagtctcttctctctctctctttcttcttcaaagagaatgggtatataccaaaacctgacatgtgtttctttaggtcttgattgatgcaacactctttgttgtttgaagatcttgttacagaataccgcttagaaaattgttaacttttcgttaggacattgtttaggnnnnnnnnnnnnnnnnnnnnnnnnnnnnnnntttgctcattgatctcacaacttttttttgcgctttgtttctctcatcgatctcagttttatgtgtttatctctccttggcagagtccatggttgagcatcttgatcatcccgactttccctgaattcgcctactttgtcaaaaatgtgttgtgagtgtgtgtgtgttgttcctctctctctgcctccctcgtatgaaaatggtaacatttacaattggaaagtcggtgttagcctttagctattagctgaagagctagttttcttgttgcccaggccattctttaccctatttttcatctgaagtaacaatgaaacaaaatccatatatactcgagttttgcttt

SEQ ID NO: 142174 - DNA, 300 bp, Arabidopsis thaliana landsberg
caaagactaaagaaaaagaaaatatgcaatgaagagctaaactatgcttctcagcttttcaatactaagctccttcttattttgggtcaattgtcaaaaaccctaccaaattctacattcgtttatatggacatctacactatcatcagtcagatgctagaaactcctgcggcttatggtaaattatttattgtgacaattcatataacactttgttatttataatatctgttcatgcatttgaattttaaaatatttgcatgcaggatttgaggagacaaagaaaccgtgttgcaaaac

SEQ ID NO: 142175 - DNA, 1127 bp, Arabidopsis thaliana landsberg
ctcctgagtactactggaaacaaaaaagcagagaacaagagaaaaaaaaaagaagacgactttatctttttctgggttttgttgttcttctttgactttatgggttcttttgttttagatttaggctcctacagatctgcttaaatctctgtgatcttgtgtcttaattcttctgtttacccgtaatttccggaggattctcttcttgcttttccctgagcttctggatttggtcagagaagccttaagttcaaaaggatttggcttttgaagattggtgttaattaagcttctgggttttcatcagtttgtctaaaaggttcatccttttctccttctctctttgatgtttattgcagtgagattctatgttctaacctcaaatctcaggtttttggtatcgaatctttgtaataaaacagttttgtctgaaattaactaagattttgactttgtaggtagtaaatcagatgagtaaaatttcattttgggaaatacctgattgttgttgaatcttttaatgcttttgattctgtgttgttacatacgtctctgttatctccagtttaaggaaagattatctgagattctctgttaatatatcaaattgagtcctgatttagcctcctatgatctcaattttggggcatttttggtgagttatcatcaagattctctttggttcattattgtctttaagaaagaaaaaaagctatattggggacatgacctagtttctttattgggcatgcgatgccttgcatatctcttctttcctaagctttagcgaaacactctttctcttttaggctccactttacttttatggctctttttctttttatttcttacttattaagaaggtgactcagaattgccttagctgaatgactttttttcttgtgggtgcttatgttaatggacagtgagtggagtctctcatcttagtctgaagctcttttttttggatttgagcatttctggtttgagaagaatcttttggaaaccaaagagaaatgtcgtttcgaggcattgttcaagatttgagagatgggtttgggagcttgtcaaggaggagtttcgattttaggctctcgagtcttcataaagggacagctcagggttct

SEQ ID NO: 142176 - DNA, 106 bp, Arabidopsis thaliana landsberg
ctcaattcaaatacataaataaatatcaataaaatggcgggacgcgacacattccagctgcgttttgcagcagtcgcggcatccgccgccgtattgatctttactc

SEQ ID NO: 142177 - DNA, 812 bp, Arabidopsis thaliana landsberg
gttctaaatatttcccaaccttagggccccttagacacaataaaaaaaccggttagcaagaagaaaaaaaaagatcgaaaatggaatatcaaactaacttcttaagtggagagttttccccggagaactcttcttcaagctcatggagctcacaagaatcattcttgtgggaagagagtttcttacatcaatcatttgaccaatccttccttttatctagccctactgataactactgtgatgacttctttgcatttgaatcatcaatcataaaagaagaaggaaaagaagccaccgtggcggccgaggaggaggagaagtcatacagaggagtgaggaaacggccgtgggggaaattcgcggccgagataagagactcaacgaggaaagggataagagtgtggcttgggacattcgacaccgcggaggcggcggctctcgcttatgatcaggcggctttcgctttgaaaggcagcctcgcagtactcaatttccccgcggatgtcgttgaagaatctctccggaagatggagaatgtgaatctcaatgatggagagtctccggtgatagccttgaagagaaaacactccatgagaaaccgtcctagaggaaagaagaaatcttcttcttcttcgacgttgacatcttctccttcttcctcctcctcctattcatcttcttcgtcttcttcttctttgtcgtcaagaagtagaaaacagagtgttgttatgacgcaagaaagtaatacaacacttgtggttcttgaggatttaggtgctgaatacttagaagagcttatgagatcatgttct

SEQ ID NO: 142178 - DNA, 266 bp, Arabidopsis thaliana landsberg
gggaaggaaagatctaactggtgtgagagttattcagagaaacttggtttacgttatgagcttgccttttgacctggcagatgaagatgtaacttaaacagccttaacttatctccttggcactcacatttgctttgaaaagagataacctttttcatatcattaatctgggttgttatgtatgcagatgtttcagcgaagagaatactttggtcaatatgggaaagtcgtcaaagtagcaatgtctcggactgcagctggggctg

SEQ ID NO: 142179 - DNA, 292 bp, Arabidopsis thaliana landsberg
gtctcaataatgttcaataatagataacaaaaattctacatcaatacacaacatgaaaaaaacggacaacgcaaagaaagttcagacgcgtgttaaccgccaaatcagatcagcagtttccgttttctttctttagaatccaatgagccagaataaacgctcaagctttctcataatacaacattcttcagactatacttggaggatctccagaccagctacaagcggcacgcgaccaccgagttctgatacaatccaccagtggtgcatgttggaccggttttggctgatt

SEQ ID NO: 142180 - DNA, 1577 bp, Arabidopsis thaliana landsberg
cgctcttagagagaaactggagcaacttctcaaattttagccttttttttgtttttgcattttgcctaatcggtgcttctccagatttcgcttatcttgttcctatagcataacaatggcggatttcaaaccaaggatcgagatttcgttccttgaaaccttcatttgcagcgctttcgctgcttgttttgctgaggtatctctcataagtgctgcgagattagattattattcctcttttggatttttgtcatttttcatttgagtctgtcaatattcttaaattcgatcaatcactgtcactggtgaacaatccagagaaatgctatcttagatttaccgttattctactgaatcttcgaaattgagctttagaagctaatctatgatggtctagtctacgactttaaggtccattacttgggaatttttgtgatacttaatgaaatgagcttacatagacgctatagatttagtgttttcgaaatttgacttttcgtgtgttatgtgtttgttgtattagtctttagtcaaattctaattcatggtttatgagtgatgttgtagttatgtactataccgttggacacagccaaagttagacttcagcttcaaagaaagattcccactggagatggtgagaatttgcctaagtatagaggatcaattggtactctagctaccatagctagagaagaaggtatttcaggtctttggaaaggtgttattgcaggacttcatcgccaatgtatctatggtggcttaaggattgggttatatgagcctgtgagtctcacattattttccttctctggtgctttttttttttttgtgtgttttatactctcttataaagttatatctgatggattgtttattttgctatatctgattaggtcaagacacttttggttggaagtgactttattggcgatattcctttatatcaaaagattcttgcagctttgttaactggtgagctcagttcttaattttgatagtctcttggaagtaacttgagtgaatgattgagattataaagggaattattttattgtgtgtgacacaacaggagctatagctattattgtagctaatccaactgatcttgttaaagttcggcttcaatcagaaggaaagttaccggctggggttcctaggcgttatgcaggagctgtagacgcttattttaccattgtgaagctggttagtaaactaatcttcaaataacaatatcaaaaatattaaaaaactttgttagcagagtgttatagccttttgatttataaaataggaaggagttagtgcgctatggactggacttggtcccaatattgctcggaatgctattgtaaatgctgcagagttagctagttatgatcaaataaaggaggtgatatttctttctcaagtattttgttgtgtaggagttttcttggcttctactggtggttgtttagtctttgtttgttcttatacttccatacatatgcagacaattatgaaaattccgttcttcagagacagtgttttaactcatctactagctggtttagctgcaggcttcttcgctgtct

SEQ ID NO: 142181 - DNA, 295 bp, Arabidopsis thaliana landsberg
atggattcttcttttttactcgaaactgttgctgctgcaacaggcttcttcacacttttgggtacaatactttttatggtttacagaaaattcaaagaccatcgagaaaacaaagaaaatgattcttcttcttcaacacaaccgtctccttcaccacctctgtcgtctttatctctcacgcgaaaatacgatgtctttccaagcttccgcggggaagatgtccgcaaagacttcctcagtcacattcagaaggagtttcaaagacaaggaatcacaccatttgttgataacaata

SEQ ID NO: 142182 - DNA, 273 bp, Arabidopsis thaliana landsberg
taccaatgtttttgcaaagtcaatggctttctctaattcaatacgagaactataatatttgttatagctaatcaggttttcttatccatatatttaactaacaaaaaaattctctttcacccacattatcatcaattattataagatacaaaccgacactaaatacaactagactaagattcaaaatgtttgtagtttatagatgatacgaaataatggtccaaactggtcttccgctcttctttatgtaaccgattcaaatggatacataat

SEQ ID NO: 142183 - DNA, 491 bp, Arabidopsis thaliana landsberg
ggataaacgaagattgagtatacttcaaacaaaaatcacaagtttgtattattcagcaaaaacaagtcaatcttgctctaacatgccggaaaatattaattaaaagaaaaaaagaacaagtgaagatcatcattcagatccagactcttgactgttgtgcttttattaatcaaccgatgagtaacttattctcttccaggaagctgtaggttggtacttccaggttgtatggtgcaggacctttcctaattcttccagatatatcgtaatgtgatccgtgacacggacaaaaccaaccaccataatcaccagcattaggcaaggggatgcaacccaaatgagtgcacactccaacaaccactaaccattctggattcttgaccctaaccgagtcttcttgtgggtccctcagggatccaacatccacactgttggccagcttgatgtcatcttctgttcttcgcctgatgaagacgggctttccacgccac

SEQ ID NO: 142184 - DNA, 705 bp, Arabidopsis thaliana landsberg
tcttgacgtctcgctgatctgttttgctaagattcaagcttcaaaaccctaatttctctagccattagcatcgatttcagctcaacttcaggtttgctgttccctttttttgtatcatcccatccaccgatcgatatttctcaattttctgatttgctgctctctcgagagagagtcaccgttatggagttggattcactatatgatctgataattatgaaattcacagatgcttctatatatagtaaatctgatttattagtgacgaatagatgaacatattcccttgattattcttctacaaatctcggtagtgataaattgttaggttttgacgataattgtacttgctcagtttttcatgtgtttagttatgattcttcttgggcatgtctgtgtcttcgaatcgattctcatgtgattcccattattgttttttttcttctggttatttcagattcaaggaaacaattattagcttctcaagtgcttcagtgatccgatacaatggtagttattgccttctctgtttcattgttaaattttgttaatttcagtgattttgagctaagagttttgtttatccttgataaattcagtcagctttgttcaatttccattcgtttctgacggtggtgctgcttgtgatctgcacatgcacatatctgaagatgcagttccctgccattttagagcagaaactgg

SEQ ID NO: 142185 - DNA, 147 bp, Arabidopsis thaliana landsberg
agggctgtgacgcttctctcctcattgattcaaccaattccgagaaaactgctggaccaaacggaagcgtcagggaatttgacctgatagaccggatcaaggctcagctagaagctgcatgccctttcacagtctcatgtgctgaca

SEQ ID NO: 142186 - DNA, 978 bp, Arabidopsis thaliana landsberg
tggtcaatataccgtttggccacctttgtatcagtgtcagtcgaaacaacatatctcaggagcaactcgtaaactagctgtaagtgaggccaagaaggttccaaataaggttcttcttcctcaggatctgcaggctcttgacccgtattctcgtgtgatgctggtgggagagaccggaaaatattaacagaaatcatcttaatcatttcttcctgacacgactctgagatcttactagatccagactgtataaaatccaccagctccaacaacgtttgcctcttaatctccttgtctctagcattcttaatcgtgtcagtgaaatcgaaaaggaaacagcaattctgaagtttcctcaagaacaaagtttgcctctctgaaaccggcacatctctaaacaacgggagtggctccaccgagcccaaaggcggaggaggtggagttgcagtcactggcgacggagaagaattaaccaatgcaccacgagaagcgtgactaacgaccacattggagccaggacctgacctattatcaggtagaccaatcccataactagacggttcattagcttcggatttagagggctttcgatgcccacctttcatgatcttcttaaacatggcttacgcaacgaagagcaaaggaccccaaactaaaccctaagtttccgagctgaggagatttacactagcaggggagctcaaaattgaatcagcatgtaacggagaaggaatcaaaaagcctgagtattcagattcaaatcctaagaattcacagataagctttcactatgcctctctcggatcaagctcctcattttcgtaatctggcggataaggatttggaggaaaaaaaagcgagaaatgataccggaatgttatcggagatctgagctggtgaaaatcagaagaacgttgaagtaatcgaagagatcttctcggagtacacggtggttgatcggacggctaagattttccg

SEQ ID NO: 142187 - DNA, 588 bp, Arabidopsis thaliana landsberg
agaacaagaactaaactactactagtcttcaccaaggtaaagctactttggaacccgagaaccaagttaatttgttctcatcgaattttttttgttctcatatgttgaaattttgttattgtcatcttcactttttgattgatcgatagaaaaataagtattcaattgatcaattctttttatatatatacatgttttataaaccatggatctccatctaaagttttgttttactgtgtttcttattctgattcttgtagaataatatatcaacacacatagtatactcttcttggaaggcaaggaacatgaatcaagaagctgcgagtaaccttggacttgatctgaaactaaatatttcaccgtcgttggattcatctttgctcactgagagttcatcgtcatcgttatgctcggaggaagctgagggtggtggaggagaggctaaatcaatggtggtcgttggctgccctaattgcatcatgtacatcatcacttctttagagaatgaccctagatgccctagatgcaacagccatgttttgcttgattttctcacaggaaaccatagcaagaagagcactagtt

SEQ ID NO: 142188 - DNA, 1599 bp, Arabidopsis thaliana landsberg
atggccgactcgactcggccgcttctctcagatttcaactcgtccgagtcaaatcttccgccaccaagatcccttgaggagacgatagagcgatgcattggagacttcgggtgggcacagtttctccaagccgctttagtctcattcgcttggttcttcgacgctcaacaaacattcatcaccgtcttcaccgactcacaacccatgtggcactgtgacaactcggaccgagtcgactcagtatgcaacacatcctcctccaacctctgcaccttacccaaccaaacctggtcttgggacttgaacccacacgtttcaatcatttccgagtgggggctacaatgcgccggctcgttcctcaagggatttcctgcaagctcattcttcctcggctgtctaatcggcggcttagctctctctacactcgccgactcatcgctcggtcgtaagaacatgctcttgttgtcgtgtctcataatgtctctctcttccatgttaacagctttctcaacgagcatttgggtttatgcgtttttgagattcttgaacgggtgtggccgagccacgatcgggacttgcgcgcttgttctatcaacggagttagtcggtaaaaaatggcgaggacaagttggagcgatgggtttcttttgcttcacgctagggtttttatcgcttccgatgttaggttacattaatgaagggaattcttggaggaatctgtatgtttggacatcgataccgactttaatctattgctgtttagttcggagtttcgtccgggaatctcctagatggcttatcgtaaagggtcgtaaagaagaagccgtctcaattctccaaagcattgcttctaatgcaatcactatgagcttcacaaacttatgttttgaagtagaaaatgatcaatccaagtcaaatcctgatgtttatgatgcgttaaagatcttggtgaggaaaagttggtcgtttagaagattattagcggcaatggtggttggattcggtatcggtatggtttattatggaatgccattagctttaacgaatctaaacttcaatctttacttaggggttgtgttcaacgccttgtctgagttcccagcttttctgataacgtttttcttcattgataaaatcaataggagagatgcgttgatcggatttacagctctaagtggaatctctagcgctctaatcgcggtgttaggacaaaaactagggtcattacagattgtgttagagctcctttcgtttttcagcgcatgcaccgcatttaacatgacgcttatttacacaattgaaatgtttccgacatgtgtgaggaactcggcgatttcgatggtgaggcaagcattggtgtttggcggcgtgtttagtccagtgatggttgctgctggtcgggaaaatcagttttggtcgtatgggttgtttggtttgatcataggattgtgtggattgtttgtgtttggattgccggagactagaggaagtgttttatgcgacactatggacgaggaggagtataagactttggcaaaaagacaatttattggttgatacttgatactgttgtcttttgttgtaatggttaaaaagttt

SEQ ID NO: 142189 - DNA, 1044 bp, Arabidopsis thaliana landsberg
gtttttgaatcaacagtcgcggcaaaaggtagatcgaagcagatctctcgccggaaaacgtcacattgaggtatctatcgccgccaatggtgaaggcactgcaaggcgcggctcagaatctaccggcggatgtcaaccaattgatcgatcagttagagcgtcactgtttggctcccgatggatctcttgttaccaaatctgtctactccgatctccaactcgtaatctctctttcagattttgtgtccacaatcccctgattctctttaagagcctcaaatgttattgtatcgacattgcaggcgagagaggagatgtctcgggagagacttcggtatttggaagctatggtaacacttttatctcttcttccatttttggggtttattttaatttcaggattttcttcattcacttattgaagttgaagctgattagttcaaattagggtttgattcaatctaaggactcacattattagtttttacaattgttaggctatttattgtgaagctgtagctatggttgaagaatatcagcaagctatttcagtagctaaccatgggggaattcgtgatgttcaaggtctataccctcaacttggcttgaagaattctcctcaggtttctaatctcaaaaacgtgattttttttctggaattatttgttatctcgagactcatttatgagcataattgttgattttttttaggtttatgagactctagagcataggttggtggttgctgaggcggctcagaaactgaggctacctcttatttcagatggtggtgaaattcatgaggaagagattgaaaagtggagtatactttcaagaagctctcttgatagtgcaagcacgagttttacgattagctccacttctaactccgtgaactatgcgaatagctctgcaaatagtgttgctggtgggattagtcttagtgctgttgatactgacgtagtaggtggtgttccgaatcgatttcttggaataacacctgcttacttatcctatgttcagcttcaaaatactatttccatg

SEQ ID NO: 142190 - DNA, 522 bp, Arabidopsis thaliana landsberg
atcctgattcttacttgctacctttcttcttccttcttcatcattcatcattcatcattcatcattcatcattctcatatctctcttcttttactggggatcacaatatctatctagttgtaaattgtgaatgatagatcctgagccttcttgccgccacctcttgaacttaatgtacttgaaaccagtctccacatagcgatagagagagagatctgttatgtgtgtattcatcaagttctctttttttgggctcaaagtgtaaaaggagacattttcaattctgagttcttttgttttcttataataaaatctgggttttctgagattttcttcacatcgtccgaaacgtggacacattttgatcttttgggtgtcactgtgtcaataaaggttgaaactttgattacatttctctcaaaaagataatttttatttctctatctgggtgagatttggattaattggtgaggaatcggaagaaactggcgagattacaagcgattgtgaaatatcagaatc

SEQ ID NO: 142191 - DNA, 214 bp, Arabidopsis thaliana landsberg
ataaataaaattttatatattcctaattagaaggtccatacacatttcgtgtattgactacaacaaaagaaacaaaacgtgaaagaaacatagaagattttatatgatattgtttatcgatgataaatgatacctgcaaaaacactataatttaaccatcacgacaacaaaagcatactggaaataattaaataaaataggaaacagattgggg

SEQ ID NO: 142192 - DNA, 273 bp, Arabidopsis thaliana landsberg
taggatctgctatcactggaccaatcggaaaggagtgtgctgatctgtggccaagaatcgcaagtgctgcgaacgccatcgtttaagcaagcttgagatctctatgttttgtgttgaacgtttagcattatctctatttgggattgttttttgtttttgtcttagacttttgttatgccttaaagctgattctagttcttataagaaccttcgtttctcgtgccagtttgtcacctcagtgttttagtctatcgtaaacttgtgatttgattc

SEQ ID NO: 142193 - DNA, 374 bp, Arabidopsis thaliana landsberg
aaaaaggatttgtcgtatgtctatttcagaaacgtaagtttttattttggaaatgtgagtttccatcatgtttccaaacatagatatttaggaaatgcgtttccataacgattttcgtgtttccaaaaaatttccgtttccaattggaaacgggaaacggacctcggagcgactttccatgcaacctagctactcaataacaaaaaccttcatttctctctcattacaaccaaaccccactcctctttttacaaccaaaccccactccgaattccagtgtccatccacaaccatcatatcttaattttaagtttgcatcgtacggtccacaatttaacatattattttgctttctaactatttaagagtttgta

SEQ ID NO: 142194 - DNA, 1278 bp, Arabidopsis thaliana landsberg; identical to SEQ ID NO: 51979

SEQ ID NO: 142195 - DNA, 347 bp, Arabidopsis thaliana landsberg
cgaatgcaacgaggctgaggaactcgcttggacggaaagtggttaaactgaggaccagacatgtcaccaaacaccccagtgttcaaggcacctggacaactgctgtcaaattctgagactttcctgctaaattgtttgcaggttttcatcttctagctgttaaatcgaatgttgcaagtatcaggattggtcgtttatctgtattgcaaccccaagttgtttgtaccgtctgtgacttgggacaaagatgtagtcttcaaatgttttgcagtttttgcaatgtttgaattttgtcttgtccttctggttgagtctataataagattacacaagggtttaaggttata

SEQ ID NO: 142196 - DNA, 220 bp, Arabidopsis thaliana landsberg
ccagaaaatagcaaataggcggcacatcagttctcaacactcacgatgggtatgacgaagaacagatccttataatcctaaatctaattcgtgttcgtttcttttgattcttcaattgcgtgattctgattggatttgtttttgttttggtttgattttgttgtatagcgagaattaaggttcatgagcttagagataaatcaaagaccgatcttcagaa

SEQ ID NO: 142197 - DNA, 348 bp, Arabidopsis thaliana landsberg
ggctttgcttgagagtataatcttagggctaatcacaggatggttagcttttgttattgggttggttattggatgggcatggaaaccaagatgggtttcttcttctaataatcgacaagtcaaattacaatgttctgctccaagatcttttgatttgtctttaccatcttcttctcctagttctgttgttacttctcctttgaagggttttggatcagctccttgcttaaaggctcttgtttgtgatacatggactatggctttaagacaacagagacaaacagtttctcctgattcttcttcttcttcatatgattcttctgaacaacatttggatttggtttcaag

SEQ ID NO: 142198 - DNA, 384 bp, Arabidopsis thaliana landsberg
gatcattctggtgggtctctggttagctcctccagtcgatccttatcagctcaaagaacaccctaaatcccaaatacacaaaaaagcataactgaaccttttgatgctcttttttttcttcttgtttccaagacttagagataagctaaagaaagtaacggttaacttaactatatgtgttttgtaaacatggtgatttataataaaaaaatttgtaatttggcggcaattacatgtgttaatgattttggtcattaaattctaacaattattttagtacgaaatgctttagaattagacacaaggaatttgtttttcaacggcattgggaatcttcctgtactaaaagaaagagaagaaactaaaaaatgagaattttaaatt

SEQ ID NO: 142199 - DNA, 410 bp, Arabidopsis thaliana landsberg
  unsure (1)..(410): unsure at all n locations
tganagatgaacatgcatcgtgataacattagatggttacaatatcctcaccaacttggaagtgacacaaattatacattactactagttagtactagtagatctgaatctctctctctttcttcttctctaatgccgtaaattgtaagctaactcttcccacatagtgcctcgattctcgcttttgctctctctctctttcctccgacaatgaataggaatctcagagaatctcttgccggtgggaggaatattccggcgatctctcagtttcgtagaggcaataacaacaacagcaacaacatctctcaaaatggcttctctagagattccgatgagaatctagatcttttctctaagatccgtcgctcatttcctttggcttcctccgacgaattacccgacggttc

SEQ ID NO: 142200 - DNA, 850 bp, Arabidopsis thaliana landsberg
cgtgggactgccgtttctgataacatatccggtttcatacatagcaaacgcctttgatcttggacgtgttttcattcatttctggtattgttcgcttctctcccgccaaatctaaaaaacatgttgatgggatctaaaaatgtcttttgacctctaactctagtttgagctctcaacaggtctgttaacttcaaatttgttccagaacgagtttttgtgtccaaagaatttgcagtatgcttgctcattgctcacctttttctccttgtggcgttcgcaaattataagtggtgcaagtacgtacaatcacaatattaattctcataaggcagctgcaatttgaaagcagttgcagtttgtgtgtttagcatcagttgtaattaatatgttgattttataggcatgaaggcgggattataggcttcatgcgttctaggcatttcttcttgacacttccgtcttcactctcgttcagtgatgtgtcagcctcacggattattacgaaagaacgtaagctcttactgttattttagcttatgtttccctatgtccatacttacaggcattccacttgattcgcagatgtcgtcacggccatgtttgttgggaatttcatcggcattgtatttgctcgctctctgcactaccagttctactcatggtaaccaaataacctggctaaatcttaagtttctcgaacattcttagcctcaaccccaatactcatatgatcataacaggtacttctattcgctaccttatctactatggagaacaccgtttcccacttggctgcggtaagttatttctgcatttcttactgtaacaacagttaaaatatcaaaaccta

SEQ ID NO: 142201 - DNA, 362 bp, Arabidopsis thaliana landsberg
gccgcatcctctctctctggtcggagaaatctccagatttggtcatttctccaaccttctcggaaccctaatttaaccaaacctctcctccttcagattcatcttcctcctaatctccctaaaagctcaaacctttctctcaatcaattctaaacaatggcaacagaagcaacaaccaaattcccagaatccgatctccgtccaatcccacaaccaccggattttcatccagcaatcatcgttccagctcaaaacacaactcttaaattctggcaactaatggtcgccggttcaatcgctggctcagtcgaacacatggctatgtttccagtagatacagtcaaaacccatatgcaagctct

SEQ ID NO: 142202 - DNA, 649 bp, Arabidopsis thaliana landsberg
atttgaacaaatctataataacataacatattacagtgtgttattaacacattttcgtgtagacaagtaacagatatgtctatctatacagacttatttttgagacttgtacacacaacatttgaagatccctcatgtatgttaggttgtagtaatcgtcactctatatacatcttccgcatcctatacatcctcttcctttctaaacatctctctactacttccccatatggttcacatcacccagtaccttgctcagtttctgcgatttcattcatagtcttgaacggaaaaagcgtttcttaaaaccaagatttgagttcttacgggaggaggacgtggcatatggttgaccgttgagacaacccgcaaatctgatatcccatccttcgatgttctttggaacacatgagtcgaataggaattgcccgagtacgctgtgagcgtttatgctcgttggttggagtgggcgaaaggacgatctttctctctgttcttcttgtgaagatgatggatcgctgttgttgctgttgctttgatacggtgctgagctaggtaagaaaaagtggtcacatggcccagtggctactcttcttaggctttggttagagttcacagcaactttctgaaggtcgcatattaactcaga

SEQ ID NO: 142203 - DNA, 209 bp, Arabidopsis thaliana landsberg
aggatcggtatcatcaacgatgtcgggagcacaaggagcagagccgatggattcaagaacggcgacaacgtacgagtcagtggaaggaggacagaacaagacgaagcttgatataaggtcaaaggaagacgaacgtgggattcaagttgacaagcttcaagacaaggtctctgatgctgctggtcttggcggacctgtctttggtgctg

SEQ ID NO: 142204 - DNA, 267 bp, Arabidopsis thaliana landsberg
caatgacatgagaccaaaacatgggttcgaattttcgagtcagttgaggcacagttttttaaacgcctcacactcagtctcactctcacatgactcgattttttgtttgtgtttgtacagctatttccactgtattgatttctttctgatacgattgatgtgtgtatatatatgggaaagaggttggtaaaaagtaagaagacaattgttccgtggtgaaccaaaaaaaaagctcaacaaatcttcagctttgttttcaccgaacca

SEQ ID NO: 142205 - DNA, 1077 bp, Arabidopsis thaliana landsberg
aaaatttccagagaagtcgttcatcatttgcaatttctcgattagttctgaatcatggcgttgagcaccagcatcagatctgtatctaagatcattgcttcttccgaagcatcagtctccagatctggtcagtaccaatagaagtatctgctgaattggttttgcatttctttgtttttccccttttttgttgtctagggttttgtttgatttcccaggaatcgattattctaaggttttgtttgattgcctagatatcaatgtttctgattagccgcggattgattccgatgcgattcttcgttgattgaattctgggatttgaaacttctctgctcgcgaatttgtcatagaaacacgctttaatggcgtgatgcgaaacagattgtttatgattaggctgaaaaattgtatcatgaaattagaaatgcatattttgatgtttccttgtttcatggaaattttccatgttcgtgttttgatagttttggttgatcagtgaaaggctccatgttcatgctatgatcagcttgttttgatgtatctcttgaaactaaatgggctataagatgatttatgagtgtttgattggtaatatttcaaaacttgctgaagatttctttgatatcatcaacaacagtgactagaagcttccactcgactggagttaagaggatgagcggaggaggacatggtggttacgatgaatactacctccacgcaaaacacatgtacaatttggaccgcatgaagtaccaagctctcaagatgtctctcggtgtattcaccgctttcagcatcggtgttggggttcctatcttcgcagtcgttttccagcagaggaagactcaatctggttaagtccctcaggatgctcttgttcacagcttgaataatttgtatgaattctcaaactctgcttttgcaagagagtttttctttctccctttggatcttagccacaagtcttatcgttatggttaagtcttctgtgtcttcctcttttgctggctgtttgatgctgtaataatgataatctgacagatatatttttttttactttgattggaagtgaaa

SEQ ID NO: 142206 - DNA, 215 bp, Arabidopsis thaliana landsberg
accgaacacttctttttcttctgcaataaaccaaaaaaagttaaaaattcaaaaacttaattactaagcaaaagtgtgcacgaagaacaaagcgacgcatccgattttatttgtttgataagttcgtgtcgtcttcgtctctctaacccaattctgtggtgtctgaagaaagcagaatcaaatccatgtctttcagaggacttagcagggtaaaa

SEQ ID NO: 142207 - DNA, 385 bp, Arabidopsis thaliana landsberg
aaggtaattctgaatgtctggaagaaaccggattcacagagatatccgaggcagctatcatgatcatcgtgatttacctccggagagaccttttctccgaggccctccattgttacaacctccaccaccatctttgttagaagatcttcagatacaggagggtgaaatcagaaggcaggatgctgaaatcagaaggcttttgagtgataatcatggactagctgacgaccgaatggttctggagagagaactcgttgctgctaaagaagagcttcaccgaatgaatctgatgatttctgatcttcgtgctgagcaagatctgcaattgagggagtttagtgagaaaaggcataaacttgagggggatgttcgcgctatggagtcg

SEQ ID NO: 142208 - DNA, 170 bp, Arabidopsis thaliana landsberg
ctataaatagagcaatcggtcgtagaaaaccaagacatcaaaaacacgaatatcgatagtacacttctacgtgcaattttctcctttctcttcctggacatctgtctgtttattacattttcttgtaatctctttttgggggtttacaatatctatcccctaaagtttcg

SEQ ID NO: 142209 - DNA, 1092 bp, Arabidopsis thaliana landsberg; identical to SEQ ID NO: 74258

SEQ ID NO: 142210 - DNA, 776 bp, Arabidopsis thaliana landsberg; identical to SEQ ID NO: 41803

SEQ ID NO: 142211 - DNA, 601 bp, Arabidopsis thaliana landsberg
tttcaggtcacctgttgcacaatctctgctcagccctaaaagcttactcctttcaactttctggaggccttctcgtagcctagggtcatagatggatttgatggagaagaacttggagttagtggagattcagaaactcgaaggccacaccgatcgtgtttggagcgtagcttggaaccccgtttcttctcacgccgacggtgtttcaccgattcttgcttcttgcagtggcgataacactgttcgaatctgggaacaaagctctctctctcgctcctggacttgcaagggctctatctcatttctctttctcgcaagaaagttctagccttttttggacctagcaagttcaattcacacaaatctattgattctctagatcagtcttacattacaatttgtgggttttgtttcgattcactaaagagattaacttgaccttaaacatggaatcgactggtgatttggatatggtgtaggactgatgtgttagttcttgtgctatttctctagaaagatttattgattgtatattgtgaatcttcagacagttttggaagagacgcatacaaaaactgtgaggtcgtgcgcttggtcaccc

SEQ ID NO: 142212 - DNA, 532 bp, Arabidopsis thaliana landsberg
gtgcccttaggcaggacattgaaactcccgagtggcgtgaggtatcaaggtactaatctttcgctagaattctgtctgttgttccttctgatgataacattcaaaaacttgtaatattgttcgttttatttgctaatcatggaagtcttgttttagagataattgaaggtgaaggacgagaagctcatgaaggggacctggtcgaactaaactatgtgtgtcggcgtgcaaatggatatttcgttcataggttagatttcatgcaaaactttagatgccttgatagtttctttcatccaaatctgatcctctttttaactctcatagtttcttgattcagcacggtggatcaattcagtggtgaaagctctcctgtcaaacttattctcgatgaaaacgacgtactttgatttgcactcaaccttgcatataacatagcgttccaatcatggcctgtactaacaaactgcttcgcatgacaggtaattgagggcttgaaagaagtcttggtgggcatgaaagctggaggtaa

SEQ ID NO: 142213 - DNA, 164 bp, Arabidopsis thaliana landsberg
aaaaagccacattaagttcttactctgctgcattaactgatggctagattcatggcttacaatcaaaatccacaaatgttggctctatgcataacagtagcagtaatgttccttggtgtgagatcagaattgagtcaggatataaagggatgtcaggatgcgat

SEQ ID NO: 142214 - DNA, 1882 bp, Arabidopsis thaliana landsberg
gaaatcgaacgaagagtgtgtgcacttgaggatcgaattaaggtgagaacaaagaagagagaagaatcgaaatagcaaatctcttgatggtaaattttacaaattttgttctttgtagatattgttctatttcgtaggtttatccaagtttatacataccccaggtttcagctggaattggtttattgattagtacttattggattgttcgcgatcctgaaaaggttcgaattttatgggggtttcgagagaatctgtgggaaaaatatgagctttatgttttgttggtgacactgttgaatatccatcgattcagcttctcaattcaatgtgcattggatttgatttagtttcagtgggtactgaaagataatttagttgggtcaatgtaaacttattccgttttcaaatctttaccaattttgcaggtcttgatgatcattaaaggtatatttcggagatatgaaaaatggaatcctgtgcatcctacttatggagcattttggggaatggggattgggattggttgtggcgtcggatggggacctggttttggccctgaggtcattggttatgtcggtgctggctgcggtgttggttttagtgttggtataacacttgctggtctcggcattggtcttcccacaaattttcttcttgcagctccttataacagtatgtacctcagactctctctctttctctcacacattttttcataaatatgtattctccataccaagtaaactcttagttttgaactttcttgattcgggtctttggcaacttgaatgcacaggtcatgtagtaatcttttgtctgctgattttattttcagctgtggaagcaactagaaagggtgcttttaatttctttggtaaaaacctctcaaccaatggttggagtgatttgatgcctcaaatcgcggggttgcagagacaagtcagtgagatatgctctggttttaacaagaagcctcatttaaataatgccattgacctaaaaagttttcctttgttcatttcacatgattgtggcaaatttggaagtcatcttctccatgtgcgcaaaggtacaaattcaattagtcttaacattttgctatatcactgtgcaaagttcttctctatccgttttctttgtcaatgataaggtacgttagtcttagtatttcaaatagaaactaggctgagcatttacctgcctttatcagacatataactagctggcactccaacactcatttcagtctcatggtaatgtttctctagatagaaaaggtttctgttattcaatggcaacccctatattctttagaacaaagtggatagagaacagttagatttatcatttttctttgcaggttcggaggacaataaatcatcagctatgtaatgctacccaccacgaggatcttaagcatctgagacgcatttcgagatagttactttgatggaatttgtgaatgtgactgaaatattcagcacaaatcagaacatggttcctgtcttgtttggagaagcactatgaaccaaacctgaagcccttgtgatttagagttacagagatacattaaaagggttcgggatttcacagtagcattcatagacagttcaggttagttaaacgtgcttcacaaaaagaaaaaaaacagaagtgtagttgaggtcacaccacaggtttatgctttgctcttaatcaaatatttatctttctcttttttgttatttgtcctttttaattccatttgctttattccttacttgtggggattaaatgtttgcagagaaagataattcgactgaataaatacacttttacctgtatacttgttatatatttgtgtcaccccaaagtgaaagctgcagactttgaaacacag

SEQ ID NO: 142215 - DNA, 119 bp, Arabidopsis thaliana landsberg
ctaatttgaccaatctaatctagggtttctagtcacttgaagcttctcttaaaaaacctgtctcactcctcgtcaacctcttcctctcccgctgtcgccaagattgaatcttttttcag

SEQ ID NO: 142216 - DNA, 370 bp, Arabidopsis thaliana landsberg
agaaaatgtttatttaacattttagaattaccaagtgcatggttatatatattaaacaaattattgatctaagaatattgatatttgagagagttttgaggataataattcatatgatttttctctattaattgacgaatctatggttataaacaagtacaatattaatactcaagatgagtataacaacaccggattttaattatatatgctttaattatatttaggattgaaaatatgactatgttagaagaaccatgctgcttatcgtacgtggcttggtgtatagaggtttccagttcaagaaccttattcaaaccaaggcctttggagtgttcttcaacatcatggtatcttccaacttcaatct

SEQ ID NO: 142217 - DNA, 362 bp, Arabidopsis thaliana landsberg
tacacaattctgagaggttccttcatctgcaaatgctactactgattcggtgatggaatcgatcggcgacgacgatgagctccgaagcaaaacagtttctcttccgagaagaatctcgtttacgattcttcttcttcttctgttaatctccttgagtacaagggtctctggttcgttagacaaatctggaagaagagtgattgaagcgagaactgggcaagacttgatttgggttgttcagctatccgatctccatttcagtgtccatcatcctgaaagagccattgatttcaaaaacattgtgggtcctgctctggctcttatcaacccttctctcgtcttaatcaccggtgatctcacag

SEQ ID NO: 142218 - DNA, 144 bp, Arabidopsis thaliana landsberg
aaagaagaagaggcgtttctctctctctttttgcttcagaaaaaatggggtttttcttgtgttcctcttcttcaatcttcttcaagttcggaatctctataatctttctagtttctttctctggtttaactccttcaggtaagc

SEQ ID NO: 142219 - DNA, 618 bp, Arabidopsis thaliana landsberg
tcaccgttattgaagctgggatatggcttgttatgatgatagagatgatggtcttggttaagtttaacgttgacggaattagcaggtctctgcatgggaacaccgtgatgatggtgaagtagaggatgataatgatcgttagccgccatcataaccgagttgggtgatgaagatggtgtggtcatgtttgttccgttgaatctcttcttctgacgctcacgagccttatggttctggaaccagtaaaagacgttcttgccctcaatctttccgaactgtctcagccttgcagtgatcttctggatctgatcggctgttggtgaccggattgcattgttgtagtaaagttctttgaggattttgatttgctccgtcgtcggtgtccacctcgtgctggtctggcgacacgtgtaaccaccagagccggacttgttgttgttgttgccgctttcttggtcggcttgatgatgatgatgctgatgctgtggcggctccatgtgtgtttgattcgacttttgttcacaaagttaacggtaaataagatcaagacttagagaggaacaagagaaagagaagtttgaagttagcaagaaaacaacttgctggtagtaaagagat

SEQ ID NO: 142220 - DNA, 428 bp, Arabidopsis thaliana landsberg
atatgataacacacaaaaagactcatatatataaataattagagtcattaaatgtggattcatcattaaatgaaacaactcttcttctctgtacaatttctcttcacaccttcaccaaattctttgacttcaaaaatcttataaaatttatatatctccaaaaccataaaaccaaaacgagttttcacaaataaattacttagttgaaatttcaaatctcattcaattagggtacactctctcaacaatccacattaatgagggttgctgcttctgatggctagcagtaacagttttatcgcctccacttcttaatgccatctttttcctcttccctctccttctctatatatattttctgactctgcaaaaccttaattcatccatctctcaaacaccatttttggaaacaccatttcacattcctt

SEQ ID NO: 142221 - DNA, 211 bp, Arabidopsis thaliana landsberg
tccctttcttcatttccttcctctgcttcttctccggtggatgtcctctttcatcaatggcggcgaggataaacacttcgcttcataacgccctctcttttttaaagccttttaacactcccctcaataccaaaccattctcttttagaagaaacagcttcagattttccaaaaagcttccttattattctcagttttcctcagggaagag

SEQ ID NO: 142222 - DNA, 288 bp, Arabidopsis thaliana landsberg
ggctttagtgagtggaggcaaagatagctgttatgctatgatgaagtgtatccaatacggtcacgaggtacgtctcttacctcggattctgtctaattttcgaagttttgttagttgttcagagtttccctgaaattgcctctcaaaagttcaattttttaagctatacgaacttaaatctcacttggggtttctcgatttgtgtttgcacagatcgtggcattggctaatttgttgccggttgatgattccgtcgatgaattggacagctatatgtatcaaactgta

SEQ ID NO: 142223 - DNA, 229 bp, Arabidopsis thaliana landsberg
ctctgcatgaaagaataaaaaaaaaacatcacaatctctttccatttctgagagctaaaaaacctctctctctttctctttgattcaagtttccaaaaatggaaggtttgtgtttaaactctttcactcgtgttttacttttattgttcgttttcttggttttttctcataaatggcaacgagtcaacgcggtcgaacaggttttggagctggtaaaaggctttgaagc

SEQ ID NO: 142224 - DNA, 208 bp, Arabidopsis thaliana landsberg
tgggaggtctaaaacaatggattacgcagctgatttcatcattcatttgcgttcatagcttcttaaaaagttttgatcttctccagatttcagatagttgtttgatagatgtttttcttcgagtgtttgcttccttgttgtgacttgtgttctctagctccagtgttgtgtgatgaaatcaatcacgcatatgtatagagagaaacag

SEQ ID NO: 142225 - DNA, 1306 bp, Arabidopsis thaliana landsberg
  unsure (1)..(1306): unsure at all n locations
cactcgtgaaagaaagaccagagagttttctcctgatccacacaacaacaacaacacagagatcccaaatccggaagatatcttcttctctcataactcagtttactcagattcactgaaacatacaattaagtgtacgtacttcttctctttatctttctctcttaaatttgatgataagaagaatctaataatatgatgacatctttcttcnnnnnnnnnnnnnnnnnnnnnnnnnnncgtcagtctctcacctgcagcaaaattcactcttctgctaataatgttctccacagagattcatctattgatcattttgactttttcaggtaaagtaaatttttatttctcttttcggtctagtaaagttttactcaaacatagaaagttacgattttttttttgttttgttttccatggaaaaattctcggcatgcaaaaactttttttttttttcctaaaaaagtatttaccttttcctttttttctccaactctttttcttaaagtgttaattttttttcttcttgtaagcacgcgagcgagaagaaaacaaaaaaatgaatagagtagtaactttttatactatttctcttttaaaatttttggtatttactggtgtttcgcaggaaccagagatgaaaaattatagttaaggttagtagtagtagataggtttaataaatttgtagttaagtaacccaaaaaaataacattaaactaaaatccaacactagaaaccagagagaccctcttaacgacaacaacctctctgtacacaagacaacaaacactctctacaaaaacactactctttccttcttcttctctctactctattctaattctaaagagagagagaaaagctatggatggatatgaagctactaggattgtgctctctagaatccaaagcttagaccctgaaaacgcatcaaagatcatgggtcttctccttcttcaagatcacggtgagaaagagatgataaggctagcttttggtccagagactcttgttcactctgttatagtgaaagccaagaaagagttaggtctcatgaactgttcaaggtctccgtggagtcatcaagatgagttgattagccctaagaacaaccgtggctcttcactcaatccagcttctttgcccttttacgctaatggaggaagatcttctagggatttaaccaacgatttcgagctcatggatgatatgaactccagaagtactgattttttgggctctgtgcatgcgagaagcgatagctgcgttttggacggtttagggtatggtggtgaatatgatt

SEQ ID NO: 142226 - DNA, 690 bp, Arabidopsis thaliana landsberg
cgttcatgtcttttccccggccaccgaaacgatgccatctgtttagtgcgcctttataattcaacgaccctttgtacttttccgattcctctttctctataacttcatctctcccattctcttcactcttctcaaaaattcgatctttagggtttttcttttatcctcttatcgctaatctggagctctatagagactataaaggtatgtttttttttcctcaattacaggctcggatgctcaaattttgtaaaaaatgactattttctattgctgaattgctcgaattgttgtgaatttagggtttttgattgattcgggagctcgagatttgacttcttttagctgattcggcaagtttgtatctagaaaggatcgattggtgaggtcaatagtggttggtgggttttagtaatggaagacggtgagcttgatttctccaatcaggaagtgttttcgagttcggagatgggtgaattaccacctagcaattgttcgatggatagtttctttgatgggcttttgatggatactaatgctgcttgtacccacactcacacctgtaaccccactggaccagagaacactcatactcacacgtgcttccatgtccacaccaagattctcccggatgagagcgatgaaaaagtttctactgatgatacagctgagtcttgtgggaagaagggt

SEQ ID NO: 142227 - DNA, 240 bp, Arabidopsis thaliana landsberg
ctgacccttcagctccatcaccaaacctttcacaacctttcctccataaagcaaccaattcagaaccatcaataactcagaaactgcagaatggttctagcacaatggatcaaagtgaatctacttctgggactagtaatagaaaacgggttagagaagattagacatctcatgagtatgacccaaagatgttgcaaacatatgtaattgtgtatataaaattgaaaatatcacagcagc

SEQ ID NO: 142228 - DNA, 417 bp, Arabidopsis thaliana landsberg
  unsure (1)..(417): unsure at all n locations
tccagttcgtccntaagtctcaggaaggttgcgtctgcaaagtcactatgttttgggagaagcgctacgaagactctccagagcccatcaagtacatgaagttcgtcacgagcttggctgctgacatggatgaccacattctcaagaaccagagcaaggcttaatcatcatagtgaccatacttatgaagataaaaataaataaagaaacatcctaatatatatgtgtgtgtgtcgtttgtgtttgtcttgtacatgatgaaaccgcctccttgtcttgtgtacattttatgctgataataatggcggtacgtcttgtaaacttatgcatgtatcatctctgtctttgatgatttgatgttgttatggtgtagtattggtgttcgtaatatataaagagcacaatattaggatgtat

SEQ ID NO: 142229 - DNA, 392 bp, Arabidopsis thaliana landsberg
atgaaattcaataattgagaagaggttcatgtaatgagccgagagaagaatataaaagcagtcaaataattttttcaaaaaactatttgtatattaaaaaggtacaaagtaaaaaataaatttaagaaggtgccatcattggctcctaaagaacaaactacaaagaatcaatttctcatgatttgatctctcacaatccgtctcctttatgtggatgcggaaaaacactctccacacgtttcatgtaaattttttaattaaatttctaaaaacaatagagctactattcgatttgttcttgaattattcatgaatacatatagtggcaaccttagacactagccacgtcaaccgtacatgttatatcatatatttttatattggtctatcta

SEQ ID NO: 142230 - DNA, 500 bp, Arabidopsis thaliana landsberg
aacgtcttatggtttagctctcaaatttctccttcgattccatcttcctccggcttcaagtcgccggatcttcttgatttccgattcacttggctttcctcttctcttccttttaacacacgacgacgcttcatagttttttgtcgtgattcaggtaaacaaatatcgaaaactagtttcctaaatttgttgattcagatcgatcttttaaccctcattatcgttttcaatagcttctatggattcgattttctgagtattgttgcttgattttgtaggaagaggtatgtaattcaggattttccggtgattttggtgggaacgtttggagaaatttcgagcttagtagtattcgtaggaaagttttcttcttttatgatttgtagtttttgtggattaatggttgaaggtgagaaatggggcttcgatggatttgaaaagattttgtatcttcgtggaaatgagatcgttggagattgcagcaagtcatctcattcgta

SEQ ID NO: 142231 - DNA, 1960 bp, Arabidopsis thaliana landsberg
taaatctcggatccactttcacgatattttgatattttttctatttataatctttctgggttttgcgtcttttgaaggctgaattgctctgaaatctcaattgtataatcatctcctgggtcgtcgttatcgtgatcatctaggtaagtggaatcccaatttctgaaatttttgaatgttttcaagtttcacatgccttagatttgacgttctttttcatttttgtaaacttgctaattgcattgttgtgttttaaatctttgtggttggtgatgaagttaatgttctggcttgaaattggatcaaagccaacatttttctcatgtttctcattaatcaaacgtgactttattagagaaggatgaattttgctatagctcttgatgttttgtgtgtttaatttagatgggaacaactctgtttctagattcatagtttagtttgagctcgtgtaaaggtgtgttgatgaatcttgggttgcgttgttgttgtttttctgacagaagaaagcatgactacactagatttgaccagagccgagcttgctcttattgttctctatttgaacaaagctgaggctagagataagatatgcagagctatccaatatggttccaaattcttgagcggtggccaacctggtactgctcaaactgtcgacaaaaacaccagcttggcgagaaaagttttccgtcttttcaaggtcatgccctcattgttgctatttctatctttgtttcttagaattggaaccggcttcattggtgcttctttcttattatttggattgaaaatgttttgatttctgattgcaaatggtttcgaatgtgcagtttgtcaatgattttcacggtcttatcagccccgtgcctaaagggactccacttcctcttgtcttactcgggaaggtgctaaagagatgttgaattttcacatcatttcttcatatcttgatttgattcaatctctttaacttctgtttttgtttgttggttgaccgtttcagtcgaagaatgcgctcttgtctacctttttgtttcttgatcaaatcgtctggcttggtagatccggcatatacaaggtgagataagtttaaggcaataatccataatggtcttttgaagttttgatgtttcatttgctctgttaagtgactaaagattcttgttcaatcgcatcgcagaacaaagaacgaactgaattgcttggacgtatatcacttttctgctggctgggatcatccgtttgtacaagtgcagtcgaggtttttcttaatctctactcaacattataatttgctcacgtttaaacataaatcccgatcttgatcttcctatgtgtatcagatcggagagcttggaaggctttcttcatctatgaagaagatggaaaaggaactcaaagctgatgtaaaaactctcatgtgtaactcctctcatcttttttcttctatctttatcaaaactcattccctttgttaaaaacgcaggatgagctgtatcgagctaggcttcagaaatcaaacgacagaactctagctttgattaatcaagcatggacattattgtagccattggtctccttcagttagctccaaagacgattagtcctcgtgtcactggtgctttcgggtttaccacctcacttatctcttgttatcaggtaaaactctctcttcctttccacaaacccacttgcaatttcacatccttgtctgatatcgaaaataattcaccattttttcttctgtaaccacccagttgcttccatcgcgccccaagttgaagacaccttgaagaaggaataagcttgttctctagactttcagaataatagtttcatattcatcagtaaacctattgtgttcaggtattctaaggagtctatgttcctcctttgaatgaatttgctgctcttataacgcgtttgcaagaataatgataagttttagaataagatt

SEQ ID NO: 142232 - DNA, 419 bp, Arabidopsis thaliana landsberg
cgaaaaatgaggatgtttggcttgaagcttgtaggttagctaatccagaagatgccaagggggttattgcgaagggagttaagctgatacccaattcagtgaagctatggttggaggctgcaaagctggagcatgatgtggagaacaagagtagggtgttgagaaagggactggaacatattccagactctgtaagactatggaaggctgttgttgagttggctaatgaggaggatgcaaggattttgcttcacagggctgtggagtgctgccctttgcatctggagctatgggtggcacttgcgaggctcgaaacatatgctgaatcaaagaaggtgttgaacaaagcgagagagaagctcccaaaggagcctgcaatttggatcaccgctgctaagttagaagaagctaatgggaag

SEQ ID NO: 142233 - DNA, 606 bp, Arabidopsis thaliana landsberg
atcaagatctgacattgttatgtgcttgaattcttcatcaagctcgtcagaaaaacaccaaaaggtttcaaatttatctgaaattcgtgaaaccctaaaaagggttatgtcaaggtagaagagacagaacaaagatagatatggtaaggaagcagaagtacgggaaggtagtgttggtttcttgcatcgcgcttctagcaaccggactcattgctgactttctctgggctacttctcatcgattctcctccgccgcaatctccgccggattatctctaccttcttcacttaccaccgtaatcgttcctggccaggtgaattgtgatctgttattgatataattagatctcaacatctgaatttagcttcaaaagatgatttttacttcaatgttatacctagtttcaattgcttgagtgttaagttgctatattttactggttttaggagaaagatacaaagaagaagaaggatagtgcgaaggaaaggaaattgtctaatacgtttcaagatttgcctgctcctgaattgaaatgggagaagatggcagcttcacctgtacctcgtctagacggagctgcaattcagattagggatcttctttat

SEQ ID NO: 142234 - DNA, 727 bp, Arabidopsis thaliana landsberg
agttttaaacgctctcacacttcttggatgcttgatccgaagaaaatcgtcctcttctttgcaactttgtaagtaattatcacacttcctttaatctcatcatatcataatatatctatttaattaacccccaaagatatagaactcaaaatgcatatatagaattagttacttgaaaatacatcgttgttagtattaattatataatttaaatttttggattgcatatatagatcaatttatttatttactttagtcattttacatcattattagatattatcatattaaatttaaaagtctgaattagtcaatgtattaaattatcataagtcgtgtacgacattgctactgaatatcggaattgcctatcagaatttaatacgtaaagttgtttttgacgaatatattgacgtagggttaatttgttccccgacaggtcaagcatgggatcaatcttgttaatcatattcacactctcgatcagcaagtccaatcccggagatatgcctctagactaatagtaaacacacgaagagcattatatataacgcatatatatcatcgaccgacctaagtttgtggccatagaacatgccacagtctcaccgacctacattttaaggagatgtatcagacagaagaacattacaaaaaatgaagagggtaaggttgtgataatagttttatttcgtatgatttttttttaaatgaaaaaaaagaagaa

SEQ ID NO: 142235 - DNA, 309 bp, Arabidopsis thaliana landsberg
tttaccaacttgcgttcgaagcaagaaactgctcctccatcatcttcctctattgatcttcttcatattctcaagtttactccaaaaagtgcgaggtagagaagaggaaactacaaaccaagaacattaaatggattgctcaatctgcaccacaatgccatctatattaagaccaccaagaaacacaatatgtggatcatgctacgaaggggctagaacaacaattgcgctgctcaagaaacttgagggctcgaaagaagatcgtcatgacaaatcgaaccataattccaccatcaataatggctcctc

SEQ ID NO: 142236 - DNA, 419 bp, Arabidopsis thaliana landsberg
tttttgtttacttttgaatatcttggatggtacattgcgtcttctatggggacaaacatacattgatacattgaatgaagtattactaaatgttttacaatgtgttttcgagttaaaaggcacaagaaggagaagcccgtcgaaaatccatgataagaagactggcaacactatgagcaagagctcctaagactacaaacacatggaatatctgatggctatgtcctgcaatatcaaaagccccaggcttccatctttcaggtatgcgggtaacataaaacgctgctcctgttgcatacaacacagccatcgcaagttcatatacgagagctataagcacgtttgggtgatccttatgaaggtaaagcacatgtgtggctggtattacgccagaaaatcccattgttaggaacagagct

SEQ ID NO: 142237 - DNA, 373 bp, Arabidopsis thaliana landsberg
  unsure (1)..(373): unsure at all n locations
gctccaggtggacataatgtgatctggggtcttttcgaggctctcaaggtgcacaacgcaaaaagcactntgctaggatttttgggtaagttctattattttttatacaactgcatcatttgccagtttagagattttttgttagacttaagtaaaatttgttgttgactgataataggtggttccgagggtctatttgcacaaaagactctagagattacagatgatatacttcagacttacaaaaaccaaggtacttgtttgatcaaggcattgtcgttaaatgcagaatctcccgttcattgcttcaagttctgatatattggtgttgaaatgtatgttgtaaggtggttatgatttgctcggaagaact

SEQ ID NO: 142238 - DNA, 415 bp, Arabidopsis thaliana landsberg
tctctttggcacccatgagccagagaacctcagcttgcgggacatatgttacagccttacgcaacaaggcatcaagggactcccgactcccatggctcttctcaagctgcgccgctttaagccagatacttttcttggtcaagaatacactaagagcatgggcgtatattgctcttgcggtctcaatggaacccctcttcttgcactcatctgcatcagcaacccaagttctctttctatcctcttcttccactccaatacctattgtgttcttaataatggcctggcatgtagcgacagatccaactctctcacatgcctcagcctcactcatccaattttctcggtcaataacaaccccttctctctggagagtctttatacccctatcaataatctttcccaccatagccgt

SEQ ID NO: 142239 - DNA, 816 bp, Arabidopsis thaliana landsberg
ggtagcaattggagcagggatgcagagtatggtagcattagtgaacttagcatcttattatgcaattggtgttcctttaggtgtcctccttgtttacgttttcaattttgggattaaggtacatcatatatatgaaaactggtatccagtacttcattatgatcaatcattagaacttttagaattttaacttgaataaatgatattgtatgcagggactctggtccggaatgttggctggagttggtatccaaacgttgatattgtgttatgttatttacaaaactgactgggaattggaggtaatttacttttaatatataactcaaaatttttattagaaaattcgtcatattaaatgtataattttatctaattacaggttaagaagacaaacgagcgtatgaaaacgtggactctaaatttacctgctgtacaatcgactactatctccacaagagatgaagagagaaagtgaacatacaactaagttaatttaaagaaatcttttaagaaattctttataaaaaaagaaagaataatttatgttgtattgtggttgtgttttgcattccctaagaatgaagtatcggtgttgagattgcattattaggttaatgcaactctcataactttgaaaaaggttaagaaggatgaactttttcttttatcagagaaaaaggttgttctcttgttcttcggatatactctttctaaacaaaaaaaaaattgtgggaggtttgaaattttaacttctttcttgattttttaatggatgtaaattttgtgtgtggggaaaaaaattccatatgtatg

SEQ ID NO: 142240 - DNA, 141 bp, Arabidopsis thaliana landsberg
ttgctacatttataactctacttgtaaaaattctgtcatcactaaggtcaacaaagaaacgaatacagaatcgaaaaagaaaaagaaaagaagaaacagagtaaacaaaagtcaaactatgctttgcttactcgttgaaca

SEQ ID NO: 142241 - DNA, 230 bp, Arabidopsis thaliana landsberg
aatgattcatttgttagatacatatagtgaaatattcctagggtttagctatagaagatgaaaaagaaaatgagtgtgattaattcttgagtgttgagaataagcaataggagtaattttcttcagcacttgtcttgtgtgctgtttaaattgctctgtttctcttctattctgatgtaaaatgcaaattgttacctttatcctatcaaataaagtataattcttttctc

SEQ ID NO: 142242 - DNA, 232 bp, Arabidopsis thaliana landsberg
ggccacaggcggggtttcagtttgctgttacaggagatcaatattgtgaaggacagtttcggcttggtttggtttggtttggttcagttctctaccagaagattgtttcatcaactttgtgtgagtttagtcgataaatctgtaatccatatctttggaatacacatttctctttgtaactatcgtttatgttttgatagaatacttgcaaattcaaggttttatttttaga

SEQ ID NO: 142243 - DNA, 496 bp, Arabidopsis thaliana landsberg
cgatcattatttacactaaggcaaagggacattttggaggatgtgtttgaatccatacatatagacactacacaaagtctgcaaccattctcatggagcagctcgtgttcctacttgtataacccataaggaattaaaatcctgttatagcaacgttttgaacattcaagaatcagccaactccggctgccttagaaccgatttctcaggggggcatgcgcgcaagagtgtgcagacgtcgtttttcactaggaattcctctgcatttacgagtatcagaggtccatattcaaacaccaacgtcttgcactgtaataacacaagacacaacaccataatatcagaaaagcgtacgctaactgctatgtgatcatgcagatgcgttgcaaaagttcgagaagaacaccaacagagaaagcagaatgaaatggataataaaaaaacacgtgaaggcaatgttatggatttgagttgatcattttgaccttggtctcgt

SEQ ID NO: 142244 - DNA, 440 bp, Arabidopsis thaliana landsberg
taagggagctgaaactgctttgacggcggtaagtatcattatgattcaatcctttattgttagaataagatgtagaaattcctgatcattccattgagcaactggtcatgttataaccattcgggttcttatgtctttttggtaaagtctttgaatatttcttcctcttgtttttcagctcaaaatggcgtcgttgtttgagcaccacctgaaatagctcggctcgttcgatggatgaacatgatcacgtatgagaacctcttgatgttgtcccatttggttacaatccagtctctgaaattgtttgtacctcaaagattgtcaaaatgttttacccttggttacaaaatcatttaaacgcttttgtaagcttctggccttgttttttttttttgaatcgtatgataataataattcctccgaattttgggggtctttct

SEQ ID NO: 142245 - DNA, 194 bp, Arabidopsis thaliana landsberg
taaattacgacgttgaagctccctcagtctaaaggattcggaggttgacgctgaactaaataatgggagaagagctgcaatatcagcagaatggttcatctgtgacatctaattatggttatggaagttcgcttgcttacgatcaatctcaagacattgaatctgccgcaaacactgctcttctccgagaacaa

SEQ ID NO: 142246 - DNA, 789 bp, Arabidopsis thaliana landsberg
gagaaagatctcgccggagatggagagtgttctcgaaccaaaacatcaaagcctcgattctctaatctaaacaaccaaactcatcaagacgacaaaaccggtcagtatcatcagaaaggcgtcgactttctcaacgtccggtccaacaatctcgatggtgggttttcttcaaaatcatcacccagatcaggaaacgagctcactcttagctatctctgtgaaaactccggtaaactcgctgaaagtcttggtcaaaaggggaaagaagtagtcaccttttctgagaattcaagctacgatgataaatgggtcgagagagatttcttcaatttgagagaaatgaatcctaattcttctaaacgtaaggctcacgaagaagaagaagaagctgaagaagaagaagataagaaaagtaacaaaatcgaaaccctaaatctctctttagctttacctgatgtatctctgtctttaacggcgtcaaacgccgtgaaaaggccgagagtggtgacgagcgagagaacaacgacgtcgttttcaaacgatttcacggcgacggcgccgtcgatgtcttactcttactctcatcctttctctcacaacattagctgctcgatgactcgaaactccacagatttcgattgctccgttggttaagacgatcacatctggtgcgccggcgatagaaccaacggatctgttcatagccgattcagaccaatcggtgacggcggcgtagcgctcgcgaacaatccacttccggtaaacctccagctctgctgttactctttc

SEQ ID NO: 142247 - DNA, 411 bp, Arabidopsis thaliana landsberg
aagacatcttcttctcctcttacaaaccctaatttctctcacgccttcagaaccagccctgttcttattgtattcaatgtggtgattcgattcaaggcattggagctgctaaaatggctgctgttgatttgatctaacgtcttgagcttacaaattttctttctttgggattcaatttcaggctgcgaaagtgtttcatgaagctaacccaccaaatctgagcttagtataagctaaagattcaaactttgatgaagcttttcaattggggaagtataagggacgatgaggtttgatggataggagagtttcttggttacatttgaaatgagtcggtctccatcgttttctgtgaagcctgagctaagtataaagcctgatcctgagtcattgaaacgatggattcatgca

SEQ ID NO: 142248 - DNA, 367 bp, Arabidopsis thaliana landsberg
ctcttctttagtaagaagttaatgattgtggattctcaacatagtgttggatcaatcgtgatgtgtgaaatttggaagttccaaagtaaaaacaggtagagctaattcgactagaattgtcaaattgcatccaaagaaaagtacgcattagaattacaaataaaaactattattcaatgttgttaaatggataaagaaaattctcacaaacgttcaattttgttcttacaaaacggtttaatgcgttatcaaatcatacataacggtttcaataatttggtattaaatacatccaaccgcaatttgactgtcgatataacgtttgttgaccaaaggaaaaataggtagaaatttggtaagactagac

SEQ ID NO: 142249 - DNA, 177 bp, Arabidopsis thaliana landsberg
agaaatttcttcaaatcaaagagtataaactaagaccaaacataattcggtttacatatcacataagggaaacaagatttaacaccactcaacaagtccacataacacactacaggcatatatcatcacctagcggaaatgacatttttattgaacaaacaaagaaagaagaaaaca

SEQ ID NO: 142250 - DNA, 330 bp, Arabidopsis thaliana landsberg
cttcgaaaccaataacacacgattgtaaaattgtaactgtacgaagtaacttctggatgtgtgatatgttttaagctcttttctttttaagagataaataaaaactctctacgaggttttttttacccaaaagattctcaggtaaaggaagaagaaagaagcatcatcagatcccagagttacatttcgaaaacaagagatgagagatgcagacaaacatctttacatgtctgtgtaatgctgtttttaagacgacacagcgatatatatattgcggagacatgagatatgtgaaaacctgtaaagctaagatcaatgcattggatgcct

SEQ ID NO: 142251 - DNA, 222 bp, Arabidopsis thaliana landsberg
gaatggaatccagccgataatcaacacaatccgggaggaaaatctcagccatactttgccggacttgttccagatctggtttttctggaccagggtcgagagcatgtgggaatcgaagcagaggatgctgaaagcccacggaatcaaggggagagaagggtttaaagaagaggaaaaggaccttgttctgcaagaagtggttgctatgttaggttatggagg

SEQ ID NO: 142252 - DNA, 651 bp, Arabidopsis thaliana landsberg
ttgagtgaataatacgaattgaacaaacacaaactctacaagtacactctcatacatctaacaagttcagaatggcacaatacgaataattctttgtcacacctgattctatatgcacccattgactataacaaaccgattctaatataccttttagtttctccatatgcattggatctttaacaaggtccatgaataatccgacggctaagaaacacaatcacataagatgctggtgatgatgatcgttagatgaagaaccggggagaccttgaccggtccaatattgattggattgattccctggagatgtcaacccggaaaccgggcggcttatattacccaaatggttgtcctccattttcacctgagcagtttgagaaaccctagtagcaccaatagaagataatcccatatttacctcgttagggaaattatataatcccatggttcgatcgaacaaagcaaagtggctggatgatccaagagaagtcattaggttattctcgttgttggtacccatgaccggacctgaagtgttaccaccatgaaaaaaccctaagtcattcaagaaacttgagctagtgttaccatttccaccattatttccattaatggcggctaagtttaaaccaataccaccaagttgag

SEQ ID NO: 142253 - DNA, 334 bp, Arabidopsis thaliana landsberg
atttggaacaactctccttcttcatcattttgtgaaatcaaatataaagtgttagtgtttttggtgaaaaacctaaagcttctttctttctcttctttatatttcgataaaaggtcattgagctattgtattttcaatcttagatttctatgttaataagctcatttgagcataaaccattcatgttttagaaatgtcttcatggtatcagagcctaggcgattgatttgggtcttattttcacaagcttctagcttccgctcttctggttttgcgtttcttggcatcagagcttgtgaatgaaaacgccaaggtgttgcaaacgtcgctattc

SEQ ID NO: 142254 - DNA, 404 bp, Arabidopsis thaliana landsberg
gaaaaattagtttataattccctacaagtattctgaaccacaaaaacacacgaaataaaaggcagagctacaaagaacaaacactaagacatatatgtgtttctgctactatacataaaacacacaagtcataatcatcatcctcaaaacaagcaacgtcaagagatgaatcataatttgtggagaaagacaatgcaatttctaacttcaaaaaaaaaagaaaataaaacaatacaaatcctttgaattaccaacaccattaggccttgagaggctttgtagacttggcagattttctcttgaggacaatgacccaagtaacaacttccaagagtaacgtgatgcctcctaaggtcccaatcacagcgatataagccgtcttgtaagtatgctttggattcaag

SEQ ID NO: 142255 - DNA, 349 bp, Arabidopsis thaliana landsberg
  unsure (1)..(349): unsure at all n locations
acatatggnagaagctgttaacatattaggatgatcagatgcccttcagggagctcagatgagttgggttcaagttgaaaagaaggttaaagactaacatgttttttcaccaagttccggcgaagaggaatccggtttgttcatttgggggttttaagagaaatccttgtttgtgtttgttttttgataatctcttatgtgttatcttttgtgtctgttagtttcaatttcaatgtttgtagcttcttctatttattgttcttgtaacatttttagggctgtatcggatttgtcttcaccgggttccataatatgggactctttcgatgaaatcttaagtattattatg

SEQ ID NO: 142256 - DNA, 1036 bp, Arabidopsis thaliana landsberg
agaaaccctaaccgccaaggctaccatcacgaccacgaccctaccgagtcacgacgagaccaagacagaatcaacagagttcgagaaaaatcaaaaacggtatcaagacctcatctccacgtttcctcacgagaaaggctggagaccgaaagagcccctgatcgagtatggtggttactggtggctaccgtctctcctcgaaggttgtattcacgcgcaagagttctttcaagcacgacccagtgacttcctcgtctgtagctacccaaagacaggcaccacttggctcaaagccctgactttcgccatcgcaaatcgttcccgcttcgatgattcctccaaccctctcctgaaacgtaaccctcacgagtttgttccttacattgagatagatttccctttcttccctgaagttgatgttctcaaagacaaagggaacactctgttttcgactcatatcccatacgagttattatctgattcggttgtgaaatccggttgtaagatggtttacatatggagagaaccaaaggacactttcatctccatgtggactttccttcacaaggaaaggacagagcttggacctgtcagcaatcttgaggagtcttttgatatgttctgtcgtggtctgtctgggtatggtccttatcttaatcatatcctggcgtattggaaagcataccaagagaatccagataggatcttgttcctcaagtacgagacgatgagagctgatcctttaccgtacgtgaagagtctggctgagtttatgggtcatggattcacagccgaggaagaggagaaaggtgttgttgagaaagtggtgaatctttgcagcttcgagacgttgaagaatcttgaagctaacaaaggggagaaaggcagagaggatcgtcctggtgtttacgcgaatagcgcgtatttcaggaaaggaaaggtgggagattggtcgaactatctgactccggagatggctgctcgtatagatgggttaatggaagagaaatttaagggcaccggcttgcttgaacat

SEQ ID NO: 142257 - DNA, 662 bp, Arabidopsis thaliana landsberg
gcagcagttaagtggtactgagataaatgatatagtttctcttcaagaacagtttctcattacccaccttctcctttttgctgatctatcgtaatcttgagaactcaggtaaggttgtgaatattatgcaccattcattaaccctaaaaataagagatttaaaataaatgtttcttctttctctgattcttgtgtaaccaattcatgggtttgatatgtttcttggttattgcttatcaacaaagagatttgatcattataaagtagattaataactcttaaacacacaaagtttctttattttttagttacatccctaattctagaccagaacatggatttgatctatttcttggttatgtattcttgatcaggaaaagggatttgatcatcaagattagccttctctctctctctctagatatctttcttgaatttagaaatctttatttaattatttggtgatgtcatatataggatcaatggaggaaggtgggagtagtcacgacgcagagagtagcaagaaactagggagagggaaaatagagataaagaggatagagaacacaacaaatcgtcaagttactttctgcaaacgacgcaatggtcttctcaagaaagcttatgaactctctgtcttgtgtgatgccgaagttgccctc

SEQ ID NO: 142258 - DNA, 862 bp, Arabidopsis thaliana landsberg
cgctctaatggcatcgatgaagctctctttacccctccaagacggcttggtatctaagaaatctcccggcattgtcaatgattttaggcgtgctgcaagaaatgctatggaagctggtaagcacattttggatttggaattcaagaagctgaaaccattcaagattcttatatgtgtccttgttgttgcaggttttgatggagttgagattcatggagctaatggctatctgattgaccagttcatgaaggatacggtgaatgatagaactgatgaatacggtggatcattgcaaaaccgttgcaaatttcctctagaaatagtcgatgcagttgctaaggagatcggaccagaccgtgttggaatcaggctctctccatttgctgactacatggaatctggagacactaatccaggagcattagggctttatatggcggaatctttgaacaaatacggaatcctctactgtcatgtgattgaagcgagaatgaaaacaatgggagaagtacatgcttgtcctcacacactaatgccgatgaggaaagcgtttaaggggacttttatctccgcaggaggtttcacgagggaagatgggaatgaggctgtgtcaaagggaagaactgatttggtggcttatggtcgatggtttctagccaacccggacctgccaaagaggttccaagtggatgcaccgctgaataagtacgatagaccaacgttttacacttctgatccagtcgtcggttacaccgattaccctttcctcgaatcaacagcttaaaattgttatcaataatgtaatgtagtgtgtttcccttatataagatgtaataagtttctggcttttcatttatacttt

SEQ ID NO: 142259 - DNA, 214 bp, Arabidopsis thaliana landsberg
aacaaaccattatatttggattaatcgagtattcagcaaatattcatattgtcttgttaatgattaagagcctagaagtctttaaaatatccatcaagattcaaacattatgactcaaactagtgtggtgttgtccattatactcgaaacgaaatggtattttttcaacttttgcttgtaaaacttagccagtgcatggcctttattaaatcaa

SEQ ID NO: 142260 - DNA, 598 bp, Arabidopsis thaliana landsberg
ccgatcttctcgttccattcttcttcctaattacaccatgcccaacatcaccatgggttcgaaacccgacccggttgctccaacgaacccgactcatcatgagagtaatgctgccaaagagattcgttacagaggcgttaggaaacgtccatggggaagatacgccgctgagatccgagatccggttaagaaaactcgagtctggctcggtacgttcgacaccgctcagcaggcggcgcgtgcttacgacgcagccgcgcgtgactttcgtggtgttaaggctaagaccaattttggtgttatcgttggtagtagtcctactcagagtagcaccgtcgtcgactctcccacggcggcacggtttataacacctccgcacctcgagctcagcttaggcggcggcggcgcgtgtcgtcgtaagatcccgcttgtgcgtccggtttactactataacatggcgacgtatccaaagatgacgacgtgtggtgtccagagcgagtctgaaacgtcgtcggtcgttgatttcgaaggtggagctgggaagatatctccgccgttagatctggatcttaacttagctcctccggcggaataggcc

SEQ ID NO: 142261 - DNA, 700 bp, Arabidopsis thaliana landsberg
tacacaattgttgctccaatctcttgctattatacaataaaactcaagcttgagttgagttttcccaaataataataatctatacttcaaaaaaattaagtctacacataaacaaagaatccgtgactcttcctaattaccaaactttaccacatctatcttacacacaatgcattcagcaatacgtgaacgagcatcaagtccacaaagtactgatgtccaatctcaccgtccctccaccgcattttcgctggagctcttccgtaatgaactccatcgttgcaacggttatcgtagtgccacggatacgtcatatcgaagttatcaactacgctcgtgaccaatcccgcatccctcattttctcgagaaacactccgttaaacgcctccattttgctcgggttaaacgctagcattctcgcgtacccgcctgtcgcgattgtgttcctgaaaatcacttctggcggttgcaatcctctgcttttgaccccgtcaaaaacttctctccaaaacgcagctgcggtttcagcacctttcgcaaaggctctaagactagtccagtgaatcccgtcgtgtagacccgagttcacgatcatcacgtcgggaacacggtttgtttcttcgttgaagtacttcttgagcaattctctaaagtctctgtctttaagcgaatcaaggccctgatagttcttggtctcgt

SEQ ID NO: 142262 - DNA, 2075 bp, Arabidopsis thaliana landsberg
cttatctgaatgctttcattctaattaaagattttaatatatgaatattcgcacgtggatatttgtataagatatgcattaatctccgaggcaatgtatagttcagaatttgaagtgaagtttaggagaggaagagagatggaggtatttagacttggagagctgagacacctactggtgacggttttcttgtcggggctcgccgaatacttgataaggccagtgatgactgacgtcaccgtagccgcggtttgctccggcctagacgattcatgttctttggccgtctatctcaccggagtacaacaagtggtaaccatatctacttatatatatacacatacatgcatataatattaaatctgttattgttttacgcttttaactaatctctattcgttgggggttgattactctttaacttttttatctttttatctgatggtgaaaatgatataaaaaaaagacggtaggactggggacaatggtaatgatgccagtgatcggcaatctatcggacagatatggaatcaaagcaatgctcactcttcccatgtgcctctctgttcttcctccaggttcttttcttttctttttaaggttccattttcccagtgaagttattataccatcaacaatatttgttcttatctttttaccattttatttggcagagaacttattataagtaatataattctgatacaattaaataatccatgcaaagccaatcattagctattataccagtcaataattgtagagctaacgtttgaaaaagtagccatgcgtatgtgtattgtgtaccaatagaaggaaagataccttcattatatttatcagttcttatgatcgtggacacctcatgattccatgagcgtagtgccaacgtaaaagagtaagtattcttttattgggtacaaacaaccgttcggcgccatcagaaatttagaaaataaatttttaatatataggcaaattaacctccaactagtataagttttgtttggaaaggagtcctataacaaattagtgtagattttatcatttggatcgaaagtgaataatatcatactaaaatgaagtttaaacggtttggaaaacccaataaatgatatcagagtctagattgagaaaaatagacttagaattctgggttatataatcggtgtgagagaaccctctatgtgccacaaataagaaggtgtcttaagaatctcgcgaataaggtggagtcatggtgtcaaaatgttgctcgaggagaggtccaatgttcgtagtctttggtttgaagaagagattgttgggtataaaccaacgtctcacatcgaaaattttaaaaagtagtttataatatataagttaagtccaactttaactaatatgagacttttaggaaaagagctcaataacaaatatgtgcaagctttactacttaaacccgaaacgaataatatcgtactaaaatgtagatgggataagtttggaaaacccaatatctttcccacgtatatctcgttttgcaacaagctggtaacttctgtttgcatgtctctttcgtttggcgtaattcttttttgctatatttacattgttgttgctatatattatcctagtattattaattaatgcaaattactataaaattaaactcatggaatgcatgattaaattatcaaagtaagcaagatgatgattcatatacatacatgtttgaacaacgtcagccaatcttgttggttttagcagcttttcgttttggatatgtgtaattaacgttttttaaaataaaattttgatgtgaagggaaaaatttttgtactaaaatgttgtacattttgcagcaatattagggtacagaaaggataccaatttcttttacgcattttatgtaatcaagaccctattcgatatggtctgccaaggcaccattgactgtctcgctaacgcttatgtggtaaattttttgtcttttcaccttgatcatattatagatatttcgttcttattaaaaaatagaatatttacatgaaattttttaactattttttcaggcaaaaaatgttcatggcaca

SEQ ID NO: 142263 - DNA, 1038 bp, Arabidopsis thaliana landsberg
cgcttatcttctcttcctgtccttttcaactccgtgactaaaaaaaaaaaaaaagtaacctttacctacttttcttctgggttttcgataatctcttttgggtatttgcaaaacccctcaaagattcttcctttctcctttaaatcggtcagtactgatctcttctccatacccttttgctatttgtttcaaatttcgattctttgattgttttggatagtttaattcatatgaatctgactcgtgtgtttgattgtcacagtctctgctttggctttgtagtagccatcgcaattcatcatcatctattgcaactatctccaaggttttgatttccacaatggcaacaacaactctcaatgacagtgtcaccactacacttgcttcagagcctcaaaggacttaccaagttgttgttgctgcaactaaagaaatgggtattggtaaagatgggaaattgccatggaatttgccaacagatctcaagttctttaaagacattactttgaccacttcagattcctctaagaaaaatgctgttgtgatgggtagaaagacttgggagtctattcccattaagtataggccgctttcgggtcggcttaacgttgttctaactcgttctggtgggtttgatatagccaacactgagaatgttgtcacttgtagtagtgtagattctgctcttgatttgttagctgcgccgccgtattgtttatctattgagagggtttttgttataggaggtggtgacatattgaggtaatggttgttgattttcatttattatcccttttggtgattcggaatcttgttgttggttgcaactaagtgttggttggttgtatttgtgtaggcaagcattgaataggcctagttgtgatgctatccatttaactgagattgatacaagtgttgactgtgatacgtttatacctgcgattgatacttctgtttatcagcctccgtcttccccgtttccagtaactgaaaatggacaaaggttaaacttcacgacttttgtccgtgtaaagagtt

SEQ ID NO: 142264 - DNA, 851 bp, Arabidopsis thaliana landsberg
atgagtgtgtctcggctgcctcttaagtatgtaatagtatctgaggctttatgttttatatttatgcatgtgttggttagctcaacaatgttaacgtaacgtttagtattttcagttcttctgtttctgtataagctttgatttgtctttttggtttcctacgacgaaaaagagaagcttcaatcggaatacatcttttggtatcaagcttgttcattaataatgtttttggattcttaacatatcaaaaaaagctttccatttataatgatgtcagtcacatctatcgttgtcaaagttagcttcacgcagacgaaactgccacaacttgattcgactcttgaaacaactcatcctttatcacagagaatatcatcatcaacaaaatctgagaacttgaccacacttgaaaagaaaaatccggcttttggaactcaacgaacccgccaaatttttagggctagaattggcagaaaccctatttttcaactttcatttccttttgctataaatctctgactccggttgttccttgatattaaaaagttgtatggtttggacatacaatctgcttttatcccacaagtaagtttctctactatcttcttctcatctagtgtcttcttttttttaaagcctttttgttgaatttctaactcaagctcatcttctctgtatttagccggtctcagatggtttcttgagaaggtttaaaaccaagtgcaagattcaagtaatctctgataacctcagcttgtcctctacttaattaaccatgtttccaagtcatcgacgtaatggattttattgtatttcgaaagaacttttctggttcctcaagttgtttagga

SEQ ID NO: 142265 - DNA, 108 bp, Arabidopsis thaliana landsberg
cattaggtatatataccgatatgagtgtcattggtcgttgtttaggttcggtatttgtttgtgtggtgtataattaagaatgggtcttacttactatacaacatatat

SEQ ID NO: 142266 - DNA, 289 bp, Arabidopsis thaliana landsberg; identical to SEQ ID NO: 47723

SEQ ID NO: 142267 - DNA, 392 bp, Arabidopsis thaliana landsberg
  unsure (1)..(392): unsure at all n locations
cttggtatctattctcatatcataacttattttcactttgatactttttgaaaagaggagtttatgtttactgattccctgaaatgggagcatcacggcctctcttgaaatcgtcccatcctctgacccagggctgtccagccgctgcacgagtctctggcgctgcatgcttgttcagattcttcatgactttctcgtgtaacgccgagaacacctttaacatcacaacaaggattgttttaatcactgaagtaaacaaaagacgatatactgtttaaacgtagactcgattaagagattgtgattaccggatttgaactcactgcttccggaggctgttcctgttcagttagccatttccacgagatcangggttttcctgcatagaacaa

SEQ ID NO: 142268 - DNA, 412 bp, Arabidopsis thaliana landsberg
aattgatattcacaaaagactattgaagtgaacgatcatcatccatcatcacaatatatcacatatatacacaaaacaagaaaatccagactcattgtgaatgatgatcattatacaatttgaactgcagtaattgatatagtatactgaaagaaagaaatttaatcaaatggtttgaagatgaagtggttttggtggatccatggttcttctcttccacaagttaacttctttctttggttttaaccctaaaggagctgaaaaagggattattatgtcatcttcatcctcgtcatcatcgtatctcaagtaagctcctctggtgtcgtcgtcagaatagtaaccacggtgatgatcagcgggtgattcttcttcatgtttcatctcaaccgcccaatcaaaatcacctaaa

SEQ ID NO: 142269 - DNA, 240 bp, Arabidopsis thaliana landsberg
gtagtgtgagctttttacttaaccgggggtctctttgactgataaaacaaaatctcttctggtttagtttgattaagggctttgtctgttttgggtacaattaattattctatttttttcttttccttgtttgtttacttcattgtatcatctccaaatccggtattttttattcaacattattgtcgaccaaaatttgttactagcttttcatattttattagtataatcttttacctc

SEQ ID NO: 142270 - DNA, 255 bp, Arabidopsis thaliana landsberg
tgccgtttcgttttttcctttctcattcaattcaagaagaagaagaaaatctccgcccaaaaagtttcttcctttgaagtctttaagccctaatctatcactgtctgtgaatcaacgcctccctgcgtttgtttctcagttgaaaaaaaaagataatgatcgcaaaaaacttcctccttttgctctgtttcattgccttggtgaacgttgaatcgagccctgatgaggcggtcatgatagctttgagagactcct

SEQ ID NO: 142271 - DNA, 564 bp, Arabidopsis thaliana landsberg
tttcctcaataaaccaaataagctaagtgttttgtgtaacgaaaacaaaaaatgggaacctcatgtctctcgttctcgtggctttgctcttttctctctcccttgctgttattgcggacacatccaacgatgccacacatggtgtgtgcaactctatataatataatttcccttcacactttcgcatgattaaatttttattttttttggtaacagatgattaaatatttgatccatggtgtataacatgtatatcacacgtgcagttaaagaagaagtgaagccgagtactgaagcaactgatgctatagaagccgaagtcgaggtcaatgacgctgttgtagagccccagcaaggcttgcctggtggtggttgtaggttcggatgttgcggtgggtactggtggaatggactgtgcatatactgttgccgcagtcaagccgaggccaacgaagttgtaaaaactgttgagcctcagaaggaagaagctaagccatgatttcgcatgtaacacaaactctatatgtttgtatgcatgcagtggtcaattaccgtatgtatgta

SEQ ID NO: 142272 - DNA, 617 bp, Arabidopsis thaliana landsberg
taaaagaagcatggtgcctaagtaagatacctagagagagctcaatagaaagaaaccaaaggttcattaatggtttttggttatgaggtgtttttctcgtggatgttataaataataactgttttaatattaatattttgttcacagtttaaattatcaaaaggcatgcatgtcaatataaagtggtactaaacggacttattagttgttatcctaaaaaataagaatagggggaggggggatgtatcgtctaattatctatatatgaatcatattgttggaaaaacatatttgtattactcaattttagattttatacatgccagcgaaaggagtattcaccgatccaacccaaagagttccatctttttcttcaacctcacttatagatatccacttattttcatttttaccttcgaatacctctaatataacgccactatcctcgctcaacctcacggccatgccgttcccattgtacctggcccaaaccgaatggaccttcatccaatccaccggcaggcccaaagcggcacgtccaagccacgcgttcgacatggcgaactttgtcagctttgagtgttttgtgttcaagcctacccagaatccgccacgtg

SEQ ID NO: 142273 - DNA, 535 bp, Arabidopsis thaliana landsberg
atctttttgggcgggaggtaactgaagcagcgattgaacctttttcttccagtacatatcctcaggatggtcttgattatgctggaactagttcaatcagtaaaagtaaggtgagtttggaaacacctgcgttttatgctctactatactttggcacatcctagttttatccctacccctgccggtgttttgcatgtgtagcattggtctaagagtctaccattttatttttgaggcgatccatgcatgatacaaataactgtactgaccccactctttctaaactcaccagcatgttgccttgcagggtgatgtgcaccatctcttaacagtttgacatttattgaacagcagtatttaaaatattaagatgtctcctttttcatgcagcagcattttctttcactgtaaatctaacgatgttgcacctgtcatcatttcttgtctagttttaagtcgttttatgggtgctgctgtcttacttttgtttcttctttcgattgagttcaggcattggctttgcttgaaattcttc

SEQ ID NO: 142274 - DNA, 1085 bp, Arabidopsis thaliana landsberg
caagtccaagataccaagtgttttagggatatcaacctttgagatatcgaactggaacatgtttcttgataagtcaatagaccaggttgttttgttggaaccaaacaacatcgaagcatcaccttggagcttgttgcgggataaatcgatccggttaaagtcgatgttgcctaatgatttgggtattggaccggagagctggttatgtgataggcgaaggtcagggactgttcctggaaacgacccaaatgactctggtatggaacctacaacataaagatcgttgtttagacaagacactgaatgatgtaataaaggaaaagatcgttctttacctgtaagtttgttcctgctaagttcaagagccaagattttaggtaacgtagagagagaacttggaatggaaccagagagatcattgaaggaaagttctaagaactcgagattcttgagctgacttataaagtcaggaattggacctgtcagattcgtccagctgagcctgagcattcggaggttcttgagtttggcgatggtgggttggattgtaccggtgaggttagagagtttgcggaagacaagggtctcaagatacggcaagtcaccgacttcagccgggatctgaccggagatctggccggagaatatggttaaggcggtaacacggtggttaacgggggcgtcgccgcactcaaggcagtaccaggagcaacagtcggtttgagggtcccatgaagcgaggtgataagggttgcttagagatttcttgatcttgaggagggtgtttttgtcattttggttacagagatctttatacaaacaggtcgtgaggaatgtgaacaagaacaagagacacaatgtcgctgtcttatccatggtgttggttttgaatcttgatggaaagtgttagtgatacatatacatactatatagagagtgatatagacttagagagacggattccatttgatctctgtttacacatggaccgtaataatagtcgatacatatcatatagtcaagatgtcggcgttgaatatgtttgggtaatgcaattacccgttgtatataattaggcttttacc

SEQ ID NO: 142275 - DNA, 464 bp, Arabidopsis thaliana landsberg
aaaaaaaactatcaacttagactacaaatatacaatcactatacacaagacaaagcctaattgaggtggagccttgggtgcaaggtttcatactcactttctcaaaactctagaaaccaaaacagcaagagtcatgagactagctccctgaggaataggccatcttttcatcaaaaagtctcttatttgggacactttgttaccttttttgatctttgcttattttctcacattggtaatgaatatataccgtatgtctttttccccacaatcacatctctctttcgacctaaattttgcatttctgcaaaactcacaactctgaaatgttttctttaggcgcttcctcttcaagtcctttgtttgatacatcttcactgctttcccacaaaaatccattatcattttccggacctttctctgtttctctagctagaggtgccacatgtgcaacatacttttct

SEQ ID NO: 142276 - DNA, 225 bp, Arabidopsis thaliana landsberg
aggatacatcccatggataatttatgcactatacgtgatcgtgtttcaaaaccgtgaaggctctaccgaacttggagctccacttaactcagcttgatctgttttggtccattacacggatcaatatgttgttgaaactgttttacttatcatgtaccaaataataagttgctttgcaatttttatgtattgaagatttgagaacattgtcgcgttattgataca

SEQ ID NO: 142277 - DNA, 1061 bp, Arabidopsis thaliana landsberg
tttttttttttgtcaaacttatatagaagcataatctgatccgtcaacgtacatgtttgcgttcaaaatcaaatatataacaactctcagacgctttctcaccattggtcgcatgtctttttcataataatgcaaattacaactaaataacaaaaaaaatcagtgaaccaaaaaagttgaaaaacacaatcttgaattattgatatacaggaagggattgcaccggttgatggcgaattcgactttgacgcatactccatcgataacattccggtttgattggataaaaaaaccgataaaccggagggactacccggatctgtactgtatcatttttacacgacgatctactaaaacttgtttgatatatatgtagtctgcatgaaattttaaatggcagattatataagaaataattattcatgttaggggttaatatccttggagattcttttgttcctcatttatgtagtgaggctgtttagggttttgtaagtatgtatttcgagtaaatgcttaacaaacttaatttagtacaacgccacaacgtgaaatcaaagcaattcaagatcaaaacacaaagggatttgtctgttcaatatttgtatgtatacatactgattactaaaatctgatcatacgaaattcaagaatcacacggtgcacaaagcaccactagtagtagaagtaattctgcatcaaatctggttagaaagaatcaagaaaactgtatattttctggctaatgaggaaagtccttcactggaacttttaaatccgaagaaacagtagagccaaaaatggtgtcaggatgagaagaaaggtggatacatgtttcctgtgactgttgctcgtgggtagtacagaagggagtgaacattcctggccgttgaagagtactttggtgggaaacccatctttggaaccaactttgattccaggagtcagtttcttggtgaaggagataaccgactgctgtttcccgggtatccgaaagtcttcactcgggttttttccgtctttctctgcaaggagatagttcagtccagggagcccttcca

SEQ ID NO: 142278 - DNA, 355 bp, Arabidopsis thaliana landsberg
caagacattggggtatgagaggctggtttcatgacggtgtaaactgggaagaacctcgtggagcagagattgttttgccctggagaaacaaaagccttgcagtcaggccgatcattcagccgttaccgggggccctcctgcaagatcacttaattgcaatgtcgcaactaggccgagaccaagagcatgtaagcaacgtctttgatatctatgtatagctaaattctgcctaaattacgtttgtctataatgctaatttacagcctgatgtggccttccctctgcaaccacccgagttattgaactgtccaatgcaaggggaatctctctcactgatccacggtattcttaatga

SEQ ID NO: 142279 - DNA, 437 bp, Arabidopsis thaliana landsberg
tttttttttttttttgggcagcatggattaaggagcttgagccctctttgcaagatgataggtgtttccccttttctcatcatgtctcagaaactcaatctccaaaacacaaatctatacaacaaatcataacctaagaagaaagaaataaaaaccttatcttaaaaaaatcatctaagtaaaccatttcttatttcatcgttctcttgcggtcacaccgatatctttatcacttgtcttttgatctgctctatgcacggattgcttgaacgctacggttggagcgattctgctatttctcctttgatgctcgagaacaagttccccagctaaccagtcaagcttctcgaagttgctctgttcatcgattcttttacctccaaacaaaacagattcaacattcttttgtttaagcatctcctctgctactcccatca

SEQ ID NO: 142280 - DNA, 301 bp, Arabidopsis thaliana landsberg
cgcagattgagctccagagagggagagagagagaaagggggcgctttagggtttctgcagttcctggttcagtctcaccattctatttaagggttttaatctctctgcttcatttggtgactaacatttatcgtcgagggttgtgacgatctccgagaatgtatagcggatctagcgatggtgagagtcatgatacatcgacgcagaggaagatcccaccggcgtcttcgatgctttgggttagaaatctacgacgatatattggttccggtgccggattaggatccgaaagctctaatgg

SEQ ID NO: 142281 - DNA, 250 bp, Arabidopsis thaliana landsberg
gtgagtcacgacgagcatctgatatcgggaagcgtggacgagttgtgggttgtgtcagacggcaggattgcaccattccatggaaccttccatgactacaagaagcttctccagtcttcaacttaagctgcgccgcatttcttgtattccccaaatccatgttgcgtttttgtttaccctcaatacgacacaagagtcctttatacctgagaatttggcgaccgtattttgctttatgtattaaggttga

SEQ ID NO: 142282 - DNA, 547 bp, Arabidopsis thaliana landsberg
aagtttataactttctgagattttgagagaagcatcatcatcaaccaattgggtttaaatcagaagagaagcaatgatctccggcgacacattatcagctaaaaaacctaaatcagttccacaagaagaagaccaagacccaccaagccaatcaatcgcacttctcgacaatcacacagattcctccggttctgattcttccactagaagcatctcaagctgcttcatcttcacatctctacttctcgtcacctgcatcgctctatccgccgcttcagctttcgccttcctcttcttctcttctcaaaaacctgtcctttccttaaaccaaatctcaaagtcaccagctttcgacagatccgtagctcgtccgctcaagaaactcgacaagcctgttgttcttttgatttcatcagatgggtttcgtttcgggtaccagttcaagaccaaactaccgagcatccacagattaatagccaacggaaccgaagctgagactggtctaatccctgtttttccgacactaacttttccctaaccattactc

SEQ ID NO: 142283 - DNA, 455 bp, Arabidopsis thaliana landsberg
gtgtcccagccaccgtcagcacgggctgtgaaaccgaaatgttgccatcagatgacccgcaggccaaggatagtccgatatcatgaggagcccatgcaatggagttgactgaagatttgtggtctgtgaaaacatgatcttgggtccattggttctggttgccttctttccagagtatgacttgaccatcataggagcatgaagcaaggattgatccatactttgggtgtgcccacgcgacttcccagacaggaccacggtggccggttaatgtggctagttgctgcgatccaccgttgttgctgacaccggttatcttgatggtgcagtcagatgatgcagttgcaattcgctttccatagtaatccatctgcacatcatggacaatgtcctcatgacccgtttcaatcttctgacctggcatgtttccgaaatgattgtccctgcaaatagaa

SEQ ID NO: 142284 - DNA, 305 bp, Arabidopsis thaliana landsberg
aatcaaaacgaaacctttattcgataagcaaatactataattcaatcgaaaaacgaacgatgaacatcatcatcatgatcatcaacaagagatccagttcttatgagtactaacaatagcagaaaacaaacctgcagaagatatcacattaggagccgataacactcccttaccatcacgaatatcagcaatcgtcatcaaaccatcagcaagatcctgcaaaatagataaaaccttcaatgtcttcttctccttaatcatcttcatcttctcatcttcaccatcacaagctaatcctctcgaaa

SEQ ID NO: 142285 - DNA, 460 bp, Arabidopsis thaliana landsberg
tttgaactgcttgattctttagtttcttaataaacccctttactgatactagtctggttacataattgctcgttcaagttacaaccacacatctctttacagaatcaagaacataagttactaaattggagttgaagctatcataaggaacaaactttgatcctttttcccaatattggcatccatcaggaaaggcttggaaagctatgcaagaacagtttctccagcaggttccatgacagtcgctaagaccagcgctcaaactatcgtcatagtaaaatggataataaccggtattattttccatcatgtatcctcttctgggttcgaaatactctgaccctttcctacaagccgttggcttctccgtgatgcagattgctgaactgttctttaaatccgtcttgcagggttcactgctttcggaaatccaggtgctgctattgttactgctgagaga

SEQ ID NO: 142286 - DNA, 490 bp, Arabidopsis thaliana landsberg
tcatacaaaataaataataatacaaggggtgacaaattacaaatacttgttttttcttcaatttgaacacaactcaacaaggtcccacaacttcccactactactactactaataaataacacccttcaagctccttcctcaacctcccactaaagtcttgaaaacaaaaagttgctttcatcaaagtccacctaaaataaaggtacaatgattacaataatacttgatcaattgagctttttgacattttttttccctctactgcaaatcctacattgattccatctacaaagcctttttcacttttttacctttcaagtgggtgagagaggagagaagaaaccagagtcattagagcagaagaaaaacccatgttggacagttggattagctgtacaaactctttattgcagaaatcctactgtggaggattgttctcaggcttgaccactgaagatgtatccggaggctgagaatggtaaattgcca

SEQ ID NO: 142287 - DNA, 435 bp, Arabidopsis thaliana landsberg
aaacataaaatttggttgataaataaattaattaattaaactgggaaaataataaaattaattcaaagttgattatataaacagaatgattaaataagaaaacgcaattaacgcgacagactccaaaaacgatgtaaaccaaaccagtcaaccattttgacagccttttccccgccgccagaaacgcaaacgcgtttctcacacgcgcccactaactttcaatgatctcattacgcggcgtcaacgcagacaacgacgtcggcgaaatcgccggagctttacctgagtagaccgggacagaagcgaatcgggtcgagaagcttcgtaatccacctagtccgacgtattcatcctcctcgtcgtcgtcatcgaagttcaaagagtaactcaaaggatcgtattgaaacttctcgcttgcgtcccaatcgcggccgc

SEQ ID NO: 142288 - DNA, 414 bp, Arabidopsis thaliana landsberg
caccatccaccatcacaagatttaaatactactaagcccctaaccccccaaaaaataaacatgttaaagctaattctgagtgaaaggctcccaacaaaagactgtagtgcataaaaaactaagtggctaaaaacgcctaacgctgctttttaggatgcatacataacccaaaagcatagagagaaagagagagagagagagaagtggtgttttagttgtggaggtaattgcaggatgctcctttccgacaatgtccattttcgcggaagaacttgcatactctttgtcccttgaagttgttctgctgcccacctgactgcctgttccaaccatacccagaatctccattctggctctgttgttggtttccccagtaaccggcttggttccctcctgaccctccgcttgggatcg

SEQ ID NO: 142289 - DNA, 186 bp, Arabidopsis thaliana landsberg
ggtagtttcggaaaacattgatcttggcttataccgaaaacccgattccagtctcgcgttgcccggaaaattcgatccaccaggtacttttattatctctttcttctttcatggccgccacttggtaatagtactttaaaaactcagttctgttactacttgcttttgccagatttactacttttg

SEQ ID NO: 142290 - DNA, 227 bp, Arabidopsis thaliana landsberg
caaattttcgatttttttttattttccttgtctcttacctgatttggtgatttattattacatcaaccactcgattcgttagatttccggatttgaaaaagagtcaccaacttgtacggattctcgttttggggatcgagtattgctgatttgtgattttgttgtttttgggtactttccctttgtggattcggatctggttggtggctttgtcaaatgggcgcatt

SEQ ID NO: 142291 - DNA, 333 bp, Arabidopsis thaliana landsberg
tttagattttactataatgtttttggtcgaacttgaactagtcacaaaatatgatctcgttacaaatacttatacaaaagttactttcaacaacaaaaaaaaagttctagtttacttacttttaaaaatgatagtgcacgaactactacgagtggttttcatttttcgcataatttaatttcatagtatgctaattgctaagtaagtaatttatatttgttgttttcttattgtcttctcctacgtaatgagccaaaaggaacgattttacaagaattcttaaggatcttccaaaacttcaaaatcacaaaaactcggttagaatcactgatt

SEQ ID NO: 142292 - DNA, 435 bp, Arabidopsis thaliana landsberg
caaaaacagaggatgtgttttgtttattcttagtcatggtttcaccattacatctagaattcccataagtgcttgtttcatcttgggttacaggtgctgggaattagatggtcatcaatcttttatgttgagagtgtagcaagagtgaaaaagctctcattaagtggattgttgctttacaagttgagaatagctgatcaattctttgttcaatggccacaactgcataagaagtatcctcgggctcactatgttgggtgcctgatgtaagctgattggaactctacttacacctagatatattacaaaaacttagaaagctacatagtgtacaccttctctttatatgcaggattgagttttaaacaatgaatttttgtaatcagctgttttgactttgttaatgacttaatgctatttcagtgagcttataat

SEQ ID NO: 142293 - DNA, 132 bp, Arabidopsis thaliana landsberg
aaaaaaaacagagctcactcattattatctctctaaaaaccctagctttctccatgggctttcccgtaggttacaacagaagttttcttaccgaagcttttcgtacaaacgctttcgattctcggattcatc

SEQ ID NO: 142294 - DNA, 106 bp, Arabidopsis thaliana landsberg
tccatcatgccatccatgtcacttctgtaatgtccttaaaaacgcacagagatgcctttggacttcactagcaaaatttacttccctccactctcctgctgatatc

SEQ ID NO: 142295 - DNA, 301 bp, Arabidopsis thaliana landsberg
ctctatcttgaaaaggagaaataaataattaatcactaagcgaaagagatttgatctaaagtaatacaaataaaccttgattgagattgtaaaggagaagagtttaaaagcatggatacagagagaggatcaataagttcatcagaaatatccagaactgctcatctacaagatagaacagttgcttgtcttcctccttcgtacggacaacttgtgaccattcttagcatcgatggtggtggaatccgtgggatcattcccggcacaatcttagcttaccttgaatcacaacttcaggtat

SEQ ID NO: 142296 - DNA, 428 bp, Arabidopsis thaliana landsberg
gagcgatatttctttactaaagtatacaaatggatttaacttacaatgtttctgatgatgcatacagtaatgctacatatttagtagaggatctcccgctttttgacaacggaggcctttactatactcaggattccgaccaactaactcatacccacccaaaaatagaaagatttggggaaatagatatgaaagcaaagaatggggaagattggccaaaaagtgaattatatggatccatgaatagttagagagagagacattgtaccctgtctggaatattctgaggcattggagctatggtaacatatctttgtaggtttaacttaagtgaattcacggtccggttcatagatgaagatggcgggtggaacttcgcaaaacgattgatcactgcaaacttctctagatcctggacttcgactctc

SEQ ID NO: 142297 - DNA, 195 bp, Arabidopsis thaliana landsberg
atctcagcctattttttttatagataatattatcctatttcaataaatgcttattagtcattactaagaaaaagtctagtattgatatttagtcattttgaaatatcttttattggttttagttttaatagtagaaaataacaaatagaaaaaactaaatatatagatattctcatattcatgtactacttaccc

SEQ ID NO: 142298 - DNA, 218 bp, Arabidopsis thaliana landsberg
attaagcatcaaattcagagggtaagaaacttttgattcaccattaatttgagaattaactaagagaaaagaaaaaagctatttacttttccagggatgattagttttttcttctctgcatctgcaatcatggctatagctggtctaaagacaggaaatggaacaaaatcaatacttgctactagtgcttttgaaggatttgaagactaagatttcac

SEQ ID NO: 142299 - DNA, 364 bp, Arabidopsis thaliana landsberg
ccgttaccatattctttgatccattatataatatatatactttcaccacatcatatatgcatctaagtaaaagtgggtacatgcagagggcacatatatttacataaaatccattttttagttatagatttcagtagcttccaatatacttgttggtcccttcactgggactggtcctggttgtcagagacggcctcatagtgactatagtgttttcgtctgctcctgcttccagtgcagccatccctgcttccagaaacttctgaacagcgtcttctgcgtatttgttgccttcacttactgtcatgttcttcccaatgtctggatatgagtttaggagatggtctccaacgagttgagaggc

SEQ ID NO: 142300 - DNA, 673 bp, Arabidopsis thaliana landsberg
atggttaaagaaatagcttcttggttattgatactatcaatggtggtgtttgtttctccggttttagctataaacggcggtggttatccacgatgtaactgcgaagacgaaggaaacagtttctggagtacagagaacattctagaaactcaaagagtaagcgatttcttaatcgcagtagcttatttctcaatccctattgagttactttacttcgtgagttgttccaatgttccattcaaatgggttctctttgagtttatcgccttcattgttctttgtggtatgactcatcttcttcatggttggacttactctgctcatccatttagattaatgatggcgttgactgttttcaagatgttgactgctttagtctcttgtgctactgcgattacgcttattactttgattcctctgcttttgaaagttaaagttagagagtttatgcttaagaagaaagctcatgagcttggtcgtgaagttggtttgattttgattaagaaagagactggctttcatgttcgtatgcttactcaagagattcgtaagtctttggatcgtcatacgattctttatactactttggttgagctttcgaagactttagggttgcagaattgtgcggtttggatgccgaatgacggtggaacggagatggatttgactcatg

SEQ ID NO: 142301 - DNA, 265 bp, Arabidopsis thaliana landsberg
agcagatcttcatcttcttcacttacgagcggctttccacgagcatatcggtgatgtcacgagtgcgttgcgggactgtcgtgcagcgctctcggtcgaccccaaccatcaggagatgctcgaactccatagccgtgttaatagccatgaaccttgaaccgcaaccacacacaaaagagcttcgatatgaaagtaaagtgtgaaaaattgtaatactaaaagaatcattgttggaaacttgtaatctcttgtaactcttttattc

SEQ ID NO: 142302 - DNA, 243 bp, Arabidopsis thaliana landsberg
atcaagaactaggagaagaacgcaacgacgaagataagaggttcatacatttatcagaatgttctaacttttcaattaagtaaatgttttgtgtagttttgacttctcctttctctcattgtgtgaattattttgactctttagctgaaaccgagaatctggttgacccaatcaacacataacactcttgaatcatgaatattgatatatctcaaacacatcaatcaatctcgaatctttttt

SEQ ID NO: 142303 - DNA, 281 bp, Arabidopsis thaliana landsberg
gacttctctgtggagcaaaccggtgttcacgtccactgaagtgtacgctaaagtatttactctacaagacaaggtaagaaaagagaatggctacataaaaaaatttcagtaaggtggagggaaaaggttttgacatttgggttaaaattgaattataggtcacaaaggtgaataagatcccaaagccaaagccaaagatagagaaagtaaccaagacggagaacacaacaaaggaggaggaacaatcaaaatcctctgatgaagctgccaaagaagaagaa

SEQ ID NO: 142304 - DNA, 286 bp, Arabidopsis thaliana landsberg
caaatgaaatgataataatcttcttgtaataaaattagacttatgatgtcatttttgtgacaacagagtaaatttcggttacagacatgtggtactaaaactatacatgaaacctgtgtcgggttactacaaacaaaaccgacttcttttgtttagagtgaaaacttttaaattttctttttaacactctcttcgctatataatgaaaaaactgccgcagcctaacgtgtttacaagatcaagaaaggaccaaaagaagcataccggtgttgccttatcctcagat

SEQ ID NO: 142305 - DNA, 451 bp, Arabidopsis thaliana landsberg
ttgaaaatgtttcagctttacaagaatgattgtcttaatataacaacatacaatctgtcatcttgtttgcatgtaagagaatgttgactataagttacaatcaggacgatcttatcagctccaatagttcactcttcctcaactttgagtatcctttgattcctctgttctttgcaacttctttgagctctgcaagtttcatagtttctatcagtgaagctttctcttccttctttgtcaattctcctaaagctttatcgctgtttgatactgggagcttacctcttggacctgaggcagaagaagataaaggagttctcttgacaaaactagacggtggtcgaggaagctctacttgtctctttggtggcttctccttcacactagtatctcctacagttgcagagttgattatattaacaaatggcgagaacatggatttgacatttga

SEQ ID NO: 142306 - DNA, 855 bp, Arabidopsis thaliana landsberg
aatgaaaatattttacatattaattttataggaacttgtaatggcggcgccagacaacccatcaaacgccgtggaatgggccattgcggagatgataaacaaaccggagatcctccacaaagctatggaagagatcgatagagtcgtcggaaaagaaagattcgtccaagaatccgatataccaaaacttaactatgttaaagctattatccgagaagctttccgtcttcatcccgtcgccgccttcaacctcccacacgtggcactctctgatacgaccgtcgcaggttaccatattcctaaaggaagtcaagttttacttagccgttacggtcttggtcgtaaccccaaggtttggtctgatccacttagcttcaaaccagaaaggcatctcaatgagtgttcggaagtgactttgacggagaatgatctccgttttatctcgtttagtaccggaaagagaggatgtgctgctccggcgttaggtacggcgataacgaccatgatgctagcgaggcttttgcaagggtttaagtggaaactagcaggaagtgagacacgtgtcgagcttatggaatcgagtcatgatatgtttctttcgaagcctttggtgttggtcggagaattgagattgtcggaggacctttacccaatggtgaagtgaggcgacggtgacgtacggcgaggataattccgtatatactatggataacccaaagtttagtgaatcacaaaccaaactttgttcggttttggtccttttggaaacacttgatctgtgttttctcttgcttttttctatatgtatgtattaattttggttttgttttgatgattaataagaaggtattcaca

SEQ ID NO: 142307 - DNA, 126 bp, Arabidopsis thaliana landsberg
tacattttaattaaaactataagcatttcaatgaaattgtcaccctcattcctggatgtttgagtttttaatttataagttgttttacctttgattatgaagattatcaatcattatttgctcatc

SEQ ID NO: 142308 - DNA, 455 bp, Arabidopsis thaliana landsberg
atgaaatttggtaacgtaaattagatatgataaaagagtgctcattccttatttctggtagttaatattaaaggggcaagtttatatatgttcccatgagaacacacaccaaacttatgactacaaattttaaaacgactccataacaaaagcaaaagcataaagagacaccacaatgacgacgatgatgctaaattaaggatgatgataggaagatcctaagagagctgaccacaatcggcaacaaccacaggcttcgtcggctttccagatgatgatccaaccttctcgatggcctttaccacgtctaagccttccacgacctgcccaaacaccacgtgcttcccatcaagccaatcggtcttcacggtgcagatgaagaactgagatccgttcgtgtttgcaccggcgttcgccatcgacaggatccccggtccggtgtgcttcctctcgaa

SEQ ID NO: 142309 - DNA, 1049 bp, Arabidopsis thaliana landsberg
ctcttcttcatcgtctcatcttcttcgtcttcttcattattaaccctaaatctagccgcaactacctctctctctaggtctctttctctatctccctctgtttactcccacagctctaaaagcgttttcgaatcgtcacacctggagaaggaagctaatcactttctcattttggaactttgaggagagatctgaaagtttttttttttgttgttgttctggatcgttcctgttccactctcttcatcttccgatcatcgttattttcgaagctctctacaaacaaaatcgattttttttctggtaaacatccttttgacatctcgattcgatttctatgttgttgagctgagactttcttgctacattttgttatcactatgccaaagatcgtgatttttgacgatgattgaacatgtttctattaaagtgactatgcaaatgtttatactttacaactttttgtgaatccatcttattacttttgctttcgatttgtatatgtgtgaaaatgaaaatcaatagaagcttgtgttgatcgatctatggaggtagttagcttttttgttgattttgttggtctattggcgtcgttgttttccattagggagcttatagattattgattaatatgatattgtggagccacgagtatcattgataagatataaatttggccaaaaatgcttttgattgaaatatgcaacaccattaagagtgtttttgtgaaaaaggaatgctcgtactgcaagctatggtttcttctattgtatgacattgccattacttgctatctctattgattcattttaagcactttcctgataaagaatctgttttatccggttgattgctcttatttgtctgttactgctcaaaccttacactatacttccaatgtttctatgccacaggttaatctaaagaggtgaccgaaagaagaaaacttttacgttttgcatggagtaagaatgccagagttaagaagtggagcaaggagatcgagacgccttgacgagcagcctaaccctccgctagttgaacaagca

SEQ ID NO: 142310 - DNA, 608 bp, Arabidopsis thaliana landsberg
caaactcactcttcagcagaagtcatgtttatggaagattatttcagaggcagttatctgtaatcagtgaggcaaatgaagcttctgtaaccaatgtctgcaactcgtcaaactctgctactgaatcggccaaagttccctcccatgcgacgccctctgagaaaatgatggtgaagtacaagtcccagttaaaaataaacccgaggcatgacttcatgatggtcttcacttgcaaggtctgtgatacaagatctatgaagatggcgagccgagaatcatatgaaaacggcgttgtggtggtacgatgtgaagggtgtgataatctacatttgattgcagaccgtcgtggttggtttggagaaccaggaagcgtggaggacttccttgcttctcaaggggaagaattcaagaaaggatccatggattctcttaacctaactcctgaagatttagctggaggaaagatttctactgaataaggagtgatcttctttgcttttgctacttaaccattatggaacagaacttcaccttatgttccagtattataattgtttcttgtagttcactgtttggtaacatttaaatgcagaagatgtttaatacaa

SEQ ID NO: 142311 - DNA, 465 bp, Arabidopsis thaliana landsberg
tgccaagaacaatccggaactgacgttcacaaattctctttgaagtatcaactctgaaaccatatttcaaaatctgattacaatacaaaatggacaaaggtgtttaaagttttagcagtcaaaaaatgtgttttaaataagctatttttcctctggtatcttaaaacataggtgaggagcttatgccacttgtttacttgttttttttcttcccagctgatttcttctgaccactcctcttgaattttttgaacttggtggtggcaagtgcttctgcagcgctcttgccttccattttctttgccatcttgaccacacttgacatccctctcactgcaactgcccgttgctctggtctacggctcatcatcttgcgatcgagtggccaataggcatatggttcaagtttatctttcttcttaagatcgccacttgcctttttgcttgcatactctttgcctgtgt

SEQ ID NO: 142312 - DNA, 1593 bp, Arabidopsis thaliana landsberg
  unsure (1)..(1593): unsure at all n locations
nnnnnnnnnnnnnnnnnnncatcttcttcttccgatggatttgatgtcggtgagaaatccagctatgtggaaaagaacgctgagcttagaggggatattgatacaagcgacgtaattgaatcaactaaggactcaattgatctatcttcagaaaaggagaacgatttggatgtaattagttcgtctgggaatgatatggatgtaattgattcgggtcggaaccgggttgacccgtttcaggaagaatccacggtgaccaccgtgagcagcgatgatcaaggagacgacgactacgccggatcggtgccacagtttcgggagccacctaattccactgagtggtctctccttgggtttttggttgggctagtgatcaaagcaatcgaatttcaagtcagtttcatgacaagcttactcacatttcctccatggcttctccgtaactgttttctcttctttttcgatccctttagcacgattaggtttggcagacgctttttaatggcaagagtagcaggaataagtgatatgatctttggttatatgaatccttttaggttaaaagatacaaaacaaatgttgagtattgtgtgcaagtttggttggggtatgttttgggctgtttatgtaggcattgtgttgtttggcttgttggtttcgtcgcttatgattggtggttatgtgattaaccgtatagcggataaaccatttgaggtcaaggagaccttgaattttgattacaccaagaatagtccagaagcatatgtgcccatatcctcgtgtgctggtgttgaatgtgagggaagttgcaaggaaagtaatgaaatgtcgaagatcaggggtttgcgagttatccctcgagaccagaagttagatatcattctttcaatgacattacctgagtctgcgtacaataaaaatctcggcatgtttcaggtattggcatgagatatatatcttacactctaagtctaagcattgcagtttgctctggcttgaaatagtttctcatgtgtattcgtttttgtccaataaacatttacttatgttttgctcatccattttgatatgggatcatgtgtttattgaaggttcgggtggacttcttatctgtggatggtcaaacgattgctactataaggcgtccgtgcatgttaagattcagaagcgagcctattcgtcttgttcagacattcttcaaagtggttccgttagtgacaggatatgtctctgagatccaaaccttgagcttgaagttgaaaggctttgtagaaaaggacattcccactgcttgcttaaagataataatcgaacaacgggcagaatttcgacccggagcaggtattccagagctgtacgatgcatccctatcggttgaatccggtcttcccttcttcagaaaaattatatggaaatggcggaagactttgttcgtctggatcagcatgagtttgttcattacggaattgcttttcacgttggtttgttgcagacctcttatcatcccaagaacacaacctagagacagatcgccttcaaacccaactggagtctggaggtagattatgaatcaacagttactgtacatcatgt

SEQ ID NO: 142313 - DNA, 555 bp, Arabidopsis thaliana landsberg
gtccaggtcttaaagacgtcgtcggattttgtttctccaaaggtggatttcagtttgagaagattctcgacttcttcactgtggttggatctcgatgaagctagtggcattaaaaagagaaggcgaacgataaatagtagccggagcattgttctctacgtcggaaggattaacaaaaaaaaagccgtggcgtttgaaattttcgcattcaaatatattttatgttatttccttaaatggattttcttacattcatgcacaccaacacgtttgcatcagcatataattttgtttccaagttaattttttcttttttcgtcctaatttctttttttttgtttttatcatttatgtgttcttgttgtgaacattgaatgaaatatagtacctaaatgaagtaaaaactttaattataaaatggtcattgtaggcgaaacaacataagggccaatggttgtgttgggctatgtattagaatcgctagaaaaggcccgatttgacttatggaaggcaacgtgacggtaagaaatcaaaagtcaaaactgaagaaattat

SEQ ID NO: 142314 - DNA, 354 bp, Arabidopsis thaliana landsberg
aaaaataatggaaatcaaaacaggaacaatcttacatctttgagtttcctttttccttcaaaccaagagaccaatatgaaacttttctcttctcaagtatgtatctgaagaacaacatgtcaatagaagatacagaagctctttttctctctctttcttctctacaactctaactttatgaagcctttcgcactccgagttcttccaaacgtttccaagtggcttcacgttttgcttcggtttcagctgcttttgattcatcttccttgaactttgcgaggcattctttaaataactcagggtcaaggtcatgaaatatctttcgcacgtttagtgtcaagctatgaacagctt

SEQ ID NO: 142315 - DNA, 809 bp, Arabidopsis thaliana landsberg
gtttgtttttcgtttcttctccgattgttcagaggtaacttttctccgataattatacttgctcatgtccatataccttattttatcccttacatgttactaatttcgagttattggatcgttaggaattgcgaattaagataaagatgaggccagtgttcgtcggcaatttcgagtatgaaactcgccagtcggatctggaacggttgttcgacaagtatgggagagtcgaccgagtggacatgaaatctggtaaagtgtcttctaagttatacgccggtgaaattttgttgtttgtccgtctcgaattcgaattcgtcttctggttgataaatcatctttgcttaggtttagtttctgcttgacctaggattctggatacttagaactagttccagtttcatacatgatttgaaggtttatatatagtaccgttacatagaaaagattggttttatttttcccgaatgtgttaagtgtggtagggggtttatgcagtagagaggatggttgtattgagtgtttatttgttcgcaggaacttttcttcaaaggaacaagatttgccatcttcttcttcttcctgcaaaatcatttctacattttcatacctgcctttatcatcttgtgcctaccaatcttcactgactctagagaaactttggaatttgtctgtctattaccaatcatcgatgcttcagatggaagtctattgaatccatcattgccatgccttgccttccatatctgaactcctccactcagaatgtttaagcatgcctggcaaatcactcatatttttaaatataa

SEQ ID NO: 142316 - DNA, 335 bp, Arabidopsis thaliana landsberg
atcattagggttggaccaccaccaaaacctcctgagccaccaaagcctccagagcctgaaaaaccaaagactccaccagcacctgaaccaccaaagcatgtatgcaagccaccttactgcaacagttgtgatgttgtgtctgttactacctatgaaagtggaagcggctgcaccattctttgagtcatatatcgcgtaccatagccttcatgttaagtcctgtatttagccaatactaattcatcatgttctcatgcttttttgtttatttctttttctcaaatatgaatctctgttgtttgtccctcccctgtttataattagtcgcttctttg

SEQ ID NO: 142317 - DNA, 164 bp, Arabidopsis thaliana landsberg
ctcaattcttcttctcattctttcactttcaaatctccacttcacttcaaccaccggaaacaaccacattaacgacagaaaatccttagaaatcattatcggtggtggtaacgacaacaatcctccaccgtcaccttcaccggaaccagaaccagaacctgaga

SEQ ID NO: 142318 - DNA, 107 bp, Arabidopsis thaliana landsberg
aatcaacaaaacatcgtatagatcccgacaaaaagatagagagaggtctgatcgatcctctgatgctacaaaaagtattaactgaacaaacctaaacattttatgca

SEQ ID NO: 142319 - DNA, 423 bp, Arabidopsis thaliana landsberg
aaattgaacaacactgatcttacgaagaaaagccatgtataatatatatttatatcttttaacaaatcatgtttgtttcttacttaccaataatttctgaaacaaagatggataaaagatgatccaactgtgaacctggcgggcggcaaaatgcagacagtcacttcctcttgctgttcccaatactgaggagctcaaggctctggagggtaatgtcacgagcggctctcgttggtgcagcttttgtggctactgaggaggacgaaggagcgaactgggtcctcagagttgtagaagaccgatcattgtttgggatgagtctgcttaatcgattctctgtgaaatcagctgaggaagtggctcgaacacttgacccagcaattgcttttcttgacgaactcaggttcctagataaagagtttg

SEQ ID NO: 142320 - DNA, 1393 bp, Arabidopsis thaliana landsberg
caaagcctttctctttaaattcgttatcgttttttttattttatcaatttaatctttttatttgttttgttcttcctcgattcaacactcgatgctgtgacaaagcccagattttggccggaaagttttgtgtgtttccggcgaagaatgcgaagaaaccggaagaaatctgaacggaatctaagctaaaagttaaagtacgatgtcggtgtacgacgctgctttccttaatacagagcttcgaaaccgacatcgatttttgtctccggctatgggtcgtgatcggaatcttacttggatctctaattgtcatcgcactctttcttctctccctctgcttaacttctcgccggaaaaatcgaaagccgagagccgatttcgcctccgccgccatcgctacaccgccgatttcaaaggagattaaagagatcgttccggcgcagaatcagtctgttccggcggagatccaggtcgatatcgggaagatcgagcatcgagtggtgttttcagatcgagtgtcgagtggtgagagtagaggaacagcgagtgcaagtgaaacggcgtcgtattccggtagcgggaattgtgggccggaggtgtcgcatcttggatggggccgatggtatactctgagagagcttgaagcggccacgaatgggctttgtgaagagaatgtaatcggagaaggtggttacgggattgtgtatcgtggcattttaactgatggaaccaaagtcgccgtcaagaacttgcttaacaataggtacttccaaatcttcaattttgattctaaagattggtccttttactctgtttctcaatttgagttttaggtattctttgattttgtattggtttcattctaaatattcatcctttactcaacttctagataagggatttaggtattctcaaatttccgatttgattcctttactcgtttctagattggggttttaggaattaccagttgggggttttgcaatttgcgtaatcaaagaattttatttgttgtattgcttggtattgaagtttgtctctgtttctctacctcgtcatgtaatgtgcttagatccattaagtaaatgcttgtggatatttatgtagatggttaagagtgatcgtgatcagagtccttctcttatttaactgcattgcctgtgagttgtggtcctgaaggttgttgttattattgaattctatgtatgtatagattatgtcattggtctcatgtggtttttatgggtaacgtctttactaataatagcactatgcttctggattttgatctatgtgatctgtaacatttctagttggtgcgtctttgattgccaggggtcaagcagagaaggaattcacagtagaagtggcagtcattgggcgagtacgacac

SEQ ID NO: 142321 - DNA, 594 bp, Arabidopsis thaliana landsberg
tcaaggatcgacagtctggagacgatgaagcgatggctttagatgaaacattttgtaatgctttagaatatgggttggctcctacaggtggctggggattaggaatagacagactctctatgcttttgaccgactcactgaacatcaaggtcactctcttacctccaaatttacacttcagtgaataatctattcgttttgactgcactcatgatatggaatatgttgttacaggaggttcttttcttcccggcaatgaggccaccacaggaggagtcagcagccgctcaaggtacgaactaactggttatttagtaataatcgacaggtaacttttccctcacgattgcaatttaaaacctggttttttaatatcacagctcctttaacagaagagaagaaataaggagtctacacaagttttctgactaagcttagtcaattcgctattatgcactctgttctcaagttacttgtaattgcagaccatatttttcaaaaaaaaaataccaattaattattatcaaaaacctttgtaagacttttttgcaattagtagtgatttcacttatattgaagggccttttttaagaa

SEQ ID NO: 142322 - DNA, 309 bp, Arabidopsis thaliana landsberg
aagctcaatcaaaatgtataaatcttacacaatatcaataaaaagggcttcacacatgtcctatgaaaacctaatttagtgtaaaatatttgatatacaaaagtaaaagtttttttaatatattaattatatagaaagaaaaaagaaaaacaaatctaatctttcaccatcttcccaagatactctttatcagcatcagccaatcggttctgaaacattgtccattccattttgcatctatctctcactccttgccatggagctttcccattctctgactttccttgacttccaagtgaaggtatcact

SEQ ID NO: 142323 - DNA, 340 bp, Arabidopsis thaliana landsberg
ctgtgggcgtatttcacaagcactccatgtccatgataactatgctatggtttcaagcagtagagtcaacctctgttagacagaagaagctggagaagaagataaatggtgatcttagtttatatgaagaagcgtctatatgaaaatctcaagtaagtagccaactaagtgttttgatggattgttagacccatgattttgcagccatagattttttttcgtttttttttccattcaactatgtttttgattactataaagctaaatgctaatgtaagatcaaagctctagttacaattaaaggatctattaatcaagattcctcagggaagctctagtt

SEQ ID NO: 142324 - DNA, 324 bp, Arabidopsis thaliana landsberg
aaattgccaagtgaatgaatgatcattagaattaagacgcaaaacaacgtcctagatccaattttaacgccacacatacttcgctaagcaactacgtttttttctttcttgtctctttatgaactaaacaataacaaattcacattaactaattaataaactacttaaatatcctcaaacatacagggatattatcggtaattcagataatgtccactcctgtctcctacgtgaaaaacggcggcaaacaaaaccgcgagccagacatcggcgaggaatacaataatcaccggcgacggagacggcttcaatgggccttaagca

SEQ ID NO: 142325 - DNA, 416 bp, Arabidopsis thaliana landsberg
cttgttctacctaaagatgttcttaagcaaataatacagaagaaactctcttttgtgctactctgattcaacctgaacagttacatgataaatcccataagacttcctacagaaatttctaacaccagtaatgatctctttaggactagctccaggctctggtaagatatgacaggacaatacgattctccctactgttatctcccatacatggagatcataaacaatcttaactccatcgattcgcttaagtcctctttcgagcttctctatgtccatatcacgcggtacgcgttccatcagtattccaaatatgttcttgagcattggtagagtagcagcaagagcaaaagcagagaaaacaagagtgcaaatcaaatcaaccaaaacccattttggtttcacccaaatgatac

SEQ ID NO: 142326 - DNA, 814 bp, Arabidopsis thaliana landsberg
ctctaacaaccaactcaccggtgagattccggcggagctgttgaggctcaagcttaatcaattcaacgtctccgataacaaactctatggtaagattccttctggatttcagcaagatatttttcgacccagtttcttaggtaacccgaatctctgtgccccaaatttggatccgattagaccttgccgatccaaacgggaaacccggtacattctcccaatctcaatcctctgcatcgttgcactaaccggagctttggtttggctattcatcaaaaccaaaccgttattcaagagaaaaccgaaacggacgaacaaaataaccatcttccagcgggtcgggttcacggaggaagacatatacccgcaattaacagaagataacataattgggtcgggcgggtcgggtttggtttatagagtgaaactcaaatcaggtcaaacgcttgcggtgaagaaactctggggaggaacgggtcaaaaaccggaatctgaatccgtttttcgatccgaagtagagacgttgggtcgggtcagacatggaaacatcgtgaaacttcttatgtgctgcaacggcgaggagtttcggttcttagtgtacgagttcatggaaaacggcagcttaggtgacgttttgcattcggagaaagaacatcgtgccgtttctccacttgattggacgacacgattttcgatcgcggttggtgctgctcaaggactttcttatctacatcatgactctgttccgcctattgttcaccgtgacgtcaaaagcaataatatattgttggaccatgagatgaagccacgtgtc

SEQ ID NO: 142327 - DNA, 470 bp, Arabidopsis thaliana landsberg
ggagttgcataagataaagagtcgtcaatgggcaatcttcaaaacttgtgctgtgaaaggcgagggacttttcgagggattggactggtaagcacattctgaaaccgaaccattttcttggtcccattattgaaacactgaacccatttctttatgcatttcttctcaaatattcttctctcatttccatcttgatcttcaggttgagtaatacattgaagtcgggaagtggctaaaatcatcgtcatacaccaatctgtcacatttctcaagagtgtaactttgatcatttttacttattggtttgtttagtatcttttttttatcttagttcttcatcttaaagagttaatatcaatgacgtgttcacttaatattctctttttgttgttttgtttcattctgaaagaaaaaacccaacacagatttttgattgagacccataaggggtaatatcatcactttttaac

SEQ ID NO: 142328 - DNA, 317 bp, Arabidopsis thaliana landsberg
ccaaggaggacagaagggtggcgggggccaaggaggacagaagggtggcgggggccaaggaggacagaagggcggcggtggccaaggaggacagaagggcggcggtggccgcggccaaggaggaatgaagggcggcggtggcggcggccaaggaggacataagggcggcggaggtggtggtggccaaggaggacacaaaggcggtggaggtggtggcggccaaggaggacacaaaggcggtggaggtggtggacaaggaggcggtggacacaaaggcggcggtggtggccaaggaggacacaaaggcggtggaggag

SEQ ID NO: 142329 - DNA, 673 bp, Arabidopsis thaliana landsberg
attttatgtagacaatgttccgatcagagaagtcaaaggtacggcgtcgaagggcggtgacttcccggcgacgaatgtctttatattcaaccatatgggatggttccaaatgggcgactgatggaggcaagtacggtgtaaattacaaatatgccccttacgtctctcaattcactgatctgatcctccacggctgcgccgttgaccccaccgagaagtttccgagctgcaaagatgaagcggttcagaatctccggctagcatcggagataacggagtctcagaggaacaagatggagattttccgacagaaacacatgacttattcgtattgttacgatcatatgaggtacaaggtggttttgtcggagtgtgttgtgaatccggctgaggctaagcgtctcagggtctatgatccggtcacgttcggtgggattcctcacggccaccgtcgtgggaagcatcggagcaggagccgattagctcgaactgagtcgatatgaatcggtgtatattgttcggctagagggcatttttggcattttctgtcttgtataggaatactatgaattatggactgaataatggaatgacaccgctatattttgatttcctccattttatgaacattatcgttttaacataataataaaatttcatttttctataagta

SEQ ID NO: 142330 - DNA, 517 bp, Arabidopsis thaliana landsberg
gattagagtggagtggagctttgaattggatgatcattatccatgtcgattctacttaggccgtcgtcctctccttcactctgttcttctctcaagcttttccgattatcctctccggattctttaatcgacgcagctgtcctcaggaacaggacaaagccgtcgcagtcgtttcgaatggaggtcgtttcgagtaattccacgtgtctttctagtattagcgtcggtgaagattttccagcagaatatgagcagtggctaccggttccggatccagagagcaggagaagagctggcgttttgctacacccgacgtcgtttcgtggtcctcatggcattggtgatctcggagaagaagccttccggttcatcgattggcttcattctactggttgctccgtttggcaggtgaatttctctgtgattagtctcaagagtagacgaaattaatttaacagcaatgttgatgatatttcaggttcttcctcttgttcctccagacgaaggaggatctcct

SEQ ID NO: 142331 - DNA, 373 bp, Arabidopsis thaliana landsberg
ttcaatacagctattggatcactgaagaaaacacagccaaactctacctttgccaattcctctgtcctcgataagagctccaatcccagaaatgagtaaaaaaccaactccaatagttcggattgtactccatagctgttctttaaagtgagtcctttctgtggatatcgtatggatcggtgcactagcagttccaaggacaccatcttttgttggttttcctacgtttctaaatgccccaagacctccaaaagtctcttcctcccttgcaacaccagcaatacctaaaagaaaaacagcaaaacatttcccaatattatatagagaaatggctcagaagctgctaatacaaatatgaaagcaaggacacaat

SEQ ID NO: 142332 - DNA, 1144 bp, Arabidopsis thaliana landsberg
aaaataaaataaaaataaaaggaagaagaagaagaagaagaagaaaggattcgtcttccttcttccacaccctttctgacacctcatctcccctcccaccttctccgtcccgttccgtttctccatcaggtaattattaatctcctcttaatcatccctctaatctctttcccgtttcttcatctcccgattctcaattccatctacacagatcctcgattccgatccaacagttcgaattcagtttccgattctgatctgatcgaaccaatactcactgagatttgatcggcgattatggagtctatatctccggtatcgaatcagcttcttcagccgacgacgacgagctctaattccgatcgctctcgtcgtaagcgtaagaagaaatcatcgccatcatcggttgagaaatctccatctccgtcaatatcgttggagaaatggagatcggagaagcagcaacagatctactcaacgaagctagttcatgctttaagagagctacgaatcagccaacaaccatcttcatcatcatcttcttcgattccacgtggaggtagagccgtacgtgaagtcgccgatagagctttagcagttgcggcgagaggtaaaacgttatggagtcgagcgatactttcaaaagctgtaaaactcaaattcaggaaacacaaacgccagagaatctctaatccgacgacgacgacgttaaccaccgggagtatcaggtcaaagaaacagagagcgacggttttgaggcttaaggctaaaggtttgccagctgtacagaggaaagtgaaagtactgagccggttagttcccggttgccgtaaacaatcattaccggtggttttagaagaaaccactgattatatagctgccatggagatgcagattcgtactatgactgcgattctctccgccgttagttcttctcctccgccgccaacgccaggtcacgaagggggacaaacacacatgcttggttagttggccaaactgtccttttatttttttccaattttaaaaaccaaaaaaaaaactgtttttttttatcatattattattcttctcactgtattgtttgttgtttgaatattttactattcaactttatttaccatttcgtcatgtatatcctttt

SEQ ID NO: 142333 - DNA, 212 bp, Arabidopsis thaliana landsberg
cagaggtagaaggagtaagacaacaacttgtgatggctgtcagaaacctcaagaacggtaagaagttctagtatttgtatgtcgctgcgaatacaggtgttgtcagatcatagtagaaatcactatataacttgtactgttaatagaattcgtttctctcataaaacattattttaaacttatcaagaaatcaatattttccactgaaataa

SEQ ID NO: 142334 - DNA, 450 bp, Arabidopsis thaliana landsberg
tctcgatcggtgatctccaccggtgacggagtttgaagagtccaccgctggatcttcgccgttgtcggacttgacgttcgctgacccggaggagccgccgcagtggaacgagacgttctcgttggagaagtatccgtcgtacgagatcgattgggattcgattctagcttaggggcaaaataggaaattcagccgcttgcaatggagtttttgtgaaattgcatgactggcccaagagtaattaattaaatatggattagtgttaaatttcgtatgttaatatttgtattatggtttgtattagtctctctgtgtcggtccagcttgcggttttttgtcaggctcgaccatgccacagttttcattttaaggaatcctttttttcttttgtcttatgtaatttgtagcttcagtttcttcatctataatgcaattttattatgattatgt

SEQ ID NO: 142335 - DNA, 408 bp, Arabidopsis thaliana landsberg
tatacaacaaaaaaaaaagggaggaaaaaaatcatgaccggttgatttggttggattatggaatcatcttaaccatcgcctataatcgctagtagaagcaggtgatatctctccaccaccaccaagagactcagtacaacaagaagagtaatttgattgttgttccaatgcacccaattgtgagccacctatactcttgaaacttggactccttaaactctgaccatccatttgctgcggcagcggtggaaccggaaacgaaagccgttttctagctgaactgatacgttctttctcgggtgttgaaggccgttgccttggtgcactctgagaccggattctagccttagcagattccgtaatcgccatgtagtttggcaatgcagcatttgtagcagtagtagtagt

SEQ ID NO: 142336 - DNA, 432 bp, Arabidopsis thaliana landsberg
ctccttctcgatccatcatctctctctctttctctcttctctctgttcctagtccatcgatttaacctctttcagattctccttcttctttgactttttttgacaccgtagtctctttccccttccatcgatttagggtttccgattttcaaaatctcctttttatttgtttcctctccttgtgcaattcccgtctcgaatccatcttgacctgggggtctgatccgatctccctctaatcatatcgtgaagcgagattatgtttttgtgctgcgcttctgctttgatcgcttaggattatcaatcgtgttatgatggtgggtactcaaaatttaggtggttcgttgccgccgctgaattctcctaaaagctatggaattacgaagccgctctctcttgctgggccttcttcggcggatattaagcgtaatg

SEQ ID NO: 142337 - DNA, 237 bp, Arabidopsis thaliana landsberg
tataacttgtgttgtaaaaactcaatattacaggtcttgatacatatgaaactaaaaccaacaaacttataaccataggcccaacgagaaaagcccaatcgagaaacataatcctttaaggaagtaagctaaataattcccgacatgcaaagccacgtggaatgctaacaaataaagttgaagacgtggatagatgattcttcgtcaccgttcatcacaagatctgttcagcaacaa

SEQ ID NO: 142338 - DNA, 367 bp, Arabidopsis thaliana landsberg
agcagtattggtctacgggtcggccaccgtattgattattagattgctattattatatatacatgatcaatggaatatatacatatatagctatgtatttgtatatatgtagctatttactaatagatcttacatatatataaagcaagctaacatggaatcattaaaaggaggtctacgaagtatgacgtgaagttgaagacggcgataatattgaagatcaacaattcagtagatggttttcaggttcttctttgttttttttgtttcctttgggttcgttttagtggtagatcttttttttttaatgtttgattatgtgaggttaatttaagttgttatttactttattgagatttctttgatg

SEQ ID NO: 142339 - DNA, 456 bp, Arabidopsis thaliana landsberg
gtaccgttagagagttcgcagaaagctcgcagattaacattaaggtgagatgtgagtctcgctgcagccacaacattgtacagaggcaagaatgactctgtgcatcctagctctcccaaattcctgtacacgattacaaaacatgtttctttctggccaatgctatcataatctcaatatgataaaatcaaacatttttcaattcttatcaacgggaattagggatttcaattttagaaatggtgaaacctgggattagtgaaagaggcaaatcggcggcggggcaaagaggattgggaaggacggaggcggggaagcgttggcggcggagatcggagagacggagctctagctgtagcggagacgaaagagcgtgctgcactgcgccatgccattttttatctacttgtagcagaaagaaaacaacaaagcaaatcagatcaatctcgaagacgg

SEQ ID NO: 142340 - DNA, 401 bp, Arabidopsis thaliana landsberg
aacttcctctgtttctgattaccaaacgtcgtcaatacatttcttcaaattacgtttctttattctttcgttactctcaacaaattttgatatctgattggtgttgattccaagtaagaaagatcaaaactttaggtaaagtatggatatgggtttccatgaaaatgagcaaaatcaagaatttgcgaatctaatggagattggatctgggcattacgggtaaataacatcttttgagtttcttttgagttttgaagctaaagtttcatttttttttttttttgaattcgattatccttgtgtgtgtgcggttaggtgctcacattatagaagacgatgcacgattagagcaccatgttgtgatgagatttttgattgcagacattgccacaacgaagcta

SEQ ID NO: 142341 - DNA, 926 bp, Arabidopsis thaliana landsberg
gtggctacaggtttcagaggcaaaagaatgcccggtttgtaaaggggaggtatccgtgaaaacagtgactccaatctatggacgtgggatacagaaaagagaatctgaggaggtttcaaacaccaagatcccttcgagaccccaagcacgacgcacagagagtttgaggactacacttaacaggtcaggtcatataccaacggaaatatttagacatttgcaggataggcttgaaagggaatctagtacaggagaaagacgcgccagaccatctcttaaccggtttatgacttcgaggggagttagagcagaggagaaccagtctagtgaagcactggttgaaccttcatcagatgagattaacgatattgatctgatcttaaataatgcccctgaaaatgaagaggaaaacgaaaacctaagctcgtcacgtgctttggcaacccagagacgatgggcacagatgtatgggagggtgtcgtcgtttactttgagctctgctgaaagattagcggatacttatttgataacacatgcattggggaggaaccaagaacaaaacagcagtcctcctgttggtgttgaagacagggattcgttctcaagcatagtaggtgtgataaactcggagagtcaagttgaaacggcggctgagattaattcaatgttgactgtatcgacttcttcgtctgttagaagacatgagaacagttcaagggtctctgatgttgacagtgcagattctcgtccactgaggagaagaaggagattagcttagaagagaatggaggagaagaaagaggaagctagagtaataatctgtagtagaaagcagtgattttattggttttttcagtttgttttttatatgggattttggatttttgttgtttcagtttttatgctaaaagactaataaataaata

SEQ ID NO: 142342 - DNA, 209 bp, Arabidopsis thaliana landsberg
gggcttaaggtgaccacttgtggtgacaaataaagtgcattccagaagaagaagaagctgggggatctagtactttcattcccatttgattttccttggacatattaaagctttcagaaatcagacctcaataacatttggtttatcaatatttctctattcgtgatattttgtatgcttttaagttgcatgatacactgaactactct

SEQ ID NO: 142343 - DNA, 843 bp, Arabidopsis thaliana landsberg
tccaagacccgaattggatggattgggatcgggataatgggatcagcgatggtttctcatatcctcgccgcaggctattctgtcacagtttacgctcgcgatcttcgtaaaacaaaagatctgcaaaccaaaggagctcgcatagccaatagccccaaagagttagcggagatgagcgacgttgtgttcacgattgttggaaacttcaacgatgtccgatcgttgcttctcggtgacgatggtgtactctctggtcttacgcccggtggagtaacagtggacatgactagtagcaaaccaggattggcgcgtgaaatacacgcagaagcgaggcgtaggaattgttgggcggtggatgcgccggtatcaggtggagacgctggagcacgagaggggacgttagggattttcgccggcggagattcagagattgtggagtggttgtccccggtgatgaagaatatagggactgttacttatatgggagaagcagggagtgggcaaagctgcaagatagggaatcagattgctggtgcgagcaacctggttggacttgctgaagggatagtgttcgctgagaaagcgggtttagatacagtgaaatggctcgaggcggtgaaggatggtgcagctggatcggcggttatgcggctgtttggggagatgatggtgaagagggattatagggcgactggctttgcggagtatatggtgaaagatttgggaatggctgcagaggcggcgatgcctggtgctgctctgagcaagcagttgttcactggaatggtggctaatggagatggcaagttaggtattcaaggcgtcgtctctgttattagaaga

SEQ ID NO: 142344 - DNA, 360 bp, Arabidopsis thaliana landsberg
cattagtcgaaagcaattgaactctgattcttcaaagagaagctgactgtgaatcgtgttagcttggttaagaacgagaacgaagggacaaagacattctcttgctgttcgaggtaacatctttgtaacggtttctctttgtcctgaggattggtttcgggttgaattgtgttcctggtaaacttatagaaaggcagagatatattcttatagttctcagttaaagtaaaagaagaagagagaaagatgttttgagtttctttgttacgcatacagaaaaagtttggttagtgtataagttatgttctcatttgtaacttttgtaaacttatgattgttaaatcaattttgatattttcc

SEQ ID NO: 142345 - DNA, 490 bp, Arabidopsis thaliana landsberg
aacacatgaatcattaacttatacttaacaaaataatgaaattgttaattatgataacaaaggcatttgctaaatatatgccttggcttggctttaacaactgcaccaaaactaatcagaaatgttcttcttctataggtgaaaacctattctgctactatctctcttttctcctacataaaaatatatatatatcttcaacaagaatgtaatcttccctcttcacaagctactagatctcaacttcatgaatcgctgctgctgtaaccttctgattctctgtcgtaattgtttgctgcattattagcaggtacatcatcatcttcagagctctcactcatttctgcgtcatcttctccttcgacccgcccaacccccacaacttcttcttcctcgtcttcctctattgccacatttaggttactattccaatctaacccccacttgtttctctgactataatccacaaactgaccaccaccatcttcat

SEQ ID NO: 142346 - DNA, 1268 bp, Arabidopsis thaliana landsberg
ggtctaggggtgcaggctgcaaattcaggtcttatggaaaagactagcttgtactctcacagcggcatgtcgtgagtcatgcgggttattgaggtacgtcacagtagttatcgtaggatgagctctgttgagtatatttaacagctggtttccaaatgaatgtcccatgatatgcgagcatcaattctcctcacaacagggaatctcatactggtttcatagtgtcaagaaacataggatggagctaagtttgaaatttgatggttgtccataaacagtactacttaagaggtcaatgtttctgctgtgttataacttgccttgtgtgatttctgctgcataccgcctaactagtgcatatatatgattggcaggtcctgcactgcaaagcaactccgcttgaaacttattgaattagacttttctctctttgattaagttttgtaaggaataaaactaacttatgttgttgctcgtaatcttgtcttgtcttagtcaaactctttggtgagcgggatggagaagtcggaagacagagctaggtcagaatctttccagaagtcacagataaggcatgtgtgttatgcaaagtcatgatttctttatgttattcttgttgtgtatttggtttcattggtgcttttatagcacaagcaggttaagcttaaagtccactgtgtgaacgtcctctaggctattgacgtgaagaaaacggggtatttcaactcaaattgttgcgttggacagacgagagagtccagaagcttttggtaagtgaatttttaatatggaaaaaagaaaaaagtaaaaaaaaagttaaaaaatgacatttgaaaaattcaaaaaaaaaaaaagaattaagttaaaaaaaaaaaggtaaccaaaagagaaaagaaggtataggcagagaaagcattggtggtggtattttgagtgagcttggatgatgaccaaagctcaatatgcgtcatcaggatcataacttgaagattgaaatgatttatataatgtgtggatgatgaatgcttttttttatttttattattcggctgtttcagactctggtcctcttagggctttaacttgaatccgtttgtgtttttttaattttattttgcggtttatgtatataagatctatgcctccttgtctctcgtttttggagttatgctgtcaaaactaagtgagagtagttgcaatgaaaggctttaaaataaaggtttctgatctatatcaaagtcaaaacactgtttctttttttcttatga

SEQ ID NO: 142347 - DNA, 418 bp, Arabidopsis thaliana landsberg
ttagttcaattatgattttaaattacccgctaatcaagttgattatgcctttaataagacaaattcaatatcattaacacacaaaagaagaaagaaaaacatttcaattttgcattaaaaagcagaagagaaaactcaaatgttaaataaaaacaatgcatgaagattatgaatgaaacgagtatttggagattcattagctgtatcaaaaactcaagcaatgtttaatctgactcatgttaaaatctgatcatcatgctttattactactacccaataaagtcactagctcaactttcttcatctttgaaattcctttgagtcctcttgattttgctatggctctaagttctaccaacttcagtgcactcaaatcttcgtctttcgcagtctcttcctcggtagtcggtattgagag

SEQ ID NO: 142348 - DNA, 291 bp, Arabidopsis thaliana landsberg
aatgttcgtctcgtctatttgctctctctcgacgactgttaattaactccggcgattgatcactccgtcttctttgtaacacagccggagaaaaatcgaaagtttcgtttttttcttctccttcgtagctaattcgccgtcgattttataattcggcagccatgagctcggttttgcaggtagagtaaaagattaatgttttctggggagtaaactcgcaagacccgttgtggagctaatctgggtataagaataaagggtttttatagggtttttcgaagtcacttgcta

SEQ ID NO: 142349 - DNA, 304 bp, Arabidopsis thaliana landsberg
aaagaaaatatccatttagagagaactacaacataacatatgaccaaagcataggattgaaacaaataaaagaaaaggaaactagtctacgcctatttcttgcttcatttaagagaattgtaatagagatacaaggagactacaactgcagcttcattttattcataatactctgatttatatatcaatacttgttattttaataatgcttggtgactgtagatgattatggccgtctctacctttcaattcaaggcttctcttcatctgaattagaacgaggtccaggcaccgaatccacgaa

SEQ ID NO: 142350 - DNA, 381 bp, Arabidopsis thaliana landsberg
  unsure (1)..(381): unsure at all n locations
gagtcctaagcttaaaaaccaggacgaacngaatggaatcaagaactatagatataatacttcacaaaaaccaaggaaagaaattgacacagaagaagaggaaaaagacatttgatctgtctgagaaacttgattagattggtttatgttctaatctaatctgatttgatttttttttattttgtctacgattcttgagttacgaaatgttcatcatttgttacttcttgttgtcgggattgagtagttgcatttttttagttgtggagctgtgacaaagaggccagctagtgtgtggaatgtggatcatcatcctttggttgattccttgtagaatcctttttgtaaacatttaaactataataaagtgttatgattaag

SEQ ID NO: 142351 - DNA, 326 bp, Arabidopsis thaliana landsberg
gagatgatgagacagagagctgcagaagtcgctggaacctcgggttgattaatttttgtaaatactaatttcatttaggatctaagcagaagtggaaatgtaatcttcttccgaaggttaagaagataaaagaaactggtgtttatgatctccacttgaagaaggtgaagaaaaagtgaataacagcagctagtgaagacatgaaacagccatataacgatttaatttagatggattcctatttaacagtcgcaagtcgtggagtgatgatgatgaataacttgagtgacttgaagagtttcttagcttaagtgccaattgaagca

SEQ ID NO: 142352 - DNA, 564 bp, Arabidopsis thaliana landsberg
gagtatcttagcccgcgtctcgagattgtcttatcgatctctctccttagtctgcaagcgcttccactcgctccttacttcaggagagatttaccggttccggtcactatcaggttataccgagaattgtctctatgtgtgcttacgtttctctcatactggccgtagccatcgctggttcatgcttcgtgagaagaacaagtcaagtgggtatgttttggcaccaatcccaatttcccattctccttctttgcacgcgtcgagtatcgtggcggttggttctaaaatctacaaaattggcggagtcatggatggatctagtgtttcaatcctagactgctggtctcacaggtggctcgaagctccaagcatgcagatggaacgggaccgcccatcagccaatttaattgatggaaagatatacgtaacaggaggctgtcacagaggctcctacaatccatcaaagtggatggaggttttcgatctaaaaaccgaaacttgggagcctgtattgtgccgttcagatagattgacgttcgagagttatcatgaacgaactaataa

SEQ ID NO: 142353 - DNA, 360 bp, Arabidopsis thaliana landsberg
gggaaattgtgagatcggagcttccgtgtttctcctcaagtcgcctccgatgaattttctacggagggatgtttccgggaacttctcgaattcaaacaacaactcagatatctaatgtaaataatcagctgaaacagaacaatccagaatctttcattattgtttgctgattttaataatttatcagcattatgcattaaactaattcatataataacattattgcaaataaagcccaaatcctttcattttgttacaatatttaccgtatagttttaatataaataataaacccaatttgttgttgcatccatcatcattaacgatttcacatcaaaagtcctaaattcttaaagtctt

SEQ ID NO: 142354 - DNA, 374 bp, Arabidopsis thaliana landsberg
tgtaatttaaaactggtattcaggtactgaacaagtctgctacataaaaagattctagtttaaacaaaccgactctggttagctctacatcccaaaactctaaagtctgctgcagaagattctaattatactaggagttaagaaacttcaaacacactaaaacccgtagagctctaagtaaagatgttgatgcaagcttgagctaaatgtaaccttctaagatagattctgatacctctcccttggtaaattcccaaacatgataataaaagcatccaggagacattcatctcgataataacgccatcttcactcttcaacccgctttcagtcaatgagagttcatcttcttcaaaatcgtccaccatttcagc

SEQ ID NO: 142355 - DNA, 293 bp, Arabidopsis thaliana landsberg
ggaggtaaaagctcgtcgaagaggagaccaataaggccgagtttcgacgctgcggctgttaatgagtttattactttgcttcatggctcggatccagtgaaagtggagcttaatcgactagagaatgaagttagaggtctgataatgctgttcgatttttttattttttgtcgattcggtttctgattattggttgttggggggatgtagataaggatcgggagttaggagaagcaaacgctgagatcaaagcgcttaggttgtctgaaagacaaagagagaaagctgttgaa

SEQ ID NO: 142356 - DNA, 390 bp, Arabidopsis thaliana landsberg
atatccatgaaattggtattttatcaatgctgaaattagtatctatgctacgttacattgtctaacaacgctgatacttcaaaattgaataccaagtaaactaaaataaaaacataaataaatgaaaaaaaaaaaacagaaacctcagattggatgtcttggagtttggtgaccgactgtctactttagactcataattgatctaaaattgtgtatataagttcaagaagagacgtataaaatcataaattaatatcgaattgtttagcaaatatggtcaccaaaatttaaaatgataagagttaggttttgatataaccgatatgtatgtttcattcatggggataatgtcggctaatatgtcagatgacatgttcattgatccatcct

SEQ ID NO: 142357 - DNA, 371 bp, Arabidopsis thaliana landsberg
ctggagttgtccaactaagacaaaaagtgcaatacatgaggcgtcgaggtgcaaaggtgatgctggagggatggataacaagagaggggattcattgtgattgctgcagtaaaatacttacagtctccaggtttgagattcatgctgggagcaagtcatgtcagcctttccaaaatatttatctggaatctggcgcttctcttcttcaatgccaagtcagagcgtggaatatgcagaaagatgctacgaatcttgctctccatcaagtggacactgacggggatgatccaaatgatgatgcttgtggtatatgcggtgatggtggagatttgatttgctgtgatggttgtccatcaacatatcatcaaaac

SEQ ID NO: 142358 - DNA, 169 bp, Arabidopsis thaliana landsberg
tgacggatacgtcgccgaagaaaaccggcggttgtggagttacttcatgttcagtaaccgtcgccgataaatctccgtcaccggaaacatccgacatctccgatctgattcctttgttggatatatatacaaaaagcacttccaaatccaaatgccagagagagagatt

SEQ ID NO: 142359 - DNA, 481 bp, Arabidopsis thaliana landsberg
caacaaattcacattcctctctgtttttttgttttcgattctccttcttcaatggcttccatgtccaccgtcttccccaaaccaacctctttcatctctcaacctctaacaaaatctcacaaatccgattccgtaaccacatccatttcattcccttcgaattcgaaaactcgtagcttaagaaccatctctgtacgagctggcttaatcgagccagatggtgggaaacttgtggatcttgttgtaccggaaccgagacggcgagagaagaaacacgaagcggcggatttgccgagagtgagattgacggcgattgatttgcaatggatgcatgtgttgagtgaaggttgggctagtcctcttcgtgggtttatgagggaatctgagttcctccaaactcttcatttcaatttgttgaatctcgatgatgggtctgttggtaatatgtctgtgcctattgttcttgcgattgatgatcaac

SEQ ID NO: 142360 - DNA, 607 bp, Arabidopsis thaliana landsberg; identical to SEQ ID NO: 51825

SEQ ID NO: 142361 - DNA, 196 bp, Arabidopsis thaliana landsberg
tcttgctcaagattagagaatgttgtgtcaccgatctacaagtattagctactggataatcgttatatagcaacaaaatgaaaagtcagtcaaccttgaagcaacgcggaaataatgtagatcttgtcacgtctcataatgcggagaagaaaatttaatattggtatgagtataaatgtacttaaatccaatagtc

SEQ ID NO: 142362 - DNA, 460 bp, Arabidopsis thaliana landsberg
gcaggttataagctgtgtagtattttttgaggtttatagacactatgagaagaggtagagggaaagggaagaagcagaatgcatctgctcgggaagatcgtggaagcggtgatgaagaaaagattccagcttacaggagaagaggaagaccacagaagccgatgaaagatgatttcgaagaggaagaagaagaagatgataaagagatggtagagaaaatggaagtagaagatgaagatgaagagattgatgatggttcagtaacaagtaaagatttgaagaaggagagaaagaggaagatgtctaatggaagcaatactgatctgactgaagaagagaatggtttaggatcgaaaccaaacaccgatgattccacgagatcgacatctattgggtttagacaaaatggaagccggaggaaaagcaagccgagacgagctgctgaagctgtcgtggaatg

SEQ ID NO: 142363 - DNA, 486 bp, Arabidopsis thaliana landsberg
gagccggagtcgtcgttcccaccaaaatctcaaccacatcaacatcccacaagaaagaatccaatacatgagaagtgtcatgcgtgacagagttacgccatggaggaagtccaccgttggctcgaagcaagtttccgtatctagtcttgagcttcattttggaaccttctctcaccggttcccactctacggaggagtcgagtcgagccggtttagacaagaccactttacgtccagtggctccgagcaagaaccgctcattcgaagcggtgagatagttaccgtagcagctccttaaacggatcacttcaaaggaaccacgaaccggctcgacaatccatctagctctcttgtcggaaccattcctgtcttgagtcaccgtttcctcgtcctcatccgctgttagatacttatcatggacgttacgcatccttacggctttagcttgattgaaaaaatccatcttctgatactatgcgaatacta

SEQ ID NO: 142364 - DNA, 779 bp, Arabidopsis thaliana landsberg
aaagtaggcgtaatggcagaagatggatcatcgctgcagttggagaaaggcgaaaatgaaaaaatggatttggccgagacacttgaaccaagggatgatatattcaggctcagtcttgatgacacacttgagcaagaaaggatgacgtttcatttaaagatgtctcaagataagcaagaaagtctaaggcagacctttaaacaaggtgatgctgaaaaagattcagacgtattttcagaaggccatgaatttccaagtaaaatggcagaactagatagtgacactgaagaggagatagtggaagaacaattagaacatttgcagaaagagaatgagaagttaagtctaacctttgaacaacatgatcacatctacagcacaacggagccttctgaaattgtgggtttgcgtcatgcgttataccaaacgcaaaattcacctctacgatcacctctcacttcaccaattcatactcccattggttctccgctgcattacctgatggcttcacaaatacgttctccaatagcttcaacaatgcatagtcacatagtttcaccgcttcgttctcccatcaactcctctggatcactctctgatgtattgttcttcagcaagaaaacttgatggcacgaaaacagataagcattgttccaagctttccccacatacttgaagactttacctgcgatacaaaaacagtgtgtacattgtttcaattttgtttttgagtgattgtaaggttttctacagataataaatcaattcattgagtatac

SEQ ID NO: 142365 - DNA, 341 bp, Arabidopsis thaliana landsberg
gaacagtcttaaactgtccacttccgtccttagccaccacaaaggttgctctgatcctagcaccaccgtcattactgccacgtccagccttagccatgagcttcctgtcagcacctgaaacccatgttgggattccggtctcgtcaatgtcttcaagaagacggcgagcaggaccatctggatcggccacgggagaatcatcagcaacaggaggggttcctttgttgacgggagctgctcctttgtctgaaggagcgaagattccgcctgtcatgttcttgaagtcctcgaccttcaagttaagcttggccatggcgctaacgacagtgtggaagatgtca

SEQ ID NO: 142366 - DNA, 442 bp, Arabidopsis thaliana landsberg
aagccgtgaagtttgaggattttgtgatcgcgtctttagtagccatcaggaaggctttgacaagcttgcttggatcatcacttttgactgggtcgagtgttttcgcgcacgaaccttggtctgtggttgactggcaaattgtctgaaccgctttctgatgagagtttatgggaccattactgtcgccattggcgccgcctcctttattaacgaacgtgataactcctatggcaacacccaccactaggaggagtgatgccacagataccacaacctttcctactgccattttttctaactttttttttttgttgttatatatttttcccctttttgattttacctttttttttgctttttatgttttttctctccctccggttttattcgggaggtaaatatgagagggaggggattttttttattgaaacagagcccggtg

SEQ ID NO: 142367 - DNA, 1678 bp, Arabidopsis thaliana landsberg
aaggtcaattcaagaatctgactttgatcagtcgtaagccgatgcaggtctgggtcgattacgacggacgtacaaataaaatcgatgtgacgatggctccgttcatcgaagataaacctacaaggccgcttgttacggctgttagagatctttcttcggttctactccaagatatgtatgtgggtttctcctctgcgacaggctctgttctgtcggaacattatattctcgggtggagtttcggtttgaacgaaaaggctccacctttagctttatcgagactcccgaagcttcctcgcttcgagcccaagagaatctctgagttctacaagatcggaatgcctttgatttctcagtttttttttttctcgtttattttcctcgtttgttacatcgtgaggaggaggaggaagtttgcggaggagctcgaggaatgggaaaaagagttcgggaagaatcggttcaggttcaaggatttgtactacgcgaccaaagggtttaaggagaagggacttcttggaactggtgggttcgggagtgtttacaaaggtgtgatgcctggtacgaagttggagatcgctgttaaaagagtttcgcatgagtctcgtcaagggatgaaagagtttgtggcggagattgtgagtattggtcggatgagtcataggaatttagttcctctcttgggttattgtcgtaggagaggtgagcttcttttggtgtatgattacatgcctaatggaagcttagacaagtacttgtacaacactccggaggtaacacttaattggaaacagaggattaaggttattctaggtgttgcctctggcttgttctatctccatgaggaatgggaacaagtggtgattcaccgggatgtcaaagctagcaatgtcttgttggacagagagctcaatgggagacttggggatttcggtttggctcggttgtatgatcacggatcggatcctcagaccacgcatgttgttggaacattgggatacttagctcctgaacatactaggacaggacgtgccacgatggctaccgatgtttttgcgtttggggcgttcttactcgaagtcgcatgcggtagacgtcctatcgagttccagcaagagaccgatgagacgttcttgctcgtggattgggttttcgggttgtggaacaagggagacatcttggctgctaaagatccgaatatgggttcggaatgtgatgaaaaagaggtggaaatggttttgaagctaggtctcttgtgctctcactatgacccaagggctagaccaagtatgagacaagtgctacattatctaagaggagatgcaaagttaccagaattgtctccgttggacttgtccggaagtgggatgatgtttggggttcatgacggatttagtgaattaggaatgtcgtattcctcctccgattcaaagggtttaccggtggatcttccatcgctgattctcaactttctggcgggagatgaatagaatgttttgaagttatataaagtatatgttatttaatggcgatagttatgttttaaatatatttgaacctttttgtgtgttttgcatttcatctgtagagactatttgggcgagatatgggaatgggactatgtatatatacttcagcatatgttgaaaattactgtctaaagaatattatggccaca

SEQ ID NO: 142368 - DNA, 133 bp, Arabidopsis thaliana landsberg
agggttttgggagtgaagatgaagaaagagagaggcgatcgaagaagcgcgacagaagaagaaggcgatgagattgatgcggaaaatggcatcgttcgttatgcatcaacacgctcactttttttttcctctg

SEQ ID NO: 142369 - DNA, 365 bp, Arabidopsis thaliana landsberg
gacaattttgtctcaaatccttagaatcaaaaagactagtttgctgttgcataaactaggcaatgcataaatttaaggtttatatctgcttctctttgtaattgtatgctgttcgttgtttataatatgaattttaaatctgaaaattcatcttcccttgttaatgcagtggaaaactgctacagttgatagagataaggttctgacagtccagctgagatgctgagtatcaccatttgaagactaacatgtgtacttgagttgtctctcatgtctagaccatttgtgagaagggagtttttgtttgcaccaatacccaccaatctctatatttgtaagaagtattatgctcaattaaggaaaat

SEQ ID NO: 142370 - DNA, 646 bp, Arabidopsis thaliana landsberg
tacacgtaactattattatactttcagactggttgttttcaatcatgtcatcatagtccttttaaaagattcccattattctatcacaaaacacccaaccatgttcctatggtacattatcgagcacgttcctatggattatggaacattatcgaccacgtcttgaacaaacttctttagagcacagttcgaagatccaccgtccaccaacgccacgtggagcttatccttcatctccatcaccctcttcctcatcttgctatcctgctccatcgcacacttgatccctctctctatctcatcagccgtcacaatctccggctcctccaccagaaaatctgtacggtactccttctttacctccgccgctaaaccaagctcatccaccatatgaaacgcgttaaactgttgctcagcgtagataggccacgccgccatcggaacaccgaaccaaagactctcgagaattgagttccatccacaatgtgtcacgaacgctcctatagcaggactattcaacacatctacttgtggtgcccagcttatgatcttccctatctccaccgtccgatctaaaaacccttttggaagaatctcctctaagttcgtgaattctccgggaggaggattagacttgtttccaaca

SEQ ID NO: 142371 - DNA, 142 bp, Arabidopsis thaliana landsberg
aagattaaatctcatacttaaaattaatcaagaactttggcttagcaacaaccatcctagaatctaacataagtctaacacataacaaaccgtacccctctaacaatcacagagagactcgttaactttaagcatatcaaaa

SEQ ID NO: 142372 - DNA, 390 bp, Arabidopsis thaliana landsberg
cttcaaacttcaaacacttgagaaaaaagcttttgatttcacatcttaatctaacaagtcaaacacttttcaaaccacaaaattcgtcaaagctctgaaacaaataaacattttttaatttctccctttttaatggaaatctcttctttcccatttccatacctacaagacgacgagtgttcccatttccttggtctatttcaagacatggactcttctccttctgctttcggattagaaggttttaatagcaacgacaataatactaatcaaaagaaacgcccaagaaaagacgactaaggcggtggtggtggcggcggaggaacagaagttctaggagctgttaatggtaataataaggctgcttttggagatatactcgcgacgctt

SEQ ID NO: 142373 - DNA, 629 bp, Arabidopsis thaliana landsberg
ttcaagataaagatcaactcttaaactgtaatataaagcatatgacaaatagtttgctggaaatcaaaacagtatagttaaacaacatgcatcatcctgctaaatagaagaagcattttaaatccacagtttggttttgttttgtttgttttttcacctccaagaggaaccaccaagctttatcacttcttctgaacttgaatctttccttgttccaaatccttcatcccttttctgactacttgcgtctccatacaaatcttttagctttgcgagattgctgttcactgtcaccgccgatttctctttgttgctactatctcttttaggagtcggttcacgctcaatctgcacactcctgctcctacttctgcttctgctcctgcttctccggtcatgtctacttctgtcgtcctcataatcattgcgcctgcttctactatcatagtcgcgccttgatctcctatcattaccataatccctctccctttctctgtatctatccctccccctctctctttcgcggtctttctccctctctctttcccgttgtctatctgagtctctgtcagaataatagtctcggctctggcttctacgtggggaccgctgttgtacttcatcgcctc

SEQ ID NO: 142374 - DNA, 452 bp, Arabidopsis thaliana landsberg
ttctcatcccatgtccttcttgatatgtttgtaccatggctttattttaaactacaatcacactccaattacactcctcgacttcctatgatttcattaaattattcagtaaaacaaaatcgttaaaaaataaaataaaaacagatcctagtaaacccgaattctggacttgaagctgagagttacccattaaattcaaaaattcaaccacaagaccatcttatttcactgacatatgtatatgtgatttcttacaaataatatatagaccaatatttaggtaaaattattattcaaaattgagaaaactaatttgccaattactttccgatttatgtccagttaactggatcggtaactaggcctctcttttttactatctaactatatatattactatattagaaatatccgctagtagcttcatctgaccgccgatcacctcacgctgc

SEQ ID NO: 142375 - DNA, 277 bp, Arabidopsis thaliana landsberg
aatgaattgggcaaaattccgtgaaactgggagcccagaagacaccgacatgtcttctactccgatctcgtccgacacgacggcggtgtccaaagtgatcgatccaaattacgtattaatggttgctgatttcttcaaagctatttccccagacgaatcttgcaacgatttcagctctttcgactctttctccgtcttatttcaaaacaataccagagctctctccatcgcacgcggccgtgtctcgtgctccgtcaccgtcacgccaggcatatcc

SEQ ID NO: 142376 - DNA, 1223 bp, Arabidopsis thaliana landsberg
cctaaatctctctcacccaatttgtgtttcttctttctgctaaaaggttataatttttgtttcttggtttggtgagaatcttcaagaaactgaaacaaagaaaatggattctagttgcatagacgagataagttcctccacttcagaatctttctccgccaccaccgccaagaagctctctcctcctcccgcggcggcgttacgcctctaccggatgggaagcggcgggagcagcgtcgtgttggatcccgagaacggcctagagacggagtcacgaaagctaccatcttcaaaatacaaaggtgttgttcctcagcctaacggaagatggggagctcagatctacgagaagcaccaacgagtatggctcgggactttcaacgagcaagaagaagctgctcgttcctacgacatcgcagcttgtagattccgtggccgcgacgccgtcgtcaacttcaagaacgttctggaagacggcgatttagcttttcttgaagctcactcaaaggccgagatcgtcgacatgttgagaaaacacacttacgccgacgagcttgaacagaacaataaacggcagttgtttctctccgtcgacgctaacggaaaacgtaacggatcgagtactactcaaaacgacaaagttttaaagacgcgtgaagttcttttcgagaaggctgttacacctagcgacgttgggaagctaaaccgtctcgtgatacctaaacaacacgccgagaaacactttccgttaccgtcaccgtcaccggcagtgactaaaggagttttgatcaacttcgaagacgttaacggtaaagtgtggaggttccgttactcatactggaacagtagtcaaagttacgtgttgaccaagggatggagtcgattcgtcaaggagaagaatcttcgagccggtgatgttgttactttcgagagatcgaccggactagagcggcagttatatattgattggaaagttcggtctggtccgagagaaaacccggttcaggtggtggttcggcttttcggagttgatatctttaatgtgaccaccgtgaagccaaacgacgtcgtggccgtttgcggtggaaagagatctcgagatgttgatgatatgtttgcgttacggtgttccaagaagcaggcgataatcaatgctttgtgacatttttccttttccgattttttgctttcgattttttttttttttttttttggcaagttgt

SEQ ID NO: 142377 - DNA, 398 bp, Arabidopsis thaliana landsberg
tgagtatgtcttatctctcttctgctcctatttcggtaagccacctaacattcattctcgtctctcttaagactctctctgatcttcaaagcagagaagcttatattgtgtgagatttttgcagagtgaattgttggtggagggaacggtggtgaggactgggaggaatctgtcggtggtgactgttgagttcaagatcaaggagaccatgaaagtcacttacctatctcgtgctactttttaccattctcccatctctaagctttaaagctttttcacatgctcagtgatcttttgctgattctatttacattcttctgttcaataaaacaagattctgtatacagatattactgtctttaatcagtttatacaacactactacattatcatccacc

SEQ ID NO: 142378 - DNA, 374 bp, Arabidopsis thaliana landsberg
ttaaagcagagaaaaaacaaagacaaataatctccatttgctttcttctccatcttcttctaattttcttcaagttttatcaatggctggtgttactggaatcttaaagcttgaagcttggagcatcttgtgaagaagattaactagtttcttgtatttttcttttctggggttttgagtttttttttctcttccttattaccggaagtaatggcatgtcggagtatgatcgcttttagtttagatcctgaaagaaaacaaagtggaggacttaggacaaaacaagctggaagaggatcttgccgtggaagttagtttttgttcaaatccattttcctcttaaagaatgtaataatgggtttttattgattgct

SEQ ID NO: 142379 - DNA, 601 bp, Arabidopsis thaliana landsberg
atggacttatattgaatttgaatgtgtaattcaaggaatgggagggggtcatctcatttttggatctgcaacgaatgaattcaagagataagagaattaaggatacccaccaagaagactaatccaatccataaagatgtaccagaaaatacaacatttttgttactcgaccaaccatcaggagacgcaaatacaacgggtacactaatcagtaagattgatgaagtaataattaatgcaaaaactgccaattggaaagcaatagtcatgtttttaatcctccaagctattaacaaaagaatatacaccatttaatcctcttacccactaaaaatttttaataaataaagggattttatcatgaatccgttgattcgagatgacttagttccaatttctttttaccacttttagtctattcggacatgaagttaaaggttcttttttacttcacaaacgggtatactggatcgcgtatctcatttatttatatagccagatttatagacctattaaagaaagtcacaccctatatctttctctacatagtgatcgtattaactcatagggctatgttctatttggcgaaaaaaaaataaaa

SEQ ID NO: 142380 - DNA, 379 bp, Arabidopsis thaliana landsberg
gaaagatcatctctaagctgtgttcattcaattatctgtggagtgagaacacttagtcgtgaacctctggtagaactcttgatgatcttgtatacttgagatagtggattgctagtctctgttctcgccgagacataggatcaatcactgaatcacgtgggtgtcattcttctccgtcttcgttccaagtgtttgattgtatggttttctcgagtgtgagtctcttgatcgttagtagagagagtccagcttcgattccggctggaagatttatagaagattcacaacatagactaagggttttgttcaccgtgagggtcttataaactctttgaacagttcaaccttatggttttttgctggattttcaacggaattg

SEQ ID NO: 142381 - DNA, 389 bp, Arabidopsis thaliana landsberg
ctccgttcgaaatcgcatccatcgccgtcgtcgtcggtgacgaaaaccaccgcgtaaaaccgtttcctaaatcagatgttcaatcttagaagtatctcttagaagctctcttgtatgaaaaaatgggactgttaagcataatccggaagatcaagaagaaagagaaggagatgcgtattcttatggtgtatgtcatattcttaaatcgttaatcttctccgatctaatcatacattatcatgttgtgctgattttggaatgtttttttggcagtggacttgataattctgggaagacgacgattgttctgaaaataaacggagaagacacaagtgtgattagtccaactcttggattcaacatcaaaaccattatctaccaaaagtaaa

SEQ ID NO: 142382 - DNA, 603 bp, Arabidopsis thaliana landsberg
ctagtcggtgctaccaagtctattgccaacccctctttgccttcgtcgagaaggaagcctctaggaggtttccagagagcgaattcgtcacaaaagagatcaagatccaactcttcccggggaagccctttaacttgaatctcttcaggctcgtatggaggacgttcttcgtgataacaacaacgttgatctcaatgttaatgcctttctttaacgatgtagtcggtctcttgggggccatcggtttttggcctttaacggtttatttcccagtggaaatgtacattgcacagaagaatgttccgagatggggcacaaagtgggtttgtctacaagtcttgagtgtgacatgtctttttgtgtccgtagccgcggccgcgggatctgttattggcattgttagtgatctcaaggtctacaaacctttccagtctgaattctgagatcatacgggaaaaataaactcctgctaaaagggttaagattagaattgaatgttttaatgtcatatttgtattagttaactttgtgtaagtgttcaattataaatcatgtttctaccgagaattcttacaacatggaactatcaatgattaaaagtag

SEQ ID NO: 142383 - DNA, 1159 bp, Arabidopsis thaliana landsberg
cgagaagcaatacgggattcgaattgagtacatgtttcctgatgctgttgaggttcaagctttagttaggaacaagggtttgctctctttctatgaagatggtcaccaggagtgttgccgtattagaaaggtgagacctttgcgtcgtgctcttaagggtcttaaagcttggattacaggacagaggaaagaccaatctccgggtacgagatctgagatccctattgttcaggttgatccggtgtttgaaggattagatggtggtgttggaagtcttgtgaagtggaatcctttggctaatgttgaaggagctgatgtgtggaactttctgagaactatggatgttccggtgaatgcattgcacgcacaagggtatgtgtcaatcgggtgtgagccgtgtactaggccggtgcttccaggccaacatgagagagaaggaaggtggtggtgggaagatgctaaagctaaagaatgtggtctacacaaagggaacatcaaggaggaagatggtgctgcagactcaaagcctgctgctgtgcaagagatatttgaaagcaacaatgtggttgcattgagcagaggaggggttgagaatcttttgaagctagagaaccgtaaagaggcgtggctggtcgtactttacgctccttggtgccctttctgccaggcgatggaagcatcgtacgtcgaattggctgagaaacttgcgggaaaaggagttaaagtggcgaaattccgagctgacggtgagcagaaggagtttgctaagcaagagcttcagttaggaagcttcccgacgatacttctctttccgaaaagagctccacgggctattaagtacccttcagagcatagagatgttgattcactcatgtcgtttgtgaatcttcttcggtgagttatgagattagaaaagaaaaacagtgtgatgaagaatgaaagagaattgagatgaaggagtgatttcatcttggttataatattgtggacgtcagagaataaacaagagttattactcttctacatgacttcgtatatttgtattgtaggggtttttatagactctttttgttacctctatgtatcttttctggtctacttttgagttctactattgtttataacgtttttctccttgtttatcaaatataattcagca

SEQ ID NO: 142384 - DNA, 110 bp, Arabidopsis thaliana landsberg
tgtgtacgtcttttgcataagaagaaacagagagcattatcaattattaacaattacacaagacagcgagattgtaaaagagtaagagagagagaatggcaggagaggca

SEQ ID NO: 142385 - DNA, 178 bp, Arabidopsis thaliana landsberg
actgtgtaggcaaaatcatcacatcgagcgaagcgttaagctggctctgttttacgactggctcttctttgacgaaagaatcgataatattatgaatgttgaacctgctgctctcttgatggtatggtcaataccgcagtatccacacatcactcactccttacttgaattcttactt

SEQ ID NO: 142386 - DNA, 361 bp, Arabidopsis thaliana landsberg
aaaaaactgaatttgctagtgactatatgctaaaagcattccatttcaagtcttatttgctagtgaatatatgctacaaaaatcaacagtttattgtaaatccatcatgatagagatgcaacttctcatttgtaacactttatggcacttaccgttttaaatggagattcttcgcggagctcaactatgtaagctgctctcttgtccccaataccctatcatcatcaatgtaggccataaacaagttaggtactaacctataaacaagtcatttcaattttaaaaacattctgatcaatctagtcatctcacctttaacttctttagatcttccctgtaaacacaacaagagaagagaaaa

SEQ ID NO: 142387 - DNA, 367 bp, Arabidopsis thaliana landsberg
ttgaaagaccattaacatcattccttgcccagatccaaacaatgccatctccactctctctatttagggttctctccaacttttcaaatccctaattcttgctccctcccttcaatcaattccgatcatcatcgaggtctctctactccccgaatttaaagatcagagccgcgacttcctctgccttcttttcctcggaatttttcagctacgttttccaggtggtgtgtattgtcaatcagttgacctttgcttttgtagccagatcgttcgtgctttgagtttagggctcttttacaaggtttcgtgttggtggaatttctctacctaggtttgggggaagagttcagtaatttcgttgtagatc

SEQ ID NO: 142388 - DNA, 1175 bp, Arabidopsis thaliana landsberg
ccgcttctcttcttcgcctttttctttcaccgatctgtgttgccgagtgccgactctccgtagtcttatctccgtcgccgatctggatctcgtcgtcgaattcgccttaatccaccgctgattctgaattttccgtgttctctcgtcgtctctgccaccgtcaccgtctcccgtcgccgtgttccaccgctgattctgaattttccgtgttctctcggcgtctctgccaccgtcactgtctcccgtcgccgtgttccatttaggtactccattgatccgatttccttctttagtatatgtatatgaatgtggatttgacgttaattttaagctatttcgttttcttgttctttactcttgtcctcttttggagatattgtggagagtccaatgattccgtagacgcagaacactttttaacactgactattttcttagagattagaactgattatgtgaatctgtatgcgaataatttttttttataactaaattagcgatttgaaactagccgaaggagtgatggatttggaactaggcgaaggcgtgatggaaaaactcgtgagcccttcaggggaagacatgaactcgcgagctcagcaaaattggaagaatgtaactgctgaagtgaccagtaattactctcggatcaccttttacttattcgctaccacagttgtcatctccattctcgttgggtccatctttgttctatggtttgacacccgcaacgttggcaccttgcacaagttactgtaaggaaattttcgagtttatcgatttagtctcattgattttattgtttgtttatatatatgtattgataatgtgtgtgtatgtgttcatgactataggtatgtcttcttgtctgctgcaaccattccatacattggtttgctattcatttgcttgtgcaacgatgttccagtcccgagttatcggctaggagctgagggacggtttgggatctacctagctacaatggttgtcatttattgcatatcctacagcatcgaggactttgatgtgatgatggaagtgtcatttctggtgattatgtctataataggagcggttacaatcgttcaacttcattctcctgccgaggatttaaattccagccgaaccacattcatactatttctagggacgatgtctgctattctgggttgtgt

SEQ ID NO: 142389 - DNA, 1480 bp, Arabidopsis thaliana landsberg
gattccatgaaatggctttgtctttaattcctctggtttgtcctggatttatcttcttgtagcctctttgctcaatagagctctttttgtctcttcttgtattaaataaaataaaatgaagacttagtaaagaaaaagaaaaactcttgagtcttgctaaagcctagttagtgttgagtgtgggagagacaaaacagaacattgaaaaatctctctgtatgatggcttcattgtcttgtgttgaagacaagatgaaaacaagttgtttggttaatggtggaggaactataacaacaacaacatctcaatctaccttgcttgaagagatgaagctgttgaaagaccagtcaggttttcatcttcttcttcctcaagatttttattaaaaaagttacctttttaagaataaactgtgataacaaaaggtttcataatttatgctaatgacatttagaaattttgttactttcccctgaaaatgcgattttgaacatttttcaggtacaagaaagccggtaataaactcggagctatggcacgcttgtgcaggccctttggtgtgtctccctcaagttgggagcttagtgtattacttctcacaaggtcatagcgagcaggtaactttgtgtgtcttaaagaacaaacaaacacattgtacttctctagatcttgttagctcctgttcaaaaggtttgattttttttgttcactttttgacttattaggttgctgtttcaaccagaagatcagcaacaacacaagttcctaattatccgaaccttccatctcagttgatgtgtcaagtccataatgttactcttcatgtacgccaatctttctcatttgcttcgtatccaaacaaattgcaaccaagtttgatatttcttgacaatggttttgttcccctttgataggctgacaaagacagtgacgaaatctatgctcagatgagtcttcaacctgttcactctgtaagttttggattcttgcaacttccttttgtttcatttaagaactcatgttgaagttgaatgagtttgaatggtttgtgtgcatcaagagagagatgtgttccctgtaccagactttggaatgctgagaggaagtaagcacccgactgagtttttctgcaaaacacttactgcaagtgacacaagcacacatggaggtttctcagtgccacgtatagctgcagagaagctatttccaccattggtgagcttctcttttcctcatatgttcctattgctttaactgctgctagcctgctaataatatgttaaatacattgcaggactactcagcacagccgccaacgcatgagcttgtagttcgagatcttcatgagaatacttggacatttcgccatatctaccgaggtataaccacttgatttgtctctttctctgtttagattgagctggtattgagctcagttcctgcttacattctcagggcaaccaaagagacatcttctaac

SEQ ID NO: 142390 - DNA, 447 bp, Arabidopsis thaliana landsberg
gaatgactcgtttacccttacctttccttttcttcttcctcacgtcaatacccttatctgtcttttcgcagttcaacgaccagtcaacgcttctgaacctgaaacgcgatctcggagatccaccgtctctccggctgtggaacaacacatcttcaccgtgcaactggtcgggagatcacttgcaccgccggaaatgtcaccgggatcaatttcaagaaccagaacttcactgggacagttccaacgacgatatgcgatttgtcgaatctcaatttccttgacttatcgtttaattacttcgccggcgagtttccgacggttctttacaattgcacgaagcttcaatatctcgatctctctcagaaccttctcaacggctcacttcccgtcgacatcgaccgtctctcaccggaactcgactatctcgacttagcagctaacggattc

SEQ ID NO: 142391 - DNA, 131 bp, Arabidopsis thaliana landsberg
cttccatcgtcgacttctattttttcttctttcttcgatttcataccaaaacaagaactctctgttttcgacaaaaacgaaaccttgagatctattttgattgacttttaagaaagagagagatctttctt

SEQ ID NO: 142392 - DNA, 910 bp, Arabidopsis thaliana landsberg
tgagaagtccaggacttgttacttcttgatgtcactcctctgtccttgggtttgaaactgccggtgtgttatgactgtttgattccgaggacaccacaattccgaccaagaaagagcagatattctctacctattcagacaaccagcccggtgtactgatccaggtctacgaaggagagagggcacgaacaaaggacaacaaccttttgggaaagttcgagctcagtggtataccacctgctccacgaggtgtaccgcagattactgtctgtttcgacatcgacgccaatggtatcctgaatgtgtcggctgaggacaagacgactggtcagaagaacaagatcacaatcacaaacgacaagggaaggttatcaaaggaagagatcgagaagatggtacaagaggcagagaagtacaaggctgaggatgaagaacacaagaagaaggtggatgcaaagaacgctctcgagaactatgcatacaacatgaggaacacgatcaaggacgagaagatcgcatctaagcttgacgcagctgacaagaagaagattgaggatgcaatcgaccaagctattgaatggttagatgggaatcaactggctgaggcagatgagttcgaggataagatgaaggagctcgagtctctttgcaaccccattattgcaagaatgtaccaaggagctgggcctgatatgggtggtgcaggaggaatggatgacgacacacctgctggtggtagcggcggtgctggcccaaagattgaagaagttgattaagccttttggcttttgtttactctgtttgcttgagattctagttggtttcttgttcttagttttatctttctatgtcactctgaaactggtgtgtgatcattttgatgttttaagaatttagctttaccgttttt

SEQ ID NO: 142393 - DNA, 806 bp, Arabidopsis thaliana landsberg
ttctcttctttcatttcactcgatcaagtttgagcttagcttttaaaaaaagagagaaacaaatcatgaggacaatggttgatttaggaaagcaaagagatcataactatcaccacatgcaaatcataaccactcctacctccgtggattgttctcgcgaattccgtcaccgacgaacacttcgttcactcatcgaatgcatgattccatactgttgcacttaccaacaacaaccataccaaaacgacaccctttcagtctcttccacttcatcctcgtcttcatcctcagaccactcttcctcctcccagagtagcagtaccgtaagtggaactttcttcggacaccgtcgtggccgagtcagcttctgccttcaagacgccgccgtgggatcttcaccgctgctcctcctcgagctagctgttcctacggcagctttagccaaagaaatggacgaggaaggtgttctacgcatagccctcgagtgtgaccgtcgtagaagcagcaatagtcgttcgtcttcgatctttgatgttcctgtttggtctatgttttgtaacggaaggaaaatgggatttgccgtgaggagaaaggtgacggagaacgacgccgttttcttgaggatgatgcagtctgtgtcagtcggagccggagtggtgccgtcggaagaggaggatcagatgttgtatttgagggctaggtttgagcgagttactggttcgagtgactcggaatcgtttcacatgatgaatccgggtggtagttatggacaagagcttagtatatttcttttgcgatcgtgaaat

SEQ ID NO: 142394 - DNA, 283 bp, Arabidopsis thaliana landsberg
gaggcaataaacttaacttaggtgctgcgatttatgcgtagaggtttgcttctcatgctctgaggaatctaagagcaaatgcagcagcccgaaattctagattcccacacatattaattttgttgcctcagaaaccagccgatcctgagtttcctatggatgaaacctagttttgtatagttgttgactctatctctctgtaatgtgatcgctagtgatttcttgcaaataacttttgtgtaaaccagtaaagatatttttatgtgaaataataatcaatagg

SEQ ID NO: 142395 - DNA, 579 bp, Arabidopsis thaliana landsberg
ctttcctgattttctcgctcattttcccggaaagttatgaagaaaaaaacatcttctttttaacaatttttggagtcttataaacgacaagccaaaaagactggagcttttcgagatatgctcttgagacgtctcaaaggaagatactttgatgggatgtcttcttaattttattataattattcactcatactcataatattattctctgatgaatctctacaaacagacaagaaagtgcgagaaaatgatgggtctctgttctccttctccttcttctcacgattgttcttcatcttctccaaggtaaaccgatgattacattatctctttctgcaatttagtttcgttgaaatcaatttggggcaaataatgtgaaatgggtttggtcacaggaactcggagaagaagcagaatgtgattgttgcatcaccttcaagattctctacctacactaaaccggttagtttcttctgagcaaccaatttcatttctcttttaaaaagcaaaacatttgtggttctaaagtcatatttttcatggcagagtttatcaattgagaagagattacttacttac

SEQ ID NO: 142396 - DNA, 1803 bp, Arabidopsis thaliana landsberg
ggctttccttcattggtcagatcagacgacgttttacatcttcttcttcttcctcttcgatattcgtcagtgtgtgtattttggggaaaactttgtgagcaaagagcgagaaaatgagcggagccggtaagaaaatcgcggatgtggctttcaaagcttcaaggactatcgattgggatggtatggctaaggtccttgtcacagatgaggctcgtagagagttctctaaccttcgtcgtgctttcgatgaggttaacacacagctccagaccaaatttagtcaggttctcctctcgatttcccccctctcttgatctgattttgtcactactgcttggtttagactttttagatctttataatttcgatttctggatcaggtgcttctttcacgaatttttacgattatcagatttttgttggtgacactcatttttttctattttgttgatgttgttgttcccattgttgattgatccagatatgtgttaagatctatttccttaagacgtgttaatcagagaacattgtggttggtctttgtttattgatcattagaaatgtggaattgtatcgagaaaaacattgatgtatactatgattagcccactacatttccaattcctaagagatcttttatttcctaacttgttttatgtattgggttgtggagtgattgttgtttttggttatccttttaatccaggaacctgaacctatagattgggattactataggaagggtattggagctggcattgttgacaagtacaaggaagcttatgacagtaagttttattttctctgcaatttatactgatacttgggagcgtttgtgtagccttgcaactcattatcacaatgagtttgtcagtggttatcaagcggatgtcttttgcttgccttacttcggctctcaaacctgactatattgttttgagagagatgtgcttaagaatgggggctgaaactgaagttcttatacttgttatatatctatttgattgttggaattgtggagatatatcaaagaagattatgagaaactaaactgcatcttttatggcttgctgcaggcattgagattccaaagtacgttgacaaagttactcctgaatacaagccaaagtttgatgctttggtgagtaatagctgagacactcgagacttttttacaattttgacaggtcttttcaattgacatcgtttttgttctcttgtgccatgtttcatgctatatctagttggtggaactgaaagaagcagaacagaaatcgctcaaggagtctgaacggttggagaaagaaattgctgatgtccaagagatcagcgtaagtagccagaaaaaacaaatcctcttctatgaagtttgtgtgtattttttttcaactcaagattctgataaaatgatcatggttgtttctatgtgttggtgtaatcagaaaaagctcagcaccatgactgcagatgagtactttgagaagcacccggaactcaaaaagaagtttgatgacgaaatccgtaatgacaactggggatactgatcatgtttctccatctccggcttggaaagaaaactctctttctctttctctgttctcttactgtgattttgtgagccaatcataacaataataagtacaccattcacttaagcagtgttgagatcttcattccaaggaagataaacgcatttggttttagttatcaatttcacaaattgtttcgtttcgttcttcagtgaataataagagtcaaaaaaattatcattgtcaaggaatgaagaagactcttgactcgtca

SEQ ID NO: 142397 - DNA, 882 bp, Arabidopsis thaliana landsberg
  unsure (1)..(882): unsure at all n locations
cacttgagacaacccctggattcgtattatcgtatgaaacagatctaacattgaagtaagtttcactatcttatgttattaagagttttaagtagttccgcgggttgagttagatacattcatccaattttacagtcttcaaagaaggtgcaagctagctgaaggttggaatcgtaagcctatgtggaagcaggttgtttattcgcatgattttttatctttaaaaaaggtatcttctttggatccagngtctgaatttaagttcatcgcgttaaagttaggctgaaggtttatttgattgtcaggctgaccctcgatatgtttggaactggcatcttttggaggacttaattgaatgcaaagtaagttgtgtggtttaaatctaattgattttcattccttgtcaaacgttaatgatctaaccttttcttattgtggcagctggatggttttattattcctatacttcaaggaaatatccttttctttatcttcttaatcttctgtttagcttgttcttggactgtttatagatgtaatgttgcgtttttcaaatatgctttttaatagacagtactccaatacatgttgtttgatattaaccaaggcttaagttaccaagttgctgagctaaagctcaagaattctcctgctgtggtatcgataatgtccaggcgctgtacacgacgtctaggtagggtttaattagttctgccagaaaattcagtggcatccatgtttgtttgacagtcttattggaattggcatcccaggtacacgtatgtggagaagaggagccaatcttgaaggggacgctgctaattttgtcgaatctgaacaaatagtggagattaatggtttcaagttctcattattgcaggt

SEQ ID NO: 142398 - DNA, 261 bp, Arabidopsis thaliana landsberg
tttggtttttcaatatatttcttctttctcatgggtgggttttgggtttgattcttcatattcttaaccacaaaatggtgtgttattgtaatgattgtttttttgtcaaacatgcgttcattttttgggtcaggacagttgtgtggtggtgggtagtaaattctttgatctggattgcacattattttgattgtgtaaaagaacagtgtctacatgtaaactcatgaaatttcaatatattggtgttggattcgtttgaca

SEQ ID NO: 142399 - DNA, 353 bp, Arabidopsis thaliana landsberg
caaagtatataaccgttaaagcgggaaaacaaaaagcctttcaaatttgctttttggatttagggttcttaagtttcttcttcaccacgttgttctgtttcttcaatggttttttctcttcagactgcaactccattctcactctctcgtcctcttttatatcccgaagaatagtaaagttctctttcaatttcttgctgagcttaaccatgtctatttccggaacattcttagcttcttcaggcaaactctcccgtttccgtttgttgttcaatttccgagactcgttcttcggctcaaacgattcctttacaagagagaaatctgcaaaagcctgttgtggagtcactgca

SEQ ID NO: 142400 - DNA, 444 bp, Arabidopsis thaliana landsberg
cttccttacgaacaacatcgagaacggaatcgataagctcagcaccttcagtgtaatgtcctttagcccaattgttaccggcaccggattgaccaaatacgaagttatcaggacggaagatctgaccgtacggaccggatctgacactatccatagtaccaggctctagatccatgaggacggcgcgtgggacgaatcttccgcaactcgcttcgttgtagtagacattgactcgttcgagttgcaaatcgttctctccttggtatcttcccgtcgaatcgatcccgtgctcggcgcaaactacttcccagaacttagctccgatctggtttccgcattggccaccttgtatgtgaagaatctctcgcatctttgattagtaagctagagtatgaaactacaaaaattgagagagaaagagaaagagagagagaatttgaaacg

SEQ ID NO: 142401 - DNA, 398 bp, Arabidopsis thaliana landsberg
agatctcgttaatatccatcctactgagcttaaattcccctgtaagttttttttttccgattgattcgatccctctcggattcatttcaccttttttacgttttcgattctccgaattgaaccgtcgttgtttgtttgggtaacctctgttataatttgtgttgttgttggtggtgagaagttgagttgaagaaacaaagttcgtgttcgatgcaattgaccaacaagacaactactcaatgtgtcgcttttaaggtcttttacattctcttcttacaattctgtcttattagtacacattgagagagtgttgatgttaattgagagacacacaggttaaaacaaccaatcctcgcaaatactgtgtccgtcctaacactggtgttgtcttgcccggt

SEQ ID NO: 142402 - DNA, 129 bp, Arabidopsis thaliana landsberg
ttcttccccaacgaccaatcttatgttgcatcaatttcacaacagaagccttaccttttcattacacgcatattgctttttcaaagtttccttttagataaattcttagtctgagtaacatctctttct

SEQ ID NO: 142403 - DNA, 342 bp, Arabidopsis thaliana landsberg
aaatagtgtttttaaccaaaagaaaaaaaagatactgtaaactatataaattttctgtaatctatagaaagaatcaaagtgaagttgcagaaataaagaccaaatcaaatgaataatttattaaattgataaggtggcaaccaacaaatatattgcacttaatatagtaaaaaatcatacattgctgtcagtgagtagtaaaccaagtagtcacccatatataaatttctggaaaatatgaaactcctaatcctacatgacttaaaccttttttagataatttcattatcaaatggctattctttcaattcacccttatatctttgcacaacaatagagaga

SEQ ID NO: 142404 - DNA, 336 bp, Arabidopsis thaliana landsberg
aagatggaaaagatgtgcactgtgaaagatgtagcaccgaagaagccagtctcggggactgctttctttacgctctgggatggattcaacagcagcaaatgtggagtcgccgtctttcttcagaactcttctcttcagatttttggtacacagagttttaaattacctgatgagatttgagttaatttccctaatatctgaaaaataaagaaaagaaaaccgatctttgtatcgtccatattttgcttgtgataatcattcgggttccactctgcttttgtacagttataaatgtgtgactacttataacttaatagggtttaaggtttcttctaa

SEQ ID NO: 142405 - DNA, 822 bp, Arabidopsis thaliana landsberg
gctacaaataccagatttttctctctctcgtcgaaagcaaaacactctcctttctctaacttctgctcatatcagccattgacacagttgctttgggtttccctcaaacggcgccgattgtctggttcgtctttctctctttcttcatagttcctatatacgtgcctttgcgtatgtataggtgttgttatctcatatctgtgactatctatcttcgccggaaacttcttggtcttttgatttggactttttttctctctaccatttagatttgaattgatgttgaattttccttgaggtgatgagtttgttgtctctctgtttctgctaaagtctttctctaatcattctctttcttgggtttcgataaatttctcgaatttgtaagctaaacttaatccgacgatgatcaatggaaaatttggatgattggttatgagttttcggaagattctaactttcaatcccaagtttttatgggttgtttttaatttcatctgtttccaaaatttcaaattttagggttcttcgataatatagggttttagattttctggattttttaaaatcttttgcattttttctgattaacctaattctcatctggataaaaataggctatctttgtgtgtttcacttgtaaatcttataatatattgcattcatctggatctaatgtttgcaaaaaaaccacatttttttccaggattttgaccactgatggccttagatcaatcttttgaagatgctgctttacttggagaactctatggagaaggtgcattttgtttcaagagcaagaaacctgaacccattacagtc

SEQ ID NO: 142406 - DNA, 707 bp, Arabidopsis thaliana landsberg
aggaagatcgaaaaggaagaagaagaggaggagatgatgagaaacaaccttccgtaagtaaagacttgaaagatatatctacaaggctttcttctttctttgagaatatttctgttggagtcttgtctctgctttcacgtatatttgtttaattgttccatggtttcaattagtggagattgtggttttggttattgtatgtttgtttgatgtgaacgattttggatgattcttctctttttactagtaaaatcacttgtctgtccattattatcaatcagattcagacgtgaagtgacagatgaacctagtttttttttttgtcaaacaaacaaacaagatgaacctagtttaatgtacaaatgttcataagatatttctctggttacttgcaattttattctacaaatatacaagtctagattacaccaaagtcacataggaacccagttacagaaatagacaaataactacaatacctatttgttaattctgtctctctttttcatacaacagagattaggtctcgttatgtatactttattctaaaccagttgcagaaagatcgagagtagcctttcccattcacataatttacagatcaattaccatccatgtttaacaatcaacaccaaactctctttgactcacctctccatagccattttgatgtatcaaatatcttccaggcaaccgtactccagctg

SEQ ID NO: 142407 - DNA, 338 bp, Arabidopsis thaliana landsberg
ctcaaatcctccttttctctctctctctatagagtttgagtatttattagaatgtaataatgagagagtaaatacagatactgttcttatctactacatgagtttcattgccctgttcaactccttttgtcagagaagaacaaaaacaataatatgattatgcagaaattgctataagaagaaacctaaactctctcccatttattaaaagagagacgtttgtattggtagatctattcttatttttccttttgggatttttttatttggttcgtaattgtgagattgaaagagagatgaacaatctgagttatcttgaaccagattactctgagttt

SEQ ID NO: 142408 - DNA, 841 bp, Arabidopsis thaliana landsberg
  unsure (1)..(841): unsure at all n locations
acaaactcgatttcccgatttcgtcgcctcttctcgtctctccgctctcctcgccgcgagtctgtttcgccgccgtctatctcccaattccggtacatcctaaaccatttccccttttaatccaacctgtnnnnnnnnnnnnnnnnnnnnnnnnnnnnnnaggtttaattgcttgatctcagttgaaactagggcgtaatctcattactaaatgtagcaaaaatcgacaatatagtctcgtctctctgttatagcaatcaatttgtgagattctgaattttggcagaatcctaattctgaagtttggctaatatagaacctgtaattgtgttttttcatttatgagatgttttattaactttgttagtcacaaattgatttcatgtgtataatgttcattatttcgattttgttctcgtatgcgatattacgttcttggctgtgatatctgaagtaaagctgttgtaatctaagtttttcttctcttgattttaaacagtgaccgttgttgtttagtgaatcgatgatttacactgctatcgacaatttttacctaaccgacgagcagctgaaggcttcaccttcgaggaaagatgggatagatgaaacaactgaaatctctcttagaatctatggatgtgatctcatccaagagggtggaatattgctcaaactgtatcctttttcttggtctaattattaagcaagactcaaatgttacgtagctgtgattttcttaacttagattgtttattttagaccacaggcagttatggctactgggcaggttctgtttcagcgattctattgcaagaagtctttggctaaatttgatgtcaag

SEQ ID NO: 142409 - DNA, 221 bp, Arabidopsis thaliana landsberg
tgatgacatctttttttctttcttcctggggtgtttcccattcattgtaacgatttgatttgagttggaagattatgtcttagaccccaacgcattatgacttgcgttaagaggggatcattttattaattttgtatttttaacaaatatcactacttcctgcaaatcaaccacatgagctatacggatgtagtaacgtggggctataatatttatcaaaa

SEQ ID NO: 142410 - DNA, 399 bp, Arabidopsis thaliana landsberg
tgatttgattttgatgaaaaatggaaccacaaattctttttctctatctctcactcttcattctctccctaaacttcttcttcacgaatcttaaaccaaggctagtccgcctcttccagccttctttagaatctcgtgtcaagaccgctcttttatcccgaaaggaagtagccgcgtttcttgattctcccattgtcgaagacgaagaaggcgaagaaagagaagaggaagaagaaggaggtatcgtttcaaatgccaactttacgtttgagtttgatccatacatgatgagcaaagccgaatcagtgaacaaagctctagaagaagcaattccagtcggagagccactcaagattcatgaagccatgcgatacgcgattcttgcggctggaacacgtg

SEQ ID NO: 142411 - DNA, 753 bp, Arabidopsis thaliana landsberg
tgaaaaaaatgtaacttttcattatttatgcaacaaaagattacatgaacatatagcaaaagatcatgcaatgagtactatatctcttaggctacactcttacacacgctatgtcacaagcataatataacaacattctagtgttcaagaaccctaactctgaacttaatccactcgtgttggcgagagactatcaacagaaaagccctacataaatcccagtcgcttagaacgtaagaaacaacatctatgaagacgaaggaacccatagagatgaagcatacacgattctacctttccacccttgaagtaaccagttaccgttttgatcaacatcgaagtttttatcgtacccgttttcgattttcaacttcagattctgcatcagttccttctcaagcggaagctgtctaaatccggctcggatcagtctcgcctgccactgcttatatgtctctggtctctccactctctctgttccttcacaagccacaacattcacaatctctctcccataaaactctttctcatacatcagcctcatctcgtcttccctagctagcttcgagtcacacatatcaaacacagccgagtaatgaaacaacgcttctctgaacctcgtgacaaagaatggcgcgttgtaattcccgcttaagatcgctggaatgaagacattcgggtttatttttcttatcagcttcaaaactgcatctctcgggctgtttaccagaacggtctcatctagaaggttcc

SEQ ID NO: 142412 - DNA, 403 bp, Arabidopsis thaliana landsberg
cttcactctaattgcgattgattctcctgtcttctccaatttatcaggtaattgcttctgcttcatacttcataccttattttcccatctctcaatccatctttgtattggagcaaagtttatacctttcaatttctcaaactcgactagttatagatctatgcaagttcagttcaaaccttacatatataatatctggagaaaccaactatgtgtacttgcaattacaataagctaatagatttcgtactataaagttagatccacatagtacaattctaagttatgcagattggagctcttgtgaatttttgtttgattcgattttgcttgagactgtcttagagaaattgcagagatgacaccctgaataaaacgctccctcagtagatccacaatttgt

SEQ ID NO: 142413 - DNA, 303 bp, Arabidopsis thaliana landsberg
tatcaatctggaggaagtggtggcggtggaggagcgcattatccggcgccgaacccagggatgttttcgcccaacactggcggtggtggaggcacggcggcgaaaggaaacgctccggtggttggtgggaaaagacaagacggaaacggaagagatcttcacatgtttgtgtggagctcaagtgcttcgccggtctcagatgtgttcggcggtggaggaggaaaccacacgccgattactccaccgctacgaacgatcatcaaaaggacgttaagatctctgtacctcaggggaatagtaacg

SEQ ID NO: 142414 - DNA, 406 bp, Arabidopsis thaliana landsberg
cacacaaaaatcatcagctttgatttatgtatttgggtaaaaacagttacaaatatgatgagattgttacacttgctactcctttaaagtattactgaggtacaagaacaagaccctctcaatcaatgtttatcaagaaacaagaaaccactcttttcaacaaatcagcacttataatatatgacatctcccattgatgctactttaaagctattctacacccaaaacgttgaaaccgctgtacttgtgtgttaaggaaacgctcagtcctcttcacggctgccactgctactccaaccactggacaaacacggtatattgcgaccagggaaaaaagtaatctccttgccacttgagaccaacaagaaaaacaaaaagagatacaaaatctacatttgaactcatc

SEQ ID NO: 142415 - DNA, 568 bp, Arabidopsis thaliana landsberg
tccgacatcgagaagtgacttatctcaaatgcacactcaaagaaaccctaagatgcacccaccgatccctctcctcctccacgaaaccgcggagacactagtatcgacggtttcttcattcccaagaaatctcgtgtgatgatcaacgcgtttgccataggacgcgacccaacctcttggactgacccggacacgtttagaccatcgaggtttttggaaccgggcgtaccggatttcaaagggagcaatttcgagtttataccgttcgggtcgggtcgtagatcgtgcccgggtatgcaactagggttatacgcgcttgacttagccgtggctcatatattacattgcttcacgtggaaattacctgatgggatgaaaccaagtgagctcgacatgaatgatgtgtttggtctcacggctcctaaagccacgcggcttttcgccgtgccaaccacgcgcctcatctgtgctctttaagtttatggttcgagtcacgtggcagggggtttggtatggtgaaaactgaaaagtttgaagttgccctcatcgaggatttgtggatgtcata

SEQ ID NO: 142416 - DNA, 1021 bp, Arabidopsis thaliana landsberg
cgagtcttcgacgagtctccggctgcgagtttctcttgctccggcaaacagacctgtcattgcttctctctccggctaactacacaggcgagcttctctatttattttcttctgtgtctccagttgcttctgatataatgaatatgctcttgaagcaaattgtttctctgcttctctttctccagtgaattgtttgttgtattataaacgaggtttaggaattgggttaataatattggaggattgtgtttgtattctgtgtccgacgaacaaatgacatttccgatttctattgtgctacgagttcagtgtttagaagggttttgatgttctctattgaatattcatgttatgttagtttgatgattagatgattttgctttgcaattactgtgtttttttgtctgactggctctgatattatacaacgtgtttgactccgattggtatcaatcttcttcttcgtcttcagaagcatggtgtttggacaagtagtaataggtcctccaggatcgggaaagaccacttattgcaatggaatgtctcagttcctctctctaatgggcaggtttcatgttctttctcttctcttctctttttggatcaaagaatgaagcttacttggcttttgtatctgtaattctgtttgtattgattgtttcgctgtccctcgcattgtaaagtttacaagttgcaaactttagtaaataatagtgttgaattccagaaatttgaattgtctgacttttgagcagagtcattgtgaaatgttgttgccttgtctttgtttttggtagagagatttgcagattcgtgagaacttctctgtaagtaaattctcttaacgttgagttactattttgttgttgttgcaggaaggttgctattgttaatctggatcctgcaaatgatgcattaccgtatccttttcaagccaaatacaacaaaattgttaaaaattgcaggtgtatgttgtttcttgacattgattttagttatgagtgtggtgtgaatatagaag

SEQ ID NO: 142417 - DNA, 468 bp, Arabidopsis thaliana landsberg
tgtaaaattgacaaagttttataaagccttcgtaagaaagaagtggcaactaaccacaaaattgaaacataacagaaaagacagagccgagacagagactccccattagcattagagagaaactaagaaaaccataatttggaaaaatagaatccttagttccttaccattgtttggcagactcgcgatattttatcatacgagaaaaactggaaatagattctgtaaaagattgcatccttaattatattctggagtctaaagccataatagtactaaggttcatggggttcatgtactcaaccgaaccagtcatgatttgttggacgatgagtcgggtggctttctcggtcgggtggaaagggtcccagaaagcataggcattgcggtcagagcataaagtcgacaatggggtgcaaacgccttgcccgttgtatgctccttgtccacaacatgctacttttgacg

SEQ ID NO: 142418 - DNA, 771 bp, Arabidopsis thaliana landsberg
cgattgtaacagtgagaattatctctccgccgtgagactctccggtccgagatagcaatctttttagccaatttttagtatcttatataataggtttttggctcaccatgttttgttgtatattgtttttgtgttacatcttaaaagaatagccatcactcagttttgtaacgttccgagatcaattatttcatagattacccgtcgtttttcttaactgtcacagaactccatgtcgttttacattcggaatgcgtgccgtggtcttccttctctctatcctacgttcctattggctataatgttttgcttactgtacgcttgtgggtagacaatgaaactcccggttcataaatttgagctagggtctcggagactctcgtcccaccgttaaagatgacgacgacgactgcttctctggttaagacttttctgtttcggtgcgactcgttttcatctttcaaattcaaatgcaaattcgaatctcccgcgaaaacgcgattgctctctccggcgaccgagaaacatgttgtcagatcgtcaagagcctggcgtattcgttgcttatccgatgatcctggtaagaccggattctggtttcgttggccattgctattttactgttttcgttttcttcgacttgtcctggctaattgcataatttgtaggttcgagtcatgttttcgttgcaagtagaaggaaaatggtagtcttgttgtcgacggtgcagcttctgtctcatatgcttccgcaaaacgggaacgcagctga

SEQ ID NO: 142419 - DNA, 225 bp, Arabidopsis thaliana landsberg
agattgaggcacaaggaaagtatctacagtccgttttaatgaaagctcaacaaactctagctggctactcatcttcaaatctcggcatggattttgcgaggaccgagctctctagattagcttcaatggtgaacagaggctgtccaagcacttcgttctcagagctaacgcaagtagaagaagaagaagaagcagaagaaggtttcttgtggtacaagaaaccag

SEQ ID NO: 142420 - DNA, 417 bp, Arabidopsis thaliana landsberg
caaaaatgttaacataacaagtatgttactggtaaaaaatcacgtttctcgactaaattgaatggtagaaataaaatcattcaaaataataaaatttactatcattcattgggatcataaatagctttgctgttttcataaataccatttcattgctatgaaatacaatgttttccactttataaacttgttgcgatgcctattctagtgattttctgatttttttctcatttgcaatgttgtgagcaaaaaagcgaacaaggctaaaccgaaaagaaaacaaggaaagattaaagatggatttgtaaaacttaagggaaacttcctctagtgcacattctcttgtttaagacatcactcaggtttacatcattttcaaggtttcctcaaacaatttggcgacgagtttaaatatat

SEQ ID NO: 142421 - DNA, 236 bp, Arabidopsis thaliana landsberg
atttcataggcctcattcccagacgacacaggcggtgttggcaaaaaagcgatcccatacggtgagcctggcaaattgacacccgctttctgaccaataaatgtaaaccactctgatgacacaacaaacatctcagttattccaagataagtaaacacaattgaactagtcttgagacatatcaaataaacatctacccttaaagttctttgcaccggctccgagaaagtctaaag

SEQ ID NO: 142422 - DNA, 691 bp, Arabidopsis thaliana landsberg
tcccatttcaaagaaaactaaagaatgccctaatacagtaaaaaaatattttcaatgaataaatcagtaatgactcaactgttgtattcaatggacggcgcataatatagatcacttattctaaggtaaaagatttcacgtgatcaccgagtccaacctttcttctattcaaatctctcgttatggcaatttaataaccactagaaaaaacaaattatagagaaaggtaatttgggcaccgacgtgaatttgactaaattacgagagagaaagaaagagagacttggtcacgaaggtgttaattagcatgaaagagagagaaataatcgtcgttgaccattgaccataacttagtcagtcatatatataaaaatccaaccgcccactattgttcccctattcacaaggtccttgctttctcagacgtaaacaacaagaaattatattaacacaacaacaacatcaaaaagaccaaccctatttattcatcttttctcttatatgcaactctcaaagaatccgatcaaacaaacgagaaatcgagagaagaattacaccgacgatttcaccatgaagagatctggaatcatggctcctgaatctccggtttttttcccacctccgcttgttttctctccgacgtcggtcaaaacgccgttgtcttctcctcgttcggcgccaccgaagctga

SEQ ID NO: 142423 - DNA, 153 bp, Arabidopsis thaliana landsberg
  unsure (1)..(153): unsure at all n locations
gagagtgagccgnacgatttctctcctcttcttgttttaaaaacctatcaataatattcttcttcttcctcctctcaaatggcggctactagggttcgttgttgtcatagcaatgcagctttcaccagattgccacttacccgccaccgaaac

SEQ ID NO: 142424 - DNA, 285 bp, Arabidopsis thaliana landsberg
tcacttgtttggcttatggaaacccacacatgcatgagcagcctctgaagtttactttatgtcttagatgatcattgttgaataattcattgggagtttatgacaatgggagctttcaaatatctgattattttgtattgatacatgcacaatgctagatttgtatccaggagatagttgcataaaccaatatactataccctcggatcttagcttattttcattgatatcttgttgttttgtgctgtaaacatatcagcttttgaatacatttggtccatggcg

SEQ ID NO: 142425 - DNA, 325 bp, Arabidopsis thaliana landsberg
aaatatatgttatattttatttttcttttagtttacgtgagctttgtttcgtatataaagtatgatgaattcatatttttttttgttttggtaaaatcatatatttgatatttctactcgcctaacatttaactaactacagttatatatatatatatatatatatgtttggtatgtaatattgacacttaatttttttgtgaaacgctccattagtcaatactttgatacgtacagatatagattagtaatatcatttactgaattattaatgtagaaataacacaaatattgatctctcaaataaaatcgcattatcatttat

SEQ ID NO: 142426 - DNA, 154 bp, Arabidopsis thaliana landsberg
aaaagactctctctctctcccatttacatctcttcatcttcttctctttctgcattttgtgactaaatttgttccgatctccgaaaaatatgaaatcttattagaaaaataccggaaaagaaacagattagtacattcgattcagcagcttcaa

SEQ ID NO: 142427 - DNA, 431 bp, Arabidopsis thaliana landsberg
aaaaaaaatgcagaggaaaatgaaagggaaaaagaaaaacattggttcgattttcgaagattgcaatgtatctgcgtctcaggagatttatctacagcgatgcggttttgccgtaccaggtcaaccacctccagattccgatccctccgtcggagtctcaccgccaccgttaaacgacggaattccaaatcagcgttcatccggtgattcggatacggataaggatagtgtaatcggctcgggtaacgatgcggtggagagtcaggcgattcgatgcgtcactccggaggaaagcgtggacaccgttgatttagaggaagatgttgcagatccgacggttgaggtttcggcggagaagcagagtgatgttcctctggaatctgcagcgaagaaggaaggtggaggaaagaaacttaagattcctttaaggg

SEQ ID NO: 142428 - DNA, 140 bp, Arabidopsis thaliana landsberg
aaatgaccaactcttctctcttctctttgaacaagcctttttgcataattttggatgggatcttctcttttaagttttaacataatgaaataatctacgttgaagttagcaacattagaaaatttgatcctttggagaat

SEQ ID NO: 142429 - DNA, 111 bp, Arabidopsis thaliana landsberg
gcggcggttctgggtttaggagatttgactgatgaagatgtccggtgtatgattgaagaaggtgattttgactgcgacggtgcgttgaatcagatggagttttgtgtgttg

SEQ ID NO: 142430 - DNA, 218 bp, Arabidopsis thaliana landsberg
acaaatacccttttcccaaatttagctagtatataaatcttcccagaagatcaagtcatcaagaccatcacacgctgacttgctaccatccatcattgccggattcatcatcattggataagaagatatctcgggcgttgcggttgtgttcacatcggaactcaaaccggtttcttgagacacactcacaacgagaatgctccaacttgatcatacct

SEQ ID NO: 142431 - DNA, 370 bp, Arabidopsis thaliana landsberg
atatacaccgtggccaaactcacccgttatgaactatgcacagccgttgaacggctcagacacaaatctttacaggtttgctgatactaaactgttgttaatccgccatttgattggttatctcaaaatctagtgtttgcttactcgtcatttgcactgcaggtatccttctgcaagtaatccctgacagcaagagtagtgtttgagtcttcaatgtctgtaatgaaaagcagattctatagatattagcctttaggagctccctgttctgttccgaacaatggctacttctttcttatataacaaacaagacatctacttttttatatctctgaattatattattatcgaactttgaatgagcttcaga

SEQ ID NO: 142432 - DNA, 210 bp, Arabidopsis thaliana landsberg
tcgaacacacatgttattgggctgcttaagtatgtcttctaataattttagttgtataatctttatcttattttattacaacgagtataaattatgtggacactatcgttctccttaatccgttttcatacggctatgtttcgaaatttggttatagacttgggctgtttatctctataatgaaactatatattggatgtaattttcttc

SEQ ID NO: 142433 - DNA, 754 bp, Arabidopsis thaliana landsberg
aaaaccacaattctggcaaaaaagaaaaatccccaaaatctagggttttcttctcgcccaatttcacttttcttctacgaaattctccattcctgccggctgtcgggttttctgaatcgattctccttcaccaacttcttctctggttctgttcgattctgattttttttcaaggtcaattttttcttctctttaaactctgcaaaatcgtgatcgattaaattcacctcagggttttttgatttctgaaagaagttaatcttcttcgaaggcgattgcaaaagagtgctctgctgtgaatttccactggtatgttcaattttttctgtttttgaaattttgtttgctagaattcgtgaagggattgaaaaaattgatgcaggtggctaaagaatctcttgaatattacgagcttatgtaggtttagagtgtaaattcgagacatgtgagattttggtgctttctcatatttttgcatgcttctgcattgcttcatagccctaaaattgctctcttttttttgtagttggagtctgtatctttttcacggttttagtgatgaatttttttttttgattggattttgaattggttactgaacatgtgttgacttgattatgtagagatgcaatcaaaaccgggaagagaaaacgaagaggaagtcaataatcaccatgctgttcagcagccgatgatgtatgcagagccctggtggaaaaacaactcctttggtgttgtacctcaagcgagacct

SEQ ID NO: 142434 - DNA, 1042 bp, Arabidopsis thaliana landsberg
tcacgaaactacacaaaatcacacataaaatttagaaaatatgggaggcacaaaattgacccatgtgaccaccactaaccctaataactccaacattcatggaccagtcgtagacgaagtagaaggccttattaaagtttacaaagatggccacgtggaacgatcccagctcttgccatgtgttgatccctcactacccctcgagctcggcgtgacttgctccgatgttgttatagacaagttgaccaacgtatgggcacgtctctatgtcccgatgaccacgaccaagtcgtcggtctctaagctccctttgattgtttacttccacggtggaggattttgcgtcggctcggcttcttggttgtgttaccacgagttcttggctagattgtccgctcgctcgcggtgcttggttatgtctgtaaattaccgtcttgccccagagaaccctcttccagcagcttacgaagatggggtcaatgccattctttggctcaacaaagcaagaaacgataacttttgggccaagcaatgtgactttggcagaatattcttggcaggagatagcgctggaggcaacatcgcgcagcaagtcgcggcaagattagcatcccccgaagatctagcactgaagatagaaggaacaatcctgatccaacctttctacagcggagaggagcgtacggagagtgagaggcgcgtggggaacgacaaaagagcggtgctgacactggcgtcgtctgacgcatggtggaggatgtctttgccacgtggtgcaaacagagagcatccttattgtaaacctgtgaagatgatcatcaagtcgtcgacggtgacaaggacgatggtgtgcgtggccgagatggatctgctcatggacagcaacatggagatgtgcgatggtaatgaggacgtgatcaagcgcgtgttgcacaaaggcgttggtcacgcgtttcatattctcggaaagtctcagcttgctcacaccacaactctggagatgttgtgccagatcgacgcttttatccaccactacgatccc

SEQ ID NO: 142435 - DNA, 325 bp, Arabidopsis thaliana landsberg
cgcaactattcgtcgtttcgggccacctaaagatgcacctaatccgttagggaaacttaagaagcgtttgaaacagaagacgagtgcgtgttacggttttcctctagctcttcagttacaagtttttgaatccattccggtgatattggagaggataaaagatccaaacgatcttcgggacttcactgagaggtcatctgaggggttgtcaatagcgtttctgcttcgtaagagttatattcttgatgctgaagttgatgacaagcttgtggttgcacatacattggaacctaagggaatgattaatgaatctgagttggtttgg

SEQ ID NO: 142436 - DNA, 208 bp, Arabidopsis thaliana landsberg
cttcttaccttagaatctctctttcttttctcttctgggctttactactctcaccggctgtgtcacagtcatcttcttgttcgtcacagacattttccggcgtcaaatcttaccctcactgtctcgacctccctgatcttaaagccattctccattactcttatgacgcatctaacacaactctcgccgttgttttctctgctccacc

SEQ ID NO: 142437 - DNA, 377 bp, Arabidopsis thaliana landsberg
ccatgcacctttctagacaaaggaaacagcacccattttgttacataacaaaaataaaaaccagaagaagaaacacaaatcatacaatacaatctatatattatggtttgtcatttattactttttattcttcgtccacatagactaggcgctcttagtcatccacttactgaacttcgtatgctcaaacttgatgaattgctcagcttctttgtcaacatcctctgcttttgcaacctctctagtgcccatattctcgctctttgacctcctcatatctgcatactcgaagccctggattggttcttcggctgcaaagacagctcggaactccttcatcgagtcccggtgatgatgattatgatgttgatggtgat

SEQ ID NO: 142438 - DNA, 257 bp, Arabidopsis thaliana landsberg
ggatagattcctctgatattcacaatgatggcactaagttggaatctgtcggagacttgattaaacagaaatctggcgatagttgtcttaccaatcccaggcggtccccaaatcccgatcatccttacttcatccaaatctaggcgcaacaattgttccagcatatccatatgagctctcatccctactaacccgtcgaaatctcttgatggtgtgaaactatttaacatgtttgaaacatcagtggctattttctc

SEQ ID NO: 142439 - DNA, 224 bp, Arabidopsis thaliana landsberg
caaaagtcgttaaaataagtgtcaattaagatatttatgcttttctaaaggtatgtatcctagaataaaaaaactaaaataaaaataaaagcgaaacaaaatcaagttaaccgtctcttgaaaacgtaatatatataatcgagaaagattcaaaattgatttaaaataataatcaaaccaataacagttatgcatgcaagaagttagaggaaacgcatcaggtg

SEQ ID NO: 142440 - DNA, 841 bp, Arabidopsis thaliana landsberg
gctgcaatggcttctcctcttctcccaacttcgactactcctgatcaacttcccggcggcgatccacagttgctgagctctctacgcgtcctcttgtcccgcgttctagccaccgtccgtcacgcttctgcagatgccagaccctgggcagagctcgttgaccggtcagcgttttcccggccaccatcgctctcggaggcaacgtcacgagtaaggaagaacttttcctatttccgagccaattacataaccttagtggcaatcttactcgccgcgtctctgctcacgcaccctttcgctctcttcctcctcgcatcgctggccgcttcttggcttttcctctactttttccgtccggcggatcagccgttggtcattggaggacgcacgttctccgatcttgagacgctagggatactctgcctgtccactgtggtggtgatgttcatgaccagcgttggatcgctcttgatgtccactctagcagttgggatcatgggcgtggccatccacggagcgtttcgtgctcccgaagacctgtttcttgaagaacaagaagccattggatctggccttttcgcattcttcaacaacaatgcctctaatgcagctgccgctgccatagccacctcagcaatgtcacgcgttcgagtctgagattgttgaagagactacattcctacaccgcatttccaaagtgtgatatttattcatattgaattgttgtaacttgtaaccattcttttgtcatttctgttttgtttactttgttgctggaattttgaaacacaattcatcttactatacaccattaaaacgagagtcagtaaagaagaatttt

SEQ ID NO: 142441 - DNA, 634 bp, Arabidopsis thaliana landsberg
aatcatacctgtactttgctttgacgggccaattcatcaccaatggtaccaatgtcttgctctttgccaacttcctcatcctcagggatagcgtcgagtgtcacgtgcctagccaccttcctcctcggactcgcctgaatcgtcttggtcaatatcaccgggacaccaccacaacaaccagctatataaacctcgacggacggagacgagactccaaactttggctggaaaaacacagaggcagaaggacctgacacgtgtccgtttcccatagcaatgtaacaatccatgccccatccagtcttgggatcactcacagttccattgttccaagcaccttcgattctatctaggttcccacacaagaccatatcctcgttatcataaacctcgaaatcaacgcatccggtaacgcgaacggtctcagtgctcacgtaagtcacctccgacgattcccggtcgactctgtcacggcggagtttaagcgacgccgtctgcgacgaaggaacgcgaacgccgttaacctcaagagaagcaccggtttcgcgacgagggtgacggagggtgaggaagtcagggacgttctcaacgacgcaaggagcgatacggacgtagaacaaacgaacctccagcc

SEQ ID NO: 142442 - DNA, 650 bp, Arabidopsis thaliana landsberg
cctctatccaccaagagagggaaaacgaaataaaaatagcacaggggagagacaaaatgagataaggatttgaagcctctcaccactctcctcgttttcgcttcgtgcttatttgtcaaacgcgaacatttcaccgaaacttagcgacttttctcgctttactctttctgggagcaatttttcagagcataggcgagcttaaaggtagctccttttcttagctttgctcaaatgggtttcttagttactcttcttatgtttccgtgataagatggttcgaaatttactagctttcttaatggaaaattttgagtttttctagttagactacaatgaaatttcaattcgaaattgagaaaaagagtggtccttttcttcatatgctttcagattagtctgtgttgttgtctgaggaaagcttgtaattttgacagtgtgtaatggttttctatgtgtaggtgacagttcttagctatggctacgattacaccttcttctattagcaatgcctggctcattcctggagcttcttttactgtaaagaagagtgattgttccatcaaatgtagcttttcgcgtaaagctgggaaacagattctatcatcaacgcagagacttgtgttacctttgtcgacttcacttagattgtt

SEQ ID NO: 142443 - DNA, 106 bp, Arabidopsis thaliana landsberg
ttaaacaaaaaaaaacaaacaatagtttaccacctttgtgcatattttagcacaaagcacttttcatcatcatttctttgcttgtcctaatcttatctcattctct

SEQ ID NO: 142444 - DNA, 552 bp, Arabidopsis thaliana landsberg
gattttaactttgagctctctgagaaaccaaagcttcactctgattcgctctcgaatcaaaagagacgacagagaaagaagaagaagaaacgcgaagaacagaaacagctctcttaagcttttcttaattattattataattttctcttcttaatccccaaatctcgtaagtctctcttctccaatctctgattcgtttctctgcttattataataatctgttaattatcaatcaaacaaaccaaaccccttttgattttatctctaaagtatcaatttttaatttctgttcagctgatggattcatgaaccacatcggctgatttgagtttccgggtttgatttttttccctttttgtgaaattgggttggaatctggagatctggatcttataaagctggaaactttacgtgtgcttgatgaaccgattttgattaggtgattggttagattcggaaatttgaagacttgttaatttgggtttgggattgggattgatctgaaaatttgtagtttttggaagatatgttggaagatcgatcaccagattc

SEQ ID NO: 142445 - DNA, 571 bp, Arabidopsis thaliana landsberg
tctctctgcactcttctttacatcggttagtaacttgatccttaaatgcaaatgaaagaaaaaagcttctatgttttttgatccttcagtttcatcccccacgttggcttgttgatctcgttttagttcctgcgacattgttgttttaaactcagtgaaccaaattcttatatgaagtttatactttttatggtgtgaacagggaccatcctatctgtaacaataccggctttgtacagtaaatatcaaagcaaagtagacaagtgttgcgggacgattcacaggcggttgtctcaccactacaaaatagtagacgaaaatgttataagcagactctcatggagcttatccaaggataaagattcatgagcttaactttggtgattctgagaatgcttttacttgtttttgtttagcttttcttgttattcaccatttgtagtataactaaacgccatatccagaatgaatataagatggtttctttgttcaactaaattaactcttgccttcgtctgaagcttaacaccactggaggaaaaaatacaaaaaaagtttaacaccgctgttc

SEQ ID NO: 142446 - DNA, 473 bp, Arabidopsis thaliana landsberg
ctccaaagccgtcatttttgcgaggcagatggcgaagcagattcgtgttacgacgccgtcgatgtccgcaacacgctttctctcaacgggcgacaatggtcaagtagaagagcagcagaaccctccagagcccttacccaacagacccttgcgaggggagagatcttccaactctcacagagaaccacccgctagacaagcccacaaccttggaaagagtgatactactctgtctgacgatggcttcctcgaacagttcaagcttggagtcaatcaggattcacgggaaacccccaaaccggaacaatacccgcaggagcccttaccgccgcctgaggattccgatgagatcttcaagaagatgaaggaaggaggtctcatccctaacgccgtcgccatgcttgacggcctctgcaaagatgggcttgtacaggaggccatgaagcttttcggattgatgcgtgacaagggta

SEQ ID NO: 142447 - DNA, 839 bp, Arabidopsis thaliana landsberg
aacctctcttcctctcgccgcctccttcctcctcctcatctccttctcctccgccgtagacacttcccgtctcttcctcaccgtcgtcaacaactgtcccttcactgtctggccagccattcaacccaacgccggccaccccgtcctagagaaaggtgcttcgctctcccaactttcactcaccgctccttcaacgttccaaccacacactggtccggtcgcatctgggccagaacctggtgtgcccactacaacggaaaattctcctgcctcaccggagactgcggaaaccgcctggaatgcaacggtctcggcggggcaccaccagcttctctagctcagttcgacctccaccacggtggtcaccacgacttctcctcttacggtgtctctctcgttgacggttacaatgttccgatgaccgtgactcctcacgaaggccatggtgtctgtcctgtcgttggttgtcgtgaagatctaataaaaacgtgtccggctcatcttcaggtccggtcacacagtggacacgtggtggcttgtaagagtgggtgtgaggctttccatacagacgagctgtgttgtcgtggtcattacaatagccctaacacgtgtaaagcttcgagccattcgctgttctttaagcatgcgtgtccttcgagtttcacttttgctcatgatagtccttcgcttatgcatgactgtgcttctcctagagagctcaaagtcatcttctgccactaatgtttcggccatgttctagggttattgtcgtaacatcggactgatcttctaatgcttttgtttggttagtctgattttgattggtttagtatgcgatt

SEQ ID NO: 142448 - DNA, 304 bp, Arabidopsis thaliana landsberg
attcctccgattcttcttcttcacctccccttcttcgaatttctctccttcccttttcatccttttgaaatttctcgtctttcttcttcgaaattggaaactcacagcagcacctgaaaaataacatcataagcttcaagatccaatttgggtcgttctgtgttttcttctgatgggtctcgtcgaaatgtagaacaagtttggagatgttgacaatggacaaggaatttgattcaaagcttactcttcaagggaattcatcttcaaatggtgaaactatttccagaagcaaaagcttcgcctt

SEQ ID NO: 142449 - DNA, 402 bp, Arabidopsis thaliana landsberg
atgaaatgccgtgcatttatattagtactgtattaatcctttatgatagttgtatctttcaagaattatgataacgagaccggatcttaaaatccattgaatgcttatgtttttatgtattttatgaatctgattaatgtgaaactgacattggaaactgttatatgggtccataattaaatgattacatagacaattcacattaaacattcatatacataggtatcgtgtatatatcatatctacgtatcaacaaaatatatatatatatatgctgtaaaaaattagaattaagataagctgagacaaaccagttaaattaattaacgttttcaatgctagtaaaattaattaatcagtttgattattaagttagtagtcgtattagtcaaccgcgtaaga

SEQ ID NO: 142450 - DNA, 227 bp, Arabidopsis thaliana landsberg
gtaagtaaagaaccaaaactttgagaagtataaaacagtttaaacaatagttggacacagaacatctcgtatataggtcaaaagaaacatattgagaggagacagagctgaaactaaagctgaattcatttgtttatttaccaaaaccaacaaaagcaaaacactcttacgtcatcctaaggctgtgaattgaatcatcaaactcaagaactgaaattttggcgtcg

SEQ ID NO: 142451 - DNA, 855 bp, Arabidopsis thaliana landsberg
cctaaaagatatccaagttcaaaagcaaaaaaatatcttcttttctctctctctactctcttctcttcttctcttcttctcttcttctctggctgggcaaccatgattactgtcgtcacctccaggctctctctccttcctccagtcttctccgtcgttaactcttcttcttcgcgttccaaaggtgctcaatttatttctgccacgtcttctctttatagcactctgttttacacacgtcgttgattcttcagttttttaaaagacccgtcttatacaaaatttcagtgtaaccgatccctgaaattcgttaaagggatgaaattttatctaagattcggagttttcttttcgaacatagtggtaatgtttgtcgaatgcttgatttggtcttccacagctgtcactatcgagtttgaagatagaaatcttgtgttaacttagtatgtattactgcataatgtcaattctgtttgaaagcatcagaatttcggaacagatttttgtttcgtatagcatcgatctttgtcttgtgtgtttttatcttctctctgaagcctgcatgaacccttctcttatggctttaattgcagatatgaatctagagccaaaaaagaaggttaaattaagagaagactggagagaaaagtccagacctatcccacccggaggaacctatccagctaaagaccattgcaggttttttctttcttttttgtttgtttgtttgtttacctcactatttttgtctcattcttatcaagatccttggtgttctgatgggtttgcagtcagtgcgggctatgcgacacctactacattgcccatgtgaaggaggcatgtgcatttcttgga

SEQ ID NO: 142452 - DNA, 123 bp, Arabidopsis thaliana landsberg
gtccactggcacgttaaaactaactacaaagactattggcgagtgaagatagcaatcacaaatttcaattaccggatgaatcatacactctggactttagcaattcagcatccaaatctcaac

SEQ ID NO: 142453 - DNA, 1314 bp, Arabidopsis thaliana landsberg
tcttctccacagttcaactcaaccttccaaattccaatggcgacatcacgagctttcactctcttcgctttcacattatctctcctcaccgtagcttctaccgtctccggccataacattactcaaatcctctctgatacgccggaatattcctcattcaacaactacctttctcaaacaaaactcgccgacgaaatcaacagccgcactacaatcaccgtccttgttctcaacaatggcgcaatgtctttcctcgccggaaaacacccactctccgtcgtcaaaaatgctctcagcctcctcgtcctcctcgactactacgatcctttaaaactccatcagctctctaaaggcacaactctcaccaccacgctttaccaaaccaccggacacgctctcgggaacctaggattcgttaacgtcaccgatctcaaaggaggcaaagtcggctttggctccgccgctcctggctccaagctcgattcctcttacaccaaatccgttaaacaaatcccttacaacatctccgttctcgaaatcaacgctccgatcatcgctcccggaatcttaaccgcacctgctccttcttccgccggagttagcaacatcaccggacttctcgagaaagccggttgcaaaaccttcgcgaatttgctcgtatcgagcggtgttattaaaacatacgaatccaccgttgaaaaaggcttgacggtttttgcaccgtccgatgaagcttttaaagctagaggtgtaccagatctgacgaatctcacacaagctgaggtggtctcgctcctagagtatcacgccctcgctgaatacaaacccaaaggatcgttaaagactaacaaagacgctatctccactttagccactaacggcgccggtaaatacgatttaacgacgtcaacttccggtgacgaggttattctccataccggcgttggtccgtcgagactcgccgacacggtggtcgatgagacacctgttgttatattcactgtggataatgtgctccttcccgctgagcttttcggaaaatcttcatcgccggcgccggcaccggagccagtgagtgcaccgacaccgaccccggctaagtcaccgtctccagtggaagcaccttctccaaccgcagcttctccgccagcaccaccggtggatgaatcttcaccggaaggagctccgtcagactcgccgacaagttcagagaacagtaatgcgaaaaacgcggcgtttcacgttaacgctcctgcgttgttcaccgcattggtcactattgccgccacatctctcttgttataaacaaaacct

SEQ ID NO: 142454 - DNA, 122 bp, Arabidopsis thaliana landsberg
aaaatggcttcctcatcaacgagaaagtacgagacacgaaagcgagatccaaactctaaaatcgcagctcttctcgttatcgacatgcagaatcacttctcctccatggccaaacccatcct

SEQ ID NO: 142455 - DNA, 234 bp, Arabidopsis thaliana landsberg
tcaaatccatcatccatggatttacctgaagaatgttgggaattaatctgcaaagctatcgatgaagacgattatcgattcctggaatctgtttcactcgtatcaaccttgttcctctcaatcaccaatcgcgttcgctctactttcgtcgtcaccgatcgagctgttcctttactcaatcgtcatctccttcgattccgcaacttgaagcgaatcagttctctgatttcactc

SEQ ID NO: 142456 - DNA, 620 bp, Arabidopsis thaliana landsberg
tttccaattgggagaagaagaagacgacgatgaagcatttatctgattctgggtctgttgaaaatcaaaattttcttgagaactttttttgaagagttatgattgcattagctgcttcttcgttggggaatacaccgattgcttcgtttaaccgtcattttagattccggttacatccacgaaaccctctgatacaagcagcggtttcaccttcgccttcttcttcttctcctactgcttcatctggctttgatttgagttctctcgaatccgccattaacaaggtcaattcagttcacaacctttacatgctttacttcttgattcgatgaactctgcagttaaagcataattctgaaagtgggatcatttgttgatgcagaaagatagtaatggtgttaaggaagctctcgataaattgagtgaagaaggttgggctaagaaatggagctcccagccgtatctttcgcgccgtacggtgtatatcgatctctctatctaagcttatccttacgatttgttaaaaccatcgattagtcgattagtcagtaagagtgaagaagtgatgtgtcttttttttcttgtatcagacatcactgcgggagctgacaactctcggt

SEQ ID NO: 142457 - DNA, 140 bp, Arabidopsis thaliana landsberg
caagtaaccactaagttctgattaagtatttttttgttccctttgtcattgtagcaaagtcctagaattgacactgagagggatgagttctttatgtgtctgaaccggctctttctatttctcaagatgtcttgccctag

SEQ ID NO: 142458 - DNA, 325 bp, Arabidopsis thaliana landsberg
tgtgattatacaaagattgattctaacccctaaacataactctatctatctcctaaacactctgaaagctataaaaacattacatcttctgattaatgccaagttaatgaatgataagccgtatgcgtcgtgcaagtaattaagagttgcctcgaaggtgtctatgctctaccagaagaaacgtgtccaagattgttcaccggttgaatctgattcactacccaattcgtcatcatagctactatcagtgggaagcaacttgattctgtcagcatgctcaactaaccaatcactaaatcctggagaagctgcaagtcctgccatt

SEQ ID NO: 142459 - DNA, 449 bp, Arabidopsis thaliana landsberg
atagagaaacattacaagaagcaaaaaagtggagtcgtaactcctacaaagcaaggaaattatggaaattaagtggagaagatggtttcctcaacaagaggaggaagagccagtcatctcttactttgaaacagaaaaacttaaaagtatgagactgtattttccggtttggtactctgcttctgtttgatgttctgcgccgtggtgcttcggttccatcaaaacatcgatgaagtttattatccagtaccagtgatcttctccaaaacgtgaagtctcgcctctttgataattttgctatatttagccacagtttcaccaacctccgtgattttcgttgttaatgtcttcacatcatcctcgaggctttccatgtctagtttcacgtccacctcatctccttcactcccaatagcatcatccacagtttgcaacagagacgagataag

SEQ ID NO: 142460 - DNA, 387 bp, Arabidopsis thaliana landsberg
tacacttcaacagttctccttttaaatagaaaattgtaaaggactgacccccacatcattttgacaatatccttctctggatctttgcagctttcccatttctccttcaatgtctgcaaataatctataatactaccagaaacaatggaaagaggagttacaatcatgtggacaaacatttcaagtactcctataattcaaatagagaaaacagcacatactcttgatgatatttctctaaattcgagtaatatctccttttatcagccctcaggcattcctcccgtgaaacgatttgatctggatgagctttaccggagcagacagctgttcccctgaaaccacaatttagattcaaaacggagtcgaatttctgagcataaatta

SEQ ID NO: 142461 - DNA, 423 bp, Arabidopsis thaliana landsberg
tacttaagtaacatagcattcaaggaattaaacatctagtcaacaacatttcagaaactgaaaattaaaaaagatctacatcaacaattcaacaaatgaaacagtaaaaacaagtcattacacaccaatggcatcaccagtagatgaaccacgatcatcttctacaaggaccaccacgttatcatacactaaagcagctgtggctcctccaagcagaggcccaacccaatacacagcttggttcttaaagcttccgtaaaccatcgccgacccaaaggcacacgcaggattcattgaacctccagagaatggaccagcggctagaacattggctcccgcaacaaaccctataaatataggtcccactgctaaaggtagcccacgtctgggatcgctagccgtgaacacagtataaaccaagac

SEQ ID NO: 142462 - DNA, 354 bp, Arabidopsis thaliana landsberg
tgaatatattgatatatctatctctactcgtcagcaagctttcctcatgcttctctcgtcattcatttgctttttcataatgatgttgtcttattgtctacattgttttaaggaacggttagctacgatttgtttatacatttaagtaggctcagaattatgccaacaaaagatagtttcagagtttattgcaacaaaaaatagtttacaaaaagggtcccaaaacccatttaatcatttaaatgatttagggtactgttactaattatgatatgtgactgttgaaaacttctacaatgtttatagcattttttgtaatggaactcccaaaaaccctgagggctcttaaagatc

SEQ ID NO: 142463 - DNA, 395 bp, Arabidopsis thaliana landsberg
agaagagagtaatacgtcggagacgacggaggctgaggttgattcggttgtaccattgacgccgtcaagttggatggggttttgggatgtgggagcaggagatggtattttcagtattcctccgttatctccgacgtctcccaacttttccgttatctccgtcacttaaaacttcggaaaagtcaacgtacgatgacgttttcacttgcgtcactctcatgatttcatttattcttgtataatataaaggtagcggtagtgtgcaaatatcaaataagtagtttaattagtaccaatcattttattcattattttttttagtagaatatttggatgttgaaaatataaatttaattttgtatttgttgatgttataaatttattgattgtataaa

SEQ ID NO: 142464 - DNA, 787 bp, Arabidopsis thaliana landsberg
atggagaagtacgagaagctagagaaggtcggagaaggaacatacgggaaagtctacaaagcgatggagaaaggaactggtaagcttgttgctctgaagaaaactcgtctcgagatggacgaagaaggtattccaccaactgctcttcgtgagatctcgcttctccagatgttatcaacatcgatctatgttgttcgattactctgcgtcgaacatgttcatcaaccatcaaccaaatctcaatctaccaaatccaatctctatctcgttttcgagtatctcgatactgatcttaagaaattcatcgattcgtataggaaaggacctaatcctaagcctcttgagccttttttgattcagaagttgatgtttcagctttgtaaaggtgttgcgcattgtcatagtcatggtgtgcttcaccgtgatcttaaaccgcagaatcttcttctggtgaaagataaagagcttcttaagattgctgatttgggtcttggtcgtgcttttactgttcctcttaagtcttatacgcatgagattgttactctttggtatagagctcctgaagttcttcttggatctactcattattcaactggtgttgacatgtggtctgttggttgtatctttggttagtagtctcaattatgcttttatgtttttgaattcgtctctctgcgatgtgattttgcattcacgctgtttcaatctttgaatttgtataaatgagatggttcggaggcaagctcttttccctggtgattctgagtttgagcaagtgcttcaaatc

SEQ ID NO: 142465 - DNA, 635 bp, Arabidopsis thaliana landsberg
acaaaacatatcatcgaaatcgatttaaggaaataaaacttccccgcattatcgaggagacaaaaacatatccgatcccatccgaagtctaagatatatcctttgtttcttattcttcatcctcatgactatatatagatcggtccatcttttccccaaaatatatcacattataaatatttcaacatataacgcaagcattagggttttcttcgatgctttgggcgtagtaatacgttgttaggtgaggattatatgctttatacgcctttacaagttccaacacatgatcaggtggcggcacaactggttgcggctgcgcttgtggttgatctttcttctctccttccttcttatcgccaccttctttcttctcttcttccttcttcggtgcttctccttcctttttcccttcttcttttggagcttctccttctttctttggcggctcgccaccaccttccttcttcggctcctccttcttctccttttccggctctttcgcaggtcccactagtacgatatccgtcatcggccaatactttcttagcttacttactacatttaccggatccacggttccaataaccgttaatatcttctccttcatgtccattgcaatggaatcgattcct

SEQ ID NO: 142466 - DNA, 375 bp, Arabidopsis thaliana landsberg
caaacatataaccattttaattttgttttccgcatgtaagtatatagggcaggaatggtttttcttggagcatgcctatatttctgttttattatttgattgtctatgaaaatctttgtagaacgtgaactccatagaagagaagaaaacggtttaattaaactaaaccaagtttccatttggaagagtctcataaggcctattgcaaccagctattggaaagaattaaaatccatcttgtaatataataccatagtagtcattttttgtgttcttaaaattaaattagttatcaacccaatgaagcaatcgaagatgcaaccgactaggtctggacgtttggtagtttcttatgaaaagaaaggtaacaatgtc

SEQ ID NO: 142467 - DNA, 271 bp, Arabidopsis thaliana landsberg
gacttcctccaccactgcttcctccacctgaagaaccacctcgagagcctccgcctccccctcctccacctgaagaaccacctccaccggcaagctgcctacgcacaaaatcacccgaaaacggcattgtttctaccgttaaatgatgacgttttacatcaatagatgacacagaagcttgatcaagtgaaccaacggcttggatttgcgtatgaatcagaagggatagaaatagatgaaacattatgctacgcatttggatttccatttt

SEQ ID NO: 142468 - DNA, 414 bp, Arabidopsis thaliana landsberg
ttttacagacagcacaagcagctttaaagccaagcaatatttgtttatctcaaccgtaatgattcccataaattataaacaataatgtctacaagctgctcaatcatcagtcagcagtgaaatcaggctcaggaggcttctgcagcttcaccaaatccctaatctttgtgttccggttcctgtgaatggtgcgaagcgcattagccgcaaacttagtggcaagaaatgcagccccaatggagtatgaaggtccagcggttgagctggacacagccgcggcctcggcttctgcctcttccattttcttcctcttgcagtatctacgccaggcagcctggatgaaacaagcagcccaagtcctccattggtgagagtaaaacctgaatgtgtgctgcacttgcctgctatgtaagc

SEQ ID NO: 142469 - DNA, 405 bp, Arabidopsis thaliana landsberg
atggaaagtgaatcacacatgttactatcgcttttgacaagcagatcagccatcgaaccaatggttgtgtacaaagataaataaacctacaacagttatgtaacgtatactcaatattagaatacacattgccaaataaactgcatcaagaattgttccgttaaacattgaatagtagggttaggtggctgtaagtagcaatcacctgcaaaagagctggtctatccttgcttatacagtcaaacaacacttgcagacagaactccttgaattcagaatcagatctggatcaatgaatatgttagaattcgcccttctgagtttgccaagcaaactaccgaactctgttatgacttatggaactaaaagcacaaataaatgtgaatcaaccggataaaacagtac

SEQ ID NO: 142470 - DNA, 562 bp, Arabidopsis thaliana landsberg
tgggtgtaaactcaatgatttgggattctattatccttttgtttaatccaccacctaaaccattgttaggatgagtaatgaagcctcttaattgtctatttcagctacagaacaaatgctatttgtttagttgggttctccatacaaaagttgaaaaacactgttctctactttgcaataatagacttcatcaccgactagctttcacagaagctttcaccatatccagacccccagatgataatccaaggaagtatctgctgctcataccaaacggaaatggcacctgcaatggaagaatatcatatgggaaagagttaacaattcatcagttgacaaggagaaatgtttgtttccttctcttttgtaaaaagatcaactattgaagtatattagcagtatcagtatgtaccccaatagacctctgccttgccatatccttggtgtgacagataagacgacttttgcaccttgcctcataacttgaacagaaacggcttgtccctggttagactgagcttcagcggcaagcctttgcaacaggttgtcaccaccctccacg

SEQ ID NO: 142471 - DNA, 250 bp, Arabidopsis thaliana landsberg
gataaacaaaaatcaaagacactgtaagatgactcccagtttcaagcttgcctaaaaggcaatgataaatataaaatataaaaattgtgattatttcatagcaaggcgatccttttaagacaataacgtttataagtatagtcatccctaacctagcaatatgaagaatcaaagaccaaaaaagaaaaaatgctttgtttaaggtccaggttcttgacaccaaaagcaaatattgaagtacgtcaaatat

SEQ ID NO: 142472 - DNA, 278 bp, Arabidopsis thaliana landsberg
attcattcattcattattgagagactactgatctctctctctctgcatgcatctttctctctattaatctctccagtatttgtcaggatttgggtatttttttaataacgatcagtgtccaatctctcttatcgtcttcataagtttcctattatttcattcttcttcttctttattctcatttctctctctctctctttttactcacagacaaatctttttcacatctctttgcaaattcttgagaattcattcaagttacataaaaagctgagagc

SEQ ID NO: 142473 - DNA, 340 bp, Arabidopsis thaliana landsberg
gctggttctggtattggtggcttgcttagtgccgtccatgctttcaatacaggtatcacatgattctcttgtcgtcaaatacttatcatttctacagtggatcttatctctttgggttttcagggatcccctatcttcaaaatcggttttccgggtcaaagcggctttcctttcttgtgggggtatgtattttctcttgccttacctactagttctggaattcttcctgtttcctcttttctgttgacattaccttgtatgaattttatggacttctcaattattgcttttccttataggttccattgcttctagtatattcaggtgtaggggctgcttt

SEQ ID NO: 142474 - DNA, 509 bp, Arabidopsis thaliana landsberg
tctatatgttgtataaatatatatatcatgacagtcgctctccattacttcgataatggttcttttttttttcgaattctttctatttacactgactaactcctgtattagcttcgttgactaacctggtcacaagtccttgaagcctctgagctccaaagctaggaacaatcttagccacattaccgaccctggagcattttggtttcccactgcaccatccaccaggagtaaaactatctttatcattcctccgtttaagtaattccttatcgatcttattaagtacttcatcatctcttctgaatttcctagcaaacgcagcaccgctccatatcatcggcattgtgtcgttgagtgacaacacgtgtgggtgctgctgcggcggattgtcccaggaaatgtagtgtaggtcatggtttactgcagtttttgcaaactcaggcacgttgcaaatcacggtctggaagtaaccttcgggcgatgaaacgaagttggtgtaatacatt

SEQ ID NO: 142475 - DNA, 450 bp, Arabidopsis thaliana landsberg
aaaaggatagagacgacaaaactccattgaagaacttattagagaagaagaacaacaaggaagataacgaaagtcactaaaatctttcaagacccatgaactctcaaatcactcttttcttcttcttcttctcaatcctctccctctcccaaatctcaaattcatcatcactactaaaaccacacccatgtccaattttacccctcccatcctcccaacagctccaatggcaactcggatccatggccatgttcctccattttggacccaacactttcaccgactccgaatggggcaccggaaaagccaacccatccattttcaacccgacccatctcaacgcaagtcaatgggtccaaatcgctaaagactcaggcttttcccgcgttatcctcacagctaagcaccatgatggattctgtctctggcctagcgaatacactgattact

SEQ ID NO: 142476 - DNA, 317 bp, Arabidopsis thaliana landsberg
gaataaaccaataatatatggtgtgaattctatctagtagtagtcaacatggcttaacccctaccactctctttgtttgtttcttcctctttataatccatctatctttagtatctaaaatttcactaattttggtttcccagtggatcttctacttaggatataaccaaaatgcatctatatttaaaatttacatacacccaacataaaaaaatttgtgattttgcttactttgcaatctgatctacacaaaaagaattgaattatgacattttttatctgtgagatttatatgattgtctagtgctgtacactcc

SEQ ID NO: 142477 - DNA, 387 bp, Arabidopsis thaliana landsberg
atctcagcggccgagcttggagatgctctcaagaaccttggctcggtcacacacgaggacattaagcgtatgatggcagagattgataccgatggcgatggatacatctcgtaccaagaattcattgatttcgcaagtgccaatcgtggtcttatgaaagacgttgccaagattttctaaagtaaaatgaacagatctaatctatatttatatgaaagggtttgagaattaatcgtgttcaatttgttttgtaatgacaatcatttgatgaagtatagtttttttttctttatgtctttattttcatgtaatggaagatcttggattattcttgaagtggattgcaacgatgtattgaagaattcttcattctttagcttttttttt

SEQ ID NO: 142478 - DNA, 253 bp, Arabidopsis thaliana landsberg
gtctttattttaaggcttacatgtcaactgatcgccatgactgaatattatcttcggatacctccaagatatcaaataatataatatttgaataatattaatatcataattctgatttttttgtatataaagcaaaaggatacaaatgtatatgcttttcatattttcatctatgtgatgtatattattgatttttcttaccaagataccaccgtattaatttttatatcttattatttattactggtatcgt

SEQ ID NO: 142479 - DNA, 206 bp, Arabidopsis thaliana landsberg
  unsure (1)..(206): unsure at all n locations
agttttttcaatcctcaaggtgtcaggattcacataatgatccatcactatacaaaggcaaaaaccaagaccattcactaatctgagtctctctgccacaagatttatctgtttttgtcatcatcatcatcttcattntaaactaatttcacaaaatcaccaaaaaatcctaatttcatactattttaaaaaaattaaacctaatc

SEQ ID NO: 142480 - DNA, 437 bp, Arabidopsis thaliana landsberg
tctcgggctccaaacgtatgaaccagaacaaagccttttagatagttccgtctgcgaaccctaaaatcattcaataaacttcgaacaaaaacgaatgcttttgttcaatcatcttctcagtttctgattccgaagaaaccctaatcaaataaatcatggactgctcatgcagtactcgtccttcgtctctgcttatctcttccgaaccatcttttcgctttcctcactctaatttctcctcgaatctcagctttcaggtttgtattagtatccttagtcttctgctttaagatttgattcgaaatcaatggagaacaattttaaagttctgagattttctattttattttccagataccgaaagatacgaagttggtgaagcagcgtttggtagtgagaagttcctctggttctgattatcaaaacggcgacgttaa

SEQ ID NO: 142481 - DNA, 135 bp, Arabidopsis thaliana landsberg
tggtgtgttggatttggaaactgtgtttgctctctcttctttcaaagaagatttcggatcctgcttacaaagattacagaaacctgtttgttagaaatcaaatccagcacaaacgatcaactctttctcaaacat

SEQ ID NO: 142482 - DNA, 438 bp, Arabidopsis thaliana landsberg
gcgaaatcgcttgaccactcaagaagagaaaacgctaacaagtcccatagtttgtgtttattggacttctttcctctcatcttctccagcagaaacaaaaaaagctgaaagatgtggttttttggatcgaaaggagcatctggattctcgtctcgttcaactgcagaggaagtcacacatggtgttgatgggactggtctcactgccatagtcacaggttttcttctatcaacactttcatgccattttgcgacatggggttgtctaaagttgtagactttttttcttataatttccagaactttttgtcctctctgattctgtcttcgaattgatttcatatctagtaaaaagacttgacttttattgtttagacaattggaatttgaggtttttatcatcagggtctgtctttgattcggtcaactctaataaata

SEQ ID NO: 142483 - DNA, 817 bp, Arabidopsis thaliana landsberg
ctcaggcacttgtagcacgtcgtctctcctttggtttctctccttatattcgacgagtgactccgattggatcgctatttcgtcatttctcactttcctaaaagaaaaaaacgaatctctctccaccatcatcacctttctccttcacttgcctcagatctggctgcgatttcaaatcttccttagtttctctcgcatcgctcggccgttgacggtcccgtcctttccgtggatctgattctggccccggattctctcgccgcgatctgaggtcaaacatggcggctgctaacgcgcccatcattatgaaggaggtcctaacggtgagttctccgtttttaaatctccgggaatcgagctaaaattttggacgattaacatgtttctatagttgtagtctctgatttctatcgatttggttctgctcacactgttatatgattgattcaagtttcattctgttctcaattctacccgatcgttgagatcaagttctctgatcagattttctctgcggacgctcagatctgtgttatctgaatgtatatagtccttagttttaagttattgtgttgcgcaatgtgcttatctactcggatcttgtaactaagttaatgaactatgccaattgattacttttgttttggaaattttccagcttccgagcgttgggatcggtcaacagttcatcacctttacaaatgttactatggagtctgataagtacatatgtgtacgagagacggcaccgcagaacagtgttgtaattatcgatatgaatatgccgatgcagcctttaagaggcctataactgctg

SEQ ID NO: 142484 - DNA, 123 bp, Arabidopsis thaliana landsberg
atttccatacttgtagctattcaatgtattgtggaggtgataaaactttgccttatgggcagtatcagaatggtttctcggcgagacctccaacggattcttacgagagagattttttgaaac

SEQ ID NO: 142485 - DNA, 2551 bp, Arabidopsis thaliana landsberg
ggtaaaataataaaaacggcatgcattttcgtagactttacaaaaagagtttatagagtggcccaacactttcttgtttttctatttttccgcgaaatatttgattcatcactgaaagcaaacgttttaatttcttttagataaaaaacataaatttaaagaaataatttatagaacttgtctcctctgtctctcactctctatccaaaattaattaaaacgaggagaagaagaaaaaaagaaagacaaaactttgttaataaaccgacccagaatcgtggtcttcataatctgtctttaccattttcgttggatttcttcagacagtaatcagaatcatttactttcgtatacagattcattttcttcaaaacgttttatttgttaaggaaaaaagtacaaaactttcgacttttgttttccgggttttgtcaataatggattccgattcatggagtgatcgtctcgcttcagctacgaggagataccagctagcttttccatcacgatctggttagtttaaatgatatgaattttttctccctctgttctaaatgattgttatctgatcttttttttcgtctgaaaattgatgggcgaaggtagtttaggtgatagacttgtgttttctttccgatttagaatctctgttttgaagattaagaaatatatgagaaatcttcgatcttgttttgaaagatttcgtattttgtcattttttcatcgcctagggctttgcttgatactagcaaaaatgaaggaaagggggcttttgtaattgatttttattgactgatgaaatatggtttgattctggttttgctcgattcctgagaaaatggatgaaaattatccaaagttgcagtctttgttagcattttagttactcctgtgatgctactatgctcagtgtttatgaacatgagaaagtgaagatattgttctcctcagaagaggagaatatgtttcatatactgtaacctcagaggtagagtaggggtttagtatatctgattactctctttgttttcttatagctttgctgtataaatatttggttgatgtgtttttgggattgcagatacattcttagggtttgaagagatagatggagaagaagagttcagggaagagtttgcttgccctttctgttctgactattttgatattgtctctctctgctgccacatagatgaagatcatcctatggaagccaaaaatggggtaactttcttttttcttttttaaaacaaccatttgaagcataaagatgcgtttatacatttctgattcatcacatgattctcaaaagtttagactgagcggtgttggttcctcctctgttgttacttggatgatatgacaaagaaaactgagaataatagcatgtttatagccgattcacgaaggaatagtaggatcagctgtatctattgcatctgatatttgggggattttgtttggattctatgaaaacttagcgtttaatctagtgaacattgttattgcaggtatgtccagtttgtgcggttagggtgggtgttgacatggttgctcatataacccttcagcacgctaatattttcaagatatcctttttttctttctcccaagtcatatataacaatcaatcttttctatcagtgtttctatagtctgttattaagttgtgttcttgacaaaatattacatgcaccgcaagagaaaaccaagaagaggcgggtcatattccacattatcgatcttaaggagagagtttcctgatggaaactttcagagcctctttggaggatcttcgtgtatagtatcgtcttcctcatcatccaatgtagctgctgacccattgttatcgtcgttcatttctcctattgctgatgggttcttcaccacggagtcatgcatatctgcagaaacgggtcctgtcaagaaaacaactattcagtgtttacccgaacagtatgcttacttcttctcaatcattttactttgcctaacctcttgttagtaaaaatctggtatttcaagactgattgaacctagatgattctaggttattttaagtgtttggtctataactttccattggaacatttgcttcaatgttttacttttgggcacacttgggatttatgagccaaactgaaactctttgatcaagttgagttcttatacccatataggacatgtatggatcactgatgaaggttttgtggatgataggaatgcgaaaaaaacttctctttcagctgaggatcacaagcagaagttgaaacgcagtgagtttgttcgagagctattgagctctacgattcttgatgacagcttataatggagtatcgcttctggtaacttgtcagcaatgaggaaactccatgttctgtctcagcaggacaaagtacgaaattattgtttgtggggagcaaataaaggagagagattatgaatgagtgtaacctaagaacacattagcttctgcggttaacgctccaattgcctgtaggtcatgagaaaaaaaacaaaaatgtatgtatttcacgtattcgcgttcaat

SEQ ID NO: 142486 - DNA, 411 bp, Arabidopsis thaliana landsberg
ctttgatcactcactcactagtaatggaggctcttcaattttccagcgtgaatagagttccttgtactctgagctgtaccggaaataggagaattaaggctgccttcagctctgcgttcaccggtggcaccatcaattcagcttctctgtcctcctctaggaatctctccacggtttggcttcaaagtttgcttcttttcgttttttagtttggtggttttgtaagattttctggttatttagtcttctttgtgatgttctgtgttgagtagcgagagatatggagttgggtgaaatcgaagactgttgttggccatggaagatacagaagaagccaagtgagagccgagatgtttggtcagttgactggtggcctcgaggctgcttggagcaaactcaaaggcgaaggct

SEQ ID NO: 142487 - DNA, 454 bp, Arabidopsis thaliana landsberg
gcttgtaaattaatgacacaacacattaaaaattgtaaaactaggtatccacacattagcttcatattttcaatatggtttgataagaaaacgaaacctaagagaacgacattgactaaccatagcttttagaaggttctttgtagtccggtatctcacctcaaccatattccttgttaagataaaaccccagcaagaatgaacacgacaaaactagctaacatggctaacatcaggccactcgaatgtccaattttggcgacgcataggagatgcatccgagtacaacgagcacttggggatgaaaaaagcctacgaatctcaattttgacgcttctaagaaaacctataaggaatgtatagagagagaaatataagtgcaatgtagtgagatcgatcacactccctacaagataggaactatacttgacttagttcacaacataaattattg

SEQ ID NO: 142488 - DNA, 380 bp, Arabidopsis thaliana landsberg
caaaaatgtgatattgatcagaaataaccttttcgataagatcgagaacatcttggttatccacaaattcaatgtagctccaatctattgcttcttttgtgtattcctcctgttccatcttgaaaacgtgctgaaaacagcaatagaaacttgtaaaccccaaaagcctaatctgtgaaactcaggggaaatggtttacactacaatcaagaaattacctgattgaaatgttgctgcaacttctcatttgtgaaattaatacagaactgttcaaaactgcaagagatcgctattagcagtggaaacacaaaaatctaacggaagtttagttcttgaacctttggcgcaagtagacaattcccttacctattttggtttta

SEQ ID NO: 142489 - DNA, 218 bp, Arabidopsis thaliana landsberg
ctgctgtcggcgagagattcttagctcgtgacatcactttccaaaacacggcgggtccgtcaaagcaccaagcggtggctctccgtgtgggttctgatttctccgccttctacaattgcgacatgttagcttatcaagacactctatacgtccactctaaccgtcaattcttcgtcaaatgtctcatcgccggaaccgttgacttcatcttcggaaac

SEQ ID NO: 142490 - DNA, 285 bp, Arabidopsis thaliana landsberg
aacaattgcacttcctcttcctcaccaataccaatgtacctttagtcaaaagaatgactaattacaaactccaaactcaaaacacattgttgcaaaagagagaactaacaaacccggtttcaagttcgaaaggaagagggccttcaaaaccgggaagaaacttgacgatagagccagaaccaacatgatgatttaagataaacagaagcagaaccagcaattttagtgttaattccattctctcttagtttctaaagattgagtcatcttaggatacaaggatct

SEQ ID NO: 142491 - DNA, 269 bp, Arabidopsis thaliana landsberg
atgggtttccctttcatatcaagtaaccaaataataacaacaacaaacaattttggccaaacttaatcaaagaaacaacaaatccttgcattacacacctccccacatctttttccttatttcaatcttcctcccttcaacaaaagatctaacataaattcatctatattttatacattctcacaatttcatcccctcatcttttttattgctcccccatgccccaaaatgtcccttaaaacggaatcgatccctcacaatattggttt

SEQ ID NO: 142492 - DNA, 693 bp, Arabidopsis thaliana landsberg
ttgtttaattagtgaacaaattacttttcatgaaatatatttatgattcaagattacaatatattattaaggaaaaactctagagcctcccaccatgacattaagaaaaaaaataagagcttaagaaatttataatgaaaaatcccaaagctcaatccttacccttaatagtcgaaaacagcaaaagaaagaaagcttaaatttggatatctagctttatctagaataaaatctccaaggaacttaatagcatatctagatgatgatgatttggatgatttgtagatagataacgatcatctcaagctttgccatatggatgatttgggtgtgaaaacttcatctcagcatccagaggaggtccaccactacgaccaccacggccattgacggtgctcacaattcctccattaacaccaagaaagtccaaagtcaacctatccgagccacccatgctaagattgtttgcgaaatgaaggtcgaaaaggctaggggaccggccttgttgatctgttgtcgcagctagagagttcatgagtccttgaaggtttccatgatcacaatctccaaagtcattaacgaccacacttgacgaagatgaagaagttagccctctaagcaaagcagatgggccgttgttatcagcaccattggtgaacagagaaggaacacctgtctgatcagaattcttgg

SEQ ID NO: 142493 - DNA, 1268 bp, Arabidopsis thaliana landsberg
aaaaaacaaatcaagcaaatttatttatcttggtcaagagacattgattctcttaaatttctgcaaaattaagctcagagattcacaccgcatctgaaattgtgctcagaggggttccaaatattaccagtcgttaggtatttctgttcacatctctccaagtttgtatctttggggttagattttagcgtttctcttctgaattcgattgagttttctagggcttttcgagggtttctatatatacttctcggttttgtgttattgtgtttctccggtccgacattgttatttacctgtttctgcatcttgagaaaaagactagacctttaagctgttgttggattatcaatatatatatatatatatatatatatatatatatatatatatagctgtattggtcaacgatcaataggagaagtttggaacgaaatctctaacatcttatttgctgaaatgttgaattgttggatgtgttgagtttatgcatgagtagatctcgtagtgagttagcttatagctgacttcgtcttgcaggaagcaatcacgagttgttttaggaattagtgaacgtgataatggctagcaatgagatggaaaaatcgagtaaagagaaggaacctaaaacacctcctccttcttctactgcccctccctcttcacaggtttgtgtttgcccttctctgcttccaattttcttaagaggaccataatgtaaaaagggaaaacaaatcccatgatttaagctattagaagccgaattagaagtgagatactagaaaggaaaataaaaatattctagatttcagctaattgtgattttgtatacctatcagtgatatgctttagttggaatatttctgtgtttgtaggaaccttcatcggctgtgagtgctggcatggctactccagattggtctggttttcaggttaggacagattcctccatctatggatctgcgctctcttttcttgttgcatttgatctttacggctttcttttcgacaggcatattctcctatgccgccgcctcatggttatgtggcatctagtccccaacctcacccttatatgtggggagttcaggtgaactggcttacgctttatcgctttttactgtgatgtctatcggtgttcagagtgctggaaaattgcaacattcttattgacttataacgaattcgttcagctgtctttcatcatatctttgattgattactgaatgagacattaaattttgcagcatatgatgccctcctatgga

SEQ ID NO: 142494 - DNA, 380 bp, Arabidopsis thaliana landsberg
catcccctatcccatctccacgagcaccaactgcgccacgtaagtttttaattgagcagtactgctcatattctctctagttttattatttttaacttggctaatttctcgatcttgagacgatgacttaatctttctagtgatgtaatttatactcttgatcgtttgtattgttgcagcatcaagtgaagtggggaataacgacatcatttgcctgaagagtatggtttcgtatacgtaaaataagacggctatctaagctgatatttacttgtctttgtttgtcttgatggctttgtaatcttttgctttcttatgttgtatacttgtgtcttaacatgtttaagatatgataatatatagtatcggtaccttattaa

SEQ ID NO: 142495 - DNA, 789 bp, Arabidopsis thaliana landsberg
atcgttctcaccaagcatttttattttgttcatttcaccgacaggatctatcaaaaccccgtgatcctgagggttgcatcaaaggccttttgggcgtcatgtcatgtaatatcgaagctcgtttgattgacgatgacgccttctcgaacacatctcgcctgtgtactgtgataacagtttaatttgggtttctccatgatctctgtgaatacaacttcatcatgtataaagaatgccatatgtaattccgttctttactgcaatattctttctgcatcatcgtttatatccattaaatgagtaaatgcatgctagaatcacgtattttagtagactacagttgttattccaggttgatctcacacttgcacaataaaacatagttaaaagtttaatacagttcattaaattgtttatcaaagaatacaagtttggtatcaaacatatacagagtaaaacgcatagatatatatgatatctcacaagaacaaaacagcaacccaaaaaaagaaaagaaagacaatgcttgtggtaaagtaacccaccccgtgtttgtatctagtaaagccaaatgaaatccttagtagtttggttatggctgacttgtgtttagcttctaatcttctggtctcacacccaaatccttcttacctcattcattttttttggcagcagcgacagaatcacacaagtctagctttctcaaggtttccatggtgctggtggaggtggtggagtagggaacaaaggaggaacagctgagaaatagtgtttttgtctatcttaccg

SEQ ID NO: 142496 - DNA, 299 bp, Arabidopsis thaliana landsberg
tgttttgcgttaagtacaaaaaagattagaacagcaatttacaacgtagacgcagttgaatacaattcaatctaaaactattttactactaatcaaagatctgtcgatttaatcttgcagctttgagtgaagagatcatcgattccgcttcttgagaaagactcttcctttcgacaagtacaagccctaacttctcacgcaagtattcatttctcaactcatctccatcgatttcaccaagctcactagcttgcttccttgtcactaaaccgtaaagccaaagactcgattcgggtttc

SEQ ID NO: 142497 - DNA, 403 bp, Arabidopsis thaliana landsberg
aacgataacctgcctctcaattatctctagtactttattttacaatcgtaattattttagctgcgctattgcagatagtcatacagagagcattgttatccaaaaggaaaaggttctaacgcttatggagattcatggactcactgcaagggatagcttgccatcatagcaataccacatttacccgtgtcttcacttacaccacgctccatccgtatgtagccttcttcaccccagccagttccccatgaattctttacgatccagtacttttgatcgccttctactccatatccaacaacagtcactccatggttgagatttgttccacagtaattagtgaaaacaccggaggagtagagctgaaagataaacccaccagcatcgattccaactgatactg

SEQ ID NO: 142498 - DNA, 134 bp, Arabidopsis thaliana landsberg
caggatggttagctgctaccgtaatccttgcgtgaagattgagaagaactaattttggtttgtgagcaactttcgaatcagctctgttagatttgatttgaacttttatttgaagatggatcggtgtgacacct

SEQ ID NO: 142499 - DNA, 270 bp, Arabidopsis thaliana landsberg
aacttaaagattcgaatgcttttaaataaaaaggttcaacgataagtgaaagaaattagtctccaatctccatacgcatacgagcatcctaattattttacatcaattctcagttacttatatcacataaagcttaaccatttattcttcctcttcttcctgcttctccaatcctgcaaccaaaagtagaagaccattggattcttcagttcaaaccaaaatggcacaagaacaaagccagaccagatcataattcaagttctttaactg

SEQ ID NO: 142500 - DNA, 208 bp, Arabidopsis thaliana landsberg
catgattaaagcatcattgtcttcttcttttttaactcaaatcattgtctttttaacgtgttttaaactattaaatccaaaactcgaattaaagacaagaaaataaaaattgtaagctatgtcacaaatcaactctataaaaattgatttgataaaatgatttatactccttttttgacaataacatttaacgtttgattttagagta

SEQ ID NO: 142501 - DNA, 614 bp, Arabidopsis thaliana landsberg
gtatgctaccatgattgacattctcggtaaatctaaccgtgtgttggaaatgaaatatgtcattgagagaatgaaggaagattcttgtgaatgtaaagattcggtttttgcatcggttattcgtacattctccagagctggaaggctggaagatgctatttctctcttcaagagccttcatgagttcaattgtgtgaattggagtctatctttcgatactcttttacaggagatggttaaagaatccgagctcgaagctgcttgtcatatcttcagaaagtattgttatggttgggaggtgaattctcgaataacggctctgaatttgcttatgaaggttctttgccaggtcaatcgctctgaccttgcgtctcaggtttttcaagagatgaattaccagggttgttatccggacagagacagttacaggattttgatgaaggggttttgtctagaggggaaactaaaagaagccactcacctgttgtattcaatgttctggaggatctcacagaaaggttcaggtgaggacattgtggtttatagaattctattggatgcattatgtgatgctggtgaggttgatgatgctattgaaattcttggtaaaatct

SEQ ID NO: 142502 - DNA, 490 bp, Arabidopsis thaliana landsberg
tcttggtcgcaaaactctccacaagactcaccaccgtctccgtcaacgatgttaccttctccatcatcgtcttcagcgccgacgaaaagaatagatccgtccgagctcaaacgcgttttccagatgttcgacaagaacggtgacggtcgaatcacaaaggaagagctcaacgactcgcttgagaatcttggaatctacataccagacaaagatctgactcaaatgatccacaagatcgatgctaacggtgatggatgcgtcgacatagacgagtttgagtcgctgtacagctcgattgtggatgagcatcacaacgatggcgaaacagaggaagaggatatgaaagatgcgtttaacgtgtttgaccaagacggagatgggtttatcactgtggaggagttgaaatctgtgatggcttccttgggactcaagcaagggaagaccctagatggttgtaagaagatgattatgcaagttgatgcagatggtg

SEQ ID NO: 142503 - DNA, 1239 bp, Arabidopsis thaliana landsberg
aacacaaagctctcatcttcttttagtttccaaactcacccccacaactttcatttctatcaaccaaacccaaatgggtccaagttcgagcctcaccaccatcgtggcgactgttcttcttgtgacattgttcggttcggcctacgcaagcaacttcttcgacgagtttgacctcacttggggtgaccacagaggcaaaatcttcaacggaggaaatatgctgtctttgtcgctggaccaggtttccgggtcaggtttcaaatccaaaaaagagtatttgttcggtcggatcgatatgcagctcaaacttgtcgccggaaactcggccggcaccgtcactgcttactacgtagcgttttcaaactcacactcactcataatgttgctaaaactgaagagactcttttctaaatttgtttgaacgtacatgtttgcagttgtcttcacaaggagcaacacatgacgagatagactttgagtttctaggtaacgagacagggaagccttatgttcttcacaccaatgtctttgctcaagggaaaggagacagagagcaacagttttatctctggttcgacccaaccaagaacttccacacttactccattgtctggagaccccaacacatcatgtaaacatccatcgatctattttctctaacaataagtgaaagacgtagatcttgactctcttgttcttgtctctgcagattcttggtggacaatttacccattagagtgttcaacaatgcagagaagctcggcgttcctttcccaaagagtcaacccatgaggatctactctagcctgtggaatgcagacgattgggccacgagaggtggtctagtcaagactgactggtccaaggctcctttcacagcttactacagaggattcaacgctgcggcttgcacagcctcttcaggatgtgaccctaaattcaagagttcttttggtgatggtaaattgcaagtggcaaccgagctcaatgcttatggcaggaggagactcagatgggttcagaaatacttcatgatctataattattgctctgatctcaaaaggttccctcgtggattccctccagaatgcaagaagtccagagtctgatgaacacatattacctcatatttctctgcttgtttgatgcaattcttaaattcctctgttattccattgtacattgtcaagatcaataaagcattcctggtttcaaaatataaaacaactgaaattaaac

SEQ ID NO: 142504 - DNA, 773 bp, Arabidopsis thaliana landsberg
agtcgggagaaaaggatggtttggctgatgatgatgctaacttaatgattaaaatgaagtttctcacatacaaggtatttttaggatggaaggtcttctggctagagggatttgtaatttgttgcaatttcctggctctttcgttgcattatcatcctgatgttggacatgtcttcattttttttacagttgagaacctttttgatccgtaatggcctatcaattctatttaaagacggggcagcagcttacaaaacttactaccttaggtgagctgctttctccctatgaatatatacatatagagtgatgtgtcaaatgttatagtgatgttttgcattgcattgtaaaacaaaacgtggagactagttgttgcatactcattatgttttgattatgtaggagctgacgtggtcaagctttaatttgatttttttctaatatcattgttgtttctgcatccaggcaaatgaaaatctggggtacgtcagatggaaagcagaaagaactttgcaagatgcttgatgaatggtaccaaaatcacactactctacacatgtagactaagcttatacaattttgtggaaacttatttcctgagcaaatgtgtaacctactgcctagataatttttcatctttttgaatctggattagcatctcatcttctcttctcttcactacgtgcagggctgcttacataagaagaaagtgtgggaatgatcagctatcttcatcaaaatacttaagtgaagctgagccattcctggagcag

SEQ ID NO: 142505 - DNA, 326 bp, Arabidopsis thaliana landsberg
cacgggacggcacaacgacaccgagcttcacctagctgctcaaagaggagacttggcttctgttaagcagattcttagtgacattgattctcagattactggtaccattaccggagctgattttgatgacgaggtagctcaaataatgacatccgtagtaaacgaggtgaatgagctgggggagacaccgctttttacagcagcagagaaaggaaacatagatgttgtcaaggaattgttgccttacacgaccattgaatctcttatgcagaagaatctttctggatttgacgctttacacattgcttgtagtcaaggccatcgat

SEQ ID NO: 142506 - DNA, 260 bp, Arabidopsis thaliana landsberg
tctcgccgcggattattagtttcccgtttaacatgattcttgcttttgatagtccaagaatataaagcataccaaggtttcagactatcaccattcccctgatgttaactctgttttaggttcagtataggggatccgaaaaactcggttcatgatgtaacaatcttatctccttgtaactgtagctgatgtacttaggctgtaaaaacaatcacttttcagacattttaagtgatcttgtgggaagtttttttccagac

SEQ ID NO: 142507 - DNA, 944 bp, Arabidopsis thaliana landsberg
cctctccctccgtcgtctcctccttcttcctccgtcgctcaatggcttcctcaacaatctcctcggatataatcactccatcaaacaccaaaatcggatggatcggaaccggagtcatgggccgatcaatgtgtggacacttaatcaaagccggttacacagtcaccgtcttcaatcgaaccatctccaaagctcaaactctcatcgacatgggtgctaacgtcgccgactcaccaaactcagtcgctgaacaatccgacgtcgttttcaccatcgttggttatccttccgatgtccgtcacgtccttctcgatccaaagtccggagctttatctggtctccgtcaaggaggtgttctcgttgatatgactacttctgagccttctttagcagaggagatagctaaagctgcttcctttaagaattgtttctcaatagacgctcctgtctcaggtggagatttaggagctaagaatgggaagctatctatattcgccggaggtgatgaaaccaccgtgaaacgtttagatccgttgttttcgttaatgggtaaagtcaacttcatgggaacaagtgggaaaggtcaatttgcgaaattggctaatcagataactattgcttcgactatgttaggacttgtggaaggtttgatttatgctcataaagctggacttgatgttaagaagtttcttgaagcgatttctactggtgctgctggttctaagtctatagatttgtatggagataggattctgaagagggattttgatcctggtttttatgtgaatcattttgtgaaagatttagggatttgtttgaatgaatgtcagaggatgggtttggctttgcctggtttagctcttgctcaacagctttacttgtctcttaaggctcatggtgaaggtgatcttggtactcaagctcttctcttggctcttgaacgt

SEQ ID NO: 142508 - DNA, 362 bp, Arabidopsis thaliana landsberg
gagaagcaggttcaacaacaactacacacactttgcaaagcaactgaagaataatcaagcagccgctacatccaaatatttaatgcacaaaaatatacaagagcttgagagaagactcactgatgaactataagccatgagtgtgcccatacacgagacagatagagagatcacagaaggtttagggttaccagaatttcccaacagacaagtaacgagatcccaacagcaacgatcaaagcagaacatctggctcggttaaactacctgaaaagttaactttacaacattttgggaactccaaaccagcttcactgcatctcacttctgtcacatgtggaagagaccttacatctatatac

SEQ ID NO: 142509 - DNA, 1238 bp, Arabidopsis thaliana landsberg
attgaaccgatgcttctggaaaggacagatcgctggaagtggttatggtgtagctcagttctgtctttatgcatcttatgctctcgggctatggtacgcatcatggcttgtgaaacacggcatctctgacttctccaaaaccataagagtcttcatggttctgatggtctcagccaatggtgcagcagagacactcacactggctcctgatttcatcaaaggtggtcaagctatgcggtctgttttcgaacttcttgaccggaaaaccgagattgaacctgatgatcctgataccaccccggtcccagaccggttacgtggtgaagtcgagctcaaacatatcgatttctcttacccttcaaggccagacatccagattttccgtgaccttagccttcgtgctagagctggcaaaaccctagctcttgtgggtccaagcgggtgcggaaaaagctcagttatctccctcatccagagattctacgaaccttcctcaggccgagtcatgatcgacgggaaagacataaggaaatacaacctgaaagccataaggaaacacatagccatagtccctcaagagccgtgcttgttcggaactaccatttacgaaaacattgcatatggacatgaatgtgcgaccgaagcagagatcatacaagccgcgactctagccagtgcgcacaaattcatatccgcgctaccagaaggttacaaaacgtatgttggcgagagaggcgttcagctctcgggaggacagaaacagaggatcgcgatcgcacgtgccctcgtgaggaaagcagagatcatgctgcttgacgaggctacaagcgctcttgatgcagagtccgagagatcagtccaagaagcattagaccaggcttgctctggtagaacatcaatagtcgtggctcataggctatctacaatcaggaacgcacacgtgatcgctgtcatcgatgatggaaaagtggctgaacaaggatcgcattcgcatcttctcaagaaccatcctgatggaatctacgcgcgaatgatacagttgcaaagatttacgcatacacaagtgattggtatgacgtcaggttcaagttctagggttaaggaagatgatgcttagtacttactactttggtcatatagaagaaaaaagaaggagagtaaaaaacaacaaacaccagaagatgtttctgataaaaaactctacgaactcatcattttctctttttttctttctgttt

SEQ ID NO: 142510 - DNA, 697 bp, Arabidopsis thaliana landsberg
ccttcttctcagacccggcttcctcttctttctcctcttccttatccttcttcttcttcttcttagaagacttcaccttctcttcagcctcttctccttcaacttctttggttttagatttcttggttgttacaggagcagggctatcactgctatcatcatgcttacgcttacgcgcttcccctgcttctccattctcagcgtcagcctttatctcctcaggagcagcagcagcaccagcaattatagcatctccaccggtaggcaaaaccacattcctgctccactcaaccggagtcttctcattaggcttcccatgcttatccaatttcccatcagcaataagcttcttcttcatagaagcccttggtcccaatccccacttcctcgggtaggtatctctatccatcaccacacgcttgatcttagctaccacaccatgatcacaagtagccatcacagatgttgtcatctcagcaatcccaacggcaatcgcctcacccttggtagtcataagaacgacttcagtaccaacatcaatgtcattctcgaatctcaacaacccaggaatcatcaacttagcaccataacagatagcattcacagcagaatccttgacaacaagtctcttgtaactcgtcaatatcatctcaagaggcataatcaccctcctaagataagactcatctctggagtt

SEQ ID NO: 142511 - DNA, 961 bp, Arabidopsis thaliana landsberg
gacaatacccgatgatggatctcccgtcgccatggccatcgattcttccaccgccgtaaccgtcgccaccaccaccactcgaagagttcctcctccgtgctggaccgacgaggaaaccgctgcgcttgtcaatgcctacaaggataaatggttcgccctccgccgtgggaacctccgtgcggctgattgggatgacgtcgccgcggctgtttcgtcctcgtccaccgttggaggtccgccgaaatcagcaatccaatgtcgacacaagatcgagaagcttcggaaacgttatcgcggtgaaaaacaacgagctcttaatcgaccaggcaagttctcttcctcttgggatttgttccctatcttggatgctatgggattcgctccggtgactccggcagccgtagaaacttacgatcccgatgtggatcatgatgatgagagtaacggtttggatggatttagggttagatcgaagaggtctgggaagtttagcggtggttactctgattcacctcgagaagtaggagatggatatggggttagatctagggcaaggaataacatgaaaatgtatggtggtttcaagtctgagtttgattcagatcacgattcaggaagtggatttggattgaaaaggaaatacaatgggaatccaaaggttagtgctgatttcgatgctgattctgatgatgagattgtgttagtccccaaggcaactaggcttaggactcatggcaagccttcctctggtgattttagccatggcagtggtggtggttttccattgaagtcgtttggtgatcggaattttgcttctcatgggtttaaacccaagaacttcagtaagcctgagcccaatttcgctcaggatctggattatgatgatgagttaaaataaaaatagagcagagagggaaggattcaacccgaggattcaaagttctaggagctcatcacgggt

SEQ ID NO: 142512 - DNA, 1477 bp, Arabidopsis thaliana landsberg
gtcatggcccaagtccctcccgagaaacaattcagagtcctcaacgaacccggctacgccccatacatcaccgagtacgacgcgagttaccgattcctcaactcacagaatcagaatttcttcacaattcctttccagctcatgttttacaatacaactcctagcgcctacgtgttagctctccgagtcggaacgaggcgtgacatgagtttcacgcgttggatctgggacgccaatcgcaacaaccccgtcggagacaactccacactctcattcggccgaaacggaaaccttgtgctcgctgagttaaacggccaagtcaagtggcagactaacacagccaacaaaggcgtcaccggattccaaatcttgcccaatggaaacatggtgctacacgacaaacatggaaaattcgtttggcagagtttcgatcatcccaccgatacactcctcgtcggccaatccctaaaagttaacggagttaacaaactcgttagccgtacatctgatatgaacggctccgatggtccgtacagcatggtgttggacaacaaaggcttaaccatgtacgttaacaaaaccggtacgccgttagtttacgggggatggacggatcacgacttccgcggtaccgtcacgttcgccgttacaagagagttcgataatttaacggagccgtcagcttacgagcttctcttagaacccgcaccacaacccgctacgaacccgggtaataaccgccggttactccaagttagaccaatcggaagcggaggaggaactttaaacttaaacaaaatcaactacaatggaacgatatcgtatctgagacttggatccgacggtagcctcaaggccttctcgtatttccctgccgcgacgtatctcgaatgggaagagactttcgctttcttctccaattacttcgtccgtcaatgcggtttgccgacgttttgcggcgattacggttactgcgatcgaggaatgtgcgtcggatgccctacaccgaaaggtctgctagcttggagtgataaatgcgctccacctaaaacgacgcagttttgcagcggagccaagggtaaagctgtcaattattacaagatagtcggtgttgagcattttactgggccttatgttaatgatggacaaggcccaacttctgtaaacgattgcaaggccaagtgcgatcgtgattgcaagtgtttgggttacttctacaaagagaaagacaagaaatgtttgcttgctcctctgcttggtacacttatcaaagatgccaacacttcttccgttgcttacatcaaatattagtgtttttttgggaaagttatttaccgaattctttttgaattcttagagatttaatgaataatcggtgtgcttgtaatgatccaccgttgaatatattgtattaccttaaaaaaaagccatcagatgtatttactatatatatatagtacctttgagaatcaaaata

SEQ ID NO: 142513 - DNA, 229 bp, Arabidopsis thaliana landsberg
cgtggatcaagattctttcttatcttcatcactccacacattttcttgtcttcaaactcacacaaagaaaagaaaagtctccaaagctcaaaaaacaatgactcgaccgtcaagattacttgagacggcggcgccaccaccacaaccgtcgaggagatgatcgcagcggaatccgacatggggtgatcttgtcggctcttctttgcgctcttatctgcgttgctggtct

SEQ ID NO: 142514 - DNA, 574 bp, Arabidopsis thaliana landsberg
atcgtgttctgctgaggacataacgctgtaagaccaaacttactgcctttctccaagataaacccggtttcgttaacactgtactatggatgttcaatctggatttgttgctcaatgactgggatcatctgttttttctttgatttgagatttgagctctgagctctttttgctagcaaaatcctctcgttttttttgctaaagacttgtaaagctagctttgttgttcttcgttctaacacaaaccctttgtgtaaagtcctagaatcgtttaatagcttgcatttttttctttctttttttgggttgagaggtctagtaacaataataatgagataacaagaaatggaaaataaacaaatgatttgactacttagccgagagttttcggataagaataggcaatgggaaaatgcaaaagaattctactttattgaggtcgtatcattttttccaactgaaactcgaaagagttgcatcttatatctagcaaagtacctaaaaacccattaaaaacatgtagcaatattgttaacaagcataacacatgacctcactttcaacgattgctcat

SEQ ID NO: 142515 - DNA, 479 bp, Arabidopsis thaliana landsberg
ggttacgatgaccactaacagagttacaacatggtatattcattacaataaaagtgtgcgtaatgtcaaaatagtgtcgagatcaatcgacagaaacagaggaactattgattatgtctttcgcatatccctctatattacctaaggagtaaggaactgtgctacatttggtttgaggaatttaaacccgccggtttagccaatccaatatgactccagctatagtttcccgttctggttcaaagagcagatcgtgtaacaacccgtcgtacagcttgatcgacttatcggatgaggaagcctcattgtatagcttctgagtacctttaggatcagtaactgtatcagctgtgccgtgcatcacaagaaacggaaccttgattctgttcagattctgcagtaaatgagcaccaagtctaaggatctcgttaccggttcttgctcgaataaatccagtgtagactagcgggtcagagtat

SEQ ID NO: 142516 - DNA, 531 bp, Arabidopsis thaliana landsberg
cacatttcgccggttgtgagtagggtttggttgacgagactgtctctctcggactaacctaggacggagctgcttcccctgaggagaatgtcgttctgccggagatctgaggactctgtcaggcctgttacggcgagaggtggaagaagaaggaggaggaggacggtgaggtttgctgagagcatcgtcttcgaggatggacgcagcggtagcagttgtggcagtggagtagctgtgagagacagagacgctgcaaatgtcggacttgctgtgagagatctccggagctggaggtgagagaggaagaggaacttgagcttctgaatctgagactgttggtgcggaaggaacgaggtcggggactgggacagggacggagatgggtatggggacggagacagagactgattgaacaacgacttctttgacggattcttcttcgaggggtggaggaatttgagcggcggcgactggtggagctgtgacttttccggcgctgaagcagcatcccattttctttctacttttgct

SEQ ID NO: 142517 - DNA, 359 bp, Arabidopsis thaliana landsberg
cttcgtcttcgtcgtcgtggatccatctacggtcggttctctttgtggctaatctttcgtctccgtcttcagttacttcttccgatcggtgagtagcctaaagcttttagatttggaatattttagatggcatctaaaagattctcttttttgatccaataatagagttcggattgaatgttcacaacttggaaagtatgataaagattaacaagtttctatgtttgttcggattgtttatttgttttgctgttagattgattttggcaatcaatgttgttgattttgatattgtaaaagcttctaatgttgactcttgacttgtttatagccggcggaaatcaccgtggtctcgccgg

SEQ ID NO: 142518 - DNA, 346 bp, Arabidopsis thaliana landsberg
aagagcaggaatgggagaagaagaggtcttgcagaggattgaagaaaggaatatggcccggaagagcaaagatttcaggagaagcgatcggattcgagagctgttggcatttaaaggaatcttcctcgaggatgttcctggagacactgtgtggagaccttccaccccattgaccaagcctaaatctggtttaggtttaggcatgacagccatcgtttttgctatcgtttttactttcttaggcttcttcttctatagccgttgaactctttatttatttcactatttgtttagattgtgttgtattagtgtgtggtaaacttattaactttaaacattgacctgc

SEQ ID NO: 142519 - DNA, 374 bp, Arabidopsis thaliana landsberg
aagaaactgaaaattgattggttttattccgtgttctagttctatggtacaaagtacaaacattaaacatattacaggcgtgtgaaaaaacaaatgaaaaaatttctctatggactatagaagtctgacttactatcctgcaggataactagtaagtagtaaaatcctttggtggcagaaatgtacaaaaggaacataaaaaaggaacaactggttccttttttcttcagggcataaacgaatcgaaaaatgaggtctcctcgtttggttcttcctttgctctagagaatccaccaccaacaaagttttgttgcgtttgaaggttgctgttgttgttattgttgttcatggcgtaaccaaaaggcccggtatta

SEQ ID NO: 142520 - DNA, 315 bp, Arabidopsis thaliana landsberg
gataaagtatgtattttgtatcatttgaaacatacttagagaaaaaatacaattatgtggagatgagaaaaaatacataaacttgtatgcgttctccacttcattattaaccaaagattaaacttaagaacttttcagattttttttttaatttctgtttccaaaaattcaatagcttgcttaaaggttatcatggagagtagaaggaaggagctgggaggaaaggaaacggtgcagcagaggcataagccaccggaggttgagccacacgtttctttcgcctctgagttttgacttcaccagatacagaatttg

SEQ ID NO: 142521 - DNA, 503 bp, Arabidopsis thaliana landsberg
tgcttctgtctttgaaactggcaattttgatcttccccatcatgggatcacggttgaaaacgttatgggcattgtatgttccgcatctgagcttgggaatacttggtgagactagccaactgtttggccgtgccctacacatgatcgatgtgaggagactatggataaaactgagactcaccaaaacaaggaacttccaagaaagagcaaagaacgcacttgcatcagtctcactaggaaaatcttcatcacaatcagcctaaaagggtgatttagaaatccttcactgtcaatgagcttagtttagattactttactttactgtctgtgagagatcctttgactgacatgtttctatacctttggagttccactgtctctgtatgtaaatcctgttttgcttcttttgtgaatattttttcttcttcttttgaatattcatgttcttggtccacttcgttgtgcttacgttttgtctatattgattatggatggtttggttt

SEQ ID NO: 142522 - DNA, 129 bp, Arabidopsis thaliana landsberg
gtaaaatctttcttattcgtaacaaagttattgtaaacttatagaatggttgtgaaactatatggacaggtaacagcagcttgtccacaaagagtcttgctttgttttctcgagaaaggaattgacttt

SEQ ID NO: 142523 - DNA, 139 bp, Arabidopsis thaliana landsberg
ttctttggtaactttcgcttactctctccccattctctctcgaagagagcctcgccggagtttgtttttcttcttgtttcgcggccaaaaccgccgttgtgtaaagctaccttgttattttcctccgttaaccatctgg

SEQ ID NO: 142524 - DNA, 192 bp, Arabidopsis thaliana landsberg
tatgttccacaataagcatcactgtgattgccaatggtaagtaacaatgtacacaaataatgacaacaatttttgtaaagaaacagctctcttatgaatcagagagaagaatttggaggaaaggaaagacgaagaaagcctaataattcaaccaaaattattgtgaatagttatttagtaatactctctaag

SEQ ID NO: 142525 - DNA, 469 bp, Arabidopsis thaliana landsberg
acttgtacacagcatatggatcatattttagaaacctgaaatagctgtataaatcatctattgtattttgtattggtgttccagacaaacaccacctccttttggctcgaagaccgcaacatgctcttgccacctgggttctatgattcttaattgtttgagcttcatctagtacaactctgaaccacccaacttttgctagagtaccagagtcagggtcagatgaatcgccagcattattgttaccttttttcttcttactcttcttagtagtacccactacatttttccgtttcttattgatggagaagccagaagcgagaccatatttttcagaatttttttcatcattctcatcgtcatcaaccaggggttgctttggaacttcatttgaaacaatggcgtaagttgtcataaccacatcatattttgctagttcaataggatctttggtcctgttaccgccgtg

SEQ ID NO: 142526 - DNA, 171 bp, Arabidopsis thaliana landsberg
gaattatataaagatcataaaatctgtgggtagagaaaatatcaaaagggaaaagtaggaagtttcttattgcctagaaaatgatggatgagctgaagagcttctctaggtttaaatgtcggaacctggtgtcccgctcctcttaccgtcacaaacattaaaccgtcatac

SEQ ID NO: 142527 - DNA, 387 bp, Arabidopsis thaliana landsberg
aatcacgaatgctttggattcaatgtacttagtgaaccatataacatttgactgtagaaatttatagcaatttactttatcaatcctcccaaatcactttatcaaagtaatggggtcaaatgttagaaattgaaaagttatggagtgaaacttaaattacataaatgctcttccaaggggaagaagactaagagtatagaatctctctaaccagaggttctatcaccaccaaaacctgattgtaagaagccggtttcctccagatgactcacatcaccccaaacttggatggtccatttgtctccgtcgaataaacggaacacattgaccgatgtataaagtatcttttcaacttttcttgcacttggacgagctctttcgtagaga

SEQ ID NO: 142528 - DNA, 899 bp, Arabidopsis thaliana landsberg
caactttgtaacacaactcctaaataagtttcaagcaaaattatccggaaactgcataattgaaaaccataataaaaagtctcagagatatccaaaaaggagggagagagaaagtcacagaaataaagagaaaaaagaaaaaggctcaaacgccatcaaagttttaagaaccaaagaaaaccataagagagtcgatcataacgaaagtctcatcatttggcacccttcttcactgcagccttggtgaccttggctccagttgggtccttcttgtccacgctcttaataacaccaacagcaacggtctgcctcatgtccctaacagcgaaacgtcccaaaggtgggtactcggagaaagtctcaacaaccatgggcttggttggggtcatcttaaccataccagcgtcaccattcttcaaaaacttgggctccttctcaatctccttaccagaacgcctgtcaatcttggtcaagatctcagagaacttgactgcaatgtgagaggtgtggcaatcgagaactggggcgtaaccgttaccaatctgaccagggtggttcatgatgatgacctgggaggtgaagttggcggcacccttagctggatcatccttggagttagaggcaacgtatcctctcttaagatccttgacagcaacattcttgacattgaatccaacattgtcaccgggaagtgcctcaagaagagactcgtggtgcatctcaacagacttaacctcagtggtcaaccctgtgggagcaaaggtaacaaccataccaggcttgatcataccagtctcaacacgtcccactggcaccgttccaataccaccaatcttgtagacatcctgaagtggaagacgaaggggcttgtctgatggcctcttgggctcgttgatctg

SEQ ID NO: 142529 - DNA, 260 bp, Arabidopsis thaliana landsberg
ttcaccagtctcttcctcgttttggtgagaaaacgatgaccgatggatttcgctataatggtttctctggaatagcgtacccgttttggctctcatctccaccaccgcctacacctccacatcatccagcttctgcgccgccgtttcaacaaagcaatccggttgaatcctatgatccagccaaagaagtgtttgatccgatgatgttgtatcatgactcttatcaacgatcgccggctaattggtcaaataacccatcg

SEQ ID NO: 142530 - DNA, 630 bp, Arabidopsis thaliana landsberg
ggttatagttgagaaatctgctgctcaaggtttacctgaaggatggatcaagaaacttgaaataacaaatagatcaggccgtaaaaccagaagagatccagtttgtaccctctactctctttgtgataacatcatctttgatcaaaagtacattttgtgtcttttccacataagctcactttagaaaatctcttatgtgattcttcttggacatgtcttgtttttgattttgcagttcttcattgaccctaaaagtgagtatatctttcaatccttcaaagacgcatcacggtatgttgagactggcaatattggacattatgcacgtaaattgaaagaaagtgatatcgaagatgatgattccggaaatggaaagactgttgtgagttccgttctccttttttgttatagttagtttaatggaaagcactatagctgaatgattgaattttctgttaatcttttaactcataacttttctctgtctgattttagcttcgtctggagtatgtggacaagagatctgcagatgatgtattggaaaaagagaaaacgatagatgatgtcagaagaagtaaacggagaaacttatcttcttctgatgaacattccaagaattgtaagtacaaa

SEQ ID NO: 142531 - DNA, 147 bp, Arabidopsis thaliana landsberg
ctaaaatatccaccgttgacaagaaaacgtagtctaataatatccaccggcgatatttggccaactcatttttttttttttttatgttgttagctagtttttcatgcgatcaccttctaagctaagagttcgtggcttacttccttt

SEQ ID NO: 142532 - DNA, 139 bp, Arabidopsis thaliana landsberg
atcacatccaaagaagatgaatgcattgtatgcaatgcagatgcagtgttgttggaaataaagatatcatttttagtactgtttaactgttttttttttctttttctcagtcaaatatataaatagaaactaaatgggc

SEQ ID NO: 142533 - DNA, 105 bp, Arabidopsis thaliana landsberg
tctaacataaactcaaaagtttaaagcaaaaagaaatctcgctcttattctctgaacaaagttcagtttcacttctcgacaaaagacttgagatccttgagccat

SEQ ID NO: 142534 - DNA, 461 bp, Arabidopsis thaliana landsberg
tctcctaaaatctcccaaacttttaaaaagttaaccaaaacccccaaacaaaaaaatgagaaacaatttcgtccctataattctctccttcatcatcttcttgactccatcaatcgcagaacaagaaccttcaattctttctcccgtcgatcaactcctcaacaaaacaagctcatacctcgatttttcaacaaaattcaaccaaccaagaatcgaactaacaacatcaacgatcatcgccggcttactctctttcctagcttcatcaatctcaagcgccggtggaatcggcggtggaggtttatatgttccgataatgacaatcgtggccggtctcgatctaaagacagcttcaagcttctcagcttttatggttactggtgaatctatagctaacgtgggatgcaatctattcgttagaaaccctaaatctggtggcaaaaccctaatcgacttcgatt

SEQ ID NO: 142535 - DNA, 408 bp, Arabidopsis thaliana landsberg
tagagagtagtagaccctctggctcacacaccgtttcaatgcgccgggtgagggtaaacggtgtgagtgcggtgagcttgaaggatacaagcacaatgaacagattgtagattcaaacaaccgctcatgacaagtgaatgtctgcctgaacaagtgtggagagcagggaatgtatcacagacagcttgaacagctgaaggtgttaggtaagtgcattgactaatgttaaggcttcttagtccttcttcatcgaattttcctttctttaccgctcgccacatctcgtgtttgttcttgactccgctctgagctaaagagtacattgctctgtctgtaatgtttctgcagtagtataagcccaatgacctcaagtgaatgcaccgattcgccaaagccacaacactctca

SEQ ID NO: 142536 - DNA, 359 bp, Arabidopsis thaliana landsberg
cctaaaaccaatgtttattgatgtagagaaatacaacattgaaaagctgagcattgaacatatctcgcattatttcttagaaagattttctcctttggctttttgtatgatgaatgtacacttgtttttgaacaaccaacactgatgcacttgaaggatattcatgtgatgctaataaatctccaataggtcccaattcattgaactctgtccattcactaattccgctagtagcctcagttcctattccgctgccgcttccaacgataaacaagtcataatcatttgccattgctcgtaagattcttgaggtctcagatccatcagaaaccgccttatcgatatatgtcaccttggca

SEQ ID NO: 142537 - DNA, 421 bp, Arabidopsis thaliana landsberg
atgacagcaaaattcttgaatattttgtaggccatggtctttgtaacttgtcaagaacatagatacgtcggataaattcatagatatcaattcaaatgataagctagcttacgaaaagcgtttctcaagaaactatgattttttctaagaattagttggtcgttacgataaataagaaaccttgaattgatggaaaagaagataaggaattaattaagagattggtaaaatggtagttgagaaagtaaaaaggtcacgtgttagggcaaatcattaatggaagaaggagaaagcaggtagaaatgcactctccattttcattacattacaaactccacgtgaggtttcaccgattgtaggaactcctgattttgtgttaattactcacaagtaattatcatatagcgcgtagctaaatatt

SEQ ID NO: 142538 - DNA, 288 bp, Arabidopsis thaliana landsberg
ctgagaaaacgttaactagtctctaatagacaccaacagcacagccaaggttcatgtcttcatgagatacaacaagcaaaccaaactaagataggagttaccatcaaagattcttcatggatctgaaaagccgtaacggatcaaatgattgccaaaagaagacgatcctacagattatttggtgagacaagaaaggcgctaaccgggaaaagttttgttcaagcgttgatggcatctgattctttagaccttatgatcttggcttgtagtttctgcataaaagctgga

SEQ ID NO: 142539 - DNA, 448 bp, Arabidopsis thaliana landsberg
ttaactcgaagctacattatcaaatcacaatggcgaaaaagctctgtttcattgttatgctatcaatatgtctcctaattttcgactttgcgggtgctcaggaggaatctccttcacctgctgctgtcttgccaggacgtggaccttcaacggattctcctttgtcaccgtcttcatcaccggaagaagattctcctttgtcaccgtcttcatcaccggaagaagattctcctctcccaccatcttcatcaccggaagaagattctcctctggcaccgtcttcatcaccggaagtagattctcctctggcaccgtcttcttcaccagaagtagattcccctcagccaccgtcttcttcaccagaagcagattctcctctgccaccgtcttcttcaccagaagcgaattcccctcagtcaccggcttcatcaccgaaacctgaatccct

SEQ ID NO: 142540 - DNA, 350 bp, Arabidopsis thaliana landsberg
gacgagacacaccaaatggtccaagatgatattacaagtctaatttcgttgctcattccacttctaatccaactccattctattttggtaggcaattttattttttttttgtcaacagagaaaaaagttttgtcgctttgtgtatctatttataatttcgattattgttttttctttttaatttgggtaggaattatacgaagtgagcaaattaaagtcaccgtgaggaagagaaccgaagaaaaagactgaagggtatagttttggttattgtaacaaagtctaacttgtagcatcactcctctttgataagttttattaatctctcttttttaacgagttacttatct

SEQ ID NO: 142541 - DNA, 241 bp, Arabidopsis thaliana landsberg
cctctgcttcttcttcttcacatcactgtgtgcgtctctctatctctctattctatcatttcgaaatcctctctatccgaatttgaactcgtctcttcttcgtaaagagttcttaatctccgtctctgtgatttcggaatctggaggttttgaatttcttgttcgtatcaatcaaatggtggatcgatttagtgagattgctttacctcattagcaatgacttctgcttcttccatgtccg

SEQ ID NO: 142542 - DNA, 228 bp, Arabidopsis thaliana landsberg
caatcctccggccaaatcaacggatccgccgtcgtaacccatctctcagatcgacgaatctcccgactcgccgatcctcctaaggtcatatcccttaaatcggctcagatctgtggctcatagatccagcgccgatcctctttctctctagctgctgtttctgctttccctccaaaaaaataacttccctctctctctcgcaacggattttactctacggatcgtttc

SEQ ID NO: 142543 - DNA, 109 bp, Arabidopsis thaliana landsberg
atctgcgttggttggaattgaagggagatatatttcaattaaaagattccatgggaaggaggattgtatagctttccaagttgatccatcaatggatttggcactacag

SEQ ID NO: 142544 - DNA, 416 bp, Arabidopsis thaliana landsberg
tgacgagagagcagagagagcttcttcttccggacactgaacagtgagagcacccatctccaacctcttcctgtaagtttccacaattactctgtttttttgttctgcattctttatgacaaatcatagaagatttaggtttaagatcgatctcgtttgatttcacactcactatctgaagctctttgattacaaacccatcttcataatctctgtaaaaatcaaacatgcaattcacttaatggtgcaaaaaccccagaagagggaaaaaggaatcaaatttagtttataaaagcagtggaattgagttgcattgttgaaatattcaaaagcaagatcagatttttgataaagaatttcacttttgattgtaacttataatcaaggaacaagatgggaagcactgtgattttaag

SEQ ID NO: 142545 - DNA, 503 bp, Arabidopsis thaliana landsberg
tcatcaaagacatcaaaagcttgcttcacttcctctaagcttggctctttctcttcgaacagattcgaaacctccttggaactgtactgtttttgaagtccctcgttttcttggtcagtggaaagccctaagcttttcataaccatccctacatcttctctgcaaagaccatcatcatcatcatcacgatattcttcgtgtttgatcgaagtttggaactcaagatctttgctcttcttctcggaaacacattgctggtgttgaacaagaggccagaacctagagaaaaataactgagcaaaagaaacccatctgaaaaaaccgatgaggaagaagttgatcagaccaaacaaagggaaagacaaagaagaagactgtttgcatttagacaatgaactcttcatggttataaagctatataattggttttcagtcataacttttgttagaagtctatttgaaaagtaaaactaggcaaaataatgaatcacaaggaaaagaat

SEQ ID NO: 142546 - DNA, 313 bp, Arabidopsis thaliana landsberg
ctgttagttgataaacaattttttacattttattggttcaaagttcaaaccattgtttttacactttattccacacactatacacatgcaagagagatctaagggtcagttgtatgattggcggtgaagtcaggctcggtgggtttttgaggtagcaaaggaagagtgtagcgaggaggaaggttggagatattgtgcctcagattgtgaagcgcgtttgatgcgaaacgcgacgcgtaaagagcgcctccaaggctcaaggacgacgacacggttgcagcattgtgttctttatcttgactagcgagcgctt

SEQ ID NO: 142547 - DNA, 422 bp, Arabidopsis thaliana landsberg
attctcacgccgttcatattccctgatacagcttgatcgatcgtgagctcgactttctcaagcattagatccatcacacacttgacttcttcaggtcctctcttgaaattgtccataccaaatgcgtagagtgtgacatacggtacaccaatctctttgcagtattgaagaatatatttgacggatatgaaaccagctctgtgtcctgcgtctaggccttcaagattgcgtttcttggcgaacctacggtttccatccatgatgaaagaaatgttagtagggattggaccgacgcgtagaactttgaatataaatttcctcataagactcattaaagcgttgaagatttgagtgaattcccctacttcttctcgtgtattattcatctcggaaaatagggattttttggttatcggagggga

SEQ ID NO: 142548 - DNA, 398 bp, Arabidopsis thaliana landsberg
tttcatccttccccgcgcactgtgtctcgctctctctctcccacatttccattatctcctttactttctttctttgagaatgtcttctacaacaatcggcgagcacatcagactccgacgagctagaaaccaaacaatccgtcatctgcacgccgccgacgatgatccgccgctaagccacgtcgttcttccgatttcacaacctaatcgcttctgtaactccgcaatgtcttccttctttcccctcccgacttcctcctgcaacgaaagcacgaggaagaaaccgtaccaaacgtcgtcgtttcgagggatgggttgctatgccgcagcagcagcagcagctcaagaggtttctgttccctccgtcattcgctactccgcggatttggatgccagaa

SEQ ID NO: 142549 - DNA, 419 bp, Arabidopsis thaliana landsberg
cgtttttcccctgtaaaacaaagtcttttgcttagtgtccatatcaaacacatgtagtatagaccaaaacagctttagatctttaagaactttttagtcactgtgagagacaaagagctgaatatgaggttaccttatactgattatcatcttcaatactttcttcaagcccagcaagtccaccaaatgcaatcaataggtgcctatgatttcaagccataaccattggagtcagtcccccaaatttaaacggctaataatgtgtttagacacaaacttataccatgttaaggggaaatgagaatcacctaaatgttggtattttcagctcagatgaactaattaccaggccgtgctccgaggtaccaatcaaataatcgtaaccaccctgcttttggtattaggaaataaggttatgc

SEQ ID NO: 142550 - DNA, 451 bp, Arabidopsis thaliana landsberg
aaaccacactcatggcgacacttctctcaccttcttcaagctaagttttcattttgttcactgccacagatctatggccatggatatatctctgttcttcattttcctggtcatttacgcgccgttagtctcatacgccgatgaatctcaagccgagattgatgctctcacggcgtttaaactcaacctccatgaccctctcggtgctttaacttcatgggatccttcaacaccagcagctccatgtgactggcgtggcgttggctgtactaaccaccgtgtcactgagatccgtcttcctcgtctccaactctccggacgaatctccgatcgtatctccggtctacgcatgctacggaagctcagtctccggtctaactctttcaacggtactatccctacttcactcgcttactgcacgcgcctactctccgtctttcttcagtacaac

SEQ ID NO: 142551 - DNA, 327 bp, Arabidopsis thaliana landsberg
gcgctttatgccttcatttgaaaacattagaagagagagtttgaagcaaacgtatggtgctgatttcactgacaacaggtctctagttattaataacgccaattccttcgcattgagaagcagctttgttcatgagcatagaccttctatcagttcctatttaaaaacagacatgggatctgctggaccagcctggacaggatcattatccagttctgttcctatgaatgatcgtgcttctacggtggggcattttgaaaatgggaatagtttatctggatccggatcacttccaacgctgcaaggggtagctgtttcttctgataa

SEQ ID NO: 142552 - DNA, 363 bp, Arabidopsis thaliana landsberg
gcaacctagccgatatttctccgaacaccgcaactgccgcgatctcagccgcgcttgattctcagcgcagtagaaaaaaccgaggaagttacaattgcggtagatgtggtcaacctaagaaaggccatgtctgtcttttaactgctccacctgatattcccactactccgatcgcttctgagccagtgagctgcatctccgccgccgcatcttcttcccgttctactgtcttatctttaacagcggcgccgtcatcgcgacagaccttcactcacttacgccgagctttatcgttcgatgacgtcgatgcgcgtaattcactcgatgaatccgatctggatgctgcatcgatggatctggatc

SEQ ID NO: 142553 - DNA, 360 bp, Arabidopsis thaliana landsberg
tcgaacgtatttatagttggaaattattcttgttatttaccatttattttcttagtacctactaataaaagaagaaggggtcaacttgacattattaagccgagagaagaagacgaagtcaagggaattatcacgtaacaaacataattagtcaatcggaaagaaacaatacacaacaaaatagtcaacgataagtatttaatgacagaaacaaatttaatggtatagttggatattttcttgtatttcagctagaaattccgttctagctaataatatctaatataaaaaaattgtgaacgaacattcacagccatatgttttcttataaaataaaataattattaacaaccataaatt

SEQ ID NO: 142554 - DNA, 375 bp, Arabidopsis thaliana landsberg
tgcattgcctgagaatcgatgacatcgagttttcgcattttaaccgcgtagttcttgtaaaccctgtgaatttcagcaattctgtctttgtgttgatctggttttggttcaatcttgagtggtttcagctcttgtaatggagtctctgattcctcaagaatagtgcacaatcctcctgttcttgcagtccttagttctgttttcaacttctcaatcacatcactatgctcaaactcatcatcatctgaatctgaaccatcatcaaactcatcatatacctcttcttgttcatcaaagcccattttcatctcttcttctctctgcataaactcttcttcttctccataaggaaagtttgaaatctgtaaacttggg

SEQ ID NO: 142555 - DNA, 406 bp, Arabidopsis thaliana landsberg
tgtctccattgccttatagttcttggcctctgatactattgttagtattgtggtgcatggtagctagattatcaaacggagcttccaacaatgtaaaggttggaatcatttcaaaggtggaagatgctacgaatttccatatctattatggacagacctttaaagtcatcaaaaacgccattgatggcaagagctatctccttattcaggttcttgctcttttctcattaacttatctttcatctttttgtttccaaatgtatggtatggttcgtgtctgataattgaggataatatgtagaacacttctagaatggcggttcggacaaagtattgtacttccaggataaagtcttatgtgattccacttctaaattactcattagacactcaatcttctcaaggt

SEQ ID NO: 142556 - DNA, 340 bp, Arabidopsis thaliana landsberg; identical to SEQ ID NO: 69458

SEQ ID NO: 142557 - DNA, 1353 bp, Arabidopsis thaliana landsberg
aagatcagggtgtctctctgctccgctccaatgtaagtttttccatatcacgtaccactcctggtttaacattgctattctaaccggttagtagatcttagttcagtaaaaccggcctatagaatagtgttccggtttagctaagaagtgtgtgtgattggttcgagttttgtggggaatatggattaggtgattgtgacgtttttgtccatggagttgatagtggtatgaaggacaaaagagtggattggtaaaggacaagttaggaatttgggtgatatcaaaagatgacactataatttcaatttatatttgtttattagtaagtagaaaacaaaagtgtcacagcttttgtaagcgtttcaaaagtcaaaattaataggacagtttcaacctttacttagcttctgtagtttttgacttttcaccacttcctttttttttgttgggtctatctgaaaagttggttttgacttgtttttcttttaaccatgaagcgttactgtttggtcagaatggcaattctcgtaaataaacactttagctgaggttgttttggttttgtcaactctacaggcaatgaacgcgaatcagagtagtatgctaattcttcaggagacatgcattgacgcatctggagcgcttgtagtatacgcgcctgtcgacattcccgccatgcatgtggtgatgaacggtggtgattcatcctacgtggctctccttccgtccggtttcgctgttcttcctgacggaggcattgacggtggtgggtcaggtgatggtgaccagcgaccggttggtggtggatccctcttgacagtggcgtttcaaatccttgtaaacaatctcccaacggcaaaactcacggttgagtcggtggagactgtcaacaacctaatatcatgcaccgttcagaagattcgtgccgctttacaatgcggaagctgatcttgatcaagactggcgcgtgcgtgtgtttctttttcttaatgaattgtgaatttttatataacttgtttttttggtcttgtactatgggagggagggggtgtcgagtcaagaacgaaccgcgcgagtgggcgagatccaactcctttgtcaccgtgatgggaccacgacgtaaaagggttcgggtccgatcacggtggagtagttggtggttcgggtattgactggggttggaaaccccctctttactctttttgtttgtgtttgttatcttgagtattattattatgtagcgcgagtaagccacacgcgtggggtgtgttgtggttagaaaacgcgaactgtgagatgatgatgttatgttggatgggatctgtatcgtttcaagttaaaaaaaaaaaaaaa

SEQ ID NO: 142558 - DNA, 1561 bp, Arabidopsis thaliana landsberg
gagggattcgaaccctcggtacgattaactcgtacaatggattagcaatccaacgctttagtccactcagccatctctcctaatcgaaaagggatatttaattaggttccataaaaaaaaaaaaggcttgaaaaagaaccttctccactttattcttaaaaagctttctttttttgttatagatattctttatctttatattatatatatatattttttttttcattttctatatttttttctatattttattatattattatatatatatatattctttttgattatttgattatataaatatatatatcctatatttaaatatataatatatatataatatatatcctatatataaattatataaatcctatattatatatataatatatatataatatatattatataatatatatattactattatataactgtttttatagaactttctcagcaattctagttacattaaaaatttagctaaagattagataaaaaaggcgcgaactcaaaaaagaaataaataaaaccataatcatagaaatagagaatcctttttttattttgtctcgtcaaaacaaaaacacaagtaaaagatcttttttattttattttaatagcctggcctggtcagtccccagccgggcctttttttgttaaaattaaaaagactcatccgatggatttttagataaaaaaagatttgaaattaaaaaaaaagtggaattgaattcgcttttactaattttcttaagtcaactctagttttttctaaattttttcagatttttttattacacccccgattactttgttcgacaaaaggttaatttatatgcaataattgcattgtagcgggtatagtttagtggtaaaagtgtgattcgttcctttaatccctttaatattcaaagggtctctcggtttgattaatcttccgatcaaaaattttatttcttaaaaggatttagtcctttccctttcaatgaaagattcaaggaagattatagattctcgtaatttatatccaaagactctaatcaattgtaaatttggattatgaaattccgaaacataatttttgaattggatgactatttacaattcaataagtataacaagaggatccatggataaagctagaaaagtgtctttctaatcgtaactaaatcttcagttctattcattgtttggtatagaaaaaattgaagcaaaatagctattaaacgagaactttggtttactaaagacatcgacatattatattgttttagctcggtagaaaccaaatacttttcctaaggattccgttaaatagaaataaagaacgaagtaactagaaagattgttcgagttggcccgatctatcttctagaaggatcatctagaaagcaaaattttctgtgaaagtacccagacggaaaaaagctcacatagatgttatgggtcgaatttttatttcgttcccgtctttttttatttgggaatttctccatccatcataaaggagccgaatgaaaccaaagtttcatgttcggttttgaattagagacgttaa

SEQ ID NO: 142559 - DNA, 309 bp, Arabidopsis thaliana landsberg
tttgagaacataaactgtaatgcaatttattacacacaaaaaaacttaaagctgatcataatttcacttatcaattcatccaaattattgtaatataacatttaacaaaaacctaatggaaccatgttttattggtaatacttgaactagtaacagggatgatgctgcttgagttggcggcatcaagagcgttggaagattcgtcatggatctgatgttggtgctcctgtggctggtgatggatgtggttgtggtggttatcatccatgaattgatatcccatttgctctgtctgatacctcatttgct

SEQ ID NO: 142560 - DNA, 770 bp, Arabidopsis thaliana landsberg
tgcatcagtaccatgttttcaggcaagtgctgaagggttaagtcgacggaagagcttagctgaagccggaaagagagatatcttctatggagaagatgacgtggcagacttgatgtttagagaagaggaagtggaacaagacacggtcatgagagcttatagaagtaacgaagctatgaaatctatccaagatacgagacgaagacaaagaaggttcttttgttttgaatgttttgactttctcaaactttttttctctagagatcgaaactaataaaccctaacaacaaacaatgtttcttgtatctctttatcttgtaaattctttcgattgaaattgatactatatggacgacagacaagagtttcattattatacattatacataacaatagaacattgcagtacataagagtttttgaacattgactacaaatttggcagattttacaaacagagtaataatgcccgtacaataagaagagtttgtgtgtataagaattttcagggcacatggaatgcgagctcctaaattacattacataacattatgttcaatgtcgaacatcatctctttttgaatcatctctttttgaagaatttgctacctctcttaccaattccggtaccttctagactcgatgagagatgcgaccttgtgtcgggtctccacgttagttctttgagaagagagaacaaagacgagagtgcagctgagatttcgctgtcttttatattcttacatgatactactctcatgctctcaagc

SEQ ID NO: 142561 - DNA, 189 bp, Arabidopsis thaliana landsberg
gaatgaccgtcaaatgatttatgctcagaaaatcaaacttcagcaaatccaaatacaactaacatttacgaaacacaaacaaattgttacacatgtgcctcgttcattcatattttccatgcaacaaaggttacggaaaccaaaaatgaaactatgatagctatttataaaactgattcgaccaacaat

SEQ ID NO: 142562 - DNA, 253 bp, Arabidopsis thaliana landsberg
gcacgttttctcgcggtggctttgtttttcccaacgttggacaaagacatggaagaagagcacataatcaagaagcaacctatggttatgcctggatgtgaaccggttcggtttgaagatacacttgaaacattccttgacccaaacagccaactctaccgggaatttgttcctttcggttcggttttcccaacgtgtgatggtattattgtgaatacatgggatgatatggagcccaaaactttgaaatctc

SEQ ID NO: 142563 - DNA, 243 bp, Arabidopsis thaliana landsberg
  unsure (1)..(243): unsure at all n locations
gtgagtgggtcgtcnattaaagacatggctgacatgttagtgtggggtggagttggtactcgcatggatgctaatatacatcatcttcttcttaaatggtccaaagttttcctcaaatcacattcttaattatttgtagatatgtaaattattttatctacaccatatgatttctgacaagatttatatttgtatagacatctttctgtcttaatttccatcttgaagcttgaacttttattt

SEQ ID NO: 142564 - DNA, 271 bp, Arabidopsis thaliana landsberg
tcccaaggaagagtcgatgaagttgaaatcggtgttcgatgcttcggaaatcaaatcggaatttgaatcagcgggaataaaccctaaattcgcgattcaaatctggaagtatgtaattcagaatcttgattgcgtttgggacgagattccttcattgccttccgctgcatactctcttctccattccaagttcaagactcttacttcgtctcttcactcgctatttcattcctccgatggcaccacctcaaagcttctcatcaagctccag

SEQ ID NO: 142565 - DNA, 658 bp, Arabidopsis thaliana landsberg
gaaacaatggagatttctccttactgtctgctttctcttcttcccattttcctcctctctggtttctccctttcatgtaattctctcctcaatttcttgatgatttgttttctttttcttactatgttcatgttcattataaaaagagagaccattgttaaaaagttaatggatttgaatgtgcagatgatgaatttgatggtcacgcagcaacaagcagagctcttcttcagacaaggacaagtaaagatcatccttcctaattgatgattctaatatcgtttagaatatatatgtagacacattaatctttaagtatggatcttctgttttctttgttggtattgaaacagcctgcaaagaagattttgctaacaagaactacacaatcataacaagcagatgcaaaggaccaaattatccggcaaatgtgtgttgctccgccttcaaggactttgcttgcccttttgcagaagttcttaacgacgaaaagaacgattgtgcctccacaatgttcagctacatcaacctttacggtcgttatcctcctggaatctttgccaacatgtgtaaagagggcaaagaaggtcttgactgcactgatgtcacccagtccgcatccgcaacttctgattctatcccacgtgcctccacaact

SEQ ID NO: 142566 - DNA, 331 bp, Arabidopsis thaliana landsberg
tcgtaatattgaagccttgaaggtaacaaaaagtaaaatatactccaaatttaaattgagttacaaaaagaaaaaggaacttcgtgggtttaggtaaaatacaaaccaacccaatgagtttaatttccttttcttttttctttatgtaggatttgcacaacactactgttttatgagagaaagagagccaaacaaccactgctaaaattcaatgaaatcccatagtagctttgaaggcaggagcatccggaggcggtgaaggcaacaccgtcaacgccaatacaccacttaccgctgccgcaatcgctcctaacacaaatgcttgaatgtt

SEQ ID NO: 142567 - DNA, 301 bp, Arabidopsis thaliana landsberg
tcgttgactctgaaaccgacagagtggttcccccaaacccagaatcactttcccggatctatgtggtggtgcttcttgacagtgtcaagtacgttacctactcatgcgttcttcctcgatcgggtctccatctcgtagccacctgatttgagctactcagatcttgaccttaagtaggcgaacattgacttgtttatacatacagaccttgttgactttttttccctgtgttgtataactcttatgttctaaggttttggattttaattttgagataagcataaagtggaatccttgtttt

SEQ ID NO: 142568 - DNA, 219 bp, Arabidopsis thaliana landsberg
gcgaacgagatatgtgaaaaattagcggtggtggggtttcacgcaaacatgataagttacttaacaacacagcttcaccttcccttaaccaaagcagccaacactctcacaaacttcgccgggacatcgagtcttactcctctccttggtgcctttatcgccgactctttcgccggccgattttggaccatcacttttgcttccatcatctaccaaatc

SEQ ID NO: 142569 - DNA, 383 bp, Arabidopsis thaliana landsberg
  unsure (1)..(383): unsure at all n locations
gcatatattacaaaacacatactaattgtttctccttctccttcttccttgcaaatggatactttagcttcaaactcttcggatctcacgaccaagtcaagtctcggaatgtcgtcgtttaccaacatgtatctcctcacaacgcttcaagcccttgcggccctttgcttcttgatgattctcaacaaaataaagtcatcttcacgaaacaagaagttgcatcctctcccgccaggacccaccggttttccaattgttggaatgattccggcgatgcttaaaaaccgtccagttttccggtggctccacagcctcatgaaggagcttaacacggagatagctngtgtgcgtctaggaaacactcacgtgatccctgtgacatg

SEQ ID NO: 142570 - DNA, 272 bp, Arabidopsis thaliana landsberg
tacacgctttccttcttcttctctttctccgatttttattttttttactatttgtgattttgaattttccggcgatggcgtcaacgtcggcggaaatggaccaattaacatcaggcgcgagcaatcggataatatttatcttgagaacgcttaggaagtgtctcgtcttcgttctctctctcgtcctttctcttctccttattcttcgtctccgtcctcgtcgccgtgtctctcctctttcatcgcctgaggatgaggctgttccggctcct

SEQ ID NO: 142571 - DNA, 699 bp, Arabidopsis thaliana landsberg
gaaacagaaaactaaagaaaaaaaatatgcaatcggcgaaacagaagataagcgatatggctagtacagccaaggagaagatggtgatatgtcaagcaaaagctgatgagaaggttctaaatttagaattacgctaatgatttcgtttaacatcattgttatgactaaatagttatggattgtttgattgattcaaatattaatgacgtgcaggcggagcgggcgatggcgaggacgaaagaggagaaagagatagcgcaccaacggagaaaggcgaaggaagcagaagcgaatatggatatgcacatggctaaagcggctcatgcggaagacaagcttatggctaagcaatctcactaccatgttactgatcatggtccccacgtgcctcaacaagcgcctgtaccggctcccgcaccggttatgggacacggttacgggcataatcctaccggagttacctcagtgcctcctcagacctatcatccgacttatcctccgacgggacatcataatcatcatcactactaatccgacctactatctttttaaaatacaaaaaaataacctgattatacgtgtggggcgtttagtggttttcttagttcttaggcatgtgcttaaaattaagtgattaagcgttgagttgatgtttgcaactttgcgtacacgtttgttgataaatattttggttattcc

SEQ ID NO: 142572 - DNA, 530 bp, Arabidopsis thaliana landsberg
ggaagaggcttcgcttacttgctgagaaaaaagctccaaactttctcttattgggtttttgatcagctccggagataaaaaaaaaaagtattttcttgaaatcgaaatctgatctccattgagagtcttgctgcttgatttggattccgatttaaggttttctcgagaattcttttgctgcagttattagattttgacgagccgttgatctggacggagttccagatctccgggtcgtggtaccaaggaattagggttttagcacaaagttctcgtttttctgtgtattcgagggatgaaggagttttcgggtcgatgttcgctgctctaacatttggagtatgaagatgaacatgaagaaatttctcaaaaagcttcgtatcacgcccaatcaacgagacgatggtgaaggttcagtctctaacagaagcaataagtctagtgatgcagaaccatctccttctgattcattgaggtctcaagataactctgaattcaaaccctttttgggtttatcaaattggttaagc

SEQ ID NO: 142573 - DNA, 317 bp, Arabidopsis thaliana landsberg
taaataacaatactaccaggtaaacatacgatgtcttaccacaataaatttacagggaagtaagttttcttaagactcaccactgactttggcgacaataactgaagcatagtgagcaatgttagcctcaggggattgtttaagccttgcaatgaccgggaacaactctgatgacttcacaaactgtctgcaaatctggtggttcgaacacattttagccaatgagaagagtgcaatcttgagcggtgactcactcgctgtctctttcttgcttgggttcaaggcaagagtcgagcaatccgcaactagcctcagta

SEQ ID NO: 142574 - DNA, 128 bp, Arabidopsis thaliana landsberg
ctgactagtgactacttcgtcccatgctataacaatatttctattatttttttatgaccttttttaattgacatttgtcgtattttgttacacaatttttttttaatgttcacataaccccaataaaa

SEQ ID NO: 142575 - DNA, 379 bp, Arabidopsis thaliana landsberg
gaaagaaaaacccgaaaacaaactttcatttcttatttttatcttaataaagttacataccatctttcttcattgtctttgttataaaataatagtctgtgaacatttacgaaccatgttcttaccttggtaatctcttgaataatatttttaaactgaaacgcgcaatactattaaaacgtaaagtggagtataatgctaaaagagatcagggactcaccttatgatctcgggaaactgcccaaactctcaacaatagctcaaaaactgaattcagaaatgacctgcatcagatgaagcccttgatttgagagcgtttaacacaaaaactggcagaaataaacagaacaaagaaagtggtctcacatgacatcactgt

SEQ ID NO: 142576 - DNA, 402 bp, Arabidopsis thaliana landsberg
  unsure (1)..(402): unsure at all n locations
ctttagacacacaatccaccaacataaataggcagtgatataagttaatatcatagaaaacaatcagaaaataattcagaagagaaaacacaacaaaaaaaagaaagaaaaagaaagaaagaagaagagatgagtgagcttctctactctctccccacttgggatatccataaccttggatcactcttcaagcccgattttaatcttggtaatatatacattaatatatagacacaaacatattttgtgttttttcaatcgtaaaatattgatacatatacgcatatgtaatatatgaatcgacgcgcatgtatttatttacangttattcaagaactttcttattaaagtgtaatatgtttgcagatacatgtggtttcatgaatagatcgccggaacata

SEQ ID NO: 142577 - DNA, 366 bp, Arabidopsis thaliana landsberg
aagcaagtggtaaaagagtatttggttccataagaaatttgacacaaatgggttccaaactattttgagatgagttctgtttctctaaagccattaacttttagtatcaaaaggtgagctaaactggttctaaactactgcattcataggcaggtagggaattagaatcatgggcaaacaaaagaacaaacagatctcagatgagttttcttctctaaagccatttctaagcatccatatggatcaaagggtcagctaaatgttctacaataacgcattcacaggcaggtaatgaattaggatcatcaattagcaaaagaacaaacccttttttctcttgttccttcccactgttcttcatgctca

SEQ ID NO: 142578 - DNA, 351 bp, Arabidopsis thaliana landsberg
gcagatgataacgtggacactcaaaaaaccattgaatggtttgcaataattgttagtgaagtaattaatatattaaatgtggtcaggattaggtctgacattttggtaaatggggtcccttatttgcatgtccattttgatcttcatgcacctacagaatcatagatttgtatgtgatcagtgatgacgaattagtgatatggttttatgatcattaacattgttttaatatgataaattaaagatctattttgttagtgtccattgtccatattgatcctcatgcaactacagaatcacagatttgtaggtgatgacgaattcatgaatgataataatatgcgatcatta

SEQ ID NO: 142579 - DNA, 840 bp, Arabidopsis thaliana landsberg
gccacgtgtcatcttcctgaaatattgttttttgtttggaggtaactttatcttctcaagctttcttcttctacaacacatctagagctttgcaacaatggaggcgagtgcgaatgaaccagctatgaaaagcttgaaatccaatccttcaggaccgataccgaactttttcgtatcgctctcttcggcatttacgcaaacacctcttgtgcgttcgaacaaacccaatttgcttcttctaccaccagttgcagactccgtcaaattgattcaagactttcatcagtctctggtttctgctactgagaaatttaaaggattcctccattcgttcgcctctaagaaccctctctttcaggaagcggttcgcctatcttccgaatttcacattttgtgcgacgaggtaacttctcttagcctgcttatgctaaagaatgttatggattaagttaagaagatgattgtgtgtttctcatgaacttgccttggctctgattgttactgtaatgggtgaatctttgtggtttctatttatacaaaatgggtcattctttaacagccagtagattgttgtctagatcatttagcatttattggaaaaccttctcacattgataaccctgagttatatatgtcctcaagttgggatcttttttggttcttttcttgtaaagatgaaacttggcttctggataagtccggttatgattttgtgtgcctttgcttctggttttgggttctttatgtcttaaagatgaagatcattttgttgcattgcagattcgtttgagaaacactacaagggtgaggtttgcgatgtctaatcacggatttgcagcg

SEQ ID NO: 142580 - DNA, 371 bp, Arabidopsis thaliana landsberg
aacacattaatattgtctaaaatactatagtgattcatttgagaagagaattacgttttttccccagctggtttggtactcgtagtgacaatgtcccatttcttgagccgtttctagagagtccttaaggtttttttggggaaatggttttctttgtaacgcatcgaccaccgatttcaccatctccttagaattcccaaattctctcgttagactctcctcagctaaatacttcccttaatgaaattacaacgagaaccgtgaatgatttgacatgtgaatagtagaacgatggaataacaaaaatgttagtataattaatgaaaacatcagaattttgcatgctaaaagattggtttttttatgtcttt

SEQ ID NO: 142581 - DNA, 581 bp, Arabidopsis thaliana landsberg
gccggtgagacagaataagagagaatttcaaatatcgaagaaatttgggatcttgctgagcagtacaagtaattggattttgaaaatcagtctcactggattcgccgtccgttcgccgtttaaaaatgtctagccgccatgacaaagagaaaggcgtcaatgttcaagtcctcctccgatgcaggtaataccttcgaacaattcctaaattcaatttaggttttggtttagattttgggtctaaccccacatttcgatttgatttcaagttttatgttcaaattgaatttaggttttggtttcgctactgtgtttgttttgtattgacaggccatttagcgatgatgaattgagaagcaatgcgcctcaggttctcacttgtaatgatttgcaaagagaagttgctgtttcccaaaacatcgctgggaagcatattgatagggttttcacttttgataaggtataattagttgcgtctactcaaaaaatggagtatacttagtatctacatgttgaatgtttgtgtttatatgttgaacacaggtgtgtggaccatcagcacaacagaaggatttgtatga

SEQ ID NO: 142582 - DNA, 327 bp, Arabidopsis thaliana landsberg
atttctcactaaatcactctctacttctccacaaagcaacactgaatcaacccatgaacctaatcacaaaccctcttctctatcttctcgtcttagcttcgttttcgatcaaatcgatgctattgagaaacgtcactctgagaaagacgaaacccttgagcgtattcgtgcttggcgtcaatctaaacagacgcatcagttaaaaactcctccttctgctccacaacaagatccggatcttagagaagttgaatccgttgtgtctaatgataaattggattcttgtgttgtgcttgagccgattcagattgattctggtgagttgag

SEQ ID NO: 142583 - DNA, 355 bp, Arabidopsis thaliana landsberg
  unsure (1)..(355): unsure at all n locations
atattcgattgtcatatgcatgagaagtatgagcccgagtctagatccgtaagcattaaattcatttaaattattttgttagtttcacaacccttnatatataaggttaagtgattaacttaattagattgctttggcttgtcagagcgaagacaaatctagtttgtttgaggatgaagatagacaaccatgcagtgagcattgttacctcaaggtctctatctctctccctctctctctcaatttttttgtctattccttaattacgtttattagttactggtttaatattaaataagtgaggagtgtgacagaagctgatcatgtgatggataatgataactgtatatcaaac

SEQ ID NO: 142584 - DNA, 427 bp, Arabidopsis thaliana landsberg
ttcttttaacttatcaaaagctcaaattactcatataccaaaacagagcataagagtaacatgaagatatgtttttctctacttcagattctgtccacaaaatcaaatctttttaattacacataattagcatttttctccatattatttagtaataacagcaatcagcgaatcaaaacattcaaagccaatcattttagtgtaattgaataaagatgatagttttagttgtaagctagtccatagatatgaggtcttgtcatccaagggaagctatacatagaaaaggtctgtacttcaactcctccactaaaaccagcttccaagatgcactctctcgtgtttcttgtcaaatggcatccatctgcaagtctctgctgcaacggatctaacaatttctgcaaacgcttgaagaacgatccatctg

SEQ ID NO: 142585 - DNA, 259 bp, Arabidopsis thaliana landsberg
aaaagaaggatgtaaaaataaaaatctagtgtttaccgtctcatgacatttctcaaaacgtaattttgtttgtttttattattagaagtccttgtttcatgaacaaaacaagtattctaatttgcctaatacaacataaacgcggatcaaaagtagatcatcgagagtaaatggtctcatcacataatagaattaataacgacttcgaaagcagcactgttccacgaaccagcaacaacatagcgtcgtcaaactgcat

SEQ ID NO: 142586 - DNA, 264 bp, Arabidopsis thaliana landsberg
tgatcgcagtcaagactctttgactcttatcttttgtattaaagataaatgaacatgtgataagaataataacagattagatgttgcatgtaatactactagactagatctacagaaggatcaaagaaagtagtaccaaagtagacatcaataatgaaattgcaagcaaaacagaataaatgttgtctcctcgattgcaagcaaaacagaataattattgcaaattctcccctcgatcatcttgtgttagatagtctgtgccgc

SEQ ID NO: 142587 - DNA, 401 bp, Arabidopsis thaliana landsberg
caaaaacatactacaggggccaaaacgtagagaaactaaaatacaggaatccagtaaatattataattcctcgcagttttgccactaaacttctcatcttgatcaagtataaccctgcttgtacttcctgaaaatatcctcagtttccgcattacggaatgcgcagcacccgataatgtagaccattaatcaatccgataagcgccaagagtagaaagatatccgcttttaaccaatctaccttaatatttgcgagcaagccggctttacaagaatcacaagtgtaacacaaagtgttttggtcattgctccaatttagacaatccatatcagcagacatatctatgggacttatccaataagtaggattaacaaatgtgaatccacattttgttgggggc

SEQ ID NO: 142588 - DNA, 885 bp, Arabidopsis thaliana landsberg
ctactactacggagattatgatcagagaaccccttggtgtacccgagtcttcattgaagcatgtctctgttcttggcagagggagctttggctctgtctctctcaaacaggattctaacttccgactctatgcgaagagtcgtcttcgttcaatcacataaagattctcgtgaaagagcttaggatcatgctttgtttccacaatcatcctcgcatcgtccaagcctcaagccctgttcttcacttagggatccaacccgaagaatgttacatctatatggagtttgcctccaaaggcactctcttcaatatgatctcccagtttcgtgggaaaccaatgcctgagaatattatcaaaggtgccgctcttatgatcatacaaggactcgacgctcttcactcacatggttacgttcactgcctcaagccagccaacgtcctcgtcttcccttccaccacttttggagagccatgggatcttaagcttgctgatttcggttcatctaaagagccttctacggattctaggtcgttatttcctggtacgctgcagtacatgccaccagaatctcttggacatgatggagtgatgggaccggccgttgatatatggtctctagggtgtgtggttattcagatgtttggaggttgtccagtgatgaccagagactgttacatgtgggggcttcccaaacttatatctccggtggccaacgacttcttgatgcggtgcttggcgttgcagccgtcacgtagggccaccgcagcccagctgttgagccatccttttgttgcgaaagagtcagtgttccattgccagagatgattccgtgtcattcttatttaaggtttccttccgccataattgacaacgtggtggaacaa

SEQ ID NO: 142589 - DNA, 224 bp, Arabidopsis thaliana landsberg
ctgacggagaatcaccctatctttcctcggctctgcatcaagaccgttgaatctaaccgttgctggctttgttaagaccatttggccaactggtgtggattgtgtgctctgtggtgttctccatggtgtggttcttggagtataccatacagacgatggtgtttcccatgatggcgtttcgggcggttgcaactgcggtggaggaggaagatgaggtagatttg

SEQ ID NO: 142590 - DNA, 393 bp, Arabidopsis thaliana landsberg
ttgttacagaaaatcttaagcattgtcgacagtagaaagtttattaacatttgcttctgtctataatcgtaaattaattatccaacaaatgaaataaacgcataaaagagggtcgcaaaaaccgtgatagagaccaaaaataagtatggatatctgaacagaacttggatgtcctgagacgcatagttaggtcgtggcctggcctataggcgaatcgtcttgaggaatgtctcatacgcagtctggaggcggtttctatggtcctttcccttagtgtttttcagatagtgagccactttgataaacccagcgtgttgttgaaacaacacagacgttgcatcttcctcttgtggcctgagcgatacttcttgttctctgttaggttttggcatt

SEQ ID NO: 142591 - DNA, 418 bp, Arabidopsis thaliana landsberg
cgatcgtgtacctgatgaacgatgaaattattcatctccctaagtttgagacgacgaacaaaagaaaacttcacggttttttcttcttctttatttccttcattttttatattttgggaaagtatttttaattttccaagatatctataatcatatcattatatatgtaatattttttttaatgtttgggtgagtctttaatttatgcaatttttcgggtgtaaaattgttactatgtgttattatatgtttttaatgcactcaatccgaatgtggatttgcagtggctatatatataaataaatatatatcccgttgtaattttagtgaaacgtttgtgtgtattgtacccatatataaaaatgtaattcactctttttagtttatatatattttgcttataaatatgcgtttcttt

SEQ ID NO: 142592 - DNA, 378 bp, Arabidopsis thaliana landsberg
caaaaagaaagtcttctctagggatgctacaaatttaagtagaacttgatacattaatttaagagaatataaatcctaccaacccaacacattttgaaaatcagaattcacaacatgagagtaatcatatcactaaaacgtcgtcgtttgatcatatcaaaataatcagcaaagatataaatgataagaaagtcgagaattcgacatgttccaatacgacacaagcaaagtcattggcatgctggagccattggagtagtcgccggtataatgacaacaagagaaaatgatgaaagctcccataatttctgatgctttgccaaagagaacaaggtaaataaagattccaaaaaccatgtacgtagctagctttgagag

SEQ ID NO: 142593 - DNA, 440 bp, Arabidopsis thaliana landsberg
aaagagtgagcagtctacaaaatagaaccaaaaagtttgaaacttgcattaaatttgaaccatttggctattaaggaagaacatgtgagcggaagatgagaggataggtgcaacagaatccggtgctccaacactgcaacaaggtttatttggaagattaattaactaaccgattctacctgtatgaatactttggcatgaaaagagacttaatcaagcatatgccttaccacagaaaggagtggaccttgcttgaacttgtcatggaatgaaaaggagagagctttcgggttttctccaggtcctctgatgaaaccgctgtaatcataaaagcatcagattttgtctatccatttagacaatgcaaagatatacaaaaggaggtcaagaccgatggaatggataacagtaagagttacttacactagtgatgctgatac

SEQ ID NO: 142594 - DNA, 424 bp, Arabidopsis thaliana landsberg
cacgacttatggggaaaacttgaagagcatccatacccattctaggattgaaaaccttcatctttccatacccagtgtcaatcacataatatattccatcgactgtcaatgatgtttcagcaatattggtggcaacaatgcatttacgggctccatcttctggtttctggaatatctttgcttgcaagtcagcaggtaactgagagtatattgggagaatgagtaggttcgttatttctctactggaagatgatacgagctgttccattctctcctttagtgaaaagcacgctgcctcaatctcatcttgcccggtcataaaaatgagaatgtccccaggtgggcttgttatgtgaatcgtcattgcctgtttaacagcagcttcaacatagtcttcacaaggagttttagagtagagaatatt

SEQ ID NO: 142595 - DNA, 210 bp, Arabidopsis thaliana landsberg
caagattcctcaaaaggaaagaagagaaagaagataagagatatctggttggtcggagatggagatgatcggaggagacgatacagatacagagatgtacggagctctagtgacggcacagtccttaaggttgcgtcatcttcaccactgcagaaagaaccagtgtacctctgttctcgtcaaatacattcaagctcctgttcatcttgt

SEQ ID NO: 142596 - DNA, 158 bp, Arabidopsis thaliana landsberg
aagacgaaaccaaatcaatctcttttttctctgattggtgttgtttcacaattcacatacctgaaaaaatgattttactatacataaactcaataagtatacagagatacaatggactgttaagaactcataaaaatcaagagctaaaatgcattgat

SEQ ID NO: 142597 - DNA, 1512 bp, Arabidopsis thaliana landsberg
cgtcgtcgtctgtgttagggagcacaaataatagagaggcgtagcacaagagagaaggtggtgatcgaggccaagatttagaatttaactataacaaaaagcctctgacgagtgtgactagtcacaagatctgatcatggcttcttgaaacttcttcttcttctttcttctctttaaaggtacctactttccttttcccaaagtttcctcctttttttttctttttttaactatatatattgaagcttgcttcgattgatttctgctgggagcttaccagctagctactggtctcactcttcttactgaaattgattctaactttgaagttaatttcttaaagctatcctctgttgtcatcaataccctcttgttttctgcgatataaaggttttgtaggtctctttcgatctggcttgatgtgtgtttgttttactcaactttttatagtgtgtgatcatttatgagaagaagcatccaattaattaatctcatccttttatcgcttttaactcctacgattgctttccctgtggggactttattgttccttttgaaaggtatagctagctataaagactcttaagagtttattattgagtctactttatgtatgtagctgtgtttgaatcttgagaggctgatattagctcagatcctcgttttgttagtatttgtgtagtggatttaccctgttaactatcaactattatttgtgcgacttgttcatagtcaagatgttgttgattttggattgtaggatgacttataaaggaagtgttcatggaatctgactggttcagttactttgaaaatgataaatcattgaaccttggaatatgacacgatgattcctgcatctgttgcgtcctgtttctgggtttagctatgtattctcgatggagttagtcaagttcataactctttttactgtgtgtttgaaattctgaattggttcttagtgtttcaagtttatgcttatgcattcgcttgtatgactggtgatgaatgtttttgtgttcatatgattatggcatgaatgttttattccctcttttatcagagttttgcacttattttttgttgtcttgtctctgtgtcaggaaaaaaatgtcaggctctaggccgactcagtcctctgagggctcaaggcgatcaaggcacagcgctaggatcattgcgcagaccactgtagatgcgaaactccatgctgattttgaggagtcaggcagctcctttgattactcaacctcagtgcgtgtcactggcccggttgtggagaatcagccaccaaggtctgacaaagttaccacgacttatcttcatcatatacagaagggaaagctgattcagcccttcggttggttacttgccttggatgagaagaccttcaaagttattgcatacagcgagaatgcatctgagctgttgacaatggccagtcatgcagttcctagtgttggcgaacaccctgttctaggcattgggacagatataaggagtcttttcact

SEQ ID NO: 142598 - DNA, 602 bp, Arabidopsis thaliana landsberg; identical to SEQ ID NO: 40392

SEQ ID NO: 142599 - DNA, 609 bp, Arabidopsis thaliana landsberg
agaaagagagagagaaaacgatacctaagctcaattatcttctctgcaacaaactccaaaggtattatcttcttatgctctctctttgcatacatacatatatatagatacctacatatatatatatctctatgtctttgttcatcatcagttatataggtgatgtagatagatggacaaaaaaacagcgtaagacctagtttctgacttacatatgttttaaattctttgtctgaatcattacaggatccgagagagagagctctggaacgatattaacatatatcatgaagaaaaagattgaagtattgatatgggaataactaaaacttctcctaatactacaattctcttgaagacttttcacaataattctatgtcccaagattatcatcatcatcatcatcataatcaacaccaaggaggtatcttcaacttctctaatggattcgaccgatcagattctcccaatttaacaactcagcagaagcaagagcatcaaagggtagagatggacgaggaatcttcagtcgccggaggtaggattccggtctacgaatcagccggtatgttatccgaaatgtttaatttccccggaagcagcggtgg

SEQ ID NO: 142600 - DNA, 413 bp, Arabidopsis thaliana landsberg
acagctgtgggattgcctatagttccagttgcggcagtgatagttttccatgatagaatggacgcatcaaaaatcttctccattattttagctatctgcggcttcctttcattcgtctatcagcactacctcgacgaaaagaagttgaatactagccacacaagtgctgtaggagatcttcatctacctgttgaggaaggtcacacaaacatacaaagtgtgtgatcaaagcatatttccagtataaagccaatgtatctttctttttttcccctcaaaggccaaagccaatgtatctttgtacagtttgagcataaaaaacgtgtaacgctactttgcaaactagtcagtcataatagctaataagttttgtacatatgataccaataatttcagaatatttttcttctata

SEQ ID NO: 142601 - DNA, 340 bp, Arabidopsis thaliana landsberg
ggatgatatttctccaccttaacctacttgatacttaacacacaaaacccattaacacattgggcatgttttacataatgtcccaatggcccttttcctttagtgaccaagtcgcgtttcttctccttagtttcacaaacgatataattatatcaagtggacagattaactggcctttttgtatcattacttaatttgaagaatggagcttcacttcatccttggaagagaaaggtaggctaagcgacagtagccaaatttcctctccacttacggtttccatgatattcttgatattttaccttcacaaggagcttgtatgtgtggtagttgaatggca

SEQ ID NO: 142602 - DNA, 334 bp, Arabidopsis thaliana landsberg
tttgagcagttgggtgcaaagctgaggatgtgggcagaatcatcatttgtgtatcttgataagctggtctcaagtctacgagaagaggagggaagtgttccttttcaatttcataacttgacagatcttttggaagacaaaaggttgtctgatgctgttttccagtcaactagtgttgaaatcattgttgatgggttcatagtggatagcttagaagtggatagcttagaagtggatatagaagaagtgaatgttggtcatcaggaacctgaagaagaatcggaaaacagtggtgaaatcagtcttcaagctgtctacgaagaagatgataatg

SEQ ID NO: 142603 - DNA, 263 bp, Arabidopsis thaliana landsberg
aaaaatcagagattccattttctcttatctctctctctctctttctctttttccgattctgattctattttttcttcaccaaccacacaaaacaattctacgtttgatctcttcttctttctccgtccaaattaatctctacgtttaatttctcttgttcaatcatgggacacgaaacaatgacgccggcaacaacacgctcgtgttcacgtacggaactctaaagagaggattctcaaatcatgtcctgatgcaagatctga

SEQ ID NO: 142604 - DNA, 422 bp, Arabidopsis thaliana landsberg
attttctataaagagataacaaacttcagaaacttctagggccatttttattccggtgcatcctaatcatgatatctgttgtaatcatcactgagttacttttggagtacacgacggctcttgctaaactcaccgccggggttcttccgagacggcaaggcgacagaaatgttatacgtattggcggtttctctctgccttgtcctcctagatcctcacctgttccagatttttcttctcatcttgtcgatttctgaactctgcgtacgccttaatctcaattttggtttttcaccggagattatgactgccaagacttttttcccggcgtctgatctctccgtctgtagaataccttttttgtattttcttaaattttttgttttgttcctgaattttgaatggctcagagttgtaaaaga

SEQ ID NO: 142605 - DNA, 406 bp, Arabidopsis thaliana landsberg
gatagtggatcttatatggagcatagatacacaggtccacgtagtgtttccatcttaggtttgggctctggaacacttgatctcactgaagaaaacaaatggggaaacaaggcttgttatagatcttactttctcaatttgtcatgactattttgatctgatttttccaaatccgcaggtgggtatggaaggcgaaaggcttggtatccacgccgaagaaggattgaagaaggttaaatgggagaaagcttcagggaaagaaccgggaatgacatggtaccaggtgaataaacttaacctttcagaaaaaataattggaagtaacttgagcaacaagaatagtgatctaatgaacaacgtttgagatattgtagacatacttcgatgcaccagagagccaaagtgc

SEQ ID NO: 142606 - DNA, 333 bp, Arabidopsis thaliana landsberg
ttctgcgtttcctctttggcttctcgaagaggaagaaaactttggcagagagcgaagcatcacacatattttggcctctccttcacgatattcgaagaagtctcctcctccttctccaacgaatcccagatcaggcggcaagtaggcgaatccttacgaagaattctaacttcatcatcaacgatagattctgtagtttgattttcaaagtagtagtgtaaaggaatcagaaatggcggtgggagagaaggagcacgaaggaactgtggttgaaagcggcggcgagaagaatgattccgccgttgtactctctgcttccggcgagaagaagac

SEQ ID NO: 142607 - DNA, 316 bp, Arabidopsis thaliana landsberg
ggaaaacatacatacccaagaggctcggagatcgatattatatagaattctttcacattaccctaagttaaaaaaaatcacatttgcccctcaaagtcatactaaactccaaaccccaccccaaattgtttgtcaatcgcttgtatatcatttgctaatacacaatcatatttacttaaaaaaaaaaaaagggacataacctccttgaccctttatataagacccactcatcattcatacttttgcacattgcctactatatcaatcttcttcttcttcttcttctttaatttgctgcttttatataaccaagtct

SEQ ID NO: 142608 - DNA, 121 bp, Arabidopsis thaliana landsberg
atcgttgacgaacatctttcataataaagtcactcagttcaccactaaactcaacaccagttggtccaccaccaaccacaacacaatgtaacagcctccttttctcctctttcgatatacc

SEQ ID NO: 142609 - DNA, 414 bp, Arabidopsis thaliana landsberg
cgagaattcatttgaatattggtgcataaaacatttgagatgttgacaaaaaaatgactttttgagatgtattggctattgcgtgcgcatattcatatccactatccaaaatcaatattggaccactggaatctcctcgatccacttttttgtccccgtaagttttgtcctcaactctttgaaaataactattctctgcattcttctatagtatataagtatacaaatttcaattttttttgtttttcagaaaatatcagtatttaaactatagatcttgtaaaatactagatacgatatagtaacacgatggttttttagaaaaagcaaaaccactagcttttatgtaacgaggtgatatggttgacgattaatcatatttctttttgagttacgaaataagatagtatatat

SEQ ID NO: 142610 - DNA, 212 bp, Arabidopsis thaliana landsberg
tatcgcaaaaaccctccaagccccaacgacgccatcttaaaccctagcttaactcttcatgctctctccctcgatttctcccaaattgaaacttcccaagtctctccctccgtcgtccgatgcgtgatagagaagtgcggcagtgtccgccacggaatccctcttcaccaatctctagctttcttcaattgggcaacttcacgagacgatta

SEQ ID NO: 142611 - DNA, 419 bp, Arabidopsis thaliana landsberg
tggataaatgaaaatcatcatcagacataattttcacttcaatggagcaaatccaaatcttgttttatatggtgaagctatagatcttacatggtgaataactatctatatttgaatacaaactcttcatgaagcattataactccctgaaaagcatcagcacaacacaacaacatatgaaaacactcttgacacattctttgttaccatcatcatcatcatcacagaagattccaagtttcagacttgaatgttcggacttagacccacatatcttcacctccttcagcccacattccccatttccatctcactctcgggttactcatcatacatgtcgatatcagattgcttcttactctaggatctttgtcctggtgaatcatcagtctcatgtctgtcaaacctctgtacttatt

SEQ ID NO: 142612 - DNA, 298 bp, Arabidopsis thaliana landsberg
gcttgatcggatcatttagattcaacttcaatctataaatatatttacatacatacatacaacactcaaatctctctgtttgcaactgaagactgacttgaacaagagcgaggcagagaccgccttttctgcagtcagctatggattcagcaactaacagaaaacctctgtttgaaaccatggacgagaaaaaaagaagagagactgcagaaacatcaaactcttttttcttatttacatctcaaaaacagaaaaacaaaaagcaaaaattttaaaaaggttttttctttctttctat

SEQ ID NO: 142613 - DNA, 122 bp, Arabidopsis thaliana landsberg
agatctcgacttgaaaaccccgaaaagaaaccctgttggtgaatcttgaggactcggtttcgcgtctgtgtttccgcctttcacttgaagtatcgtctgaccgatgacttgtctaatggatt

SEQ ID NO: 142614 - DNA, 1259 bp, Arabidopsis thaliana landsberg
cacttcttcgatacttcccaagttcaccgcaatggccaccgcttcaatcttccccgccgccgtgaccgtcaccagagatgtgacatctcttcttaatccatcttctctgatcatcggaaaatcattatctccttcaaagttcagctcaatcaaatcctccgtttcattttcccgcaaaaccctaactccaattcgatactcttcatctcccgccgatcactcacccgccaccgccgtggaagcgatcacgaatcgatccaaaaactccttgaaatctcgtctccgtggaggagaaactctctacggtctctttttactctccttctcgccgacattagccgagatcgctgctcacgccggttacgattacgtcgtcgttgatatggaacatggtcccggaggtataccggaagctttggattgtattcgagctcttaacgccgccggaacatcagccattctccgattaccggaaaactcaccaacctgggctaaaaaagctctagatctaggtccacaaggaatcatgttcccaatgatcgaatctcgtaaagacgctaccaaagcggtgtcgtattgccggtttcctcccgacggtatccgtggatcggcgcacacggtggtgagagcttctaactacggaatcgatgaagggtatttaagtaattacgcagaggagattctgattatgtgccaggtggaatcaggtgaaggagtgaagaaagctgatgaaatcgcagccgttgatggtgttgactgtgtgcaaatgggaccgttggatcttagtgcgagtttagggtatttgtgggatcctggacataagaaagtgagagagatgatgaagaaggctgagaaatctgtgctgagcactgatccggcgaaaggcggggcttacttgtcgggtttcgcgatgccgcacgatggagctggtgagattcggggacgtggttaccatatggtcgccggagctgttgatgttggattgtttaggaatgctgctgttgaagatgtgaggagattcaagatgggtttggtcaatgaatcggacagtgaggattcgtcggaacatgataaagatgttgatgatgagaagtactggagcgaataagcaaaaatttcaaatttcgttaatgttgtttccttttaactttccataaagatttacaaaatcatgatgccacaaatgtttcaaaaacgaaagcaacatgaatccaacaaagctgagacatttggctttgttttttttggaattgaactaa

SEQ ID NO: 142615 - DNA, 318 bp, Arabidopsis thaliana landsberg
gtctaaagaaggagagggagagagtggctcactacctacactcaagcagtgagccaaagctggttgaggttggttattatgcactatgtaattatgcctgtacttgtaggtttgatgaagaaaccatagatcttgcataagccttgattttgaattttgttatttgtattgagatactttccagactctttttaaatgcgtagtccaggcatacttgattttaaagattgatatctgtttgacttgtatagtaatcttttgtatgcagaaagtacaacatgaattgctggttgtgtttgcaagtcagcttctagaaaa

SEQ ID NO: 142616 - DNA, 252 bp, Arabidopsis thaliana landsberg
cattcatgttatatgtatcttcctaattcttcctttaaccttttgtaactcgaattacacagcaagttagtttcaggtctagagataagagaacactgagtgggcgtgtaaggtgcattctcctagtcagctccattgcatccaacatttgtgaatgacacatgttaacaatcctttgcaccatttctgggtgcatacatggaaacttcttcgattgaaacttcccacatgtgcaggtgcgttcgctgtcac

SEQ ID NO: 142617 - DNA, 1612 bp, Arabidopsis thaliana landsberg
gttcccttttcagtgtcctttcaatttctttcgacgaaacttcatttctcaatttcttttgattttgatcgcttcgaagaacgaatcaatttaagcctgccacaaacaaaccctagaatacgacaacgcacgacgacgaagaagtcgaagaagactactactataaacgacgaagatcattacttcaatcttcaatcgagcttttaaattttcagatcgtagaagaaaatcgaacttttgattccaaaagcgatgagaccgattcaatcgcctccaggagtttccgttccggtgaaaagccgtccccgtcgccgtcctgatcttaccttaccgcttcctcaacgcgatgtttctctcgctgtacctcttcctctcccacctacttccggtggttccggtggctctagtggatctgcgccgtcttctggtggttcggcgtcttcaacgaacaccaacagctccatagaagcgaagaactattcggatttagtgagaggtaaccgtatcggaagcggagcaggtggaacggtatacaaagtgattcaccgtccgagttctcgtctatatgcacttaaggtgatatacggtaaccacgaggagactgtgagacgtcagatctgtagagagatcgagattttacgagatgtgaatcatccaaacgttgtgaaatgtcacgagatgtttgatcagaacggtgagatccaggttttgcttgagtttatggataaaggttctttagaaggtgctcatgtgtggaaagagcaacaattagctgatctatctcgtcagattcttagtggtttagcttatctccatagccgtcacatagttcatcgtgatatcaaaccatcgaatcttttgataaactctgctaaaaacgttaagattgctgattttggagttagtaggatcttggctcagactatggatccgtgtaattcatctgttggaaccattgcttatatgagtcctgagaggattaacactgatttgaatcagggaaagtatgatggttatgctggagatatttggagcttaggtgttagcattttggagttttacttggggaggtttcctttccctgtgagtagacaaggtgattgggctagtcttatgtgtgccatttgtatgtctcagcctccagaagctccagcgactgcgtcgccggagtttcggcattttatctcgtgttgcttgcagagagaaccggggaaaaggaggagtgctatgcagctattgcagcatcctttcatattaagagcaagtccgagccagaacaggtctcctcagaatctacatcaactcttgcctcctcctcgtcctctgtcctcgtcttcttctccaaccacatagcgttttctctcttcttcccttcatcaactcatattttttgtgttactactgttcttgagtctgttgtccaattttttgctaatcatggagggtctctgaattttacatttattagggagtaaaaaactcgagagagggtttttgggattattgttttctagaaaggtaaaagagaacaatgataatattcttatgcttatgatggtgcatgtatccccaatgtagctttgttgaatttcataaaagtttttgccttggt

SEQ ID NO: 142618 - DNA, 291 bp, Arabidopsis thaliana landsberg
agcccatcgactccatctagtgggactcagccatcgtcaatggatctgtcgtcaccgaggagcatagggaaggtacactgccgttcgatggaacaagtcagggaggagactgagcggaaaggaactttgctagagagacttaataatgtagaggagcaagtgcttaagctgtgttcacagtttgaggaagaagttgaagaagagaggaagagagaagataagacggataaggaaaagaagaccccgaagaagaagaagggattgaggaagctggttgataaagttgttgga

SEQ ID NO: 142619 - DNA, 451 bp, Arabidopsis thaliana landsberg
ctatggtcaacgattacaggactccgttgatggttgctgctacttacggaagcattgatgtgatcaagcttattgtttctttgactgatgctgacgtgaaccgtgcttgcgggaatgatcagaccactgcgttacactgcgctgcttctggaggagctgtgaatgctatccaagttgttaagctgcttcttgcagctggagctgatttgaatctgttggatgctgaaggtcaacgagctggtgatgttattgttgttcctcctaagcttgaaggcgtgaagctgatgcttcaggagcttctttctgctgatggatcatctactgcggacggaatctacgggttgtgacaaatgttccgaatagaagctcatctccgtgtcattctcctactggagagaatggtggatcagggtctggttcaccgctcggctctccttttaagctgaaatct

SEQ ID NO: 142620 - DNA, 236 bp, Arabidopsis thaliana landsberg
aacataaactaaaacttcattaaaactcgattcctaattgcaaaacccggctttatgtcttaagatcttactacaatccggaacacacacttttgtatgtcttaaattactaaagcataaacgaaaaaacaaaacactcttctcacttaacattactaagcaagatcctatgaaactgcaaaactttttaatgggcaagagatgttgataggagcaagttgatcaaggaaaccgaa

SEQ ID NO: 142621 - DNA, 236 bp, Arabidopsis thaliana landsberg
ttgaaggagatgaagaaagagaagaagagagaaagtcatcgttcgtggcggatgaagaagcaagaccaatttggaatgggtcgtaccaagttccagaatttatggagaagacaagttaagatcgagactgaagaatgggaaagagctgctgcagagtacatggagcttttgacagatatgtgtgagcaaaagcttgcgcctaatctgccttatgtgaagtctttatttctgggttg

SEQ ID NO: 142622 - DNA, 173 bp, Arabidopsis thaliana landsberg
agatttcagaccgaaacctaaataatattgagtaagtttattcgaagaagagatgaagagacaaagagcaatcgagttagatcgagtgaagaagacaatgttgaacatagattgggacgatgctttgggcgatgaggaagttcccgagctcgagatcatcgctactgacaaat

SEQ ID NO: 142623 - DNA, 112 bp, Arabidopsis thaliana landsberg
ccatttaatgtatgcaaattatctacttatgattgaaatcccattgaaaagatttgaactctactccttcatcttacataacgaatttggtaccaacaaaatgtaagtgatc

SEQ ID NO: 142624 - DNA, 115 bp, Arabidopsis thaliana landsberg
attactttcataatctgtaaaacattgtaaccaattgtgagtgcagagtaaagcttgtacattctttggaagtcaacagtttaaatatggagaactaatctaatttactataatc

SEQ ID NO: 142625 - DNA, 490 bp, Arabidopsis thaliana landsberg
gtagaaaaaagtcatcgttaattagaccatagaacctttataacacaaatgattccaaaatctttccatacactaattaatgtttccattcatcatatattttcgcttagaatttctaatccgttttttatggtaagtaatataataaatacgaccataatgtaaaaatgttagatgcatctaatcagaagaagagatccaagataattccaccataccttcacttctcacggccgatagattattctcggatccagaagcaccaggttgtgtgtaaccatcggatctttggaccatgggttgatcattaccattgatggatcttagcatattattatcattttcggcttcagtactcttttctggtccatggatagtatttagggttggctgtgtcatcgacgatgaagaagagacgataatgttgtgaagcccctcaaagtttgttccaacgtccacgtgtccaaaaccattactcgttctcaagctc

SEQ ID NO: 142626 - DNA, 217 bp, Arabidopsis thaliana landsberg
ctataacgcgtgatgagatacctaaaagaagcaaaagaagttcggtagttgaaacataaattttagtgctcaaacaaagtaaactcaaaggaaacagctcctgatcagatttagggctctatgagtaggtttaaagtctacaaagataacttcttctttccctatttttactatttaaagaatttttatttttattttcgttttaaggacatttttt

SEQ ID NO: 142627 - DNA, 105 bp, Arabidopsis thaliana landsberg
gattggaattggaataggtgttggggtaggtggaggctctggtcaaggttccggcagcggaagcgttagtggtggcggcggcggtcgccattaatcaaagctctt

SEQ ID NO: 142628 - DNA, 242 bp, Arabidopsis thaliana landsberg
cgtaataaaagagtgttttgatccattgatagttacgagccaaccatacgaatcttttgaatataaaagtttttaagtgtcatttctcctagtcctaataagtttttaagtgaagggacctcagtcttgtcagcagaacactaaagaaactttccgacctgactttgttggattaggattgttgtggctgcgagtcaccaaggacgagggttctaagcaatggcatctggctctcgagaagt

SEQ ID NO: 142629 - DNA, 413 bp, Arabidopsis thaliana landsberg
cgaaaatgttttagggtttttctttactcgattaagctcactagttcttcgcaacgtagttagagatcgacactggcgcggtggatttagggtttttttcctccgcgactacgctcggcgtttcgatttggaaccctaagctatgtggaacaacaacgatggtatgcccttagctcctcctggtactggcgggtccatgatgccgccacctcccgctgctcatccttcttacacggcgcttccgccgccttctaatccgactcctccggtcgagcctactcctgaggaagcggaggctaagcttgaggagaaggcccgaaaatggatgcagctaaattccaaacggtacggcgacaagaggaagtttggattcgttgaaactcagaaggaggacatgccacctgagcacgtca

SEQ ID NO: 142630 - DNA, 212 bp, Arabidopsis thaliana landsberg
agcttcagctacaaagagaccttcataacgttctttgttccgattttcttttatcgtttgagttgtaatcatgtaattgattttaatgtcatgccttggattcataagatgggtcatgccttgtttcccctttgttgtcttgtatgttgaatattgcaaactctaaagagcatatttataagaagaaataaaagtttctacatttgactttc

SEQ ID NO: 142631 - DNA, 256 bp, Arabidopsis thaliana landsberg
cccacacagtctccctagtgagcgatgatgaaagcaaaccagaaaccgaaaccccacgcgccaccgcgtcctctcttctcctgtggcttcttccgccgctgcacacaatccgtcctcagcccaacctctcctcaccagcagcaacctcgccgtaaacccaccaccacttcctcctcatcttcctcctcctcaacctcaacttcccaaagcttcactcaatggcgctttcctcatcatcttgatcaaactccatcca

SEQ ID NO: 142632 - DNA, 603 bp, Arabidopsis thaliana landsberg
attcagactactattcagagcttacctccagctttaaaacactattactgcatctcaaagcatcaacacaaagtcgacacgttaaggagatgcgttcacgccctcgatgcccaatcggttatagctttcatgaaccactcaaggcagctcaaagatgtggtctacaaactcgaagctcgtggtatgaattcagctgagatgcacggagatctcgggaagctagggagatcaacagttctaaagaagttcaagaacggggaaatcaaggtacttgtgacaaacgagctctctgctcggggtcttgatgttgcggaatgtgatctggtggtgaatcttgagcttccaactgatgcggttcactatgctcatcgagctgggagaacagggaggctgggaaggaaagggacggtggtaacagtgtgcgaggaatcacaagtgtttatagtgaagaagatggagaagcagcttggtttgcctttcttgtattgtgagtttgttgatggagagcttgttgtcactgaggaagataaagctattattataaggtgaaaatctaaagatgtaattttcagatactattattactattgaaaattcagagtc

SEQ ID NO: 142633 - DNA, 353 bp, Arabidopsis thaliana landsberg
cactttgtgaatcctctttgttccttcttcttctttctaggccatggcagggatacttgagtttgggcggtccctgttcaagcaatcaaaccccttctactctaacagttgctggtttcaccccaaacttcattctaccacaaccacttttaacacgagatgcagatgggagaagaggggagagtgagggtgagacagtgtcgagtttctcatatccaaagcgtgcatcttgagctaacgggtttgctgctcggctagggggagacccaaggaaaaatgggggtgatctagatgatactgattcctagagaaagaagaagacaagaaatagatctcaatacacaaaatgtgga

SEQ ID NO: 142634 - DNA, 301 bp, Arabidopsis thaliana landsberg
ataaaagcccaatagtttaatatactaaaagatacaaaacttcttctttttgtttttctttaagaaaacaacagatgatatacatacactcacactcacactcacattcacacacaaaagagacccccaaaaatcgagccttaatctcgtcaactaccactacttaactcacatgaccaatctgttctcacatctctaaatagatggatctccatcgagatcatagaccactactggaacatatgattagtattgatggacctctggctttcagtttcttgatccagaaatgttctgatct

SEQ ID NO: 142635 - DNA, 420 bp, Arabidopsis thaliana landsberg
atgccgagacagtggcaaatgacgaacatggacttgtcgttgccagcaatgaggagcaatggaatggaagatggaacatcatcagcagctaattaccatcacagttactttggtttggacgcttcgaatccaagttttacgtctggtattaatggctacaccgagttcaggccatcgaatggtcattgatcagcaaatggagagaggggatttgtaatgtttttatttttttttaaaaggaaaaaaaatcatgaatatacaatttgtgtaaagagagttgtcttcttgtcatcctctacgtttcaaatggtttttttttttttaaatatagtataagatagttttcgcatagaaaaactcttccctgaaagtccctgaatagtttttataaataaattatactcctctttatctttaatc

SEQ ID NO: 142636 - DNA, 330 bp, Arabidopsis thaliana landsberg
agttttgtcttctttagctttttctcctctttttttcttctctttgccaaatttcttctctttcgcttttacattttctccagcaaaataagacaagatctcaatcacttcttcttcttcaattctatctaaagctgtcacgagaaagccagagaatttctcagcttctcattttgtcaagcaaatacaaaaagaacacacttcttttttatttccgggaaaattcgtttttatgtagtggtcgtactaaacacgcttcctttatgtggaatcttaaagcagtccctttttttagttgaattccacagttcttttctttttttttttttg

SEQ ID NO: 142637 - DNA, 278 bp, Arabidopsis thaliana landsberg
tgtaacaaataatgtcccacacttatcattatccaaatatccaaatccaaaaaaaacattcaaaccaacccatttctttctatccaaaaaagtcaaaaacaatcatctcctcaaataaaattaaaaaaaaaaaaaacaattttacatcaaatttgattgatgaatccaagaattaaaccaaacacaaaagtgtttcttgtcttttagcctgaaaatccgaaaatcagtttcttggagtcagcatccatggagcttcaacaatctgtaaacagagagac

SEQ ID NO: 142638 - DNA, 369 bp, Arabidopsis thaliana landsberg
cttagaaaaatcaaaatctccatgttgaggttattaatattgaaagcacgtgttgttgtattcgactcaattactaaactcgcatgttaacgcatgacacatgataatatcggcatattcagtgaaccaggttggttcatgatcccttccaaagcggactcacaccttagactcggagctcacacgccaaatcgctcggctaggttttgatagccaactccggccaaaaaaccaatcgcgagaatgtggtttttgattgacccaactcacattttgacctagcacgaaaaccaaacaccaacatgaaataagataaactattcaaaatatctagttttatatacaaatcttaatttaatgtcacgagaa

SEQ ID NO: 142639 - DNA, 390 bp, Arabidopsis thaliana landsberg
gtcaccaccaccaaaccccttctttattgctctgttctttgagcaaacaattttgatttcttcgcgagcgaagaaacctcaaagacgaaaagtctcgaaatttcataactttttcttgaagatctatctagatcacccattttcttaaaaacctcttgagatttttctatctcgtgaaaagaggttttaaggtttagatgggtgtggctcactctgatcttcacaatgatttgtcttcttcatcttgttttggggatcggaatatcttgaagcctggtttaggagatttaccagaggcgtgtgtggctataattgttgagaatttggatcctgttgagatctgtagattctcaaagctcaatagagcatttcgcggcgcttcttgggctg

SEQ ID NO: 142640 - DNA, 316 bp, Arabidopsis thaliana landsberg
aacacggggaaaagaaccccaaacagaaacatgcttattagaacaatctctcccaatgtcgaatcatacaacagcggcaaaaattgcggtacctttcgtatattatcttctttgtataaagcctaaccttggctgttattgtaaccccaaatgaatccatattaaaaagaaaaaaagacgcagccgcaaaaatattacactcgaaaacgactcaacagagcaaaattctttggcctcttgatgcctccaaaaaacatctgtacaatctctttaaggagcacgagccccttgaattctcattatctcgggtttgttc

SEQ ID NO: 142641 - DNA, 261 bp, Arabidopsis thaliana landsberg
gatactgttctttttcacagccccaacagagactaagaactgatcaagtgaagagagagttctcatatcgtctggaggaaaatagctcgcagcttttcccattagtgaagtgaagagaagagagagcgaaggacgagttacatatctttcccctagaagatcctctaggaacccaaacgcagctagaaaatctgatcttcctgcgtttattggagcttcgaaatgagctgggataatccttttaaatctccagtcacgggc

SEQ ID NO: 142642 - DNA, 1473 bp, Arabidopsis thaliana landsberg
caatctcggagaagggaggaaaaatggcggccaaaaccctaatcaggtcaggagcttcgttgatgaatcggtttctaacgaagccgacaacgaatatcgtgcagaacaatctcagatcttcttttcaatacatagctcctcagggacaagaaatcccgccgtattttttcccgtcgttgtcgaatctacagagctcactcatttcgcgccctaacgacactgcttcgctccaggaactcaacgaacgtggatttctttacccttctggtcttccttcactcgaattcttcttgccagaaggtactttcactctttgactctattttgattgtatctgtcagtagctagattagtaatttgttcacactctcctgaagctggattttcttggcttatgaatatgatttatagtgtatgcaatgcagtcactagatgctcgagtatcaatcaaatgttgagaggtgttctgtttcttttgtggattgtgtgtcaatggttgatgaaatcagaaactttgcttgcttgctatgtgcttacacagtagtaacaatgtttaggtcgtttatcgagtcctgttaccggccattttgctgatagtgttctgttcttgaatggagatcatagcgaattataaagtattgggaagcacatttatttaacttatgtctcaacttataggagggttaagaatctggctgtgttgtgctttgagtttgatatagttcaagagtgttatgtgtcctaaaggagagttcagccttgtattgttcattggccttgaggcttttagtctctgcaaagttgtatatttttgctgctcgttggtgcctgtctaatgtctttgtatttggtaatgtagttgatccttcaagtgagccattgcttctgtttcctaagaggacattccaaccaagcactataaggcgtaaacggaaccatggattctttgctcggtatgtcactttgtgttcaacctcttagtttagtccaaaaataggggttcacttgtatttctcaacaaaatctagtaaattctaaagctcttttaattcttctaatcattgctcattctcattcacgttagaggaattcgttgtttagcactaatagaaagtaggaacaagattctacatctgtacatggtgtttgaatgaccaattctggttactcatacggctactaaatgtctaaatatgagcaggaaggcaaccaaaggtggacggagagtcatagctcggagaatagcaaaagggcgtcacagagtcacagcctagaatctctctaatctttccattgatgaatctccggttattcaggctagaaaacctgaaacttccatctcctaaataacttgtcttcttatccatgttctcatgtgttgttgatctcagaattgatctgaagttaaaattttaaagatctcagctcttttgtaatggatagtttatatcaatgaatccttttttcctcatg

SEQ ID NO: 142643 - DNA, 304 bp, Arabidopsis thaliana landsberg
ttcgacataatcccatcaaatttataccataatgcattgatactcttcacttaattttaaagcttttgttggctctctctctctatgtgtgtattagcatataattcttacaacaaaagacaaatttatgaaaaatttctcaagactcgggtgttatctcaggagtctgcaaaggaatgggactgttatcttcttctttcgcgtttggattctcggcttgtttttcttcaggttgggaggctacaccattctctgatgcatcctttgtgtccgtgctgatgaccttttggagatttgttggatg

SEQ ID NO: 142644 - DNA, 389 bp, Arabidopsis thaliana landsberg
catccactgactgcatcaaaatattagcagtaacttcagatattctgccctcatcaagcatctcccagtaagttgcttgcacacctgacacaaccaattttcaaagtgtcaataatctaccaggtaaaatagtatattggagggtacatgatcataactaccatttaagaaccgcatacgtatgtcctttaaacttttagggtcaagacttccaattttagagccattgtgaggatgatgaactagttccccttctgaaccttttaggcttgaaatataactttcaactgtaggccagtcagcaggtcctagctcctcatcgtctcctagatcttgaaacgctcgtaaggccttattcaacatttcgtactttgtatattccaatattc

SEQ ID NO: 142645 - DNA, 418 bp, Arabidopsis thaliana landsberg
agaagaaaaagagagagagagagagaggtttgaattttggagatgaagttcgacttcatcattgtagctcttgtaatggtatctggtgtagctcttttaatggtgtccggtgagatttcaactgaagaaatttcaccggcgattgagcattcgtcgtctctgccgcaatcagaaaccgaaatgtctccatctccgacgatgtctaatgattacgattatccgtcatcgtctcaacttacggaatccaatgatctcaactacactgatagtaccagaccgggaggcgaagaagcatccgtaggtggtgaaaatggcggaggaggaggaaagaaaaccggaatcgctgttgttggatcgattgcagccgcgagtatggttggattcggtggttatgtgttgaagaaacggcgagagaaca

SEQ ID NO: 142646 - DNA, 389 bp, Arabidopsis thaliana landsberg
caatctcttgtgaaggctttgttgaagaacacgaacaatccgagattagcatggagaatcttcaagaggatattctcttctccttcagaagaaagccatggcatttctttagatgcgactcctacaatcgctcgtatcctggttcgagccaaaatgcacgaagaaatccaagagcttcacaatcttatactctcttcttcaatccaaaagacgaaactttcgtctcttctctctgttgtatccatcttcgcgaaatcgaatcacattgataaggcgtttccgcagtttcagttagtacggtcgcggtttcctgagaacaaacctagcgtttatctgtataatttgttgcttgaaagttgtataaaggaacgacgtgtggagttcgtttc

SEQ ID NO: 142647 - DNA, 222 bp, Arabidopsis thaliana landsberg
tgcagttgttaaatggtaactagagaaacgaagttgacgtcagagcgagaagtagagtcgtccatggcgcaagcgagacataatggaggaggtggtggtgagaatcatccgtttacttctttgggaagacaatcctctatctactcattgacccttgacgagttccaacatgctttatgtgagaacggcaagaactttgggtccatgaacatggacgagttt

SEQ ID NO: 142648 - DNA, 317 bp, Arabidopsis thaliana landsberg
tgaagagaaataataacaattaactcacccaaaaatatgaggaagccagaggtagccattgcagctagtactcaccaagtaaagaagatgaagaagggactttggtctcctgaggaagactcaaagctgatgcaatacatgttaagcaatggacaaggatgttggagtgatgttgcgaaaaacgcaggacttcaaagatgtggcaaaagctgccgtcttcgttggatcaactatcttcgtcctgacctcaagcgtggcgctttctctcctcaagaagaggatctcatcattcgctttctttccatcctcggcaacag

SEQ ID NO: 142649 - DNA, 323 bp, Arabidopsis thaliana landsberg
aacacaaaccacaacaaaaaatctcgagacaaagatacaatggcgagccgaaacagagcactcttctctgtttccactcttttcctctgtttcatcgtctgcatctccgagcaatcgaacaatcagtcttctccagtcttcgcctgtgacgtcaccggaaacccttctcttgccgggcttagattctgcaacgcggggttgagtatcaaagcccgagtcaccgatcttgtcggaagattgacgttggaggagaaaatcgggtttttgaccagcaaagctatcggcgttagccgccttgggattccgtcttacaaatggtggtc

SEQ ID NO: 142650 - DNA, 397 bp, Arabidopsis thaliana landsberg
atactcacattccgtgaagcgtgttgagattggagcagtgagaggttcatattatggtggacaaacaataaagcaagaacaattcaagaggtaaagtatttttattgtatcttcaagatattctatacattagctctcagtttagttaaggataataatggatcctgtttttaatggttggcagaaccaagtctcaaactgaaagagtgcatgtcctggggagtcatggttcaccactatgtagcatagatttgaaggtaagtttcaagcaactctcaccaagtctgttcaataagttaaatatttgcatatgaaagtcaaaattttaaaaatgactccaggacaatgacataaacaataaacttcttgcaggatgttttcaactttgatgaggtca

SEQ ID NO: 142651 - DNA, 443 bp, Arabidopsis thaliana landsberg
acttacaaaatggagataaaaccctctaggatattctccaccatcaccatcttctttctctgccttctactagcacacgtcacctccaaggcatcatcatcatctctgtgcaatggatctgtggcggagtgcagcagcatggtggagacagaggaaatgagtgtgataatggagtcttggtcaagccagaggttgacggaggagcaggcacataagctttcgtatggagctttgaggaggaatcagcctgcttgcgatggtggtaaacgaggcgagtcttactcaactcaatgtcttcctccaccgtctaacccttatagtagaggctgctctaagcattaccgatgcggccgtgactcttgaccattcaccatcatgaatctttatgttgtaaaacacctatgttctttattttgttggtgaatttgaattgttttggtttc

SEQ ID NO: 142652 - DNA, 364 bp, Arabidopsis thaliana landsberg
gtaaattgtgattgtaagtataaactaatacacaacactgtaaattgtaaaactcatctgtttttttttttttttttgacaatcaccactattggattatatagtatacaacaatgatttgcaatagaatcgttatggaaaaaaaaaagtatattccgaaatagttcactaattcctctgttttcaaacctaaagaaactggtacataaacactgcttgcttgctactaaacaatttgtaagctttttcctcttcaatttcacttcctgttaccattttgcctttatatatatataccatttgaaaaaccaaaaaccattgaaggataagtagtctaagtgagcataacgaacacagattttag

SEQ ID NO: 142653 - DNA, 437 bp, Arabidopsis thaliana landsberg
gtaaaatggttattgtttatgagataaatgcttgttttgtatgaaaacactgataatttggaaaacaaaaagatttaaaatttgttgagaacaattagcaatttacaagaagtctagcttcagaatcctccaatcattagaactgtttagaaatctataatcgtttgaggacaaaaactccacatccaatgcctagaaaagttgctatggagaccccaaaaacaccagagagaatcccggggacgacaagagaagtccatccttttgcggttgccatggcacacgcagtggttgggcctccgatgttagcatttgatgcaagaagtaatagcttcatgtcgatacagaatagctttcctagaaccaaagtcactgctagatgaaccattacttgaatagcagcaaataagaagatacttggggcagtgttgattaca

SEQ ID NO: 142654 - DNA, 373 bp, Arabidopsis thaliana landsberg
gtcttcttgttgattttttaaattttgggcccaacaaaaatttactagaccaacccacttagaggaagtaaaaatttacttctctttttttactcagaggaagtaaaaagtaccggaggcacaaaagagataaactcatgcagaactcctttacttattcaacacaatagtctaacttgtagggattcattgaagagaaattgactaattcttcctaacaactgacaagtagaacaaggagaagcaacttttctccatgaaacaaaccaagagtttgaggtgatgccttagcattcttcgaaacaatcaatcacttcagcatatttggtgagcaagtttatacccgagagaaagcccaaatatgtttactggg

SEQ ID NO: 142655 - DNA, 131 bp, Arabidopsis thaliana landsberg
tgcaaactggagttttgcccggatagaaggagccggctggggatgggctggagtgatctggctatacagtttcctaacgtacatccctcttgacttactcaagtttggaatccgctatgttttgagtggaa

SEQ ID NO: 142656 - DNA, 353 bp, Arabidopsis thaliana landsberg
ctgcttcatagttcatacgattcttcgattcgtcttcttcaatcagtgaagaagaactcaaaagatggctaaagagagagaccaaaacactaaagacaaaaacctcctcatctgtttcttatggaacttctccgccgagcttaagctagctctaatggcgttactcgttctctgcactttagctactctcctcccttttctaccttcttctttctccatctccgcttccgaactccgtttctgcatctcacgcatcgccgtaaactccacctccgtcaacttcaccaccgtcgtcgaaaagccagtcttagataacgccgtcaagttaactgagaagccggtgttggataacg

SEQ ID NO: 142657 - DNA, 235 bp, Arabidopsis thaliana landsberg
aacctttttaggagcagctttggttttgggtttgaagagagcgagaggaacgaatgattgtctcctagatggtagagcaaccggagagtttccagagaggaagagatggtgaactttgggctgagccaaagggctcttgttcctcaaaaaatggccggcggtgacgcctgaagtaagcagcatggtttgagccattctttgtgatgtgttactgaggatgagagaaggatcagtg

SEQ ID NO: 142658 - DNA, 430 bp, Arabidopsis thaliana landsberg
agcaactgttacaagctgaaccaagacgcacaagcgagtctcgtgggtcatgctcgaatcaagagtcagttaatggctaatgcttctgcaaaacgttattatcgggtatttttttatccttctccctttcaccatcaaaactagaacggaagctcattttctgtcttttgcagggatttgttccggagcctctggttggtatctgttacccggccactgaaataccgagttggttctgccaccaaagactaggacgttcactagaaatcccattgcctccgcactggtgtgatattaactttgttggacttgcgttatctgtagttgtctcattcaaggactatgaagacagtgcgaaacgtttctcggtaaagtgttgtggcaacttcgagaacaaagacagttccttcacgagatttgatttcactct

SEQ ID NO: 142659 - DNA, 217 bp, Arabidopsis thaliana landsberg
accctttcgtcgtcaaggtctagctttctcaaatcctctctctctcgtttctccgattccgatatcaccgtctcctccaccggaaaatccataacgcgattaggtttttagcctagttccttaatctctggttattgattctttcaatttctgatcgatgacattgtccaagcgattggctctattgggagctcaatctgcgattactctcgctaac

SEQ ID NO: 142660 - DNA, 143 bp, Arabidopsis thaliana landsberg
agatctcttggcatgtgtcgaaaatgtggagatcttaagaatgtagcttgtggccgttgcaaaggaacaggaacaatcaaatcaggaggattctttggtttcagtgactcgtcaaacacaagatcagtggcttgcgataattg

SEQ ID NO: 142661 - DNA, 200 bp, Arabidopsis thaliana landsberg
tacagtccatgttcagatacacaaataagcaaaggagatggtttcaccattggtattgccatctctagcaaagaagctttttttcttgaccaagtccagctctctccctgtgatactcgtctcggtttagctgcgaaaatggcgcagcttgcgctttttagacctaaggttgacgagatctctcttctctccatcgacac

SEQ ID NO: 142662 - DNA, 382 bp, Arabidopsis thaliana landsberg
  unsure (1)..(382): unsure at all n locations
anagagatgtgtcaggctgtctccgaagacatgagatttatgaatccaaaggaagtccagggacccctccaactataacaaaatcctcgttttggaatgtcttaagacattaattcattatatttttagcatattgtaatttagtatcattgatattaaatttttgtggtcagagatccacgtacgatattgcatgtaatttgtaatcgttttcgcattcatacaagtaaatgtgtacacatggtgtaaaaacgatacaatattaaagttggagtttatataattcatgaaggtgacacatacaatatttccaattgaaatgtattttttatctcaacatagtcgaaataaagtaaaagttgtcattagtatatttggcaat

SEQ ID NO: 142663 - DNA, 311 bp, Arabidopsis thaliana landsberg
attccacaaacaaagctgagccttaaagtcaagaaggagaggtgggttgctgctgctagatgcgtggcttcaggatcggattatgcggcggcaatggagccaattacgccggaggaagaggaggaattgactcagagaagagggatatgtggtggagaagtaaacagaggagtatgggagctcttggagtgccttgagaaagaagctattatggggaatgatgatgggagagatcctagagattacaatagaagagcaaagatttttgacaagagttctaagatcttcaagaacttaaatgaacagagaga

SEQ ID NO: 142664 - DNA, 256 bp, Arabidopsis thaliana landsberg
gcatgaatcttttttaaataatctgtaatgaatttttgatgaggaaaaagaaaaacaaaaatttaaaataaagaagaagaaaaacgaaagccacagggtcgctcacccgagagagaccagggcaggccttgaccagaccaccaccatttgcagccactacgtggagaaaccagatatacacatgtgcgtctgtgtaatgcatgcagacatgtacttttggttgaagtaccattataaggcttgaaggagcgttttg

SEQ ID NO: 142665 - DNA, 207 bp, Arabidopsis thaliana landsberg
tcttctcttcttttgaacatgaatttcaaaccagatcaagcttcaagagtagacaacaaaaacaacaacttcctctcttatcgagaaaaccaaaattatgagaaatgctttgtatctagccagagcttcttgcagaaagacgtcatcattatctacatgagctcttgaaacctgcaacaaagacacacaaacaaattcgattacaac

SEQ ID NO: 142666 - DNA, 1419 bp, Arabidopsis thaliana landsberg
ccataaaaataaaaataagtggagaaatcaaaatcatcgattctcctttgtttcgcctaacccaattcctaaatctcagcatctttcatcaatccaatctctcaaataagcgagagagaaacaaagattatcgaatccttggagacgaaaacatactccaatttggaattttctcgtctttttttttacctgattttggtatacgtttgatcgaaatcatttgctctgatggatctctgttttgttaacccttttgagatttggtagatatggttttgaggattgatatatttgccgctgattgtcgttgaaaaattgtgaaatttgatttggtggtttagggttaaaatgaaattatatgatgaggaatataagaatctgattttttttgattagattctccagatgttcttgttacttgtgattgaaactttgattttgggttgttgttgatttttgaactttggggattttaaagttgaatttttttctaatttatgccaaaacggtcttcttctatggttttgtattgaactgatgatttagatttgtttaaatctcggcttttgtatattgtagtggaagattgaattttttatttcttgtcattggttataggttttagtttattatgatgatgccactagttgcatgattactaacttgacagtggtttatatgaacatatgtgataattttcttaagtttgattcctacttctcttttgggattgttgtgcaggttttaggacatttgggttaccctgaggcttaaggagaatagtggtttagttatttatactgaattttgtgtcattcagactttccgaggattttctgtttggtaccgtttgcctcgtctgtgttttcatttgagctgcatcttaaagtgaaagttcagtgcttaaacagtaataaagtagtatttcaacaggctgctaataagattgctccctttcggtaagtttgttttcagccaactatctctctttgtgaagttaacaatccgttgcttcttgtgatggttaagattcctctggtatgcttagtttctgtgctagtttctagactatgatgagtcagtataagatatctatttcttctgtttttggtgtatcttcatttgttcttgctttggttctgctgctacatgattgttttgaagttttgatattaagcgatggttttggtcttgcaatgttccctttttggcaaaaaagtagtatttataaacctcattcagtgtttctaactttctcgatgcgtgagtagcttacacagtgcttaacaagatggctggtgtaaagcgaaaattaagtaccgagtcagatgttcatgctcttcacaaagaactggatgaggtttcatgtcctgtttgcatggatcacccacataatgctgttctactgctgtacagctc

SEQ ID NO: 142667 - DNA, 406 bp, Arabidopsis thaliana landsberg
attgtaaacaaaaataacaaacattattgtgattttgtaatcattcactgtgtaatacatgataacccaagaaaaaaaaacattcaaagaatttgctataagatcaaaccccacaatgtacaaatcaaagaggggttaagcacacatattcactttaccaacctacaaagaagaatcaaaaagaataatagagatccaaaagcaacataaagttttcttggaatgagaagagctaacaagagatgagagacttcagacgttaatatccattcgctttgacctggcactgccattgttggttgtttcttgtacactggaaagagagtatctcggaatggtgtagttatcaggggtggacactggttgttgcggatagagcgtgggaggcggagttaggttgcgttgt

SEQ ID NO: 142668 - DNA, 113 bp, Arabidopsis thaliana landsberg
aggtagaggatcaggctatcatcgcagcacatgccatccacggaaacaaatgggctgttatcgcgaagctcctccccggaagaacagataatgctatcaagaaccactggaac

SEQ ID NO: 142669 - DNA, 1931 bp, Arabidopsis thaliana landsberg
gtataatttccccaatttctcagagagactcaaaatcaccaccaccaccaaatcgccgccatgtttaaacaagcttctcgtctcctctcccgatctgtcgccgccgcatcttccaaatcggtgacgactcgtgccttttcaacggaacttccatcgacgctcgattccactttcgtcgaggcatggaagaaagtcgcaccgaatatggacccaccgcagactccttctgctttcatgaaacctcgtccttccactccttcttctatcccgacgaagctcaccgtcaattttgtcctcccttacacatctgagcttaccgggaaagaggttcgatcttttggtcacattttgttttcttagggtttgatctatgattttgttcattgtggtctttctgtggatacgtctggatattggattgtgtgtggaaatttggtttgtgattgatttgtagatttgtcgaaaatctcgagatttcggatttgatacgctttttatgattcatctcaacttatgcaaatgtgcataattaggtcttaggacgtttgattttggttagatctgacggcgctacattttagggttttgatagcggtacctgagtctagcagcaattgtttgcgttacaatgacgataattattttagtttcatgatttctctcaaaaacaatttgtagtgaaacttgtaaatacacgatcatcttagaatttacaggttaactatgtgtacagtatctgaaaatgttgcttgttacattctttttctcaggtgagttttttttgttagattcatcactgaaaaagttgagactagtcgattaatttactgcttctatattctctgttgatcaatcattgaaatgggatgtttgaattgggattcttaaaagaggtctgttattgaaattctattcatggaaatgatcccaattttagtgtttgtctggcttttttggtttcggttacaatggtattcacatataatgtctgtttcgtatatgacctattctccactattgttatatgatgtgctatatgcgtagactgaatatcgattataacgccttaatttttatgagttaatctctgtagccagtagttatacatattcattgttatttcatgtagtattcagattcttgtagtacatatgaatatcagtacgcgtagatggtgattcgctgtaggtagcttaaatcttgccagccttttttcttgatgcattttccaaccatcttgggctgcgctatcatcttcatattctatttatacaaaattaaaacgaaccgctgatcctagagtttcatatcttatatctttaatcataactgaaagctaattggtttctcttcatatacttgaaggtcgacatggtcatcattcccgcatcaacaggacaaatgggtgtcttgcccggacacgttccaacaattgctgagctaaaacctggcatcatgtccgtccatgaaggcactgacgtgaagaaatacttcttgagcagtggttttgcattcctccacgcaaattccgtcgctgacataatcgcggtggaagctgtgccgcttgaccacattgaccctagccaagtccaaaagggtttagctgagttccaacagaaacttgcttctgccacaacagatcttgagaaagcagaggcacagattggtgttgaagttcacagtgccatcaacgcagctctctcgggctaaaagaaggtttctttctttatttcttcgaagaaacaaaaaaaaaactaaatcatttggcttttcaagtgattagtgaagtccctttttactactgcaaaggatggaataaactagaatttgattcttcttgtttaatcgtgttggacttttgtttgaataaatgattttgtttaacgggcacaaaaacccacaaaagtttcatgtgtctcatatctctgcac

SEQ ID NO: 142670 - DNA, 325 bp, Arabidopsis thaliana landsberg
gaaacaaatagatttatcttcgtgattaacgagagagaataatcgcatccatcaatcgtattttacgactttcgattgtgatagtttaatttatttcaatgtatgcagaaacatatcaactactgaattatatatattaattaaccattttgtagtcagaattaaccgggattaaatcacccaatcctaaatttgattttgacctaactaatgaaaatttagtagtaaaaaactattattttgattttacattttaactttgatagttttttctaatttttattaactagaaacctaatttttttcgtcaactagaaagctattc

SEQ ID NO: 142671 - DNA, 101 bp, Arabidopsis thaliana landsberg
aaatgttgggtgtctcatagaagcttggaacgtaaaagtagcaaactggtcttctgtttaccttaccacacttgtctctctatctataatagtttttcttt

SEQ ID NO: 142672 - DNA, 400 bp, Arabidopsis thaliana landsberg
ttagcattaactaatattaatatgttttgtgtttttaagaattaaaaaggtttgtgtataaaaaattaagagtgtggatgaaagtgaaagcattcgtaaaaagagacgagcggtcggatccatgaatgtgtttgggtcctactttttcctcgttctcccacgtggaccattctgaactatctacgtgtcattttctgtcctaaattcaaaagctacgaacctacgtcgttttgtaggctcgtattctcagcgaatgaactgggcaactggctatgagtctcaatgacattggcttcatcatttatcgttctatgcttttaacattgttagattctagtcagtccacgtgtttgtgtatatttatttcaacccagatttggttctttttttggaaatgaat

SEQ ID NO: 142673 - DNA, 226 bp, Arabidopsis thaliana landsberg
tgagatcaccaggttggtgaatcccttggttacacgggtcaaacccagatgagaagcttcaagaagatgtggttacaacattgttgaacatatcaatacatgatgacagcaacaagaagctcgtctgcgaaaatcctaatgtgattcctctccttatcgatgcattgaggcgtggaacagtcgccacgagaagcaatgcagctgcagcgatcttcactctgtcagc

SEQ ID NO: 142674 - DNA, 220 bp, Arabidopsis thaliana landsberg
caaaaacgtttttacttataaaacgttagaaaacttctctagtcatgttttatgcataggtcgctcacaagtcaccaccatgcaacactctctttgttctgatcttcttccgacgaagacttctcctcgttctcatttacttccacaacccaaaaatgcaaatatttctcgacgaattctcattaatccctttcaagataccgacacttgctgatctcac

SEQ ID NO: 142675 - DNA, 1075 bp, Arabidopsis thaliana landsberg
aaaaagaagaataacgattccttttccaaaaaaatgctttattgtcttattctcctcctatgtctctcttctacgtatctaccaagtctatctctaaaccaagatgccaccattctccggcaagccaaactgggcttatccgacccggcccagtccctatcttcatggtccgacaacaacgacgtcaccccatgcaagtggctaggcgtgagctgcgacgccacgtcaaacgttgtctccgtcgatctctcaagcttcatgctcgtcggacctttcccctccatcctctgccaccttccttctctccattccctctctctatataataactccatcaatggctctctctccgccgacgacttcgatacgtgtcacaatctcatcagtcttgatttatcggagaatctattggttggatccatcccaaagtcacttcctttcaatctcccaaacctcaagttccttgaaatctccggaaacaacttatcagacacgatcccgtcgagcttcggagagtttcgaaagcttgagtctttaaacctcgccggtaacttcctctccggtacaattcccgcctctctcggtaacgtcacgactcttaaagaactcaaactcgcttacaatttgttttctccgagtcaaatcccgagtcaactcggaaacctcacggagctccaagttctctggctcgccggctgcaacctcgtcggtccgatacctccgtctctgtcccggttaactagtttggttaacttggatttgacatttaaccaactcacaggatctatcccaagttggatcacgcagctaaaaaccgtcgagcaaatcgaactattcaacaactcgttctcaggcgagttaccagaatccatgggtaacatgacgacgctaaaaagattcgacgcgtcgatgaataagctgacaggaaaaatacccgacaacttgaatctgttaaacctcgagtcactcaatctcttcgagaacatgctcgaaggtcctttaccggagagcataactcgctccaaaaccttgtcagaactcaagcttttcaacaacagactcaccggagtattac

SEQ ID NO: 142676 - DNA, 196 bp, Arabidopsis thaliana landsberg
cttgtgaaaatcaaattatgacatggttgaacacaagatataaaaggcaactaaagtcggcttcatatctaatatgtaatctttttgctacagcttaggctcactaatctaattccattggtcctctttttgtacgcggttttatatgataatgacataaaactttgaatcgataaatgaaagaatctttgaatac

SEQ ID NO: 142677 - DNA, 430 bp, Arabidopsis thaliana landsberg
tcgagcttgccttagagtttgtctcaagcttctccttttttggtattttgtcttaagcttccttgcttctctttcttcttcttctctactctttctctctatttcaaaccttcgttttctttccttttttgtataaaatcttaaaatcaaccaagacaatggaaatgaaattgctctttacatcggctttcacccaaatgttcggctactcgaaccatatggatcaagccagcaactgccaaagcacccgcaacaaaattataaagatgatgaagaaagaagaattcccaagtggattccaagtccctcttcactaccctaaatactccaagtctgattacgaagttatggatgatctccgccttgacttgctcctcaaacaatatggattctccttcgaaggatctcttgaagacaagagggtttttgc

SEQ ID NO: 142678 - DNA, 716 bp, Arabidopsis thaliana landsberg
tacctaagaagaggagcttctgagcggtctcatgaggatcattgaaggaatccttatagacggcaaagatatcctcatccgagtgctgctttccggtatactctctgattttctgaagggttttgcggagatggtaaggaatcgaaaccctagaggagccgccatcggaggagctcatggttcttgttaagggagagaagcagaagcgggaggagagagaaattgagagagcaattgaaattggaagcgcgagtccctccgtatttatttatttacttaccaagataataataatgtaccgcttcactgtcggtaacttttatacgctcacgtcacttcattgcacaccaaaagactctttaaagttttacattttgtatgacttcaacagtcacccaattatagagagacacgtggacgatgacccaaaaactgtgaatacgttcacactcattttgttttgatattaccgtatacatatatgtgtgaatccgatcataaaagtactacgtataacagttgaaacaaaagaaatcaaaattttcgagggaggcaaggcaagctcgcactctctcactcatcatcggttccaaaatagcggtctccaaactcgcccataccaggaacaactcggaactcgtcgtttaaaccgagttctatctctgaagtcacaatctttatccttgggaactttttgcacaccacatttactcctt

SEQ ID NO: 142679 - DNA, 237 bp, Arabidopsis thaliana landsberg
gaaaaaagagactactaaaaatcataatgaggccgacaccaaaagtagaaatctggaagtcaccagtaccatatctctttggtggtctctttttgcttgttttgcttatagctttggcattactctcattggtctgcacacaccaaaaaccttcttcctctagcaataacaatcatatggatgaagaagacgatgtcggtgacaaggacgcttagcctattaccagagagtacttac

SEQ ID NO: 142680 - DNA, 155 bp, Arabidopsis thaliana landsberg
agtgagaaacacacaacttcccgtcataaatattgtccatcttgttatcaacttcttcagattccatgttatcaacttcttcagattccatgttatccaccattgaaccagaacccgctttaacttctccattctctatgttactacaatgctct

SEQ ID NO: 142681 - DNA, 811 bp, Arabidopsis thaliana landsberg
ctcatctttcttgcgacgggcccttctacccggtgcgtgacaggttgaatcattctcctccgattcacggtgattccggcgactacagactcaacatttaataagccgatctcttacatggtacgagctcggacaaattgaagaatacaaaggtccgagaaataatttggtaagcaattcgatcctttaaacgatgttatttttgtcaatccgagtcattgatgaggtattatatctgttactgaatctctctgatcttcccctgataatggacttcatgatcctgtaaatttcagattttgagccttgtgcctcaaaattgtagtcaaaggccgcgtttttgtctcaatttgtagatctttgttgttgtttctgttggatcttacgtatatatccttgatcattttaaaatttcaatggaagtgatccaggctttgattagcttttaattatataggaataatggcgtcttcatcggattcatggatgagagcatacaacgaggctttaaaactctctgaggagattaatggaatgatatcagaaagaagttcatcggctgtcacagggcctgatgctcagcgtcgtgcttcagctatacgaaggaagatcaccattttcggtaacaaattagatagtctgcagtctcttcttgctgaaattcatggaaaacctatgtaagccatttactagtccaatcctaattgcttaaatctgtaaattagacacctttaaggttagtgttaatctgaattattacttactgacacagttcagagaaagagatgaatcggcgaaaggatatggtagg

SEQ ID NO: 142682 - DNA, 109 bp, Arabidopsis thaliana landsberg
agagacaggagctggaactactagagtactttctttaagcgacatactatatagatcagaggccaacagtgacagttcacatgatatgtcaagatccgaaagagaagat

SEQ ID NO: 142683 - DNA, 372 bp, Arabidopsis thaliana landsberg
atgcaataaaatgataaatgtgttatagtcaatgaataaagaataagagagatggtgtgatgtttacacgtttggggcctaaaccaaaaaaaaaggatgggtccaatatgccaactactactattgtattgagagtaggaagagagagaaaccttaatggagacagagggacagtggggttatgtcaattgtcatattattcaaccactcaccaatcactcactccaaatctatatctctctttttacaaataattatgatagatttgatgataagttggttctcaaatcccagccgttcaatttatccagatatgcaagaaaatattagattttaaggaatcggcctttccttatttggtaagactaaata

SEQ ID NO: 142684 - DNA, 352 bp, Arabidopsis thaliana landsberg
cgaaaggtccactatcattagtgcgtacactctgccccctcttataaattatgtaactattattatggctacttattagtgtactatatgtacatattacatcatattcagatgataaattaaagtaaggaaaatctattgttgatcggaactggccggtgcttccaccgttacggttgcagaacgatcacttccttgccggcaaagacgctcgtactccaacgatgacctaatcttaggcaacacaactttaccggaatacttgaggcacaaggcacatgtaatgataagtatagcagacaacatccaactaaactgcagattcgccaatgcttttgccctaatctcagca

SEQ ID NO: 142685 - DNA, 265 bp, Arabidopsis thaliana landsberg
gcaagttcagagacagcgggatctcccgaacaattctcctacttagtggttagccctttctctcttactgattgagaagtccagtatgtcttgacatggagaagacgaggaaggacagatcagcaggactcccgacccatagtagagctaaagcagccgtagcagtgaagtctataggtttggattggtcctcttgctcctcatcagtatcagcaagcaagtcgtagctgtgaagtctataggtaggaaagttcctcagtcaacg

SEQ ID NO: 142686 - DNA, 238 bp, Arabidopsis thaliana landsberg
gttcgagctccgcttgacatgttaagagcttctcctttgcttcctttgcttcaacagatacttcttgcaaatccaaagttaaactctccatagctttcttgattttctcttcttccttcttacagttttccaactctgtcgcaagttctgtcttttcacttaataggttctgaatctgtgatgttgcagtcttttcattcagcaaagctctaaccttttccccttgggtggtttcaag

SEQ ID NO: 142687 - DNA, 451 bp, Arabidopsis thaliana landsberg
gatcatctctcttcccaaaagccaagtccatacctttcctccatggcttcttcattgctttcccaaactagtaaaatctcctagctttccatttccacaataaacccgtgatccaaaacttgcctttttctcctaaagatcttctctttttaagttttggtttcagatacatacataacaaagtctcttcctttattcatcaatgactacagcaatatcgatgaatccatctttgtttcgagtaatctgtatactccattcgataattgcgcttactagtggaaccttaatgatgttctacacagagaaagcttcaatctttggaccaggaagtgagattgctagcaaactaaaaggatcaacaccacacgatgaactactcatacagatttctcagtcattctctggtttgcttctgtttgcaattggtttggtactgttcatggtttcg

SEQ ID NO: 142688 - DNA, 380 bp, Arabidopsis thaliana landsberg
ggttaggtgggtgccgattaataattagagacaaccgtggcaagcgtaaaaggacagtgaaatgatgtatagtgaaatatcgagctgcgtcaagtaaacaaatatgaagaacgttgatgttgtatggttaaatttgcgtaagtttgagaatttaggggtcctagtggacccatttctttaaagcccataataaaaccaacctcatattcttgtaggcccaaaactggtcctagcttattgattgttttcatctaccaacatatatgtgaacaagtgaaaagagaacacatttcattctattacttttttcattaccaggaactaatcccaacttttatagccaagactaatccttcaggtgagtgtaacggtcgagtagc

SEQ ID NO: 142689 - DNA, 175 bp, Arabidopsis thaliana landsberg
gtcaatatacattgaagaaaagttaacaactaacatgacgccaatgtagttagttatacatacaagtcttttaactctacgagagaagcaatggcaatgggaattggtccaactaaaccacttgcttgaataaacctgaggtaaccataacattataattacttaaatcaagaat

SEQ ID NO: 142690 - DNA, 256 bp, Arabidopsis thaliana landsberg
tttatagtgagtaataaacatatttgatcttttgttcaataagtttgttggagatagcaaataaaaacatagataatgtagtaaaaatatagatgaagaaaagagaaaacatgagagtttgtttacattgagaggaagagaaagaaagagaaggaccacatggattagattctagagggaatgagaggaatgtggtgctgaagataagtagaggcagctgcaactccactttccattacaactgggtattcaacat

SEQ ID NO: 142691 - DNA, 107 bp, Arabidopsis thaliana landsberg
gaaaaaagtctcttggctggtcaatctccacgatatcatcactaagaatggagaaaccagatttgtacgatttcgcctgcaaacagagttaaagaacatctggatgc

SEQ ID NO: 142692 - DNA, 433 bp, Arabidopsis thaliana landsberg
gcttttctttaaaccaaaaaaagaagaatatctctgctagcttctcatagtctgctcattattgggatgcactatcttcgtagagggaatgtagagttgtacatataaagtggttgacttgggacgaaatacccacattactgtaaaattttaaaaatcgtgctcgaatatcaaatttggtggtcatctcaaaacatcccacaagacaatataaggagtgaaaaaaaatggaacctgtcagaccgccgtgcaaccaccccggcaaggtagaaccgagccgagtaacgatcctctacagcaccagatgcgtcctaagacgatcgtagccgtcaatcacgctctgatcgcacggtcatggttcatcaaccagggttaagggcctgtctccttagaaatcaaggaaacagaggtacgagcctatagaacagatcct

SEQ ID NO: 142693 - DNA, 575 bp, Arabidopsis thaliana landsberg
cgggcgaaacaagtgaagagaattgagatcaatgatcaacacaggtaatgttctagtttgtgttttcttgtaatgtgagtagtattatcgtctgatcattttgtttatgtgtggtttaacaagttcttttgagttgccgtttgctaaatacattttgtttactggttgtttgggttccaaaattgggtaattttatctgttcttgtatactcatgaagattggtatctttttttggtagaatacagtgttagctagcttctgttttggcctttgttgtggttttattagttttgtagcttggtgaagttcattgagttagccaagggaggtcatgagaagagaaattcttccatgtacttggtgtcttatcttgtgaagcccttgagctatatttttattgtgagtttttcctaacttctgagttatgctttcgtgaacattttgcagtcaaagagctgtcactactgcactatggtgcaacttcctcgtgttttcactcaagtttggggtttggtggacaagttctagccatgtcataatggctgaagtagttcactccgtagctgattttgct

SEQ ID NO: 142694 - DNA, 391 bp, Arabidopsis thaliana landsberg
taatgaaacaaaggcgccattcttgaacttagcccacattgaacagagaaattttattgtgttatgtcttaagctacagaaaaaaaatatttgggtaagaaaataattataatactcacccctggcagttccttggttcaatatgttccccaggcagagaataattttcataatctcttttagcttttgtgaagtacgtatctgataaacaagcaataaggagaaaatgtctaagaaagataaacgcaaatgggctgcgtaaattattgagttttaagtattgcaaatatcttacctcctcacatgcagaatttacggcatttaaacctttattaagttcttttatctgcaaagtaatcatcataaaaaaaggagatcaagaatctacagt

SEQ ID NO: 142695 - DNA, 216 bp, Arabidopsis thaliana landsberg
ttacccttctcgtacgagtgggctattttgggaatgatttaggtggttttaagttactgggtagtagtgcactgctgagcgatttctgtttctcctgttgaatgattgattcagaaatttgaaattcacatcgaaaccaaatcttaaatcatattggtagctttttttttgttttgtgattagatactgtttttttatagtattaaattcgttttg

SEQ ID NO: 142696 - DNA, 145 bp, Arabidopsis thaliana landsberg
acaccaccgctcaaaaaatggcgacggcgacggcgacatcggaacgattcgagttagccaagcactgcagttcacggaactggtctaaagcgatccgagttctcgattcgctccttgctaaggagtcttcaattttggatatatg

SEQ ID NO: 142697 - DNA, 211 bp, Arabidopsis thaliana landsberg
tatattaattcttagcccttgttgtggtgataatcgccgcccgagtttctctaaaactctccaaaacattctatctcatagccggcgtcgacatttccttgatcctcgccgtgatctgtttcctcataatccgtagccgttacaacaaagaaagaaagctcttggtatcaagattcgtctccgaaggcagagagctacgaatcgagtacag

SEQ ID NO: 142698 - DNA, 377 bp, Arabidopsis thaliana landsberg
acgttcaggtttctactcatccgttgcatgaagaagtgaagcttactacagaaactgacaacatgagtattggctttcctgtgaggacgccacagacactcggggagctgataatgatgagcagaaggagaagttatatgagaagagctgttgaaatgagaaagcagaatccttacacggtaagactctcaaatatcttttctcatagtcttccaaagccatatgcaccgtaacagtttatcacgcacatacctaaattcaatcgtgaaaaaagattctgaaatgttgacaagtgcctggataaattagcaggaatttacaaagaatggagctgatagctgctgcctctttgtgccaggtatgattcaaaatgatag

SEQ ID NO: 142699 - DNA, 601 bp, Arabidopsis thaliana landsberg
tctctcataatatcttctccacaatttcaactcttctaaagtctaaaccatgaagttactctcaaagacctttttgatattaactctcaccttcttcttctttggcattgcactagcgaaacagagctttgaaccagagatcgaagctttgaaatccttcaagaatggtatttccaacgaccctttaggagtattatcagattggaccatcatcggttcgttacgacactgtaattggaccggaatcacctgcgatagtaccggacatgtagtctcggtttccttgctggagaagcaacttgaaggtgttctgtctccagccatagcgaatctcacctatctccaggttcttgatctcacttcaaatagttttaccggcaaaataccggctgaaataggaaagttaaccgagcttaaccagcttattctgtacctaaactatttctctggttcgattccttctggaatctgggagcttaagaatattttctatcttgatcttagaaataatttgttgtccggtgatgttcctgaggaaatctgcaaaaccagttctttggtattgattgggtttgattacaacaacttaaccgggaaaata

SEQ ID NO: 142700 - DNA, 352 bp, Arabidopsis thaliana landsberg
aaaatatgagcgatcccaagtatgcatatccttacccggcaccgggaaattacccgcaaggtccgccaccgccggtgggagtaccgccacagtattatcctccaccaccgccaccgcctcctcctccaccaccaccacgaaaagttggttttcttgaaggactgtaagtgctctgtttttatgtttcataatattagtttgtttctattattaaggagtgatctgttggaatttataaatgaacttcaatgtttgtcggtggtaatgtgtgtttttggtttgcagattagcagctctgtgttgttgctgcttggtggatgaatgttgctgtgacccgaccattatatgcttt

SEQ ID NO: 142701 - DNA, 895 bp, Arabidopsis thaliana landsberg
caacgacctgggcttgtatcctcaaggtaaatcaaactcactacaattttcagatcattcccagaaatttattagtggaattaatcaaatttggggttttctccgtcgtccatcttcaccagtgttcaattttcgattccgtttatacactcgcttagctcaatcattagagtaggtgcagcttagtttaagtcaaacccagaaaagggaaacttagacgaatgattcaattttgtactttgttcacggtagatcattcttttgattttagtggctgcttaataactgaatctcgccttttgtagctctacttcaaaaccatgtcttccaaggatgtccattgttactttcatatcctgcaaaaggactgtacacttggagtacttatcaaattgcttgagcaatccgaggagccaattgtttgttagatatggttttctggaaaggagcaacaagaagaaatcacagaggctggtcttggcatctgctgaagatggagtagctattaatggaagtcctcagccaagatctagtagtaatttggaggacatgaggactagtttcaccggatcattacaagacgaaaacaattctaatggacttaaccagtctttgcatgatgctgctagatctattgaattggctgttaaagagaagattactccgtccagattttcgtggtttccttcgacttggcttggtgctgataaatatgcatgggtgaagactctttcgtatcaggtccgtatgtgccttttagctgcactctcttgttttacattagtttgatgattacagtatttctcagttcaactaacattcatgattttacaggcttctctgtactccttactgcaagcagtaaatgagatttcatctagaggcaagttcttta

SEQ ID NO: 142702 - DNA, 357 bp, Arabidopsis thaliana landsberg
tggagctcaaaaagtgtaagagacaaccaacaataaacgattcatctcttctcctatcctctcctcttcgaattcaacgtttggagaatccagcagccgcaaaatggcttcgcttgtgtattctccattcactctatccacttctaaagcagagcatctctcttcgctcactaacagtaccaaacattctttcctccggaagaaacacagatcaaccaaaccagccaaatctttcttcaaggtgaaatctgctgtatctggaaacggcctcttcacacagacgaacccggaggtgcgtcgtatagttccgatcaagagagacaacgttccgacggtgaaaatcgtctacgtcgtcct

SEQ ID NO: 142703 - DNA, 396 bp, Arabidopsis thaliana landsberg
gagaaagtgatttcgtggatgacgaaaagccgatccgtagcttataaagtggatgatgagaaaagaaggaagaagaagacaaagacgaatagtggtttcttttttggtttggtaatgggcacaaagaagagacaataagatagtcagtcttgtagatttgttagattagattgttcttgattgtgtattttcttgattctttcattttagattgattgctacatatagatgactagatcagtttggtgggtacgtgcaagtgagagagattctttatacgtattcttgtgattgattccctaagtttgtagtttagtgtggtaacataaaatgtgataatccagatttaatatgcgttgaacatataattatatgcgctaaatcaagagatttgcg

SEQ ID NO: 142704 - DNA, 134 bp, Arabidopsis thaliana landsberg
ggcggccgaaagcgataccagatgatgacgacggcgaactttcacagttcaaaggtttcgatgtcgataacgatttcgctaagagattgttgcacaacaaggaacgcgaggatcttcagcgatacgaagagaag

SEQ ID NO: 142705 - DNA, 213 bp, Arabidopsis thaliana landsberg
ctgttactgggacggctagtgctgccgcactgttttcagcctatttggttgcagctgctgtttctgccttgtttgggctcacttcacggttcttaaatctctgtcctgcttctgccgagcttggttgtagctcagtagtgtgagggaaggcgaacgaagaagcaaactctgttcaaagcggagaatgcggatgagtctgtccacttataaggg

SEQ ID NO: 142706 - DNA, 1612 bp, Arabidopsis thaliana landsberg
aatttggtgatttatcgttaaatccatggcggctccgtcgccgtcttcaccaccaaacctactctctcctccaccattccgatctcccgaagcttcttactttctccgaacttgttcaaatttctctcaattgaaacaaattcacaccaaaatcatcaaacacaatctcaccaacgatcagttactagttcgtcagctcataagtgtttcttcttccttcggagaaacccaatacgcttctctcgtctttaatcaacttcattctccttctacttttacctggaaccttatgataagatctctctctgttaatcacaaacctcgtgaagctcttcttctctttatccttatgatgatctctcatcaatctcagtttgataaattcactttcccttttgttatcaaagcttgtctcgcttcttcgtcgattcgtttaggtactcaagttcatggtttagctattaaagctgggttttttaatgatgtcttcttccaaaacactctcatggatctttactttaagtgtgggaaaccagatagtggacgtaaggtgtttgataaaatgcctgggagaagtattgtttcatggactactatgctttatggtcttgtctccaattctcagttagattctgcagagattgtattcaatcaaatgccaatgagaaacgttgtttcatggactgcaatgattacggcttacgtcaagaaccgtagacccgacgaggcgtttcagctttttaggagaatgcaggttgatgatgtcaagcctaatgagtttacgattgttaatttgttgcaagcttctactcagttaggaagcttgtctatgggaagatgggttcatgactatgctcataaaaacggttttgtgcttgattgtttccttggaaccgctttgatcgatatgtatagcaaatgtggaagcttgcaggacgcaaggaaagtatttgatgtgatgcagggtaagagtttagcgacttggaactcgatgatcactagcttaggggtacatggatgtggtgaagaggctttgtctctgtttgaagagatggaagaagaagcaagcgtagaaccagatgctatcactttcgttggtgtcttatccgcttgtgcgaatactggaaatgtaaaggatggtttgaggtactttactcggatgatccaagtttacggtatctcacctattcgagaacataatgcttgtatgatccaattgttggagcaagccctcgaggtggagaaagcttcaaacttggttgaatccatggattctgatccagacttcaattcttcatttggtaatgaatacacggatggaatgaatgaaacgaacgaaactccgagccaacatcaaattatgttcaccaagtgggatacaggccgattttgaaggttcagtgtctcttgacatatatattttcgtctattaaacagattcattgatcatctttgtaactatacaagaaaagctccttcaaaagtagtgtaatgtcatgtacttgtaaaaggaatgggagcttaagcagggaaaatagtaaattcgatttgtaatagtgtcatgtattttgtaaacagattcatttatctttttacattatgattctcaaaa

SEQ ID NO: 142707 - DNA, 1920 bp, Arabidopsis thaliana landsberg
atgaatcccgaagaatcaagaaggagagcctctgttcaagccgtagcaagagggtttgagatgattaatgagaagaatcagtcaaggaatcagaaagctgcgagtcctggttttactcggatgacaggccgagtacaatggccgagtatggccccggagtcctctgtgggtcgttctgccgctactcaagaggaaatagcaagaggcaagagggtctgggagtccgagccagttgcagaagaaggagtgcctgagatagagaaagaagcatctgaggaagatgtgcaagttgatgaagaggtcccgatagttcctacaagtagaagaaggaacaccatgaggagaaagaaagaacctaccatagaagagcactaccaatatctcatggagctgagttttgaggggacaagatatccccatagacctaccatgcaagctttggggatatgtagagatgttgactacctcatggagatggccaagctggagaccttcttctcctacaagtatgaaggatacaaaactgagagctgccaattcctagccactttgaagctccatttctatgctgaagaaagggagagagagctgcataagggagttggttacatcacattcatggtgtttggaattcaatactcggttcccattaggcagttggatgctattttcaagttccccaccaagtatggaatccgccaaaacttcagcaaggacgagctccttgatctatggttgacaatcgccggtccacacccctacaagtcatctagggccaagagttcgttgataaggagcccggtgcttaggtatctccacctttgcattgcaagtgccttcttcccgaagaagacaaccggccatgttaatgagggcgagctgaagttgcttgatctcaccttatgcttcattttgggacacacgaggaatgggatagagatggaaggggatagggctgatacatccctttcggtggtgttgattgatcacttgattggttttagggagtacgcagccggaatccaccaatccggctatggaggaagcttatgtgctggaggagtgatcacgcccatcctaatagccgctggagttcctcttcatacccccactcacacagcaacctacatcgatatggagtatttgaagaggaagtgctacttggataggtctgctccagcggatcaactctacttcaagttcaagcactccacgctaggtctctctaggctagcactaccttgcaagaagttcaccaccattaggattgggaacaacattgactttgatcctcctcaatcgatcttagtcaatgtccttgcgcctctacaagcagagccgagcttaggaagtgagtctcaagaagaaggagcagagtggaatgaagaagaagccgagcaggaagcttatactcggccgagtaactttcagcaggccgagtatggccaggacgagtttgaacaagctgagttcagtcaagctgaacagtttgataaacaagaagattcgtgcgaagctgcagcggagcagtttttctttgaggattatgctgagtccgatccagagagagatcccggtcaagttcacaagaagttgggaatgctcaaaggtctgggcaagcttcagaggaagttgttcagtgggttgaagaagaaggtgagaaagatgaagagagcaacggatggcatggcggttcagattcaggagctgcaacaaagacagagatcaccaccacctcgacccgagttcaggagaagtaactcaacaagtgtggcgccgcgaagggacgctcgtttcgacccgccaagagcctcaaactacgagctcgggaggagctccaccttttcagatcgccgtttcaacagccgcccatccggtccagtgaaccagttggttctgaacgctgacccaagccgagag

SEQ ID NO: 142708 - DNA, 374 bp, Arabidopsis thaliana landsberg
gaggagacgacaagcaaattgcattactcaaactcaaattacttttgagtctgtttcaaaccaatcggtgaaattataagaaattggtttcgtttctttggaattagggtttatattactgttaagattcgattatagagtgaattttgggaagatttttcagatttgatttgtgatgtgttgtgttgtgagaaattgcagagtgtagtttcgggattaaacagaggacttgtggcgagtgttgatgatttagaaagagctgaagtggctgctaaagaacttgaaactgctgggggaccggttgatttaaccgatgatcttgataagcttcaagggaaatggaggctgttgtatagtagtgcgttctcttctcg

SEQ ID NO: 142709 - DNA, 362 bp, Arabidopsis thaliana landsberg
ctttcttctctctctctctcgtttggatctggccgttgattttctcccgacggcgataagtttgttgcatgaacgccggtgatggcttctgtttgcgtcaacaatgttactgtttctcaggattttcctacttacggatgtttcaatccacgagcttctttcagccgtgacgacggtggtcggagttctggatccgtcgcatcggagattccgaaggaggaaacagcagtcggagctggtgatttcgagtttaggttagaggaggatccagtcggaatgctcccagccgatgagcttttctccgacggtaaactcgtgacgaagcagcaacaacaacagacgacggagatcggcgggaaatg

SEQ ID NO: 142710 - DNA, 758 bp, Arabidopsis thaliana landsberg
tgtacctgcagtgtgtaacgatgctcaaaagtccatcagtagtaaaaccagaacacttgtctagcttcaaagtctcaagatcatctgctctagctttagctaaacgatctagatctaagtcactgacaatcatccgtcggaagtgcaccgatttgagctgcctaaggttgttagaaatctcagtaacccaaggagtaacataacctccccagttctcagggatcagattaaacatagctgctctaggcttgcctttaagcttgagcgacctcaagttcgggaatcgacggctaagacgatcaggcgtcgcagtgtagcaaagcgccatagtcacatgctctctcgtctcggaatcaatcttgaaccatctccgacacaccaaagaagccgaatcgcgatctttcgggtcagttatataggtcatgacttgctcgatgacatcatcaaccgtcgcgacgcagctcaatttacacctcttgatatcaggatcctccatcggatcgaaaaaaaaacaaaagaaaaaaacaaacgaatcctggaaagattcgatttagagaagaaaccgacgacttcgaattgaaatcgaggtcgcagatccacacataaccaccagagtgagaagaaagaagtaagaaaggaaagatccggtgaatcggagaagactagagattgagagagtgagggagaagaagacacgcgtaggaagaagaggcggattgggaggaagaagaagaaagtgggacgatggaatcaaattt

SEQ ID NO: 142711 - DNA, 531 bp, Arabidopsis thaliana landsberg
attcggtagctctcctctccgaatctaaaagttttccgaagaacttaaaacaaatatgactgatacgctcgagctcgactgacgaattcggcgtagtgttcacttttcttcttctttcttggaaacccacactcgtctgagtcgtctctgttactgacacccattaaagccctagcctttggtttcttttctccaaatcttgcaagatctcttgaggtaatttcgccaatttcattattctcgttgttaatttcacttactgtatcactgaaatctggaatctttcatgctttttgtgaataccctttgctctgatttctgtttcttgtttaaagttttcgacttttttttttataataattacggacgtcttgagtaattttgagctggaatcagataattcacatggaggaaccgagagaggaaagtgaggctgttcgtgattgcagtgagcccatggaggaagctggtaagggatcaggtttatcttctaaaactgaaaccctagttgatgaggatgccaatacggac

SEQ ID NO: 142712 - DNA, 379 bp, Arabidopsis thaliana landsberg
cctccttgagtcgaaatgctactgtgacgactctgtttgcttctcttccttttcttcctcggcaacaacaacacccttcctctcctcactccctatccgccaaaatctcttcttcttcctttttcttattttcctttcaatatctgatagctgcaaaacagaacccaccatgtctggtctgtataattataataacttctcaccttctagagccgcttctccccagattagaaccccttcctccgatgttgacaggtgtttctctttcgacttatcctccctctctaatggcttctttgatgaaatctcttatctctttgttttttgctcgttttctgcagtcaatacatatctcagttgttagcagagcatcaaaagc

SEQ ID NO: 142713 - DNA, 966 bp, Arabidopsis thaliana landsberg
tcggagcgtgtcccgacctcggaaattgattctctatcatcatcttcatcctcttcctccgctgcgtccgaggagctcgtggtgctgtaatgatcgtgatcctcccattcactacactgtacttcctctctctccgtctccgtctcttcctccacctgatttctcattgattcgaactgcttctgcttttgcttcctcgtgtcgaagaaatcatactctgacctcactgtttccgtatcctcgtcgttgaatcgattatcggagttatgtttcttctcttgagccttcctgttgaagaattcggaatcgggaggagaaggagggtagaaattctcccagttccagacggaggaggcatgagaaggagtagcggagtaagtagagttctgataagcactgggatacaaattgggcatgaaattggatctctcacttctcggagaagaagaaggacttgactccgagagaatatgaggcagtctaggttttggttgctgtttccggcgtcgattggaagaggtggacatgactgaaggctgcttagaactggcgacggaaggagacgtcgaaggaggataaacagaagaaggagcaggcgacggcgaaaaacgtggagggacaaatttagccggagattgttcagaaagcggaggagggggagtatggaggaaaacagccggagtttgatcagatacagagagaggctcaccggaggcgaatgaggaaagagcagatccagtgatacgaagcgatcggcagtaatcggcgtgagcggcggcgagatgatgacgagcgtagacagcttctttcatcagacggcggcgatccttacaacgccgtacagcatcttcgttatcgagcttggacgccgcacatcccatggcttatttttctccttcaggtttgttcttcgttacggtggcgcctgagctcacggcggctctgcattattcacaacagaatcat

SEQ ID NO: 142714 - DNA, 402 bp, Arabidopsis thaliana landsberg
cctcttggtttgaagctaaccacaaattcagttaaagagtttccttttttttctcagttgcaaaatcaaaccaattatacagagaaataggcccaagctgttatggccaataacgagctaaaagactagccaaataaagacagatcgagggtagtgagagttgtcactacaggctattctctacaatacaacatttttaagctcgagctcttttgttgctgcatgaagggcacttgtattgtttgatatgctcagctctagctggagtgatcttcacacacttgccatggaaccacttctcacaaaggtcacagcagatccagaattcatcagcaccatcactgtctccacaggctccacaaagggtttccccgtggtcatactcatcatcttcatctattt

SEQ ID NO: 142715 - DNA, 712 bp, Arabidopsis thaliana landsberg
tgtacctttccggcgtcttgccatgcaattcctgtaagagcctctacggcgatggcgcctagagtgccaagcatggcccaccttccatggatcagctcacattctctgaaccgttggatcccaaagacttcagtgtacggctgaaacggcgtcggtttgatctccgaagattcttggatgatcccgatgatgtcacccgccacgttcttggcaaggttttggtcaagtccatcgaaatcgtactgaagatactcagccggtttacctaaaccaaacggatcaaatccacggtctccgatcatcgatccgtccaaccattccggcgggtttgcgccggggaaccaaactagtctgtctccatcgtcttggacctgccttgatttctttggcggtggagccggtttcttttttccgaaactgaacccgaaccgggcttggaccctaccggttccaggtctaggatcttgaatccggatcccaaaaatacctgaggctgctgctgcagtggtggtagccatattgagttggtgtgatactgcttagagactgatgattccaatgttataacatatagtttttttggattttagaataatagtaacgttatgttatatgtgatggtaaatgtaagaagccttatcttagcgttatctcctgtgattggtctctctctttaccttttttcttttgtggctggctactttctaatacg

SEQ ID NO: 142716 - DNA, 337 bp, Arabidopsis thaliana landsberg
ggaaatcatcttctttagattctctgcttcaaagttcaaactccaactaacccatttggtttcaacaattacaacaagtacagggctagatggcaaaagatgtattgtatcctaaagctaaactcttgtaagctttcgacaaaataaaaagcaagaagacttataggagattgcagggttatcactccactcagtcttcttcatctgaactatcatatgctaatcccaacaagcctttcggagcattttgaccttgcccattgctttccgtagcttttccgtcatttctgtctgcgccaggtttcttcaacactggcatagcttcttctttctgctt

SEQ ID NO: 142717 - DNA, 220 bp, Arabidopsis thaliana landsberg
gttttgcacccatatctttactctgtaacccatgcatattcaccatgtccctcccacttaatgacatgtcaccattttgggaggacaattggtttgtcttctcctgccttgagaagctagctgccatgttgttgctgggcaatggatgcgggcgtaaaataactggctgaggcttagatggctggttccaaaactgatgttgcggagctgaaatacccga

SEQ ID NO: 142718 - DNA, 421 bp, Arabidopsis thaliana landsberg
ttgatatctcaaatgaataatttatttccttttgtattacagagtgtcagaatcagagattccttttgagatccaaattttttcaaattgatacaataatcagagaggtttggattcaaataagaacaaaaactcctgcagttttagcaatcaataagtgagctgctacttatattctgtaaccgccttgagctccaactagctgttgtaggagaagacggtagaataatcgtcggaatccgcttgctttcttccacaaaaggaaagtctgtcatgtaatgaagacctctgctttcatgtctagctaacgcgctgctcaccacaagcttagcgcaacagaacaagtttctcatctcacaagcttcaagagctaccactgtttgttcccatccatgttcaaacaaaaatgtttcccattttg

SEQ ID NO: 142719 - DNA, 411 bp, Arabidopsis thaliana landsberg
gtggctagttacatgctcttacatttaagtgtctttcctgctcagtatatttaatgaacgcaaaatatgtgatcgctcatagaatggttttgaattttgtgctgattcagtaatatgttaccatttctgcctatcttctatttctcaaatgttttttttgtggctgtgttaatagggcaagataggagcactcagagagatcaggtgcatctgccttctcattcaggacaagtactttctaacaatgcatttcaacctcagagctatcctacaactgatcacagcaaggtcaaattttccggggaaagagcacatcgtgagctagaagttcgctcaaagactcctcaagtttcttatgatagctacgttgaatcaagtgtggcatctactgctccaagatcagtcaatgac

SEQ ID NO: 142720 - DNA, 252 bp, Arabidopsis thaliana landsberg
ttgtgagaagtaaggaatgaagccccggctcatctagttttgaagttatggatcatcatgcccagtgtttcattgatgtaaatggcttcattttattcttccgagtctcttaatctgatttttatccaatacattacttggcttctttttttctttttcggaaaccaatagagttgggttcttactttcttaggatcgatagtcttaggaagatgcttttgcattgaccaataatgtcaaaacctttggaat

SEQ ID NO: 142721 - DNA, 382 bp, Arabidopsis thaliana landsberg
tttctcgtgagatgtcaaaaggattctagttacattacaatgacaaagctttttcccttctacatagcaaaaaaaagttatgattctacaaaatacagacacgagaagacagaaaccaaccaaacaatagctcattcaatcaaattccaacactggtccttaccaaggtttcagatcagcgaccggtcctgccgtccagttcaacagcttctcacctggtctcagatacacactcctctcatgaggcagcttacgagccaacccattcaatacttgatgaaacgcatcccctggttgagccggttgcgggaacagcatggcttgtttcatcgacgggtttgccaacaacctctgttttctcagtataacctctggtgggatc

SEQ ID NO: 142722 - DNA, 538 bp, Arabidopsis thaliana landsberg
cgatacagagctgaaggtccttccttttggataatcgaacggaaagcttcccggattccgacgggttttaagggacatggtcgaagcgcttgcatatgggtcttgatggtatcgacgggaaacatcgccatgtgttcgacggagccagcaatcgaaccagcaatcataaattgccagaacttaagaccatcgtgagcgatttccggtttgaaatccggtgtctgagaaacctgccggagatcaggttcctggaatttgggtacggtgtagcctccgtagccatttagggattggggcgtagatcgggaggcacttggtactcggcggcggagacaaaatctcgagtaaaagtagggtttttgaggacttgttaagagtaaaaaagacaccaaatcggaatgtgaatcaccgacgaagagagacggtgaagggggaatttggtgtggtggtggactacattatctcatatcatagcttttgtttttatctgtagcttaccaaatcctcctccttgatgtcgtcaaagatttgatctttc

SEQ ID NO: 142723 - DNA, 379 bp, Arabidopsis thaliana landsberg
gatttatgagacaagtcaaaagcccatgatcatgggaaacgttcttctttggacgtgagagtccgagacaaccaaaaagttatgacagcccactttctttcagaacacacattttaacctttttcattccaatagtactttccaattttcatatcataggaatataccaaagatagagtgttttgagagacggtcattatgtttggtttagaagttcttttatgattattgtttaattctcaagtctctataacgtgtcatgttaattattttaaacatcctagtaatagaaatatgtctaattagagaccacaaaaagattcaaaaaaagtgccaattaaaagagtgaagagatttaaggattatccgggaagattcg

SEQ ID NO: 142724 - DNA, 439 bp, Arabidopsis thaliana landsberg
ctatctctttttttttgtcaaacaagatcttcattcattcaatcctcaaaagagggaggttcatacacaaagacataagataatacaatgaaattaaagataggggcttcatgagtttttcaaagagatgtgtacttttaaaaaaagcttacaaggattgaaagattcgaccatgaagtcgggcttggcgaaatccttgcaaacaatgcatccgagcttttgatcatgtgctccacggaggaggatgttgggttggtgaggttgaaaaggaaacggtaaccaactctaaaagacatggtcataatgccgtacttttccaaacaaacagaaggttgcaaattatccaagcaaaagattaatacatgactgaccttgataattggtgtatgggtagatagagagttgtagaggcttcggtaacacctactccgtagaaata

SEQ ID NO: 142725 - DNA, 705 bp, Arabidopsis thaliana landsberg
gcacagagagagctaaagctacagtgtacagaagaaaatgagaggactctccagaaactccggcgcggcggcgatattcgcgattctactcattctcgccgttcataactggtccgtcgccgtatcttctcaatccaccgaattcgccggagatttccctccattcgaaacagagtgccgcggtacaattgccgagtgctctgtttccgccgccctcggagacggaggagatctattctacggcggaggagaaatgggagaggagttcgagatggactcagagatcaaccggcgcatattagctacgaggaggtacatcagctatggtgcgctgaggagaaacacaattccgtgctcacgtcgcggcgcatcttactacaattgtctacgtggcgctcaggccaatccttactctcgtggctgcagcgccatcactcgctgccggcgctcatgaatctatcactgtcagtctcactgtaattcttttttttttctttttctgatatataatcttttcagaaatttctcttttcttttgttaccggtttatatttctaagttcattgcggattattagagtttcatacacatgtaaatgtttctgggaatttatctctgttattgatgtaagtttgtttacataaaccagaaaaaaaactatggaataaatacattataattaatagtatcatcactcataaacga

SEQ ID NO: 142726 - DNA, 416 bp, Arabidopsis thaliana landsberg
cgtgaaagactcttccaccgccgttttcagacatgaaacctcgtaacagatctctcgggtatttatctatgtctagagaaagatttgtcgtaaccgtcatttctctgttccatgccctttgttgtctgcttgcttcacccatagattccgaaacaatagaaagaaagaaaaaaaaagttttttgttttgtttcttctttgttataagatgatgaagaagaatgaaaaactctgaatttcacatccgatcaaaaatccaaaattgtcatcatgaattaaacagtaaatctcgcaaattcatatcaaagtaaaaaaaaaaaaaaaactcgccggagttaataccagagacggcgaagaagacgaagaggttataattgaaagtgaagagcagagacaaagaagaagacccttttggac

SEQ ID NO: 142727 - DNA, 360 bp, Arabidopsis thaliana landsberg
gttactttatacccatcaatcaagtcttgtcctttttctccttctctctctcatacgagcttctttcctgctgatgaggcttgagctttacattttcaatcttgattgagattctgcatgtttctcgatctttaaactcagatgaagaatcttggggggttgttcaaaattcttctgcttttcttctgtctctttctatcgacccacataatttctgtttcttgtttaaactcagatgggctaactctactctctcttctgaagcatttggatagagtaccaccacaagttacttcgacatggaagataaacgcatctgaagcaactccatgtaactggttcggtatcacttgtgacgat

SEQ ID NO: 142728 - DNA, 125 bp, Arabidopsis thaliana landsberg
ctctttttaacctctgaagcaaaaaccaccacatcggagatttctaatccaacgaaaacgcttcaattttcttgcgatttctcttcctctgcgaaaaacccttttggattcagactttcctcggt

SEQ ID NO: 142729 - DNA, 453 bp, Arabidopsis thaliana landsberg
caaatctttttctcattcatcaaaagaaaaaaccaaagcaaaaaaaactcaaaacgtttttgaagataatgatgatgatgaagaagatgtttgttcagatcgctgtggtttgtctattggcgacgatggccgttgtgtccgcccacgagggtcaccaccaccatgctccggctccagcaccaggacccgcatctagctcaaccgttgtttctgccaccaatatgttcaccgtcttggctattgctgccgtggctctcgtcgttggttccaaccactaagttggttattacattcgtcgttttgtttcagtttctatgaaattgttctcttgacttttaatatattttgaatttttctcatttgtttttaactctctctatgttgatctgatttcttgaataaaataaaagtttattgaacgtgtgtttttaattacgaagatttggattacaa

SEQ ID NO: 142730 - DNA, 696 bp, Arabidopsis thaliana landsberg
tgatttcttcttctacagatgtattatttgattctccttcgatcattgtcaacgttttcttcttttgtaatcatcacagttttttttgagaatttgttcatttttttttctcatatattgattcgagttctttcttcttgaatcttgttcttcatagatctagtttttgttttttactctctagatctatagatctgttgaattcacttctttaatccatctctgtgttcttgagttcctatggtctaagtcaaactcaagttcaagatctgttgaatttggaatcttgctggtgaagttagagatgaattatttcccagatgaagtaatagagcatgtattcgactttgtaacatctcacaaagacaggaatgctatatctcttgtatgcaaatcatggtacaagattgaaagatacagtaggcaaaaggttttcattggaaactgttatgccattaatccagagaggttgcttcggagattcccatgtctaaagtctttgactttgaaaggaaaacctcattttgcggatttcaatttggttcctcatgaatggggaggttttgtgctaccttggattgaggctttggctagaagccgtgtaggacttgaagagcttaggttgaagaggatggttgttactgatgagagtcttgagctgctttctcgttcttttgtcaattttaagtctttggt

SEQ ID NO: 142731 - DNA, 216 bp, Arabidopsis thaliana landsberg
ataaattttggaaacgtgttaaacattcaattaacaaattttttttttgacctgttttttatcgtaacaaaataccacttgtttgccttctcgttacagtaggaaaaagaaacgttttcattgtcgacgactcaaagagtagaacctgaagtccgataacagtcgataggtagtaagatattttgaccaaaacatcgtgaatttattgaaatgctg

SEQ ID NO: 142732 - DNA, 376 bp, Arabidopsis thaliana landsberg
cccaaatagaatattctgtattgagtatgttttagctagactagatagttcaaagatatccggtatccaagtgtcgatttggtgttggttaaaaaaaatgtaagaaaaaaaagctggatcttatccttttactaaagaaaatctgaccatagttatttccttagttaagagccaaaattaggctcagattttaattaattgaaccattagatttgttcttactcaatttctatgtattttaataagtttcacttctaaaagtgttttctaaagttttacaactacttcaaatcttaagactgtttttaatgaattcaaaatttacactttaattcaaattttcaacttgtgattaacaaataattatactttatcg

SEQ ID NO: 142733 - DNA, 118 bp, Arabidopsis thaliana landsberg
ttggaaatcagacaaatgactaagcgggtcccttttgactttagcatcaatattcaatattaccgtgccagtaataagagttctcgagtccatgaaatgatgttgtatcagttttcgt

SEQ ID NO: 142734 - DNA, 250 bp, Arabidopsis thaliana landsberg
agaacggagctcaggctaatccttatagtcgtggttgcagcaaaattgctcgttgcaggagttagacctacaaacaagaaagctatcttcttgatcttgacttatgttttctttgatccatcaagcgttttcattttaattaaatctttaaatattcatcatgtctctgcacaatagtaaagacctatgttttgatcaaattgggttgatttgtaatattttatgtgaataatcatggtcttaatgatcc

SEQ ID NO: 142735 - DNA, 407 bp, Arabidopsis thaliana landsberg
gaaaaaggtcaaaaaaggaaatagtgctaacgaagaaggtccgtttattgttgtggaatcttccaaattcaagacggtaggcgagaagactactttaaggccagatttagccatagctcttcaagttagagccttccagagagtcacaaggctgtggaaatgcgatgttgaagcattaagaagagagatgagagacaacaatgttcctgtatcctattccggcaatggaattcccacaaaatctataaggagaccaaacttagaagagattctccggcgtctgcttaatgtcctgaaacctgaaactttccaaggagctattaaggccataaacgagaaaatcctctcggttcttgatgattcagggtcgggaagagtcgatttgggaatgttttacgcagtgattg

SEQ ID NO: 142736 - DNA, 420 bp, Arabidopsis thaliana landsberg
cccaacttagagtaacaagaaagaaccagcaatggatgtaacaccaacgacgaccgcagagacgccaagagctgccgcaccgcttttggcagaatcagcagagcctgtaggcgcattgtcgtacgaggagtcacttcctagaggaccagccactgcaacgtcaccgtcaccaggagtaggagctgcatcgtcatcggtggttccgatttggtcatcggtgactggagcctcgacatgatcggttttggaggcagctggagctttggagggagacgctgaaggagatggagaggaggcagctgcggcaaggccaatgatggccatgaagacgagggcaaccacgacgacaatgttttggcgacccattcttctctctctccttcttacgtagaactcgtttaatttattttagggtttgcg

SEQ ID NO: 142737 - DNA, 267 bp, Arabidopsis thaliana landsberg
ttaaagaatagataaccccaatttccgagaggaacgttaggagaaagtttttgaaaatttacaaaactttctgttagtagatgcttaatttcatcagtgttttccaagcaattttgaattaaggattaataaaattgttatgtatattatgaaataatgaagatatttcgctatctctagagtctaaagagattagcagttggtgccttggtggttgacaaaagaaaagaagaagagattagcagttgcgtttaacattggttttat

SEQ ID NO: 142738 - DNA, 122 bp, Arabidopsis thaliana landsberg
taaagcaaaattaaattaagatttaaattagaacaaacagacataataatttatcacttttctcgatattcatttgattacaaaacagaaccttctacttcatagagagtctttcttcttcc

SEQ ID NO: 142739 - DNA, 433 bp, Arabidopsis thaliana landsberg
atttttcttgcaactaattgaaagtggtcttacacaatagaaaagtttcccatacatgctctatccaatataaaatgggacctagatctctagtaacctgagaaaacaaatctcaataatatgagaaaacaaataataatcacaatcgctctttactagaggtctgtttacacttacttagacactatttcgatttctcaattagacaaatagctattcagaaaatcgtttttattcatgttcaggttataacagaacactcgatctagtgtaaataactcaactctagattgcataaatgttcatcacatggatgagcactcgatctagttgattttttttcagaatttgcctttcaaaaatcacttgttataacttatgtggtctcctgggatgtttttgtatgcttacgtttgtgaaaattgtcccaagt

SEQ ID NO: 142740 - DNA, 106 bp, Arabidopsis thaliana landsberg
tttttcctctctgtcgcggaaaaaaaaaccctagtttttctctcttctcaccgatttttcattccgatgcttctggtcgcatagcccatccccgcagatctgttaa

SEQ ID NO: 142741 - DNA, 305 bp, Arabidopsis thaliana landsberg
tttatgaacaaagtcgtcatttattagaaggaaatgaaagatcaccactaaaataatctcttgagtgaacaagctgatcacaaccgtatatataattggctaaaaataactatatttgtttgaaacgcacttggagctagaatacacatgatgctaagtgaagaacgaaaactatacaacgcagtcacgtagatgaaaaactgatatatgtacgtttcaatttatttgaaactcacgaaacatcatgatataggacatacatcatttttagttgtgggagtgaaatggaatatgatttcccattc

SEQ ID NO: 142742 - DNA, 387 bp, Arabidopsis thaliana landsberg
cacaactccacaaaagagtacaaaaacagaagacgatgcatattagaaagaaaaagaaatctcctagtctcatcaaagcgtttcaatatgtcataccaaatcctaagatcaaacaaggggataacaaaatgtacaccattatattcacaatgggaaaatacgaagcactcacgctattgttaaatcattttccttcctcctatcatactctgctgcgtctgagacccagacaagttttgagaaccattactactgttcgccggtttattatgcttcccgtctgcgctcccaaacacatccagatcttcaaacaatctgtatgatggaacaaacggcttctgtcctacagatacacctgaattgcttgcagttgaagtagcctgagga

SEQ ID NO: 142743 - DNA, 1407 bp, Arabidopsis thaliana landsberg
gaagcaacaagtgaagaaagaaagaaaaaaatggagaagagtggaggaagaattgtaatggatgagataagaagctttgagaaggcacacttgttcgatcttggtcatcctcttcttaaccgtatcgcagattccttcgttaaagccgccggagtaagttttcatccatatctcttcgtttcccggtcgtatatgcatgtaacatatatgtagtaacatagcttaatatggattaactatgaaggtgggagctttacaagccgtgtcaagggaagcttactttaccgtggttgacggtaagaaactccggcgggtttcttcttacttatgatttatatgtataagaaatgagtatgtaatgtaagagtgaaaatgaataaatagagaacgtactttagtttgattatacattttaggggcaggttttgactcgaacaacgtgggtccaccgtcggagattacagggaacaagaaacataggttccctaatctcagaggtccgtaacataattgtatcatatttggttgatgatcttatgtaatcagcattatgtttatcttaatgatgttttatcgttgttttcttaatcaggggaaagcagcaaatctcttgatgcattggtgagtttattacaatcgctaattattagccttttattattcgtcaaatattcgtgtgctagtgtgctagtgtgttcatatctaagtgttgcaaaataatacataaagaatggtcgtaactcataaggtttcttgttagttaactgaaaatgtttaaatttgtggcctataggtgaagaacacaggaaaagaatctctccaatggggtgagtttatatatgaatttgattaagttaacgcttcacgattaacgttggaaagagatttaatgatttgggaatggtagggctagcggcagggttgtactcaggtatcacttacggtatgacagaggttcgtggaggagctcatgattgggttagtctaattaatttgacttgtgtcattttgttttcatcaacgaacaaatgatgaacatgatctttaattagtatgtaatttgatatgtgtcacagcggaacagcgcggtagctggagcattgacaggagcggcaatggctatgacgacgtctgagaggacaagccatgagcaagtggttcagtctgctctcactggagcagctatttccaccgctgctaatctcctttctagcgttttctagatgatttgtattagaagctttaatgcataagggttgtttcatgtatcagttatgtttctttttgtgaaaacgaattcgctaaaggtctactaagatcttttcctgaaactctcgaagctggagggagatcgttttgttatctgtttggaaaatatttgcactatatatatcttgagtagtacct

SEQ ID NO: 142744 - DNA, 239 bp, Arabidopsis thaliana landsberg
ataataataataccatgtttaataacaataagaagtataacaatacataaagtttaaaaaatttaaatccataaaacctttaaaatactaaaataacaatagtctagtagatcaccaataagtcaataacagaaataaagtaataaaacatcgcaaattcaaaacaactaatctcgattgtcttcctcatcattccatacatcctcttcaggcggcaatgtgaagtcttcatcaaaatc

SEQ ID NO: 142745 - DNA, 1301 bp, Arabidopsis thaliana landsberg
ctacacaatcacattagccaaaaccatggcctcctcaagtctccatttcttcttcttcttgacacttctcttgccattcactttcaccaccgccacacgtgacacatgtgcgaccgccgctcccgatggttccgacgacctctcaatcatccccattaacgccaaatgctcacctttcgcacccactcacgtctctgcctccgtgatagacacggtccttcacatggcctcctcagactcccatcgactcacctacctctcaagcctcgtcgccggcaaaccaaaacccacctccgtccccgtcgcctccggtaatcagctccacatcggaaactacgtggtccgagccaaactcggcactcctccacagctaatgttcatggtcctagacacaagtaacgacgccgtttggctcccttgctccggctgctccggttgttccaacgcctcaacttctttcaatacaaactcctcatccacttactcaaccgtctcttgctccaccgcacaatgcacccaagcacgtggcctcacgtgcccatcctcctcaccacaaccgtccgtctgctccttcaaccaatcctacggcggagattcatccttctctgccagtctcgtccaagacacgctaacgttagcccctgacgtcatcccaaatttctccttcggctgcatcaactccgcctcaggcaattctctaccaccgcaaggactaatgggcctaggacgcgggcctatgtcattggtctctcaaactacgtcgctttactcaggagtgttctcatactgcctccctagcttcaggtccttctacttctccgggtcgttgaaactgggtctcttgggtcaacccaaatccatcagatacactccactcctccgtaaccctcgccgtccatcactttactatgtgaatctcaccggagtgagtgtcggttccgtccaggtacccgttgacccagtgtatttgacgtttgacgcaaattccggcgccggtacgatcatcgattccggtactgttatcacccgttttgctcaacccgtgtacgaagccattagagacgagtttaggaagcaggtaatttcgttaatatcacaattagtataactcaagaaatgggaaactaattacaatcttgttaatgaaggtgaatgtgtcgtcattctcaacattgggagcgtttgacacgtgtttctcggcggataacgagaatgtggcgccaaagataacgctgcacatgacgtcactcgacttgaagctgccgatggagaatacacttatccacagcagcgcgggaacg

SEQ ID NO: 142746 - DNA, 363 bp, Arabidopsis thaliana landsberg
agacaacggaggctggggagaaagctacctctcttgctccaaaaaggtacacacttgcacattttgatgaaatcaacttgatgtaggatcattcagtcactacaatcctcttgatctatgcagatatacatagcacaagtaggggagatatcaaacgtggtgcaaactgcttgggctttaatgggtctcattcactctggacaggttttaatcattcaatattgatcgacgaaaatacaattaattaatgaatcagtactatatatgaccagtgctttacacaacaggcagagagagatccgattcctcttcaccgtgctgcgaaacttatcatcaattcacaactggagagtggagattttg

SEQ ID NO: 142747 - DNA, 151 bp, Arabidopsis thaliana landsberg
gcaaaactagaatggccccatatatataatcggaacttcatataatacaatggtgtaaaaccctgaatctgggtgaaaaataaatacaggcaaaggcagcaacaacaacaggactctttccacactaatcgagttgaatatgagatcactc

SEQ ID NO: 142748 - DNA, 1003 bp, Arabidopsis thaliana landsberg
cgaagaaaccgagagacatttttttttttttggaggatcatcaaattcaaacatcatttctccggcaaattcgccgtcggaattatctcagagagggattgagctgcgaaggtaaacgtttcctgggcttgtattcgtgtgtattctcgtgttcgctttttcttttgtggttgcaatttttatccttcgttgttgaaattggctatctagtggtgtgtgtagtactgttttccccaattacttcaaaggaatcgagtagaagcatcaaggctttcatctaattttatgaataattggacctgtgaagttgacgtcttctctagttcttcatttagttgttgtaagtgtttttatagcctaatttgatttccgtggaaagataaactgaaagaaaaatctgatttgattaagggaatgaaaacttggattcgtttgaagttagttgtagaaagtgtttctataggttattggtgctaatgattcattgcctttgcagtggtgatttttgtctctaaatgtcgagtagctcggggagtttctcgggaagcagtagctcggcgtgtagttccagaagtgattgtgagaactcgtttgatgttgaagatcttttgcagattgggactacacgcagggaggtaaacacttcattgctatgctcattataaggtagtttctgactcttagattgctgaagttgatttctgttttgttttgtgctctttgatttgttattggcagctaaggaaacaaaaggacttgctgagagaatcacagccccatagtattgaactagtcagagtagtcttcttctccttgtttaatatgagcaattcagggaaagtattttctcattctgttggttgagttttcggaccttaatcttctcttcaccgcagaggttggaacttcacacgaagtcattatctgaatctcgcttagaagacacagcaagaattcagatgatggagaaagaattattgaattgctataaggaaattggtaa

SEQ ID NO: 142749 - DNA, 394 bp, Arabidopsis thaliana landsberg
ggagatgagaggaaaggtccaatgtcacttcctcagccttacactttcaagccttctccttccacttagaagattccttcctttctggtatcttattaactcttactcaatatgtccttattttacttcaaccttagattctttaatttgtcttatgtttgcatatccctctagtgttctgtgttttcatcattgctcttatgatcaagcttttttaccttgatcacatcaaattcgtccttattcagggtaggtttttgtttgtctttgtcaggtgttgaggaagattacaatggccaaatactgttcctgaatcattttctttgcctagttttttagatctttatttgtgttgtaagcctttgaacatgggaataaagtgccacatttcaag

SEQ ID NO: 142750 - DNA, 223 bp, Arabidopsis thaliana landsberg
cgagcatgtctccaacactaatctctttatgttcaacactatgatcagaggttactcgattagcgatgagccggagcgagcattttctgttttcaaccaattgagagctaaaggtttgaccttggaccgattctcgtttatcacgactcttaaatcatgttctcgtgaattgtgtgtttcaattggtgagggattgcatgggattgctttgagatatgggttt

SEQ ID NO: 142751 - DNA, 439 bp, Arabidopsis thaliana landsberg
catcggttcctgtatattttatttgttgagaaatgtccagttcatatacatttagaggttcctcatgagaaagccttcgaaagtgattcccggtccgaaagctaagcccagaccccactcttctccctctgtgcctttcttctcaagctcatctctgactttgtccattatgtagaagatggtgttgctgcttacgttcccataatccatcaacgcccttctgctgcattccagcttttccggcttcagcttcagctttgtctccagcccgctcaggatggctggtccaccaggatgaactgcccagaaaaggtcattcaactccaacgcaccagagccagcctttgccactagcttcttgcagaactcctccacgttgtcttcgatcttctgagggaggtctcttcctagcttgaaggttatgccctcttctgacagc

SEQ ID NO: 142752 - DNA, 302 bp, Arabidopsis thaliana landsberg
aacagaattgaagaaaaatcacaacgttgatcatatataatagtgatacgaagagacgattgtattacaatatgtgcaattatttaaaacagtggttaagaaaaatcacaactttgatcataatcgatcgtcaagtggacgcctggtttatgatcgatggaagatgaatcaagcgaaagagaagtgttgaatccctggacgttactgtttatgaacatcataatcattggctctgtttttttctctaatgatcccctgtttttcggaacttcgtttttagccggaatcttgttcatgaggtt

SEQ ID NO: 142753 - DNA, 132 bp, Arabidopsis thaliana landsberg
aaaaaggggagagaactaacaaggcctgagcactgaaactctttgaacatctcttcagatattttgtttagtgtttcactcgatagcttttggaggcccggtcttagcaataacactgttggcatagtctgg

SEQ ID NO: 142754 - DNA, 762 bp, Arabidopsis thaliana landsberg
gcggaatcggttgtgagagagagagacggtgatcgggaaatgtcgacgaaaggcgcggcggcggcgtaccctagcgcggctcggatatctgattctccatgttatcttcagtactctgcttctctcaaatgtgagtcatgctcctgatctcaccctttgtgattgtttcttcgaggataggatttgacatgttatcttcagtactgtcaagttccataacgaattagcattgattagatctcatctatttcattatgcttcctcaaggtgattagattagtgggttgaatcccatgtcagtgattcgatttaggtcccatcaattgataacgtcgggtttgattcctgattgtttatgtgtttccgttttcattagttatgcctcttagcttgaccccttgatttcttatcaggtcttgaagaatttggatcagacaagagtaaatgccaggatcattttgatgtgtacaaggaatgcaagaagaaagaggttgttgttgtgaatgaatatttaggcttttggcgtttccaacttctttgctgctttacctatgtgttattttgtttctcagagggaagctcgactggaacgcaataagacacggtcgttgttctcgtgaatgcagatcctcgaataccaatgatgtctcagaacatcacctagctagtagtatcctgttgtttcatttgcaatggctgtgtttgtatgatctatctaagtaaacaagtggaaagtgtttgttaatgttactttttactccc

SEQ ID NO: 142755 - DNA, 383 bp, Arabidopsis thaliana landsberg
cattactgtactatttatggaatattccactaagttatctagaaaagcttctagtaatgcataatagtggtaatctgacaaatatcatgtagtaatcatggttatgtcatatgtgaggcaagaagattaaatgctttctggacctatacgtctctagttactcttttttaacaaaatagagcctttttcaggagttccttatggcactacttctaattcatctacaggttatcgttctgcaaaaggtaagctccatgtccttagtcaaactaaagtaatttaattgacagtataagaagtggtcatttttgcatgagagtttagttagtatgctgactcgatggtgatgtatgtaatatcatcgccgatgatctccaattgct

SEQ ID NO: 142756 - DNA, 2026 bp, Arabidopsis thaliana landsberg
gctcagcaggtttctgaagctggactctctgtttgttccattgatccttctcctaagctcatatggcctaacaattatggagtttgggttgatgagtttgaggctatggatttactagactgcctggataccacatggtctggtgctgttgtctatgtcgatgaaggtgtcaagaaggatttgagccggccttatgggagagttaaccggaaacagctcaaatccaaaatgcttcagaaatgtattaccaacggtgttaaatttcatcagtctaaggtcactaatgtggttcacgaggaggcaaactccactgtggtctgcagtgacggtgtaaagattcaggcttccgtggttcttgatgccactgggttttcccgatgcttggttcagtatgacaaaccttacaaccctgggtaccaagtagcttacgggattgtagctgaagttgatggtcacccattcgatgtagacaaaatggtgttcatggattggagagacaaacatctggactcatatcctgagctgaaagaacggaacagcaagatcccaacgttcttgtacgctatgccattttcttccaaccgaatatttcttgaagaaacttctttagttgctagacctggtctgagaatggaagatatccaagaaagaatggctgctagactgaaacatctggggatcaatgtgaagaggattgaggaagacgagcgttgtgtgatcccgatgggcggtcctttaccagtcttacctcaacgggttgtggggattggtgggacagcaggaatggttcatccttcaactggttacatggttgctaggactcttgcagctgcaccaatagttgcaaatgctattgtgagatacctcggttcaccaagtagtaatagcctgagaggagatcaactctctgctgaggtttggagagacttgtggcctatcgaacggcgtagacagagggagttcttctgttttggaatggatattctgctgaaactcgatttagacgctactagaaggttctttgatgcattctttgatctgcaacctcattactggcacggattcttgtcttccaggctgtttctcccggaactgttggtcttcgggttgtcgctcttctcacacgcttccaatacctcaagattggagatcatgacaaaggggactgttcctcttgctaagatgatcaacaatttggtacaagatagagactaaggaccagaaacttagacatataagtacatctgttctttggttcttgaccagtagtatatccgcattgcaagtcgttggataattgtgtataaaccacagatcataacctgaatccttgtgaaatcaaattgttactactagttcattaaaattaatactttgtgctgcattgtgtttcaccaactcttgtaaatccaaaactagaggcaaaatgtaataagataaaagagtggattttgaacacaaaagcaaatctttcaaactccttccgctccttaatatttgatgctttcgtgaaagtcttatatttcatcttcctcgaaagggtctctttccggataatcaccaacctgcaagccaacatcaagttcatgagtagcagaaaatggttttctaatcacttaaactaggttaactactaagaacccaatccatactaggtccaaaccatgtccagaaagtcaaactcgcccaaacgttagcttgagagtgataacacccttaggcattagctagttctatagctaacccatactcgactccagactcctaatatcaaacttggaaaggtaaaacccgcattgacatctatttgagaaacagcaaatactactatacgatggatgatgtagaatgactaaccagttctatgaaatgtaataaatcatttcacaagcaaaatgaattaggcaacggagaagctaaggccttaaagaaaaaaaatacctttactttgtcaggcctgaccataccaccttgaagccgagggcactcaaagaatcttgttcctttcaccctgcaaatgtaagcc

SEQ ID NO: 142757 - DNA, 454 bp, Arabidopsis thaliana landsberg
cagcgattctccaattcgacggtgatacgaaaatgctcgcagacgctgaatcgtttctgtttcatcttctaaaggcggtgccttgtgcgtttactcgtcttaatgcgttactctttagagctaattactatccagagatctcaaaccataacaaaaatcttcagacgttagatttggcttgtacagagcttaggtcacgtggcttgttcgtgaagctattggaagcgattctgaaatctggaaacagaatgaatgcaggaacagctagaggagatgctcaagcttttaatctcaccgcgcttttgaaactttctgatgttaagagtgttgatgggaagacgactttgcttaactttgttgtggaagaagtggttaggtctgaagggaagcgatgcgtgcttaaccgaaggactaaccgtagctttagccgtagcagcagcagttcgatttccga

SEQ ID NO: 142758 - DNA, 969 bp, Arabidopsis thaliana landsberg
cttttgttggttccttgtcggtttcctagggtttttgtttagggttttcattttctttttccttatctatctaatcctctgtttctctccacatcaaaaaaaacctcaaaattaagagacgaattcgagataatgggttcgcttaaggaaggtcaaggaagatacatggaagaaggtgaatcagaagagccgcttttgatggcacagaaccagagattcactatgttccccattaggtacaaatctatttgggagatgtataagaaggctgaagccagtttctggactggttagtcctctttctttccttgaaattttcttatgttctctgttcttcttgagtttgaactattctcggagttgtggtggatacagttttgattaagaaagtttgtgactttgtaaatgtaaagcttcttcttttcgttgtttaggattttaatgtaatatagatgttccattttgattgtggtttgtggaaaagaagatgtttttctacttgtaattctgattctggttcagagaatgtttcatgtgtgtgatagttctgtttctgtcttatattatcatcaattgtgtgttttgacttctttgaattaattgtagctgaagaggttgatctttccactgatgtgcaacagtgggaggccttgacggattcagagaaacactttatcagccatattctggcgtttttcgcagcgtcagatggtattgttttggagaatttggctgctagattcttgaatgatgtccaagttccagaggtgaggattttcactttgcggaatattgaaaaaactgtggctttaaatgattttttagtactgttgtctgacttgatatgctgtggcaatgtaatatcttgaagtcgacacttgctgtttgatttgagatagtcaattctctggatgtttcaggctcgtgctttctatgggtttcaaatagccatggagaacattcattcag

SEQ ID NO: 142759 - DNA, 368 bp, Arabidopsis thaliana landsberg
gttgttctttaacaggatcgatcctttgatgacgaggcgaccaattgtcttgaattgattctagccttgggttcgaaccgacgtggtgttatttgattattatatttggtttcagtgtcatacactctacacgagcctccacttcaaatttaaaataacaaatctttgttaggtcataattgtctagctaatataacaatgctactagcagaatgtatgtactacataatcagattttatatattcttgatattctcttacagatttttgataacaactgattatatgtaatatatgaggtttagtgtcaacgaaaattatgataattttgttagaatcttgaaaaattaatacaagttatttacata

SEQ ID NO: 142760 - DNA, 290 bp, Arabidopsis thaliana landsberg
cgctcttcgatagaggtgcccaagaagcttctcttctctctctctctctctcttcaatgccctcctctgctactagcacatatctcctctctttaaaacaagtctctctcacagcttcttcaccactccttctccagctcaaagaccgtttctttcaccagccaaagctccttaacatgggattctcaactgggaaaagaaaatcaagagatgaagaagaagatagagtgagcttcttcgcttctgaattccccatggatgacctcaacgatgacgttctcgagagagtc

SEQ ID NO: 142761 - DNA, 438 bp, Arabidopsis thaliana landsberg
ctttttctcattgtatcaatatgagagagtaggctttctcttttactagttaaagtggtcttgtcatcattcaggaggtggcatgattcttctaggcttttcaatttcgacttgagttcttcaagttctacattggcattaaaaagagaattctccagtaccatgttttcctcagagagtttcttgctgttttctgtagcactctgcagacgggaaatcaacatgtccttctcagaatgaaggcctgatttctcttcagcaagtgacatagaagcttcctccaatgttttcagctttcctctgattgtttccagctcagcattcaaatctgatatggagttctccagaagaaggtttttctgaacaagcttttccatcatttctaacttctcaatcagggccgtcttttcaatactttctctttcccggatttccttt

SEQ ID NO: 142762 - DNA, 452 bp, Arabidopsis thaliana landsberg
aagtacgatcggaagtcctccggatgaactcgatgagatctcggcgggtattttgaaaggagatctgaaggcgaagaaagcagtggcgattaagattgttttgaactcgaaggtgaaagtgaagatgggagctctaaaaactcctaaatcaggaattagggttacttgtgaagggattaaagtggtggctccgacgggaaagaaggcgacgacggctacgacttccgccgctaagtgtaaggttgatccaagatttaagatctggaaaattactttctaaatatagtaaacaaaataatggaatcacattcttagttttttcttcattttctttttattactccattgtttcaattttcatttctttttaaatttgatttcatatacagttctttgattcctgtaagactttatttttttggtttatgtaaatgaagatataaatatttgtg

SEQ ID NO: 142763 - DNA, 494 bp, Arabidopsis thaliana landsberg
gtattttcagagtttgaacggtccaatatgcgaatttgtcagtgaaattggagggtttatgatgtttagttacatcaatggacacatccggtttgtatgaatcccatggctgaaaacaattccacttccaagctgaaccgtccggtttagtgatcttagtaggaggtataccccaataagtggatataactttaccatcggccgttcggataggattttctggctggttattcccacttaccggagatgacgtgtcagagctcaatagccgaacattgggcaagtggctaatgagatgtcccctgaatcctccaattcctaaaccggaggattgtaccgaagatgatagtaccggtcgaagagtgcggtaaatcgatctgtaggacatgagtaacaacagttggggtgtgatgtatcaacgagttttggtggtgagaatagaaatactaaaattatgagagatggtttaaggttatgattgatcttcagattgg

SEQ ID NO: 142764 - DNA, 469 bp, Arabidopsis thaliana landsberg
gtcaaaaacggctaattttctcagcctgagatccaatcctctacctccgattttctcctccaccggaaactctcctttcctccgagcttcctcggctctgaatcttccgacaactgcttcgaaacctttccacagttggattcgtgcttcttcacgtcgccggttggttctcggtggttttggcggcgcttctttgtggatgaacaacaatatgtccggtaaatttggcggtaaatctttcattgcttccgctaggcagaccaatccttctcccgtcgaacaggtctctttactctctttagttaattgttcaaagtttgtacctttagggattcagaaatcgaaatgtcgtttaattggtcaaagtttgtagctttatgaaatttgaactattttgcttggttttaggcgttgaataaggtggattggccagagactttccctttcaaagaagaagatttccagagat

SEQ ID NO: 142765 - DNA, 408 bp, Arabidopsis thaliana landsberg
aactgtctcctacggtacctgcacatagaaacagaccgcgacactattacttatttcttaattctgttttttaagggttttttctttctggcgagactacggctacgacgacgcttcttccgctttcgtatcttttccagcattttcttctccttcctcttcctcttcctcttcctccttcttccccttcatttttttcctcttcgcatcaattccctctggggacttcttcaagaagctcaccaacggctctccatcagacatttcatcaacagctttttccccatcttcattgtcaccattttcttcatcagcggttttactcttaatcttttttgaggtgatcttcgatattggtatctctttctcatcatcagatgaattgttttcaccattatcagagttgga

SEQ ID NO: 142766 - DNA, 578 bp, Arabidopsis thaliana landsberg
gtttttcgtctggtcccatagtgaatcgtggctcagatggcttcctagggtttgtggaaatcggagaggggaatacagatttgagatgcaaagtagctccagctccggtggtgacgaccttgaaaagcagcagcagcagcagcagaaggacaagtctccccagaagcagagcgagtcagccaatgaatcgaaccacctcacaatcgttgtctgcaatggagattctagtcgggaagaattggtgggtcagatcccaccggaaaaggaggttagcttatccagaaacggaagctcgcacgagcagtgcagggtttgtctacaagacaaagaagaggttttgattgaactaggttgtcaatgtcgtggtggtcttgctaaagctcacaggtcttgtatagatgcttggtttcgtactaaaggctctaaccagtgtgagatctgtcaagttgttgctgttaatgtcacacctcctgagactcaaccaactacaaactattgggtttggaggattgatcctagctatagacaagaagagcgtgagagaggatgctttagtccgctttgggttgcattttcga

SEQ ID NO: 142767 - DNA, 149 bp, Arabidopsis thaliana landsberg
cgacggttcgtcattcttcctctaagctttatctttctgatctctgaccttgtgactctgtgcatgtgtgtttatctgctactgtgttttgtcggtttgatctccaaaaaccagacatgaacagaggaagcttatgccctaatcccatc

SEQ ID NO: 142768 - DNA, 643 bp, Arabidopsis thaliana landsberg
atgggcatggttggtctaagagatgttttccttgttgctccggcttatcaccaccagaacgccggagtgatatctggatccgatcatatgaacagtaatgcagctgcggcggcggcgctcggtgtcggagtgattcctctactcacggcgggtccaccgcagcaaaacgtggaagactccgacattaacttcctcggaaacaaccggagatggcagaataacaacaacaaccacgaaacgcagtatcttcacttcaagagtactaaccagacaacggtcggaacgagctcgaacaactcggggtctggctcaggcgcatcaggaaccgccacgtgtcaagactgtggaaatcaggcgaagaaagagtgtaagcagaggcggtgtaggacttgctgcaagagccgtggctttgattgttctactcacgtgaagagcacgtgggtctctgctgctcggcggagagagaggcaggtcatgcctaccggcgctaatccaacggctggctcgtctctttcgacctcctccgggacgaagaagccgaggatcgtagggtctcaacaacaacaacaacaacaagccacttctcatacttcaacttctaacacaccacctcaaagtttcgagaccagctccagccgacaag

SEQ ID NO: 142769 - DNA, 539 bp, Arabidopsis thaliana landsberg
gttcttgactgtccggtttgcttcgagccgctcactattcctacctttcaggttatgttttgaacttgcatgcattttattttgtttcatgtgacattttgatttcgcttttgttaatttattttattgaatacggctttgattgtatctcgtttggtatattatgcgtttcagtgtgatgatggacatatagtttgcaatttttgctttgccaaagtgagtaacaagtgccctggtcctgggtgtgatttacccattggtaataagcgatgcttcgcaatggagagggttctcgaatcagcctttgttccatgtcaaaatactgagtttggctgcacaaaaagtgtctcttatgaaaaagtgtcaagtcacgaaaaggaatgcaactactctcaatgctcttgccctaacctcgaatgcaattacactggctcatataacatcatctacggtcactttatgcgtcaccatctttacaatagtacgatcatttcctccaaatggggatattccactgttgatgttctaataaacatcaa

SEQ ID NO: 142770 - DNA, 295 bp, Arabidopsis thaliana landsberg
tattatattatgcttgataaatttaaactttatgaattaataagcccaatgatgaagcaagcacatgcctaaatctcactaactctcatatatgtcataaagaactttgaagtttttaaactaagtaattgtttatccaaaaccaagtagacataatgttatgtctaaactgaatgggttttcttaattgaagcatgcaaagcattaaacaattaactaaaggctcttagtcaatactaatctactccttttttcttctagaccactgcaataatatgcattcatatcaactcaa

SEQ ID NO: 142771 - DNA, 445 bp, Arabidopsis thaliana landsberg
ccaagcagcttctctttggccatctcttcttgaagctgctttcttcctcaaattctttttttttccagattcttctcctttcttcttccttcttccttatttcgatttcgaattttgaattttctcaatggctcaatcgtgtcttaaaattgttcgaatcaacaatctaaggaacagagtgaatcgtcggattttgattctccgacgattcacacggttgttatggagtagaatcgttgcttgtactcctggcaaatctcggagatatctcttgctttctcgcgctcttccgtctccgactgtttctcgtccttctccttctccgatccccgccgtcgatgtcgtcgtcggtggtggtggtggtggtggtgagtttgttcgtcgttcgtcggttgtttacgataatgataacagtcatcggagatcggattctgatttggtttct

SEQ ID NO: 142772 - DNA, 133 bp, Arabidopsis thaliana landsberg
caaagcatgttcgatgtattaccacaagacataaccgccgacatctccggaggttacttctttattaaaaagaactgttcttgtcttactacgactcatcaatacacaacaaacacaacattcacaatcagac

SEQ ID NO: 142773 - DNA, 394 bp, Arabidopsis thaliana landsberg
tctagtaatcaattggaaggatgataaagaaatagtttgagtataaggaagatgtttaattgaatttaagtttggtttggaataagagcttcggagaaatgtacataagttttctcaaagaagtaaagatcttacataacgatgacatgtaaacatttgagcttcaaatacaatgatcattatattgttttgcagattggcgattgcattgaattagaaaccaaaaaaaaaataaaaaaaaaattatatgttctttacttcatttgtatggtccacttttagatcctttacttcatcgtgctctctacttttggaatttcctttgcttttctcctcttcatctactacatagaatcaaaaatgaaaacatcttttttttactcaatatttactc

SEQ ID NO: 142774 - DNA, 294 bp, Arabidopsis thaliana landsberg
gagaagccggtttcagatttgatcaattcgaagaattgtggctttcgttcgttgggtgaatccttgcttcgtcctttttgatagattgctactgtgttttcgaggaagttgtgtggagatagttagagagatttatgagatttcaagaggggttattataacgcacgcatggtgttcgacggaaagccgcagagaagttttgttgctatccgatttgactgagactcaaagtttgaaaattgttacttgggtattgagaaagctaaccttgggcaggttcgtatatgagttggg

SEQ ID NO: 142775 - DNA, 409 bp, Arabidopsis thaliana landsberg
gctcgattaatcaactactccaatagtccaactcccacatcacatgctttgtaatcatctatatatagaagaaacaggttaatttgtatgtgtatcttataatattttcactaacgaacaaattgagcaatcatcatcatcattaattcttcatacgtaagaagaagatagaaggagagaaaacaacaagaaatatagctggaagattcgtcacatgcagtttagttggtagaataaaacactttatatttgggagttttacaaaagccaatagaaatcttttttttttttgatgaatattgctatatgagttttaatagatgggtcatgaaacctaatgggtatttcgaagtacaaaaacataattcttaatggacttcattctttagatcagaatctccaatcctac

SEQ ID NO: 142776 - DNA, 421 bp, Arabidopsis thaliana landsberg
ccaaaactgagagaaactaaacaaattcaaatgaccaccaccgataaatccgccggaatcgtaactgactcggaagccggaccggagacttctcttctcctcaatcctcacgaaggatctaccaaaaaagctccttctgattcctaccacttcgcttacatcatctacttcaccctcggcgttggctttcttcttccatggaacgcattcatcaccgccgtcgattacttctcttacctctatccttccacggccgtcgatcggatcttcgccgttatctacatgctcgttgctcttgtttgtctattcgttatcgttgtcttctatgcacataagagcctcgctagctttagaatcaatctcggtcttttactcttcgtaatcgccttgcttgtggttcctgttttggatctggtttatg

SEQ ID NO: 142777 - DNA, 375 bp, Arabidopsis thaliana landsberg
tgagagagtctctgtctctgtaaaagatatttgagcttgagaagaacagaagaaacttccaggatcaatcaatcgatcaactttagtgaactaactcttgatttttcattcgaagttatggaatcggttcccgaatccgtaccatcgccgaactcgaatacaccgtcaataccaccgccggtgaactccgtaccgcctttcttgagtaaaacctacgacatggttgatgatccgttgaccaatgaggtcgtttcgtggagcagcgggaacaacagcttcgtcgtctggagtgccccggagttctcgaaggtgctcttgcccaagtatttcaagcacaacaacttctccagcttcgtcagacagttaaatacttat

SEQ ID NO: 142778 - DNA, 172 bp, Arabidopsis thaliana landsberg
atcctcgagtgttcatctattattgaataatacctctggagagtggagacattacaattaaaagttaaaatatactcatatatattggaatactgatatgtccattaatataaggaccgtaagaatgaaacaattcatcggaaaaataagcatttcaattttttctctacct

SEQ ID NO: 142779 - DNA, 321 bp, Arabidopsis thaliana landsberg
ccgaaggacatcttagcgaagagtattgtttcttatggttcagcatctaaactggaaccctaatgtgattgccactctatcttgtgtttgtaaatggtttgatgatctcgctaagcggttattgtggaaagaattctgtagagctagagcgcctaagatgatgagtgaccttcaatctagtggtagccatagtgttgatgggagttggagagcactagggaaacttttgatttactgctctggttcaagcaaaggtggactctttaatgatgttcaaatctctggtcattttgttcacagaacccgcttctctagaacatc

SEQ ID NO: 142780 - DNA, 295 bp, Arabidopsis thaliana landsberg
gtataggaaaaagatcaactattactaaatgattaaaagttaaagttaacaaaacgtataaagatcaaatttatcatacagtaacataaatttttctgaataagctcatatgagaaatgtatattacagtagctaaaaaattacactcttccatcaaaactaacttaacacattatttgaaataagttatcacataatcacacaatttgattcgtccgttacaaatctagagttcccatatggttgatagtaagaatttgcataggcaggattgtattggtaagggttgttcatc

SEQ ID NO: 142781 - DNA, 658 bp, Arabidopsis thaliana landsberg
  unsure (1)..(658): unsure at all n locations
aacaaagcagatttgcttcttctcgattctttgcaatttgcatgcattgctcatcaaaaaaattcctggctgggttttgttggaaaatagctgtataacttcaaatgttgaaactttgcttttcttcttcttctcttttggtcaaattttgtgttctctctagagcaaaaccctaattctctcaattctactcaaaattaatatctcttgcttccttgagaaagataaagatttgtgtttactaaggtgagagattctgcttccatatagatcattttgcattgtaggaattttccggttaaatcatggtttaggtattgaaattgatggttttttttagtcatcctgaggttagtgtcttcaatggatcttgatattttgattttgggtatctgggaatctttaaaaactcaatttttacttatttaggttgacatgtgaagaaatttgattccttaagctgttgtatatatatataaagattgcatctttgttaagnnnnnnnnnnnnnnnnnnnnnnnnntgatagttaaagtttttttgttcaataaaaactgcaacttgtgtggttctacaatatgatacttatcttgtatagaattgcttgttggctaggttgaggaaatgataatagcaaagcaatatcgttgcattcact

SEQ ID NO: 142782 - DNA, 327 bp, Arabidopsis thaliana landsberg
aaagaaaacaatggagaagaacaacaagaagcggtttgtcctcgtccatgggctgtgccacggcgcttggtgttggtacaaggtgaaaacgcatctggaggctgtaggtcactgtgtgaccgcggtggatctagctgcatccggtataaatatgactagattggaagagattcagactttgaaggattactgcaaacctttgcttgagttactgaactcacttggctcggatgacgataaggtgattcttgttgcgcatagtatgggaggaatacctgtctgtctcgcttctgacatattccctagtaagattgctactattgtttt

SEQ ID NO: 142783 - DNA, 390 bp, Arabidopsis thaliana landsberg
gtagacagtgctgtgcccaatgacgtaaatgttgaagttacaaaaatagatgattttgaagatatttttacacaaaacccttagaaatatacattatactttcttttctctaaacagacacctataagatatgaaataccatttatttgtgtttagtcttcttatgtatatggtaagctatatctttcatatagtctaatcagtgcatgtccatcaataataccatgcatgagccttcctccaactattcacaacaggagctgaatattaaactggcaaattgatgttctaccatatatacctattatatcacaaccagcatagtctatagtggttttactatagctaatgtaattagtactaattaaagctagttgttagaaaaacatg

SEQ ID NO: 142784 - DNA, 269 bp, Arabidopsis thaliana landsberg
ttttatatatgatatggataaaaacttttatggttgggatgagcgttctagttattcttctagttattccaataatgttgatcttttagttagctccaaggacattcgcaatttcatatcggatgacaccttttttgttagggatagtaataagaatagttattctatattttttgataaaaaaaaaaaaattgtttaagattgacaatgattttagtgacctagaaaaatttttttatagttattgtagttctagttatctaaataat

SEQ ID NO: 142785 - DNA, 115 bp, Arabidopsis thaliana landsberg
cagaatcacatcccaaggagatatattcagggttccttctcccagatttgtctgtgtagacaagatcagggttcttgctgatctcttcaagcacccatggaggcaaggggatact

SEQ ID NO: 142786 - DNA, 322 bp, Arabidopsis thaliana landsberg
caatatttgaatcggtcgataaggcccataagatagtatagatgggcccaagtttctttcgaggtgacacttgtgacttgtgatccgatgaatagcttgttttttttctttctaagataacctaatttgcattttgtttgttgatatctaatcgaaagctgctggataatcagctcccattttccctagtgaggaagtatgtgtcatagctaccaagggcactgatccaggttagatcaacctttgaacttggactacttaattatctctaggtctatgcataagtttgattggcacagtgattgtttaatttgatgtcaat

SEQ ID NO: 142787 - DNA, 403 bp, Arabidopsis thaliana landsberg
gcatcaatctcgattcggtcatcttctctgacttgagtaatagtcatatcgttggacccagaaacagcttcctttgtaatcactccacagaagcggagcttgcttttcttgctaatgggtaatctccggtgaccaaacgaaagaggggaatgaagaacaaaagaagaagacctgggaggagaacaagtggttgcagaggaagaagaacaagtgttagtcgtgctaggaagcaaatgaggaggtatagagagatttatagaagaaagagtcgtcatgactcctttttattttgacagagaagcttaaattaataattatatatttgtgaggatttgggtgtcgtcgtcgttataatcggatttttaacaaccgtcagagagaatctgaagaagacgaaagagag

SEQ ID NO: 142788 - DNA, 376 bp, Arabidopsis thaliana landsberg
cacgaatgttctctcttgcttttgtgatttgtaaaattctagaaacgtacaaatgctgaaagttttttttttctttctttcttttctctttgcgtattatttatatatctttgctattcactgattttataaattggaacttattgagtaagattccaaaactattaatcatagagattattgacacttcattatgtttttaatcatagacgtgtgggcaaaatgacagcaccttaaattatttattttgttacaaaatccataattaatcaactcatcttggttatttaattaagagcacattcattataatttttcttttgccagcactataaattttctttgggccaaaaacatttattaaattttgtaagat

SEQ ID NO: 142789 - DNA, 202 bp, Arabidopsis thaliana landsberg
aaacaaagctttgcaatttattggtgtgggggcaaaagcaaatttgttcttgattcatacttttgagagctttcctatctggttacaacctcatgctctcatctaagctaaggtagaggtaaagggtcgggtatggatatagcaggtaaactgtcgtgcatatacgccatgacaaagaaggacaacatgccgatggaaagga

SEQ ID NO: 142790 - DNA, 264 bp, Arabidopsis thaliana landsberg
aatgttatcacgatttctacaataagaaaaatccacaactgtatcatatattcgagcatttgttgatcggtttcaggaaaactctcagaattggcgttccatcaagaccgaatcattgtttcctatgtgacttcttgtgctgtttcgttttggaagacacaagtccatttgcaagatcaaacgagctaagatcatctagaacttgatcaagaccaagactaggagcttcttcacctttcttctcagtctgtgaaccttctcttg

SEQ ID NO: 142791 - DNA, 571 bp, Arabidopsis thaliana landsberg
gctgcagattgtcttgaggtttacgacttttggactaatctcctctgtggagagcaatgactaaaactcgtgggactgatgtaagttttgatttccactgttaactttttatcatctaatattttgttaatctgccattgtaagtcttgattctatagtttttatgaaacttggactatgagtccttagtttattatttgtcatttctccaaaagggcttttttctgattgtgattggttttggttattgttgtagatgacaaagaaaaagggtaaacatgtttctgaaatggatttcaagactcatcagcatactgaatttttcgataagttgatagagctcacgcctgctagattctacttacctgatgagacagaaaggaaatggtatccaggtcttagcaaggctcaaaaagctagagccaagaaaaaaacaaatgacaacctaaagaaggcgaagagagataagttggacccagagaagtctgctttgacgactctcgatttactgaaggagaagatagacaaggaaagattggcttcacagaagcagaagcttaagaagaaacac

SEQ ID NO: 142792 - DNA, 660 bp, Arabidopsis thaliana landsberg
  unsure (1)..(660): unsure at all n locations
tttaacattcttctccaatctctctacaaaccctaatctcagcatncgatctcgctgcagaagagcttcaatttctcaacattcaaggcatattacgtgaatccacaacaatccccaaattttccccaaaaaccttctacctcataaccctaaccctaattttccctctctccttcgcaatcctcgctcattccctctttacccaaccaatcttagctcagctagatgcaactcctccttcagatcaatctaaaaccaatcacgaatggacccttcttctcatttatcaattcatctacgtcatcttcctcttcgccttctctcttctctcaacagccgccgtcgtcttcaccgtcgcttcgctttacacgggaaagccagtttctttctcttcaacaatgtcagcgattcctctggttttgaagcgtttgttcattaccttcctttgggtttctttaatgatgcttgtgtacaactctgtcttcttgttgtttctcgttgttttgatcgtagctatcgatttacaaagcgtgattctcgctgtcttctcgatggttgtgattttcgttctgtttttgggtgttcatgtttacatgactgcttggtggcatttagctagtgtagtctctgttcttgaaccgatttacggtatcgccgcga

SEQ ID NO: 142793 - DNA, 645 bp, Arabidopsis thaliana landsberg
aaccaaaccaagccaaaataaaattatctctgaaacaaagctttgatacaaaatccacctcaatctatagccaaatgaatatttcaatatccacctttccaattcgaagtcacaccataactatgcttatacaaaattcactaccaaaacctcgaaagtcaatagaaatgaagaagagtatttcacctatcagttcctagtttcaatctcttcctcctcctgctctgccttgaagctttgcgagtaatgataagaagagtcttctttagttttgtggtcttttagtttccacttttgtatttgtaaaactctaacatctcttcttccacgggatgagtctcgcctactatcacaagacaatgcaacggtgctccaaaatcaacgctttcgagttgcttcatcgtccctgcaactatcgtctggtcctcagagccaagccgggcaaagcccacacactgtgtgtcttcaccataaacagaatctccatgcttttgctcaacttccagaagctgctcgattgctgtattaacactcatatacctcggcggttcatactgtttcttccctcctctgcatagagattcaaaagtaggctccttcactcggatatctagcaaacagagagtgtgaagtccaagagagcgg

SEQ ID NO: 142794 - DNA, 278 bp, Arabidopsis thaliana landsberg
catgagagccagactgcaaccgttcaagcacagtgtaggtaatagaatccggtgtgagtccttgctgtttcatctttgagtatagatcaactgcttctgcggttctcccgttcttctctagacaatcaagcaaaatgttgtacgttacaatgtttggttgacaccctttaacaagcatctcttcgaacaaactatacgccatttcgactctctctgttttcccaaaacattccatcagagtgctgtatgtgaccacatcagggtttaatcctttttct

SEQ ID NO: 142795 - DNA, 282 bp, Arabidopsis thaliana landsberg
ttgtctaataaacaaatttatttcattaatcttccaattttgggaagaaaaaaacaacactatgaaattacaaaggaacagaacatctgcaatataagtctatcccccaaattaattcagattatgcaaaagctaatacaaacactatagaaaattacaaacattacaacttacaatgacaaaccgcaaaaccgtttcttcttcatcatcatcatccaatccatttaacgattaaatatcaaagtttctccatctgaatactgctctttaacggcacatagt

SEQ ID NO: 142796 - DNA, 361 bp, Arabidopsis thaliana landsberg
tcttttgggtccctaaaaaagctccttcctttatcttgttttctaagttatctttttgtatgagtttcaaagcttatcattatctcactcttcttccatagcaatgactactttaacgaagattcaagtgtacccacaagtcttggagcaccgtctcttcttcagagatccgatacgggtcgggtcaagattgacttgtagagaacgtagtaatagggtttatgtgcatcggtgtgagaaaaaagttgaaagaaagagaaaagttgagaaatttaagggaaatgggtcgtgggattctttgaaatctgggtttttagggtttagtaaattagggttcttgtctaaagatgagtataatcag

SEQ ID NO: 142797 - DNA, 290 bp, Arabidopsis thaliana landsberg
gtttcctctctcccccaccattctttctcctctctccgcttcttcttcttcccctgttcctcttataacccctctcgtctcatgtctacctcctcctcttcttccgacaacggagccggtggaagcggcggcgttttcgaggccccatctccatcccgccctcgccgcggagccaacgatgtttggccggagccttttcttgaatctctcgccgttcaagttgccgttaacgcttccacatccgccggcctcctcgccgcagctccggctcttgccaacgtttttcgggt

SEQ ID NO: 142798 - DNA, 532 bp, Arabidopsis thaliana landsberg
gatctatgccatggttacaaaagaggacaaaaaagctacttggagcacatatgttggtgaacagagaacaagttatcctaccgcaaagaatataatattcaacaaaacaaaagtggatggacaatataatttagtacgcagcataatatgagatacatatcaataagaaaatgccatgacatgctcaataagtactatggagaatgaaaattcaacatagtatgcagaagaataattagttaccaattggttggtattagcaaggccaagaccttcacccgatgctaaaaacacttcattggcaagtacattcgggactccttcaagatatggcgcaatctcagaaggtttaaagaaccagagaagcttgactttctttgggatatgcttattagcgtgttcccaaatttttatgatcatgacaatgaagggttcagtagagtctggttcactggcattgccaactaaagacacagtcataaaggcggtattcatcgccatcataggtgaaagattcatagaactggacatc

SEQ ID NO: 142799 - DNA, 1335 bp, Arabidopsis thaliana landsberg
tcgcgagtccagtgagaaaaaaagaataacaatccgacgagaaagaggaaagatcaaatcatctaagtgctggtgccttgattctgcagttctccattttaatccaacaaaaaaagaagctgaatcgacggtataggtgaatacttcttcacgactttttcaaacactcagaaacttctcttcctttcacattgatttattcctaattttagtgcgattttttccttttttttctcagaagtttatcaatcttgttaggtagatatttactactagtttgttttttctactaatttgctgaagaaagtgttaatctttggttggtttaaggtataaatttgcttacatctactcaaatcagctaacttttattttggtttggtagcttaaagattcagtcaaaaaaaactttaatctttgttttcctgcaaaaagcaaaagtgtttctgtaataaaacacctttttgcagagaatgttaaaagattctctagttttaggctttatgtaaaaacgatttttttgctgggtgttctgtttttggatctgtgtttcttttttgggaagatccacccaatgaaaccaaatctcacattacaaaatgacaagaaattgtctcttcttcccaataattccaaaactttgatttagtaaaaaataaaataaaataactgggtgacttaacaaccagaaagattatgtgtaagatattggtgctttctttgcttgtaatagggtttatctttggtgatttgatgaatcacattgacggcaacttcttttctaattacacttctaaatattttatatatttggaattgttccaaatcattacaatattcatttgttgtctctttgctttcgtttggtggtaataggagtctctttgaagctaaatgtgtaaatattattcttatgtttttttcgtacacttgcttaagctttctttcttccctgagtttggttgtctatatgcttatgataagtttttttttttccctctgttgcttctttctcacactttccattggtcttcatgtactatttgtcagattcttcaaagaagcaatcataacgcaattgattatatccccaaaagaaaaggtttttaaactccaaaaatgcagactccaaaatcaaggtgatgatcacaactctaactttgtgttcttgttgtgaatgttgttggagttattgatctgtttcaaagtgattgtgattgtgtgtgataggccaggatcattggagctgccacaaaagaagtctcctttaccaggtcccaaagttgttaggagactcaaaccaagcggagcagaatccgatccaaaaaccaagac

SEQ ID NO: 142800 - DNA, 495 bp, Arabidopsis thaliana landsberg
tacgtgaagacgtagctcgtgtttatttccagcaattgatctcagccgttgatttctgtcatagccgtggtgtttatcaccgagatctgaaaccggagaatctcttgttagatgaagaaggtaatctcaaggtgactgattttggtctctctgctttcactgagcatttgaaacaagacggacttcttcatacaacttgtggaactccggcttatgttgcgccggaggttatattgaagaaaggatacgacggagctaaggcggatctgtggtcttgtggtgttatactttttgtgcttcttgctggttatttgccgtttcaagatgataatcttgtgaatatgtataggaagatttacagaggagatttcaaatgtcctggttggctttcttctgatgctagacggcttgtgactaagcttcttgatccgaatccgaatacgaggattactattgagaaggttatggattcgccttggttcaagaaacaagcaa

SEQ ID NO: 142801 - DNA, 580 bp, Arabidopsis thaliana landsberg
tcgtcatcttccctgttttgctgtttagtctgcaagagaaatttcagattccggcggagaaagctataacgattcttcaatggatcccacttcttcttcttcctctgctcttagatggaaaattcttcgccaagcgcttctcagtagatctggttgatactcccctactccttctccttcctgcatccacttttcgatttcacacattcgcatagctaatggatcatctttcaattttcctcagattctcaatctcaaactgagaccaaacggatttcaaggaaagcaactcaaggattcaacttgattccttgtcaagtggtggactcttctcctcaatcggataagtctcgtgaagcatccgtttgctacacacttcccatcactggctctcccaaactctatctaacgttaggattttgatctgaagttttcatcaaatgaaacaatgttatgttttgttcgatagatttgccactcataagagcttctttaaaatatatgcagacaaagagtggataattgtagtgatctcaatgacttcgagatatctaatcgatacaacattgataatactgga

SEQ ID NO: 142802 - DNA, 370 bp, Arabidopsis thaliana landsberg
cagaaactgaattagatcagctcatctgagaagaaaaaaacaaaaggagagaaataaacaaaccctagatcgtttgttgagaggaccatgctcttcttctaaatcatcttcagcaatctccaatttcaccggtagctcatctcggcacctggccgccgattcagactccggtcttaaacctccagatttcctcatttccaccatcccccgaaaaaacaaacctttccttctcaaaaactcaaattcagacaaaattcggataacccacaaacgaaatcacgaaattattccacaaaaggatttatttatctggaacgcgaaagagaatcaaaagcaaaccctagaaatcagagtataaaacatttacggg

SEQ ID NO: 142803 - DNA, 515 bp, Arabidopsis thaliana landsberg
agataatggcatcaattctcaggtcagtggcaacgacttcagccgtcgtagccgccgcctctgcgattcccatcgcgatcgccttctcttcttcttcttcttcttcctctaccaaccccaaatctcaatctctcaatttctccttcctctcccgatcgtctccacgtctcttgggactttcacgaagcttcgttagctctccgatggcgactgctctcacttctgatcgtaatctccatcaggttttggtttaaagctttgaacttttgaaataccctatttccaatttgagctttttcgctttcctgattcgatgattaagtatttaagtagctgaatttgatttgcaggaggatcgagccatgcctcagcttcttgtaagtctttctcgtaatcctgtatctttatacaacaatttttggatttgagctagtgagaacttgtgttgtgtgttccagactgagtttatggtggatatgacatgtgagggttgtgttaatgctgtgaagaacaaa

SEQ ID NO: 142804 - DNA, 419 bp, Arabidopsis thaliana landsberg
ctgtctctcactttccttcattatttactcattgcccaaaataattcatttatcatatcctcaaacttttttttttctatacctcgaaatccaaaaaaataaatacattggtttagtgtggcattgatgtttttggtataaagctcttcaccaatgatagcttcagagagtaccaagagctgggaactagcgcagtcagacaagagaatgaagaagagaagaagaaaccggttaaagattccggtaagcatccggtttatcggggtgtccgaaagaggaactggggaaaatgggtgtccgagatacgtgaacctaggaaaaaatcccgaatatggctaggaacgtttccttccccggagatggcggcgcgtgcacacgacgtagccgctcttagcatcaaaggacctccgctatactca

SEQ ID NO: 142805 - DNA, 760 bp, Arabidopsis thaliana landsberg
agagtagaacatctcatgtcaatattgattctctgcttggattctgttatgaaaagaacaagagagctataatctacgagttcatgccgaatgggtccctcgacaagtatatttctgcgaatatgtcaacaaagatggaatgggaaagattatacgacgttgcggtaggtatctctcgcggcctagagtatttacacaatcggtgtgtcacgaggattgtccatttcgacataaagccgcagaacatactgatggacgaaaatctttgtcctaagatttcagattttggtcttgctaaactctgcaaaaacaaggagagcatcatatcaatgctgcacatgagagggacctttggatacattgcccctgaaatgttttccaagaattttggagcagtttcgcataagtcagatgtttatagttatgggatggtagttcttgagatgattggagcaaagaatatagaaaaggttgaatattctgaatctaacaatggttcaatgtactttccagaatgggtctataaagattttgagaagggagaaatcacaaggatttttggaaatagtataactgaagaagaagagaaatttgcaaagaaattggtattggttgctctatggtgtattcagatgaatccatctgaccgtccaccaatgatcaaagtcactgaaatgttagaggggaatctagaagctcttcaagtaccacctaatcctctcttgttttcacccgcggaaacggttccagacactcttga

SEQ ID NO: 142806 - DNA, 170 bp, Arabidopsis thaliana landsberg
gctctctctctctctctgccatcagaagaaaaaaccaaacaccgagacaaaacacatcacgaagaagagagagatttgccattttcggcaaggaagtgttttattctagggcttctctagttgctgcgtagacaagatggtggagtgaaattgcggcggtgacttttcag

SEQ ID NO: 142807 - DNA, 318 bp, Arabidopsis thaliana landsberg
gtgatattcacggaagagctagaggcaaaagacctgaaatttctagtagcaggtaatattttttccttatcttatattagatgtttgaacagatacctaaaggatgatcccttcttcttttctttttttgtgctataagagtttctattctttgtattaatgcaaatagggtggcgagtagagatggcttggaggggtgggttagtacgcgtaaccgaaatttaaatatggaacatgaaatgaatcatagggatgagagtaacacacgcggaatttgtagttctgttaccagacttgatgtgcgtgaaaccggtgtag

SEQ ID NO: 142808 - DNA, 428 bp, Arabidopsis thaliana landsberg
ttagacgcaagactatgcgaatacatttccggatagatattcattacaggacagcatagaggggactagaggtttatagttatatatccgtgtaggatttaataccatgaccaacttttcttgacattgttagatgccattatttgtctaataagagtgtagatagagcatatgtagatgacagaagagagagagcgggagggtttatctgatctgtggtcgcttgaatgatgagttggtcataggaagtttcctgtctaccctgtttctttcttgagtctggatcagttgaccgctaaaccctctccggcctgacccttctccaaaactgtcaccagagatcttcctcctcctctcattgtgtccagctaagcgcctcctgcagcttcttttagcttcatcaaactctggtagctcatgaaacctgc

SEQ ID NO: 142809 - DNA, 532 bp, Arabidopsis thaliana landsberg
ggcagtcgattgatctttatagtagtgtaccgtctcccgttatctgttttcttgggaataattcgatgacgagattcggaagctctttcttgtcttctggtttgataagaagacatactccggaatcattacctactgttacaaaacctttgttagaagaacaagcagatgaacaagcactaccaaaacatagacttagctctcagggcttactctctcctattccttcgaggaggggttcgatgcgaaaggatgagaaatcatccatggtgtctcatgagattccaatgtctcgtaatagctcatacggacaagctgtactaaatggtcagttcatcttaatgcttgagttaaaatatcgtgtcttctcttcgttaaaagtggttaaatagttttaagagattctctgatgcttggcttgatgagagtagtaacgatggtagagctaattgctgctttcctagaactatagagctgcaatattgattgcaattgtgttcattcaccgttaaatactaatgaaaatatgtca

SEQ ID NO: 142810 - DNA, 422 bp, Arabidopsis thaliana landsberg
gcttattgttcccaagattcaagcctcaggagtgagtttatatgccttaactctcttttactcccattcttgctaaagcctctaaacaacactaacttccttccaatgcgaatcaatttttttgcagatgtgtcctgtggtagggatcttaaccagacaggacctaagggcatacaacattctacaagcctttcctctcttggaaaaatccaaaggtggaaagacacattgaaagagctacttgcttgttgtaagaaatcgcttgcagccttgtgtttttcttctcattcttaaagatgtatctgtccagttttgcactttttcttcatatccaacagaagttgataagataaatattgcaatgacacaaaaagagagactcatatctccttatcaacaggaacagagcaaaactgtttcca

SEQ ID NO: 142811 - DNA, 204 bp, Arabidopsis thaliana landsberg
cgtttttggatcatcctccgcttttggaacaacgacaccatcaccgttatttggttcatcaagcactcctggatttggctcttcttcatcaatctttggttcagctcctggtcagggggcaactccagcatttggcaacagtcagccatctactctgttcaattcaaccccttcgaccgggcagactggttctgcgtttggaca

SEQ ID NO: 142812 - DNA, 240 bp, Arabidopsis thaliana landsberg
gaaaaagcatatattaccgtctttaagcttgaaataaaaggaaccataaaccatttctccttaggtttaggagttgttgccacatggagagctccctaggctcttcttcattagtggccaaaaacatctccatttctttttttctttttttaagttaactatgaaattttaagattatgtgacgtatcattcgagaagtcatatggtttatgttgactgcattagctaataaaactctat

SEQ ID NO: 142813 - DNA, 466 bp, Arabidopsis thaliana landsberg
aacctgcaggatccattcatgattttggagatctgtttatcaaatctcaggttattaaatctccacttctcgtttaattctgttcttagcccaagttggtttaaaaatctagagttttgatcgcaatttgtgatttttgatttcagatcagaagcttctacgagttgattatatgctgtgtttgcagatctgggtttggttatatttctgagtaaatctctcacccaacaccatgtgtgatcaaagaccaaatcttttagggtctctcgtgttgttgggtttcttcatcttctttgtaaatggagaagaatgctctaattcgagctcattgattgggcatgagtctgagttcaagatgttgcaacatcagcttcgtggggttttcactgttgtcgatgattgttcgtttagggtttctcgttttgatatgctctctggttccgaggttcattggtggggtgctatg

SEQ ID NO: 142814 - DNA, 259 bp, Arabidopsis thaliana landsberg
gggtttgcttttttgttgtgtcaatgaaatgggagaaatggagatcgaagaaatcgaagctgttcttgagaaaatctgggatctacatgacaagcttagcgatgagattcacttgatttcgaagtctcactttctcaaatcggttaaaccttcaaatagatcggagaagagaaagaatcctcacggaaattccggcgaagataagcgacctggttatgttttcatcaaaggattcgccgtcgatgataacgactccacg

SEQ ID NO: 142815 - DNA, 352 bp, Arabidopsis thaliana landsberg
taatgggagacgcgggttttatgcccgagctagttaaatttctcgacgccaaatcgatagatgtacgagaaatggcgagcgtggcactgtactgtttgatctcggttccaaggaacaggaagaagtttgcacaagacgactttagcattagctacattctccagttgctagaccatgaagatgggagcaatgtgagcagcgattcaggtaacacaaagtttttgatatcgatattgatgtctttaacgagctgcaatagcgcgagaagaaagattgcgagttcagggtatttgaaaagcatagagaagctagcagaaactgaaggttcagatgctaagaaacttgtgaagaa

SEQ ID NO: 142816 - DNA, 420 bp, Arabidopsis thaliana landsberg
atttttcataagcataatcactcaaccaaatactgatattctaatttctaagttaatctgtttccaaagaattttatattcgtctcccaccaagtatagcatttgcttttattttctgtgagagaaaaatacccttaaacacccctaaaccggcacctttattatcagattactttgcacaactttagtttcccgttcgaactataactccaacccagaatggcaaccgtccaaaagttacccaaaaaaggttatcaaagatttcatttcctaatatatggtctagggagaaagaaacaattagataccaaagagggctcgtaaggagaaaaacaaaacgtgtgtaagcacagcatggaaattgtctgacctttttaatattttgcagtaaactattagttccattgctctgcatcatat

SEQ ID NO: 142817 - DNA, 383 bp, Arabidopsis thaliana landsberg
gacgatctagaccaagtattcaaaagggttttgagcctgaaaacagagaacaaagatgacaaagacgctatagcccagtgtaagttgcttgtggatgaagctaaagaagaacttggcacctccatgaaaagaatcaacgactcagaggttaataactttgcaaaaatagttcccgatttggacagttggctaagcgcagtcatgtcttatcaagaaacatgtgtcgatggatttgaagaagggaaactcaaaacggagatacgtaagaatttcaattcttctcaagttttgacaagcaattcactcgcgatgataaaatctttagacggatatctttcctcggttccaaaggtaaaacgcgacttcttcttgaagcaagatct

SEQ ID NO: 142818 - DNA, 368 bp, Arabidopsis thaliana landsberg
gactttctctagttttcgtctctgttttgcattgaagtttttttctgttgacaaaaaaagaaagtatcttccaagaaagaaagaaaaaacttacaaaaggatatattgtgaatggagtccatgaaaaaaagtctgttggcaaaactataaattatcctttctaaatagctgtttagaggaaacaccaggaaaagaagaaagaaacaaaacaatgtaatcttagaggcaagcaagccaagcaacctggcctagaaatgcatcaaccatcttgtttgatattcgaagagcatcttcagttttcccggcttttagatatgcatcaatcattgttgtgtatgtaaaaacatcaggaggcaccaatctgtctg

SEQ ID NO: 142819 - DNA, 356 bp, Arabidopsis thaliana landsberg
gtcagattctctctctatctatccctctcaatctccatctgcccatatttcttgctgtcaacaaattcattcagcaatctcctttttccccatcaacaacaaacaaaaaataaagtcctttcacaacaattatatttagaacaaattcaccaaaaacccttccacaaaaaacctctcttcttcaacaatgtcgtctcgaaaccaaagatcaagaatcacctctagtttcttcgtctccttcttcactagaaccattcttcttcttctcattcttcttcttggtttctgcaatggagcaagaacaaacacgaacgtcttcaactcgaaaccacacaagaagcacaacgacgccgttt

SEQ ID NO: 142820 - DNA, 270 bp, Arabidopsis thaliana landsberg
catcagaaatccagattcctagtttgatctaaaaaaacacttttacacatatatcataaagtttaaagaaatggataatcataacattaacctcaatgttaactcaatctcacactcacaccgaatctgaaacttgtggtgcagccatgttaaccgccactttcccatccggtccggttctgagatcggtcatgccactaaccggttgacccattccctggtactgctgctgctgctgctgaggctgggctggtggcggttgaaccatca

SEQ ID NO: 142821 - DNA, 155 bp, Arabidopsis thaliana landsberg
cgagccttttctcgttcggcggtcgttttccaatcatcaactgccgcgtgtcagctcctgcttcggctcccttcgtcgcttccgttcctctcccgccgtcaacctcctccgactcactagcttgctctctccaatgtcctcatttccaatcgtac

SEQ ID NO: 142822 - DNA, 422 bp, Arabidopsis thaliana landsberg
ccatactgcatcttggtcccattctcttggcgtttgctttgcatgggacaatggtggtgattgtgcttcacttaccaataaaaacaatcagtctcatcagccagtcctttttccctctccaatttgggtaagctcctctggaccttaccacataatgtttctaatttctcgattcttgaacaaaatgtgcctaataagggatatgcagggtgtacgaggatgagtttgtgtttggcttacttgttgcttatatgtgcctagtaatattcggtccccggtggttagccaatttaattagaccatccatcagacccatagttcacaagtgggttatcactatcagttctttgctcaagttgagtgatttcttgcttggagagccccgaaaacaccgtgcaaatcataatatgagacttcggtgt

SEQ ID NO: 142823 - DNA, 422 bp, Arabidopsis thaliana landsberg
aaaaaagattcttcaaaagagcaaaaaaatcaatggagagagcaaagtcgaggaagcctcatatcatgatgataccatacccacttcaaggtcacgttatcccttttgtccacttagccatcaaacttgcttctcatggcttcaccatcactttcgtcaacaccgactccatccaccaccacatctccaccgctcaccaagatgacgccggtgacatcttctccgccgctcgcagctccggccagcacgacatacgttacaccaccgtgagcgacggcttccctttagactttgaccggtcactgaaccatgaccagtttttcgaaggcattctccacgtcttctctgcccacgtggatgatctcatcgccaaactctcccgccgtgatgatcctcccgtgacttgcttgatcgccgacacg

SEQ ID NO: 142824 - DNA, 534 bp, Arabidopsis thaliana landsberg
cggatggggtcacctccacgaaaccacgatgaaaactgtatgtttttgtccttttgaatatttgcctgtttcagtgctgatatgaatgtcagctggtagtcttacactaccttggcccctaaaatgtggcctgtagggttaatattatgaagttgctccagtgaaacatgcaaatagtggaaagaatcatgtgtttaagattattggttgctatgacgtacctgtgttgagtttgatagatgatattctcagttctaagctttagtcattgtttcagatgacttggtaagccacagatcaaatagagacccaagccccactggaagtcagaaaggaggtgattcttcagcccagctttcatcttttcttttgcaaatgaagcgaatctcattcatgtgtcttatcatatcaggaagattccagtcactcgtcataaatagggagaggagaggaagattttcaaacttcgagggtcctgtttcaaatttttcaagtggaaatatgcctgctccaaacatccgcccttcaaatatg

SEQ ID NO: 142825 - DNA, 306 bp, Arabidopsis thaliana landsberg
tggtggaagattggcgttcaaaggaggagatctagcgacaaggaaatcgatcgaaaagaagaagaagaagaagcagaagaagaacaaagaaaagctcgacggtgttgaggatggagcgaagacagctcctgacggttcaccccctcccgccgctgccgctggagatgaccatatatactcaattgatgcggcgaagaagaagaagtacgatgacctatttcctgtggaggcgaagaagttcggttacattccgaaagcaaatttcgaatccagggaagatgctcttgacgatcgcgtcaagaagaa

SEQ ID NO: 142826 - DNA, 385 bp, Arabidopsis thaliana landsberg
gttaattgcccaataagttgtgtgagttgtctaatctttcaaatcaaacagcccgtaaagcccataaagtcgcaaatttcgcattccaaagtttttaagaatggagaaacgttcagattcagagagtgtagagattttgggtgattgggattcacctcctccggaagaaagaatcgtaatggtttctgttcccacttcaccagaatctgattacgcgagatcgaatcaaccgaaagagatcgaatctagggtttcagacaaggaaacagcgtcggcatccggagaagtggctgcgaggagggtgttgccgccgtggatggatccgtcgtatgaatggggtggtggcaaatggaaagtagacggaagaaagaacaagaacaagaaa

SEQ ID NO: 142827 - DNA, 424 bp, Arabidopsis thaliana landsberg
atctcactcgttaccggtggatcctcttctctcgggagaagagtcaccgggactctgtacggacacaaaagaggccacgtcacgttttcggtccagtacaaccaaagatccgacccggtcttgctcctcgacctggccatgtcaacggcaactctcgtcaaagagatgtcgtcggggctcgtcaggatcgcgttggagtgcgagaagcgtcatcgatcaggtacgaagcttttccaagagcccaaatggacgatgtactgcaacgggaggaagtgcggctacgctgtgtcacgtggcggcgcgtgtactgatacagattggcgcgtgttgaacacggtatctagggttactgttggagccggagttattccgacgccgaaaactattgatgacgtgtccggtgttggtagtggaacggagcttg

SEQ ID NO: 142828 - DNA, 418 bp, Arabidopsis thaliana landsberg
tgttctaggtggattcttaagaaaaagaaggaaacgaaaacagaggaataacaatggcagggagaataagctgctgtctaaatcttcctcccctagattcaaattctgcacaatcattagcttcactgctcaagacaacgtcaaagatctcttggtatctcttctattcatgatatagttattatttacctgatcatttttcatatcaatgatctttgttcttttattgtttagtaggagaacagaaaatgagacagagccacggaaaaacaagtgttcttttgtcttgggggtggcggcaactgtcgtaatcggcgggattcagatcaatgatgttgcatcagtggaagctgcggttgtgaaatcgccggtagaagagatggctgcgggtgtggtgccgccgcggaggtggagtgac

SEQ ID NO: 142829 - DNA, 263 bp, Arabidopsis thaliana landsberg
tgggtctagaactttggataatattataataacgggtccagatttcatttccggttaaagcatttttaaactgtttaaatttaatacacaaaaacactacaaacaaccactagcaagtagcaatgcttataagggatcactcaagtggattgaggttgtatataccaataagtagacacacgaaatatagctccggtaagctggaaaattgagcaaaccaaactgtatggttaatgtcagtcatctccccaagcatcttcccg

SEQ ID NO: 142830 - DNA, 208 bp, Arabidopsis thaliana landsberg
aagtaattttagttttcttttatagaatgcccttaaataaactaaaaaagaaaacgacaaaaaaaaacagggcgttgagtttgttttcattatgtttgatttctctgtcattttctttaatgtgtctagcgagtctgcctttgtcccaatggtttagtatctgcatgtatccacggatctctatttgtcgacgaatgttatttacaat

SEQ ID NO: 142831 - DNA, 405 bp, Arabidopsis thaliana landsberg
tactttaaatcaaaatgtcccaaagaagaagaccaattttccaaagagtttcgaaactactaaaaatctcgatcttgagaagacccatcatcccaagactcaagctaattcccataaaacaaagaagatccaaaagggtcaaactccttcagcaacacaactataaatttctccaagagtatcaattctctccttcaagtacatcctttatcaaatgctatgggaagagcattcagatatctagatcgggtcttaaacgcatttacgggttattgtttctttctcagtgtatcggccggtataatgaaaatgatgacacaataacgcaaagttggatggagatggagccttttcattatgccctcggagttgcttctcctgcaagggagcatctgcagccgttcg

SEQ ID NO: 142832 - DNA, 1193 bp, Arabidopsis thaliana landsberg
ccgcaccgcctccttctccggttatctcgctactaatcagactattccacagctatgtcacaggtaacaacactgcccactatattccttgttcccgtcttatagtgaatatcgcagatctgacactgaatcgtcaccggagctttgctttgtgattgattctatggttacaattactagaatagtatcgaatcattcaatttcttaatcagttttgtagatccttcctcgtatcgtttgatctggttttgattagtgtagttcttgacttatatttcctctggatttttaggtagacaacagaaattcatcagcagccaagcgtgctagaactgacggtatgacatttcttaccttcgaatccatatatacccgaagatagtgtttctgtgtgtacattgtttccaatgtcttgcatgcttttagtagtggaaaattttatcctgtgtaacattggcaatgttgtgttatttcggttatattgagtctatagtcagtttctttcagcgtatatgtttataaagggtttttgattttagactaccaatatgaatagttgtttggtttattcttttggtcgtggataggggggcgtagagaagatgattggatctgcccaagttgtggcaatgtcaacttttcattcaggacaacttgcaatatgcgtaattgcactcagcctagacctgcagatcataatggagtaagttattttgtgttgcaatatcgaatatatgtctttctgctttgaaacagttttgtgtgcaaagcagtcattgacttcttgacgggtttagtagatagagctctttgaggcacacatgtatagagacttaggatggtgagtagttttgattaggattttcaggtgtttgttatgaaaataaggaatgaagtggaagattagccttagtgctttgtccagtctattggcttttgtacttagattttgtttaaggaaatagaagagattctttcaaatctagaagccatttgtttgttatcttccaacaagagcagcaatacgaagattaccagtgggtattcagtttaaacaattatctacttagtttttgatgacctatttgttgcacgtctgtaacagaagtctgctcccaaacctatgcaacatcaacaaggtttctcatcacccggggcatacttaggatgtgggggtccccctccagtatata

SEQ ID NO: 142833 - DNA, 516 bp, Arabidopsis thaliana landsberg
tccaatcgtcctccctcgtcctgaatccatccatcatccactctcctcttaaaaatcctatctttgtggtttgcaatctctcccacgacgcgcttcatcattcatggctatttgaatctctcttctctctctctatcaaatatgcaaaacccttcaacggtaacccaggaatcagccgcaccggtctttgatttcttcccacggctcagaggtttaacctctagaaatcgatccccgtgttcgaattcagatgggtatgctctctcatcgtccaatgccttgtacttcaatggtttccggactttaccctcccgaaggatgggaaaaaccctagcttccttgagcttcaacactaagagcagtgctggttcgagtctccgtaggtttatcagcgatttcaatagctttattaggtttcactgcgataaagtggttccggagagctttgcctccgtcggaggagtcggattatcgagtgatgagaatgggattagggaaaatgggactggtggggtt

SEQ ID NO: 142834 - DNA, 569 bp, Arabidopsis thaliana landsberg
caaaaaggttttctcctccatcaaaatcctccgacgatgacaaccatagctgcagctggcctcaacgtcgcgactccacgagtggtcgttcgacctgtggctcgtgtattaggtccggtccggttgaattacccgtggaaattcggttcgatgaagcggatggttgtggttaaggctacatcggaaggagagatatcggagaaggtggagaagagtatacaagaagctaaggagacatgcgctgatgatccggtgagcggggagtgtgtagcggcttgggacgaggtggaggagctgagtgcggcggcgagtcatgctagggacaagaagaaagctggtggctccgatcctttggaagagtattgcaatgataatcctgagactgatgagtgtcgtacttatgataattaaaaaatatgtttttgatgttcgaattatgaaactttaggtatggatcaatgtttgttcttcttgtcccttgttgttatgtttgtgtttttggtttggttgatgattgtaatgtgataaatgaatatgaatagtacaatacacaacatatgtttcataat

SEQ ID NO: 142835 - DNA, 401 bp, Arabidopsis thaliana landsberg
tgggggtgtgaaaaagagacaaaaggagggaatttagaaatgaggtggtgaaggtatgttggattgttgtggaacgatatggtcaataaagcatatcgcattattggagagacattacatatttaccattattcatcttattatttctctgtacttaaaagaacaatgtgtttcaaaaagataaataaagtgacaagaaacctaattattagatatgggtcatttcagctccatgcacattctctttacatattttcttactatttctctataaagagattaacattctaatcaattgccaaaactatcaaagccataaaatcaactactaaatgttcatgtttctatcaatagccataatagttcgcatagtttagatatattcatgcaaccttttgtgt

SEQ ID NO: 142836 - DNA, 698 bp, Arabidopsis thaliana landsberg
atttccttatttaatataatggtatgtgaaaatgaattcatctaaagacaaactgaaaaacatgaaacaagattctctctttttgtagcaaatagagagagacacagagagaaaaagagatggcaaacgaaacggctagtaaagtagcgggttacttatctaaccaagactcaagacaccaaaacagacatgtttgcatctaagatatgcttatttgttgacagattaataatactcagggtagtggcactggtggaacttggccgttgcttcctgtgccagctccaatggtcggggttggctcttcaaatccggggtttgggacaagcgtatcatcgccaccagggagttgggtgtgaggtccggccccttgtccaccattatatgatgggattcccccaccagtaagtggagctccggtgacaggattgtaagggtagaacggcttcttgcatttgggaggaagcaagaaccttccaacaccgggaatgagaatagttggtttgggctcaatggttacaagaaagtcagggtgtttgacatcagtgatcttaggggacttgggaacgtgacgtagtccactcacttgctctacagatccaagcactaggcttaaaaccacgacaatgactgcggaggtgataagtgaagaagccattaattttattttattttgttgtagaggagaaagctcgtgt

SEQ ID NO: 142837 - DNA, 358 bp, Arabidopsis thaliana landsberg
cttaaatctctactacgacattattttgtacatgaagctaatatatttagtttacatgtttttgtacacagtaaaaatttatagacctatgtccccctttctctcttcttcccacccaacgcaggaaccgcaacgtgagagcggtcaagccgatccaatggagagacagagcgaagtttctctgtaaggggacaccaaaactcagaggtctcttaaaaatggaagaagctaaagtttgtttggtgagtgtgttttgtcatgaaaccaattgagagcaaggcattcttatgggtgagaatacaacagtgagtctcgcgtgatctgatagagagtaattttctggccacattcctttttc

SEQ ID NO: 142838 - DNA, 244 bp, Arabidopsis thaliana landsberg
ggttaaatgacataaagtttccattccatgatagatttacaatagataattaaatatatacatgacagagtaacattatcctttaaaatgataaagaacactttttaattaatattatatctttgtttaatcgaattccctttataaaaaataaaatgggatatgtctaaagaaaagaatcaaggcaagttatcaggaccatcttcacgttgtttgattcgggtatcgggttcgggtcctgaac

SEQ ID NO: 142839 - DNA, 660 bp, Arabidopsis thaliana landsberg
atctgattctacctttccattttctttctaaaagtcgtggctttgagaatagttttttcctctttttctcatcagactcggtttcctagttgactcattttcaagatctgggcatctgtcatttcttttataaaagctttctttttttatttatcccttttgttttcagctgctggttgcttgtagtaggtatagttttgggtggccttacttgcttttcagcaaaagctgggagattgagatttcttcttcttctctctctttagtctttgggatctgcgcatttctcagaaattatatgggactctcgaaagcatgatgctttttgttgtctcacttgtaatttgttcgggactttgttgctgaagaaaactaagcaatgtctgtagaaacatggttcatgattcagaagactactactagctcatgagttcactggtacttggaattaagatgattgatcagttcatcaactttgtaattcgacctcctaggtacttctccaccctctttagctctttcaagtctcaacttttttgcattcaattgatagctgttgggggtgttttgacagggctgagtatgatcctgatcagtatttgtgggagaaggagtttagcctcggtggcacaaagtgtaaaagacaagacttggaggcaa

SEQ ID NO: 142840 - DNA, 400 bp, Arabidopsis thaliana landsberg
tgaaactgttgagcccaacgatgttgagcctcagcagggtggccgtggtggtggcggtggtggtggcggtggccgtggtggttgtaggtggggatgttgcggtgggtggtggcgtggacggtgcagatactgttgcaggagtcaagccgaggcaaacgaggttgtggaaactgttgaggcccaacaagctaagccatgaattgcgtgtaatacaaactctctatgtttgtatgcatgcatagctaattaccattacgtacgtatgtcaaaataaagcaaaaatagtacctaagaaggtacctagaggtcaataaaagaaaacgtaggttcatataatatgtattttgttatgtagtgtttcttttctcgtggatgttataaataataacaactgtttttt

SEQ ID NO: 142841 - DNA, 258 bp, Arabidopsis thaliana landsberg
agttttgatctctaaaatcgttggaaagcaaacacaatctcttgtctcgaaccagaaagatagagtgtctcaatggggaagctatagaactgcttttacagctgctctaaggtcgcctcagctcagaacttactcttcatctggtaggattccgagtaatgtgtattgtacttttgcctttagagatctcaaaggaagttttttaagtaatcatctgtctcgaagttatactactgcccctgcaagaaatgtagttag

SEQ ID NO: 142842 - DNA, 433 bp, Arabidopsis thaliana landsberg
cttacggagagagagataggtagagtcacaaattggaagaagagtctaagaaaaagctttattgttcaagaagccaccacccacaacttctgaaagttccaaattttgcttcgtttgaaccctaaaaataattgcttttttttttgtccttgagcttctttctgacaacacaaaacccgataagatacagaaatgtctctctctctctctctctctcttttgagttttctgagtccaaaaggcaaaactccaaaccagtatttagtatgtataaacgtcagtctttttcctttgttttgcgcttaaaacgacgtccaagatcgtgctgtgtgacacgatgaagagctcaagcagagtgaaaataagcgtcgtttcttataaggtcgtaagattagagcagtcgcagaaatctcggcgtgagaaaaggaaagag

SEQ ID NO: 142843 - DNA, 329 bp, Arabidopsis thaliana landsberg
gtcacacagcacgatcttggacgtcgttttaagcgcaaaacaaaggaaaaagactgacgtttatacatactaaatactggtttggagttttgccttttggactcagaaaactcaaaagagagagagagagagagagagacatttctgtatcttatcgggttttgtgttgtcagaaagaagctcaaggacaaaaaaaaaagcaattatttttagggttcaaacgaagcaaaatttggaactttcagaagttgtgggtggtggcttcttgaacaataaagctttttcttagactcttcttccaatttgtgactctacctatctctctctcc

SEQ ID NO: 142844 - DNA, 408 bp, Arabidopsis thaliana landsberg
tttataagtaaaccaaatattgtaatacgcggtttattacaatagataatacatattaaatcttgagactaaatcaagctgaaaattcagataaatacgtactctgtatttactgcttcggagggatcaagaatggaataatcatagatagagatgctgtggggcggctcgatccagacaccaactttctgaccccaggtcagatactcaaagtagtacccttcagggtcttcacaagaactcctgctatataaggaatacttgtaggggtgatttctactgaaaggacaaggagacttggtggaacgcctctcgttgataaatctgctccagaaatacaaaatgttactcattgaccctgtgaggccgtaggtcatcacgcaagacccatcgctcaaaaatattgag

SEQ ID NO: 142845 - DNA, 215 bp, Arabidopsis thaliana landsberg
gcaaccatgtatcttcaattgctaaggtccctaccttccaaactggtggagctccatcctcctctgaacagcctaagcctgtggtggtgaccaccagtggtcccaaggttacgccgcttcagcagaaaaaagcagacactcttgagcggttgaaggagactcttcgtaaaaaacaggaaatgctggagcagaagcgtaacgagtaccgcaaaaaa

SEQ ID NO: 142846 - DNA, 142 bp, Arabidopsis thaliana landsberg
ctgcttcttgttttctctttttactctcttctaataaaagaaagacaatattttacttctcttaacgcaaaattcagatgctctacactgttggtgacttggtgtgatctcttttttgaatgaataagtacttctttagttg

SEQ ID NO: 142847 - DNA, 468 bp, Arabidopsis thaliana landsberg
gttctctctttcttacatatttcttttggatttcgttgtcttttttttttctctcttttcttctcctctctctcgctcgatttcaatttgggcgagaaaggagcggtcttttgtctttcctgggtttatcagctagatccctcttgcctaaagtttgtaactttcttagggttttcttctgatttcctctctctcggggttaattctgctcaaaaatgtaagcccttctccttttatttcgtttgttagattttgttttgcttgatctgattctgttatgtaattttgggttcagggtttgattcagaggcaaatctggttatgtttagacaataaagttcgggactttttgacatactcacagctggtttttagctttggttcttatagagagtaatagtagtgaagggtttgtgccaatagttagaaatgatcaaacagatatttgggaaattacctagaaagcct

SEQ ID NO: 142848 - DNA, 209 bp, Arabidopsis thaliana landsberg
ggtatgtagactctttgcttttgtcccgcggaaggaactgcaaacatgtatgttgattgttgtgtctatttgtttcctgtatagtactttgttattcacttgttccttttgcagttgtttttattggatcaaccctgtttgctttgcaacagctatctggtataaatgctgttttttatttctcttctaccgtattcaaaagtgctgga

SEQ ID NO: 142849 - DNA, 220 bp, Arabidopsis thaliana landsberg
gtaactgctggtcccgtattaatatttattgcttcattccttattactaagcaacaaaagtcacgcgtgagatataaaagaagatcctttgcagtttctctgttcttgctccttcttcttcatctccctttattgatactgtctgagtaataataaaaattcactctttttgtattctcaagacagatttcaaaatagaaatcattctccttttttcttt

SEQ ID NO: 142850 - DNA, 359 bp, Arabidopsis thaliana landsberg
tgcatgagaaatcaatcctgatgccttttctctccgcaacactattagttctcaaactacctgaccatttcagtcatttaacctattacgctctcttctcgatgttccctcttctttgccgtgacaaactcttgatcccttacttaacactatcttttctcttcaccgtcatctatcattcacccgggaatcaccatgcgatacagaaaaccgacgtttcatttttctcctttaaaaacttcccgggttatgttttcttactacgaacccatttcttcatctccgtagttcttcatgtcctctatcttaccattaaacctcctcagaagtaccctttcctattcgaagcactgatcatg

SEQ ID NO: 142851 - DNA, 351 bp, Arabidopsis thaliana landsberg
gtgattaacaaaaatgctatgattacgtatcaccttaatatagctcctcaactcttttaattaattctccataatttactaaaatatatatttacaccaactagccatcggtatttaataacacttatattactcattaattaatccaaatataaactaaaaaaaatgaatttatcgtagtataagatttaatatgttctgatttcaattaattaaataaaacgatattatatttaacatatgcaataagagatgcaaatctttagaagattaaacacttaacattttgtgtaccgattaactttataactatacatgtttatataaccatgttacttttaaaaatatgaa

SEQ ID NO: 142852 - DNA, 299 bp, Arabidopsis thaliana landsberg
atcgttctgctatttcaccaattcaatatatcaaagaaaaacgagtaatacaagactgttggtagcatgctttcgtattgaaataaaggagaatgtcacaaatgaggaaacatgtctagtggacggaatctttaggtaagacatgggacccttttgcaactatacatcaaccacatgacaaaagaattgactgtgtcatattcatctgtaatgatgcctaaacaacactagcttgcttaatcctttcccaatcaccacattacgcagttcaagcaagccttgaggatctcttaaatttg

SEQ ID NO: 142853 - DNA, 776 bp, Arabidopsis thaliana landsberg
tggttttaaatgcaaataatatttatgtttatccttgctttacctggaaccaattaacagacccaaaatctttataacataatcaacaaagataaattacatgaacattcctaatatttcctttatcattactcaatggatcccaagcgcttgcatttgtctaatcatcaacatagacgaatcatacatttgcttgcggctaacgtcaccttcctttcctccttcctcttcgaagaacctctcgcttccatccaatatactcaccacttggctaatgctaggccttaacttcggatcggttctcgtgcaaactaaccctaaccgtaatagccttgccaattctcgattctcgtattcatcatccaaatgaatatctgcaatctcctccaagagtttttttcggttaccaactacttcgcggattcgcaacaccaaaagagcatcttcttttttcctcttgtaatccactgctggctgccccgtaaccatctcgagcactaccacgccaaagctgtatacatccgccatggttgtagcctcgccggattccatgtattctggtgccatataaccaaaaatcccttgagcagatcctttcttttttgcagcttgatgagccttgtcgtttctagacaaaaactctgccaatgcgaatccgcaaagccgcggattcatatctctatcaagaaatatagttgaagaagtaatgtttcggtgaatgacttgttcgtcccattcctcgtggagataacgtacagcgcaagcaagcgatttga

SEQ ID NO: 142854 - DNA, 358 bp, Arabidopsis thaliana landsberg
atagcatctagggttctcttcttctgttattcaatcgtcgttttatgggtctttttggatgattgatagtttttaagtttctttataattctctaatcgagagagggagattggcagtgatgactcggaaatttcaagctcaacagaccggaattaggcgtttcttccaatttattggttgactcgtttctgtgtcgataaccccgctgatctgagccttcctctcttttcatttgattctgatttgtttgcgttttcgaatttgaaattctctggtaatcgatttatacgtttttatcgattttgaaatcggtgtttgcgcttttttaatgatgatggggattttggagattacgat

SEQ ID NO: 142855 - DNA, 340 bp, Arabidopsis thaliana landsberg
agaaaagtaatatgttactcgtagttaattttctaacgaatgttatatacaatcacataccgatacttttttctttcttttcttaaaccgttattgtactaaatgtaaaacttgaagaaacattcaccgaagcagagaagataaaggtaacaacaaaaacaaacttatcaattctttgccccttaagtattgataattaaccatccaaatgaaaaagattccaatctttgtattatttctttgttttctccatcctccgatcaataatcacgtcttctccttcttcaccggaaccctaccgtcagtaccagcaagcattgcgtacttatcctttcttgtg

SEQ ID NO: 142856 - DNA, 510 bp, Arabidopsis thaliana landsberg
tttctattggagtagaattgtgtctatatatatatatatatatataagttgcataacaatcaacagaagctgaagacacacatacacaagatttctgcctatagctctgcagtctacaatacaagaatcaaatcagaaactctttctaaggcaattcatgtcaacttaggctctctcattcgttctaaagaagtgatcaagattctctaacctaagaatctctccacgtggtttgattggttgtgtcatagtagaaatatcagcaacggaagcaatgagaagcagaagacaacaatgttgtttagttgggccacagaagctaaagatcttgagaactgaactgaacctgagtagcttccacctgagttgcttccagccgttgaatccatgcttggagttcttgtctgtacagtaacatttttgcatgaaccataagctgctcctggctgcaacatcaagaaccaaaatacgggtgccggttttagataatttaggcttgtaagatcttat

SEQ ID NO: 142857 - DNA, 320 bp, Arabidopsis thaliana landsberg
gcctttagtgatcgcagacaggactcctctggcacatttgaattgccacttgattttgttatagacaagtgtctactgcaggaaatacatcttcagtatccttctcgatacttccatttgctagaaatatacatatttaggttaataatttgtcagttggctgtcattttctgtctagaatgtttttctcgtgataacatatcaatatcactttttccttaacagacaatagatataactttgtcagtaagctagctatcaagttgctcgaagaaggatttggcttgcaagaacatctgctagctctacgtagatatcat

SEQ ID NO: 142858 - DNA, 229 bp, Arabidopsis thaliana landsberg
ggctgaaaaagtaaagtctggtcaagtttttaacctattatgcatattctcgatctttttcttcctctttgtgttatcagtgaatgtttcggctgatgtcgattctcagagagcggtgccatctgaagataaaacgacgactgtttggctaactaaaatcaaacggtccggtaaaaattattgggctaaagttagagagactttggatcgtggacagtcccacttcttt

SEQ ID NO: 142859 - DNA, 291 bp, Arabidopsis thaliana landsberg
atcacgtcgcttcttttcctcggcagaaccagcaagtgccattgcactggaatagtaaggtgtcaaatccttgtcactatcactagatgcctcatcatcaatggcagtagctgcaccaccagaaaaacgctgtcgcttgacaggccgctggaaacttttttttgcagaattttgcccagaataagtgggcttgaagccagtggcagcatccaccttttgaaaactctcagagctctgcaaaatttccgattatcagaacgactgcaaaaaccgagttctaacagctaaaac

SEQ ID NO: 142860 - DNA, 288 bp, Arabidopsis thaliana landsberg
gatagatcgtttgacaaaaaaaaaaaaaagagtttatggatagagaatcaacgcatgggataatgttaatctcataattatttatttgaactttgaattcactttttaaagtataaaaaatggatagaaaaccatgggataacgttaataattatttgtatctatgtattacacatgaccacatggaaatataataattatttctatgaattaagttaattgctattatttttaacatgttgagaaggtgcatatagaaatcaatgtagtcaatcttacatttttcaa

SEQ ID NO: 142861 - DNA, 1427 bp, Arabidopsis thaliana landsberg
atggcaagatcgctcaagaaatcagtcaagttgagcctaagacatgtccggatccgttcttcaaccatcaggtttaaaccagactctagttccatagaaatagatcagagaattgagtttctcggagaagaggaaaccgatggcgacagcaccagtgagtatgaagagtttgaagaagaggaagaacgaggaggagaaggggaaggagaggaacgagatgatgattgcaagatcgttgagagcggttacaaaagtgaacacgaagagaccgaagccgcggtggaagcagtagaggcggagattacagaggccgggaatagggtgatggtggtggttgataaagtgattgcatcaactggagctcttgagtgggctttgaaacatacactacaatcacaagactatctttttcttttatatttctccaaaccctttagaaaaggttattgctctatcttgagtgttcatttggcaattttggtttgactccttgagatatgaattctaaggatttctattcgctataggaaaaaggaagaaccggaaaagtgaagtaaagaccgatgaacttgttcattctcttaaaaaactctgccaaacaaagcgaccaggggtgagtccaaattctaacaaaaaggcatttgctgcgtctacaatcgctcaaatttgacggattttattatgcctatatataataacagatagaggttgagataagaaggctacaaggaaaagagaaagagaaaggagagaagatagtggaagaagctaaagaacaacaagtgagtctattagttgttggagaagagaagaaaccgccagtgtggagattgttgaagagatggggatggaagaaacggcgaggccgagccggaactctcaagtattgcctagagaaggcttcatgtatgaccattgcggttaaaccaaagaaccgtaaacttggtggttacttgatcacaaccaagcgtcacaagaacttttggctcttagcttgatggttaaaaagcaattttaggtggttactttttttttttgtttttcatattatttggagagattgattttagtatagcttgtttagtttgattaagacatttcgtgtaaaacaaattcaaagtataatacaaaattggttattaaataattcacaacggagagaagaaagaaacaaaaaataaatcaatctatcaaatattaatcaagagtaatgtaagttatctaagacaattattatcatgaatgaatgcaataaagttgacaagaaaaagaaatttagtagtccaggctgttcttaagtaagttcaagacttctttgtaagccaatttcttggccattttcttatcagaggcctttgctgtgtgagcaaaactcatctccttagctttcacctcaaccgtgaaagaatcgaaatctttagctttac

SEQ ID NO: 142862 - DNA, 823 bp, Arabidopsis thaliana landsberg
ctttattttgccatgatgcagctcagaaaacattcaactcttgacaacaacgaaaaatgagacaacagcactctcgcctgaatgtaagatacatgtatttcgtatttttttcaggataaacgttacctttgttgataaagatggagaggaaattcatatcaaggttccagtaggaatgaacatccttgaagctgctcatgaaaatgatatagaactcgaaggtacgatttttcctccatttattcctctttgtccaatgatgctttttcgcataatgcaagatagtaactaatatctcagattgatcttttcattggaaatttatgcgttgtttcttctttattactcttcaggggcatgtgaaggttctctagcgtgttcaacctgccatgtgattgttatggtaaaactcacttgcccttacaaacactcatctgcatagaatatcatgaactgagttttaccaaatagttgaaactgtaatcgtaataggacaccaaatactacaacaaactcgaagaaccaacagatgaagagaatgatatgctagatctcgctttcgggttaacagcaacgtgagttctctattctacgctttaaatggttttggtcgggtgtcattgaaaaatattaacatgttcctttgaaaatttatataggtcgcgattgggatgtcaagtcatcgcaaaaccagagctagatggagtacgcctagccattccttcagctactagaaattttgcggttgatgggtttgttccaaaacctcactagtcacttaatagtctcagagcaaatgatttttcgaaaaaaacccattaca

SEQ ID NO: 142863 - DNA, 734 bp, Arabidopsis thaliana landsberg
cttctttaaattaaaacacaaacactctcttctcttcataatcctcatctcatcatcactttgtcactaaatcagaatgaatccatccgagcagaatcacttgtccggtaaattcttcaattatctgtttaaatcaagatcgatatccaattagataagttaataatcttttcttgcctcagtggaaaaaccttcacagacttcttcggggccgtacacaagtccaccaccgattggttatccgaccagagatgcgatggttggtgatcctccagccgccgcagtggagacaaactccaagggcgatggtttttggaaaggatggtatgtttttctttcattcactctcttcatgtgattatagatcatgatggttctaattatccgttttgcaagacattcatacgacgctcttattttatttttaatgatctatcagtatagggtttcaatttcttgtgtgtttctctgttttcctgaattattatggagtatatctaattcgaatcaaactattggttttgaactgcaaatgttttggtaaaattttggtcaacattttctagtcaagatttgttttttttcccaacattttagttgataactagtgtttaatttcttgcaattttgttgtttgttttaaattcacccttgacttacattttatttccccttcaatgacaaaagataatataaaaattcaacttcagagttgtcagctaaaagtttgtttt

SEQ ID NO: 142864 - DNA, 661 bp, Arabidopsis thaliana landsberg
atgtcgaccgaatgtcctagtaagtttttgtatttgtattgtatagttcataattaaagttttatatgtttgtaaatagttagctaatgttcaattagatatggattcaaggcatttaaaactgtaattcaatagctatatcatatatgattacattttctaaagtctgttagaaggttaattatgttatacatggtcaatccatggtgatgtttctagttcttttgttttcatttactcaaatatgagcttcttgatctccaaaatcccaaacgtaaacgattgaccgatctaacgtaacgtgatcgcagggaagaactcgtggccggagcttacgggaacaaatggtgactatgcggccgtggtgatagagagagagaaccccaccgtcaatgctgccgtgattttggatgggagtccggtgaccgcagacttcaggtgcgaccgggtcagagtttttgttgatggaaaccgtatcgtcgtcaaaacccccaaatccggctagacttgtataatttctatattcataatgaaaaagctatagacgagtcgtggttggttagtaatcaatcatgtaaaataataatcgtttgccttcataatttctgtgttaatgatgcctaaagttatgaatgaaaatagtatcctatatttcaatttg

SEQ ID NO: 142865 - DNA, 3328 bp, Arabidopsis thaliana landsberg
gcttgctacgttcaaaatggagctgccgctgaagcgttgcttgtcttcaatgatatgatggatgatggaacagaacctaatgtagctaccgtgctctgtgttttacaagcttgtgcagctgctcatgatttagagcaaggtaggaagactcatgaattggccattaggaaaggtttagagacagaagtgaaagtctctactgctctagttgatatgtatatgaagtgtttctcccctgaagaagcttatgctgtattctccaggataccaagaaaagatgtagtctcttgggttgcgctgataagtggctttacattaaatggaatggctcacagatcaattgaggaattttccatcatgttgctggaaaataataccaggcctgatgctattcttatggtgaaggttcttgggtcatgttcggagttaggctctctcgaacaagctgaatgctttcatagttatgttatcaaatatggatttgacagtaacccattcatcggagcttctcttgtagagctttactcgaggtgtgggagtctaggcaatgcttctaaagtattcaatgggattgctttaaaggacactgtggtttggacatctttgatcactggttatggcatccatggaaagggcactaaagcactggaaacatttaatcacatggtcaagagctcagaagttaagcctaatgaagtgacatttctctcaatattatctgcttgtagtcacgcaggtttgatacatgaggggttgagaatatttaaattgatggtgaatgactatagacttgctcccaacttagaacactatgctgtattggttgatcttcttggtcgtgtaggagatctagatactgccattgaaatcacaaagcggatgcctttttcaccgacacctcaaatcttgggtactcttttaggcgcgtgtaggattcatcagaatggtgagatggcagaaactgttgcaaagaagcttttcgaattggaatctaatcatgctggctattacatgttaatgtcgaatgtgtatggggttaagggagaatgggagaatgtggagaagttgagaaattcagtgaagcagagaggaattaagaaaggactggcagagagtttgattgagattagaagaaaagtacatagatttgtggcggatgatgaattgcatcctgagaaagagccggtttatggattgctgaaagagctggacttgcatatgaaagaagatttggaaaactctgtgtactttgaatatgagggagacagcttgtgatactggtatgcttaagcttgaagccaagatctctgtcttagccaagtaaccactttctattagaagagatcaacactaagaatatggagatttaagcctaaggcggatctcaacaatacatgatgtgaatacaatcacagacgatttactgaggtttgctgataagatcttgatcagtctctgcatcatctgtttaacaatctcaatctttgactgtttgctttcggagccataaacagaggaatccttattcccttttataggagcaatacaccaagtattatttccatggctgaaattctcttatgggaacctcattgttccattgaagctgtaaaatcgaatctggtgaatattctcgagcaaagccgcatgctaattatgtcaattcagaagagtttgattaggagactcgaagcgagtttgatgatctttcttgttgttcaactctgattataagggtataattgacttttcatgtattacggctccaccacctgacactaaggtactctttgtccatctcgttggtatcatcggattcggatggtaaaaataaaaagagcaaacgaaacttgttactcatgcaagcttctcaggtgccacgtcactccattacgtgtcatcttcacacaccatctcgctcaaaaccgatctcatttttcaaaccttaaaggcagaaggaactgattaagttaacactcttgagaagctctcgattaagcgtgaacttggaggatcaatggctgacgttcgcacacactcgcaccagcttcaagtgcaccctcaacgccagcatgaaggaggcatcaaagtcctttatcctcagagtggcccttcttccactcaggtcccttttacatccctccttcgaatctcagttatgcatatgtatgtggttttcacgtgacgcacgtgcatgcaggtgctagccgtgtttgtcggtgtaccgataggaggaacgctgctgactatagccggtttgacattagccggttcggttattggactaatgctagcattcccgttgtttctcatctttagtccggttattgtaccagcagcctttgtcatcggtctagctatgactggattcctggcttcaggggccataggtctcaccggactatcatccatgtcgtgggtactcaactacatccgccgggccgggcagcatattccggaggagcttgaggaagcgaagcatcgtttggctgacatggccgagtatgtgggacagaggactaaagatgctggacaaaccatagaagacaaagctcatgatgtccgagaggccaagacttttgatgtccgagaccgagacaccaccaagggtactcataatgtccgagacaccaagactacataaagcgtgtgttttgagtgaaccatgttgaataaaaatcgactgttagttcttaatgttgatgtgttttgaatgtttgtatttgcttgtaagcttattttgggtttagtttcctcttctttttttttcatgtaacaataatgtcggagacgttttgcttctatcagttctttgttttattgatgcgtaatagatttgaaatgttagctcattcacaaatggtcaaatacaagaaaagaaacgcaagctttcaagcttcaaacacgaaggagtaatagacattctctagaattacgcatcaaactgatatcatatatgaagtcgcaatgggttacaacttacaagctcttgaaatcgatatttggtcacaaaggtgatccttaaatcgataactgatataaagtactgtacagagttggctaaaccgatggctaccgaccaccaaaaaaacctgcaggtggagctcctccttcgttcatcaacttatccagaaccacgttgaggtcaacagcttggccgttttcagtcagttttctcactgttgctctgacttggtcccttgggaatcccatggttgtcaccctgtcgattacatcatcgattggggctctgctttctgatctaggggaactagagccaccaccgctgctgacggctgaaaccattggcaaagcgtgtggcaatcga

SEQ ID NO: 142866 - DNA, 1017 bp, Arabidopsis thaliana landsberg
acttgtgagtaaattgaagaaaatttgggctattgcagatatgaggatgagccagcagagcctgagattgaagtaagttcaatattttttctttgtataagagacatggttattgcttattatacaactttcggtttctgattggttttttttttcttgtgtaggaaggagtagaggaagatgttgaaatgaaggagaatgatgatgtcaatggtgagcctattgaagctgaagataaagtcgaaacagaacctgtgcaacgtccacgcaaaacgtcaaagtttatgaccaagtatgagcgtgctcgtatcctcggcactcgcgctttgcagattaggtatggttcttgctactgagaacaatctttttaatgttaaattggcttgtaaagtttgagtcttaatgttgttttttggctgatacagcatgaatgctcctgtcatggttgagctagagggtgagactgatccacttgaggtgtgcttacctaccttcttgttgttggtttttgaagttatgtctcagtaaacttatatgaacatttgagctaatttattatgatttggattcagattgcgatgaaggagcttaggcagcggaagataccattcactattagacgctatctacctgatgggaggtgagagattgcattgagcttatattattctcttcactcacttgatctcttcttttcttgtgacttacttatgattcctgaaacagtttcgaggaatggggagttgatgaactgatcgtggaagactcatggaaacgtcaagttggtggtgattgataatctgaccagagacaaatcgacaaatacgtatgtaacttgcaagctttcctctcttatggatgataaattttctgatgttgtaatggaactaaaaatcagtgaaacttatggataatactagactcatattccgaaattctgcaaaactagaagccccaagtaccataattccaccattattatacatattagaaacagaacatgaacagatgtacaca

SEQ ID NO: 142867 - DNA, 482 bp, Arabidopsis thaliana landsberg
gtctaaaactcggttttctcaatttgttttgcagagagaatcaaacagcttaagggcagtttcttagttaaaagtaaccaagtttacatggttgagctagacattcagattccatcagcatacgatccatttgcagaagctaaagattcagatgcaccaggagctaaagagaacattcacatccgaatccagcagaggaatgggaaaaagagcttgacgactgttcaagggcttaagaaagagtacagctacgagaggattctcaaggatttgaagaaagatttctgctgcaacggtaacgttgtgcaggacaaagaactaggcaagatcattcagcttcaaagtgatcaaaggaagaaagtgtctcagttcttggtccaaactgggattgctaagaaggatcagatcaagatccacggtttttaaactgaacccgaattggatcgtttgatatatctatactatctatgccaaataattgg

SEQ ID NO: 142868 - DNA, 1229 bp, Arabidopsis thaliana landsberg
tagggttttctcagccgcttaagagcttatcatctttgtgcttcctgcaaatagctctttgttgttgatctttctcctccatcaacaaacatggggtacgtttctcctctattagatctatccttcgtgttcctatctcatttctctgtttagcgttttatttatctgattcacttgttgtttccattaattatgaaggattctatagagtctgctgtgttttgtttggttggaaattgttacatgttttcgacttttgattgtggtttttgattggaactgattctatagcaaatgcgtcttcatttctggatatgtttgctaaatgttttttatgtatagatccacaatagattgtgtaaattttgagctactctggagttctagtatggttgataactggagatttaaaattcgctgtatgagtatctatggtctcttgggttttgaagctcacttttgctgatgtattcgagataaatcttctatcgtcttgttattatttagatgaatttcttattgattttctgagttttaactatggtttatcgagtgaagttgttctcaaatgttattttgtgatgatttgttaacagtaagacacgtggtatgggagctgggcgtaagctgaagagactccgaattaaccagaggtgggctgacaagcagtacaagaagtctcacttgggaaatgagtggaagaagccttttgctggttcttctcacgctaaaggaattgtccttgagaaaatgtaagtctgatataacattcaagtttacttttttttttattgatttgttgagtatagacattgggcgttgattagattcttgtgtttgatgatgcagcggtattgaggctaagcagcctaactctgctatccgtaagtgtgctagagttcagcttatcaagaatggaaagaagattgctgcctttgtccccaatgatggttgtttgaactacatcgaggaaaacgttagtcacatgaaatgactatgcaatcatcacactatgaattagtttcattcatatgctgatacatttcttgtttatggtgttgcaggatgaggtcttgattgctggatttggtcgtaagggtcacgctgtgggagatattcccggagttaggttcaaggtcgtgaaggtttctggtgtttaactcttggccctcttcaaggaaaagaaggagaagccaagatcttaagcaacccatacaaaaagcgtcaag

SEQ ID NO: 142869 - DNA, 1680 bp, Arabidopsis thaliana landsberg
atcaggttcttaacggatctctaaatcttctgatttaagaagatggtaagttactagacaaacttatggtttttttccttctttcttgtttgcgttaaagtttcaatttttattaactgaaagctgttgttttgattttatagcttcctctatcgctgcttaaaactgctcaagggcatcctatggtgagtaaaatttcgacccttgattacaattttgttatatatgaagtgaagctgagtttaagtgagcattgcattagggatctaaaggaacttccttttactgtaattttgaatcttgttttgttttggtagctcgtggagcttaagaatggagagacatacaatgggcatttggtgaattgtgatacttggatgaacatccatctgcgtgaagtcatatgtacatcaaaggttatcttatgttttcatatgttgatacaaatatactttgtttagacttcgtgatgaaattttgtgtagctgacactcatatattttgctgcttgattactctaggacggagatagattttggaggatgccggaatgttatatccgtggtaacacaatcaagtaccttcgagttccggatgaggtaatttttttttgtgtgtgtgtgtatatatctcttgcttgatctagttttttctttgttcccctctctctggaatgatgatgcttagccaaatcagatatgtgctccaataggcatgtttctgttggaactctgttcagcagatggtgtgcctcttgttgtagtgcgtcttagacgatatcacagggaatggttattgctgaccagaatattgacccttttgttttgtgtttctgatgccaataaactttttatcttggatttttctctattgtttctacttttttcattccctctatattcacttaccataaacaatatcttcatctataaggacagtcatatgctgtttttatttacgttcttactgctgcaacctagattgagttgacttgacatagattgttttcttctctcttcaggtgattgataaagtacaggaggagaagacacgcacaggtatagtattactcatgtctatattgtacctttactgagatatgcttcgagttttctgaggtgttaatatttagccagagtagacattgagaatacttcaggtgttaataacgatggttgaatatgtgcagatagaaaaccaccaggtgttggacgtggaagaggacgtggtgtggatgatggaggagccagaggcagaggcagaggaacttcaatggggaagatgggtggcaacagaggtaaaaaatacacaaacaaagcttgtcacaaaactctgattttactagaatacttcaaatatctgtgtcttgccacaatgggatttaagctaaaactctaatatgttgtgaaaaacaggagcaggtcgcggccgtggttgatgcaacaagttttaaagactcgctgccaaatctgctaacttcccattgtagagaaaaccaaaagttacataagaagttggtctgttgttggttttctattaagtatgtaagggatagggagtgtgtttttcgattctccttgtgatcttttcgaaaaatgaaatttgtcttttgcctttttgtggtatatgtgaaattccaattgttttcatttgcgcttaaaaatgaatctttcaggtctt

SEQ ID NO: 142870 - DNA, 676 bp, Arabidopsis thaliana landsberg
cagaatctctcaattctcttttgtcgatttcgcagtagaagagtcctttcgccgtctccgagaaactcgttgcagcgtcacgaccaggtttccttctcacttttactaaattttgtaattgctcggttttttgtttagtgcgagtttactctggtctgaagagaacattttgggtctgcttatttacagttggagaaaatgtcttctagaggaaaaaggaaagacgaagatgtcagagcatcagatgacgaatctgaaacccacgcgccggctaagaaagtcgcaaagccagcagacgattccgaccagtctgacgatatcgtcgtctgcaacgttagtctacactttctgtctatctttcaatttcgttatctactctattagcagtgagcttatgggtttcggtcaagttttaattttgttgatgtgttttgctcaaaattagggttttaatcaaattagggtttatgttggttatacatcagatatctaagaataggagagtctctgtaaggaattggaacgggaagatttggattgacattcgtgagttctatgtcaaggacggaaagactttgcctggcaagaaaggtaactttattttgtaatttaaaccaatgccccttggctctcataattcattatttctagtaatatgtatacctcatctcttagt

SEQ ID NO: 142871 - DNA, 1014 bp, Arabidopsis thaliana landsberg
tagggcttcgcttatatcgcagatcgaagttcttgtttccaatcgccgaccgtataatctgataataaagtaagatgtctgctactccggaagaagacaagaagcctgaccaaggagctcacatcaatctcaaagtcaagggacaggttttctatttctcactcactctctcgacttctatttcttgcattgtgtaacgattcgttgtctggttaaagttttgagtgtgattaggatcttcatagcttctgattgcttcaattctagggttttgagtttgtctgcgttattcccaatttctattctggttagcttgtgtatgaggtagtgattattgtgtaagcgtgacttttaattggcttaaatttgaagcaaacaaaagttatctgagaattgtgaattatgttttgactcataattgtagcaaacaaaacattactactcttgtatgtgtgagggtgtgtattggtggagacagtatatatcaaagaagaaattgttgtaatgttgtgagttgtgactaaactaacaatttataaccttgaactctcactatagcttattgtagttatgcttttggagtatggagcatttgtttcatgaaaggttttcgttgctatgtaaagtgtgatttgttttgcttatgtttctgtacccattggtaggcatttttcgttgttggtacttggttggttatagatacagtttttggtattgagaaaatcgtatataatactcttcttgaagtaacaatcattggtaatttttcttgtgtaggatggtaatgaagtcttctttaggatcaagagaagcactcagctcaaaaaactgatgaatgcttactgtgaccgtcaatctgtggatttcaactcaattgctttcttgtttgatggtcgtcgtcttcgtgccgagcagactccagatgaggtaacatcattccccgtacccctttctcttttactgttttccgtattacaaagttgtatgatttccttaaccgagaatcttcaattt

SEQ ID NO: 142872 - DNA, 911 bp, Arabidopsis thaliana landsberg
aggaaaacaaaactgcaaaaacaaaaataaaaaaaacatcgcacaagaaaataaaagatttgtagaatcaactaagaaaatggctagcactatgatgactacattgcctcagttcaatggtcttcgagccaccaaaatctctgcagctcctgtacaaggcctggttagtacttttcagttttcttagattctcaaaatgtgatttgatcttctataatcttttggggtcaattttttcctggattttatatgttttagtggcagatttattggagattaattaatcataacctagaatcaattttatgacattgcaaaagtaatattatttgcaaaaactaaggttattgaatgttttggaatggtgtttttgtcatcccaggcaagtgttcagcccatgagacgcaagggaaatggagctttgggtgcaaagtgtgacttcatcggttcatcaacaaatctggtaattaaagatataaaacaaaattaaatggacaatactaattaagtctaagcaatgattaattatactttgattagataatggtaacgtcgacgaccctgatgttgttcgcggggagattcggacttgcgccatcagccaataggaaggcgacagctggacttaggttggaggcacgtgactcaggtctacaaacgggtgacccggccgggttcacgcttgcggacactttggcttgtggcaccgttggtcatatcatcggtgtaggagttgtccttggccttaaaaacattggtgctatttgaagttcctaaagctcttttatttgtatttgtaaaatttgtagatttttataacaatattctcatgcacctgaacgagatctaatggattttacaagtctttatgtttatcttataatgttgtatcgcaatttatccccctttaa

SEQ ID NO: 142873 - DNA, 600 bp, Arabidopsis thaliana landsberg
atgactcttcctcgacgttcaggtaaaaacaccactgcaatgttcatactatgtcccttttttggccttatgcagatgtatgtgagtgtatgtttaagcagaggcagagtcggaacaatggtgcatagcggatgaacaaacgccagacgatgagttgcaagcaggcttagactgggcttgcggaaaaggtggagcagactgcagcaaaatgcagcaggaaaaccagccttgcttcttgcctaacacaatcagagatcatgcctcctttgctttcaacagttactaccaaacttataaaaacaaaggtggttcttgttacttcaaaggagctgccatgatcactgagcttgaccccagtaagctttctcctctctctctttctcccttgaatcttagtagatagtgaaccatctgtttctgatccagctatgattgtgacaggccatggttcttgccagtatgagtataacccctgattcaaacgacacagcaaagacaagatacagcaagatgaaaagctatgattttgcatttatacgttttctctatgtaatgttttcattccaaagcagtatccatgtactgttctcccattacact

SEQ ID NO: 142874 - DNA, 5301 bp, Arabidopsis thaliana landsberg
gagaccggtcaacttgttggaactgttgctaatattttcgacaatggaggaaatgatcttctacatgttttgcttgactcatccatggaagtctgcaatgggagtgcaaagaccaatcagcttgtttggataccttttgtagatgcaattgttcctgatgttgatttggaaagaaaggagatgtatataactccaccgaagggactcctcgaggtgaatatgcgagcagatgatcggtccaagaaagaaaggcggcagcttgtgaggcatattcttcttcgctcttcatattgaccagtctttatagactttccagattgatctttcttggtctcttaaactctacgctctggtcatttcaggaatggaaagaaagaaaaaaacagcagaagcgccttattgctgctaaaaagaagttatgtgaaatggagcaaaagcatgtgtttgatggattaaggtttggagaaaagtctcaaaggaatttacttgctgatcatatccttaacgtaaactccacactacttcagaaagctttgcaaagtattgacacctcatcgaagaggtaaattaacttcaagaaatttcccaaccattgcgagaagtgtgtcttctcatttttcatttaaattatgatgaattagatggaatgtaactgaggaaatcaatgcactgagagctagagtatcggaatgtaatctgagtgtgtcacgagaatgccttagttttgatgcaagcaaagagaacatgggtgataacttcagtttccttcaacaagggcaaaatctgttctctgagggtaaagtttctatttgtttggttctcaatgatcacgagaatgaagaaccagaaggtgagaatggtgtagtctcgtaccttcatgcactacttgatgaggagcagaggttcataaaggttagctgatgcatacttaaaagctatgagattttcttgtcatttagttatgattttacaggataactgttgggttatgtgcaggaagaagatcgcgcttgcgtgccacttgtcatagtttcccctgaacataccattgaagctctgcagaagctatttcaggataatgatcattttggatttgagtcagaaaaggttaaggcttgaattcatccaagaatagttttgcatttcggctatcagattctcacaaagtatatgtctttactaatatatagatctggattctcaaagaagaaacgcttccagtagtttgcagctcacccgaggaaccgaaaaagcacaaaattttgatgaaatctccatgggagatacttgagtccccggttggctctggaggagtcttgagcatccttgcttcacatggaattacagactctctttccaccctgggaatcaattatcttcaggtatcgatatctaaagatcatcgcttaatctctttgaacttgactcatatccagaaattgttcctttctggttctctccttcaaatttggtaaaaggcattaagctttacgatgttggcatttttctataggtacacagtattgaaacaaaaccacaaccgtcacaacattacatcaatcccatgcttgttggtttcgtgagcgcaagaggagcagagattgggatccaagtgaccgaagaatctgaactcaagaacttggaaatgacattctcaatgaagtttctgaagagattaaagggaaaaatcgagtttgaagctgtcatgaagatgaattcacatgttcagaatgttgaaaaggagtgggttgagtcagtaccatcagaaccaaactcgtttgagtttcgttctgatatttacagagtcttgagtgaatgttcttcatcagctaagatttgtttgatgaacattaccgtttagaacttgtacattttgctacttagttgtttgtcctcacatctaaaaagcttctagagacgcaatttatgcccgaacacattactcaagcaagagagaacatcattgtagcttttgacaaatcgatgataacaaaaacccaaaccaaagctattgctctttcatagcacaaaaaaatatattttttatcaaatttcaaaaatatatccctctttttgggaaacttaagatccaactgttgatttgcagccaaaaaagatcgaaccgttgattctattgaccaatctctgatctttaacaaaattacatttttgaccatcacacagagaaccctaatttatatatttataagaaacttcagtcttccgaaaaacatcctatcacattgcggcggaggaagctctaatcaccgtaagcttctctctttcactctctctgaatctcatctttctgttagtttatgtatatatatctactgaaatcgatgcttcgtctcacgcgtaccttttgttgattttgtagaggaagaggagtaaaaatggcggttccgttgcttattaagaaggtggtgaagaagaggtggggcaaattcatcagaccccagagtgatcgcagaatcaccgtcaaggtactcactttttctccttttcaggtttagagattcaacttttttcatgggtataagtttgttattctctggagtttaggctttgatagtgaggaaaaaatgattgcttcctctgtattatcattaggtctaagtctatcatcattaggtctaagtctatcatcattaggtctaagtctagattgttttcagtatgatgcattagggctatgagattgtgcatctagataatgccctgtggtatctggtagccagaattctaattctgtttctggttacttcgtttttacacgggcagaaagtgaatctcctacaggtcttgcgacacagtttgcttttgatttgataagcttactgttactttaaccctgttgacatttctcatctatctcattcgtttgaaaagcttgttttgattctctgatgattatgcttaatcttcattctctgattgttcttttgtttttcaattgttattgttcaggaaagctggaggaggcctaagggtattgactcccgggtgagaagaaagttcaagggtgtcaccttgatgcccaatgttggttacggatctgataagaagacccgccactacctcccaaatggattcaagaagttcattgttcacaacacctctgagctcgagctactcatgatgcacaacaggtaactattatgactccttggtgttatacaccacaaggatttgatagattttttaaagcaagattctcatggtgtgttttgctttggatttttcacaggacttactgtgcagagattgctcacaatatctcaacaaagaagagaaaggccatagtggagagagcttctcagctagacgttgttgtttccaacaagcttggtaggttgcgtagccaggaagacgagtgaaagccctaaaagatatcatctagggattttcttttatctgtcgttaactattccgaattatcttctttttttttttttttttgcgttttggagagtggctgaatgatattacaacttgggttctcgtttttatgatattaattcagaatcagacacagtctcagaccataatttattcctcaatttatacctaaattttcagaccatcgaaatttaacttgagttcaaaacttttatcgatactgccaagtgtaactaagttaggatagctgagagagacacactccatttcgtgctttaatccccacgttgtccagaaagactcgatgagagaatctcaatcttgttccatctcctcacgtgagtcgttacaccaagatgatttggggatacacgaggaacaaaaaattagttgatgcgttgaatctgttcgacgaaatgcctgagagagagatgtaaggagatgaatgtagttgctgtgaagctaggttcaagggtcgattcctttgtggctaattctgtggttgtgatgttcagtggaaacatgaacgacgccgtttcagtgttcatagataattggaggaagaaccttgtctcgtggagttcatccatcgtgggtttctacaaaaaggaagaaagctttttggttacttgtcaagcggaccaaatcatatctagaaagattaaacactacacttgtaaggtatatatcttgggaagaaaaatagatgttgtgatatcgtagtgacaggcttgctgttgcatttgggttggttagtatagttgaaggaagtaaagtcactatggttttttgaagattgtcacacagtgattaagtctgatcttaagagttgtgggaactgggatgtgagattgttttaagagattcgacttggtttcatcattttaagaatgggattttttcttgtggttattggtagaggagtacttgagaaagttgcaaagtttgacttgtgatgtgaggataagagggtaagagactagaaatgtgattgtgagttgtgtggtggtggtaaagtcacgatccattccaaaggaggagccttctgtcaagttggcagaaaagtctgagaaccacttgtggaattgctagtcaccactttgcctctgctaaattatatatgggcaaatcacttctcctctgatatttttttccagaaacgtctaagattgtttcctcctctgttaatggcttcttcgtcctcctcttctcgcaattggtcatatgatgttttcccaagcttcagtggagaagatgtccgcaaaacattcctcagccactttctcagggagctggaacggaaatcgatcatttctttcaaagacaatgagatcgagagaagccagtcacttgatcccgaacttaaacatgggattagaaattccagaattgcggtggttgtgttctccaaaacctatgcctcttcaagctggtgccttaacgagctactggagattgtgaaatgcaagaaagagtttggccaacttgtgatacccattttctacaatttggatccatcccatgtgaggaaacagaccggagactttgggaagatctttgaaaagacatgccgatgtaaaacagtggatgagaaaatccgatggaaggaagctttgaccgatgtagctaatatccttggatatcatattgttacctggtacgactttatgaatcatattatggttatttaacgaacattattacttgttgtttagcaaacatggttgtgaaatggtctgtttccttattagggataacgaagcaagcatgatcgaagaaatcgccaatgatattttgggtaaaatgaatatatctccatcaaatgattttgaggacttggtcggtattgaagatcatatcacaaagatgagttcattgctgcacttggaatctgaggaa

SEQ ID NO: 142875 - DNA, 4170 bp, Arabidopsis thaliana landsberg
tttcacatagttgtccaattgttcccacacatctcagttttgatatccatcttcttatcttcgttaaccacctaccaaatgtcacgtggacgctccatttcggtttctatccggattcgcggtggattctcctcccaccccaatcatcggttcatttcagcatttggttatatccaaataattttaaccggtttataccgaaactactcgaaccagacaatctttgattggtagaaagagagccacgtaggattatctcttctaatggcaaattaaccaaaaacgtaactgaagatccaaagagaaagagagaaaaaagacgatgagagctctaacatggacggcaatgtcgccgccggtgatgtcacggacggcgacttctacggttaacttacgacgtattagcctacggagagatcgcgtctgtgttagagccacggcttcgtctagcgccacggtttccggcggaggagtagtagaggcggtagaattggcagagataggagaaagaagcaagaaatggaagtggaaaggagaatattctgttaactactttgtcaaagattcgccggaggaagttactccggcgagtcaaactgttcttttggttcatggctttggtgcttctattcctcactggcgaaggtattaatcattcatcattcatgttttaagagtaaatgtatgaatcttgttgagatagtgtttttttttagttaagtatcaataaattgttgtatgtggaagatttttatgtataggcattgcttttaacaagaacgaatgaaactacttttgcaggaacataaatactttgtctaaaaaccatacagtgtatgcaattgatcttctcgggtttggtgcttcggataagccacctggttttagctataccatggagtcatgggctgaggtaaacaatctttgaaatactctggcatgtttttgttgtttaaagaagtgttttggtttggtttggtttgatttgatttattttggtgtagttgatactcaacttcttggaggaagtggttcagaaaccgactattttgattggaaactctgttggaagccttgcttgtgtcatcgctgcctcaggtctaaacccttttcactatttgagtttgtttctacgtctaatgatataaacttcgattacttgagctaaagatgtcacaagtatatgaatcttaggtactaagtttctcatatatttggaaaaaaaaacagaatcacgaggagatctggtcaaaggtcttgttctattgaattgtgctggtggtatgaacaacaaagctgtctttgatgactggagaatcaagctgctgatgcctttactcttacttatcgacttcttactcaagcaaagaggaattgcttctgcactcttcaaccgtgttaaagacaggtatgtccttattcactttttccctgactttgaaacgatttattcgagagctctaacgcattgacgaatttacgaaacgcagggaaaatctgaagaacatcttgacaaatgtttacgggaacaaggacaatgtagatgacacccttgtagaggtattgtcattattactcactctcaatgacaaagaacaatgaaagttttattcactttttatgtgaaaatgttatgttagatcattgctggaccagcaaataccgaaggtgcactagatgcttttgtttcaatcttaacgggtcctcctggaccaaatccgattaagctgataccggaaataaccaaaccggttcttgtcttatggggagatcaagatggactaacccctcttgatggtccagtaggtaagtacttcacttcccttccggatcagttacctaacttcaacctctatgttctacaaggcgttggacattgcccgcaagatgatcgtccggatcttgtccatgagcgtctccttccatggctggctcaactttcttccacctagtttcgatttgtttagccgtgtacacttgtttataaatgtaaaacaaatctatctaattggaaaaagacagattcaaaatgatatttcttgacacattttgtggtgtctgaatgtaagttgtaaagaagtcatggtggtagtaacttggtaaaggagtttgtttttggaataaacgcaaattacatggtttgtaactgaataccaaatgtcaaagccaaaaatatactaaactaaaagataggcttatttagtcaaagctcaatgctattgacttggtagtcatttttggtaaaagaatcgttacaaatgtagaaagtgactagttaggttgatgaatgattgatggtcctatacaattgataatttgctacttttgttggtaggcaagtaaaagacacttaatgagctgctagaagctatttttggccacaaaatctacaaatttgtttggttgttgaatctttaaaaggacattcatgctgcaatatcatcaacatagtgaagatgataattttcaaacttgaaattcaaaagtgtatatatatatatgaatatgatgattgaatattgattatcagtgtgaatgaaaaaccattgttataaattttcagttttcatcaaaaaaatgatgccaaagaagaagagtaaacaaaacaagacaaaaagagttaaatggagtggtccaataaaaataaaaataaagaagacaaaacaaatttgtattaaaatggttagatgtcgttgggtgccgggaagtcttcgttggagtctattatttaaatgcttcaccgatctctcattactctctagtcaatatcccaaaatccctaattcatatctttgaaactgataaagataacaaagaaatggcctctcaattgcttttacctccaaaccaattcactaaatcagtctcacctcaagttttcattactggtaagttcactgttgatctcttgattcttttgtcaaaactttattcttgatttgattgcttcaaagttgaatatttgatgtcttgtgtgttttattttgatttgattaggtgattgtcaaggatttagtgacttaactctgaaaagaaaatcaaaccaagctacaagagtttcaaatggatctagcttaagagtaaaagcagctttgagatctactcacaacaaatcagtggttgagattccaaaacaatggtataatcttgttgctgatctttcagtcaagcctcctccaccgttgcatccaaagactttcgaaccgataaaacccgaagatttggctcatcttttccccaatgagttgattaaacaagaagctacacaagagaggtttattgatatccctgaggaagttcttgaaatctataagctttggcgtccaactcctctaatcaggttcttgatttttttttttagtttttttattttgattgttttttttttgtgttttcttttatatttataatttagccgtagatgatttaaagataataaaaaggatttgtttctgtttttcataatcaagattttgaatatttggtttgaatatttatatcaagatttgtattagtttagccaaattttatatcagattatttatattgctttgattatagagcaaagagattagagaagcttcttcaaacaccggcaaggatttacttcaagtatgaaggtggtagcccagctggttcacacaaaccaaacacagcggttccacaagcttattacaatgcgaaagaaggcatcaagaacgttgtgacggaaaccggtgctggtcaatggggaagttctttagcctttgcttctagtctatttggtctcgactgcgaagtaagcataaatattagaattttgctttggtatcttgaaaaatgtaatgttttgattataagtgacattgtttcttttatgcttttccaacattataggtatggcaagtagccaactcttaccatacaaagccatatcgtcggttaatgatgcaaacttggggtgcaaaggttcatccgtcgccttcggatctcactgaggcgggtagaagaatcctcgaatccgatccatcaagtccgggaagtttaggcattgcgatatcagaagcggttgaagttgcagcgagaaacgaggatacaaaatactgcctagggagtgtattgaaccatgtgttgttaccccgaacgagtactggaatagcagtcgtttaaggattgaagaaatatagcgga

SEQ ID NO: 142876 - DNA, 4310 bp, Arabidopsis thaliana landsberg
  unsure (1)..(4310): unsure at all n locations
atggcgaaggataaagtgagtttcgatcattgtattcttcattattttgaatttgattaattttgttttttgtatgttccataagattcaccaaattaaagtgattttgcaggtctgcgtatttctttcactgtttttattaagcagattaaatatttagtccatatttctaaaattctgtttatgtatagaaattgtaaacttttgggacatgccatgatacgtttaatagatcaagtttaattatattgtggaatacgtcaaaagcttacataaaggattgttttagtagtataccatatatgtggtaatatcgcaggtccgatccgaatggtaacagtaacgtaaatagtgtaaaatgggaaagagaacataacaaggtcttgctagtgaattagaatatacaatttacgttgaacaaacggtacacataaatgaaacaaaagttgaatagtgatcatatcagaatatcagatcaataatgtataaacaatatcaaattttaactattttaatgatcgaaacaattcttataacaaacttaattcgtatgactgttttcgatcttttgatgatatatattttcaaaggaagttgtcattgtcaacttgcaattcaacagtttctaattttgggtgctgttgaaacccaactaccacattttgatgtatttaaaacattatactatgcatctttctgatacaaaaatgtatatcattaatatgtattagaattcttagaacatgcctatatatccaatatagctcatcaaacactaacgagtataaagaccatccactccaccaccacgttaagtttttgacttaatgatcatcggctatgttgttgtggtccaacataaagagtctgccgagtttggtttcactgtctaaattggaaccgtttttggttcaacaactagttcacgcagtaaagtatcacttaaatacagttagttcaaccggccataaaaaagtttgttctcgtacatatggatattattgatttacacattgagaatatctacccatctattattaacaattaagcttgacctagagaaattctgatgtagatttttctgattatcttctcatggttaggaaccaaaccttaccttgtttctctactcgaatcaatctctttattagcttatgtatggtttagtgttctctaaccaaaccaagaaaaggattggtttagtgttaacatactgtattactaagtacatagttattgggctataagaagctaactgggccacaaatccagaatcccaatataagtcaatgtacatcgtttgctaaaatctaaaaacggtatctttaatctcagaaaggacattatacaaagatgatgatgttacacataaggtcgtttatctacatcaacttcaacccactagttcttcatattacataaagtctcataaaagcgatttcgtatcgaacttttactcataaaattcccttattctatgattaaaaaggaagaaattccaaagttttatagtaattttatgcaatgccaacttgtgttgcttcgtaattccaggtacattacataatttaataaaattaaaatgaaccaatcaaaaacaaatccaggtcatcatcatgacttgggccggcccaatatccctgagtcggcaacactctctctctcttccattcctttatcactaatcttcaactaacttttctcttccccctaacttttttcacccaaatatttcgacttaattaccaaaaaaccagccattgatcgtaaaacctttccaccaccgcacaccccctcgccgggggtagtgcgtcgcatacacgcgccaccgttaccttctacttctctcttgaagcaacactcgtggtctcctgatctaatccgcgaggaagcttggtcaaaacgtcaagatatctcccgccaccgtcatctccgccgtggtaagagcttgaccgacgaagatctcgacgagcttaaagcaagtttcgaactcggattcggtttcggatctcccgaaaacgctgatccaagactttccaacacgcttcccgcgttagaactttacttcgccgttcaaaaaagctacaacgacgccgtttctaacaaatcaacaacgtcgtcgtcttcactctccgacggcgataccagtcctcaccacaccgtataccaaaccagtatgtataaacatacacacacacacacatatatacacatacacgattataaatttataatgatcaaatttcatttgaataggtgatgatccgcaaacggtgaagacgaagctgaagcaatgggcgagagtggtggcgtgcaccgtgaaccaatcgccgccgagatgataattttaacgactgttaaacgttgtggggataaaggttaatccggaacagggtatgtaaattgagacgccaaacagtcggtggagtccagtcagcgttgtaatattacacacacaatagtaaaatactaatatatgttggacccaacttgtttataagtcatattgtttactgtataatgcatgatttgatttgatccatcttcgtttagtatgtgatatataatttcatatatgcaacagaacgcaatttgcaaaagtatattctcagattctattgtctgacttttgtccatgggagagtggtgttggcttctcttatattcgttgctaagcttgatacaggcttatgcaaattcacgtgcatttgcatatagtgattaaaacagaaaaactgatctctnnnnnnnnnnnnnnnnnnnnnnntaacttatatatattataacttttgaaaagaagaaaaattatggccgaagaaacgatcgaaatattgagaaaatagagaaagtgtagggaacgatgagggagtaagtaacacatctgtgttttgtctgattgtctgattaagaactacacatagcagatctgtgttttgttatgggccttcactattaggcccatctgacccatatcgttaccgctttttagtatggaaaagcaacaacaatgtaaaggaaagcagaaacgttagatttctttagacgcgcaaactgaaagagctttgatcgatcgatttggaggattcgtagaagatatggttcgttcttacctttgattctgtctttattttttttatgtttagagattagcaatttctaaggatctctagataacaattttgcatgatggatttttttttttaagatctgatttgtatttagcgaatgttagaatgaagaaattagggttccatgattgaagaagattttagacgaaaccctttagtgttagagctgagattttgaattttggatgttattattgcagtcgagtatatacagaactgtttcgagaaaagagaaaccgagacgtcatcatggattgacgacacagaagaagcaagagattaaggaagcttttgagctatttgacactgatggttctggtaccattgatgctaaagagcttaatgttgctatgaggtaatatcgagagctttatatctttctgtctttgttttatggttttggaattgattcttgatattatcatttgtgatagggcgcttggttttgaaatgacggaagaggtattattatttctttcgttttttcggttttttccgctaagattcgttgtttatatctatggttctgataccttgatgtatttggtattgaagcaaatcaacaaaatgatagctgatgtggataaagatggaagtggagctatagattttgatgagtttgttcatatgatgactgctaagattggtgaaagagacacaaaagaagagctcactaaagcattccagatcattgatcttgacaaaaatgtatttactcataacttagttagttacttcatttgatcttaatttttctagaaactaaactatttttcttccaaattttcaggggaagatatctccggatgatatcaaacgcatggcaaaggacttgggtgagaatttcactgatgctgagatacgagagatggttgaagaagcagaccgagaccgtaagtgtcctaaaccttttttctcattctcttgtggcacaatgcttggtttgactaaagatatatgatacattactgaaaactgcaggtgatggtgaagttaacatggatgaattcatgaggatgatgaggagaactgcttatggtggtaactagaaaggttgttgctgttcttaacgatatttgatgagctctattatagttctttaactgaggcttaattatctgtaatattattactgaagatacatatatcacagttttaatctatagctcatcttaatggcaa

SEQ ID NO: 142877 - DNA, 674 bp, Arabidopsis thaliana landsberg
tttagcaaaatctcaaaagacaaaaagatattgatgtctctccaacgacccaatgggaactcgagttcgtcttcttcccacaagaagcacaaaactggtaggtgttgaaagaaacttatctaatatttaacttaatttggtttagagaaattggtttgtataattctcagaggaaagtgatgaggagttgttgatggttcctgacatggaagcagctggatcaacatgtgttctaagcagcagcgccgacgatggagtcaacaatccggagcttgaccagactcaaaatggagtctctacagctaaacgccgccgtggaagaaaccctgttgataaagaatatagaagcctcaagaggtaatcaatgatgagtaaaaaaacttttttttcttagcattcgatttgtggaattgaaatggtaaaaaagaaactgtggtgaaaaattacagattattgaggaacagagtatcagcgcaacaagcaagagagaggaagaaagtgtatgtgagtgatttggaatcaagaacttatgagttaccagaacaacaatgaccagcttgaagagaaaaattctactttgacgaacgagaacacaatggctttgaaaaaggcttattaaacaaaagggcctaaaaactgatggaccaatcaccttaaatattttacccctttta

SEQ ID NO: 142878 - DNA, 2360 bp, Arabidopsis thaliana landsberg
gaatatgaatattccgttgaagaagacttgctcctgaaatcctttggaccgaaacgcgtaaaattatttcccttcaatttctctgaaatctattcaccgtctcctttgtctcctcctccaaatcgatcgttcctcgtcgtcgtctgattttctctacgattgctttttctgtctagctcgataagaaaaaacaaaactaatttttgaagagtttttttttttgggtttgggagcgatgggtcaagcttttcgtaagctattcgatactttcttcggcaatcaagaaatgagggtaatctcatcatctctcgtgctatttatctggatgagatctcgtgtaattttgtcatctttgatttgttttggttttagtcatagcttttatcgcccatgtctgatctttgatgttttggaattttggatttggcaaatactttaaacctcaagcttgtgttttctggattcctctctattacgaatcatagatttgttgttagctgtggcatgatgaatcagaattgaagaaatgatttttgaatctcttttttttttttggttttcgttttccaattttgctattaatgacaggtcgttatgctggggctggatgctgctggcaaaacaactattctctacaagcttcatattggggaagttttgtctactgttcccaccattggtaagcgttctggttttttttttcttttttgcccatttcttaaaaactttgcagaatccttgtgttattgtcatagctgtgattaatcttgttctcagaagctaagtagttggatatttcttgttttggaacgagatttagttagatctttggtgtaggctgttagattcattctaataagaccttacaaaaaaaaaatgattgctgagaggtgggatcataatctatcttctccttcagttgaatctcatgataggtttacatactgatattctgcatatatttgtgatgcctttacttctgaagtcataagttatgtctgtgaatttctcttgtgtcatgtatgattcttggtgtatcattggttcttgtgacattatacttttctgtgattattgttctgtcattttccctttggttccttggaatatgtctgctgacaatttaaactttgttactcaggattcaatgttgagaaagttcagtacaagaatgtgatgttcacagtttgggatgttggtggccaagagaaactgagacctctttggaggcattacttcaataatactgatggacttgtacgtatatagtttttttttcgatttttgctttcagtcagatacttaactttcaaggtttttccatctctaagttggcatatgttatcctatatttggttatgatgttgcagtatcatatgttgcttggccaatctttagatctttttccatctttatcgaccatggtataagactactctatgatgctcttgcagatatacgtggtggattccttagatcgagagaggatcgggaaagcaaagcaagaatttcaggtataatacctcagaacttgcaaaagacttttcgtaaactctctggattataccttaccctgctctcggattgccacaggagatcataaaagacccattcatgctaaacagtatcattctggtgtttgcaaacaaacaggacatggtaattcgatattttcttttggtttttgtttgtttctcgtctgtgcttataattcctcaattcacttctttactctgctggatattagagaggagccatgtcaccgagagaagtatgtgaagggttaggcttatttgatctcaagaacaggaaatggcacatacaaggtacttgtgctcttcgtggagacgggctttatgaaggcttggactggttatcatctactcttaaggatgttaaagccgctggattcacatcggttggccactcgttttaaatcttccaggtaatataaagacctgaaaacaccagcgagctataaccagtagttcagtacaattactctcagtctcgtgatcaggatcttgtaaaacgtcatttctccttgcaggtatactttgatatcaatggccagtgtcttcttcttggctttatcacgaaatcagaatctctgaagactttttttgttaaggaaagaatgatcttctcattgtggcaatattagactccattagactatttttgaattttgatcatgctgccatgaaagcttctttgtatattctgctgatgaagagttgtatcatctgaaaaaccttctctttggggtcatctttgtccgattaagactttggtagatgtatatacattccttcgaaatcatgatatatttttttataacaattataagttttcccttc

SEQ ID NO: 142879 - DNA, 910 bp, Arabidopsis thaliana landsberg
cttgttcctttgaatcccccagaaaaaccctagctttctccctcattttcccccaaatctcacgacttaatttatgcttgggggagactaatcaaaggtcaaaatccattagggagggaatcgaatctcgatcgatctcaatttcttctgagaaaagaaaaaaatgtcatcggacattgaggtggtggaagaaatccaatcgaatcccaaggagaatggggaatcgagttctaaagggattgaagaagagagcttgaagaacgatgtctatactgctgccgcttatggtgatttggagaagcttcatagattggttgagtgtgagggttcctctgtttccgagcctgatgctcttggctactatgctcttcagtggtctgccttgaacaaccgcgtcgccgttgcccagtaccttatcgaggttttgtgtcattttacgaattgtttgttgattgctaaattagatttgaactagtggttttcaagtttctaaaactgatccttttcgatttctggtttttccagcatggtggagatgtaaacgcgacggatcatactggacagactgcattgcattggagtgctgttcgtggtgcgatacaagttgcagaactgttattacaagagggtgcaagagtagatgcaacggatatgtatggctatcaggttcatatctcttctttaactacgcgtccatgttctctgctgacttctatcaaatttcccttcttttcttgtttagttctcaatgggtgtatgttaatacttaattttgaactgcttgtaggcaacacatgttgccgcacagtatggccagactgcttttctttgtcacgttgtctcaaagtggaatgctgatcctgacgtgcctgataatgatggaagaagccccttgcattggtatgcttgc

SEQ ID NO: 142880 - DNA, 1156 bp, Arabidopsis thaliana landsberg
gttcaaagatcaagatctgcagacatggcggaccaaacaaccaaagctgtgaataccttttcttttcttaaatcagctcaattttctagtggaatatacttcgttccccagtaagatgtttgcagaaaatggaattgtaatgtgtatagttacaacaggcttttatggagattcaagctagcatgattgaactcactgggaagctcaaacaggtgaatcctcactttctttgtatttatcaagttttagaatcaaacgtgacacattgtataagggtttacttgtaatttgttagttcttgaactgtgtttggttttataatcccttctttcatgttgtgtaatgacaaaattggctttcctaggttattgtcatgtgttattgaaaaactgacatgtaattttcattacatgttattgagagtagtgtaatgacaaaattggctgtcctaggttattgtgatatggtgttgaaaaactgacatgtgatgtggatgggttttatttataggtgcagaatcagatgcgcaacaaagagggagatagaaagcgagctttcttaaccttggaggagctgaggccattgcctgaagagacaaacacctacaagtcaataggcaagtgattcaattctctggttttgagacaaggactagtaaagttttggtctaatttgtgttttattcttgttttcaggcagaacgtgagtggtggttatttagtcagtccaactagagggcctttagagaattttgaaggctgattatagttttgcttcattatatggtgaaacaggtttgttttagagcccaagacagtgctggagggtgaacaagagcaaaaactcaaggacagtgaagctgccgttgcttctctacaggtaacattgagacagtgaagctgccctctttcaatgtcttattgggttattaggagatcattgagatgctggttatctaacatgttttgttttcgggatgatttttagacatccaaggaatacttggagaagcaggtagcagaggttgagaacaacttgagggagctgttgcagcaagaaccgggcattgctcaacagattatgtccatgtctatgtaacttttgtattatcccaaacctttgagtttggagagcttttgggattgaaaccataaca

SEQ ID NO: 142881 - DNA, 809 bp, Arabidopsis thaliana landsberg
cgttcaccgaatcttcttgggttaggtttgtcttcaaaatcgtcagaagaagaagaagaagtcaaagacgataacaatgacgtcatcatcgtacctccgatttgcgatcgccgtcgtagctttcctctcaatcaccaccatcaccaccgcacgtccttgcaaaaccttcctaatctcctcatattccctctcaataaccccagaaaaccctaacctcgaatccgatttcacctccacacgattcgtcaccgttttcacaatccgtcgtctaaatcctcaccacgtggttcctttcttcgtcaatcgtcgtcacgagaagccacagatccaatcggatcgttccctccctttgatctctgataacatcaattcgtttagagatcgaaccagagatattcttagcgtcgtcgtcgcgcttttgttcggtgttggttgtggtgctttaaccgctgctactatgtatcttgtttgggctcttgttgtgaatcgtcaaagctatgattttgaggaagaagaagatgattatgagaatgatgaatctgatgctgctagcttgaagaaattgggttatgttaagattccagctccagctcctgctcctgtgaaggaagctgcttgatttgaggttgtgaatttcagtttctgcatattatcatgatttacgttgttgcttatctatgttgttgcgtacaagtaaattcgtctctgttatggatttatctaaacttactatactctaagtatcagtgtttttacgatttgtagttgatgtttcttatatatatatatataagtgtgattatgatgtt

SEQ ID NO: 142882 - DNA, 1349 bp, Arabidopsis thaliana landsberg
acgaatggctgatcaaggattagaagagagtaatccaatggaccttagcaaacatccttcagggattgttcctactcctcagtgagttcttttgtgcctttgtctttattttagtctcttaagagttagtgtttgtttgatgtctatggtgaactttagactgcaagcttgtttatatttgaaatatggaatacaccttctcaaagttaaaaccttctaacttgtaatggtgtggtttttgtttgtttgtttagtagtcaagtcatttacaagatgccaccaagaattgctgctatccgtcttgtaagctcgcatcgtgaggtctatgaaccatgtgatgattcatttgcgctagttgatgcattactcgctgatcgcaccaaccttatagagcacaaccctaagatttgtatggagattggatgcggaagcggatatgtcataacttcacttatacttcttcttcaaaacgaagttcctggtgttcattatctcgccattgacactaacccgatagctacaagagtgacaaaagaaactctagaagcacatggagttaatgctgatgttatctgcgcagatttagctactggtctagagaagagacttgctggctcagtcgacgtgattgtggtgaatccgccttatgtgccaacacctgaatatgaagttggaatggaaggtattgcctctgcttgggcaggaggggaaaatggccggacagtcatcgataaaatcttgcctgtggttgatcttttgctatcagagaaaggatggttctacttagtgacattaacttcaaatttcccagcagagatttgtctgatgatgagaaagaaaggttatgcttcgagaatcgtagttcagagatcaacagaagaggagaatctcgttatcctaaagttctggagagacaaggatgaggagagccaggacaaagagacatcatcatcatcgtttgtttcgcagttttcgaaatccttatcttcgcttatggagaaacaatggcgctgatactacaaagatggctagagatctcataagcatgctttgtttaaccaagaattctctagtgttttaatttttatgaaaatcatgttttgtgttggtggtgtagtcgtaacagtgatttgatttagtggggttattggttagtggattttaactgatgtgaaattttgattttcaattccacattatgtgatttgaaaaaatcaatgaaaaattataaatttctacttgaaaaaaaatgttcactaaatcgctaaatatgcaaaaatataatagcgttataacactaaagctgacgtggccgaaaaggagtggactttcacataaaacccgaagac

SEQ ID NO: 142883 - DNA, 1785 bp, Arabidopsis thaliana landsberg
  unsure (1)..(1785): unsure at all n locations
cacagacactgcacttgatctttctcgtggccaaatcttttgattctccgttcattctccggttccgatctcgaagaagatgagagtagtagtaatatcttcctttgtctccgtctaaatgcaacaatcctttcttcttctccttgcttctgccattagatcaagctcgtctccaccgaacgatccgtttctcggcatttctcctcaaggtttgttttctgctcattgaaagatctgcttcgttttgcttaagatcttcaccataatcactccgatttgatatttctttttctcgtttatgtgtgttagatgagaagtattacaagtcatcttcagagattaagtgtaaggatggatcaaagaaattcacgaaagctcagcttaatgacgatttctgtgattgttcagatggaactgacgagccaggttcttttcattttctcaatttctcttcttctcataagcattttgtgtttttcgattggattgattcttctctgttgaacaaaaattgtgtagcttttctttggtttaggattgtgattggtttcatttgaattcaaaagcggtgattattgaagttatactttgggtttagtggaataaagtttttttttgctttttgggagtatatgtgttatggatgatcatctttttgctttgctttgctttatgtggtaaaaactccaggtacctcagcttgtccaactggaaaattctattgccggaacgccggccactctccggtgattttgttttcttccagagttaatgatggtatttgtggtatgttactcaaattctgtagttatttacattttaaattttgttgaacctcttctttgcaagcatttgtgttttcaaatgcatggcagagaaagaagttgttgaagtgttagcttattcgtacttatggcttgtttacctatgggagcagattgttgtgatggaagtgatgagtatggatggtcaagtatcatgccaaaatacatggctgggaagnnnnnnnnnnnnnnnnnnnnaatctgaagaagaaaattgaaacatataatcaagggcttgtaataaggagacaggaaatcgaactggcgaaagtgggtctggagaaagatgcagcagaattgaagaagctgaaaagtgagcagaagattctgaaaggcctnnnnnnnnnnnnnnnnnnnnnnnnnnncttccttttgatgcataattgaatatttttgtttgctgcttttgcggcatgagagttgaggtttagttttttcatatggtagtaccatgagataattagtttattggaatgtgaaagcggaaccctgcatataagtgtagttcgatgcttgaaatgcttcgggatcagcccttaaagttcaactaaccaccaaaaggataggaagaaagttaaaaaaatacatgagttgtagttgaagtagtggaatctgataggatcattaacttctttctatgatgactacagatgataaagaattctttttgccaagttgacatgttttacatttccctcggctcatttcttctgtagatcgtaaagaacaaattgagaaggtagaggagaaggagcgtctacagaaagaaaaggaggaaaaggaaaagaaagaggccgaattagcagcccagcaaggaaaaggggatgctgaggagaagacagatgacagtgaaaaagttgaagaaagctcacatgatgaagggacgcctgcagtttcacaacacgatgaaaccacacatcatgatgagattggtaattacaaggattatccttcagatgag

SEQ ID NO: 142884 - DNA, 911 bp, Arabidopsis thaliana landsberg
gaagaaagaacaaaaacaaaatgcagatcttcgtcaaaaccctcaccggaaaaaccataaccctagaggttgaaagcagcgacaccatcgacaatgtcaaagccaaaatccaggtttctctttctctctttctccgtctcccaattccacctcctcgtgcttttcttaggattctagggttttgcactatgaatttgtttgattgttggagacacagattggtttgctttgtttgattgatttttaggttttctttccccgattcttgtttctgattacgatctgagattatctagcgatcgatgttaagatttatttagatttctgtgtaacagtaagcacaaaggctctcttaatccttcatgtgtttgcttaatttcgtatttgtttatgttttatggtacacttgaaggtatgtgaactgcttgagaatggttaattgtttctgagtttaagaagattggattaagattattgttaatgatcttttgatttggtcttcttctaattggtttatgaatggatgggatttgatgaaaacaggacaaagagggaataccacctgatcaacagaggttgatatttgctggtaagcagcttgaagatggtagaacattagcggattacaacattcagaaagagtcgactcttcacttggtcttgaggcttaggggtgggactatgattaaggtgaagactctcacagggaaggaaattgagattgatatcgaaccaaccgatactattgatcggattaaggaacgtgttgaggagaaagaaggtatccctcctgttcaacaaaggtaaataacttctttttttccagttacttcagaagaattaagtcgcaaagtttttgccttgggaacaaagagtcttgaactatattaactctttgtgatatctgtctc

SEQ ID NO: 142885 - DNA, 464 bp, Arabidopsis thaliana landsberg
aacacctagacctttatcaaaaccagagaagaccaagaagaaggcatggctagatcaccatactatggttcatcttacttagactacctctctctcccaaacccacatctctgtttcctcttcatcgtcgtcttcttcgtgttgtccttcacatggtacttgaacttcgagtccatcatcgaagacaccctggaccacctcaagctcgtctttatattcacccctctcttcctcctcctcctcgtccactttttctccggtggcctctccttctacgtcccctggcctgaacaagactccattcaccgtgctggttcttccccttggggcgtagcagccgtgctcgtgctcatattgttcatggtttcgtaccagtcagatttccaggagaggtggttcccgtttggggctaagtagatcaatcaaagtttatgatgaccagctttagttattctctagctata

SEQ ID NO: 142886 - DNA, 2033 bp, Arabidopsis thaliana landsberg; identical to SEQ ID NO: 72824

SEQ ID NO: 142887 - DNA, 3670 bp, Arabidopsis thaliana landsberg
atggggaattgctttgaatcttgttcgaagagaaatgataatgaggacgataatcttgactcctcagtgaactcgaaacccttttcacgtaagctcttctcattctttgatattcatatctctctgtttctggaagagtctaactaaattcttactggaattgttgaacataacttgtccttttgcacattttcctggaccctctgaatgttaatgcattgatggatgaatcttttatgtagtctggttattcgattgccctgttcttaactttagtaactttgttgttgatagttctgtttatccatttaattctcattttgatgtaagaatgtgtggctctgtttcttatccaggagctaatagtgatactggaagaagctcgaatctgtcatatccatggagtttaaaacctctcattacaagaaaatgtgaagctatcagtgctctacctccaccgcacaaagaaggagacataatgcattctcaatatttgaagtcctttaccttagatgagctaaagaatgctacaggaaacttctgtccagagagtctaattggagaaggagggttcgggtttgttcacaaaggctgtattaatggtggacctggaatcgaactcgcggttgctgtaaagaagcttaaaaccgaagggcttcagggacataaggagtggctggtaagcttcttttcaaatcattttattatgatttcaccttgagactgtactctattgaaatctctactacttgtatatggttttctccaaagagggaagtgaattatcttggaagattgcatcatccgaatctagtgaaactgattggttactccttggaaaacgaacaccgccttttggtttacgagcatttgcctaatggtagtcttgagaatcatttgtttgaaagtaagtaaagaaactctttcttaaatctaaaactttttgagttttttcttcaatgatctggattctgcttattctagggagttccagtgtgctttcttggtcactgcgtatgagagtcgcgattggtgctgctcgagggctatgttttttgcatgaagctaatgaccaagtcatttacagagacttcaaagcagcaaatatccttctcgattcaggattcaacgccaaactctcagactttggattggccaaagaaggtccaaaagataaccgttcacatgtgacaacagaagtcatgggtacagaaggttacgcagctccagagtatctagcaacaggtttctctttatttatttatttgctcatttgattccatttcaataaagaacataacatgaaaatttctaaaaaacattgcctttttttgttctctgtcaggtcatctaacaacgaaatgtgatgtctacagcttcggtgtagtgttgctagagattctctctgggcgtcgagtcatagacaaatccaaatcacgggaagaagaaaacctagtggattgggcaacaccttacttgcgagacaagcgaaaagtgtttaggataatggacacaaagcttgtgggtcaataccctcagaaagcagcgtttatgatgtctttcttagctttacaatgtatcggagatgttaaggttagaccatcgatgcttgaggtcgtatctcttcttgagaaagttccaattccaagacatagaaagagtagaagcaaaggttttgcttgtactaactctgcttctatgccttcaaaacggtttctcagacatcctaaggactaaaaaaatctttggctttttggatcgttcttttgtggaaatggaatataaaacttttttgttacttcattaataacttctgattaattatgagaaatggaaattaaagatatatggccatgatctacattctacaataatgttttaaccatacgtttcattttgttatcttaatcattcagttagtggttattaaacaatacataatcatgatcattgtgatgtgtatgtatgcgtatatataagaacatgtacattgagtagtactacactatttactcgaaatgattgcatgtcatatatgcatggagagacgaaaagaggagtctaatccaaatctaaacgcccctataaattacccactaattaacattaatcatatcttctcgtaactccaaatttaacacgacaatcaattagccgtcaatactcaataccccacttctcctaatagattcatcatcacttccattctttattctctctccatatcttactaccactactctcttctctgaatgtagtatataaatcttttctcgcatcatcgagtttcacaacacaacttctatctctctcactttctttacaatggctgatcacacaaccaaagaacagaagtcattctcattcctagctcattctccatcctttgatcacaggttaaattcagaagcttttgtttagtttcattttgttagtagtttttgtttacttataatttattttctctgtatttttccaaacgcaatgcagctccttaagtttatcctttattcgactgggaagaagatcttcttgctctccaagaaaactctggctctcaagcatttccttttactacaacttctctgcctttacctgatcttgaacccttgtctgaaggtataacatattattacatagtttttatattcatatagagctatatacatagaggtctcatggtcttgtttgttctgtagatgtactcaattcatacagctctgcgtcatggaacgaaacagagcaaaacagaggagatggcgcttcatcggagaagaagagggaaaatggaacagtgaaagagacaactaagaagaggaaaatcaatgagagacacagagaacatagcgtgagaatcatcagcgatattactacctacacaactagttcagctccaacgacattgtcaaaggaaactgtctctcgctacttctacatgcccataactcaggctgcaatagcacttaacgttggtttaactctactaaaaaggagatgtcgcgaattgggtattcgccgatggcctcatcgtaaactcatgagcttaaacactttgatcagtaacgtcaaggtatgtagaacaaggcactacacttaatattattgttttcagataattgaactcaaatgttttatcatatgaataggagctgcagaagatggaaggcgaagagaatgcagaaaaactgcaggacgcgttggagatgcttgagaaggagaagaggacaattgaggatttgccggatttggagtttaaggacaagacaaagaggctaagacaagcttgtttcaaggctaaccacaagaggaagaagaagagaagtctcaagtccgatcagtctcaagtaccctcgtgttcaagcagcggatcagttcctagtgatgagtcggttgatgaagcaggaatggagagtgatgaagaaatgaagtatctcttgtgtggtttctcaagtgaatttactagtggtttgtgaaatctgtttttagtgagaaattggggattgtaaagccaaatgctttttgactaattcaatgaacagaaaacataaatatgatactgaatacattgaagagtaacaacattagtgtagatagattactaacaaacaaaaaaagagagatagagatgaagaaaggagatagacctcattatttgtttcttaaacactaa

SEQ ID NO: 142888 - DNA, 1542 bp, Arabidopsis thaliana landsberg
atggtgaaccaaaggagaagacttgcgcagaagcgatacaaggaagctaatccagagctgtttccaaaagcagaaccaacgccaccaaaggaccctaataagaagaagaagaagaaaagcttgttcaagaaaaagaaacctggatcttccactgatagacctcagagaacaggctcttccacaagacatcctcttcgagttcctggtatgaaacctggagaaggctgttttatatgtcattccaaaacccatattgctaagctttgtcctgaaaaatctgagtgggagagaaacaaggtttgttcttttcttctttaatcattggttttgggattagggttttagttcaatttagttttagatttcagtagggttttggcagctcttgttagaatcagttgagggtttaatctttatgaactcaaagatgaattttttcatgaaatgttggtactttgatgatcattagacttgttggttactagaaaatgaatgtttttggttttgttgtttgtagatatgcttgcaatgtaggaggagagggcatagtcttaaaaactgccctgaaaagaacaatgagagctccgagaagaagctctgttacaattgtggagatactggtcattcactttcccattgtccttaccctatggaagatggtaatttttctcttctctggatccggaatatttatcttttctcatattacaagatttcaggaaacctagcatcgaaatttgtatttttttttacctctgtacacagatatttgacttatgatctgaagtgtagttcatgttatttagagagtttaacattatattctctgaaaacgtatttgaggctatactgtcacttgtttgtttgtttgttaagagtagtcactaagattagatttggttgctgtattgattcttttgtaggagggaccaaatttgcaagttgtttcatatgcaagggacaagggcacataagcaagaactgtcccgaaaacaagcatggaatctacccaatggtacaatgctcaaatcttgtttcgagccttttcttttcctcatagaagatgagttttgatatgttgaacaatggatttggtgggccttcttttgcagggcgggtgttgtaaagtgtgcgggagtgtggcgcatctcgtcaaagactgtcctgataaattcaaccaagagtcagcccaaccaaagaagacttcaagtaacattttcttttgtctcactcttccaattcttgagcttctaattatgtgatcctagtcaagtagtttctctttcaagtgattcggaacagtgaatgcgatctcatttatcttataaagaccataattgtatctccctgactgaaatgacaggatttgatgctacaccaagaggaaagctcactaagtttagtggggacgatcttgaagacgatttcactgaagagcccaaaagcagcaagaagatcaatacctctgatgattcagctcagaatagtgtcgaggtgaagaaaaagaaacaaggtccaaagattgtcaatttcgttggatga

SEQ ID NO: 142889 - DNA, 1249 bp, Arabidopsis thaliana landsberg
acgtgtcaaaacattacattttcactctcacattcagacgcaccaatcctctgttttggattttgaagagaaaatggcaagcagcgacgtgaagctgatcggtgcatgggcgagtccctttgtgatgaggccgaggattgctctaaacctcaagtctgtcccctacgagttcctccaagagacgtttgggtctaagagcgagttgcttcttaaatcaaacccggttcacaagaagatcccggttctgcttcatgctgataaaccggtgagtgagtccaacatcatcgttgagtatatcgatgacacttggagctcatctggaccgtccattctcccttccgatccttacgatcgggccatggctcggttctgggctgcttacatcgacgaaaaggtattcttcttttcttctttcacttgctcatcaagattttattaattaaggtttgttcgcaacaaataaatttttatctatagtgcagagtttttgcaaagcaaatagttgtcttaagtgcttttgtggttactagttaatatatatacgcaaaacatagcattttgtggtctaaaataagtatgtgaatggaaacgcaaatgtaaatataaacaactcaggaaaatatgttagtttcattaattacaatgttaagacttaagacataaactgatctttatttttcaatgttggacattgatcaacatgaatgaagtggtttgtcgctctaagaggtttcctaaaagccggaggagaagaagagaagaaagctgtgatagctcaactagaagaagggaatgcgtttctggagaaggcgttcattgattgcagcaaaggaaaaccgttcttcaacggtgacaacatcggttacctcgacattgctctcgggtgcttcttggcttggttgagagtcaccgagttagcagtcagctataaaattcttgatgaggccaagacaccttctttgtccaaatgggctgagaatttctgtaatgatcccgctgtaaaacctgtcatgcccgagactgcaaagcttgctgaattcgcaaagaagatctttcctaagccgcaggcctaagttgttggtggactaggttttgtatttgtgggttgggttcttgcaagaataaattaagagtgttattgtttttagatggctttatctttgtgtgtgagttttaatcaggcgtacgttaaacgttacgtatgtatcaggtttggtgaatgattttatttaggttatgttgattgaga

SEQ ID NO: 142890 - DNA, 1125 bp, Arabidopsis thaliana landsberg
  unsure (1)..(1125): unsure at all n locations
gctttcttttgcctctcgcattttcttcatcctttttgcctcagagctccgtggagagcagcaatcagtagccatggctgagcaggttcattttcattcctttgtgttcatttctacattctgatagatactctttacgattctcattctcttctttcttttgtagactgagaaagcttttcttaagcaacccaaggtcttccttaggtaaattcatctgaacaaatctgagaatcttattacttccatttacaaatcgattcatatgatttatgtttttttttttgtgtgtttcagctcgaagatatctgggaaaggaaagagacctggtaaaggtggaaaccgtttctggaagaacattggtttgggtttcaagactcctcgtgaagccattgatggtttgttgttttttcttatacttctgattatcatttaagcgaaagctccaaactttgatctgaatagttgattcagtgttgtgtattaggtggttaacagtataatctaagtttttctgttgaaaactagagattttgttgttggtgtttagttgaatatcattgagtgtttgcttttgattagatttgaagcaaaacctaaaaatttcaggcatgtttcgtaatcttgatatgtttattgtgtggaacaggagcttacattgacagtaaatgtccattcactggaactgtttctatcagaggacgtatcttagctggtacttgccacagtgccaagatgcagagaaccatcattgttcgtaggaattaccttcactttgtgaagaagtatcaacggtaagtacattgtgatgaacctatgttcttgaacaaagatttaacatcaatggctagaaaagattatcttcttaaattgtgaatctgtgttcttgttagtccaaagatttaacatcaatgctaaagaaaactatattcttatatttttatcagatatgagaagagacattccaacatccctgcccatgtctcaccgtgtttccgtgtcaaggaaggtgaccatgtcatcattggccaatgcaggtgaatattgtgttgtcttatgcttcttatgaantgattttggcagtgcggggaaaacgatatctgattgtttgtgatgtatgttgca

SEQ ID NO: 142891 - DNA, 3262 bp, Arabidopsis thaliana landsberg
cgttgttagctttctctttggctgattccttcttcttcttctctaattcttttccttggtttcagagtataataatccccagcttctttgatcctctctctctctctcttcctctgttacatgatggctacgacggcgagtagtgccgctaattctgcatctcgcttctccattgattcctctatctcgcgatcacgtcacggcgattcctctccctggttgttaccttctgattcccatgatcatccgactctttccctctcccaggacgatcccttctcagcgccttcggtctccccgcccaccggaaataactcttccgactacgacaatgctgataagaagcctcctcctgtctggaacatgccttcttctaatagctcctccgatgtcggccctgtcatgggcgccgccgaatcctggcctgctctctctctttctgctcgctcttcttccatcaagtctccctctttggatgcttccaaaccttttcctgatggatcatcgtcatcaataccgcctccccaggtcgtttctttttgctctccaattatgtcattacagaatattagggattcaccagtatctacctattataggcttgtggtttcaagtttcatttctcaagctccttcttttgcatgtttcgaatccaaagaggataatttagtctagtcgtcaatatgcttgtttgattgcctatagtagatacatatatccgcttttgctcattatccatccatatatattgcaggctacttccaacaccagcaccaatgccaatgcaggctcgagtgtttctgctacctcatctgaaaacagtgctgttaataatagccagaggaaaccttttagacggaataacaacacatcatcttccagtaccagtagtaacgtctccaatgctgcgcctttaaacaccagagatcagaatcacagccaaaggggtggtggctcttttggttcagggaatttccgtaattctcagaggaatcgcaacagcagctcttaccctcgtggggaaggtcttcaccatggaaacaggcgcaattatgagcatggcaaccaaagcggcttttctcaccgtaactatagtgggagagacatgcacttgcaaccgcagaggggtgttgggatgattagaccgcagatgctgatggggccaccatcttttcctgccagtagtgcgcaatatatggcagcgcctcaattaggttcatatggtggccccattatctacccaggtatggttttgctcatcttatgctctctcatacattcccatttctaattcattcattctgctatgttacatcttcagattatgcacagcatgtctttatgccacatccatctccagatccgatgggtttagttggacccttcccacttcaacccatgtattttcgcaattttgatgccatcttgtacaataagatattgacacaagtagaatattatttcaggtaatcgtttcagttttatttggttgtgtttgcacttttctacttgtttatgggttaccccaatgctccattagatgcatctatcagaagtgtgaattacaaattttatcctttgttaatttttaaacgcagcgctgataacctgagcagagatgaacatttacgggatcagatgaatgatgaaggttgggttcctgttagagtaatagcagcattcaggagagtaagtggttttccatcttctattctgaagctgacatgcgttaatcactttacaatgtctactgcagaaagtatttcttattgtatcaaggtgttacttatattagttgtgtttgtttgtttacgtgaccttggaagtagtagtcttagtttagtaagtgtattggtggtaaaaaaaaagagtaattctttgaaatttttgcaacttttgcagcttgcggaactgaccaataacatccagactatattggaagcactgagaagttcagaagtcgtggaaattcaggtatgtaagatgagcatccttgtctctcattcattgatggatataagataagaagtaaagtggaaaggtgtaaagataaaaaaaggcatagaaagactaaaggtagaatgtggatgggattgtagggtgaaacattaaggaggcgaggagattgggacaagtatttattgcctcgtgagccttcaagcgtccggtccagctgcgggggctagcaacaatgcctcactggtgtctcaaattgagagcatgactctatcagagaggagcagagagggagtgtaagagagatgcgactaagagagagaaagaacgatgtgtttgcaagcctatctctcttcctttccttttttgtgttttgtcgagaattggatatgaactgattgatactcagtctcataagaaaaaaaacaataatatgctgctcaactttttttgaacttttctggtttttaaaaattttttggataggaaactttaatagttggtgtttggctgatcattgatttagtcatccttgttaagaaaatgtaatatctgaagatacccgccactcggcagagagggtttcacgtcaaaccatatccgaaatactagagagctctaaattgaaaacagctggctatctcagcagtgacataccattccttcactcgtccacgtgcaaagtgggcatgttggctttactttatgtatgctttaataagacaatttgaagttaccagagaaggaaaaaaaactgtcgtaatcggcgctaatgggcttccgagacatttgttaccggaaacatcacaaaaagcttaagcagttccaggcactcttctcccttctctgatatatctgattccttttttttgcttgtaactgttgtgtaacgagactgtgtttcgtatgatgaaaaaagaaggtggagataaaagtgaagatggactgcgaagggtgcgagagacgggtgaggaagtcggtggaaggcatgaaaggagtcagcaaagtcaccgtcgatcctaaacagagcaaactcacggtcgagggattcgtccaaccgagcaaggtggtgcatcgggtgatgcatcggacagggaagaaggcggagctgtggccttacgtaccttacgaggtggtgccacacccttacgcacctggtgcctacgacaagaaggcccctcctggttacgttcgtaatgcactcgccgaccctctagtggccccgcttgctcgtgccagctccttcgaggtcaaatacacttctgctttcagcgatgacaatcccaacgcttgtaccatcatgtga

SEQ ID NO: 142892 - DNA, 2271 bp, Arabidopsis thaliana landsberg
atgggaaccttcttaggatattttgtgcctggtctctcacttgcacttctcggtctctggcatgtaatcaataccatacaatcttactctctaaattccccaaaccaaaatttcacctcatgattctggttccctttcccgtataacaaaaaactcaaacatctcgagctcatcgtcattatcattgttactttcttatccattttcctcctaaactcagatttccctttccttaaattatcgtctttcaaaccggaaatcaaacacatctgcatagtcttccaactcatttcgtttgcgtcttccactctcatctttgacgtaataaatcctcccgataaggatatataccggtttcatcgggcttcatgcaacattggttttcatgcaagaagtactcttctttcttgattctcactccactgatcacttaggtcttgaaggccagtaccatgtcctcctcgaattcgctgccttcgtctccttctcttcagctcttgcgtcgaccatttaccctaaatctttttatgcgtctcttgtgttctcggcctcgctcatgtttcaaggatgctggttcttgaacatggggttaatgtttttagatccaaattatgtccatataggggttgcttgagaaccacgaccgatacaccaagaagtaacaacagtactattgttgatcatagtgggctggtttgagagtctccttgtacagaaattatggcacaagcgttagcgaatcttcagtttagctggattttatcagctatattgatttttacatttgtattctctctcaaaagtttcggggaaagtcgccgtgtttcccaattgccggtcgtcaacgttagaatacgaacgtaattttcgacgaggaggtgatcgttctactgtcgtggaagcctcgacgaatccttttcgagaatatatttcgtctcgtttatattaatgttgtaatagtatagaaaatatattttgttatcggtaggtaagcttttactatttgatgtaactagcctttgattgttatgacatgtagcaacgaattatacattggttattgataaaagcgtatttccatgatattttttttaatttatatacaaggtttatactggtataacttcaataatggtaagacttatcttttgactagagaactgtataaaatgagtcttggaaaacgacatagagttaaagcaactttgtcactcttgtcagataaaaacttatcggtttctcttttccggctttaactctccactcatcactctccactctcaattttcaccttctcttctctgaacaaggcaaacaaaaatggttacaacccaaaacacgattgccagagtcacctccgtctctcaccgccgatcacagcaagatcctgagtcgccggtgaagaagttcttcaagttggtcttaccttcaacgatgaaggataagatgatggtaattacttaacacttagaaaaaacttgaaataaagtgtttgcatgtgtgttgttatccctgtttcaatttctagggactatatctgaagattcactaaacagtgtccatttcttttgttttatcttggactagagatctaaaagggatacactaatctgatcatttgttcttaagaaatgtagagaatttaagatctgacattttgttacttgtttctgaaaatctcattatgttgaataactttgagcagaagattccgccaagattcgtgaagctacaagggtctaaactctcagaggttgttacattagagactcctgcgggtttcaagcgttccattaagctcaaacggatcggtgaagagatttggttccatgagggttggagtgagtttgcagaggctcattccatcgaggaaggccactttctcttgttcgaatacaaggagaattcgagtttccgtgtaataatcttcaatgtttcggcttgcgagaccaaatatccactggatgcagttcatatcattgacagcgacgatgatataatcgatattacaggcaaagagtttgttggaactcaaggtacaaggaagaataatcaatctgttaatggtggtgatacagagcacaaatccaagaagagatcaagagacatcgaacttgacaagattctacacggtaagaagactttgttcttaatatagattaagaagattgggatctgaatatttttaatctatgtgtagatcttgatgtgatgaatccaatgcatgtgcttaaagaagaagaagaagacaagagagtcttcaggggataa

SEQ ID NO: 142893 - DNA, 2067 bp, Arabidopsis thaliana landsberg
ggagacggtgaagatggcagtgagacaaaaagcaatggcgacgttgccgaaactgattcaaagcatgagaaacgaagttacgaagcagcccagtcttgtcttaccatctctcagaagagctttctctctctacgatcagatcaatctcatcgataacgttcctgaggatcagctccgatttcaggagtattcatctctctcagtcatgttcctaatttgactatgtagcaagggaatttggattttcgggtatgaaatgaatcaattaatggtgctttttgcaggtttgatgagacgagtttcactgtgaatggggttaaatacgaaggaagcttgctctgtgttgggaatttgctaatgtcatggagccctcgttacttctccgacatcacaacggataggtaccagtaccaccttctcccttctcttcagcttacttatacaggactagagctagagttaagagattgcgtaaagttataatcttttcattgttcatgaccctctctaatgaatgtttagttaagtccttttcagcgaaagttgaagtctgtctagtgtggcctctcttgtacgtactagtatctgtttgctgtgtttgatctaactttgtaatatctatctactctttctactttgaagttaatgtgtcattgctaaacactttacatgtctaattcatggatgcagcttgtcaatcttccagacggttcgaccaattccaggtactatacattttaccattttgtaagttgatttcttccacattccttatacaatagtctttgttccaggatcgttggaaactgtatgatacgtttgcgtacgccatatttttagtggctaaaaagtaaaaaccttttgcacatattgaagtgtatcatcagtggtttttgactctcctttttctgttttttttttttcaaaacaatctctagagctcttgattgtcgggtgtggaagatacaaccacccactgaatccccaagtccgtcagttcgtaaagtcaatcggcatgaagctagaaactgttgattctgtatgtcctttgttctattcaagtatttgttctgttggtttggagtatttttctgtgcttattgattaacgctctgatctatccagagaaatgctgcatcaacttacaacatactgaatgaggaaggcaggatcgtggctgctgcattgcttccttatggagttacatcgtaagaaactcaacacctctggaatactgtagaacaaacttcgaacaacttgcctcgatctttatagtggaaacaccaacatggtcttcttgtctactgtaaatgatatatttcactctatttgtaaaacttttgcaaaaaaatcgaaatttacaggattaccaccttgttacgtagctttaatttgattgagctttatctgaaaaatagaagatatagatgttaggggttagatttgggcttgcttttcccaaggcccaaatccaagtcaaaggcctaagcagaatgttaagtcaagagggtaggctcgtcaaaaccctggaggaatgccctacacgcagaaggctataaatacggaatagcatgtcttgtcaaagaaagggggatccaggctgacacacaaagacagagagacgctcctcaacgttcacaagctcctcacctcgttccaagctcctcaagcaagcagctctttctcgtcaacaagctcctcagctcgtcctggacaacaagcgatcagctcgtcttcgtcaacaagctcatcaactcgtcatgcacaacaagcaatcagctcgttttcatccttggatcgtccagctcgcaacccatccttggacaccaagctcatcttcgggaaccaggatcgtccacaagcaatcagcttgttctcatcttggatcgtccagctcgaaatccgtctttggacgcgaagaacaccttcagatgtcaggatcatcttaaggaattaagctcgtccttatacgtcaaggccgtcctcggacatcaagatcgcctttccggccactatcccgtcttgcaccaactatcggctcgttctttctccatccatactcgttaa

SEQ ID NO: 142894 - DNA, 902 bp, Arabidopsis thaliana landsberg
tgcagctttgcgtatggaacacggatggatgggagaagcagaaaagcaaggttctgcaaattccacagggaagatccacgtcttctttgtcagacacgcgtgttcagtttcatcaagatcaagtacacttccttgtggtccatgaaactcagctcgctatatacgaaacaaccaagcttgactgcatgaaacaggttttagtctttatatatgttcattctctctccttgcatctgagtaacccttatagaagaaagaaatgtctttattttgattccagtggcctgtgcgtgaatcagcagctccaataacacatgccacattctcatgtgatagccaattgatatacacaagtttcatggacgctacaatatgcgtcttcagctctgcaaaccttcgattgcgttgcagagtcaatccctctgcatatttgccagcttctctcaggtgagttaataaaatgaatataaactagtgcaatgttggatcatgaatcttgagtcttcatgttgatgttttgtgcagcaactcgaatgtccatccactggtgatagcggctcatccgcaagaatccaacatgtttgcagtgggtctgtcagacggaggggtccatatattcgagccgcttgagtcagaaggtaaatggggagtagctccaccgcctgaaaatggctcagccagcgctgtcacggctacaccttccgttggagcttctgcctctgaccagcctcagagatgatctgcttcagtttcttactctgttttttttgtgggggttttagatcttttccgatttattattgttttgtttgtgtggggggaagaaagcattctaacaaggtaaatgaattaatagcttacaagttcttcttaattggttaattcgatgttgcttgcctctg

SEQ ID NO: 142895 - DNA, 1655 bp, Arabidopsis thaliana landsberg
gttggaagctctttgaaaactcctcccttcgaattctccgtctctttctctctgtatcgacatcgaatcggcaatggctgcttcaagctccgttttcacagtatccccgtcgcgaaatcttgcagctattcctcttcatcagtccctatctccaccgttgcttagatccagctccgtcgcgtttcgtcccaaacgaagatccagctcactcgtcttatgctcaactgatgaatcaaagagcaccgcagagaaagagatcccaatcgaactaagtaatttccctcttattgcactctgattttcaaatcaagtttcaacttttataaattgttaatctttaattgtgtcagggtatgaggcgtttccgacagtgatggacatcaataagatacaagagattttgcctcacaggtgataattttattaaagcattgttctttttacagctgaagtttgcattgttgtgatccagtttctcaaatctgaatcttgttgtgtagattcccatttctgttagttgatagagtgatagagtacacagctggtgtatctgcggtagctattaaaaacgttaccattaatgacaatttctttcctgggcatttccctgagagacctataatgcctggagttctcatggttgaggtaatttgcatttgccctattctctcttcttactccaaaagttcaatctgtttgcatatatttatagttaaaagagaagctttttgagcctagacatttactttttgctctgtttcttgattgcttagttgattagttggttttgaattgtgattttggggaatagagtgagggtgaaatttgtgttcaagttttgagggaagtacaggtgaaggcttttggtttaagtttcagttaagggtcggttaatagagatctccgaagctcgaaatttaagaaagggacttgatttaagattaagataagttgttctaaaggattcttggatcatagctttatgctgtgataaaactagtaatttctatcccaaatgtatgtggaatgaattgttaggaggctccttatgtgttgttgcagttaataagagctacatatagtttattcatagagttgctgagttttacacatcataacaacactactaagtggtatggtatatgttttggttctacaggcaatggctcaagtgggaggtatagtgatgctacaaccagaagttggcggatctagaagcaacttcttctttgctggaatcgacaaagtcagattcaggaagccagtgattgcaggtgatacgctggtgatgaggatgacacttgtgaagttgcagaagcggtttgggatagcgaaaatggaagggaaagcatatgtagggaactctgtggtatgtgaaggagagttcttgatggctatgggaaaagaagagtgatcacgcctttgtttctttcttcttcatacgggccttgtggctgctaattagttgtcacatcctaagttgagtctcatttctatcttcaatttatgatgtttgtttgcacattatgattatattaaaaaagcaacttcagttttaataactagatgacccaaatatatattatagtttgaaatgagatgaaagacaatcccaattcagcgcgagataccattacatatttggctggggaaga

SEQ ID NO: 142896 - DNA, 1196 bp, Arabidopsis thaliana landsberg
gtttcgacaaagcttgagagagatcgatgtcgtcaaagatggtgaagtcttcagaaatcgtcggaaaacttaatctcagggcacaccaagaaggaggctttttcgctgaaactttcagagattcttctgttttcctctccacctctcagctccctccaacctgtagctctcttcctcgtttatttgcatctatctatgtcttcctttgatttggaatcttgttgatatagtgtcttcattagtttccgattttgcattttgagatttcagcggtatgatcctccgaaatctgatcagacataagtcacggcttccgtagaattcttgtctttcctgttaccaagatcatccaaatgcttgtcttgtgaatttgcttggatcttctattcacaaatcttattatcaatgcttaaactttggatttgggttattgcagatcatctcgcaagtttgatccttttttatatatttttctgaatctctgcagttaaggtggacagagctgtgagcacaagtatctacttcttgcttccatctgggagcgtttctcgtcttcatcgcataccaatggctgaaacctggcacttttatttgggtgaaccccttactgtaagttcaaagctcttgtctttacagtgagtgaacaaaactgtataatgagaagaagaatataatccatgttcttgaatatggcttcttcttcttgccttgatcaggtagtggaactctacgatgatgggaagttgaaattcacatgtcttggtcctgacttgtttgaaggtgatcagaagcctcagtacacggtccctccaaacgtctggtttggttcgtttcctacaaaggatgttcatttttctcaagacggggctctgcttaaagctgaggctagagactctgagaaccatttctctcttgttggctgcacctgcgctcctgctttccagttcgaggactttgagctcgcgaaacgctctgatctcttatcaaggtttccgcaacacgagtcactcatcacaatgctatcttacccggagtgaaagggcctacctagaggagacgccttattggctcaatggtttttggtaactactaagagaaggatactatgtttgctttgttacttcaacttttcatatgaatcatacaaaggttgtaactgtaaattgagttcacttttcatctttgtatctttgttt

SEQ ID NO: 142897 - DNA, 1338 bp, Arabidopsis thaliana landsberg
ataagtgtttttgggattgaaatgggctttagtaattttttggtttgaatagtttcaggaaatgcgagcttgaattcgcagagaagaacatggccaaagcagtacaagtctaaaaatggttacaggtctcttcgagtgaatggattatttggaggtggaaacaaagataataacagtgaagatggacaatcaaaggttggtacattacattggttttttcaaatagcaaacagattctgcaataggtgaacattttaagttaggcttcatgttgtaaagattcaaagtttatgattttggaactaatgaagtttgtgtgtgatctttcctaggcaggaatatttggtaatatgcagaatatgtatgagactgtgaagaaagctcaaatggttgttcaagtggaagctgtacgtgttcaaaaagagttagctgcgtaagtccggcacatttatcatacaaaatttgaggaagttttcttctatgagtaatgagttttgcatgttggttttgttccaatttcgcagcgcagaatttgatggttattgtgcaggcgagcttgtcaaggtcagtttagagcttgttttggccttaagatagatcaatgcacataatagatcagtgaagtattaactaacgtttacttgatgatgtaagaactgtgttttctgatttgttagtctttggatgatttggcaagaactccactctagaatctcaaaactttgtttagtctttattgtttctgtcacaaagtctgatgacctaaaccttatgaatttgtgtcaggttacgttatcaggtaaccagcaaccaatccgtactgatattaccgaggcagcaatggaactaggttccgaagtgagtaaccatacgtaccttgttatggaacagtcaaagctaattcatcagtttctcttgttgatgttgtgtgttttcctttggcagaaactatcacaacttgtcacagaagcatacaaggacgcacacgccaagagtgtggtggtatagcaatttgcagaccatttatcacaatgcaactaaagtatttgtttctatccatttcttctaattgaactttgtgaattttttcacaggctatgaaagagagaatgagtgaccttgcgcagagcttaggaatgccaccgggtctcagcgaaggaatgaagtaagaagctgtttttgttgtttcatttcaactttcaggtatgagaggttcggctttttttgtttgtttgtatatcagtcaggcagaagcaaagagctttgtactctactcttatggaattatatataaaagatttgaaacttttggttttctgcaattttattcccaaggta

SEQ ID NO: 142898 - DNA, 2641 bp, Arabidopsis thaliana landsberg
agatcgagcttcccacatggacagacattgtgaagaccggaaagttgaaggagcttgcaccatatgatcctgattggtactacatcagagctggttagttctctttcatcctagtttatctcttattatctctatgcgtttataaagttttcaattagcaaaatgacttcttgtgcagcatctatggcaaggaaggtttacctgaggggaggacttggtgttggtgctttccgtagaatctatggtggaagcaagaggaacggtagtcgcccacctcacttttgcaaaagcagtggtggtattgcccgtcacatcctccaacagctggagacaatgaacattgttgagctcgacaccaaagggtaacattactactactactactactactactactactactactacgttagaggtgtttctctttaaaaatgtttttatgctaatactagtatcacttttgttcttctttcagaggaagaaggatcacttccagtggccaaagggatttggaccaggttgctggccgtattgcatttgaaccttgaagatcttaatgttcttttttgttcttcttctacttttgaggccattgtgcttttagtgtttatctttacttttaagaattgttaccatttcattctcaagacttgcgctcataatgttcaaaaatttatctttttggcgatggctttggacattgaaacttatgtcttcaaccgtatttttgtgttcgtccgatttaaggataataggatatggtttcttcatccctaaattgctaatttcatccttctttagtgccactaatctcacttttatgcttcacttttaaccgaaatttctttgagagaagagaagcaaagattagatatcttcatcacattatattctttgttgtattctctcctaggcaaagagatgtcatctttcttcaatatcatagctagcttttggtttccttagagatagcctcgacctttcttattccaaactagcaatgatgctctctgttgctctcggcggaagatgtagccagtcccaacgtacatggactttgaagtaggtactaacatgaacgtatacagtgttgtggttagtatacttttgaggatcggatcatcaaccttatcagttgattcttcaacttaattaaactcattatataaaaaaacaaaatatttatgtgaccgttaagaacttaattgtgaaagaagaggaactaacagagaaaaaagggaattgtaatgtgaccgttaattgtgattagcaatatccctttttctctcaaataataattggggcatttgcaaatcttacacttgacttccttgaaaagaaagcctctgttgcgtaattacaatttgcattttggttgtatgtttgtgattgtttcataggtctattccacaactttttaccttttttatttttttactctccacaactttgtacctataactaaataatataaagtcacaattttgtacggatattctgatgtttcattagtcatttacatttttattgattatgttcgcatgtacagctactttcgtaaacagcttcttttgtacgaattgttctagagaattttcgatcataatcaaaatataaacaaaatgtttaacaatgcgcttcaaataggtgggcctttgttataagtaatttaaaagtcgaagaacccaatggcctatatgtcattcaaatacatgggcctatgttataagtaattaaaaatttaagaaccttaaaggcctacatgtgattctcacaactctaattcatgccatgttttattttaaaagtgttaattttcattaacataaatggtaaaatcgtgtattaaacgtactaattcatttcaagtaaatattccttttataccgtaaatatactacattgtatcattttcatattttatctttggtatttcattattttcttcacattacaaccataaattatgaatttcacattagaggcgtatacgtatttaaaaacgattaaaagagtttccaaaaacgtgtgtaaattacgtactatataaatattaaaaatggatcggtgatccaactccttctccttcatcatcatcgtattcaccgttgtcctttctttcattgacacttgccagtttacatcgacaaacaaaagaaatcagaatggatttctcagggagcttctttgtcatcttcgttaccttcttctttctccctcctctgtcttcagctgggagctacgattctggttcgggtctcgagtcactcgctcgcgggatgcttcattcagccaaggatcctgagttcttcgagtggatgagaggaattaggagaaagattcatgagaacccagagacagggtttcaggagttcaaaacgagtcaactcgttcgagacgagcttgactcgcttggagtgaagtataagtatcctgtggcgaagactggcgtcgtcgcttggatcggatcctgttcgaaacctgttttcggacttagagccgacatggacgcacttccgttacaggtttgaaatctaataatcaaagttccgatttttactctgatttttagattgctttgtttgactaatgaatttgaaaaaatggggacaaaaaaaaggattagtggaatgggaatcga

SEQ ID NO: 142899 - DNA, 951 bp, Arabidopsis thaliana landsberg
cacaaaattcccactcaccacacacaacaaaagaatagtgatcgaagctcatggcgtctcttgcaaccgtcgccgctgtgaaaccatccgccgccataaaaggactcggcggcagctcactcgccggagctaagctctccatcaagccttcccgcctgagctttaaacccaaatccatccggtaactaaaacttttcatttattcattaattaggatcaaaatgccactataaccacactataaattcaaaatatattaatagatttttgctggctgaagtgtgttttaaacgatagatatagtgatgattaattagcttaaaaaggattaaattctgataatttcatctcttctttgtgattaaattagcttgaggttgttgtgttcatgtgtaatagggctaatggtgtggtggctaagtatggagacaaaagtgtctactttgacttagaagatttgggtaacacaacaggtcaatgggacgtatacggctctgatgctccttctccttacaatcctcttcatgtttcttcatctcataacctaacttgacttttctacttcaatcaaacactattctgagaagagattctcttctactttcgttacttgtagagcaagttctttgagacattcgctgccccattcacaaagagaggattgctcctcaagttcttgatccttggaggaggctctttgcttacttatgtcagcgctacctctaccggcgaagttcttcccatcaagagaggtcctcaggagccgcctaagctcggtcctcgcggcaagctctgatctatattcatgttacctttctcttcttccttctaaaactcatcaacatttctcaatactgcaaacccttttaagtaattttatgtatattctgtttatctgttacatttgaaacgttttttcttcccctaattttacaaaagaaatcttttttt

SEQ ID NO: 142900 - DNA, 654 bp, Arabidopsis thaliana landsberg
tctaagtctatggaatagtcaagagagaatggatacgaacaataccagaacccttgtgaaatttgcagctcttgcaatagttttagccgccttggtgttgatggaagaacctacgagcattaccgcatgtaacatcaacgcaaaccatctggaaaaatgtcgtccagccgtaattggagacaacccgccatctccaatcaaagagtgttgtgaactcctccaagccgctaatctgaaatgcatctgcagattcaagtctgttctccccgttttagcggtttacccatctaaagtccaggctcttctgagcaaatgtggcctgacaacaatccctcctgcttgccaaggtaaaatcaaaataccattaagatactaaaaaccggtagactagtaggatcccaatatgaagtatgaagtaaaaaaggcttacgttttgctgttctgtaagtgcagctttgaggaactgagatggagacagaccgttctagcagacttcactcgaacttgtcctgcaactgatctgaagtcttacaatatgtcttatgttccgatccaaataaattacaaactcgcagtaataatcgcagcttgtgtatatagaagaaccttgttgtatacatttaacaaaaactttaagaaactgttttagctaaa

SEQ ID NO: 142901 - DNA, 3818 bp, Arabidopsis thaliana landsberg
taataaaagctggagttgagactgagctgcttgttggaatgaaaaatgatggtaatgaaagtgatttttctatcaaatgattacttgcaaagttagctataaagtttctaactttgtggttgggttatatgaataggtcaatccaatgtagatattgttgctgttaaaggcagtttacatcttccttttgatcaaaatgctgttcagaatctcactgctctggtaattaatcatcttttgcttcttctcacatttattgcttgtgtgatctcacttgtctttccatattagtttttccctttgttaggttcttttcattgcctgttttgtctcatctcatgttactccacactatgcactctttgttaggtcattcatggtttagtaacaatacctgaacttgttacatccctgtatctaaatgcaagaaagtctctctctagcctttaatctttatcatttatgttttgataccagatacttgctttggctctagctatattccatttcatttctagatatagaatcttacaatggcttttgctgaatatagagttttctcctcttttccttttctggcctttgctctttaagtttgctacttattatttggtcattttgtcgaatcatctaaatgtagagtttcagcaacgcgtctgtgccaacttccgctcaagctaccttgccatatgcttttgctgtcagcaagttcctgcaggtatgtttgttaatcatatagttcttctagtctccaagatgacattaaaatatagaatagaatccgaggtaaccatttgctcgtgcaggcgggtgcttttgattttgttggcaccatcatctatgagatagatggtaagccataccaaagcatcttttataatggaactattgaagttgttgaagatggtcctctcttcagaatggagtcagtcttccttagtggtcttttaatctttgttatcgcttttctcgccatctatatccaaaatgttttgaagcatatgaccaaggtacatcctatttcgctatcttatcgcactttcattccatggtactaactttgagaatggttactgtgaaaatgctttgcgcagaaaacaaagagagcaccaaaagttgaagttggaaccgcaactaaagatgcttcgcatgatgaatggcttgaggtattcgttgcacaagacctaataactttctccataatgggttttaacttttaatgtattgaacattttggtattgatacattgctctcaatatattgtgtaatgcagggtacttcgtacactcaatcttcgagtaagtcaaagaagaagaagtagatctcacacgctttgttagggggcttgagataagaaaccgaaaacacacgaacgatagtaacgttgcagttgttggtagagataacttcacagaatctgtaatgctttctttactctctctagctatagatgttgcaaggaaacaattttctttaacttttgtaatttgtcaagattattttcttttgtttaaaatgataattctctttcgaaagttcatgtatatagtaaagaaaagttgaataatcattagattaacaatataggttgaaattttgtatttggaaattatatcgtataatccaaggtttaaaatatgagagttgtgtcaatagactattatgatgctctatgaagctaatcctctcagtctctacaattatttaagagtggtttgggctaagtacatgtacattatcggaactcttatttatctccaaaccaatgggcttctttttacgacattgggcttaatattcctggcccgtaaataaatcaatgaaacgactacttaatatcttatccagtaaaaaggtagagaaaaaaaaaacacaatattctctctctgcctcggatccacgcaactattaaccctagttagattcaacactaaccacagttaacacgaaccctttcaatcttcctccacgtgtcaaaatcaacggtcacaaaaatcatttccttctctttataaaacactaccaaaaccctaatctctttcacacaatcacagaacctaatcttcttctccaatcaatctcagagaaaaaaagaaatggcaacaaaccctaaagttttcttcgacatgaccatcggcggtgcaccggcgggaaagatcgtgatggagctttacaccgacaagacaccaaagacggcggagaatttcagagctctatgcaccggagagaaaggcgtcggacgtagcggaaagccaatccactacaaaggatcttcgtttcaccgcgtgatcccaaatttcatgtgccaaggaggagatttcacagccgggaatggtactggtggtgagtctatctatggcttgaagtttgacgatgagaattttgagctgaaacatgagaggaaagggatgctctctatggctaactctggccccaacactaatggctctcagtttttcatctgtacggtgaagactgattggctcgatgggaaacatgttgtgtttggtcaagttgttgagggattgaatgttgttagagatattgagaaggttggatctgactctggaagaacttctaagcctgttgtcattgctgattgtggtcagatttcttagatctgtctgagattgttgatgttgatgatgatgatcttgaggatccaatggtagctttgtgttgtttctctttgatgttttctggtttatgtttttggattttgatgtttattgctgttgtgaaactttgagtttggctaccattgaataagaagaatgagaataaaatcttgagatccaaatttttgtttaagctttcactatcgttgaattgttcaagattcatattaaagacaaaaaaatcgactgagaagaagacttaaagcttattggttttggtcttttggatatggtgaagtatgaattttttgtcagtttgctatgggtattagatttttttagaacaagaaagtggaattgatgtgatttgtcggacttttagatatcatagagtacagttttattgatatttttcttattagattagtctttttcgatgtggttatgttttttgcacacgaggaagaaattgagactagagcccaactacgaatttataacgacggcccattaacaatggcagttatgacttttcatatccgaaatttttttggccttctttaacaattttttttgaaaattttaacacacaaccatttaaaaatttgatatcagatctaacccattcaaaaaacgccatctttacttcctgggataatctaaagatatgaactgaaattcccatctcttgtaagatgcaaatcaggtagcgaacatatacatatcaggcaaatctagtcttgtttttaagttggttttactacgtctttgcacattcaaaagtgtatgcatcatgttatcaaaattttttttttcgatatgcaatacatcctttgcctcaacataagatccttccagtaagaaagctgccaaaaaatgcttttcatttgccaattgtgattaactagatatccatctagcatattggcggggatgtgccaattacccccacatagaatagtttcttgagcaccccaataatctaactgctcaagcaaggtttctctagacacatgtacaggtggaggttcacgtactactttgttcttcttgaaatttttttttgtccttcctatacagatgactcatcggaagaaaacgacgatgacaatcaaaccagcttgtcttacgaccatgcttcagttgaaatgcatctgtccgatgaatgcaataaggacaagataacctgccatgtgtag

SEQ ID NO: 142902 - DNA, 679 bp, Arabidopsis thaliana landsberg
cttgtttcacacagtttcttgatccaaccaaaaccaatacacaaagcttctcaaactccttcacctcaaagcttcttcctttacatctgaatcgttgagttaactcggatttgttctgcatcctctgtttctgaatcgtgggtcatccttattttgtctcgaattcttcaccaattgcttcgatcaagctgcattggttaaccagttgccctaaagatcagatctttgagcaaaattttgtcactgatcttctaaatccaaaccagacacagcaaaacaacctctgtagatgattcgagaaatctcaaacttacaaaaagatattataaacattcaagacagttattcgaacaaccgagtcatggacgtcggaagaaacaaccggaaaaacatgagctttcgaagttcgccggagaaaagcaagcaagagttacggcggagtttctcggcgcagaaaaggatgatgatcccggcgaattatttcagtttagagtctctgttcctattggttggtctaacggcatctctgttaatacttccgttagttttgccgccgttacctccgcctccgtttatgctgctattggttcccattgggattatggttttactcgtcgttcttgccttcatgccttcttctcattctaatgctaatacagatgtaacttgcaatttcatg

SEQ ID NO: 142903 - DNA, 3780 bp, Arabidopsis thaliana landsberg
  unsure (1)..(3780): unsure at all n locations
caacacaagctttcacgaacccagaagagctttgtttccggcgacatttacctaaagctggagagctaatctgcggaagagagaatccgatagcggagaccgagccaagggagcaggtgttgacccgggaagaaggttgacgcgtgagaacgactttgtgagcttgtgagagagatgacgaagcaatatccatggattcaggtggaggagccaaagtgaagtgagatttggaaatcgttgggagagatgtagagggaaaataaaatgaagagagatcagagaatttcgcttcaaatggagttgatgggaaaatcttagctctcacctctatgagaggatattggataggataattagattttagagctttattcctctacgaatgactcataccagattatggtgttctactaccttaatcaccgtctgtttcgcaatctcgtcgatttatcttttattgggccggaaagtaagtattatcaagggcttagcccaaacgctttatgcggttcacgcgtggaatcgacgcgccgtcaccgtcaacaaaattgggaagagaatataaaattagggcaagagagaaaaaaggttgaatcgaaacagatcggaaaatcgtcgagagagagagagagagagagagagagaatgtcgtatcttcttccacatctgcactccggttgggctgttgatcagtcgattctggccgaggaagagcgtctcgtcgtcattcgtttcggccatgactgggatgagacctgtatgcaggtctgtcaaacgtttcttcctctcttatctttatatttcgatcttgagcttgattatatgtttttgattcgatttgtagttcatagctctcgatttggatcctttcgtactggaaaattgcgatactttgtggtgattgtttgaaaattgtgttccttagctcagaactgatgaaattagggtttcactcaaaaaaatcctagttgttggagttggttactatgtagaaggttttgaatgtgtccgttttagtgtccatttctgtgatttatgcttcgttttgttcttgcgaatttggtgatcttggaatattccggatatgttgtgttgattgtttgaaactttagccattcgtgtgatctttattatcttggaactgattaaaattttagggcttcacttacaattgattctagtattcagtttctggtttctgttttgattcgaagtttttgatttttgtagatggatgaggtgcttgcgtctgttgctgagacgattaagaactttgcagtcatttatctggtggacatcactgaggttccagacttcaacaccatgtacgagctgtacgatccttctacggtcatgttcttcttcaggaacaagcacatcatgatcgatcttggaactggtaacaacaacaagatcaactgggctctcaaggacaagcaggagttcattgatatcattgagactgtctaccgtggtgcaaggaagggtcgtgggttggtgattgctccaaaagattactccaccaaataccgttactaatcgagcttcccaacactatctagtttgttaaaaccattgagtctagtgattctggtcagctgaaatatcccgtgaactggtttcatttcatatatgctttgatgatgattgtgattctggtttttgcttactgtttcggttgttctccatttatgtatgtaactacttgcttcgaacatgattcagtgaaatgaaatttggaagccgttgggtttatgtatatgcatctttgatcttcctgggttatgtatatgtgacaccatttgtctaccaagtaccaacgatggatacgaaaatgaaactttttactattgaaagattttacagaatacgtttattcataatttttctgaagagctcaatgtttgagaaagattccagaaagattttaaataatttttagttgacagaatgattgaaataaattctaaaaagtccatcatctagaaataaatgggtttgggctaaaattgagaaaagtgtagcctttaaaggaagcctcttttgtcggcttttgatctcagctgattcttcaaaaccgagctccgctgaattttctttgctccatttccgtcttcacacagtttagggttcacaacttgattcggatcgaaagcaccgagaagaagaagccaatcaatcatgtctagacaagtggcaaggcttatcggatctctgtcatcaaaagctcgccgttgttctaccggcggctcataggtttttccgtcatgccagtctctcacttcgttgacccaatctcgctccttcgcgtcggatcctcatcctcctgcggcggttttcgttgacaaaaacacacgagtcctctgtcaaggcatcaccggaaagaacggcactttccacactgaacaagccattgagtacggcaccaaaatggtaaaatcctgattctttttatcttcttcgaattgggtatttctccattgttccgattacatttggtttaggggttttctagtgattttgacaatgagtacacatatatatgctttttcatcacctaaattccattagatcctggagatgagagattgctttaaagcaagtggctttactaatttacgttgtgtgcgtttttattgtgtaataataggtggcaggagtgacaccgaagaagggtggaacagaacacttgggtctcccagttttcaactctgttgctgaagctaaggctgacaccaaagccaatgcctctgtgatttatgttcctgctccttttgctgctgctgctattatggagggtattgaggctgagttagatcttattgtgtgtatcaccgaaggaatccctcaacatgacatggtacttattattatcaccatgcctttgattttgtttgttatatctccttcagtgcttattacataggattgaatactgatataattatctcttgtgcttctctctttgacttgagtgatgtttctgatttaggtacgtgtaaagcatgctcttaacagtcaatctacagctaggctggttggtccaaactgccctgggattatcaagcctggtgaatgcaaaattggaattatgccgggatacatccacaagcctgggaagattggaattgtctcacgatctggaaccttgacatatgaagctgtaagttttttttcttatgcttgatgcttgttctctgtatccatctctctcaagtttatttcaccatagtctttagcctgggaaaaatctccgaaattagttttgttttctagtataaatccctccaaaggttagattgaacatggttcttttgttacactatggagcttttgaaaatttatataaacaggtttttgttggttctagattttgaattaggccttatatttcttacgatttctaaacattgtttcggttttgannnnnnnnnnnnnnnnnnnnnnnnnnncagtgggtctaggccaatctacttgtgtaggaatcggtggggatccttttaacgggacaaactttgtcgactgcttggagaaattctttgttgatcctcaaacagaaggtaaggttttcaaactggagttatctagccatatcttaattctgtttcaccgttttccaattttatttttcctctagatagattaactttaaagatcatttagtagaagaatgaccacatacttacctaatctctttaggttatgaaattcttgttttagaaggcttcgattcctctcttttcttagtttagttggtagctaaaatttaaaaactaagaa

SEQ ID NO: 142904 - DNA, 1026 bp, Arabidopsis thaliana landsberg
  unsure (1)..(1026): unsure at all n locations
tcatcatcatcatttcgccgttaagtttctctctctctctgtttccacccattatagaattcagtgaatcaacaacaacaaggtaacacatctctctctctctctctctttctctctttttatatttttgtgtcccaatctcttcttcatttctgtttggttgccgagaaaacgcaggaaacttttctgcaaaaaaactcggtgaccatattcaaaactttcccacgttaattctctcttctttgttttgtttcagattcattacttttctccaaaaaactttcttcaagatctgttcttttaaataattatggcggaagaacatcgatgcgagacgcctgaaggtcaccgtctctgcgttaacaactgcggtttcttcggaagctcagcgacaatgaatctatgttcaaactgttacggcgatctctgtctcaaacaacaacaacaagcttccatgaaatcaaccgtcgaatcatctctctctccggtgattgcacctgttctcgaaaactacgcggcggagttagagatcccgacgacgaagaagacagaggagaaaaaaccgattcaaattccgacggagcaaccgtctccgctgcaacggccgaatcgatgcaccgtatgtaggaaacgggtcgggttaaccgggtttatgtgtcggtgcgggacgactntttgtgggagtcataggtatccggaggttcatggttgtacgtttgatttcaaatcgggcggacgtgaagagatcgcgaaagctaaatccgttgttattgcggcgaggctcagaaaatatgaatcggagccgttgaccgatttctatctttaccctgagaaaatttcgattgtctcggtggatctcaaccgttcattatgttattgtattacggacacgtgtcgcaagattaaggttgagatggtttcgtaactttttaattattttctttgtttatttccgaagaaattaaagtttttatgattgtgtggcttttgcttgtaaaaaaaaaaagggtttctctttgggaaaaa

SEQ ID NO: 142905 - DNA, 520 bp, Arabidopsis thaliana landsberg
ttagattctcaaaatccagagagagctcgttaggaaaaatgaaggcagtgatagggacagtggtgtcgaacaaaatgcagaagtcggtggtggtagccgtcgacagactcttccacaataatatctacaatcgatatgtcaagcgtacttccaagttcatggctcacgatgaaaaggactcctgtaacatcggcgatcgagtattttccccttcattttttgaatttgatatacatttgatcaagagctcgaaaatttagggaagctctaggaatatttgaactcaaccattggaagtagacttgcctgtttgttattaggctgctttggaaatgaaacttgatttggttgtttgaaatattaggtgaaattggatccttcaaggcctttgagcaagcataagcattggattgtttcagaaatcataaagaaagcacgcatttattctccacaagctgttgctgcggctctcaattcctcaacctccattgctgagcagccccctgtttcgtcttcctaa

SEQ ID NO: 142906 - DNA, 654 bp, Arabidopsis thaliana landsberg
tttgttgactgtggatataagtctgtctctaaaagcttattatacctgaatctggttgcaggttgtatcaccaccaaggagctcggaaccgtgatgaggtctctggggcaaaacccaacagaagctgagcttcaagacatgatcaatgaagttgatgcagatgggaacgggaccattgatttcccggagttcctgaacctgatggcaaggaaaatgaaggacactgattcagaggaagagctcaaggaagcttttagggtttttgataaagaccagaatggattcatatctgcagcagagcttcgacatgtcatgacaaatctcggtgagaagctatccgatgaggaagttgatgagatgatccgagaagcggatgttgatggcgatggtcagattaactatgaagaattcgtcaaagtcatgatggctaagtgagagaattttatcttaagcccacaaaaagaaacaagatttatgatttctacagtgaagttacattatgacttgattctggttgcgttctttaggacatcattttgcttatttcccttgtttgtttggttaaaccttttagtgttatgtgaagtatgaactcatattttgctcatccttgggacaatatttatctttcttttttgggcatctgattttatt

SEQ ID NO: 142907 - DNA, 2992 bp, Arabidopsis thaliana landsberg
aaaacctgccacgtatcatcttcggtttaatttgcagtccgcggaaaaaaaaaggagactggaaaaaaaaagtcacagtctgtctgtctctctcctctaatcttttttatccgctagggttttgaagcaaggtttctcgcgattttctcgatatctctcgcccatggcgaaaccaagtcgtggccgtcgttccccctccgtgtctggctcgtcatctcgttccagttccagatctcgttcgggttcgagcccctccaggtctatttcccgctcacgctcccgttctagatcgctctcttcatcttcatctccttcgcgaagcgtcagttctgggagtcgcagtcctccacgtcgtggaaaaaggttagggtttctttcaatcacttaccaattgttcgaattggatttgtgtaatttcgctttcattcttcttggttcgttcagctcgaattcgaattgatgttctgatgtatcttcttgtgtagtcctgctggacctgctaggcgaggtcgctctcctcctcctccaccatctaaaggagcatcttcaccttccaagtaatatctgactcgttcacataaatatattctagtgtttatgctttcgtcattactgactttacaatcttttataccttcaggaaagctgttcaagaatctcttgttctccatgttgattctcttagcaggaatgtgaatgaagcccatctcaaagaaatctttggtatgtcgatttctcttttctctgtttcttctgcttcttctaattttactacatgataactgtctacacatgtcctctaatgtcatcagtagtatatacgtcattacgatcatcactggaattttgtcctacttgtgttggctaaatgttaagtcttaactcatggcttgtattcatgttattattaggcaactttggtgaagttatacatgtcgagattgcgatggatcgagctgtaagttactattctctttactctctgttgtttacttgcatcacttgttgaaatcagctcataattcctttgaatattgttaacaggttaaccttccaagaggacatggttatgttgagttcaaggcaagagctgatgctgagaaagctcagctctacatggatggtgtatgtctctttccaattatgaaatgcactgtacttgacatattggcagagaagatttatgcatgtgttttttttttgtttactgaacacaggcccaaattgatggaaaggttgttaaagcaacgttcacactaccacctcgtcagaaagtatcttcaccccctaaacctgtctcagctgcacctaaaaagagatgctccaaaatctgataatgctgctgctgacgctgagaaagatggtggtcccaggcgcccaagagagagtatgtcaaatccttatatttggggtatggatgattgtcgtagtctagaccgtgtgttgtgttaattagtatcatcaaatatgtgcttagcatctcctcaacgggaaaacagggctttctccgagaaggcgatcccctctacctaggagaggcttatcacctagaaggcgatcacctgattctccccatcgccgaaggccgggctctcctatccgccgtcgcggtgatacacctcctagacgtaggccagtatcaccatctagaggccgttctccatcttctccccctccaagacgatatagatctcctccaaggttagttatggcaccatctgttttgtcttgtgttttcagattcgatagctcaccttttatctgtcagcaggggctcccctagaagaattcgtggcagtcctgttcgaagaaggtctcctcttcctctaagacgaaggtatgtctatttggtacctgaattacacccttagtaatcgaagtttaggaatcacagctttatagactatattactctgtaaattagacagggaaaaatgtgtcagttttatatatgttttgtattcggcgtgtttcaggtctccacctccaaggagactacgcagtcctcccagaagatctccaatccgtaggcgtagccgatccccaattcgtaggcctggtcgctctcgttcaaggtccatctcaccccgcaggtttgttggaactcatttaaactttttactggggtctctctcgtggattttattttgttacagatgcatagctaagactgattcataacaagtttttaagtctttcataattcatgagtataccccaagatcctactttgtcttatccttttacctaggtttctgacataccagctcctagagacgttgatactaaatatgactaagttgtatagatcagtctggggtttgttcatgaattaattttgtctttaactgtaagcaggggacgaggtccagctgggagacgtgggaggtcatcttcttactctagttcaccaagtcccagaagggtaagggcttcttgcagatccctttttagctgtaaaattttttatgccttgctagttatgtgtcttgactcttgactttctatcctttgtgcattattaaaccttacagattcctaggaagatttcaaggagccgcagtcctaagaggtaaacgctttctgtcttaacactaatcctcgtcttaaactggaaacactttattgtctgtagaatgcattaattgaagaagttccactgttaagttatgtatagtaatgttaaggttaccccagttcctgataaaagacatagcataaacatctggaacctatactttcttagtgagtttggtgatgaaacagagcaaaatagaattgttgtgtagaaattttttgcgttgaagtctaataaaagaaaatgggttgttgttgggtatgtttaggccactgaaaggaaaaagaagcagcagtaacagcagcagcagcagttcaccgccaccaccacctccacctcgtaaaacttaaaggtgataaaaatgttataaaaagaaaagaaaagaaaacttgagtcttgatgtagctctctttc

SEQ ID NO: 142908 - DNA, 1235 bp, Arabidopsis thaliana landsberg
atgggactccaccgagacgaagcgacggccatggaaacccttttcagagtctcacttcgtctacttccggtttccgccgccgtgacatgtcgctcgatccgattccccgtttcaagacccggttcctcacacttattgaaccgtaagctgtataatttgcctacttcttcttcctcctctttgtcgacaaaagccggttggttattgggtctgggtgagaagaaaaagaaagtggatttaccggagatagtggcatctggtgacccggttctgcacgagaaggcccgagaagttgacccgggagaaatcgggtcggagcgtattcagaagataattgatgatatgattaaagttatgagattggctcctggagttggcctcgctgctcctcaaattggtgttcccttaagggtaagtctataaatgcttttcctagtttcacccatttcgaagcaaatgattgaattagtgtttcatggtgaatgatgcagattattgtattggaagatacaaaagagtatataagttacgcaccaaaggaagagattcttgctcaagaaagacgtcattttgatctcatggtaaataatagaatcagagtgcttaagagttgttacaattttcgattagaacaaaaatgttgaagtttgggggttttggttaggtgatggtgaatccggttctcaaggagagaagcaacaagaaagctcttttctttgaaggatgcttgagtgttgatggattcagagctgcggtggagagataccttgaggtggtagtgacgggctacgatcgtcaaggaaagaggattgaagtgaatgcttcaggttggcaagctaggattttgcaacatgagtgtgatcatttggatggtaatctttacgttgataagatggtaccacgcacttttaggacagtcgacaacttggacttgcctttagctgagggctgccataagctcggacctcaatgacagattcttcaacaaaagttgtaatcttctgttttgattctttactaaaactcttctagattgagcttgactcaaataatttcaaagatgaaactttgtcggaaagagggttcttttttcgggtttggtaatggattgaaagattttcatttaataaaatattataacttgaagacagaagatattagtacaattaaagacagctattctacaaatggtaatgtgatgttatgcttactccggacaagacacggtgtcgtag

SEQ ID NO: 142909 - DNA, 617 bp, Arabidopsis thaliana landsberg
caaatattcaccacctaaaaagttctttcaaaatctcccttcttactcatttgcattagtcctcaaagatgggtatccaattgatcggactctctcaggcaaagcaaaagcttcaaagaagcttatcagcgagaatcgcaagcctcttggctacgtcgggtactaataatgtcccaaagggtcatgtggccgtctatgtgggagagacttatcacaggaagagatttgtgatacctatatcgtatttaaaccacccattgttccaaggtttgttgaacctcgcggaagaagagttcgggttcgaccatcccatgggaggtctcaccatcccttgcactgaagattacttcaccgctctagcttctattctaagtggttcatgataagggagctcattgatcatcacaacattcattaagtttctttatacaaatctttgtgtttctcttaaaatgtatttaaggggggagagaaaataactcgagactgagaaactaagtgagtctctttcaatttttgatctaaaatgatcttgtgagttcttttaaccattccatttgtaaagaattcactatctgaaaaattaatctatgattctttttgtccattaacagtta

SEQ ID NO: 142910 - DNA, 2329 bp, Arabidopsis thaliana landsberg
  unsure (1)..(2329): unsure at all n locations
atggacaaattgatggatgcggacccacgaggctctcgaaagaagccagtgagtgattatttattaatgtccaagacaactcgacagaatctgtgatattgtcctaaaaactaattagctttctatggagaacatcttcattcccaaacccagtacttccataccattccccaccatctcagacccatctgatacatcaatgaaagctctttgtgtgaaccatcattaagcttgagaataaaaatcatgtataagagttgccgactctacaccacatttctacaagttgggaaagatctctgcttaaaatgcaaccactttactagttgagttagcatggcttttgatgattcaccaacatacaatgtactatattatggatttgactggcggctcaacggaaactccatagtcttttctgcctctagacttgggcaatttcacagaagttgagaccctcttcatgagtcggagactttggttccttttagtctagagataataaacgttaagaaaaaaggaaagaagatgagaaatgtctctcagctagacaagacccccatccgtcgtcgttgacccctttccgccataaaatcccaacacctgttttcttgcatcgaaaccatccccttgccttgtttgcttggacagatgactccttgctaggtttttgaagatccggccgtatctcttcggtaatcttttctcttcagcctttttgttgttccttgtgattttcgagcaattggagattagtgtgggtgtatccggtctgatctaaccctccttggtcatgcttttatatgtatgccccttttcagacctcaaagcttccgcctttggatccgatggaatcacaaggaccttctaatggtcatcccatggatatcagcagcaattcaatcccatcgtccgcctgtaatctgtgcggaagagtcgttcaatctgcttccgatgatcttgaaatcttcagcttatgtgtcgactgtaagtttttgttgcttgaagatttcggcactcccgcgcctcccttggctcggcggcagacaattaggaggaggaggatgaggaggaggagaagaacaactaggcacgacagctctgagtctgtcggtgttggtgatctttcctcccaacaattcacacacttgataagcattgcaaggcaaagcctttcaacggttcatgctagtgaggatctacgtgatgatctgcgaactagctctcataccactccaagcggctctactagatggagacttttctcagaatctgaaagtgatgattttgacaactttggcganaccgaatcaacgctagttttagcctctacagatttccccatgctgataacgatgccatttcttttagtgcttacggtggagagtctgatgcttccactgacaggcatgccgatatctttgttcaaccagatgacaggagcgacattgactttgacactgatatagacccgatgcgcgctggtcttaaccagtggaactcagacgaagaagacagggaatgggaggaaggagcgggtccttctggggttgcaggaacacgctatagaaactatttggcaagtccaagtgaaagctacagctccatgactcggtttgattcacctgagttagagagaggctttcgtcaaagaattatagagaggaggcatgcgttatctcgcaacatcttcactggtttggaggatttggacttctctccctatgctgcaaatgttggggattatcttgatgagagaggctttgatgaactacttgagcaacttgctgagtctgacaattcaagaagaggtgcaccacctgcatctgtctcatgcgtcaggaatcttccaagggttatcattgcagaggagcatgtaatgaagggcctagtttgtgcgatctgcaaggagcttttcaccctccgcaatgaaaccacgcagcttccgtgtctacatttataccatgctcattgtatcgtaccttggctgagtgcccgtaactcctgcccactctgccgttatgagctcccgacagatgataaagattacgaggagggaaagcggaatgtgctggatgtgagcgaggatagctcctcctctgatgatggtacagaatcgggggaagaggaatatgtagagagaggtgagagcgagtctggtgtgagcagagtcagcagaggaagatggctgtttctggctgctgcaccagttgtgagtctggtgggcgttgtgttggcaatgtggctaagcagcccacacaggaggggtatagcaatctctcatagccaaagggagaacagaaccagaagatggctgccgtttttctga

SEQ ID NO: 142911 - DNA, 1034 bp, Arabidopsis thaliana landsberg
ctctgtctcaaaagacaagtagattccttttttttacagtatccaataatttgtaatcatataaataatcggtgaaaaagaaggattctttgtttgtttcccgagaaaatatcctcgatttccatctcctatctgtcatcggagctttctacttccgaaggtaaggaaactggatcggaactcttttgaattctgtactgtgtatttgcttagggtttctgggtcttattgcattgttaaggattgcgaatcttatctgaatctgtgtctactactattgtgatgttttaaagctatttgtggaacagcttttacttgtccctttatagatctctttccctcttgggttcataagaacaaaatcctcttccctactttgtacgattcatgactattcagctgaatcgtgttgggttcttgtctgaatttgagtgttttaagattggattattactggaaatgtctgtactaatggaatcttatgtgagctttaaggattagagctctaaaatcaagatagggtcaggtcaacgcatagagaataaattgtgttattgtaactacttttctagtcaacgttttctgttaaattgaatccctttcttggctttgtttccatgtttttgacatgattgtattgaaacaggaataaaggatcaatcaagagtttgatcttgttagaatagccgataatggaaggagatgtgttgtcaggatttggagacagacacaatatggatgggaaattgttgcagagtttccagaagagctttgtggatgttcaagacattttggaccaaaaccgattattgatcaacgagatcaatcagaaccatgaatcgaaacaaccagataacttgggtcgaaacgtggggttgatcaaagagctcaacaacaatatcagaagagtagctagcctttatggtgatctctctcattcttttgcaagatcagtggatgcttcatcagaaggtgaatctagtggaactttgaaatctgatgggaaagctaaccagaagagatttagatccggt

SEQ ID NO: 142912 - DNA, 661 bp, Arabidopsis thaliana landsberg
tcccttgaaccgaacttggggcgtgattcggaggagagagtgagagttgagcgagagttgttcggccggagaatctcgggtttgattggaccggagaaaaccggaattcatagagaaagaatggaagagaaagagcaatggcgggtattaatggagaatgccggttttgaatcggttaagctgagtaattacgcagtgagccaagcgaagattctattgtggaattacaattacagcaatttgtattcaattgttgaatctaagcctggcttcatctctttggcctggaacgatttacctctcctcactctttcttcctggcgataaccaaaccaaaccgatccggtattcttagttttgttttgttttcaatgttatttttggttagacaaatattcaattgttaatatactccgtggtcatagtgttttgtttttcttttagttcgaacgttgaattaattcaggggtaggttttgaattctctgaaccttatgtgttttttggtaacatcatttggatttgtgaactaggtttaaaaactggtcttagtcttgtcgttttctcattagataatttaaactggatagcttctttatttttggttggataaagtgaccggtactggtcatctgtttgagatgtaatactatatcataaaa

SEQ ID NO: 142913 - DNA, 446 bp, Arabidopsis thaliana landsberg
atctaaccctctcgatcctctctcgcctgttgaaaaagcacgacgcaagagcaaaggatcaaaaagggaagacgaaagaagagatggatccagacgcagttgcaaaggctttcgttgagcactactactccaccttcgatgcaaatcgtccaggtttggtttctctataccaagaaggatccatgttgaccttcgaaggccagaagatccagggctctcagaacatcgtcgctaagctcaccggcctccctttccagcagtgtaagcacaacatcaccaccgtcgattgtcagccttctggtcccgccggtggtatgctcgtctttgtctccggcaatcttcagctcgctggtgaacaacacgctctcaagttcagccaggtttttttttgccttatctctttcccttgggtttagatcacttcgatttttagtgtttcctttgta

SEQ ID NO: 142914 - DNA, 578 bp, Arabidopsis thaliana landsberg
catcacttcgtcacaacttttctcataatcatagccatgctcaaattggtcatacaacaacaacatcaacaacgacaacaacgacaacaaacaccgagttcgtaaaatcatcatgcactttcacaacgtacccaagactctgtttctcttcactctcaactcatgctagtctcatccaaacaagccccaagctcatggctcatgcggctctcaacatcacattagcctcggctaaagtaacttcagcaatgatggtgcgtctctcgaatagtcggctcaagcctaaagaagtctcggccatgagagactgcgtcgaggagttaggtgacacgttggaggagcttaggaaatcgattggtgagatgtgtcagctaagtggctcgaactatgaagtttacataagcgatatacagacttgggtcagtgcggctttgacagatgtgaacacatgtactgacggatttgaaggagaagatatggacgggaaggttaaggttttggttagagggaggattttggttattgctcatttaacaagtaatgctttagctttgattaatcactttgcttctattcat

SEQ ID NO: 142915 - DNA, 567 bp, Arabidopsis thaliana landsberg
tataaatagccatttttatatcctctcgtaacttttccttctttctttctccaaatttgatcgtaaaaaagattcctatcttcttagatttcttcttcaccattcttttcttgaaaaagaatcatgggcttatcttatagcggcgccggagttattatcgccggagttatcttgaatgattttatcaaatcagttcgttcttttcttgatattcgtcgtttgtttggttcggcatcttcagggagcactatcaccgacaagattccgatggacgatatgcttccggcaacaaagttcgaggatatatcatcaagggttaatccgccggagagctgccggatatgccaaggatgagttcgacggcggtgacgaagtccgggtgtttgaggaattgcgtacatgtttatcacaagacgtgtattgaccgttggatccaagacgataagatgacgtgtcctttgtgtaggaccccgatcgttcctgatttctatttttttcgtttgtaaattagaaaagctaaatgtttcattaatcagattttttttcaagcaaatagataccaaccgg

SEQ ID NO: 142916 - DNA, 319 bp, Arabidopsis thaliana landsberg
agaaaagaaaagcctttcaggtctcaaacaatggagatgaagaagattgcttgcggtgtgcttttcgctgctgcctccatgaccgccgtcatggctgctgaggaagtcggagctccggcaccaggacctgcatccgccgcctcggctgcgttgccagctcttggctctttggttggagcttcccttgtctccctcttcagctactacttgcactaagctatctttcattatgtaataacaactcattatgtgatcttattcatttcctatttatttccatttcacttgtttattaataaaacagagaaagtaattcaag

SEQ ID NO: 142917 - DNA, 686 bp, Arabidopsis thaliana landsberg
agtgagtgagtgagagaagaatcagagaaaatgccgccgaaattggatccatctcaaatcgtcgacgtctacgtccgagtcaccggaggtgaggtcggagcagcgtcttcactcgctccaaagatcggtccactcggtctggcaccaaagaagatcggagaagacatcgccaaagagacagcgaaagaatggaaaggtcttcgagtcaccgtgaagcttacggtacagaatcgtcaagctaaggtcacagtggttccatccgcagcggctctagtcatcaaagccctcaaggagccggagagagatatgaagaaagtgaagacatcaaacataatggcaacatttcgtttgatgatgtgattgagattgctaagataatgcgtcctagatctatcgctaaggaattgagtggagcagtgaaggagattttaggaacttgtgtctctgttggttgcactgttgatggtaaagaccctaaggatcttcaggaagaaattaacagtggtgacattgatattcctaacgagtgataaaggtttttacttttgagttctctatcgttttattttttgtatttgattttgaggatttggtattagtaatactatatttcggaagttgagaattgttggcttttgcccatttgaatcctttcttgggattaatcaaaatgttcaattttctac

SEQ ID NO: 142918 - DNA, 595 bp, Arabidopsis thaliana landsberg
ctctcacacttttttaagatttttttcttcggctcggacgcagatgactaacagttacgctctgtcaccggcgattatcgccgccgttcgtcctccggcatctcaagactatctagttgctgcttctcttagtggacgcaaatcgatcaactcttcatcttcgtccattttcgtacctatctcattatctacttcctacggtcgaagcaaatgcgccttctcaatctcgcggaagaatccaaaatcgacgattcgttgcgatattgctgtgaaatcggcggcttctgtagacgcggacgctgatctatcgtcatctacgtcgttggagacggaggaagacgagaaagcgaaggagaagattggagctagggttagggttacggttccgttgaaagtttaccatgtggttcgtgtaccggaggttgaattgatgggaatggaaggttttatcaaagattacgtcgttctttggaaaggaaagaaaatctcagctaatctgccgtttaaggtacagttcgtgaaagagatcgaaggtcgtggtcctgtcaaattcttcacgcatcttaaggaagacgagttcgagttaattgatccg

SEQ ID NO: 142919 - DNA, 626 bp, Arabidopsis thaliana landsberg
cattgcctactgatcaatctcctcaaacctcaccaggatcatcttcttctccttcaccgagaccttccggtggatcaccggcgagaagaacggcgactggattatccggcaagcactctattttcagggggattcgactacgtaacggaaaatgggtatcggagattagagagccacgtaaaacgacaagaatttggctcgggacttatccggtaccggagatggctgccgccgcttacgacgtggctgcgttagctttaaaaggacccgacgccgttttgaattttcctggtttagctttgacttacgtggctccggtttcaaactctgctgcggatataagagcggctgctagtagagcagcggagatgaagcaaccggatcagggtggggatgagaaggtattggaaccggttcaacccggcaaagaggaagaattagaagaagtgtcgtgtaactcgtgttcgttggagtttatggatgaggaagcgatgttgaatatgccgactttgttgacggagatggctgaagggatgttgatgagtccaccgagaatgatgatacatccgacgatggaagatgattcgccggagaatcatgaaggagataatctttggagttataaa

SEQ ID NO: 142920 - DNA, 822 bp, Arabidopsis thaliana landsberg
ctagccctttctcttttctctctctctctatatattgctaaacaaaaccctacttattctaaaaatggaagccacgatcttcgagaaaagaagaagctcgttatcaagcatagcggtgcacaaacagtcatactcgataaccaaatcaaagccaaagatccgtataattcacatatttgctccggagatcatcaagaccgacgttgccaacttccgtgagctcgtccaaagcctcaccggcaaaccagacgaccagagaacttccaaggcaaaacctagaagagatatgcatcgtcttcatcgtcaagtccaagacatgatcaacacggagaaactaagagaacccgagcattgtgatcaagagttctgcttaaacgcagaagagctctcgatgacttggaacggtaataatggcgctggtgaaagctctggagggttcttgaatggtttgggagatttcgaagggtttattcaagaacttggtgaatttccttatttgcccttgtcctccattgatgcttctgcttcttctaactcctcttcttcctctcatttacatggtggatcagttttctcagatcaattcgcttaactcggtctctcaaaggatgtgtaacctttttcatcttttattttgtttactaggtttttgtggaaatgaatttttaatttattacttttttttttgtttgtttagtatgaggctaattgatttaatgaaattagctgagactccttttatttctcccttaaggtctttatgatttgtccattgtcttcaaaatgtaatgtacactgataaatgttgtgtctagcttttgc

SEQ ID NO: 142921 - DNA, 1533 bp, Arabidopsis thaliana landsberg
actaaaaaaaattggcgtcgagtgatttagacgaagaataagaagaaaatgccgtgcctcaacctctccaccaacgttaaccttgacggcgtcgatacatcttccattctctcggaagcttcctccaccgtcgcgaaaatcatcggcaagcctgagaacgtaatccctttttctctctcgatttaacctctagttcgtttcgttctgttcgaattttgtttcgattcttcgttttctcctgagatttgccttgtgtgcgtctttatctcttaatcattttcttctccttattgaataacagcgattcgagtgttgttttcttcacatgcatgatatagaaaccctaagcaattttatctcgttgctccgttctattctagtggttcacatttccggagtcttctcttgacttatttgtacaatcttcgttggggttcttcttttttattttaccacgatttctaggccattcctggcccttgaatttctcattgctgaagtttgttttcaaaaacaatattggtctgctttgacgattgcttgtttatgttagtgatgtttaaatatttttgtcctgtaatgttgtttcttagatcattatctgattgcattgttcattgtggtaatttgcagtatgtgatgattgtcttgaaaggctcagtgcctatgtcatttggcgggaccgaggatcctgcagcttatggtgaattagtttctatcggtggccttaatgcggatgtgaacaagaagctaagcgctgctgtttccgccattcttgagactaagctatcggtgcccaagtctcgattcttcctcaagttttatgacaccaaggcaagcaattccctctctctgataacttttttgatgtagtgacataacatatgcaaatgtgttaatgatttcatatgcccgatatgcgtccatgtctcattttcattgttcgttgtctctctaggaccatcaaagtcaagaatatgcacaatgtttacacgctttacaccagcactactaggtcatgaatagggaacaaatacatcttatgtgtgtaagttcatcatcataagacggacctataacttttactcataaactaggcattataaacaattaaatcaaatgcataaaccgtttccactactcgaattcaatatttacacccacactgttgagttatttaggagattcgttcaacttctctaaatccgttgtctaactggcttagagggtcatccatcatctggagtgtttatgcctataaccacctgatatatcaattatacatttcttttctcgtgtggttcttcttgcagggatccttctttggttggaacggggcgactctttaattccgtggtaggtgattagtgtgattgtcttgaaatgtatgatctactctcatcgatcaagtaactttgaactacttcgtattgtaaacatatctaaggtttgatggagttgcattaagaaataacatttatgctatatatgatgctacaacttactatcagggtaaacaatggttatttagtc

SEQ ID NO: 142922 - DNA, 574 bp, Arabidopsis thaliana landsberg
atattccattcttacctctctctacctctctatctctctctcctcataatcgatccgtaaactcgccggaggagcagggagattcaataagacgatggctcagagaacggagaaggaagagaccgagttcaaagttctcgaaaccttgacgacaacaacaacgacgttatgtaccaataactgcggcgttacagcgaatcctgcgacgaacaacatgtgtcagaaatgtttcaacgcatctctcgtctcggcggccgcaggtgttgttgaatcaggttcgatcttgaagagatcggctagatctgtcaatcttcgttcgtcaccagctaaagtcgtgattcgtccaagagagatcgatgcggtgaagaagagagatcaacagatcgtaaaccgatgttctggttgtcggaagaaagttgggttgaccggattcaggtgccgatgcggtgagcttttctgctcagagcaccgttactccgatcgtcatgattgtagctacgactacaaaaccgctggtcgtgaggcgatcgctagagaaaatccggtggtcaaggctgcgaaaatggtcaaagtt

SEQ ID NO: 142923 - DNA, 1266 bp, Arabidopsis thaliana landsberg
cacacacactctctctctgatcattcaacttttcgaaattttgcttcatcgtcttcgtcatcggctctctgatgaattcctcaaacaatgcctctttctctccgtctttctccttcgccgacggctttatctccgaccaccggaggatttggtccatcgaggaaacagtgccggattccttactccggcgtcccgacgacgaagattggtttctgttctttggattctaggaaaagaggagattcctctgttgttaggtgtagcttagaaaccgttaatgtcagtgttggtcaggtgacggaggtcgataaggacacgttctggcccatcgttaaagccgccggtgaaaagcttgtcgtacttgacatgtacactcaatggtacctactatctcttctatgcctctctctgctttgaaatttttaccattcgacatctctgattgtatatagcggaatcgatgaaatcaatggcgttgcgatgtcgaatgcttagattaccaattgatttgaattttgatactaatcaaagtttccgtggctttcaactaagattgaaaaatcttctcagttagattcttctgcagatgtggttcatttagattccatagtgaatgttttggttttgatgttggtagtctttaaagagagtttcaattcaagatgttctattcttggataccttatgcaggtgtggtccatgtaaagtgattgcccctaaatacaaagctttatcagagaagtacgacgacgttgtgtttctaaagcttgactgcaatccagataaccgggtctgagttctgctcttttatctctcttcttttggtaactcggttttcctaaaccatatatcaattgaaccatagctagtagcagctaaggataatcaatacctgtttttgttgttgctactactacctgtctttgttgttgctgctaagccattgaaactcttcattggtgcagccattggcaaaagagctaggaataagagtggttccaactttcaagattttgaaggataacaaggttgtcaaggaagtgaccggtgcaaaatacgatgatctggttgcagcgattgaaacagcgaggtctgctgcttccggatgaaccagtctctcatgtctttaccataattgtttgtatgtaatgtgaaatctggtgttatccctatatataggtgatgaggaaacgtcagcaaaagattatcttgtatgtgtaaaagtttcaagaaatatgatcaagaaaatgatgatctttaggtttc

SEQ ID NO: 142924 - DNA, 591 bp, Arabidopsis thaliana landsberg
cttagggttaagcaagagagaaactagagatgaggttgataacgcacaacatgctttcctgcaacatcaaaggagtcaccagtggatttcctctacggatcgaagctgggaacgtgattgagaaggaagtcgatttcaatcccgattttatcaggcacatgttcgcgaagattgagtggaaagctctggtggaaggtgcgcgttccatgggatacgctgagttaccggaggaatctccggacgccgcggtgctgaaatcagatgagcccttccttaagaaactccaccacgcgttgctcgagctccaccttgaggaaggcgcgcttgtttgccctgagactggacggaagtttccggttaataaaggaatcccaaatatgcttctccatgaagacgaggtttaattgattgtgagatttttccttgtaagtttcaatctatgatgtttctgatgatgtgacccttttagtgagatatgcaattgaatgattccatttgaatcatccattgttgtcgtttttgaatcctttaattgtgttttatcaaagaatggtgcctgattgcaaaaaagtttataccctgattttgagt

SEQ ID NO: 142925 - DNA, 724 bp, Arabidopsis thaliana landsberg
  unsure (1)..(724): unsure at all n locations
tgatgtttacttgatgattgtgatgttgatgggtttcgggtttagtatagagttatcaaatgggcacaagttctatgttggtgggagagatggttgggtccttactccttccgaggattattctcattggtctcaccgaaaccggtttcaagtcaacgacactctttgtaagtctctctcttctcttctatttggccacagatatgtgtcattaatgcatgattatactcaattgttgattttgctagattttaagtacgtgaagggacaagattcagtgttggaggtgagtgaaaacgagtacaacacatgcaacacgactcaccctttgacttccctctcagacggtgactctctcttcctacttagccgctcagacccattcttcttcgtcagcggcaactccggatcctgtctcaaaggtcaaaagctagccgtaacggtcatgtctaccggacaccacagccacactcctcgtcatccctctccttccccttccccctcagcgtctccggtccgtaaggctttnnnnnnnnnnnnnnnnnnnnnnnnncataaggctttgtcatcgccagcgcctactccgggagtggatccctcccattcagaagttcttgcgccggctccagggcccgccgcagctgttcgcaatttggccggttccgttgctccgggagtgatttctctaggcttggttcttgtgattatgataagttccatggtt

SEQ ID NO: 142926 - DNA, 649 bp, Arabidopsis thaliana landsberg
cgatcttcaaaatccataaaaatctctcctttatttagccctaaaacagagtattagagtttgattcgtaaaagagaatatttttaatctccgccgcaagtcgatgtcgataacgattccctacgatggctcaatctcccgcgagccatcaccgtctccaccgccgccaaaagcgaacacgaagaatctaccgacgaagattctctctaacttcctcataggtctaatcatgatccctgtagctataaccgcttttatctttatcctcacgtctctcggtttcaccttcttcttcgctttctactggtttcttcaacgaaactatcgccaccgtctccgccgccatcgccgtcacgaatactcagatgggttatctccaagatgcgtgaagaggcttcctcaattcaagtattgtgagcctagttcagagtacggaggcgatgattgtgttgtttgtatcgatggatttagacaaggacagtggtgtcggaagctgcctcgatgtggacatgtgtttcaccgaaagtgtgtggacttgtggttgattaaagtctcgacttgtccgatttgtagggatagggtttatagatttgaagaaggaagaagatggagaccacaaggtgaaaatttttgatcggtggttttataa

SEQ ID NO: 142927 - DNA, 1669 bp, Arabidopsis thaliana landsberg
gaacttgacataaaacttggtctcaaattctagcttaattctaataagtctcattattattattgaaaattaaaaattttggaaaatacgtttgtaaatagaataggtttttgattctgtttacaaatatccaaataggtaaattaaattattaaattcaaatttctttttattttcaataaaaagaataaaaaaaaaaggacagagttctttttttatagtttagctagaagaggagattatatgaaaaatttaaccgattctttcgtttacttgggtcactggccatccgccgggagtttcggatttaataccgatattttagcaacaaatccaataaatctaagtgtagttttcggtgtattgatcttttttggaaagggagtgtgtgtgagttgttcatttcaagaataggctggattcacccagtggcactataactaggaaagagtgcataatcccgcgaattacttctgaataaaaaaatcatatttgagaaccatagcctttcgttattctttggtaagtccgctttactttgattctctattaaccaaaaattgggacaattaattaacatggttaaagctaaaccgtttgaagttcagatgcaacatggtactctttctactatatatagtctaaatgtagactaaataaaaaaatgaataaaattttcaaaaagaattgttatacttttttcgatataaaacactcatgtcgataaaattttttgagtctttttttataatgcagaattgataacctacgtataaaataataagaattctttggatttcaagaaaaaaagaaacaactttgctgacaattattaatttttcattggtcagaagaatcctccgaatatttttatcttggattggtgatctttttcgatagaaatatatattgaatatgaattgaataaaaaaactcgggagagggtaggctcattgcatgaaaaagatgggaagggaagtctcataaataattgattggaataagtgagcatgagagccaaatgaatcgaaagattcatgtttggttcgggaagggatcatagaactttttttttaatgaatggaaagataatctactttcattaaatgatttattagataaccgaaagcagaggatattaaatacctattcgaaattcagaagttctgcgtgaaggagttattcgccaattaggtaatgtccgggcgctgcttgggtattgtatgaatcgcaagcgggtaagtttagcgtgaatggagactttgatatcgaccgagaaatatggcatttgatttgtcccccttatgaacctttgaaccatttagaaaattccaaaaatgaacccattctttttgaccaccaaagaccatttaatcaagtccgctatcgggttttccaacaagcttttcatttagccctaggaaccctaaatagttgtttgagtaatgagtacatttacgactattaatgcaaatattgggatgtttggtacgatgaaagaaataactgattaattatttccttacgattattataggcattatttttttttcttccaccaaaagaatcaggacaatactcatggtaaccattagagccgacgaaattagtaatattatccgtgaacgtattgagcaatataatagagaagtaacgattgtaaataccg

SEQ ID NO: 142928 - DNA, 551 bp, Arabidopsis thaliana landsberg
aacaggagtctctcaaccattggtgccaacgctatgactactgttctttttccaagagagtttacaaccatgtggccaatcacttcaatcaatggctcaaatgctaacttacttggctttgagaaactattgacctctgttttgggtccgaaagctcaggagaaaggttcctttaaggtgttaaaagcgaaagtcgctgctcaaacctttatgaagattggttttagcatagaaaagaagctcaaggaagcagatgttgaaggtttaagctttccagagtggcgaacaaagcctgagacaatgagaatgcattttgaggttcttgctaaagttgatggtgagaatgttatcccggagaacgtaatgcgagttgatccaatcccactggaggacacgatagcgtaaaatgtgattactggaaatgtaaccatgtcgaaacttccaatcattgagtctccttcaagcccttttaccttgtaaatcatgttctatgagaaaaagtttcaaacttttgatctcgcctttgtttactttactaatcaccatattgc

SEQ ID NO: 142929 - DNA, 855 bp, Arabidopsis thaliana landsberg
agctttgcttctgctaagtatcaagcttctcccaagcagcctcagacatatacacttttaaaccaaaattcataagtaaaaaggttgtcttcgttttatgggtttgcttaatttcttattttctgtatcatcagattgtggtcaagagaacactttgaagtctggggatgtgatccaatgcagagagtgtgggtaccgtattctctacaagaagcgtacccgtagaggtgacttattcttaatcctctccttttgttttgtaatgttttttgctttctttgattcctctttttttggatcttgttcctagtttataaaagtgatggcaccattttgaatgcctctcaacatatacatgatatcgggatccttttttaagtcttgatcatagtttatgatactgatggaacgattttcagtgtgtcttatataacgcaaatgttctaaggatctggtttccgaatttatcttgagattgttaatctgttggttttcttgtacaaaatgtagatgttgtaaacttgtttccggctaatttatttgatggtttattctcttgcagttgttcaatacgaagctcgctgagaactactactcctgaaggtggttcatagtctgttaagatgggttgagactttttggcactgtttgtgatatatatatcgacatggtgattgctacattgccagttcgatttgatttggtcacagtgtgactgtgtaatgactttaccgttttgatagatgtaattcttggaataactaagttcacattgctataatccttgattggctataatctctcgttgttttgctacctttgttctttagtgtactctgcatttagttgatcaga

SEQ ID NO: 142930 - DNA, 1364 bp, Arabidopsis thaliana landsberg
actctcagctactttttccccaattttgagctcaacatcgaaccctagctcaacgaaccaatcatgtcttccaagcaaggtacgttgctgttatacagagatttgagttggtgattcgttcaccgaataaagtgattagagacatcgtttacgatctgctcatcttattttggttttaaacaggaggaaaggcgaaacctttgaagcagcctaaagctgataagaaggaatacgacgaggtgactctactgtttcttttttcttttacgagttggattttctgttgatttgccttcagctaaatcggcttatattgttagctttagacctcgaatcaaacgatgcttttgctctggatctggttttgattgtccaactaacttgaattcttaaaatttgttaacattcagtgactcataaatcattaattttgctcggattcaatgatttatacgcaagttcgaattttgatccagtgtttttaagggcacagtcttgacttcttcacttgattttgtttgcatactatttgtgtattaatgactcttagacattctctaattgctgaaatgttgatttggtatcaatgcagactgacttagctaacattcagaagaagaaagatgaggaaaaggtgagttcccactttgatgctctgacttgttttctctttttgttcatacgaagttttgtgattggaaaattgcatctagttaaacttatatgtttgggctccttttttaatggaaagctataaaatactaatcaaagattgtatcttcacaagagagcttctgttttagatacatgggttttgttaaggttatgcattagtacgttccactttgtcagtttggtctactaatcaaactgacactaattatgactttatatctggtgactacaactagatgggtcatttctattaattatttgttagtttaggggtattcattacagatccttttgagatgatatggactagtttcttctaactttgatgaaatagtgaccatttgtccatattaggatgtttagtttactttttttccacccaattgtgtgaaagactcattagcctttctttcgcatgagaagtacagtgatcatttgttaccgaaagcctgacctgctttgttttgaatgaaaatgataaaacaggcccttaaagagcttagagccaaggcatcgcagaagggatcctttggaggttctggacttaagaagagtggcaagaaatgatccgttttatccatgaagtgtgttttaaaatgcaaatttatcaagtgaaaaacagataatcctgtgttgatgtaactttttatcataattcgagaagagtaacttcgcttctccatacatat

SEQ ID NO: 142931 - DNA, 2780 bp, Arabidopsis thaliana landsberg
atgtctgtcaaggtcccgttctcgatccttaaggtaaataaatagctgcattgttatttaatctaaatgcctctctagatcaaggactagagctagcgccattgacatttagtttgattcactcacatccaactctatctctattaacatctgtgatgactgatgatgaatggtgttttgttgcagtcgttgataaataagaagaaggaatggctttctataatactattttggctttgaagtaggcaacttccttagtgaaacataagaggaatctgaagttttactataaatatttttgctctttttgttttgtttgtttgtttcattttagataacccaacttaagttccattctctgttttgtaacaaaccttcaatgtttcaccaatatccacaagcataaccacaagatcatagcaagacatcctagctgttggatatggttctctaacagtttttagtcacaaaattactagtatactgtcaagtatggtagaatataagcagataaaaacaattgttccattctgtgctgattagtgaaccatcgaacaataaaactgagtcatttagttgtctttggaactcactacgaaagcatctgagaggaaataaatgggatgacaacaaacaagagatggagagagtaaagctcattcaaaaatgaacattttgctttattatgagatacaaatcaaaacatgacaagaacttgtgattctcatttcaagggacacactttctcgaaggcttcttgctctttcctacacagatcaaactcgtttgtgtagtaatacatacacccaacataatcatccatctccttttggcacttctggtgaagatccttcagcctgcataattcatacaacaaatttaatgctttaccgaagaaataacataatatctgcatgtggacccaacattattaatctacgatctcgatgatgctgaaagtcttcttatattgatattattagaggattacatcatactaaacaacttctgcacatccaactaagtcttagaccaacatttttagggaagcaaatggcttcttaatggcttataagttggggaaaaaacaatgagaagttgtggtatgaaactgtttctacttggccaacatctgagagcaaggatatatgaaacaacccgatttctacaaagattgtaatatgtctgagtgtaatagatagttcctccatgaaatacagtctgaactctaaagcatatacaaaaccagagctcaatgaaaaacgatttgatggctgatctaagctcacctatgacttccataactacttaagtgtgctttttttatggtctcatgcccattgctaagatgattccacgatattgtcacagctatagtcagatactttggctcacttagtttagcacaaaagaagtgatcaaagtccctacagttcctaatttcttgaaatccagagacccaatcgtttcttcattcaagtctcatttctgaatcccaggcttacactctatgattagaatcctaaatcaaccatttgatactcgaggcttcctaaccaaaaccaaagccaaaactactaaacttgcaaagtagaaggaaaatataatgagctaaagatacgtacaagccaagcacgcagcgagtgacgtcacgacctttgtcgagacacttctctgggtttggatcattcttcttgcatttgaggaacgcaacattctccggcatacacctcatacctatatgcttcgctgacgccgttaaaaccgccgaagtagggatcgggtttcccgtagcgtccaccgcactcgacatcgcacagcaaattcgaaattcctaaaccagaatccgaaatggagaaactaaaattaatccaatctaacgcaatcccccaaaaaatcggaatcgaaatccatgaatctaaactaagagaagctgacaggaagataaagactgagagagcagagaacgaacatcgtcgtaccttttcaacggatcgatttggatcttcttcttcttctccactgagtccgacggaaatagaaaagagagagagaaaagagaacaacaaaaccaggtgagagtagctaaaagaatattgggcctattcagatttaatgggccgaatgaaaatttagtgtcttgtctctttttaatgacagtgttcctacttccttggtctcattcccgtttcatctccgccgccgtatcaccaccgtgttgtcgccttttgccatcggtaagtttctttagtttctgatgctttcagctctgtgtttgagcatctgtgagtattttttcttgttgaagttgcatttcggtgaattctaatgtttcattttgttattagcgcaagtttttttgcccattttggattgaatgatctaggattacgtttttgcatctttttgtttattttctgtaatctttcgaatggtaatgttcctaatgttctcagttctctgctttcaaaatctaaaaaaaaaagtttcgtgattgcactttggtctttagtttgtctaggtttttatgtcgcttgatgcacatattgaactgagatttgatcgttaatgatctcctctctatggtgtagtcaagtgagaaaatgggggacaagaggaagaagacgttcatgttcatccgtcttgtctcagctgctggaactggtttcttctatgtcaagaggaagagtaccaagggacttcttgagaagctcgagttccgtaagtacgatcctcgagtcaaccgtcatgtcctcttcactgagcagaagatgaagtga

SEQ ID NO: 142932 - DNA, 1159 bp, Arabidopsis thaliana landsberg
attggtgttattgaagttgtgactaaatttttagggctatgatatatgtgcagtttcttgggtggtaagaaactgaggctgaagaagaagttgactgttccagctgtgtccaggccagatgcgtcggtgcgcgccgtcgcagctgatccagatagaccaatctggttcccgggaagcactcctccagagtggctagacggtagcctccctggtgacttcggatttgatcctcttggtctttgtgagtatattttttgtgttcctccttgcatgctttttaacaagttttataaacaaaattagactatatttataattttctgacaaaatttagacacatgtcagcatcggacccggacagtctaaaatggaacgtacaagccgagatagtccactgccgatgggctatgctaggagccgccgggatattcatcccagagttcctaacgaagatcggaatcctcaacactccgtcatggtacacggcgggagagcaagagtatttcacggacaaaaccacactctttgtcgttgagctcattttgatcggatgggcagaaggacgtagatgggccgatatcatcaagcccggtagcgtcaacactgacccagtcttcccaaacaacaaactgacgggcacagacgttggttacccaggtgggttatggttcgacccgttgggttggggatccggtagcccggctaagctcaaggagttgaggaccaaggagatcaagaacggaaggttggctatgttggcagtgatgggtgcttggttccaacacatctacactggcactggtcctattgataacctttttgcacatcttgctgatcctggtcacgccacaatcttcgctgtaagtgtgatccaaatcaaaacatatctttactaaatgttcataacctcgactcgtttaattgactagcttttgtgtgtgtgttttttttacaggctttcacacccaagtgagacaacgaaaaagggttatggggaggtgaatgcgtttgtgtgtgatcatgtttgaacaaatatcattttgaacttaaaattattatgtactttatataaattgtggtcgaatacaaattaaggttccccgtaacactcttttcctaactcaatgatcataagatgcttttacattgtcattcggag

SEQ ID NO: 142933 - DNA, 1422 bp, Arabidopsis thaliana landsberg
cataaaccctaaatccccaaaatggaataatcaaaatttcatcaggagatctctaaaatcgaaatctacttgatcccgcaacgaagaaatgttaagaagaagactcttgtcgatcatatcaacatcactcatcaattcttcgtttcatcaaaccgcgaaacccagattcatcatttcttcaccacttcttcaatgccgtccttctccgatctctactcaaattccgacctctacgagcagggctttgtcgtttcaaggaatcagggcttatagtttattgagcttgaacgatctgagagacaatgtgccgagaaaactcaagacgaggaaaggaagaggtattgggtctggtaaaggtaaaactgctggaagaggtcacaaggggcaaaaagcgagaggaacgatgaagtttggtttcgaaggtggtcagactccactacgacgtcgtttacccaaacgtggcttcaagaacaaatttaagctccattttcaggttcaagcttgtgccttttagttctgggatttttatttctgaggtcaagtttcggattttgtagcttcccttgattcgaagggttaacatttgtgattgattccttagattaggtcgaatttgagaatctaaatcagatggatcactcttgttcttctttctgtatgccattattgctgttctttagctgcttgtggtgaagtaggttatactgtgtgtgtaaggatttaggatttgacactctattgatgcagcgactaaagatgtttatgattgttttgtgatgcagccggttggtctagggaagattgctaaactcataaatgctgggaagatagattctcatgaattgattacaatgaaaacgctcaaggttcggtcatacttcactctttgattcaacggtttaaattgagtttaggattcttaatatgtctgattcttactgaacacattaacgtcggtttgcaggatgtgggagccataggaaagcaaatagaagatggagtaagactaatgggtcgtggtgctgatgatatcaaatggccacttcatttcgaggtttatcatttgcgttattaacttttgctctgtagtctctagagccgttgcaccagtcaatgtatttgcttagttagatgttcagttaatcggtatgagcgtgtttattacaggtttcgagagtgacggttagggccaaagaggtggtggaagcagcaggaggatcagtgagaagagtgtattacaacaagttgggcttaagggcattgcttaaaccggaatggtttgagaagaaaggaaggttattgccaaaagcagcgcgaccacctcctaaacaacaagataaggttgatagcattggacgtcttccagctccgaaaaaacccattcccttctttgcagctgaggagaccaaagtatgagtctcc

SEQ ID NO: 142934 - DNA, 1834 bp, Arabidopsis thaliana landsberg
tgtggcaatcaagatgctgattttgtattatgcaaattgttgttgtatgtatgtagccgtgtgtgtggaaactcccatggatttatcaggaagtatagtcttaattgctgtagacagtgcttccgtagcaacgccaaggaaatcggattcattaaggtaaacatgttgaatgattgtcttttgtatctccatgagaatggcccatgatgttttctcactctcttggaaagatgattaactcttctggttttgttttcctttgtttgcagtaccgttaaagaccaatggtgttatgaggagcaatcatgtgaaactttcaagctttaaaattgtaatggatttatttcgataaggcttttgagctgttgaatcttttagcttcttgttttaaactcaatcttggttctctacaaatgattatcatatagatttgagtttctactatttgagatttgtgttgctattatctattactctgttgatagttgcttaagaaccatataacaactgttaaatccttccactaagggaccaagtactttggaatggtggtttattatagatgacactagtggcaatgtgaatcaaacaaagatataagtacagctgttcacagttaacgatgtacttaacgatttatccacttaacaagacaagtgacaaacacattaaaagagagatcaatgaagcaaaattatccaacgaatacaaaagtttagtttgaaccagcaaagttattgagaaatcagaaaacacttcacttaagtttacgcacgtgtgagtttgtccaaagtccaacaggttcttttacttcttagtttctctcacgtacgacgaagactttctcgtggaaacacggagaaccaaaaaacagaagagaagcgatatgaaacgaagaaacaaacaagatcatcgtcccttttgcctttagggcacaaaggggaagcctttttcactgggtatgtttcttctctaatgatccatcttcttcttccctctttcgattctcaatctcacgaaattacctgtgacgcttcgatctctttcaatttcttcttcgatttctctattcctagtttataattgattgcaatttcgaaatcgtcccaattttgattatcggaatctgatttttcaggtatgtgttgagaatttggggtttttaggtttttggctcagaagagagaatctgggatcttaaaaatcgaaactttctagatgtggttttagttcaacttagttgtagaagatgggatcaaatcaaggttcttccaggttagatacgttagagattaaagctctcatttaccgggaaattgggaatcaaagagctgagagttacttcaatcagctcggaagattctttgccttgaagatcaccaaatctgaattcgacaagttgtgcatcaagaccattggtagacaaaacatccatcttcataaccgtcttatacgttccatcatcaagaatgcttgtattgccaaatctccaccatctagatttataaagaaaggtgggagctttgttagatttggtaatggggattcgaagaagaacagtcaaattcagccgcttcatggagattctgcgttttctccttcgactcgtaaatgcaggtcaaggaagttgagagacaggccaagtccacttggtccacttgggaagcctcatagtttaactacgacgaatgaggagtcaatgtcaaaggcacaaagtgctactgaattgttgtctctaggaagtagaccccccgtggaagttgtgtctgtggaggaagaaaaaaaagttgaacaaatagcaggaggaagtccaagtgttcacagccggtgtcct

SEQ ID NO: 142935 - DNA, 397 bp, Arabidopsis thaliana landsberg
  unsure (1)..(397): unsure at all n locations
tcctctcaaatctcaaactctctcttcccatcactctctcgctctctcttcaatctcatctcaatcatgacagagcaagagatctgcgtgagggttacaagagcggcggcgaaacgaaaagcttcgacggcgatgggtattgacggagatcgggtcaacaagaagagagttgttctcggtgagcttctaaacgtctccaatgtcaatctcttggctaatctcaatcagaagaaagaaacccagaagccaaaaaggaatcttaaacctcctccggcgaaacagattaagtcagctcccgtggctattattgacctagaatcaaaatctgacattgattctcgatctgatgatcctcaaatgtgtggaccttatgtngctgatatctatgagtatcttc

SEQ ID NO: 142936 - DNA, 699 bp, Arabidopsis thaliana landsberg
ttttttgcctcgctgagcagctgcgaatctcacgacttcaagatggttagtctcgctctctcgcaaatttttaatctttgttacaatcgtttgttagtttcgcctgtttggattgattaaagagtttgatttgttgttagttagatatcgaaacgaaattagtgattttgatttgtgttggaaaaatgaaatgtaacagccgtcgcacaagtcgtttatgattaagaagaagttgggaaagaagatgagacagaacaggcctattcctcactggattcgtcttcgtaccgacaacaccatcaggttcgactattcttgtttttttttgtctattgtttattccctgatctatcaaattgaagatatatttagttgtgttagttgatcgatttagttctaaaactgatttcattgtgtggttaatttcaggtacaatgccaagcgcaggcactggcgtagaaccaagctcggattctaagtgataagccttctaaaagagtcttctttatctgtttggtttagcatttcctcaagtcttctttttgttttaagttatgacattttcatatttctgtaagacttttactctattatgattcatgttaccaaattttcttcgtattgggagttgtttcttaacatttgtgtgatttgactattgaagtatctcttggattgcttccatgtagagttgcttct

SEQ ID NO: 142937 - DNA, 940 bp, Arabidopsis thaliana landsberg
ctcataagagaataaaaggatttttgattgagtaagttcaacaaagtctttttagactatctttctttattttttccttatataaaaaatatattaaaaactcaatcaaaattaaattatccacaagaacaccaatttttgttatgcttaatatatttaatttgatctgtattttttttaattctacccttttttcaagcacttttttagtcgccaaattgccagaggcctacgcctttttgaatccaatcgtagatgttatgcccgtaatacctcttttctttcttctcttagcctttgtttggcaagccgctgtaagttttcgataaaattcttaatactgtcttaaacaaattcacgattttgatttttccaacaattcaaaagatccaaaaaatcttgacgtatgaacgaactctcaattcaaacatttaatttttttggtagccatactaaatctggatcatttctatttcctaaattttatcctcttttccctaaatgaaagaacctaattagattcaagttcaccaaaaaaatatctagatgttggtatgcaaatctgtttgaatatgaaagattcgactattatcttaattacaaataactttctgaaacctttttttttattggtatcaaaattagatatttgatataaaaatagagaatctattctctttttttttagtaagatcttggagattgtgtaatgcttactctcaaactttttgtatacactgtagttatattctttgtttctctcttcatatttggattcctatctaatgatccaggacgtaatccgggacgtgaagaataaaaaagaaagtttttttattgctttatttaattcgtggaaatgctcgaattttattaggattttatctattacacaccatcaaaaggagaaggggaaagagagggattcgaaccctcggta

SEQ ID NO: 142938 - DNA, 568 bp, Arabidopsis thaliana landsberg
aaaacaacaacacaacaataagcaccaaaacctcttttcttctcttcatttgagtctcaaatcgaaaaatactaacaatggaggcaatgaagatgaagctttacgtggtggttttggtggcagtgatagcgttctctacagttcaccagacggttgcagcggttgacgctcccgcgcctagccctacctccgatgcttcctcatttatccctactttcttcgcctccgtagcggtgatggcctttggattcttcttttaagaagtttcttctttgctttttatgtttaaatgaatttaaagtaaaatcaactaattgatgatgtttaagtctggtcttgttttgagttctagttgatttcatgttggttatgtttgatgtcttttatctctctattatgtatcgctgttgaatttgactcattcgaatatcaataataatataatcaataataatataatattattattatttgtctattttctttatttctttgatagtaatagaattgatttatttaaaacttcagaaatctataaatgcagatatgatgcaaacagaaccgagaa

SEQ ID NO: 142939 - DNA, 548 bp, Arabidopsis thaliana landsberg
gtgacttgaacgtatggacgtaaccggatgctcaactacgaaccacggtgtcgggggttcgaatccctcctcgcccacaaccggcccaaaagggaaggacctttccctccgggggggtaggaaaatcatgctcgggatagcgatagcggactcaaagctatggaacttggggatgggtcttttgtcgaaatagagtggagtgaccttcttttttatttgaatttagatatatatctattatatctatcgcttttttaattttacatatagtatttttaaacggccgaatcagcatattttttgaagccccgtaactcttcctcagccaggcttgggcagaatagcggagcaagtattagtagcatagcaaaaatgcgttcctcatcattaagtcattaaattcatatgtttgctcgcggtaattgtgaactctcgggagaatcgatgactgcatcaaagatgcacttgttagtacatctgaaaattctgaattggctagttgtaaatagccccaggactatagaataacggattatcccgaacctaca

SEQ ID NO: 142940 - DNA, 876 bp, Arabidopsis thaliana landsberg
atgggaagagggagaagttcatcgtcttcttcaatagagagtagcagcaagagcaacccattcggtgcttcgtcaagtactcgaaacctaagcacggacctgagactcggactcagcttcgggacatcctcagggactcaatatttcaacggtggctatgggtactccgttgcagctccggcggtagaggatgcggaatatgtggcggctgtggaggaggaagaagagaatgagtgtaacagtgtagggagcttctacgtgaaagtgaacatggaaggagttccaattggaagaaagatcgatctaatgtctcttaatggctaccgcgacttgatcagaacccttgatttcatgttcaacgcatccattctctgtaagtttctatgtatacataatgtcatatcagaatgatttatatgtcttagaggtagcaaatttctaacgatatttttttctttcttataagtccgttttgatttttttttttttttaacggaatgaaaaaatacttccgctcattactattcttttgtttgaaggttaatatcgccgtaataatcgcccatcactatttcataggttgtttgtttgtttgtcaaaaaaaaaatctggataacgttatatgtcagagttatttttccgtaggtagagtttatatattgcgcagtgtgtaagtactgtgtaatgggtaaattgtaaaaatgatgaaaactgatgggaattgaaaaaatggaaatatataggggctgaagaagaagacatgtgcaatgagaagagtcacgtgctaacgtacgcagataaggaaggtgactggatgatggttggagatgttccttgggagtaagcactcttttcatccttttttgtataattaga

SEQ ID NO: 142941 - DNA, 1558 bp, Arabidopsis thaliana landsberg
ttttcaatagggaattgaagacatgcattcaaaatctgacagtggtgggaacaaggttgattcagaggttcatggtacagtatcgtcgtcgataaatagtttaaacccttggcatcgtgctgctgctgcttgcaatgcaaattctagtgtggaagctggagataaatcttctaagtcaatagcattagcattggaatcaaacggttccaaatcaccatccaatagagataatactgttaacaaggaatcacaagtcacaacgtctccacaatcaggtgcattacgcttgcggatttgcttactgttgtgtttaatactcttaaccaagtgttgttggtttatttcgatatgcagctggagattatagtgataaaaaccaagaatctctgcatcatggcatcacacaacctcctcctcaccctcaacttgttggccacacagttgtaacttcccaatatagatacattgttcttatcatttcctttgggaaaattttagctatggttgcttacaatttagttttttcccggttatgaatcatgcagggatgggcatcctcaaatccataccaggatccatattatgcaggagtgatgggagcctatggacatcatcccctggtatatgactatttccaaactatttacaagttttcctaaagcctcaactgattatctctgttaagacgatttaaccatgtgacatgtctaccatgattcatgattgctattgggttgcgaaacatgagattgcatttttaaatattctattagctgtaggtgctttatgaagtctagcatgattataattgtctaacagtgttcctgatagatagatgaattatgatttatagcagcagtttattgaagatattgagaagatgtatttagttcacgacaggaatttttaggctcttcttatctatttagcatctatgtgactttataataaataacacatttaacctatcaggggtttgttccatatggtgggatgcctcattcaagaatgccactgccgcctgagatggcacaagaaccagttttcgtgaatgctaaacagtaccaggcgattctgaggcgaaggcaggcacgcgccaaggcagagctagagaagaagctaataaaatccagaaaggtgcattgcgtgttaccatgtatattagtttcttgagaggtctgatctaactgtgaacgcatcacactgcttaatgcatctctttctttgtttgcatggtccacagccttatctacatgaatctcggcatcaacatgctatgaggaggccaaggggtactggaggacggtttgcaaagaaaaccaacaccgaagcttcaaagcgtaaagctgaagaaaagagcaatggtcatgttactcagtccccgtcatcatctaattctgatcaaggtgaagcttggaatggtgactatagaacacctcagggagatgagatgcagagctcagcttataagagaagggaagaaggagagtgttcagggcagcaatggaacagcctttcctcaaaccatccttctcaagctcgtctagccattaaatga

SEQ ID NO: 142942 - DNA, 3102 bp, Arabidopsis thaliana landsberg
attttttttggtttgtgacgatgactatagcaattcaccattgtctctctctccttaatagctgcaagatcttaagagctttaacacaaatacatggcttgtttattaaatacggcgtcgacactgattcttacttcactggaaaacttatcctacattgtgcgatttctatatccgacgctttaccttacgctcgtcgtctcttgctctgttttcctgaacctgatgcgtttatgttcaacactctcgtccgaggctactctgaatccgatgagccgcacaattccgttgcggtgtttgttgaaatgatgaggaaaggtttcgtctttccggatagtttctccttcgcgtttgtcatcaaggcggtggagaatttccggtctttaagaactgggtttcagatgcattgtcaagctttaaagcatgggcttgagtcgcatttgtttgttggcactaccttgattggtatgtatgggggatgtgggtgtgttgagtttgctcgcaaggtgttcgatgaaatgcatcaaccgaatttggttgcttggaatgctgtgatcaccgcctgttttagggggaatgatgttgcgggagcgagggaaatcttcgataagatgctggtaaggaatcacacgtcgtggaacgtgatgcttgctgggtacattaaagctggggagcttgagagtgctaaacggatcttctcggaaatgcctcacagagatgatgtctcctggagtactatgattgttggtattgctcataatggaagtttcaatgagtctttcttgtacttcagggagttacaacgagcgggaatgagtccaaatgaggtaagtctgaccggagttctctctgcctgttcacaatctgggtcatttgagtttgggaagatattacacgggtttgtagagaaagcagggtatagttggatagtttcggtgaacaatgcgcttattgatatgtattctaggtgtggtaatgtcccaatggctaggttagtctttgaaggtatgcaagagaagaggtgtattgtatcttggacatcaatgatagcaggcttagctatgcatggtcaaggagaagaagctgttagactattcaatgaaatgaccgcgtatggtgttacaccagacgggatatctttcatttcacttttgcatgcttgcagtcatgctggactgattgaagaaggtgaagattacttttctgagatgaatgagagtttaccacatcgaaccagaaattgaacactatggttgcatggttgatttatatgttcgatctggaaaactgcaaaaggcttatgatttcatatgccaaatgccaattccgccaactgccatagtatggcggactcttctcggggcttgcagtagtcatgggaatatcgaattggcagagcaagtgaaacaaaggcttaatgagcttgacccaaataactcaggggatcttgtacttctgtcgaatgcttatgcaactgcaggtaaatggaaggatgttgcttctatcagaaagtcaatgattgtccagagaatcaagaagacaactgcttggagcttggttgaagttggcaaaaccatgtacaagttcactgcaggcgagaaaaagaagggaatcgatatagaggctcacgagaagctaaaagaaataatcttgaggcttaaagatgaagctggatataccccagaagtagcaagtgctttatatgatgtagaagaggaagaaaaggaggatcaagtgagtaaacacagtgagaagcttgcacttgcatttgctctagctagattgtccaaaggagcaaatatcaggatagtaaagaatctgagaatttgcagagattgtcacgctgttatgaagctaacgtcgaaggtttatggggtagaaatattggtccgagacagaaatcgctttcattcatttaaggacggttcttgctcatgccgtgactactggtaaaaggttgtggatagatgtacaccacacatatatcattttgtggactaatgcatccactagtgacctcaccaatggaagcttcactcccaacacaaactttcagatctctctactctctacaacttgaggtcttcatttgcgaggtttgtggtttacattgccttgggactgtgggtaactttgatactttgtattcttcttggcctagaacgtaatatacgaaattgttttggactgttattgtaaatttctaacagattctaccaaactttgacgagaaatatcaagcacgtcttcgtggttctggttcaaaattctcaacctttgaatcgtcgtttccttctttctcgcttcagatcttcgaaaaaccctaattttttgtataatttcgcttccatggctgcttcagctgcattctccatttcatcaccaccttttgtaccctttaccaccaaaattcgcagaccatttctcttgcttactccaaaatatcccaaacctgtttcggtgcgagcttctgtgtcctcgatctccatcgatgaaaaattgccagtccaaacaaaggttagtttactagtatcttgttttgtattaatggtttgatcctttgacttggagaatgaattagacaaaattgtattagtcatgttgagattctattgagttttgtttcacaatcttactatattagctgtactctttttatgtagaatttgatcaaagtgagatttgttttcttacttctgaaaaccagaaatgaaaagtaaggctcttctgggataatcctttcgtttctgggcttcttttaatgtaatgatgctgttctgttttagacaagcaactggcagtggaagttcaagggcaattcgattggtatatactatgaagagcatgagagggagaagtgtgaatcggctaagaatattctaatgataccaacaatttccgatgttagcaccgttgaggagtggagatctgtagctaaagacattgtgcagcgcgatggagacgtcaactggcgagcaactattgtagattggcccggtcttggttactctgctaggccgaagatggattatgacacagatgtcatggagaagtttgtggtcgacttcatgaactcacctgaaagcccaatgagccagtcag

SEQ ID NO: 142943 - DNA, 1470 bp, Arabidopsis thaliana landsberg
  unsure (1)..(1470): unsure at all n locations
ctcagtaacaaaaacaccgaaccctagattttctttcacctgaatctgaagatggagttctctaccgccgactttgaaaggcttatcatgttcgaacatgctcgcaaaaattctgaggctcagtacaagaacgatcctcttgattccgaggtttctttcttctacttgtcctcccctctcctcagaatttgtgaaattgcttcatttcgattaatatgatcggacctgatatgtaacgaatattaaggatgttttgtggagatggatttcgtgaatgtattgtcactatgtgtagtttaggtcttgaattcgatggaaatattataatttatgttatgagattgattatatgtttctctgaaattacattttttcctgagtttcttttgatatgtggtcatattaagaatacctttgcgaacatttttattttctgtagaatctgctgaaatggggtggagctttacttgaactttcacagttccagcctattcctgaagctaagctcatgttaaatggtatgatctcttctttaatgtcttaaaataagcgcctcaaattcatctttgctctgaaatgtaacgaaatattattgatcatgtagatgctatttccaagttggaagaggccttgacaataaatccagggaagcatcaggctctttggtgtattgccaacgcgtacaccgcccacgcgttttatgttcacgatcctgaagaagcaaaagagcactttgataaagccactgaatatttccagagagcagaaaatgaggtgcattttcagattttatgcttttgaatttgaaacttttatgttgttgtgagtgctgtgagaccaacttcttactattatattatttcaggatccaggtaatgacacatatcgcaagtccttggattcctcactaaaggtattatttcaacattccattttcagagtcaatctttgtgtacgcaaattataacattaatcatggagacaattgctgctgttataataacaaggagagaacattttattccatcttcttcttctgtatttcttttacatttgagctcatgtttttgtctgtctatgtgaataggccnnnnnnnnnnnnnnnnnnnnnnnnnnnnnnggaatgggacagcaaatactaggtggaggaggaggaggaggtggaggaggaatggcttcatctaatgttagcgtaagttatcatgtgtttaagtatgctgtccaatgttttgaaaagtgtcatcttcttattatctagtagcagcatgttcagaagaacataagcagagagtgaaagaatctcatatcatatgtgggttataagttttcgtggttgctctgagaaattgccttgcttttgcagcagagtagtaagaagaagaagaggaacactgcattcacttatgatgtatgcggttggatcattctcgcttgtgggattgttgcttgggttggcatggcaaaatccct

SEQ ID NO: 142944 - DNA, 1402 bp, Arabidopsis thaliana landsberg
  unsure (1)..(1402): unsure at all n locations
aaaatttgtggcgaagagctaataaatagattcagaggagaaatagagagagacagagagcgagggacaaaaaaaaatcgattgataattttttcggcagagtcgagaaaattttgatatattaatatccgtaattccttaaaaagcctcctcctcttcgtcttcttcttcttctcctccccagtttcgcatcattctcttcgataaccgccacatcctctgaaaccctaatctggagaatcgccgccttctccagaaaatatctatttctataccttgttcctttgatttccaggttcgaatcaccgcctcctcgtttctccatttccgtgtttgtttgttttggtttcgtttgaatctttttgctagatatattcgttgtctttgggattttgattgttcttggcattttgaaattgctttgcagattctgatgaaaccggatcggatctttctctagatccgttctaggtttatcgatttctttctatcaatctctcgcatccggatgctttttgcaagttcttgaagcggattcatcataaatcgacagagaaatgtcgcaggctccgaatccagaagaagaagaagacacgattgaaatccgcgaggtttggaaccataaccttgaacaagagatggctctgattgaacaatccatcgacgatttcccttacgtagccatggacacagagttcccaggaatcgtttgcaagacagtaacggcgaatccaaacccaaacccatactctatacactacgaatacaactacgataccttgaaggcgaacgtgaatatgctcaagttgattcagctcggtctcaccttatcagatgagaaaggaaacttaccaacctgtggaaccaacaagcaatgcatctggcaattcaatttcagagaattcaatgtcatatccgacatgttcgccttggattccatcgaactcctccgtaagtcagccatcgatttggagaagaacaacgaatgcggtgtagacgcaaagagattcgcagagcttctaatgggttcaggagtagtgcttaacgataagatacattgggtgacattccattgcggatacgattttgggtacttgctgaaactcttgtcagggaaagaattgccggaggagatatcggacttctttgatcagatggagaagtttttcccggtagtgtatgatatcaaatacttgatgggattctgtactaacctctatggaggtctggagaaaatagcggagttacttggtgttaaacgagttgggatttctcaccaggctggatcagatagcttgttannnnnnnnnnnnnnnnnnnnnntgaaagagttcttcttcactggttccttgctcaagtattctggttttttgtttggattagataatcctcggttgctcac

SEQ ID NO: 142945 - DNA, 1174 bp, Arabidopsis thaliana landsberg
ttgctctccttcaccgaccaccgtctctaactttcatggacgagattctgactcgtgaattccgtactctcatcaccgacacttcctcatcggaatcactcccgagcttcttcccccgtcacgcctcctccgccagagccttcgttatcagcggcagacttccggtaaccgatgaactcctttctcatctcccttctctccagattctcgtctgcactagcgtcggcatcgatcacatcgatctcgccgcatgcaagcgtcgcggcatcgttatcaccaacgctggcaacgcgttttccgatgacgttgctgattgtgccgtcggtttgcttattagtgttctccgtcgtattcctgcagccgatcgttacgtccgggctggtaattgggcgaaatttggggattttcaattagggtccaaggtttgctcgaaatcacaaactctcaatttcgaattctgatctataactttagttagatgattacaaaggggaaatttaggtcaatgttttgcttagtgatctttaaaagcgttttttttggattctgagaaaaatttgggaatagctttagagtgtggggttacagataaagcagagctatgtgttagtaaaagtctttgtggtagtgataatatttattgttacaggtaagtgggaagagagttgggatagttggattggggagcattggatcatttgttgctaaaagacttgaatcatttggctgtgtcatctcttacaattcaagaagtcagaaacagagtagtccataccggtactactctgatattctctcgttagcagagaacaacgatgtactcgtcctctgctgctctttgacagacgaaacgcaccatattgtgaatagagaagtgatggagtcgcttggtaaggatggggttgtgatcaatgtgggacgaggaaagttgattgatgagaaggagatggtcaagtgtttggttgaaggtgtgattggtggtgctggtttagatgtgtttgagaatgaaccggcagttcctgaggagttgtttggtttggataatgttgtgttgtctcctcattttgctgtggctacaccagggtctttggacaatgttgcacagatagctttagctaacttgaaggcgtttttctcgaaccggcctttgctttctccggttcaattggattga

SEQ ID NO: 142946 - DNA, 1265 bp, Arabidopsis thaliana landsberg
cgatatctatgtggagatcgagagattacccaagaaggggaaacgatttcggcgaagacagggcaaacgctcgccggaggaaaaggcgcgaatcaggcggcgtgtggagcgaagttaatgtatccgacttacttcgttggtcgtttgggagaggacgcgcacgggaagcttatagctgaggcgttgggcgatgatgggtgtggggttcacttggactacgtgagatctgtgaataatgagccgacgggacacgcggtggtgatgcttcagtcggacggtcagaattcgatcattatcgttggtggtgcaaatatgaaagcttggcctgagataatgagcgatgatgatcttgagattgtgaggaatgctggtattgtccttctgcaaagagagatcccagattccatcaatattcaagttgctaaggtccattttttgactttcttgagttagttactttagtgagagttggtttagggtttagggaagctctgttgaatggatgcagctgctttaggttttgaaaactatgagaggttttggaatagggttatagagttgattatgtttgaaatatcatgttcaaagaaacttaggctggtggtgggtttaattgcaggctgtgaagaaagcaggtgttccagtcatccttgatgtgggaggaatggatacgccaataccaaatgagctattggattccattgacatcttgagccccaatgaaactgagctcagtcgcttgacaggaatgccaactgaaacttttgaacagattagccaagctgttgcaaagtgccatcagttggtaagtcccttttttttgcacattaccaactccaaattctggcttattcttgctgcaactggactctttaaagaggcttttttgggtttataaggtttaaagctatgttttcctcagggagtgaagcaagttctagtgaaactcgggtccaaaggatctgcactattcatacaaggggaaaaaccaatccagcagtctatcataccggctgcacaagtggttgatactacaggagctggggatactttcactgcagcatttgcagtcgctatggtagagggcaagtcccatgaggaatgcttgagatttgctggtaataattagtgacataaatctggtttcctaaccccatatctcagattagttttgtctcactttttttcccgggcctgcaggtgcagctgcctctctttgtgtcccagtaaagggtgcaataccgagcatgcctgaccgaaaatct

SEQ ID NO: 142947 - DNA, 1442 bp, Arabidopsis thaliana landsberg
  unsure (1)..(1442): unsure at all n locations
ctttcctctcattattatctctacacttctcatctctcaatcccattcgcttattatttatccatatgggaaaggttcttgagaaggaggcgtttggattggctgcgaaagacgaatcgggaattctttcgcctttcagtttctctagaaggtttcaatttgttttcttaacgaatatttttgtttcctatatgatattccgataagtaagctgtttttgttctaatgaaattaagttttggtgtgtatatagggcgacgggtgaaaaggatgtgaggttcaaagtcttgttctgtggaatttgccacactgatctgagtatggccaaaaacgaatgggggttaactacttatcctcttgtccctgggtaacacaaattttctttactcaacaaataacattatttcatattaaaataaactataaatgctagcaaacgtgattgttactatttcaaataatatcaacctatatctaagactttcttgcatattttaccggatgagacatgtttattcataccattgttattgtaaaatcaaacaatggattgcacaaaaaaaaaaaaagggctctaatgatgacatttaatcggaattaaattgtttcaggcatgagattgtgggcgtggtgactgaagttggagccaaagtgaaaaaattcagcgctggagacaaagtcggagttggctatatggccggctcgtgcaggtcatgtgacagctgcaatgatggcgacgagaactactgtccaaagatgatcttaacgtccggagccaaaaactttgacgataccatgacccatggtggatactccgaccacatggtgtgtgctgaggatttcatcatccgtattcctgacaatctcccattagacggtgccgcaccactactctgcgccggggtcacggtctactcccccatgaagtatcacgggctcgacaagccgggtatgcacatcggtgtggtgggactaggcggtttgggccatgtagcagtgaaatttgctaaggctatgggtactaaagttacggttattagtacttcggagcgtaagagagacgaggccgttactcggcttggtgcggatgccttcttggtgagccgtgacccgaaacaaatgaaggatgcaatggggactatggatggtatcattgataccgtatctgcgacccatccacttcttccgctgcttggtttgcttaaaaataagggaaaacttgttatggttggtgcaccagcagaaccgctcgagcttcctgtttttcctctcatctttggtatgaacctatttgtcagtcatctttaaacattatcaacaatatagccaccaaatttgcggttatagtaacaaatccggatacttttccattgataattaaatctactgattattttgtcacanatctaatcatatgtgaagagtaaagccactaaacgttg

SEQ ID NO: 142948 - DNA, 2933 bp, Arabidopsis thaliana landsberg
agaatcaaaacgtcttaaaacatgggaagtatcgtggagccatgggcagcaatcgccgagaacggaaacgcaaacgtgaccgcgaaaggctcgagcagggagctgcgacatgggagaacagcacacaacatgtcttcatcgtcgctaaggaagaaatcagacctgagattggttcagaaagttccatgcaaaactctcaagaacattctctctaatcttcaagaagtcattcttggtactaagcttactctcttatttctcgccatccctctcgccattcttgccaattcttacaactacggtcgtgtaagttatcttctcaattccttctctctttctctaattttgtttgtgttggtgaggtttggtagtgaaattaggcaattcttgttcagtgtccttatgacttccttttaggattttagttgaaggggatacgaatttcccaaccaattttatggatttaaaaaaataatgaagacaactttgttggagtgtttagattttagttaattgcactatactgaaacagtagctaagtacaaaatcacttgttcttcttacgctaaaacaaacttcctagatacatatattcacttgatcatcatatctctacaagcataaatcccgtgtttgataactattttttgtcagtacaaaattaatgatttgtgtttttcggagtccggtgcatttctgacacgtagttatccgttaccaaatattcgtcgagaaaggtaaagaaagactgctctaaaatatttttatttttgtgaaaatatgtgacagccgttgatatttggactgagcttgatagggctgacacctctagctgagcgagttagctttttgacagagtaagttattatcgtcccacaaattttctataggataactacgagatatttcatagtattaccattttattctggcccccacacatgtgttgcctcaagtttgttttagaggcgtggctagaaaaaagtaattgacatttccaagtgttgactgaatgatcatcacttttaagattcttttgaaatttcgaaacgatgttaaatagctaaatcttttgtttctttaacagaaaaaagagttacacacttagacttttctacaaaataatttgataaaagcgttattgtattagaaacgaattttatactcccttgttaagaaaatagaacatgatcgtcttttttattcttgcaggcaactagctttctacactggtcgaacaggtaaccttttcatacgaaacacattattttatcatataatatgatctccgaatcaaataacatacatctcctaattaatgtttactttggcagtgggcggtttgttgaacgcgacttgtggaaacgcgacagagctgataatcgcgatactagcgttggccaataacaaagtggcagtggtgaaatactctctattgggttcaattctctcaaaccttctcttggttcttggcacttccctcttctttggtggtatcgccaatatccgccgcgagcagcggttcgaccgggtacatacatatacaccctccggttttattttattttatatggtaacttaacataacctaaccgggaaacatggatacaaattgtatttggaaccaaaccaaaccggtttgtaaccctaagtaaatcgtgttgacttgaaccggatataaataatcattccggtaatcaaagatggttatgtgatgtttctcttcttgattgtgttacagaaacaagccgatgtgaacttcttcttgctgcttatgggcctgttgtgtcatttgctgccattattgttaaaatatgcagcaaccggcgaagtatcgacctctatgattaacaaaatgtcgctcactctgtcgcggacaagcagcatagttatgcttattgcttacattgcttatctcatcttccagctctggactcaccgtcaattgtttgaggcacaacaggtacctaagagttacgtcatgttttcatgcgaataaaatgtatctataatcaattttattggtatctaggatgatgatgatgcatatgatgatgaggttagtgttgaagaaactccagtgataggattctggagcggatttgcttggctcgttgggatgacaatagtcatcgcattgctatcagagtatgttgtggacacgatcgaggtactgattatgtcgatatacgtttgaatcccaacatgaaaaagaaagaaagaaactcacaagattaataaggaggtttcatgttggtcaggatgcatcggactcatggggactatcagtgagtttcataagcatcatattgcttcccattgttgggaatgcggctgagcatgctggagccatcattttcgcactcaagaacaagctcgtgagttttcttttttcttgctttacaagtattctttgtttgtgtttggttttatgtttagtgtgaatttcttccaaatgaacccacaatatttagcattgaaaaaaaaaattgttgcaaaaatatcttataaaactccaacatgtaacactgcctgaaatctatttttgtggaatggttaattataactacaggacatatctctaggggttgcgttgggctctgcaactcagatttctttgttcgtggtaagttcttcttcgccttttatattatgttgaaatctgaaagatgacaaatgttgcgtgcaatataagaaatctaaggcaatgttaatgtgtgtgtttcatcaggtcccattgagtgttatcgttgcgtggatcctgggaataaaaatggatctcaactttaacatccttgaaactagctctctagctttggccattatcatcacagccttcactttacaggtaaaacgttttgctttaaacacaagtttgataaggatgacctttctagttaatcattatcgtttgtatttgggccggtcaggat

SEQ ID NO: 142949 - DNA, 2797 bp, Arabidopsis thaliana landsberg
agaaaaacaggtctatgcttgaggtgaaagacaaatttaagaaacccatacaattttatatggaatcatttcgtagaatatctaaatgttaagaaaatgttggttttgtgatcgagtgtttctgtatagtgctataaaaatgtttgatgattttggtattattatgagttatatagtaagagatcaatcgtttgtactaaacacgttatgtttgatcgtttataataatttcggcatatattaaacttgttaaagtatgtttaatctctgtaatttatgtttcttttggtgaaattatctttcccttgcgcgggtaaaaaactcatagctgtattaaataaaacaaactctagttgtattaaataaagcgactaggtgacgtgtcgaggcctgcgcgactgcgtttgccacgtctccgccgcctcctccgattcttttttaccgtagctaaaatgccgatgttgtcattcatcaccgaagaatggccgccgaaactagcatcaggaagctcccatctctctccggcctccgtcaccgacgtaatccactggaagataatccctacttccacccctccaatggcttctacatcactccttctgacgtcatcctcgcccaggtcgcctacgacctctccgcccaatcccaatcacgcgtggcctaccacagggctgggcctcgccgtgagatcatgtacgagccatcggctgtgaaggcggcgatcgtaacgtgcggtgggctgtgccctggcatgaacacagtcataagagaactcgtggtgggtctttgggagctgtacggtgtgagagagatatatgggataccagctggttacagaggcttttattccatggaagccgtcaagttagatcccaaggcggttcatgattggcacaagaagggtggcactgtcctcgccacttctcgaggtggcttccatctccaaaagatcgtcgatgccatccatctcaacggttataaccaggtctcttcctgattcattttttacttgttctgtaacattatcatagggaagttcaaagttgatgtttcctcttttgccctcgtcaggtgtatataataggaggagacggcacaatgcgtggggctgttgagatcttcaaggaaatcagcctcaggaaactggaggtgggaatcacggttattcccaaaaccgtggacaacgatgtcggcatcattgatagatcatttggctttcaaacggctgtagagatggctcaggaggctatatctgctgctcacgtggaggccgagagcgcagtcaatggcattggacttgtgaagcttatgggcagaagtactggtcacattgctctacatgccactcttagcagccgtgatgtggactgttgtttgatccctgagatggacttctaccttgaaggcaaaggtgggctctttgagtttctcgagaagagactgaaagaacgtgggcatgctgttcttgttgtggctgaaggggcaggtcaagagatgatcccaagaaatgaatcacagaaacaagagagggatgaatctggcaacgcagttttcttggatgtgggagtctggtttaagtcagtcctcaaggcctggtgggagcgagagcatccagatgaactgttcactgtcaagtatatcgatccgacttacatgataagagctgtacctgcaaatgctacggataacttgtattgtacactcttggcccactcggctatccatggagtcatggctggttacacagggttcgtccctggcccgatcaatgggaactatgcttatatccccttagaggaggtggcacagactaagaaccaagtaaacacgagtgaccacaagtgggcctgggtgcgctcagtcacaaaccagcctgattttgaaacgaacgttaagtgttaatcaccctgagaacgagcgtaagcgaaaatcttgtaagcaagtaataatctttttatgtatacaatgaaacgatcaaggcaatcttatgtccttatctaaataacagtaattgtcaacaagggaacaatgcttgatttctaggaaaaaaaaggttgaaacaaaagatgtgatccttgaacctatttatcctaataagcacattactacatattattccatggctcatgcttattgcagaaccgttttcttaagcacataagagagagagtggttgagaaggagcttgagctctgcactgtattaatacaggtcgtgccactaggtttacattaaccatctacaatcatcatcaattctttttagaaagaaaaataaaagaaccagaaatctggcgagtgcaaacaagaaactgaatctctgtggcctaagacgtatagtctaccactacctgtctctacttacatgatgcttatgttctgaccctgttcctttccacactatcttcttaggatctgtactggatctgattttctcttctcctcttttgcatccctcttcaagcacgttcttagctttccctgtagaagctggacctaggtgaagcttgagcatcatgctatgtttatcagtgggagtctctttacctcttgtgaagagttcttggttctctgatcgacttgattctcccttggaactgctctcttggtcaaagaagagtgcttggacgaccgttcttaatggcatcctctcatttttcacagcgtgtgcacgtacttgtgcagacaatttctggcagtcaagacttctgcatagtcgttttttctcttctttgcttatctcgggatgcacctgccatgttacaaatgttttatcagtttcaagtactgtatgcaaa

SEQ ID NO: 142950 - DNA, 2475 bp, Arabidopsis thaliana landsberg
gttaaggtttttcgaacagaggacagtcctgccaaagtagcctctcagcctcaacgtcatagctacccatctaggaaacctcgagggccagatcttccacctggttttgaaggtaatcactatgcagttaagcctaatgtttcaaacattcctcgcatcaaatggaaacgacctcctcccaaggtatattttttatactgtaaagaattggtgaatcccttttgaatctttttttatcatatctgatattaatattatgtgtcttggacaatgcagttctctgtcaatgatacttggctggttggatgtggtggcgggagctcagaatggcaaaatgaaaacttgaggatttcaaaagtgctggaagctatctatcctcatcgctctgccatcccttctcggtattttaccttcttctcttaggttattcaacattgtgttggtgtgttagttagcctgctgattgcattctgttttcatgtagaccctctgtttcaccggctgtggaagctgaatgctttgatgacagcaaaactcctgccattcgtctcactcctattgaagacgagagtgaatcttcttcagaggagtcatccaacagtaaggttgaatcaggtgttaccgcaaacaagcagggtcagttggagaccaaacctctatgttcaacccaagaacaggtttctggtcttactggtcttgcaccagacttgagtctggctgcttctgcagctctgactgcactgatgaaaaccaaggaacaagggagtttggtcgatactgagctacttatcaagttcctcagcgtttccaaaattaatcaagaatcttatgggtgacacgggaggtaaatcctctgaaactaagaatcagcccattgtcactaacatcaactctgctactagacctgttccgcagcctgtcagtgctgtcaccgcctcacccatggctagaaagccgcagccagtgataatacctcaagaacacagtgttgcagtttctcggtcttttactaaccctgagaggcgagtatcacctcccaagcctgtaaatggaagcatatccccacctaagcctataactggaaaaccatctagtataccaatgcccgttcatttccatgtcggtatagctaaagaacaacctcagcctgctcggttcccatcgagttctctgccaatgaaccttaacttccaccgacctccaaatgttttctcagaaccaaaggtaatagtaaatcctcaaccccaacaccaaccctattccgcattccgtacatctgaaatgaactatgttcaatcatcaattggacttggaaggggtcctcaaaccggtttcaattcttatccaatgaactttagccgggcagatgcaattggtagcgctaaaccagtagtacaacctatgaagggtctagactatttcaaaaaccttataagggaacatggcacagataatcatgaaactaaccaataccattcacaaactggaatattcaacggacgcattgataataataataagattcatcaacaatgtatctactttggcactgcgaatggatgtaatatgggagacagttgcacctatgttcatgaccggtataggcccaactttgaggccgcggctccgagggctaagagaatgaagtttggaaggtatgagagaaatggtttttgaacataaaaaaaaaattagagttcacttttatagtcttgtctatcactggttaaggaacaaaacctgaggtgatacaactttcaattttgatcaatttgtgcgcaccaattttaattcatttaacaaagttatttgtttagagcaccagtttaatgacacccgtttaagaggtcgagaaagccgaacaatattaatttaaatcatgatttcatggtgcgtgaactagcaaccactatcaagtcaggcgacaaggtcgaagttgaaggtcaacctatctacaacgaagaaaaggtctattatctgcttaacaaaccacgcggtgtcatttccagtgtaacagatgacaagggtcgcaagacggttgtcgacctcttgcccaatgtcaaagagcgcatttaccctgtgggtcgtttggactgggatacatcaggagtcttgattttgaccaatgatggggactttacagacgagatgattcaccctcgtaatgagattgacaaggtttatgtcgcgcgtgttaaaggtgtggccaataaggacaatcttcgccccttgacccgtggtcttgagattgatggtaagaaaaccaagccagctgtttatgaaattctcaaagtggacccagtcaaaaatcgctctgtggtgcagttgaccatccatgaagggcgtaaccatcaggttaaaaagatgtttgaagctgttggtctccaagtagataagttgtctcggactcgtttcggacacctagacttgacaggactccgtccaggagaatcccgtcgtcttaataaagagaaa

SEQ ID NO: 142951 - DNA, 3416 bp, Arabidopsis thaliana landsberg
ggagtgtgttgactgtggctattcctggtatgcctcaagggatgaggtatcaactctgacaatagtcacagtataaacctgcccaaggcacagagaaggaggatattgagaagaatttgaccagtcctcgtgaaactaataaaccaaaagacgaagccttgaagaccaatgactcgaacgttgacaacaatcctgaagcctccaagaaaccagagtaaagggtttccaactttttaaccttatgtttagagtttcgggtctgaattcgaactgggtttcacttttaacagttggttaaccgtataattaagtcggataaagcttatcatgacaaaaaaaactaagactttggttatgggcaatgtatcaactgtctctttctcttatggaattttattttagtgcaccatctttatcaataattgtcgatttgtctttgtcgacaatagtctctttgtctttatcaacgatccaatgcagttggaccacggccaagtagggaagtacatgaatcgatagacacaagttagtggcactagacacatggtccatacgactgtcactaacaccgttcactttactgtcgtcataacccttttttatcatcttgcctctcctactccaccagaatatgcccatttccaaattttctaccttttgagagacttgagatttggatatttgtgtgccattatctcatcttgtaagatggaaattacacggccagtatgtgtgtgccccccaagctgttttgctttccattaatggtgtccgtatcatgaggacacttgatggtattagactccattggtggccaatctataactgggtttcaagattgtcttactactcaattcttcattgtgtaaacaggagatgacattacccctgatctttaactccacttcatcttgttcagatgattttgcagtgaagagcgaggttgttgaaatcatcgaagaacacaaggttgttcttgatcaaagcttcatcaaacaaattagttaatgttcttggattgtctcgtatacatcaatgcgtttatgcgctaacaaaaccttctattggttcctgttttgaatattgatttgctttcattgtttacattagatgatacaatgctttatgtcattagctaatggtataatacatggatgctacaatgaaaaggtacaagttcatcaaagttattgcttgagggattatttatctggataaaaatatgctaattaagacaataaaactgagacttcgatcataggatcttatatatcaatggaactttttcaatgtacaattattattgtgggtcctgtctctttgtttataattatatcaacggctagtgacttttaaaatcgtttttctcctaactactccgttataaaaatcaatataattgttattccaatgatcaccaagttttattagagcatctttgagagtaaacattgacttttaattagagagagaaatagacttgaaaggaacatagctctgtgatcttagattcaacttttttttcttcttcttcttcttcttctcaatcttgttgcagacgaccatggaatatgaggaagtgtcactacccttgatccacgagcatcttatgatgccgtgtaattatctaactagggctgattgctgtggacgcttcggttttaccagtggtggttattactgcgaaagctgtagcttcttggttcataggaaatgtgttgacgactcttctgaatatattgaacacccgtctcactctgttcaccctcttaagcttcaaagtaaaccagaccatatatgtgatatatgtgataagaggatcgtggatctatgctatcattgtgagatctgtgacttcaatgtggatctatactgtgcaaggtacccaccaccagaagttattgatatttccgagacgcatcaccacaagctcacccttctcaagaaagggatcaagttcgactgtggtgctagcaaatgtggggaggttatgtatgggtttccttacaaatgccatgaatgcgatttggcattccatgtggattgcgaaaagtatggagcagaggtaaaccacccttcccactccttacacacactaaaactcatcactggtaaaccaccggcttatactgatgggaattgtagtttatgtgggaaaaagatttttgacgaaatgttttatcactgttccgcttgtaactttactttggatttgcgatgtgtttctcttccaccaccactaaatcttcacgaccaaaacacccacaaccatgaactaacccttatgccaaaattgatctcttttacttgcaccacttgcggcctccatggagatcgaagcccatatgtctgtcttcaatgcaatttcacttcccataacaattgctctggatttccatgggtcatcaatatcaaccgtcatgatcatcgcgtttctcgcacttctcttcttggtattattgattcagtatgcggagtttgtcgtaagaaaatggattggagttgtgggggctattcttgtaagaggtgttctgagtctacgtttcataccaaatgcgctactagagaagatgtttgggatggaatagagatgaaagatgagcccgaagaagatgaacctatggaaccattcgaggtgattgatgaagatataatacgacatttcagccatatagagcataacttaaaactcgacaagtctggtacctttgttgaggagagaagttgcaaggcatgtgcttatcctatctatcatgatcccttctacagttgtatgagttgtgattttcttctacacgagaactgtgctaaacatcctacacgaaaacgtcatgtgctaagcaataaaccgtatattctacatgcatctcaacgtaactactctaagtgtaaggcttgtggagtcttttttaattgtttcatatacggtacttttccgtttggattagatgtgcgatgtgcctccttttctgggtcacttgtccatccaagtcaccaacatcctttgttttacacatcaccaaaaggagtatgtagtgcttgcaacaaggaaacatctcacgtgctcagatgcgttgaagatgagtgtggatacgctttggatttcaaatgcgctctattaccacatgaggtcaagcatagagtcgacgatcattttctctctttatgctttggtgaaagagatgcaagtggtaaatattggtgtgatatttgcgaggaagaaactgatccaactaaatggttttacacctgtaaagattgtggggtaactttgcataccaattgtgtgctcggagatttccgaggtctggaaccggaaacaaatatagtattggatgatgactggatgcagatgacactttacgagacggttcgcaacaatagtatgtctcgaccactttgtataaatgtagcgt

SEQ ID NO: 142952 - DNA, 3611 bp, Arabidopsis thaliana landsberg
cctacgcgttaagaacgagtttgatacccgtcgttgcaaccacagtaactacttttatggaatctggtgtaataactccacaggtgcggtcacaaagctacgactacgggactgtctcagtggaactctcaaatcaaacagtagcctcttccagtttcatcatcttcgctaccttgatctctctcacaacaacttcacctcctcttccctcccttccgagtttggcaatctcaacaaattagaggttttatctctttcctttaatagcttccttggtcaagttccttcctcattaagtaacctaagcatgctttctcagttagacctttcccaaaacgatctcaccggtagtttcccacttttgcggaatctaaccaagctcacagttttagacctttctcataatcacttctccggaactttgaagcccaacaatagcctctttgagttacaccaccttcgttaccttaatctcgaggtcaacaacttcagttcctcactcccttccaaatttggcaatctccatagattagagaacttgattctttcctctaatggcttttctggtcaagttccttccacaattagtaacctgacccggttaactaagttgtaccttgaccaaaacaagctcactagtagtttcccacttgtacaaaatctaaccaacctctccgaattagacctttcatataataagttctttggagccatcccttcttctctcctcactttgtctttcctatcatctcttgatctgcgtgaaaactatctcactggttctattgaagttcctaactcctctacgtcatctaggcttgagttcatgtaccttgggaataaccattttgaaggacaaatcctagagcctatctcaaagctcatcaacctcaagcatctcgacctctctttcgtaaaaccaagctacccaattgacttaaacctcttctcctctttcaaatctttggtgaggcttgttctttccggtaatagtttattggctactagtataacttcagattccaagatcccactgaacttggagaatttggtcttgttaagttgcggcctcattgagttcccaaccatcttaaagaaccttacgaaattggagcatatagacctttccaacaatagaataaaagggaaagtcccggagtggttttggaaccttcctcgtctccgcagagtgaatctttttaacaatttgttcaccgatttagaaggttcggaggaagttttagtgaattcatcggtgaggcttttagatttggcttacaaccattttagaggaccatttcctaaaccaccactctctatcaacctcttatctgcatggaacaatagtttcacaggaaacatacctcttgaaacctgcaaccgaagctctcttgctattcttgacctatcctacaacaacttaaccggtccaattcctcgatgtttgagtgatttccaagagtctctcattgtagtgaacctccggaagaacaacttggaaggcagtcttccagatatattttctgatggtgccttgcttcggacacttgacgttggctacaatcaactaaccgggaagcttccaaggtctcttctgaattgctccatgctaaggtttgtaagtgtagaccacaacaaaatcaaagacacatttcctttctggcttaaggctttgcctgatttacaagcacttaccctccgttcaaacaaattccatggccctatatctcctcctgatcgaggtcctcttgcgtttcccaagctgcgcatacttgaaatatcagataacaactttacaggaagcttgccaccaaattactttgtgaattgggaagcatcatcactccagatgaatgaagatgggagaatctatatgggagactacaacaatccttactatatctacgaagatacagtggatttgcaatacaaaggtctattcatggagcaaggaaaggtccttacttcctatgccaccattgatttttctgggaacaaacttgaaggacagattcccgaatccattggtcttttgaaggcattgattgcactcaacttatcaaacaacgcattcacaggccatattcctctgtctttggcaaacgtgacagagctggagtcactagacctctcaagaaaccaactctcagggactattcctaatggactgaagaccctctcgtttttggcgtacataagtgtggcccataaccaactcagaggtgaaattccacaagggacacaaatcactgggcaatctaaatcctcctttgaagggaatgcaggtctttgtggtcttcctctccaaggaagttgcttcggaaggaaagtgccaccaatacgacagtcaaagaaagaagacaaccaagaggatgcaaaagtgttgaactggaaagcagtggcaacagggtatggacctggagttttttttggattggcaatagcgcaaatcattgcttcatacaagccggagtggctaaccaagataattggtccgaataagcgcagaatctggtaggatgtttttggttttgagtttgaataagacatgtttgtcacatagtttgtattgaagcatttgcttgtattttacttatttatctataaagtaagaatggtgaaattctatgtactcatattcatatacatttttgtttcttccaacgaaaaacatagcagaggcagggaagaggtgaatgtggttttgggtttagtaataaaagattagattgatccactcaataacaattccagaaaatatactaatatatatatgctgtattattattgcagcatcttaaaatgtataaatctatattaacaattttggaatacatttatatataataataataaaaaacctttattgaagtaagatattacacaaatgcattgatttaaataacaaaatataaacctcatattaaaggtaaattgagattataacaaatggaaaatccttaaatacaatctcgatgtttatttaagattttacataattaaaggttcacactcttttttttttttttttattttttttttatttttaggttcactctccttgattgatccatactctctctggtttgggtcaaacatgcaaccgaaactcacaacggaagaattattgaatgatacgttcaaggtcttgaacatggtacgtcacagcgtgcaccaaattttattggaaactcaagaaaacctctgagatataggttcaaggttcagatccttaaatgggccaacgaagaattcccattaggttttctagccacatagtgattggaggattccgaggtggtgtctctataattaggagggttttcttcagacaaaatctctttgatgggtccataaactcgaggattcgccatcaaatacgagctgaagaaacatgccactgaaattctcggtccagctacattggccaaaaccctatgctccacgcttatgaacttgtcgtttgttataagctgcacccaatgaggtaataaaagtcagatttatattagtccattgattaaccactgatcaaaaaccaaaagggttagttagttagcctgaagaagatctccaacgttaacaacaagagctccagggacaggaggaac

SEQ ID NO: 142953 - DNA, 1652 bp, Arabidopsis thaliana landsberg
ctttgcaatatccttaatttcgtctccgtcagtagcagtctccgccgggaatattttttttccggtagctatgctccgaaccgtctcttgtttagcttcgcgcagctcgtcctctctattctttcgcttctttcgtcagttccctcgctcttacatgtctctcacatcgtcgacggcagctctccgtgtccccagtcgcaatcttcgccgaatttcctctccctcagtcgccggtagacgtcttttgctccgacgaggtttgaggattccctccgccgcagttcgcagtgtcaatgggcagttctctcgcctctctgttcgcgccgtcgccacacaacccgctccactttatcctggttggaatttttcacatatacttctttttttcaatctgtttgaagtttaattgctaattgatttgttctcttaattcggacatgttgatttgtggcacttgtgaaattgtggttcttactttaggataggttgtgaattgtagataggtgtggtccgtgtggtgcatttttcatctcatgctttgtgtctactttgtaatcaaatggagccatgtgtaacctctgctgatgcgtgattttccttatttttggttgtttggattcagatgtaggtcaagatgaggctgagaagcttggatttgaaaaagtgtcggaagaattcatctcagagtgtaaatcaaaggcgatactcttcaaacacaagaaaactggttgcgaggtgatgtctgtgtcaaatgaggatgagaacaaggtcttcggtgttgttttcagaactcctccgtaagtttacttcataataatttttactctctgtaaatttgacctgagtatgtattaggcaattgaaattggtacctaaagcttcactccttgaatttaactaattgaaatggtcaagtttatctctactcatcaaagctttttttttctgattagacctagtcatttcgtttcttcttctaatatattggtacttgtaaagtggtctaagttttggaggttacaacttgtcaaattacttaacgctttgttaaaagtcgatatgagcaactgcactttcagtagatattggtcccacaggcacctccttgtgaaagacttgcaaaaactaataatggaagcaattttagatcatagtttcgttgttaatgcaggaaggattccactggcattccgcacatactggaacatagcgttctatgtgggtcaagaaagtacccggtaaaagagccatttgttgaactactcaagggaagtttgcatacttttctaaatgcattcacatatcctgataggacctgctacccagttgcttccaccaatacaaaggtacaatgagccaaacattaagtccttcttttgttgtcctcagtgggctaacctctttctttctgttattgttatctaaagtgagtctatttctgatcacaactcatcactatcactatctatggtaggatttttacaatcttgtcgatgtatatttggatgctgtcttcttccccaagtgtgtggatgacgctcacacctttcagcaagagggctggcactatgaacttaatgatccctcggaagacatatctaacaaagaatttatttacctaggattccattttagagctcttttcctcggct

SEQ ID NO: 142954 - DNA, 2373 bp, Arabidopsis thaliana landsberg
atgaggcttttgcttccattttcctcgccgttatccgccacgtcatcaccgtcgacgccgcaatttatccctgaacttccacctccgtctcaatttgactactcgggtctaactaaaattcttaaaaaatcggtaatcggaaccctaaccggagctctatcgctcactctcgttttctcgtcgccgatttcctccgttgctgctactaatgatccttatctctctgtcaatcctccttcgtcatcgtttgaatcttctctgaatcacttcgattcggctcctgaagattgtcctaatgaggaagaagctgatactgagattcaagatgatgacattgagcctcagttagtaactaatgaagggattgttgaagaagcttgggagattgttaatggtgcctttctagatactcgtagccatagctggactcctgaaacttggcaggtgtgtgaattagcttgttgggtagataaaggaagaagctttatatatgtaatggttgaattttttttttgttactttgcagaaacagaaggatgatatattagctagtcctattaagagtagatcgaaggctcatgaagtgattaagaacatgttggctagtttgggtgatcaatacactcgattcctatcaccagatgaggtttttgttctttacattctatgaatttgattgatggaggaaggactcttaagttgtttcagttactcatatcattgtttgtttcacttgtttgaagttttctaggatgtcgaagtatgacattactggtattggaattaaccttagagaagtttctgatggtggtggaaatgtaaagttgaaggttcttggtcttgtattggacagtcctgctgatattgctggtgtgaaacaggttataaaccggtctagtttctttcttgtagtttcgttcgctgttgatctcacttaaaaaagtgtgcaatgtctctctctttgatagggagatgaaattctggctgtcaatggaatggatgtcagtgggaaatcatcctttgaagtatcgtctttgttacaaggccctagtaaaacttttgtagttctcaaggttattattcttaataataagatacatactaaattcattagtacttgatttaagtttggaatcaagatttttatgtagtttaagcatattgcaggtgaagcatgggaagtgtggacctgttaagtctctgaaaatccagagacaagttaatgcacagaccccagtttcttaccggttggaaaaagttgacaatggaacagtctctgtcgggtatattcgtctaaaagagttcaatgcgctggctagaaaagatttggtgattggtaagccttttcatgttgttacatcaaagttatcaactttcggtcccatccttttatctacttgtgtttaaatactacacatccttttcactatgtgcagcaatgaaacgactcctagacaagggtgcgtcttattttgtaatggatcttagagataaccttggtggacttgtgcaggttcattctacaattgtaacttaagaccatttcttctcacaaataatttacaggaacttgatttttcacttagcccttcgtttcttggttatgtttatttcaggctggaatagaaactgctaagctgttcctagatgaaggagatacggtaaatcaacattcatttagaacttttaaaacattgtcaatcgttgttcaggaatatgaaacagaatagcttgcttcaacttacatgaatgagttccataacgattggcttaaacttatgttacatgttgcgattgtgtaacaggtgatatatacagcggggagagaccccgaggctcaaaaaactgttgtttcagataagaaacctttgatcactgccccacttattgtatgtgatgaatcatgtaagccagttaatctttcccactattatgttattttgcatcttgcactgattagaatccttattattgttgcaggtaatggtaaataacagaacagcaagtgctagtgaaattgtgagtaatctcaaaagatttaacccacgggaaactcttctttttttggatcgttaaacggatgatttgtgtcatatttctccaggtggcctctgcacttcatgataactgtaaagcagttcttgttggcgaaagaacttatggaaaggttattccaaaggcttactagtttcataaccaatctatcgattttgaattgtttttgatcatcttcatgtcatttgattaatgggtttcagggtttgattcaatcggtgtatgagctcccagatggttcacgagttgttgtgacaataggaaaatatgtcacacctaaccatatggatatcaaccgggggggaattggaccctgat

SEQ ID NO: 142955 - DNA, 1504 bp, Arabidopsis thaliana landsberg
gtctctcgataagcaaaaaacatcgtacgaagaagaagaagatgaccttaattttgtctgaatgaaatcttaaaattcccagaaagaagaatgacgaacagctcgtcatcgaagaaacaagctcaagatcagccagaaactagcgaacccactctcaaatctctcaaaaccaagatgattaaattcgacgaaaaggtccgtctttttctttcttcaatcgaactcaaaagagcaagtccacttaattttgttctgtaacctcttcaataaattggtcatcatcaccaacttaaaaaaaatctctcctttttttgggttaaacagcagaagaagcttaaagacattgaaataagcgttccaattgtgtatggtaatgtagcattctggcttggcaagaaggctagtgagtaagtatacttttttggaaattgaacttcttttgtgaagcaaagttcttattttcatcacaaaagtttaaaattttccatttttacaataccgttaaaataatggagagacagtttaggttattggttgttgttagtgttttagttcttttggataatgacgagaagttcttataggaatgctggaaaaggttatattttgacaatacccttaataagagagacagtttacataaatatccattaaggtttattggtttgttgctagcgacttagagttttagttcttatagaaacttaggaaggttatattttgacaatacccttattgaagaaaagtgttttgtgttcataagatttgagttgaatttgcaggtatcaatctcacaagtgggcagtatatgttcgaggggcaacaaatgaagatatcagtgttgtagtaaagaaagttgtatttcagcttcattctagtttcaatagcccgactagagttatcgaggagcctccattcgaggtatcggaatctggttggggagaattcgagattgcaatgacattgcatttccacagtgatgtctgtgataagccattgagtttgtaagtccctttcaatagcattgttgttaagtaggaaaatgccagcaattggaagagttacttatgagttatttgttgttttgggtggatacaacagatatcatcatttaaagctataccctgaagatgaatcaggtcctttgacaatgaagaagcctgtggttgtggaatcttatgacgagattgtctttcctgatccttcagaaagttttttagctagggttcagaatcatccggctttgacctttccaagattaccctctggttacaatttgcctgctcctagtatgatctccttatctaaagcttctttcattccttagtttaagttgatcattgccttaaaatgtcgtctcacacaacaaatcttatgattagtgcaagtcgaagataccgggaaaaagaagagaggtgatacgaaagatcatagtttgggacaatggttcatgagtttctctgaagcagatgagttattacagctcgcagctgctcgtcaacag

SEQ ID NO: 142956 - DNA, 8006 bp, Arabidopsis thaliana landsberg; identical to SEQ ID NO: 38316
  unsure (1)..(8006): unsure at all n locations

SEQ ID NO: 142957 - DNA, 4423 bp, Arabidopsis thaliana landsberg
ctaaaatagctgatatttacctcgattctttatgaggtaatatttttcaattttgtatataaatacttgttgctgtcttgcagtctctcatgtactcatcaccagagttttctttcttgtgttgattttgttaccttgatccctaagctaccgtaaaccttactcttcccgttcaatccgcaggtaagtaaaactacaaaatcccgtccatcgattaacaaaatttatccattctttatcttctttcgttaacttttaggtttaaaactgaatctttatgttctgcagtcatggaagccgatggtcagaaatactctgtgcttgcgaaaacacaagtccgtgagaagatgatgaaagaaattgaacagatctcggaagtcttcttggtgtcaaaatcggatgcaaccgtcatcctaattcgtctcggatggaactcgtttaaggcttcagatcttcttggtgacaacaaggagaagtttctggcgaagttagggttggctcgagttctcaattccaactcttcttcagctgatcgtgagacgggtgatggagattacttagtctccacgcccttttgctcacacaagttttcaacaacttgctggagtgaatatctcagcgatgctctgaagaagaacaaggagcagagaggactcatctcttgccttagccaagactgtgtcgcctctgttggacccgatacgatcgagcaactcacagagccagtgaaggagatgtacgagaattatattctcgaatccttcatggagtgccacaaggcaacgatcaaatggtgtcctgctcggggttgtgaatacgccgtcgagcttcaggaggatggtaatgaagataatgtcatcaagtgtggtctgttgtgcggccataccttctgttggacatgcgggctcgagtcacaccgtccggtgtcttgcaaaaaggcatcaatttggtggacgtacctgttggatcagtcaagaagcatttcttggatccatacaaacaccaaaagttgtcccaagtgcaagattcctgtgcagcagaatggtgatcctaattacagactcattaattgtatctgcaggtttgtttctttctgagctttaaaacatgtgcaaaatattatatctttaaactcattactatgttttcttgactgttatgcatcatcagtaataacttctgttggatctgcttgcgcacggaggaacagcatcaggggaactggaattgttctccagtcgctgttccagctgcgggtccttctaccgttgaattctcacagattctccacctgaatctgtgggaggcaggtcatgaagcattgaagaaggctaagtccaagctgagagccttagaggaaaaaatcattccgaaactgatcgagaactgcggagcgaccgagctggacattaggacagtaagagaagcagggatgcttagtgttcagtgcaggcaggtactgaaatggagttgcgtatttgattactctataatcgagtacgaaagcacgaagaagcagtacctgaaacacctccgagctctggcgagcacaatgctttgtatgcacgaagggaagcttgatgagttgatacatctagccctctcacctgaagatttcactaactataagcacaagttggaaatcagtacaacatgcactggtaaccacttcgatggattcatcaaggaactggaagatggtaagcctgaagtgaaggctgatggttacgagaatgaaccaggcagtcgctggttctgtgataggtgcacgtttgagaacagctgggttgataaacagtgcaagatgtgctttttccccctggactatcatccttctcctcaagtggcagcagctcctgaagaccttggaaaatcggagtgagagtgagtgatgagtaaaggataagtctcatcagtgattgatgctggtttcgtttggtgttttagcttctcttgtgttgttttgtgtttaagagtctcctttgtttctctttctcctctctgtgttggatcatcatccatcatattggtttaagagtcttgttgcatttgtcttctaagtctttgttgttgttgttgttgttgtctgttgttgttgttgttgtttgttggtgtttatgtttgtgtttccttgttataatattttttgtaacatgaaaatgcaaatacaaaacttcagaggaacaataaagtttaaatcatggtttcgaatataatgtctattgaagaacaaaaggtgaatttcaaccatacatcaaatatataaaataagaaaaaatccggtggctgagaatatttaacggtaatgtaacactctgcaacagtatcttcttcctctacactgacacatttcgtcgaacacctttcgctaatgtcagtgagcaagtttccacatctctctcatggcgttcacactatcaatttcctcaatgaaccagtgtttttaagtgtgttgctcccatctccctctcggattcgagtattctcgtccatttccacctccgggatcggcggcggggtcgccaagtgccatggaacgagacatagcggcgccggtggtagaggtgataacgggttgaggagagatagtggattaggtttcgacgagagaggagagagaaaagtgcgttgtgaggttgatgtgatctcgtggagagaacggaggataagaggcgaaatctgggtcgattctgattctcaatctgtttggaatgttcttactgattatgaacgacttgctgatttcatacccaatctcgtttggaggtacttccctcagtaataccacttttttctttcagattcttatcattttgtttgtgtttatctacagaattcttctgaataatctctaaagattcaatttttatgttatctggttcatgccattgaaattgtttatactgaatacaatgactatacgtctccaagagaatgctgaatctccatgcttagttacctctctttgttgatggtatattgtttcaacttgtagtggaagaattccttgtccacatccaggacgtatatggctggagcaacgaggccttcaaagagccttgtattggcatattgaggctcgtgttgtccttgatctccatgagtgtctagattctgtgagcactcttaagcctttacttttctcttgctgaatgattgggattgagtctaaaacctgcaaactcttccggattctgtggtctctttttttatgcatatcttagcttttgttaagaatcaagaggtttcctttacactggatgatctgtaatcatggttgataaggagttgcctgcttcccactttctctagatccttattcctaacctcttattagttctagaaaaaacaatcatagtgaggtttactcttgaaaatatccatggttctaatgagttctctttcagcctgctttgcactcattgcattggttacttagggtacaacaagatgttatttgtaacaagtagttttgttgtttggttaattagttaatctttactcttgagttcttatattacatttgtttctcaatccatacatctctattaatgtagtttttcctattatcttattagccaaatggtcgtgagcttcacttctctatggtagatggtgatttcaaaaagtttgagggaaagtggtctgtgaaatctggtatcaggtacactcattaatccccgtaagaagtttgtgtgctcatcctatcatcatttaaattaaatcctctataaatgtgtatcagagaaattctttctgtaaacagtctgttatgcatttctaaccacggatcattttggaaccatctatgttccaaacatttgtttttctctttctccaggtccgtaggaactgtcttgtcatacgaagtaaacgtaatcccaagatttaacttccctgccattttcttagagaggataatcagatcagatcttcctgtaaatctccgggccgtagctcgccaagctgagaaaatttataaagattgcggaaagccgtcaataatagaagatttgttgggtataatatcttcacagccagccccttctaatggtattgagttcgatagtcttgctacggagagatctgttgcctccagtgttggatcattagctcattcaaatgaattgaacaacaattggggagtgtatggaaaagcctgcaagcttgataaaccttgcaccgtggatgaagttcatcttcgtagatttgatggtctattggtaagtagtttggctcaaaacttactctatatactatgaaaaaaaaaagttttcccatcttttgtgtttatgagtcagtggtttttttcttggatgaaggaaaatggaggtgttcaccgatgcgccgttgctagtataacagttaaagctcctgtttgtgaagtttggaaagttctaacgtcttatgagagtcttccaga

SEQ ID NO: 142958 - DNA, 2335 bp, Arabidopsis thaliana landsberg
ggtgtggtggacgtggattacaacaagcaccgaagtcagtagtttcgatgtgtttacagaagagagagcaatagatgagagtaacgtggaaacatgaatgctgaggaacatgggttggcacgaaggatcggtaactttaaaaaccagagatttgattgatgggtaacgtttatatgttaatggtgattgttggatatgtggtcagggtttggggaaagacgggagcggaatgaaagaaccggtgcaagcgcaaggcgttgataggagagcaggacttgggagtcagcagaagaaagttgatgctgagtttgaggttcagcctggtgacacttacagaactcttctccataagaaagcacttgcgagatttcgtgacatgtctgacaataattgattctctctgtgtgtaaagtcagttggaaacttctaaattccgttgtgcttaaactgtgaaagtgattttgattttgttctttttgttaaattattattaatgaaaagagacagattagtactacttgagtttatatggaccttaaaacctttgtattattaatgtatctggaggcaacaatgacccgaagacaacaacagtatttaaaacacttaccaaaataatatatgctttcaaagcttttaattacgaaagttagctcacaaaaaaaatcagattaattcaactttttttgaaaatttataaatctataaatcaatgattgaatactattttgttaatgaataataataaattgttatttcatgcacattaaaaacctaagtattgttccaaaagaatatatgcattgatgtatatcaatttctaggcattacttttttttcatcataattgttagtaaaggtgacatgtaaaactagttaatctcgtgtctgtcattggcttttcccaaaaacagatgggttaatacgttagttggaaccattgttataatggctgggtttagttgctgccggctatttccggataaatgcctcaaaagatctttcagtgaatccaccgtgatttgcgttgtcataacgtgagatgcaaatgaagagctttcctctgttaattttgtttttacacaaccctataaatatagttttacactttaaacccataccaatttatttttgaaataagttggtattgcccaactttttatcaaggatttttcaacatgaagaaatgtgagtttttgattgattcaagtaaacgtaagttttgcaaaagggatgaaggaaatgtgaactctgatatattgatttgaaaattttgatagggttaataacaggagcagtggtaatagtgttgattggattaggggcatgggctattgtttccattacacctccacctcctaagagatgcggaaccccaggtggaccgcctattaccgcccctaggatacgtctcagcgatggccgttatttagcctatgaagaacatggagttagtagacaaaatgccactttcaagatcgtctttatccatgcattctcgacatttaggcgtgacgctgttatcgccaaccgtgttcgccctgtaatgatttgatatctttctctcttactatttctcttatagagtatttctgtaattgcattgtttgtctctcagggctttctcgagaaaaatggcatctacgtggtttcatatgatcgacctggttatggagagagcgatcctcactcgagtcgcaatgaaaagactttagctcatgacgttgaacaacttgctgaccaactacaacttggttccaaattttacgtggttggatactcaatgggaggtcaagccgtttggggtgttctcaaatacattcatcacaggctcgcaggagcgacactgatttgtcctgtgaccaactcatggtggccgagtttcccagatagtttgacatgggagctatggaacaaacaatcaaaatccgaaaggttttcgatgctcattacttatcacactccatggctactctactggtggaacaatcaaaagctattttcaacaacagctgtgatgcaatcaagccccaatatgttctctcctcaagatcttgcactactacccaaactcgccgcaagggtgtcttacaagaaccaaacaacacaacaagggacacacgaatcacttgaccgagacctgattgttggatttgggaaatggagttttgaccctatgaagatcgagaatccgttccctaagggtgaaggtttcggtacatatgtggcaaggggatgatgatcggctcgtcccgatacaactacaaaggatcattgctcagaaactaacttggatcaagtatcatgtgattccaggcgccggtcatattttttt

SEQ ID NO: 142959 - DNA, 6298 bp, Arabidopsis thaliana landsberg
agctatatatgaggtttcttctgctggtatttccaatgaccacattggaatgaaaatatttatcacagaaggtgttgttccaactttgtgggatcaacttagcctgaaaggaaatcaggataaagttgttgaagggtatgttactggcgctttgaggaatctttgtggcgttgatgatggttattggagactgacactagagggtagtggtgtagacatagttgtgtctcttttgtcatctgataaccctaattctcaagcaaatgctgcttctctgctggctcgtctagttctgtccttttgtgatagcatccagaaaatattaaattctggagttgtcaagtctctgatacagcttttggaacagaaaaatgatatcaatgttcgtgctagtgcagcagatgctttggaagctctttcagcaaattccgatgaggctaagaaatgtgtcaaagatgcaggaggtgttcatgctctcattgaagccattgttgctccatcgaaagagtgtatgcagggaaaacatggacaatctctacaagaacatgcaactggagctttagcaaatgtgtttggtgggatgcgccatttgattatatatcttggacaagtctcacaatcccctcgtctaacggaaccaattggtgatgtaattggagcccttgcctatgctctaatgattttcaaacaaccagagagttccgagaatatatttgatccaagcgtgatagagagcattttggtaaagttactaaagcctcgtgacacaaagttaatccaagaacggatcttagaggctatggcgagcttgtacggaaacagtagtctgtcgtgttacctagatgatgcagaagctaagagagttcttatcgctctcataaccatggcttctgctgatgtacgagagcgtctgataatttgcttgtctggcttatgccatgacaaggttggaatttgggaggcgattggaaagagagaaggaatccagttatttatatcatttctaggtttgtctagtgagcaacaccaagagtatgctgttgaaatgttgaaaattttgacggctcaggtggatgatagtaaatgggctgtaacagcagccggggggatacctccacttgtccagttgctcgagactggatctcagaaggccaaggaagatgctgcctgcattctctggaatttgtgttgtcacagtgaggaaatccgtgattgtgttgaaagagctggtggtattccagcattcttgtggcttctgaagactggtggaccaaattcccaggaaacatctgcaaagacacttgtgaagcttgtccatacagctgatcctgccacaataaatcagttgttggctttacttctgggagatgatccgacttcaaagattcaggtaatagaagtgttgggtcatgtgctctcaaaagcttcacaagaggatcttgttcatagaggatgtgccgctaacaaaggactgaggtccctagtcgagtccctaacatcttccagagaagaaacaaaggagcatacagcttcagttttagctgatctgttcagctcaagacaagatatttgtggtcatcttgcgacggatgacattattaatccctggatcaagctgcttacaaacaacactcagaatgtggcaaaacaggtggctagggctttggacgcactgtcccgcccagttaagaacaataataataaaaagaagtcttacattgccgaaggagatattaagtcactcataaaattggctaagaactcttccattgagtctgcagaaaatgcggtatctgccctcgcaaatcttctgtctgatccggatatagctgcagaagcactagctgaagatgttgtttccgctttcacaagaattttggctgatggatctccagagggtaagagaaatgcgtcacgcgcacttcatcagttacttaagaactttccagtttgtgatgtgctaaagggaagtgctcagtgccgttttgctatactttcactcgttgattctctaaaatcaattgatgtggatagcgcagatgctttcaacatattagaagtagttgcgctcttggcaaagactaagagtggggtgaatttctcttaccctccatggattgcccttgccgaagtgccatcaagcctggagactcttgtgcaatgccttgccgaaggccatactcttgtgcaagataaggcaatagaagttttgtacaggctttgctctgatcaacagtttctgctcagtgaacttatagtttcaagacccaagtcaatgttggttctgcctgatagaatagtgaatgcatccagcttagaagtgagagttgggagcacagcgctgctcttatgtgctgcaaaggaaaagaaccagctgatcacggagacacttgatcagtctggttttttaaagctcttgttacatgccctcgttgatatgataaagcacaattctacaagcttttctctagagactgaagtccagacacctaaaggttttttggaaaaaaatgttttccaggatacaggtagtttttattttcctgatccagctaaaatcttgggtggtacagtcgcattgtggctgctatgcatactcacttccgttgatgctaagtcaaaggtcattgttatggaagctggcggacttgaggtgctcttggggaagcttgctaggtatacttccagtgctcaggtaaatgttcctttctcgggtataaaaaaattatatgcttcttcatgtttattggttatgggtatcctacagggcaccttcgttgggaatgaaataaattagcgaacttctgttatgagttatacaactttgcggggcggggtttggtctttaggtccttctgttagataagaggttctgttacagtaaatctcacttctttatatcgttacagacttgtcaagcatgaattgtgcatttcggttttgaatcacactgctctctcagtttctcttaggcttgacttgattcttactttttttgtggcagagatgccttgtatgatgaattttcccccttgaaagtaatcttgagctaaactattttaccaggctgaatttgaggatacagaaggcatttggattagtgctctcctcctggctatcatgttccaggatgacaatgtgtccttttcttaacgacaatgcggatcattccaacacttgcagttttgctaggatctgatgaactgatagatcggtatttcgctgcccacgcaatggctagtcttgtttgtactaggaacagaggaataaatctgacaattgcaaactctggtgctgtttctgggataataaaccttcttggctatgtggaatcggagatactgaacttggttgctttggcaaatgaattttctctcgtgaaagagcctgatcaagttattcttcaacacctttttgaaattgaagatgtgaggcttggctccactgcacgtaaatctatcccgctgcttgtagatctcttaaggccaattccagataggcctggagcccctcagtttgctgtccaaatcctgattcgcattgctgatggaagtgacacaaataaattacttatggctgaagctggagctgttgaagctttaacaaagtacctttctctaagtcctcaagattcaactgagtacgccatatctgaattgcttagggtattatttagcaaccacgagcttagacaaaacgaaatggcactaagttccttgaatcagcttatcgcagtactgcggctaggttcacgaagtgcaagatacagcgcagctggggctctgaatgaactatttgatgctgaaaacatcagaaattctgaaatcgcctgccaggctgttcaaccacttatggacatactcggttctgtatcagaaagtgagcaagaggtagctctctctgcattgatcaaactaagctcaggaaatacttcgaatacagctcttctgattgatgtggaaggaagtctgctggaaaacgtgatcaaaatcttatcatctgctactgcttcagaggagttaaagataaatgctgccagactttgttctgttgttttctcgaataaaaacatcagaacaagtgcatccgcctccggatgcatgaagccgttaataacacttatgcagtctgaaagaagtgcagcagttgaagcagcagtttttgctattaagatattattggatgacgagcaacatttagaactagcagccgcacataacattcaggagcttcttgttggcttggtttccgggaaaaattacgttattattgaggctagcttatcagctctcattaagttgggaaaagacagagtaccacgcaagttggacatggtggaagctggaataattgagcgatgtcttgagctactacctggagcctcgagttcgttatgttccgctgttgtagagctgtttcgtattttaacaaatagtggagtaatcgcgagaagaccagatgttgcaaaaactgtagagcctctcttcgcggtcttgctgcggtcagacttgaccttatgggggcaacatagtgccctgcaagcactcgtaaacatattggaaaaacagcaaacccttgaagcttttagttttacacccagtgaagccattgtgccgctgatttcttttttagaatcttcatcccaagctatccagcagcttggagcagaactgctgagccattttcttacaatggaagatttccagcaagacatcacaacacagagtgctgttgttcctctggtccggcttgcaggaattggaatactgagcctgcaggaaactgcgataaaggcattggagaagatatctgctagctggcctaaggctgttcttgatgctgaaggtatttttgagctatccaaggttattcttcaggaagatcctcagccccctcttgatctatgggagtcagctgcctttgttctttccaacattctgcagtatgatgcagaatgctttttcagagttgaactgccagtgttggtaaaattgttgttctcgacaattgaaagcacagtgttactggctcttaaagctttgatgcttcatgagaagaacgacgcttcaagtacagtacaaatggctgagcttggtgcaatcgatgcattgctggacctcctgagatctcatcaatgcgaggaagaatctggaagcttacttgaagtaatatttaacaatccaagagtaagagagttgaagttatgcaaatatgcaatagcaccactatctcaatatctgttggaccctcatacaagatcagaacctggtaggcttcttgctgctctggcactgggggatctatctcagcatgaagggctttctagatccagtggttctgtttccgcttgtcgggcactcattagcgtgctagaagaacaaccaacagaagaaatgaaagtggtggccatctgtgcgttgcagaattttgtgatgaatagtagaacgaatagacgagctgttgcagaggctggtggcgtattgttaattcaagagctactgctttcttgcaacccagaagtttctgggcaggctgcactgatggtcaaatttttgttttccaaccacacactccaagaatatgtctcgaatgagcttataagatcactaacaggtacttttcaatttaagttatacgaatcctatgtccctgtcactctagcactacagtttttatattctgataatttgttttgttctatcttcaactgtttgacatcttattcttgtgaacagctgcacttgagagaggcttgtggtctacagcaactataaatattgaagttttgagaaccttaaatgtgattttctccaattttcctaagctccgtgcctcagaagctgctactttctgcatccctcatttggtaggggcgctcaaatctggtgttgaagacgtccagggattagtattggatattctttacttgctaagacactcctggacgaatatgtctatagatgttgcaaagtctcaagccatgattgcagctgaagcaattcccgtcctgcaaatgctgatgaaaacatgccctcctaggtttcacgacaaggcagatagcttattgcactgcttaccaggttgcttaacagtgaacgtcatgcgtgccaataacttaaagcagtctatggcaaccacaaacgccttttgtcaattaacaataggaaactgccctccacggcaaactaaggtaaaacaaatccatcacaggagaatattctacactcccaccattgccaaaaactgtctttgtatcattgggtttttgtctctttttctgtaggtcgtgagcaatagc

SEQ ID NO: 142960 - DNA, 1793 bp, Arabidopsis thaliana landsberg
  unsure (1)..(1793): unsure at all n locations
ctggcttatcgtcattttacggaatgttcttccttttctaagtagtttttatgttgtttcataatcatcaggccacaattggtattgattttctatcaaagacaatgtaccttgaagatcgaacggtcagacttcagttgtggtaagatcttgagcctctttcaattttcgaatactgaagaataacattgcagatcattttttgatgattaacatcgagagccgaaatcatatgacagggatacagctgggcaagagcgattcaggagtctaattccgagctatatcagggattcctccgttgctgttattgtgtatgatgttgcaagtatgtgtaccttcactcgttctctcaaacacatgaatattttcccatatctgagatcttggggatgtggttttcagtaatcttatgaatttatgcgtttcgatttcttctttatgttgatccattgtgcgttgtgaaactcgagatttattttgttttccactgacatataggcaggcagtccttcctaaacactactaagtggatcgatgaggttaggacagaacgtggtagtgatgtcatagtcgtgcttgtgggaaacaaaactgatctagtggacaaaaagtaataatgatctaccatctcttcctctacttgtttcttgttaaaccatgatgtgcaaattactgtttaatagcaattgagactgaaatttggtagtcctccttgtttaaacacgctctgatttcgtaagtatgttgacaagacgaatgggtgtcttttttgttttactcaagtacaaactgttgttaaaccacgtcttacttttctggtggtattgagtatgttgccaaacgaccctacaagataataaatggaaaatcatttggtgctcaactgcatatctttacagggtttctttatagtcaacacgctttgacacttgatggtgcctactacatttgttactgccaattgggcctttgtattaaatattttgnnnnnnnnnnnnnnnnnnnnngaggaagcagaagctaaggcacgcgaacttaatgtaatgttcatcgaaaccagtgccaaagcgggcttcaacattaaggtaacaaagatcttggcttgacacatttatgagggtttcttgcacaacaaaaacttgctgcttagttcaactaagccctaactttgtttagttccatcaatattcaatagttaattaacctagacttataaatttttaacccaacctgctgattattacatcctcctcatttgtatggatctttcactgatactctctaaacaattaccgcaaatccataacgctatcactccgtgcaaatcttgttttcttatgatttcaaacctttttgtattgctaggcgctcttccgcaagatagcagcagctttgccgggaatggagacattgtcttcaacaaagcaagaggatatggttgatgtcaatctcaagtcttccaatgcaaatgcatctctcgctcagcagcaatcaggaggatgctcttgttagatttggcaacaacagacacagcaacaaatcgatagagaacaacaaagcacactactaaaaaatgtcctcaagcccctttgcatgattcgatcagttatcgtcttccatctgtaaaatttttgcctgtttttcaactttttttcttcatcggattgtttttaaagaagactctgttttagctatggtttgtccctaactgtgatcttttgtggtctttggagtttcaaatgctcgctgcttcagtacttttgtttacttatttctcaaatctgtgattt

SEQ ID NO: 142961 - DNA, 4163 bp, Arabidopsis thaliana landsberg; identical to SEQ ID NO: 38011

SEQ ID NO: 142962 - DNA, 2528 bp, Arabidopsis thaliana landsberg
  unsure (1)..(2528): unsure at all n locations
ccccttacgtaaccctaagcggacggagcaatgctctgctagatctatctttctttcaattcttcaccagagatcgtcgagactcaccattgaaatcgaagaaacagcaccaatttccacttcaccnccgaaagagagagacagagaggataataaaaggccgccatggatttagatcaatggatttccaaggttaaagacggccaacatctctctgaggacgagcttcaacttctctgcgaatacgtacgccttcttcttctttcttctttcttctcttgcttgctttctcttccccgaatattcatgcatctacaaaaacccaattcttcgcttactcttttgagactttagagcttgctttgtggcactttactttgaatctggtctctctcccttactgtttcctttgccattttggtctacggattttagggtttttctctcatttttccaatagaggatttattgactttgctatttcaattctaaattctaaggaattagggataagtttagctcttctttagccaatttatggatgcaccaagtccacgcttgcaaactgttatttgaggatttattatagtaattttagtgttgaaacttgtagtagcagccgtcttcttcttttttcatgacaatgatttgctaagatactctggtaattcacaagatattttgactattatataggtgaaagaaattcttattgaggaatcaaatgtacaacctgtcaacagtcctgttaccgtctgtggtgatatccatggccagtttcatgatcttatgaagcttttccagaccggaggtcatgttcccgagaccaattacatatttatggtatagactctgactttgggcgtaggctcgtatgacatatcaatatgtaacacatagtttaattatctgtgggggattttctcagggggatttcgttgatagaggttacaacagtcttgaagttttcaccattcttttgcttcttaaagcaaggtaagattttccgtagaaattgtgcgttatatatgtcatggatcgtcatccttccgtttcacactgtatatcatagttctcttgagaatgctctttaagctgtaaacgcattgctctactggaaaatcgatttaacttgtattccaggaaatttatattctaacttactttgctgtgagcttaaaatcactcgtttccttgtatttcaatatgtagacatccagccaatatcactcttttgcgtggaaatcatgaaagtagacagctaactcaggtatgcattattctaatccatttatatctattgttgctgacttgctgtgctcttcacgcagttactggttgagaagtaattttcgctcaattgttataactagttttgaaagtttattttgtacatgtggcaatgccatgctagatataggcatagatgttaactaagatgcattttatgtgaaccctttgcaaccataagttttcttcttaggaagctcttgatttatctctatcctacaccatatcctatatcttttaacatccactgtcaaggacgaagattgtagtgatattttgtgccctgcaggttcatttttatagttttcttaaattgtcgtaccaattttatatttgctaggtgtatggtttctatgacgaatgccaaaggaagtatggtaatgctaatgcttggagatattgcacggatgtttttgactatcttacactttcagctattatagatggcactgtaagtatttctcagcttctttggcattgtgttatgatgtgttcttgtataattttatgaatgcataagttagctgtataccatattaaaacgtattgcatcctcaatgtaggttctatgtgttcatggtggcctttcacctgatgtacggacaattgaccaggttaaaatgtgctattttaaattacttttggttttcaccatgcaagtgttatttatgattagattaaatctcatttactcatttagatgttattttgttctctagataagattgattgagcggaattgcgaaataccgcatgaaggacccttctgtgatcttatgtggagtgatcctgaagatattgaaacatgggctgtcagtccacgtggagctggttggcttttcgggtccagggttaccactgaggtatttatatttttttctggggttgaaatttgaataaggtgtgaaaagaaataaatgtatttcagttccctgatctgtggttttgcttcttgtgcagtttaaccatattaacaatcttgatctagtatgtcgcgctcaccagcttgtacaagaaggtctcaagtacatgttccaagataaaggtcttgtaactgtaagagccttgcttcaaaatgatcattttggatagttggaagtatattctgggtggcatgtttctactctttattttttttgtgaaggtgtggtctgcgtcgtaatttctgctcccgttgtgtgaactctggcaaagtatattcagttatcctatgacatcatggtcaggcatattgtttt

SEQ ID NO: 142963 - DNA, 1013 bp, Arabidopsis thaliana landsberg
gctctttcttttccgattcgtcattcgatgaatcttcctttcttatacaattttggataatcttttctaatgtaaaaattcgagatttttttttataatgttaaatctataaataagagcaacctaaaacgaacaacttctcccactttccttattttcgatcttatccttatcttcttccttgttctatttctcttctaactaatctcttctcttctcttctcttaaaatcaaacgtaatcataaataaagatcttcttgtttaatttctcttgatcctcgcaaaatcacagattcttgaaattcttttttcttgtcttgaaattcttgagttcttgagttatgaaaagacaatggacagagttatgaaatgataaatctcaaccaattccttgtttatcattctatatcagttgtgattcttcattggttttacgttatctcttgaacaaaaaaacatggcaaacgcagagaagacgagttcaggttccgacatagatgagaagaaaagaaaacgcaagttatcaaaccgcgaatctgcaaggaggtcgcgtttgaagaaacagaagttaatggaagacacgattcatgagatctccagtcttgaacgacgaatcaaagagaacagtgagagatgtcgagctgtaaaacagaggcttgactcggtcgaaacggagaacgcgggtcttagatcggagaagatttggctctcgagttacgttagcgatttagagaatatgattgctacgacgagtttaacgctgacgcagagtggtggtggcgattgtgtcgacgatcagaacgcaaacgcgggaatagcggttggagattgtagacgtacaccgtggaaattgagttgtggttctctacaaccaatggcgtcctttaagacatgagatttgtgtattagtgtgtgttttactttggtcattttatagtttttgtaatctttttatatcgaattgtttcttctcattactttctgaattctgatacaattgcatatcttattg

SEQ ID NO: 142964 - DNA, 3511 bp, Arabidopsis thaliana landsberg
aatggctgggactaacaatggcattgctgaaaacgaaggagattctggtcttgaaccttatgttggattagagtttgatactgctgaggaagcaagggactactacaactcttatgctacgcggacgggttttaaggttaggacgggtcagttgtatagatctaggaccgatggtacagtttcatcgaggaggtttgtttgctcaaaggaaggttttcagcttaattcaagaaccggttgtcctgcgtttatccgagttcagagacgagatactggcaaatgggttcttgaccagattcagaaagagcacaaccatgaccttggaggtcatatagaggaggctcagactactccccgtccttctgtacaacagagagcaccggctcccactaagctaggcatatcggttccacatagacccaagatgaaagttgttgacgaggctgataaaggaaggtcatgcccttctggtgtgatctcttttaagcgcttcaaaggagctgaagatagtgatgggcaaactcagcccaaggccactgaaccgtatgcagggttggagttcaactcagctaatgaagcgtgccagttttatcaagcgtatgctgaagttgtaggttttagagttcgaatagggcagttgtttcgatcaaaagttgacggttcgatcacatccagaagatttgtttgttcgaaagaggggtttcaacatccttcgagaatgggttgtggagcttacatgaggatcaaaaggcaagactctggaggttggatagtcgaccgtctcaataaggatcataatcatgaccttgaaccgggaaagaagaatgccggtatgaaaaagataacagatgatgtgacaggagggttggattctgtggatcttattgaactaaacgacttaagcaatcacatcagtagtacccgagaaaacaccataggtaaggaatggtatccagtgcttcttgactattttcagtcaaaacaggcagaagacatgggattcttttacgccatcgagcttgatagtaacggaagctgcatgagcattttctgggcagatagtcggtcaagatttgcctgcagtcaatttggtgatgctgttgttttcgatacttcatatagaaaaggagactactctgttccgtttgcaacatttatcggttttaatcatcataggcaacccgtgcttctcgggggtgccttagttgctgatgaatctaaagaggctttctcatggttgtttcagacatggcttcgtgcaatgtcaggccgtcgtccgagatctatggtagctgatcaagacttgcctatccaacaagctgtggctcaagtctttcccgggactcatcaccggttctcagcgtggcaaataaggtccaaagaacgagaaaatctcaggtcgttcccgaatgaattcaagtacgagtacgagaaatgtttataccagtctcagacaacggtcgagtttgataccatgtggagttctcttgtaaacaaatacggccttagggataacatgtggcttagagaaatatatgaaaagcgcgagaaatgggtaccggcatatctaagagccagtttctttggtggaatccatgtagacggcacctttgatccgttttacggcacttcccttaattctctaacgtctcttagggagttcatctcacggtatgagcaaggactcgagcagcgccgtgaagaggaaagaaaagaagatttcaattcttataacttgcagccgtttctgcagacaaaagagcccgttgaagaacaatgcagaaggttgtacacgctcaccatcttcagaattttccagagcgagcttgctcagtcttataattacctcggtttaaagacctacgaggagggagccatcagcagatttctagtgaggaaatgtgggaacgagaacgagaagcacgccgtgactttcagtgcatcgaatctcaatgcaagctgcagttgtcaaatgtttgagtacgaaggacttctctgcagacatatcttgaaagtgtttaacctcttagacattcgagaactcccatctcggtatatacttcatcgctggaccaaaaacgcagagtttgggtttgtacgagatgtagaatcaggggtgacttctcaggaccttaaggccttgatgatctggagcctaagggaagcagcttcaaagtatatagagtttgggacatcgtctctggagaagtataagcttgcatatgagatcatgcgagagggtgggaagaaactgtgttggcagagatgagaaaaccaagtaaggtcagttgtcctgattctctttgtttctcgagtttataatctaagatgtctaaatcttcaaaatctgtttggtagcgaggttgttttctgttcttgtccttcatagattctcatttgggctgtgttggttgcctcatcggcggcagactctccctctgttctgcctccttatgaataacattgtttcatttatgtctgagctcttggatcattttgccattagattcagtttatggtttagcttttaatgacgctggtgcttcatgtcgtaaaaatgattgatccagtttcttgtaacagagatggtattatgaattgaagtgaaacaacgtcatttggtatagactagagactatctcctttgtaagactatctcctttgtctgggaaagtagaatattttctagcaaagaaatctgacatattcttatctatatcagaaattcaagaatgagtttgctgtgaaaccagaaaagcatcaattgatttctttattttcttcaagagttcactttcttctgttacagattgagaaatcagaagaagatgaagccttacctcatcagtgaagatggaatctgtggccgccgatgtaaatcctaacccttttgttaacttaaagtcatcagaaaaggcggtggtggaggtcgtcgatgtggtgaggccggttgtatccattgataaatcggtgggtttagtgaccgacatgtatgttctctgttattttcatgtttgtttcctaaatatcttaagaaagtgaagaacctaccaagttagaatttttggaagattcaggacattttggaagttcatatgaatctagtagaaacttaggatgtcatgtaaaatcgttatcaagttctccttcttctctacactcgtatttaactttttctttacagacaaatacttgcagttcctcaggtatcattattatgaataatttgatgtaatctttaacaaacaaaaaggaagtgacgaaaagttagagcgggaagagagaattaaggagaaagaaacttaaaatacccattgaccattcgttgttaattacatgatacatattacatgattatgtttttaaaacatttttaatccgaatgttggtttattatatcttagcaaaaagcagacttcctcagctctctataccataagagttgggtgatatgaggctctctacgtatgtatttgcctcgaacccgtcactgagcttaaccccacaaatt

SEQ ID NO: 142965 - DNA, 2192 bp, Arabidopsis thaliana landsberg
tgtaataatgtaaacacataaggtataaatagcgacacgttgttggtacgtttggagcatgttgcacaacatgcacatcttttcatcacattgctttttcactaaaaaagcgtttgaggcagttcaaccgcctctaacgatccaaaagtttttctgttatttgttttgtgctcacttatacaagtgtgtcatttttattcaaatacaagtgaaattaaaacaaatatatatatacattttttttttctcttacaataaatcaattagtcagtgagaggataggtttggcttgaggtgactcgaaatctaattgacatgtacacatttttggacatgtgtgttgtgtgatactgatgctaataatttgattgatttctttaaaaagcatttagaggatgttgaaaacacagtactttgtagagataattaacctaactttgaagtattataataattaattatgacattgtcaatcactaattcatgattaactaaaaattaatagatcaaaaacctaaacttaaccgatgattgtaactaaaatctctccacacgcttaaggctcacacacacacacacacagactctcccttataaatgttgagccaaagcaatctctctccattcattcaccttcctccgtccccttcccctaatccccaaaacacacagataaaaatctctccttttttcatcgaagcatataacacaacaccgacaaggagattcctttaactatggcgaagaaagcaagaattgttataatcggagctggaatggctggtctcacggcggcgaacaagctctacacaagctccaacaacaccttcgagctctcagtcgtcgaaggcggttctagaatcggcggtaggatcaatacctctgagttctcatcagagaagattgagatgggtgccacgtggatccacggaatcggtggaagccctgtttatagaatcgctaaagagactggttctttagtctctgatgagccatgggagtgtatggattccaccattgataaagctaagacctttgctgaaggtgggttcgagattgggccttccattgttgaatccatctctggtttgttcactgctctcatggaattagctcaggggaaagagatctctcaatccgacgccgatttgagtcgtttggctcatatttacgaaactgccactagggtttgctctaagggaagtagtactagtgttgggtcgtttttgaaatctgggtttgatgcttattgggattcaatcagcaatggaggagaagaaggagttaaagggtatgggaaatggagtaggaagtcacttgaagaagccatttttacgatgtttagtaacacacagaggacttacacatctgctgatgaactctcgacgcttgatttcgcggcggagagtgagtatcagatgtttccaggagaagaaatcactatagctaaaggctatcttagtgttattcatcatttggcatctgtgcttcctcaaggtgttatccaattgaatcgaaaggtcacgaagatcgagtggcagagtaatgaagtgaagctgcatttctcagatgggtctgttgtttttgcagatcatgttattgttactgtctctttaggtgtgcttaaagcagagattgagactgatgctgaattgtttagtcctcctttgcctgatttcaaatcagacgctattagaagactaggctatggagttgtcaacaagctgttcgtcgagatgtctcaaggaaagttcccctctttgcagcttgtgtttgaccgggacgattccgagtttaggttcgtgaaaattccatggtggatgagaagaaccgcgaccattaccccaatccatagcaattcaaaggtcttgctttcttggtttgcaggcaaagaagctctcgagcttgagaaacttaccgatgaggagatcaaagacggtgtcatgaccactatctcttgcttgacaggcaaggaagttaagaatgataccgcaaagcccttgaccaatggctcattgaatgatgatgatgaagccatgaagattacaaaggtcttgaagagcaaatggggaagtgatcctctgttcagaggctcctattcgtatgtagcggttggatcaagcggggatgacctagacgcaatggctgagccattgccaaagattaataagaaggtgagtcaggacaaggtc

SEQ ID NO: 142966 - DNA, 1569 bp, Arabidopsis thaliana landsberg
acgatgttcaagatcctattttcttcgattttaatctcgatcttcccgctggatctggttgcctcttggttggtgccaatggatctggtaaaaattattcgaatcatttcgattttgtgtgtgtttctgtttctgtgaatctgaagtagatcgatttgggaccttgacgaatatagaatgtattatgtgatttcgtgtgattctgttttggtagtgttggaattcggtttaattcgtcgaattcgactatacgtatagagtttgagtaagtaagatcgatttttcgactatatgtatcatgttaatactcgaatttgattgattctgctaagaaggtgattgtcgttgcgcgtttcattgacagggaaaactacgttattgaagatctcttgctggaaaacatatggttggaggaaagaatgttgtacaagtgcttgatcgctcagcatttcatgatacagagcttgtttgtagtggtgatttgtcttacctaggaggatcatggagtaaaactgctggttctgctgtgagtactgagatctcaaagttaatacactgcaagagttttgatgtgagaacgttttgtttctaattctttaaaattctttagggtgatattccactccaaggagacttctcagcagaacatatgatatttggaggtgagattctctgatcctagtatgagtttttagtgaattgtttcgttgtgcttatactctgaatatgttttgtgtttagttgaagggattgatcctttcagaagagagaagttgattgatcttcttgatatcaatcttcaatggcgtatgcataaggtttctgatgggcagagacgtcgagtgcaaatatgtatgggtctattacatccgttcaaggtagtattgcattccatcaactattcatcggcgtatgtgtttttgcgttgatcattatctgagacttagattgtaatgatcgcaggtattactactggatgaagctactgttgtcctgttctgttgtcgctagcaatagattgtgttgtatgttctcttaaaccaagaagtgtgatacagtgtaatgccagtgcaactaacgcccgtcctacatccttatgtttgagtgaacatcaaatactgattttcatgttttatatttgagtagagaagagctacaattgtatatgcaactcatattttcgacgggctcgagacatgggctagtcatttggcttacattaatggaggagagctgaaactctcggccaagttagatgagatcaaggatctcaaaacctcaccaaatctgctatctgttgttgaagcttggctccggtctgaaaccaaagttgagaaaaagacgaagaagaaacctgttgttacctctccatttatgtcgtctagacaaatggcatattaccgatgaatcttaacttgtttatgagatcagtaagaataagagcactgcttctacagatgcctttgttttctatggtacttcattgtttagaatccgataacttttatcacacatgaaagaatttctgtaaaaccacgtttttaattaaattactattttgccaatatt

SEQ ID NO: 142967 - DNA, 5834 bp, Arabidopsis thaliana landsberg
attttttgattgaactcctttttctttgttacaacatttcgttttcttctttaacgctttctcaatttggtagtgtatgatgcttgactccatcgcctcttgaatatggtttcagtctgcattacgccaatgtatctgtgggaacaccggcgacttggtttctggtggctctggacaccggcagcgatttgttctggttgccttgcaattgcggtactacttgtatccatgacttgaaagatgctagattttccgaggtacctttcccttctccaagcagttgaacatttttttcagactatttgttccttatctcttgtcgttttctcttctttgagacagagtgtaccacttaatctatacactcccaatgcatcgactacgagttcaagcattcgatgcagtgacaaacgttgttttggatcgggaaagtgttcttctcctgaaagtatttgtccttatcagattgccttatctagcaacacagtcacgacagggacattgttacaggatgtattgcatctagtcacagaggatgaggatttaaagcctgtcaatgctaatgtaacgcttgggtaagtaatgactcttttcctctgtctttcttctatgcacctttaagaataaagggttcattcctggagtaacctattgaatgaagtgagattccggacatgtaaaaagtttaggtcttttgcctctcttagaactcatgtacggttccatcaactgtcctctgtttagagaaatgaccaaggagatgctaaagaactgaatccgtgtttgtggtgcagttgcggtcagaaccagacaggtgcgttccagacagatattgctgtgaatggtgttcttgggcttagtatgaaagaatattctgttccaagccttctggcaaaagccaatatcactgcaaactccttctcaatgtgcttcgggcgtgtcattggcaatgtcggaagaatcagttttggagacagaggctacacagaccaggaggagactccattcatttctgttgcaccaaggtacaaagtcaacatagtttctacaccgattccatttctttctcccattgttttctttttgacaattttgatccaaaatgaataaactagtaccgcttatggtgtgaacatttcgggagtatcagtggcgggagatcctgttgacattcgcctgtttgcaaaattcgacactggctcatcatttacacacttgcgggagccagcatatggcgttcttaccaaatctgtatgtataaacttttcttcttctgaaaatgttgtgctgttaaaccattagatagatctgtaacttttgcagtgggtattgctacatcggcatgacgttcattctccataacttttgcagtttgacgaacttgttgaggacaggcgacgcccagttgatcccgagcttccgtttgagttctgttacgacttgaggtcacgcccgcactcttatcagtgtagttattagatgattttgcccactttagtaaaatgtgttcgaattttaacgcacgctagaacatctaataagtaagaaaagcctgaggaaacattgactttatagaagaatatgaagtaatcattgactttgtaaaatggactgatcggtaccacatttgaattctgatgttcttcatcttcacatgcagcccaaacgctacaaccatacagttccccttagtagagatgacttttataggaggatccaaaatcatcctcaacaatccgtttttcactgcacggactcaggcaagacatggtgtttaatttttctttctttgatttactagcttatgtatttacatatttgtttttggttatgtaacaggagggtaatgtgatgtactgcttgggtgttctgaagagcgtaggtctcaagattaacgtcataggacgtaagtatctccacactgatacacaaaattctgtatatatatgcaaaatactaatgggaatatttgtggctcgcagagaactttgtggctggctaccgcattgtattcgatcgggagaggatgattttgggttggaagcagtctctttgtgagtgaccagaccaggaagtgattaactgattatatatacctaggaagaaagcattggtaatgaaagtgttttgtgttaatggcaggttttgaagatgaaagcttggaatctacaactcctccaccaccagaggtcgaagctcctgcaccaagtgtatccgctccaccacctcgttctcttcctcctactgtttccgctacaccgcccccaatcaaccctcgtaactccactggaaaccctggtacaggcggtgcagccaatctcatccctctcgcatctcaactcctacttctcctacctcttttggccttcctgtgaatcacagaagccatatgttttccttggtttgaccattttgtgttcattcagtaacaaacttcgtttgatgtgcaaaacaattttcattggtttgagagtggtaatcttgtctcccctgtttttgttacataaagtgttttggatatgtcaaagtgcatggagcaatcatcaattacataaagtgtataaacttcgtgataatctgacagacttattataacggctaatgtcagaagttatctcacttaaataggaaattatttcacgaaatagaaaagtaaagaaattgttcgttgaacagaagagaatacagggagttaagtgaaatatacgaagaataaaggggttttccgaaaaaaaaaaagagttgactaacagacttattaataacggctaatgtcagaagtcaactccctccggataagagactctgccttcgtcaaccttttaggttcttgggaagaagaagaggatccaaagtaatggctactactccgattaaacaactcttagctcgaacattcaaatcagcatgtctggaacaatgcgaacaagtcaagctgttgaccttttcatttcctcaatctccttacaaatacggcattcgtaccagtgtacatcgtttatctgagaaattaaacagagttttactctggaagttgtattattttatcggaaaagcctcgagattgaagttatgaacgttgcacgccaagtgtttgtgttattgtctatgttagttttgatcttttggggtttggagagatgtgaggcttctgggaagtttagcttcgaagttcaccacatgttctctgacgtagtcaagcaaactcttgggtttgacgatctagtgccagaaaacggaagtttggagtacttcaaggttttggcccaccgtgatcgcttcatcagaggtcgaggtcttgcctccaacaatgaagaaactcctctcacttccattggaagcaacctcacgcttgcactcaattttttgggattgtaattcctcttttccttttgattcacaacatttcgttttcttctttaacgcaaacacaatttggtagtgtatgatgcttgactccatcgcctcttgaatatggtttcagtctgcattacgccaatgtatctgtgggaacaccggcgacttggtttctggtggctctggacaccggcagcgatttgttctggttgccttgcaattgcggtactacttgtatccatgacttgaaagatgctagattttccgaggtacctttcccttctccaagcagttgaacatttttttcagactatttgttccttatctcttgtcgttttctcttctttgagacagagtgtaccacttaatctatacactcccaatgcatcgactacgagttcaagcattcgatgcagtgacaaacgttgttttggatcgggaaagtgttcttctcctgaaagtatttgtccttatcagattgccttatctagcaacacagtcacgacagggacattgttacaggatgtattgcatctagtcacagaggatgaggatttaaagcctgtcaatgctaatgtaacgcttgggtaagtaatgactcttttcctctgtctttcttctatgcacctttaagaataaagggttcattcctggagtaacctattgaatgaagtgagattccggacatgtaaaaagtttaggtcttttgcctctcttagaactcatgtacggttccatcaactgtcctctgtttagagaaatgaccaaggagatgctaaagaactgaatccgtgtttgtggtgcagttgcggtcagaaccagacaggtgcgttccagacagatattgctgtgaatggtgttctcgggcttagtatgaaagaatattctgttccgagccttctggcaaaagcgaatatcaccgcaaactccttttcaatgtgtttcgggcgtatcattagcgttgttggaagaatcagtttcggagacaaaggctacacagaccaggaggagactccattagtctctcttgaaacaaggtaagaagtcatttccagattagcggcgccaaagttttataatttgtgtatatctactacaccaattctgcttctatctcccactatgttttccttttcacatttttgacctaaaatgaaaactagtacggcatatggtgtgaatgtgacgggagtatcagtagggggtgttcctgttgatgttcccctgtttgcactattcgacactggctcatcatttacactcttactggagtcagcatatggtgtttttaccaaagctgtaagtgtttagattagactataccatgtattataatgctgcctgaccaatttcatgtaaaaaagcgagatatgtgtaaactattcttcctcggagaaactattgtgctgttaaaccattagatatatctgtaatttttgcagtgggcattgaaaattgaaatgaagatttctcagaagaaagccattcctccaagctttgtttgttacatcatatgacgtacatcttttacttttgcagtttgacgatcttatggaggacaagcgacgcccagttgatcctgattttccgtttgagttctgttacgacttaaggtcatgcttccactcttatcagtgtagttatatatgcttttgcctatattaatagcacattcttttaacgcacgccagaacacgtaaaaagtaagaaagatgggaaacattttatagagaagaacatctgaattctgatgctcgtcctcgtcatatgcagtccaaatgttacaacccctgtagagatgattttcgttggaggatccaaaatgactctcaggaatccgtttcttacagcaacgtctaaggcatgacatggtctttaatttttctttttcttttcctgtattaacgtatctatttacattttctttttgtttttggttttgaacactggtaacaggagggtactaagatgtactgcttgggtattctgaagagcataaatctcaatatcatcggacgtaagtatctcaacaaccaattctgatgcacaaatttatatatatatatatatatatatatggatataatgagagtatttgtggaatgcagagaacttgatgtcgggccaccgcattgtatttgatcgggagaggatgattttgggttggaagcagtctaattgtaagttcctaaatcaggaagtgactgtatatacttaggaaccaagcattagtaatgatgtggttttgtgtcaatgcaggttttgaagatgaaagcttagcatctgagtctcctccaccaccagagatcgaagctcctccaccaagtgtatccactccaccacctgctgcttctgctacaccgcccacaatcgatcctcgtaactccaccagaaactctggcacaggcggtgcagccaatctcagccctcttgcagctcaactcctatttctcctaccacttttggctttcctctga

SEQ ID NO: 142968 - DNA, 1186 bp, Arabidopsis thaliana landsberg
caaacccttttcctcaattctcaatgcggattcgttttccttaagacaacttcgacaaagttgcatattttttcgaaccctaatttccgtctagttcaatttgttaggttttagggattagagtggattaaattcgaataaagatcgttcttttaactaaattgtagtctttctctgctgcttgtgactaaagtctgatttttagcagaatttgtttccaaagggatttgctttgaagcctttagctttcttagtattaagatatgacttcatccagctcacttagatgcctgattgcaaatcattcagatccagtatcttgttttgtatttgatactcaagtctaaaactttgttctttagtatagttcgcttaatccattgcttgtgacagagatttgtattttgaggcctctagctttttgtatttgctttaggtttaagatgtgaagtttcatcattgcaatgtcatattgatacttatcaatatttgctcttttcgttttgtggtatggacagtggccgacatggatttgtagtggcgataactggaatagatacaataggaaagggtttgatcagagatgggactggttttgtcacctttccagttaaataccaatgcgtcgttttcagacctttcaaaggcgagattttggaagctgttgtcactttggtcaataaggtaatgtatctatatagtcttatttttttagtcaaatgtctttagtgacaaatcaaccttatggattttcctaatattatcacagatgggattcttcgctgaagctggccctgttcagatttttgtgtctaagcatgtaagcttatgatctttcatcatgaatgagacctcgagttcatttttggttctaggtgttttgtacttactcttgttctcctctcttttatcaccacagttgattccagatgatatggagtttcaagctggagacatgcctaattacaccacatcagatggatcagtgtgtttctttctctagttcttatttcccaacagtattatatgtgtttcatctatcttctagaaactcaattttccaatgcttctcttgcaggttaagatccagaaggaatgtgaagtgagacttaagattattggaacaagagttgatgccactgcgattgtatgcaccatctccttcataactctctagtcacaattc

SEQ ID NO: 142969 - DNA, 973 bp, Arabidopsis thaliana landsberg
gtgctacaagcaaagatcaggcctctaaccgttatccccggaaattcctttgttgggtttttccatcctgatgggatgatcaacgagggtagattcgagtttctacaaggcgcaatgtctttcgatagtatttgggctgaaattattagtctggaggaaagctcggcgaatggtgatagctatgatgatgattcgccaccgcacgtttacatagtgagttggaacgatcacttctttgtcctcaaagttgaaaaagaagcttactatatcattgacacacttggagaaaggctttacgagggttgtgatcaagcttacgttttgaaattcgaccataaaaccgtcatccacaagattcttcacacagaggaagcaggatccgaatcagaacctgaatcagagattttgagcagagggaaggagtcatgtaaagagtatattaagaatttcttggcggccataccaattagggagttgcaagaggatatcaagaaaggattagcctcaaccgcgcctgttcatcaccgtttacagatcgagtttcattacaccacaaacgcagagattaccagtctataaaagcctaggcagagttgctaacgttttgttgagtttcttgtaagttttgtaactaacttgtgaatgtgatttagagttaaaccagtttgtatctaactatccaaggaatttacatttttgctcgttctatttcgctgtctctttttggttcattatgtttttacagcttaaaattttggcattgtaccataatctcaaaatcttcagacaaaaagacaaggccgggcatgttttattcagacagtattgttcactcatcacaatacacaacatgaatcaatcaagcgcaatcaagcgcaatctcacaaatccatttgatcaagaaggttaacataagagttacatgaagaacattgccacgaaaaatcactgctgcaattgatcgtagacattg

SEQ ID NO: 142970 - DNA, 1528 bp, Arabidopsis thaliana landsberg
tgaaggcatccaccgcctctgtagcagacgaaggtcaatcgtcgtatgacgccaaggagtctaaaaattcgcaattaacgcacaaagtagagaagttcaagagatcttgcgagtctgagagtttccggcaagtccatggactatacagtgcgtttatccgccgtctcagggaagcaaagaagttctcaacgatcgacgaagttcttcaataccagaagaagttcgatgacataaagtcgcaggatttcgttatccgtataatgcttctttatggatactcaggaatggcggaacatgcgcacaaactgttcgatgaaatgcctgagctaacctgtgaaagaactgtgaagtcgttcaatgcgcttctatcggcttatgtttattcaaagaagcttgacgaggctatgaagaccttcaaggagttaccagagtagctaggtattactcctgatttggttacttataataccatgatcaaggcactttgccgtaaaggctctatggatgatatattatctatctttgaggaactggagaagaacgggttcgagcctgacttgatctctttcaacactctgttagaagagttttataggagggagttgtttgttgaaggtgataggatttgggatttgatgaaatccaagaatctttctcctaacattaggagttataactcgagagtgagaggtcttactcggaacaagaagttcactgatgcacttaacttgattgatgttatgaaaactgaagggatttccccagatgttcatacatacaatgctttaatcacggcttaccgtgttgataacaacctcgaggaggttatgaaatgttacaatgagatgaaggagaagggtctgactcctgatacagtgacttactgtatgttaatccctcttctctgcaagaaaggtgatcttgatagagcggttgaggtatccgaagaggccatcagacacaagctcctgtctcgcccgaacatgtacaaacccgtggttgagcgtttgatgggtgctttctagattgatgaagcaacacagctagtgaagaatggcaagctacagagttactttcggtacctgccagacttgtccgctggtaagaaaaagaccacttccagtccagtctcttcaagtgcgaagaccacttccactccggtctcttcaagtccggatacctcttcctttctgctctctttaagtctggcggcggactcttccagctccgtctcttcgagtccagactcttccagctccgtctcttcgagtccagactcttacagctcgttctcttcgagtccagactcttccagctctgtctcttcgagtctgttctcttcaagtcgggagaactcttcaagtccggactattccagctcggtctcttcgagtttggactattccggctcggtctcttcgagttcggactattccagctcggtctttccgagtgcgaactcttccagctcttcctctgggttgttggacgattaagagtgcttgatctgtgtttagcaactggttaa

SEQ ID NO: 142971 - DNA, 2134 bp, Arabidopsis thaliana landsberg
  unsure (1)..(2134): unsure at all n locations
gtcgtctccttcgtgttcgagatttgatatcgagtattcgaaccagaggataagagaatggctcacaggatactgagagatcatgaagccgatggatgggaacgctccgatttccctatcatctgcgaatcttgtctcggtgacaacccctacgtgcgaatggtgatttctcgattccatctctcaaacattcttggattttgctgttgcttgtttggtttcaatggatcctgaatcttatttccggatctcatctcttaaccagtctcttgctcgttgatgtttttctgtatattggagttgttaacttagtaaatttggttttatggtttagcttgttatcaaattcatcgaaaaattgggttttagatccaaattcgtttagttatagttagatttgattacagctgctgattctcttagctttcagctgcaattttgttttctgaaaatctcgatgttttgatttctgattgaagttttatctgttgatatgtagaccaaagcgaattatgataaggaatgcaagatatgtacacgacctttcacggtgtttaggtggcgacctggccgggatgctagatacaagaaaaccgaaatttgtcagacttgctgcaagctgaaaaatgtttgtcaagtctgtctcctggatcttgagtatggtcttccagttcaagtcagagacacagcactcaacattagtactcatgactctatccctaaaagtgatgtcaacagagagtattttgctgaagagcatgacaggaaggtatgatcatgttcgcactcacggttatatttcagcatttgttggtttgagaattttgaagacttactctagctttctcatggtggcttatctaagtgattttgctttttctgttatgtaggctagagctggactggattatgaatcttcattcggcaagatgcgacccaatgatactattttaaagcttcaaagaacaacaccgtactataagaggaaccgagcacatgtttgtagtttcttcatcaggggtgagtgtacaagaggtgctgaatgtccatacaggcatgagatgcccgaaacaggagagctatcccagcaaaacataaaagatcgttattatgggtaagcttttttcttctgtatgtttgactttgttgacgtttagttccgttctttattggttgtttcgatacctcccctaaggagtgtaaaatttcatatgtttctgccatagtactattttctccttgatcattcataatatactcgatatttgaaagcttcggatatgtgaattcttggactgaactatgctatgttggctctcatgtagtcttgttacatagtgtcgtttccagtttttgttctctttgtaatgtattagtacttttgcatttattcttgttgaagagtttgttttaactgtttctcattttcttttacacgtttgcagtgttaatgatccagttgctatgaagttgcttggcaaagctggtgagatgggcactttggaatcgccagacgatgaaagcatcaaaacgctttatgtaggtggacttaactcgagaatccttgaacaggacatacgagaccaattctacgctcatggagaaattgaatctatcagaatcttggccgataaagcctgtgcatttgtcacatacacaagccgtgaaggtgcagagaaggctgcgcaagagctctccaacaggctagtcatcaacggtcagaggctaaaactcacatggggaagacccaaacctgatcaagatggtgcaaaccaacagggcggtgtggctcatagtgggttactacctcgagccgttatatctcagcagcacaatcaacccccaccaatgcagcagtactatatgcacccaccaccagctaaccaagacaaaccttattacccatcaatggacccacagagaatgggtgcagtcatttcaacccaagaggctggtggttcaagcactgagaacaacggagcttcatcttcttcttacatgatgcctccacaccagtcatacccaccaccaccatatggatatatgccatcgccttaccagcagcagtatcctnctaaccatcatcatcaacctggtcctatgcagcactatgcccccgcctccagcaagctta

SEQ ID NO: 142972 - DNA, 2546 bp, Arabidopsis thaliana landsberg
caaaaaaaaaacatcatttcttctcgcactcttcacctgctccaatggacgaaagacccgagacagagctaatatcaataccagccacaccacgagtttcaacaccggagattctaactccctccggtcaaagatcacctcgtccggccaccaaaccatcgtcggcgacatggactccgacttcgttcatatcaccgaggttcttgagtccgattggtacaccaatgaaacgagttcttgtgaacatgaaagggtatcttgaagaagttggtcatctcactaagctaaacccacaagatgcttggcttccaatcactgaatctcgtaatggaaacgctcattacgctgcttttcacaatctcaacgctggtgttggttttcaagcccttgttcttcccgtcgcgtttgcgtttcttggctggtgcgtttgcgtttttcttgatttttccaataatcttttttcttgtttttgagttttttcttgaactttgtgtttagtgtttcaagattatttttgtttagtgaacggcgagggtttattcgactctctgtggtgctcagatccagtttcagggttcactttacttgtttgggcaaaaatcaaaaatgtttttcttgtcggaaataataataggatattgactaatttactttttaactttgaaaacatttcaattttagcagtagatattttctttttaatttgtcatgcttccatcattacacatgtggatactcacagacatacttttttgctttaatttggattaagacagagccttctttatcgtctactttgtttcttgttaatttccggcaaaaaacacttttatgaaaagtatttattgtgtatatataagtagggcatgtagttgacgtcataatagatgactatttcttcttataaactttatatttagataaatattttttattgcaagttctaatatttgaaactatacataacttgttaaggtggagcatttggctagttcaatacttaaatagcttagtgatgaataatgatattgcaatgatcatgtatttgagattcttatgtaagaaaatgcacatatattatttccaaacttcaagaagtgaattattgttgttacaggagttggggaatactgtctttaacaatagcatattgctggcaactatacacactttggattctggatcattttcactaagctgtccccggaaaacgctacattctatatgtcgagcttgcacaagctgcttctggcaaaatgatgactttaattttacattaagaatgatgaaacaatgcatcattcgtgacaatcattattgagactaattctgtgtcttgctaaagtgctattactaaatcttgtattctcgattgtaacaggaaaaatggtaagagtagtgctttcatagtttcctacggcttacttatcagcaggaaccgcgacagcgctgattctgatcggtggagagacaatgaaactcttcttccagatagtttgcggtccattatgcacctcgaatccgttaacaacagttgaatggtatttggtgtttacatctctctgcatcgttctgtctcagctaccaaacctcaattctattgcgggactctccttaataggagcagtgactgcaataacttactccacaatggtttgggttctctctgtgagccaaccaagaccagccactatctcatacgagcctctttctatgccttcgacttctggttcactcttcgctgttttgaatgctcttggcattatagcttttgccttcagaggtcacaacttggttttggaaattcaggtaaaatatgcaaaatatttctgtctatagataatgcacatattggacttatgatttattctgagtattgaaaactttgtagtcgacgatgccatcaacgtttaagcatcctgctcacgtaccaatgtggagaggagccaaaatctcttacttcctcattgctctgtgtatctttccaatctccatcggaggcttttgggcttatgggaaccttgtaagttccatttactatatcttttgtttatgtcttgtcagtgaaggatgtttatctggtgtttggttcatgttagtgaaatatagaattcaaaaggaacactaatatcatttatttatagttcattttctgatctttggttcaatttccggattagtttgaagttattttttcttggtcttatagatgccttcaggaggtatgcttgctgctttgtatgcattccacattcacgatatcccgagaggcttattagcgacggcatttctcctagtagtcttcagctgcttgagcagttttcagatatactccatgcctgcctttgacagctttgaagctggctacacaagcagaaccaacaagccgtgttcgatttgggtcagatcaggtttccgagtcttttttggttttgtctcgtttttcatcggtgttgctctcccttttctgtctagtcttgcggggttgctcggtggactcactctcccggtcacatttgcttatccttgcttcatgtgggtccttg

SEQ ID NO: 142973 - DNA, 4770 bp, Arabidopsis thaliana landsberg
gaattcttccttgtagctatactccctgtggattcgatcctcaaatactactccaatatactgtgcacttgcagtagtcgtgtggtctttcaggtaaaagcctgaggcaaaataaaacacgcatcaattcacatagaagaattccgagtcattctctgaagcatgggaacactttaagggctatactactcaatgccctcacaatggtttcaagaaagcttcacttcttagtactctatacagaggagcattgcccaagataaggatgcttttggatactgcttctaatgacaactttcttaacaaggatgtagctgaacgttgggaaattgttgaaaacctagctcaatttgatgggaattacaatgaagactatgattgctctaataggggaggcagcgattctgaagaaaagcacaagagggagatcaaagctctgaatgataagattgacaagttggtgcttgctcagaagagaattgttcacttcatttcagaggaacagcatacccaaatccgcgatggggagaatctgactattgaggaggtcaaatacctacagaatcaaggtggctacaacaaaggttttaacaactacgagccccctgatcctaatctctcttatagaagcaacaatgtggcaaacccacaagatcaagtctaccccccacagaaccaaccgcctcaagctaagccctttataccctataaccaaggctacaaccaaaagcagaactttggacctccaggcttcacccagcagccacagcaaacttctgcacaagactcagaaatgaagactctacttcatcagcttttgcaaggacaggcctcatgctccatgacaatggataagaagctagctgagctcaccaccaggattgattgctcttataacaacctgaatataaagatagatgcacttaacactagagtcaagaccatggagggacacattgcttctacttcagctcctaaacaccccggacaacttcctggaaaatctgttcaaaatccaaaggagtatgcccatgctatcaccacagtgagtacttctgccactgaggacagtgggattcaagaaggggaggttttgagaccaaaatcaagacaggagattgaactcgacttctttgctcgacttgtcgaacgagcatatgacccgagcaacccaatccctattccacctgcatatgaacctaaaccatactttccagaaaggattgcacaagttaatgcaaggatcttccagaaacacaagatgatgttcataaagtgtatcaaagagttagaagagaagatacctttggttgatactcccaaggaagtaatcatggaaagaccccaagaagttcagcatatagttgaattgagttttgagtgcagtgccatcattcaaaggaaggtgataccaaagaagctaagtgatccaggttcctttactctaccttgttcactaggacccttagtgttcaacaatagtctttgtgatttgggagcttcggttagtttgatgcctttgtctgttgcaaagagattgggatttgataagttcaagcctagcagcattcatcttattctagctgatagatcagtgagagtgcctcatgggatgctagaagacttaccggtaaagatcggatcggttgaaattccaaccgactttgtggttctagagatggatgaggaaccgaaagaccctctcattcttgggagaccatttttagcaactgcaggcgctctaatcgatgtgcaaatgggtaagatagatttgaaccttggtaagaatcactatataagctttgacatttcaaagaaaatgaagaagcccaccatagaaggacagcttttcttcattgaaaaaggaaatttagatgatgagttgttgagtgggttggaaaactccattctaacttaccacctaagagagcctaagcaaccgaagaagccttctatgatgaaaagaggacctagctcaggggtagggattaaggggaacccattggatgttgattctattgctagagaacttaaggagctcaggaaggagtatgaagttcaagaggaacccatagaaaagttggacctcaagatgaaagaattaaactatactatcttagagcttaaagaaatgattaagggttatccaagtcctgaagttgaggaatggtttgaggaacctgatttgggagaaggagactacgctactgatgagatgaggcttactttgaggaaagatccaatgaatatttttctctccagctatctagagaaaatgcagagtatgattcagactttgaggattcagcaagtgaagatgaggacttctcagttcctctcttcaatctcttctctacctaaacattgtgagagtcaagcttagtgacattgggaggaagtcccatgtctatccttgtatatattgctttcttgttatttttgatgtttttgtttaagtgtttcagggaaaaagacttctagagaatttcaggccacactcgaccgtgctactcggctacaggccgagtgtgggcttcaattgaccaaaggcccaagattgaatagtactcggcccacaccactcggcccgaagccgagtcagaaaaagaagcccatcaggcccaacactgtactcgacacgcgcgtcgagtatgtcggccgagttcacacgtgcgaggtcaacacaattcaaattcgaatttgaattcgaatttgctgggccccaccaatcaaattctgctccccaaagcccttcaaagattctgctgcaaatagtgagacatgtccccttgaccaaatgaagggtgaggatctaaggtgtttggagggctaggatcaaatcttcttgtctataaaaccacactcaacaagctaagtcactcacactctctttttgctcaaaaatttcgaattttactccttctctccaaacattttaagttcttactctcacttctctagatttctcagaaactttgccaaaatctcttgttacaaaccttttcaaagcctctcttacactctttgttcatttttaaacatcaatttctcttctactttgacctacctttggttattttgtggtgactatctgcagtaaatcacctcaagatcatgaatcccgaagaatcaagaaggagagcctctgctcgagcagtggcaagagggtttgagatgattaatgagaagaatcagtcaaggaatcagaaagctgcgagtcctggttttactcggatgacaggccgagtacaatggccgagtatggccccggagtcctctgagggtcgttctgcggctgctcaagaggaaatagcaagaggcaagagggtctgggagtccgagccagttgcagaagaagaagtgcctgagatagagaaggaagcatctgaggaagatgtgcaagttgatgaagaggtcccgatagttcctacaagtagaagaaggaacaccatgaggagaaagaaagaacctaccatagaagagcactaccaatatctcatggagctgagttttgaggggacaagatatccccatagacctaccatgcaagctttggggatatgtagagatgttgactacctcatggagatggccaagctggagaccttcttctcctaccagtatgaaggatacaaaactgagagctgccaattcctagccactttgaagctccatttctatgctgaagaaagggagagagagctgcataagggagttggttacatcactttcatggtgtttggaattcaatactcggttcccattaggcagttggatgctattttcaagttccccaccaagtatggaatccgccaaaacttcagcaaggacgagctccttgatctatggttgacaatcgccggtccactcccctacaagtcatctagggccaagagttcgttgataaggagcccggtgcttaggtatctccacctttgcattgcaagtgccttcttcccgaagaagacaaccggccatgttaatgagggagagctgaagttgcttgatctcaccttatgcttcattttggggcacacgaggaatgggatagagatggaaggggatagggctgatacatccctttcggtggtgttgattgatcacttgattggttttagggagtatgcagccggaatccaccaatccggctatggaggaagcttatgtgctagaggagtgatcacgcccatcctaatagccgctggagttcctcttcatacccccactcacacagcaacctacatcgatatggagtatttgaagaggaagtgctacttggataggtctgctccagcggatcaactctacttcaagttcaagcactccacgctaggtctctctaggctagcactcccttgcaagaagttcaccaccattaggattgggaacaacattgactttgatcctcctcaatcgatcttagtcaatgtccttgcgcctctacaagcagagccgagcataggaagtgagtctcaagaagaaggagcagagtggaatgaagaagaagctgagcaggaagcttatactcggccgagtaactttcagcaggccgagtatggccaggacgagtttgagcaagctgagtttagtcaagctgaacagtttgatgaacaagaagattcgtgcgaagctgcagcggagcagtttttctttgaggattatgctgagtccgatccagagagagatcccggtcaagttcacaagaagttgggaatgctcaaaggtctgggcaagtttcagaggaagttgttcagtgggttgaagaagaag

SEQ ID NO: 142974 - DNA, 1167 bp, Arabidopsis thaliana landsberg
  unsure (1)..(1167): unsure at all n locations
aaaataaataatattccgtggcgcctgcggcagagatcaatgacgataccggatctctgtaacgatttggtcgatgagatactctgtcgcgttccggcgaggaatctgaaacggttacgatctaccagcaaacgatggaaccgtttattcaaagatgataggagattcgcaagagagcacatgcataaagccccaaaggagtatctacctctcatgttgacaagcgagtacaggatctgtccggtgagcatcaatctccaaggagatgttccttctgtagtgttaaagagagagcttagcctaccagatccggattattcacatcaattcgatataggtcgagtctttcactgcgacggcttattggtatgcaaccacgtaggcaagaatccccgatacggatctaaaatcgtggtttggaacccgctgactggtcaaaccaggtggatcgaagccggctatcgttggaaggaatacgaagtcagatttgttctcggatactgctaccagcaagacgagaacaattcctgcagtaaaaaaatctacaaaattttgtgtttttatcctaatggccaagatacagaaatctacgagcttaactactctgataggtggacaaggacgattcctgatggtgatctcactccagggtgggccttgatatactcagagcagaccgtgtctatgaatggaaatctttacttgtttgcttcggagaaatcaaaaccccatcttggcgtgtccttgctcagatttgatttctcaacagagaaatcatctctatgtgtgactcttccctatcagcgtccaaggtatgaaattttgagtatttccgccgttagaggaggagagaatctttctctgttgttgcagctcgattttgaatctaagactgagatatgggtgacgaannnnnnnnnnnnnnnnnncaccaaaggagcagcagtctcttggaccaaggtcctagcatttgatttaagccctgatcttcaattattttcggaggaggtaaattttttgcttgacgaggataagaaagtcgctgtgtgttgtgagagatggttggaaccgcaagagcccccccggtaccagtgcaggagagagtacaaaatcaaaaacaagatatacattctcggggaggataataaagtcgatgaagtgggtttt

SEQ ID NO: 142975 - DNA, 2545 bp, Arabidopsis thaliana landsberg
gctaggcggcaatgggttagagaagaagacttggcaaaagatttgcagttgcacgccaagcaacttcgaaaaataataagactctttgaagaagaaaagttgattatgcgtgaccaccggaaagaggtcggtgcagatactatgctctttcagattgttgtatagcagttattgcgcaatatccctcttgctaagctttcaactcaaccactcttttagtctaatgataaatagcatactgtcataaaatatctagagtatgacaatgattgaagaacatgagtgtgagagaatgatatattttccaggttttgcgttcattggttgatgctcattcattcctctaagtttcttttttcctttgtgaaccttgtggttgcaatttttcaccacatgttctacattttttggttcaagtgtttgcttatctctaatcctttaccaattaccacttctttactttgttgctttattgatttctcaaatcttttcaatagactgcaaagggtgcaaagatgtatagtgctgcagtggctgctacaactgatggccgagcagaggacaaagttaagcttcacacccactcgtattgctgtctcgattatgcacaggcacgcttcatgtccctacttttttttcttcagtttgcgtttttttgccttttttttctatcaaactaccttatactttgttaaacttgcagttcttcttttttacagatatgtgacgttgttcgttttagactgcatcggatgaaaaaaaggctcaaagatgagctagaagataagaatactgttcaggagtatggctgtcctaactgcaaaagaaagtaaagtccactattctttatgtttttaaatctttacatggtgagttgtattattttcactaaacctgtatagattctcatttctggtatagatataatgcactggatgccctgcgattaatttctatggaagacgattcttttcattgtgaaaattgcaatggtgaacttgttatggaatgtaacaagctaatttccgaagaagtagtagatagaggtgacaatgcaaggagacggcagcgggagaaagtaaaagtttggcttcaggatttggaggtctgtgtttactgttttaacggctatttcaatgaaagtatgagaaaaacacaaattgatttgccttcactgaagcttgtgcatcgttccaaattcatgatgaaatcagaacgatatatgattaagtttcctaggagattcgttcttaaatatccaatgcttgagatttgcaataccaaaaaaagactgtggttgtagtgtgtgcgttgacacaattggaaataaaatgtagggtgaattgaaacccctgatggaactaataaatagagtaaaagacctaccgttccctgcctttgaaccttttccggcatgggaagctcgtgcagctaaggctgctcgtgaaaatggtgattttaaccctgatgatccttcaaggtctttgggcggatatggttcaacaccaatgccatttctgggagagacaaaggtgatctttcgttacagttctcaatgtatataatattacaatgttattatggaagataagttttccatgtatttttcccttagttgatttctttgatctttacatggttaggttgaggttaaccttggtgaaggaaatgaagatgtcacatctacaggtggagattctagtctgaaaatgttgcctccatggatgatcaagcaaggcatgaagctgaccgaggaacaaagaggagagatgagacaggaagcaaatgttgatggagaagcagcaaaactttcagatgacaagaaatcagtcatggaaaatggcgatgataataaagatttgaaggcatgcttttggagaaaaattatttgagtttagttagattcccacaatagcatcttgtggattgtgtttccagaatgttgatacatcttatttccattttgcttcaggatgagtatctcaaagcttactacgccgctataatggagcagcaaaagcttgctgcaaagctgaatcagcaagaatccgcaggcgaatcaacaaccactgacattgaatcggctactacatcctcagatcgtcaagttggtatgaagtcgaaacgtgaagatgaagaagaagatgaagatgttgattgggcagaagaagcttctgttgcaggtcagttttagtttattactacttcatttccagtttgttaactagttgatcatattaaacaagacattagttagttagagggaaacttgtttaggttttttcaaagtagaaaaccggaatagagcgttttatttataaagcagggcgtgaacaagatatatgttaagacagctggtagttaaactataatagtgggccagtttaggtctcatgataatgtgatgctcatcttggttacttttcatgtgacttaatttgcagcaaatggaaactacaaggtggatttgaatgtggaagcagaagagacagaagaaaaagaagatggagacgaagatgacgacatcgactgggaagaaggctga

SEQ ID NO: 142976 - DNA, 3698 bp, Arabidopsis thaliana landsberg
  unsure (1)..(3698): unsure at all n locations
attttgtatcatccagtttataacgagactatgtcaatgggaggagggtcaaaccacgagtttggccagtggcttgaccagcaactcgttccgttagctacgagtagtggctctttgatggttgaattgttacatggtaacttagacatttgggttaaggaagctaaacatcttcctaacatgatatgttaccgtaacaagcttgttggtgggatttcgttttctgagttaggtcggaggattcgtaaagtggatggtgagaagtcttctaagttcacaagtgatccttatgttactgtctctatctctggtgctgtcattggtagaacttttgttattagcaatagtgagaatcctgtgtggatgcagcatttcgatgtacccgttgctcatagtgctgctgaagtacattttgttgtgaaagacaatgatcctattggatcaaagatcataggagttgttggaataccaaccaagcagttgtgttccgggaatagaatcgaagggctgtttccgatacttaacagtagtgggaagccttgtagaaaaggtgctatgttgagtctgtctattcagtatactccaatggaaagaatgagactttaccaaaagggtgttggttctggtgttgagtgtgtaggagttcccggtacatacttccctttgaggaaaggcggtagggttactctttatcaggatgctcatgtcgatgacggtactcttccgagtgtacatcttgatggtgagattcagtatagacatggaaaatgctgggaggatatggctgatgcgatacgacgggcaaggaggttgatttatatcacaggttggtcagttttccatccggttaggctggttcgtggtaacaatgatccgacccaaggtacgttagtagagttgcttaaagtcaaatctcaagaaggtgttagagtgttggttttggtgtgggatgatccaacttcaaggagtcttttgggattcagtacagtatgaatctacataactctgtttttttctgattaagacattctattattgtttacccataaaatcaaacatatatatatatataattttatggagtgcctctctgttttgtttctccattttgatttatagcttatcacttaaataattctatggagtgcctctctgtttgtacacaattttgaatggtctaatatttggttgttcttaacttctcacatagtcacatattttgttgtttcagttgcatttcatactttcgtatatttgttcagatctgaccctttttctgtctatcttgttggaaagcatgagtttgcttcagttagatcgttttacatgtctgtactaactgaagcaatgatccttctatcgttttaatgaaagcttttattttgttgtagcaaggagttatgaacacaagcgatgaggagactcgccgttttttcaagcattcgtcggtgcaagttctcctttgtcccagatctggggggaaaggtcacagcttcataaaaaaatctgtaagatgctcattagttactgcttactgcttaaactcccgtgtgtatagtttcatcatctgaaatttgagtgtcattatgatgatcaggaagttggaacaatctacacgcatcatcaaaaaactgtgattgtagacgctgaagcagctcagaaccgaagaaagatcgtagcatttgttggagggctagatttgnnnnnnnnnnnnnnnnnnnnnnnnnngcatcctctcttcaggacattaaagacactccataaagatgacttccataacccaaattttgtggtaaccatttaagaaaaatcctccttggttgcagttttggaattagaatccgctattcttgatccatgtaaaatctgtttttcttattagactactgcggatgatggaccaagagaaccttggcatgacttgcacagtaagattgatggcccggctgcatatgatgttctgaccaacttcgaagagagatggttgaaggctgcaaagcctagcgggatcaagaagtttaagacttcctatgacgatgcgttgttaaggattgataggattccagatatattaggagtttctgatactcctactgttagtgagaacgatcctgaggcttggcatgttcaggtatgaacatcaaaactgttactgaatgaccggagaggttgagtattttatgaagccatgatttatcaggtgcaagctaagctgatgtttttctggtttgatacagattttccgttcaatcgattcaaactctgtgaaaggtttcccaaaggatccaaaagatgctacatgcaaggtgacaaaaaatgaaaggaatctttagctatcattatgtttgggtgtctaaaacatgtcagaaaactaatccacgaaaggtttttgttttggatagaacttggtgtgtgggaagaacgtgctgattgatatgagcatacacacagcgtatgtcaaagccattcgtgcagcccaacacttcatctatattgagaatcagtatttcattgggtcttcatacaactggaatgcgcataaggacataggtttggtcatatgtctctgcttgttaatttcaagaatttaagaaacttaagtttgttcctatagttaaacttaaggatgaagacatcaggagtttttttctatatatcttgaactgtgtcacatgttatgacatctatgaaattattcttgaccacgacctcctacttcttcactttatgctagctttaggatgtcagtctccgatttttttatttggcattcgatgcgagttgctttggctcttaacattgctataaaacgttggtgtgtaggtgcgaataatttgattcctatggaaattgcgttgaagatagctgaaaagatcagggcgaatgaacggtttgctgcttatattgtcattccaatgtggccggaaggtgttccaaccggcgctgctacccagaggattctttattggcaggtatgtctgagttaaaacttatgggttgttgtcttagccaaaatcttccttccgtttctcaaatcaaaatcacaaaactaaagtagagactagtagagataatattgatttcaatgttcatagatcaccaatatggttgaacgattttttggaagtaagatatatgcatgtaagattcatgtttcttacatgagttctgtctgggtatatggagattatgaaactgatagtcagtgttatcatcgttgcagcacaagacaatgcagatgatgtatgagacaatctacaaggcgttagtggagacagggcttgaaggagcattctccccacaagattatctcaatttcttctgtcttgggaacagagaaatggtggatggaatagataactcaggaaccgggagtccaagcaatgcaaacactcctcaggtaactaaacgccgagaatgcctgctgcttaaatttctcatgtttttgaaacgaggagtcccggtggtgttgcaggcgttgagtcggaaaagcagaagatttatggtctatgttcactcgaaagggatggtagttgatgatgaatacgtagtaattggatctgcaaacataaaccaacgatcaatggaaggcacaagagatacagagattgcaatgggaagacttaccagcaacaacatacatgggcaaggaaacattctggtcctcgtggtcaggtaaatcccgcaaaccatgcaaa

SEQ ID NO: 142977 - DNA, 1845 bp, Arabidopsis thaliana landsberg
agatggtcgaccacttccacgagcgtcattacgagtaagtcaaatattagtatctcgatctatatatgcattgtttttgaatcctaccgatttgtctcgttgaaattaaccaggcttgattgtaatcattagatagattagtttattctgatttcattcaaattaaaatacaaatatttattagtagaagttttttttgggttgtaaaaaggatgttggatttatgatggttttggtttggtgtatatcttcagcaactcgactgacgtcgaggggaccgaggaagagaaggcggtcgctttcgaggaagaggacgtcattgagatgatttctagtccgacaaacagcacaaggcggagcctaaccggtaggggcaagggaaaaggaaaaggaaaatggagcaagctaacgggaccttgcaccgcaagcaacccctatcgataaatgctggcgttgcacgctgattgggccagacgtcgcaagaagctcgttcactgtgtccgtgggtttggttacaggaccaccgaaggcaaacgcggccgcatctatgtagtcacgagccccagagacgatgatatggtgaaccctagacctggaacactacgtcacgctgtgatccagaaagaacctctatggatcgtttttaagcacgatatgagcattcggttaagccaagagctgatgattactagtgacaagacaatcgatgctcgtggcgctaacgtgcacatcgcatatggtgctggtatcacgatgcagtacgtgcacaatatcatcatccatgggcttcacgtccaccacatcgtgaaaagcagtggtggtttgataagagattcgattaaccactttgggcatagaggagaggctgatggagatggtatctctatctttggggcaacaaacatttggcttgaccacatttctatgtctaaatgccaagatggacttatcgacgctataatgggttccaccgcaatcaccatctctaactctcatttcacccaccacaacgatgtgagccttccacaacgtaattaactcgaccgttatactattaatgacaacccaagttaaccaaaggaacttgttatgtttttgggttctgtctttaggtgatgttgcttggtgcacaaaacaacaacatggatgacaagaagatgcaagtcacagtggcttacaaccatttcggaaaaggacttgtgcagaggatgcctagggtccgatggggtttcgtccacgttgtcaacaatgactacactcattgggagctttacgcgatcggtggtagccaaggtcctaccattctcagccatggaaaccgtttcatcgctcctcctcacaaacaacactacagagaggtacaaaatgatttgagtgtgcacatatatatatggcatcaaatcaaagtactaatagaaaacatgtgtatatataggtgacaaagagggattatgcttcagaaagcgaatggaaaaactggaactggagatccgagaaagatgttttcatgaacaatgcatatttcagacaatctggaaatcctcatttcaagtgttcgcattctaggcaacagatgataaagcccaaaaatggtatggccgtttctaagcttaccaaatacgccggagcattggattgccgggtcggaaaagcatgctaaaaatataactcactactaaattttttctctttgtatctaggcctatataagaactgataaaatcatggggtaaaaatggaaattaattattctaatttatgaaaggctctgtgtaaagaatctatgcgaacggcttgatactttgtaactcttaatttgtttgtgtatgtttttttgtgctcgtt

SEQ ID NO: 142978 - DNA, 2300 bp, Arabidopsis thaliana landsberg
gttttatctaaagtttcaatgacccagatttggtacagcccatacatgaccagtaacaaaccgagctaggcccggcttacctttctcctactcaatttaattgtttttcagtatattggtgaaatcccttgctcgattcaagtactttttatattgatgaaaaatagttgatgtttataagtttattagtggtataagtagaatgaagaaaatttcattaacccttttataggagaatcttcgagtaatggatattgcttatatgaaaacttcttaagttctaattgatacaagcaacttttattggttacgttatttttacttttgcaatgtgcatttgcgcttagtattttgtctcttgaatttcgctgatctcgaaatcagccaagatttcataaaagtgttacacaaaagtttatggtcataattaaggattttgacttgaatattagtgttccgttgtggttaaacagagtccaaatggtgatgtgattgactgtgttccaatctcaaagcaaccagcttttgatcatccgttcctcaaagatcacaagattcaggtctagagaataaaaacataactgatttagatctggctttgtgttttatgttgtaagtgctgatgtttttatatatactttgtttttttttagatgaagcctaattaccaccctgaaggactctttgatgacaacaaagtgtctgctcctaaatcaaatgagaaagaagggcatattcctcagttgtggcatcgatatggtaaatgttctgaaggaactattcccatgaggaggacaaaggaagatgatgtgttgagagcaagttcagttaaaagatatggcttgaagaagcataggtctgttcctattcctaaatctgcggaacccgacctcatcaaccaaaatggtcatcaggtgagggatatcaagaaatgcttcattttttaattacttttgtagttgctttgttaagtatgagtcattttgatctaagctttggtttcttgaactcttcaatgagattagcacgccatagcttatgtggaaggagataagtactacggagctaaggcgactttgaatgtgtgggagccaaagatacagaacacaaacgaatttagcttgtcgcagatatggcttttggggggttcctttggacaagatcttaacagtattgaagctggctggcaggtaagacattttcatcatttggagatgtaaagatgacttgtgcaatttattgtgtgttttgattgtgtggtgcttacaacaggtgagtccggatctatatggagacaataacacaagactcttcacttactggactgtaagattttaaaactccctttgaattgaatatttgtggtgtatgtgtaatatagcatgatgttcttacgttgctcaatctttcttcttccagagtgatgcctatcaagctaccggttgctacaatcttctttgctcaggtttcattcaaatcaacagtgacatagcaatgggagcaagcatctcaccagtctctggataccgcaattcccagtatgatatcagtattctaatctggaaggtacttgtgtcagaactgaaatcttttgtttctctaaagaaaaactgaaaccttgaggctgaatgtgttatgttgaacatgtcataggatccaaaggagggacattggtggatgcaatttgggaatgggtatgttttggggtactggccatcatttctgttctcctacctaacagaaagtgcatcgatgatcgaatggggaggagaagttgtgaactcacagtcagaaggccaccacacttggacacagatgggaagtggtcactttccagaagaaggtttcagtaaagcaagttactttcggaacattcaagtcgtagatggatccaacaacctcaaagcaccaaaaggacttggtacattcaccgagaagtccaactgttatgatgttcaaacgggaagcaatgatgactggggacattacttctactacggtggtcccggtaagaacaagaactgcccataaacccgggcatgtgtagtgtttactcagcttgtatctctctttcagtcttgtgaatttcctccttcttgggtagtattaggctgtagtaagaaagtgaagtagtgatatgtatgtgtaagctctctcagtgatgggaagttttgtaggtttgtgtggttttaacttaatgataaggtgtttgtttgtagtagtagtctccatgtaactagatgggggaaaagtaggtgtgactttaagtttctttaaagctcaaagaaactttagccctt

SEQ ID NO: 142979 - DNA, 1509 bp, Arabidopsis thaliana landsberg
  unsure (1)..(1509): unsure at all n locations
gaagactatttacacaataatagcttaccatgttgcataatacacacactcatttctaacatcaaaatcgttttctgtattctttatgtggttccctcttaacactcattttcaggcgagaaaannnnnnnnnnnnnnnnnnnnnnnnnnnnnnnnnnnagagagcgttgaaggagcagaggtgacagtagagcagatctctaaagacttccccattggatctgccatctccaaaactatccttggaaacattccttaccaagtaaaacacactcgctaaagtctacactaaaacaacaatgtctttgcttctttaaacggattctgttttgataggaatggttcgtcaagagattcgacgccacggtattcgagaacgagctgaaatggtacgcgacggagcccgatcaaggcaaactcaactacacattggctgataagatgatgaatttcgtcagagctaacagaatcatcgctcgcggtcacaacatattctgggaggatcccaaatacaatcccgattgggttcgtaatctaaccggcgaagatctccggtcggcggttaaccggcgaatcaagagtctaatgactcggtacagaggagagttcgtgcattgggacgtgagcaacgagatgcttcacttcgacttctacgagagcagactggggaagaacgtcgtacgggttctcgccgcggctcgtgagattgactcattggcgactctgttcttcaatgatttcaacgtggtggagacttgcagcgacgagaagtcaacggttgacgaatacatcgcgagggtgagggaactccaacggtacgacggcataaggatggacggaatcggtctcgagggtcacttcacgacgccaaacgtagcgctgatgagagccatcctcgataaactcgctacgctccagctcccaatctggctcaccgagattgatatcagcagcagcctcgaccaccgctctcaggttcacaagtctctgtgttccggtttagttcagtttgcaatttgaatctggttttggttacaatttttagccggtttattaacggtttttcgaattgattttggctgaaatacggtatgtctgttaggatgataaaatctggttggagtacacattgattatacttgggtgcaagtaaccggaaatttgttacgttttcaggcgatttatttggagcaagtgttacgtgaaggattctcgcacccatcggtaaacggtataatgctatggaccgcacttcacccaaacggctgttaccaaatgtgcctcactgacgataaattccggaaccttccagccggagacgtggtggatcagaagcttctagaatggaagactggtgaagttaaggcgacgacagatgaccatggttcctttagcttcttcggctttttgggagagtatagagttggcatcatgtaccaaggtaagacggttaattcgtctttctcgttatctcaaggccctgagaccaaacatgtgaggcttcaaatc

SEQ ID NO: 142980 - DNA, 1493 bp, Arabidopsis thaliana landsberg
gaggcaaaggaggcagcctctgctccagaggccgtccccgccgaggaggaggagaagaagaaagatgtagcggaggagaagaaagtggcggctgaggaggagaaaccaaaggaggaggaggaggagccgcaaccaccaccaccacctccacccttcatactctacgtcgacttgcattgtgttggatgcgctaagaagattgaaagatctattctaaaaattagaggtaaaagaatatataaatggatagaggattagattctgctaagaataattgttcaacacttttaattaacaaaacaaaattctcttttaaaaatataaaaaccaatagcttcattctcacaatcccaactacctaatattaatttataaagttcaaaagggaaataaataatttaattaaaaaatgtctaggtgtagaagaagtggtgatggatatgaatgagaaccaagtgacgataaagggagtgttggatccacaagcagtgtgcaacaaaatcaagaagaagactaaaagaatggccaaagtcctctcgccgcttccggcagctgagggagagcctctgccaccgatcataacctctcaggtctccggcggcctcaccaccgtcgagctcagcgttaacatgcactgccaagcttgtgctgaccagctcaagaagaagattctcaaaatgagaggtacatgcatacatacatttgtggatctagtcaaaaccaaaatactctttttcaatgtaaataattttaagaatggttaaaagtttttggttatattgaatatggtattttgttttataatttgttgttctgcatgtatcgcaataatcgttaaataaaaataataatatatatttcccaccgtttttaattaaacatacgcatccatattaaaataatatatcatttggtatagatgtcacctaaaaattcattatatatcatgtcaaaaagaagaagttactatatatctcgttatgcattacgtcacatgcatgtttaagctaaatttgttgatgacaatgagattttgcgaagtttctatttttttttagtggtaattaatattgagcttaaaggactaactaatattgttggttaggggtccaaacaactgtgacagagcacaccacgggaaaagtaatagtgactgggacaatggacgctgagaagcttgtggattacgtctaccgtcggaccaaaaagcaagcccgaatcgtaccccaacctgaaccggaacctgaagcccccgcggccgcggaggaagaaaagaaggaggagagcggtgaaggcaatgaaaaaccaccagagaccggagaggaaaaggaagaagagaagaagaaggagggagaggaaaatggagaggaaggtggcggagaagaggcggcggctacggaggaagagagacgagacaatgaaatgacggctatggcacaagaaaaagggatgaagaggatgatgtattactatcaaccttcatacgtcataga

SEQ ID NO: 142981 - DNA, 3182 bp, Arabidopsis thaliana landsberg
atggtgtggtttcgtgctggttccagtgttacaaagctagctgttagaaggattttgaatcagggtgcttcgtatgcgacgaggacacggtctattccgtctcaaactcgttcctttcactcgactatatgcagaccaaaggctcagagtgctccagttcctagagctgttcctctttctaagctaactgatagtttcttagatgggacgagcagtgtctaccttgaggagttacaaagggcttgggaagctgatcctaacagtgtagatgagtcttgggataatttctttaggaactttgttggtcaggctgccacgtctcctggcatctctgggcagacaattcaggagagtatgaggctgttgttacttgttagggcttatcaggtgaatggtcacatgaaagcgaagttggatccgttaggtttggaacagcgagagatccctgaggatcttgacttggctctttatggattcactgaggctgaccttgacagagagttcttcttgggggtgtggcagatgtcaggattcatgtctgagaaccgaccagtgcagacccttcgttccatattgacaaggctcgaacaggcatactgtgggaatatcggatttgagtatatgcacattgcagatcgagataaatgtaactggttgagagaaaagattgagacaccaactccttggcggtacaacagggagcgccgtgaggtgattctcgatcggcttgcatggagtactcagttcgagaatttcttagctaccaagtggacaacagccaaaagatttggacttgagggaggagaatcattaattcctggaatgaaggagatgtttgacagagcagcagaccttggagtagagagtattgttattggaatgtctcacagaggaagattgaatgttctgggtaatgttgttcggaagccactccgtcagatatttagtgagttcagtggtggtattaggcctgtagatgaagttggctacactggaactggtgatgtcaaatatcacttgggaacctcttatgatcgacctacaagaggtgggaagaaaatccatctctctttggttgctaatccaagtcacttggaagctgcagattctgttgttgtggcaaaaccagagcaaaacagtactactccaatgatttagacaggaccaaaaatttaggtattttgattcacggagatggtagttttgctggacaaggggtagtctatgaaactctccatcttagtgctcttccaaactacaccaccggaggaaccatacatattgtggtgaacaaccaagtggctgtcacgacagatccaagggcggggagatcttcccagtattgtactgatgttgcaaaggctttgagtgctcccatctttcatgttaatggggatgatgttgaggctgttgttcatgcctgcgagcttgctgctgagtggcgtcagacttttcattctgatgttgtcgttgatttggtttgctaccgtaggttcgggcataatgagatagatgaaccatctttcactcagccaaaaatgtacaaggtttgtgactttattttcttaatatgttaacccaaaaagcatctactatggatttatgacttgttgaagttttctaatgtttttgttttgaactcccttgtcgcttttcaatttgacaggttatcaaaaatcatccttcaacccttcagatctaccacaaaaagctcttggaatgcggtgaagtatcacaacaggatattgaccggatacaggaaaaggttaacaccatcctcaatgaagaatttgtcgctagtaaggactatctccctaagaaacgagattggctttcaaccaattgggctggatttaagtctcctgagcagatctcacgtgttagaaacactgggtgagttggtttgtctttctttctttattttttttctctgtcctattgtctgttaaactttacacttttcttcagcgtcaaaccagagatactgaagactgttggcaaggcaatttcatctcttccagaaaacttcaagccacacagggcagtgaagaaagtttatgaacaacgtgcccaaatgattgaatcaggagagggagttgactgggcccttgcagaagctcttgcttttgctaccttagttgtggaaggcaatcatgtccgattgagtggtcaggatgtcgaacgaggaacatttagtcatcgtcattctgtccttcatgaccaggaaactggagaagagtattgtcctctagatcatctcatcatgaatcaggatcctgagatgtttactgttagcaacaggtacttttacctccatccttcccctctaggaattattgtgctcctagcttgttttcacagctcagagtaaactgacatagagatcgactctctattgctcacctatattctttttcatttctccaaaacgcgatcttacattttgagagaaatcccgcgagtttgttacttgcataccagaattctcattgtaaagattccctactaagctttgcttgttgtgtacagttctctttcagaatttggtgtccttgggttcgaattgggttactccatggaaagcccgaactcgttggtactatgggaagctcagtttggagacttcgccaatggagctcaggtgatatttgatcagttcatcagcagtggagaagccaaatggctgcgtcaaaccgggcttgttatgctacttccccatggttatgatggtcagggacctgaacattcaagtgcgaggttggaacgttaccttcaggtaaattcttcctagatcttatgggttatggtgttgaattagtgaaaatatttaatcgcattttgattctcttcctgactataattatcttctgttatagatgagtgatgataatccctatgtcataccagacatggaaccaacaatgcgaaagcaaattcaagaatgtaattggcagattgtcaatgccacaactcccgccaactatttccatgttctgcggcgacaggtaagacctatttctgattatcttttttaccggtcaccaggtgttgtttccagcttacaatttcttaatgtcactcatgttgcagatacacagagacttccgtaagcctctgatagtaatggcaccaaagaacttgctccgtcacaaggactgcaaatcaaatctctcagagtttgc

SEQ ID NO: 142982 - DNA, 2736 bp, Arabidopsis thaliana landsberg
atggttttgatgctatcaatttctaaagttacgaaaggtaataatgatcatgcgccggctccaatgtcagagaaagggttgctgccaaatccaatatcatgtgtagcggacgcaagaaaaattccagattgtgtagaggcaataaaacagggccatttgaaaattataaaaaaagaatgttgtatcattctactcagtcttcccgaagattgttttgggattttatttcctatacgtttctactatcgtatcatacttaagattacatgcaaattaattggcatcgtttaatcacaattttttttaatctagagatattttttcatgtaacggtattcatattatttcataataaaaccatttttctttcagtgatttgttaataattacctaaatgattatactataagtaagaaataatatgtgttggctatactaactaaaaattggactagtgattgtgaggcccttagtgagtagattaacgagaaaatgatattttcatgcatatacaatttacaaagcgtgttttcctacttttacaaacacatatgatcaattcatacccaaactacacaaaattcaagttatatatcattctaatttattagtcaaccattacggttgctcagtctgctaacatgtatctcatgatgttgcttaaaacgacatcgttttgtttgttagagctgaaattttataaactgtatttggttgactaacattcattaattatgattctaaattatgttctaaatgtgagtttgggtataaaattcaaatatttgtgtaatttcgatatgaattatcttaagtgtttgtacatataaaaaaaaaacacattttacaaattatacatgtaagaaaatacactttacaaattacacaggtatgaaaattatacacttaatatagaacaacaacaattttggggtgaaaatgtagactgtctaagtgcaaattggatcgcattttagcaaacgaaactaagtatatagaattgtagattccggtttagagacgaaaaaaaaaaaatccggtttataacatcgaccaaatagggttaagttaactgaacttttcagggtaaaaaaagtaaaataaaataaaattaaaccagtaccttcttagttatccagaaggttttgatttggttttccttaacatccttcgtcgccggaatttgacgactaatatcagacttcatcagcttacgtcgatctacgtacgacggctatgacgatgacgtcgatcatcagatccagtcctactctcgctttcatcgtcttacagatttgcttcatcttctttgcttacactttcccttgctcttctgggtaagtaaatcgttctctgtctttgatttctctgctaaatcatctcaattatctagtcgatgcaatttcctgcgaatttcttctgttgataatttgtctcaatttgatgatttagttgcttgccgagttcagtactttgattttttggagatccgagaatttatttctctttgtgtggtttattgtgcaggtctgaggatagttacaccattactggtagagtcaagattccaccaagtaggttttaacttttcccttcttctctctttgggatcttcccaaagattactttacctttacggttccaacaatcagttcctaatctaaaaagtgatgtgtagtctgttttgatgttttgaatgatgaaatttgactgcttcatgtttattctgaatgttaaactctgttgaactgatctacaagttatttcgtaggcaacgtgattggtcacatagcaaagttctcaaatgtcaaagttatactcaatggtggacagaagattacgtttctcaggcctgatggatactttactttgtatccttttgatccttctgttattaaagtttcttttgagtatattattactcacagtagctgatgattggtttcttacttgcctttgatatatgccaaaagaaatcatgttcagtattggcttgttataaatgttgctagaaatagatcaggagaactaaatacctttatggtttcatgaaaagaagagtagtggagatgattcttactttttgcggtccttgactaattggtttgtaaagtcatgaagtgcctgctgggactcatttgattgaagtatcagcaatgggttacttcttttctccggtaagtttttatgtgttgctattaatggtttccaaaactgcagttttgtaagaatgtgttgctcatgcaatgatggataaccaaattcttaggtacgagtagatgttagtgctcggcatcgtggcaaggttcaagcaacactaacagaaaccaggaggagtcttactgagctggttttggagccattgaaggaagagcaatattatgaggtgagacttcacatgactcttttcattatttgttttgcatgtgcttctacacatctgtttttttctttctttaatctgatttggtcatgtaaaatactacagattcgagagcctttcaacattatgtcgatcgtgaaaagtccaatgggtctcatggtgggattcatggtcgttgttgtgttcctaatgcccaaattaatggaaaacataggtacgcttctattaccctcgaaatgtaggagttcactatgagccaacagattcatcttccgtgttttacttgtaaccaactcgactatggatttgatggacatttgatgttacaataaaacatttcaccaatctaggag

SEQ ID NO: 142983 - DNA, 1826 bp, Arabidopsis thaliana landsberg
  unsure (1)..(1826): unsure at all n locations
gaacgaccactggtgatgttgatgtttgttgactttttttaattaacaatgttttggtttggttgtttggncttcttgcaatctgagtaatttcactagaccagaaatgttattattgtttcaggtggctattattgcacctaacatcccagcaatgtacgaagctcatttcggagtaccaatgtgtggagctgttctgaattgtgtcaacatccgtctcaatgccccaacagtcgcttttcttcttagtcactcgcagagctctgttataatggtggatcaggagttctttactctggctgaggattctttgagacttatggaggagaaagctggaagtagcttcaaacgcccgcttttaatcgtcattggtgatcacacctgtgctcctgagtcacttaaccgggctttgtcgaagggagctatagaatatgaggattttcttgcaaccggagatccaaattatccgtggcagccaccagctgatgagtggcagagcatcgctcttggttatacctcgggaacaactgctagtccgaaaggagtggtgcttcatcatcgaggtgcgtatataatggctttgagcaatcctctcatttgggggatgcaagatggtgctgtttacttgtggactctccctatgtttcattgcaacggttggtgtttcccttggtcccttgctgtgctctctggtacaagcatctgtctccgtcaggtagtacttgagagagttacttttcacttaagaaaagaagttcacataaatcagaagaagagctgattaaattttggtttcaggttacggcgaaggaagtgtattcaatgatagccaaatacaaggtaactcatttctgtgcagctcctgtggtcctcaacgctattgtcaatgctcctaaagaagacactatccttcctcttccccatacagtccatgtcatgacagcaggagctgctcctccaccttctgttctcttctccatgaaccagaagggcttccgagtcgctcacacctatgggctttccgagacttatggtccttccaccgtatgcgcttggaaacccgagtgggattccctccctcctgagacgcaggccaagctcaatgctcgccaaggtgtccgctatactggcatggagcagcttgatgtcattgacactcagaccggaaaacctgttcctgcagatggaaaaaccgcaggagaaattgttttccgagggaatatggtgatgaaaggctatctaaagaatccggaagcgaacaaagagacatttgctggtgggtggttccactcgggggatattgcagtgaaacacccagacaactatatcgagatcaaggacaggtcaaaggacgttataatctctgggggcgagaatatcagcagtgtcgaagtcgaaaacgtagtgtaccatcaccccgcggttcttgaagcctctgttgtggccaggccagacgagcggtggcaagaatctccgtgtgcgtttgtgacacttaagagcgattacgagaagcatgaccagaataagttggctcaggatataatgaaattctgccgggagaagcttccggcatattgggtcccaaagtcagtggtgtttgggccgttaccaaagacagcaactggaaaaattcagaagcatattctgaggaccaaggccaaagagatgggaccagtaccaagaagcaggttataggaagtgataaagctttaagaacaacattttgaaaataatgtgttgtatgtttttgcggaactttgccttgtgtgtaaactttcaaatgataacagaaaatattctctttattttcaacgctttcattgtgt

SEQ ID NO: 142984 - DNA, 2316 bp, Arabidopsis thaliana landsberg
taatatgacggttcagatgttggcccgtttcagtactctccaaccgtcccagtgtcaatgcttaaggagagaattgtctctgaatggcctaaaggttagcaccgagcacaatcttttggtttgtttttcggctaatccgtgaaaaagaagtaaaaatgcgatagaagtgctctttaatgctttagatttggctttagaacgtttgcttcagccatttttttttttcttcagtttcttcacttgtggcttgatagacaaagttcagacataagtcataggatctgattgacttactaatcatttgtcttaaagtaggaacagaagatggaagttaaactattgatcttttaaaaggttactcgatcttgtgatctatgttttaacagtttctccacttgtggtataggcttttgaattggtctgattgtattactaatcacttgtcttatactacaaatcatgtctttagagactatagggacgaatactgttctggttctttttagtagaatttcttgatcttactcttcagtcttgtgcattcaacaaaaaattgaatttgtctcattttgtttcctattgtatcttattgactaatcgaatttgggggttttgaatgtgtgtagacaagaagattgttccaaaatcagctagtgacatcaagttgataaatgctggtaagattttggagaatggtaaaactgttgcacagtgtaaagctccatttgatgatctccctaaatccgtcattacaatgcatgttgtcgtgcaactgtctccaacaaaagcaagaccaggtcttgttctttcttatctccgtaaatcttgtttgtggaatgaattctttagcctaatatcttgttttttctttctcttacagagaaaaaaatcgaaaaggaagaagccccacagagaagcttttgctcatgtaccataatgtgagaacaacaacaagtcccaagtcaaaaaatctgaaagagttaagttttgcttctctgtggtatttgctaaaagaccatataaacataaactaccgcttcatattcgacattttcttcacaagttcaaagaaaccttcatcgatggcgttataaagctagtctattagagttgtttctcttgagctgtgatggaaaaactcttgtttggagcatcctttataaagataagagttttgttaccgcgaactaattcaagtatctctgtaacatatcttgtatggttttgtcaatctttagtacattttagacctggtttttttctctatcaggatccgcccaaaactgtatccaaacatctttatccagtccattacctacagtgaaaacgagtactaaacgtttgcagttgggttcttgagtggcaaacactttgatatgttactatatggtccatacctttctcatcattttccacttccacaaagccaatgttttggggatgtaggtagatacaaacctccaaaagaaacagagagcatgagatctcaataaatgtcctttcacctaacttatcactgtctcccacttaattctctcatttataaccttcactttcacttagtgtctctccactatcttgtcttgtttcgcctttaattctattcctctcctctggctctcatttataatcttcactccaaatgcacctttctttgtactcccatcactttctcttcgatatggtatttactttaatccgattcgaatattgtaactatgaaaaacaaaatgaatagtaaaaatatccgtttcgtatccaagcctatttttaaaagacacgtttgtataactctctctatatatagaaaggaaccacgaagctctttcaagagagttctattcttgtctgaaaactagttccctatatttcttctttcttcacacacatattctccaattcttacataaatatcaaataaaccaaacttgaaacttgttgtgcttaagatgacgaagaaatcactgacaatgtttctttttatacttctgcaatttctgctcgtaaactctctatcttcaaagcattcatcacccaaaccaaaaccagatgcagaaatcactataatgggttttgtttactgcgatgtttgctccaaaaacagtttctctaaacacagttacttcatgtccggtagtaactcagaacaaaaagatctctttaattaattccctgcaaaaactctgtttcttaacgtttctttacacaggtgtggaagtgaggatagtctgccgattcaaagcagcttcgtcaacaacgacagagactataacattctctgcaaacagaaccaccaacgagtctcgactgtacaag

SEQ ID NO: 142985 - DNA, 1040 bp, Arabidopsis thaliana landsberg
gatttaagaacatcttgttccctctatgtgttgatgccatgtggtatcttagcaatatatctacacggccaaaggttcacttatgtctttagacctcttgggaatcacctccaaagccatttcaaaccattcctcattactacaatgagaatgtaacaatggaatctctctgtagtcttcatggttggggaattagagactcgcccagacgggttttcgacgcggttttgtttagtaatgagaaagatcttttaactgttaggtggaatgagctttatccttatgtgacacagtttgtgattcttgaatctaattctacgtttactggtttgcctaaaccattggtgtttaagagtaataaggatcagtttaagtttgtggagccgcggctaacttatgggacgattggtggacggtttaggaaaggcgagaatccgtttgtcgaagaagcgtatcagcgagttgtgttggatcagttgcttaggattgctggtattcaagaagatgatttgttgataatgtctgatgttgatgagattcctagtgctcatactatcaatcttttgagatggtgtgatgatattcctccagttcttcaccttcagttgaagaattatttgtattctttcgaatactatgtcgatagcaagagctggagagcgtctatacaccgttacagtccagggaaaacgcggtatgctcattttcgtcagagtaatgttatgttagctgattctggatggcattgtagcttctgtttccgttatataagcgagtttatattcaagatgaaagcttatagtcattcagaccgtgtcagattctctcattacctgaatccaaggaggattcaagatgttatttgcaaaggaactgatttgtttgatatgttacctgaagaatacacattcaaggagattattggcaaaatgggacctgtacctcggtcttattcagcggttcatcttccttcgtacctactggataacgccgagcagtacaaatacttgttgcctggtaattgcataagagaaaaacag

SEQ ID NO: 142986 - DNA, 987 bp, Arabidopsis thaliana landsberg
tcaggttccgattttccctcttttttactaaatgtttctttttttccggtgactatttccgatcatgatcccttttccgatcgatcaagcctttcggtaaaatcacagtcctcgtcgacggagactacaaaatcttcggtacacttcttctcttttaagctactactacacgagtcatgatctgataatggatttgatcatttgcgatcatgatcaatgaatcacatgatctttgagatttttttgattgtttggaaaagattgtttaggtaaatgagtgttgaagagatttcgatttgtgttgcagagtcgcgtgcgatcatgaggtatatagcagagaagtatagatcacaaggacctgatcttttggggaagactattgaagagagaggacaagtagagcaatggttagacgttgaggctacaagttaccatccaccactattggctttaacgctcaacattgtctttgcaccacttatgggtttccctgctgatgagaaagttattaaggagagtgaagagaagcttgcagaagtgcttgatgtctatgaagctcagctttctaagaacgaatacttggctggtgattttgtgagtctagctgatttggctcaccttcctttcaccgagtatcttgttggtcctattgggaaggctcatttgatcaaagataggaagcatgttagcgcttggtgggataagattagtagccgtgctgcgtggaaggaggtttccgctaagtactcactacctgtttaaacaaggagatgttgacttggggggtttgtgtgagctttgtgttctttgagggagttcgttttcgggtcgattgtcttgttgtttcaataagaaacggaactctgtctcatttgttgtctctggtttcttgtattctgtaacttttcaagcttttcaataagagtttaaaatcagagtgactcaacccatgtatattcctctattcagtgtaggtctttgataaaa

SEQ ID NO: 142987 - DNA, 1302 bp, Arabidopsis thaliana landsberg
ccattttttatattggtttgcttttaaaaattgatgttttcttggcccactcttggatattgttacttattttctcgaccaacttgttatgcaggaagagtttcaacttgctttgttcaagaacagaaagaaagaaaatttgtttgccaatagggtaaattctaagtttctttggccttagtaactttgtagttagtcgtaacgattagttctattataagtagttaatggtaatgctcttttttccagatatttgatttatttgatgttaaacgaaaaggcgtaattgattttggagactttgtgagatcactcaatgttttccatcctaatgcttccctagaggagaaaacagactgtaagttgacccataaacgagtttatatccatcgtcgtttctctaaagccttgctgtacttttattcatgttattctgtatttcatatatcagttacctttaggctttacgacatggactgcacaggcttcattgagcgccaagaggtaaacaatggtcctatatcttcacattccattcccaaacaatctatgtttcaaagactttcagtattatggattctgcatcatctataagtaatcataattgtgtatgcgtttttggcaggtgaagcagatgttgattgcacttctctgcgaatctgaaatgaaactggctgatgatacaatagagatgatacttgatcaggtttacttgttgtctattacaagtttgttttctgtcaaaacaaagactgttttatgaaactcgagtttttttttcttttcgtgaacagacatttgaggacgcatatgtggatcgggatggaaagattgataagacagaatggagcaatttcgttatcaaaaacccatctttgcttaaaatcatgactcttccgtatctcaggtatgtctccttactatgatacttccatctatttggccagttttggtgccattttccaagtttgaggacttaaaaactcaattttagggatataacgacgacatttccgagtttcgtatttaactcggaggtggacgagattgcgacgtgaaagagacaagacaagctggtttatagagaccaagtcgtaggctggaccaagaataaaaaagaagattgattccaacaatgttatatagcaggatcgagctctatttcctttggaatttttagtctattggatttcaatttcatgtattgcgattacttttggctctctttctttaacagttttgaatactcaagttgtagttctacgaaaagattaatataaaaccacaatttctgattaaaga

SEQ ID NO: 142988 - DNA, 3074 bp, Arabidopsis thaliana landsberg
ggcataatgagagtaagatattagaaaagataaggaatgctcctagaatttctgttcaaccaacaaagattttttggataaatatgcactaatacttgtatatttggcacaacaacacggtattaaagtctaaacatttttatttaattatttatgacatctaaattttgaaaaaaaaaagttgttttacatagaatattggctttatttccaatttagctcctaactttctattttctctcacaaaagagaaaccaaacaaggttttgattaatttgtttagctaaaaataaataaactgcattatacacttcaaatcgtgctaattaggaagcccaaatcatatggagggcgagcccttttaccacttatgggcctgttattagtggcccaagacgagacggatgtcggatcatgcgatttggctgttgcaatccatagacaccaccgagcgagcatcttcttcttcttcttcgctaaccggagtaatcgtaagcagcttcgactggtgacaatgtgttactctctctctatacaatcttcaattgacttccataatcgaaacgctctaaaaatccatggagatcgagcaattttgacttcgaacttacctacactcaggaggattccgtctttgccggagcgagatcgccggagaaagttgttactctgctccgggagagtcgttaactcattgaaattcactggaaacacttccgtcgatctatgtggtattcctcgtcatcgattaagagtttcttgcagcgatgctcgccgtacaccggaagaaacggcggcggagtttacggcgctacccaatttttcagaatttataacgtcggagagagtgaaagtggtcgcgatgcttgcgctagctctggcgctgtgcaatgcggatcgtgttgtgatgtccgtcgcgattgtgcctctttcgctttctcgcggatggagcaaatcattttccggtatcgttcaggttattctttctcatcgatcgtttggggaaatttagtaatatgtcgttctactgtatatcattgttctcgtttgtctcatagtttcttgaatgtttatttggtagtcatcgtttctatggggatacttaatttctccaattgctggtggaactttggtggaccgttatggtggtaaagtagttatggcgtggggtgttgctttgtggtcgttggcaacttttcttaccccttgggctgctgatagttccttgtgggctcttcttgctgccagagctatggttggagttgctgaaggagtggctcttccttgtatgaacaacatggttgcgaggtagtgatgctttgtattttattactgcttcaaatgtgataaagtgacacacacatgatctggttactggagtttattgggttcttagtgatagtacttttgatgtagatggtttcccccaacagaacgttctagggcggttggtattgcaatggcagggtttcagcttgggaatgttgtaggactcatgttgtctcctattcttatgtctcaaggaggtatatatggcccatttgtaatttttggtctatcggggttcctttggttgctcgtgtggctctctgcgacgtcaagtgcaccagatcgacatcctcagattacaaagtctgaacttgagtatataaagcaaaagcagctattatctacgagggagaacaaacgaaacgccacaggtggaatacctccttttggacgccttctctccaagatgccgacttgggcagttatagttgcaaactccatgcatagctgggtatgtataaagattccctcaatcaaactctttatttattcttgtgattgtgaagacatctcttgatttttcttgtagtagcaaaattcatgtaactcattttaaattgcttacttccagggattttttgtgattctttcatggatgccgatctacttcaattctgtaagtccctaccaccaacaaattgtaaatacattattgtttttatctagtcttcataagtgattttagttgataatgtgttgcaggtatatcatgtaaatctcaaacaagctgcttggtttagcgctgttccatggagtatgatggctttcacaggataccttgctggtttttggtcagacttgttgatacggcgtggtacaagcatcaccttaacgcgaaaaatcatgcaggtttgtggtttggactgaagagttctgtattcatattataatgttgtataagtctgatgcaattaaatctggtgcattcggctctctctttcttgtgctgagttgggagaattcattccttgttttggcagtccattggttttattggtcctgggattgctctcattggtttgaccacagcaaaacagcctttagtagcatctgcctggcttagtttagctgttgggcttaaatcattcagccacttggggtttcttattaatcttcaggtacccaagcgtgtgaatcatacttaacccacaaaatgtcttgagtatctttaacatttatagttttataccttcttgttccaggaaattgcgcctgagtattctggtgttctacatggtaaacgttcttattcgtcttctgtagttactattgattcattaaactgtagtacaaaattcccggtaacatctgaaagaggaattggccttacaatcaatcataaaacaattaggtcactaaaaatcgtctgaccctctttttgccttttattattggtataggaatgtgtcttactgctgggacattggctgcgatagttggcacagttggagctggtttctttgtagaactattgggctccttccaagggtttatccttcttacagcaattttgtatctcctttctgctctcttttacaacatatatgcaactggagaaagagtagattttgacacaacaggtccgtcccttctcttattctctgggttatgttgttttcttttctggttcagtttcattcaatttgtatcaatatatcgcatcattctaatggtatatgttggtattcttagcagcttgaaggagaccacaaagtcacttaataggtggatcagctagtaaagaa

SEQ ID NO: 142989 - DNA, 644 bp, Arabidopsis thaliana landsberg
ggataagaaccctagcatttctcatttcgaatctcgctcgagctcacagtttcttcgttggggatcgaaatcgtgccatttgagttagcctctgtatagatcgatggctagcctgagaagagctctgctcgtagcagggaagacgaagatcaacctagagaactgccatttcatcaccggaatcaactacaacggtctcagcgtgaagcaactacaagagctccgtggaatcctccgtgaaaacacaaacacgaagctcctcgtcgccaagaacactttagtctacaaagccttggaaggaaccaaatgggagtctctgaagccatgtatgaagggtatgaacgcttggctattcgttcaatctgaagatatacctgctgctttgaagactttcatcaattttcagaaagagaagaagctttacgataacaatttaggcggtgctgtttttgaggagaaattgtatgctcctcaggattacaaggttattgagacgatgccttctcgcgctgatgtttatggtatgatgcttggttctttgcattggccggcgttagatctcgtcaatgcgttgcaggccccaccggcggcgtcggaaaatgagacagttgttgcatagaaggaaggaattttccaatttcttg

SEQ ID NO: 142990 - DNA, 2472 bp, Arabidopsis thaliana landsberg
  unsure (1)..(2472): unsure at all n locations
ggaagagcttacattcctgttgatcaagtcattaacggcgattatgtgtatcagtgggttgagatcttggatggtgagagaaaccctattcagggaggatcaaagattcatgtcaagcttcaatatttccatgttgaggaggatcgtaactggaacatgggtatcaaaagtgccaagttccctggagtgccatacacattcttctcgcagagacaaggctgcaaagtttctctgtaccaagatgctcatattccagacaactttgtccctagaattcctctcgctggagggaagaactatgagcctcaaagatgttgggaggatatttttgatgctattagcaatgcaaaacacttgatctacattactggttggtctgtttacgctgagattgctttagtgagggactcgaggaggcctaagcctggaggtgatgtgaccattggtgagctactcaagaagaaggctagtgaaggtgtcagggttcttttgcttgtttgggatgacagaacttctgttgatgtgctgaagaaagatgggctcatggctactcatgatgaagagaccgagaatttcttcaggggaagtgatgtccattgtattctgtgccctcgtaacccggatgacggtggtagcatagtccaaagtttgcagatctctactatgttcacgcatcatcagaaaatcgttgttgtggacagcgagatgccaagcagaggaggatcagaaatgaggagaattgtgagttttgttggcggtattgatctttgtgatggaagatacgacactccgttccactccttgttcaggacattggacacagtccaccatgatgacttccatcaacctaacttcactggtgctgctatcactaaaggtggtccaagggagccttggcatgacattcactcccgtcttgaaggtccaattgcttgggatgtcatgtacaacttcgagcagagatggagcaagcagggtggtaaagacattctggttaagttgagagatcttagtgatattattatcaccccttctcctgttatgttccaagaggaccacgatgtgtggaatgtccaattgtttaggtccattgatggaggagctgctgctgggtttcccgagtcgcctgaagctgctgcggaagccgggcttgtaagtgggaaagataacatcattgataggagtatccaagatgcttacattcatgcaatcagacgtgctaaggatttcatctacgttgaaaaccagtacttccttgggagttcttttgcttgggcagccgatggtattactcctgaggacatcaatgccctgcacttaatcccaaaagagttgtcgctgaagatagttagcaagattgagaaaggagagaagttcagggtctatgttgtggtccaatgtggccagaaggtctcccagagagtggatcagtgcaagctatattagactggcagaggaggaccatggagatgatgtacannnnnnnnnnnnnnnnnnnnngggcccagggtcttgaggaagatccaagaaactatctgacattcttctgtcttggaaaccgtgaggtcaagaaagatggagagtatgagcctgctgagaaaccagaccccgacactgattacatgagggcgcaagaagcacgccgtttcatgatttacgtccacaccaaaatgatgatcggtaagttcacatttcaacggaaaaaaacttgagaagtatacataaatgttgtgcctgattcatttgatgaaatccattttgcagttgacgatgaatacattatcattgggtctgctaacatcaaccagaggtcaatggacggtgcaagagactctgagatagcaatgggaggttatcaaccacatcacttgtcccatagacaaccagctcgtggccagatccatgggtttcgtatgtcactctggtatgaacacctgggaatgctcgatgaaaccttcctcgatccatcaagcttggaatgcattgagaaagttaaccgcatttctgacaagtattgggacttttactcaagtgagtcactcgaacatgaccttcctggtcacttgctccgctacccgatcggtgtagccagcgaaggcgacatcactgagcttccaggatttgaattcttcccggacacaaaggcccgtatcctcggcaccaaatcagactacctgcctccaatccttacaacctaatctcactaagcatgtcaagtaatgatctctctctccctctctgctttgctgctgttgtagctttgaataaaacttgagtgtctacctttagaattaagaagtcaaatggttgttatgatgatgcacttctttacccctttggtttttatattcgtacaatgacgtggtgagagaatgtagctttgtgatcttgttttgttgatgttatgtacctttggacttatgaatcttatatctgatccttttctttttatttagtgtgtttcacatcaaa

SEQ ID NO: 142991 - DNA, 2641 bp, Arabidopsis thaliana landsberg
atgaacacttattccccactccaactcataccgacgcctattcatctcaaatcctcacgcgccgcctcaccgtcatcattacgcgtcgcttctccgttaattatacgcgccgcctcctcagacgactcacagtcagtcgaaaaccaaactctagaagtcctcgaatggcgtgccctctgcaatcagctctctccgttcgcttccacaaccatgggcctttccgccaccaaaaacgccgaaattccggtgggaaactcgccggaagaaagcaggaatctccttaacgagacctcagctgcattagctgctatggagatgatgaaatcgcgaggattaggtctttctgaaatccaagacttgtctgatatcgttgagcgtgctgtgtccggtcaattgcttaccgttagagaactctgtaccgttcgaagcacgttaacggctgctacatcaacgtttcagaaactccgaaaagcagccattagtgataacaggtttgtgttctgcttctaatgtagacattttgaaattttttagtcttcttgaattgtttataagatgattgaaccgtggtacgctaccgaatcagttatagttattagatgttcttattgctattgagatgcttatggttctagcttttgcttctgttattttgtagggttactccacttgtagatatactacagggttgtgatttcaaggatacattacagcagaagattagtttttgtatagactgcaacatgactatgattcttgatagagctagtgaagatttagagattataagatctgaacggaggagaaacatggagaatttggattctcttttgaagaaaatatcaactaagatttttctagctggggggattaacaagcctttgataacgcagaggagatcaaggatgtgtgtagctattagagctacacacaaaagtttacttccaggtggtgttgttttaagtgttagtagctctagggcaacatgctttatagaaccgaaagaggcagtggagcttaataatatggaagtgagacatgcgaactccgagaaagctgaggaaatggcgattttgagcattttgacatctgaggtggtgatggcgcagagagagatattgcatttgttggatagaatattagaacttgacattgcttttgcaagagcatcacatgcaaactggattaatggtgtctatcccaacgtaacttcagaacacacaaaaacaccgggcttagctgtagacattgattctgcgcagcacccgctacttcttggttcagtattaggcagcccaaatggtggagacattttccctgtgccagtagacattaaagttgaaagcagtgccaaagtagtcgtcatctcgggtccaaacacaggaggaaagaccgctttgttaaagacattgggattattgtctcttatgtccaagtccgggatgtatttgcctgctaagaactgcccaaggttgctcttggtttgatcttattctggctgacattggagatcctcaggtattaccttatgaattccttgcaagataatagagctactaacgtcttgattatcttcttatcgaggtttacatttgcgagaattttcttttataaacttcttatttgcagtctttggagcaaagtctttcaacctttagtggccacatctcacggatacgacagatacttgacattgcttcagaaaattcacttgtcttactagacgaaatatgtagtggaactgatccttcagaaggggttgcacttgctactagcatcctacagtatattaaaaaccgtgttaatgtggcagttgtatcaacacattacggtgacttaagtcgcttgaaggataatgaacctcgattccaaaatgctgcaatggagttctccatggaaactttgcagcctacatttcgagtactctggggaagtactggtctatcaaatgcattgagagtagctaagtccattggtttcaataaaagaatattagagaatgcgcataagtggacggagaaattgaatcccgagcaggatgtagagcggaaaggctcactctttcagtcccttatggaagaaagaaataaactaaagcttcaggcaactaagactgcagcttttcatagagacttaatgaacctttaccacgaggtatttaagaatgttgttttattgatattattaatctcttgtaatgtatgtttctgttcttgatttttcctgaagcttgagcatgagtcgcatgatcttgataaacgtgagagggctcttctgaaaaaagaaacgcaaaaggtgcaagaagatctaaactctgctaagtcaaagatggagagactggtggctgaatttgaaagtcaactagaaatcactcaagctgatcaatacaattccttaatcctgaaaaccgaagaggcagttgcagagattattgaagcttgctgtcctatggatcctgattccttagaagaagaatacagtgactactcaccacaagctggtgaaaaagttcttgtaactggactgggagataagttaggtactgtggttgaagaacctggagatgatgatgatacagttctagtccagcatggtaagataagagtacgcataaagaaaaaggacataaagccccttcctc

SEQ ID NO: 142992 - DNA, 1553 bp, Arabidopsis thaliana landsberg
gaggagaaaagcctaccaagagtttgcaactgaaagtgagttttttttttttgttttaacaattatgagttcagggcataaacgtttttaaatatgtcaattcagttgtctctttctctgttcttcaacgatggttatatttctcttgcagggaggtcaatgaccacttatggtactgcaccgccagatgatggtaagagactatacagctatttgcattaaaactgttaatgtccctttggatacgtttccaccataacactatgtatatatgctttctgctgcagatgatattacaacttcaggttcacttcaattcgattttaaagcaattgaagctgcaacaaataattttcagaagagtaacaagcttggtcatggtggatttggtgaagtttttaaggcaaaatgttcttaaactttctcaactactagtttgtgttataaacttagttgccaaaaaaaaaagataagaaattctgatagtgagtgaagatcatatgaattgacagggaacttttccgaatggaacagaagttgctgtgaagaggctgtctaaaatttcaggtcaaggtgaagaagagtttaagaacgaggtgcttcttgtagcaaagctccaacatagaaatctcgttagacttctggggttctctgttgaaggagaagaaaagatacttgtctacgagtatatgccaaataaaagtcttgactattttctctttggtaagaaacatatgatatataggattagattctctgaaacatttgtttttgatctcttacccatagtctaatggctctatacgttggatgtgcagaccatagaaggaggggtcagctggattggagaacacgatacaacataatcaggggagtgactcgagggattttatatctccatcaagattcacggcttacaatcatacaccgtgacctcaaagcgggtaacattctcttagatgtcgatatgaacccgaaaatcgcggattttggtgtggctaggaattttagagtggaccaaactgaagctaccacaggaagagtagttggaacattgtaagctttcaattaaaaaaaactccgtttggtggttgtttgtagactaaaatgtgaatctttatttgcagtggttatatgtctccagaatatgcaatgcgtggccatttctccatgaagtctgatgtctacagctttggagtattggtactagagattataagtggcaaaaagaatagcagtttctacaacattgatgattctggtagcaatttggtaacacacgtgagtataatcatttaagttacagtgagtgtatatgataaagccaaagaattattaatttaattagcaacttgtgttaggcttggaggctttggagaaatgggtcaccgttagaactagtggatccaaccataggagaaagttatctgagtaatgaggctactagatgcatccatatcgcactattatctgttcaagaagatcctgcagatcgtccattgtaaacagcgaacatcatgatgcttactagtagcacaaccactttacatgtg

SEQ ID NO: 142993 - DNA, 2993 bp, Arabidopsis thaliana landsberg
  unsure (1)..(2993): unsure at all n locations
attttaaggttcctgtcatgtctgattgcgaaatcgcttttttcttcttcctgagttcctttttttctcttatgaaattttaaccgtgatgatgatgatcataatgaaacagatatgagcaagaaaaatctagcgattctgttgcgtgctagaatgagatccaacaatccctccaaattttccctctctcaatttcctgtaagcttttctttttctctgtttgaattttttggataattttgcgattctgtccaaattcacacaatttgtaatcatgggcaatgaaaagtttacatcttttgatgaaaaagagagagagagagagtgagaaattggctatggctttaatcggagcttgaatgtttttaagaagataagaatataataaggctaatttgactctataataatggtttgttgactttgttgtcagaaggaaattcaatctaatcctcaagagaatcattctagagatcacattgtgcaaaattctaatgattttggtaccactggaaggtaatttctcattgtagatattgatttagcaccattgatctttgcagtagtgagtttggtttttgttttagggtttatgatgttgttcgagagacaatgcactcagctatctcagctagtaaaactggtgtattagacattactcttaatgattttcaagaggtaaaactatcttcacattgttgtttcttgattctgatctttgatgtgtttaaccttttcaatctgattacatatatggttaaaaatgcttatagggttactttagcctttcgcttgaagaccgcgagaagttactgcttgttttagccaaggagtatgatgttaaccgagagcaagtccgagaacttgttaagcaatatcttggacttgaaactccagctagtgagagtcattcttgtgccattcttgttttttcttgtgtgattcttcgttacattctccattgatgggcgagtacttttctttaggtgatgatgataagggggctttatcttctgttttctatcgcattgagaggaatctgaggcatgctcttaggccaacatatgaagttttatttgagaggttgaatacacatcctggagggttgagatttttgtccatcctccgagctgatcttctgtcgatactctcgtaatgtttcttgtcctcttgttatgtgactggaaactcaaatatttgaagatagtttcgaatcagttggtaaaacatttccggttgtatctgacactgatggttgtttctaatgtacagaaaagagaacacgccgtctttgcgaacattagattcttttctgaaggagaaactcggtatgtggcttagtcctgccactttagagcttcatcaaattacttgggatgatcctgcttcattgcttgagaaaattgttgcatatgaggtatgcagtactagtctccattatagtaatctcagctatttcagaatgttagaagttttgtctaatgacgcattatttataaggcggtgcatccaatcagcaacctcttggatcttaaaagaagattgggaatagaccgtcgatgctttggatattttcatccatctgttcctggttagttactttctctggactcatgtctctttgattgtaagttgaccacattctttgatcattctatgtcgttactctcaggtgagccacttatttttatagaagttgctcttatggagactgttgctcagacaattcaggtcaaactaatcttgatactattcggtatagtttagattctatagctatgtgtctaaaaaattcattggcgttgcaggaagttttgtgggacaatcctcccataccagagaaccaagcaacatgcgctttattttactctatttcttcaactcaggtatgtgcacactcttccttcatatctgtagttcttacatttgttctcgttgattttcacattttctattcatttcgtggttctgatgaaagctatggctttatgacttctgtcttatgtatttgcagcctggcttagctgggataaacctcggaaaatttctgatcaaacgagtgattacgttggtgaaaaaagacatgccacatgtttctgtgagtactttgactaatttgtatgcaaatcttgttacaggtctaaaagtttgtgtnnnnnnnnnnnnnnnnnnnnttctttttgttgcagacatatgcaacacttagccccattcctggattcatgcaatggctcctctcgaagttatcatctcagtcaagatttgctgaagatgagcgtggtacacagagcaattcgccttcatctacgtttagcgagaaagtattactaccagaagaggaacatgccctcatgactctatcagagtaagattttcttcatgcccttatgttcttatctgttatatagaaaatcaagttcaagtcatcaactcagtgatctttttatgcagtgaatcttcatccggtagcaacggtatggaagttctattgaatttgctatcagtaaagaactgcgattgggctacttcgcctcgcctattaccagttttagaacctattcttatgcggttatgtgctaggtatgttcattcttggaggagatgtaatggttatatatgaatcatataggcataactttcaatggtctttcttgattttgataggtacctcttgcaagagaagaagagaggaaaagctttagactctgttgctaacttccacttgcaaaatggagcggtaagtccagtgaatgacgataggttttagttaatagagtgattgagattgataagctttcatgttttgatacgttacatagatggttgaaagaataaattggatggcggatcgatcagagaaaggtattcgtcaaagtggaggcattatggtaaactatgtctataggtaaagtaaactttgtactaaaaataattcagctacgaagctttcatttttgttggtccaaaacccatcttattcgattcatgacagg

SEQ ID NO: 142994 - DNA, 1330 bp, Arabidopsis thaliana landsberg
  unsure (1)..(1330): unsure at all n locations
cggcttgtttcatagggccatggcttagtggaacagacatattgctcactgttgacccggtgaatattcagtttattctaagttcaaacttcgtgaattaccccaaagggaagaagtttaacaagatctttgaattcttgggagatgggattttcaacgttgactcgggcttgtgggaggatatgagaaactcgtctcatgcgattttcagccatcaagatttccaaagtttttcggtgagtacaagcgtaagcaaattaagtcaagggcttgttcctattcttgataacgctgttgagaaacacattcttgtcgacttgcaagatttgttccagagattcttgtttgacacatcttctactttgatggctgggtatgatccanaatctctctccgttgaaatgcctaaaggttgagttcgctgatgcgatggatggagttgcagatgccatgttctatagacatctcaagccggcttttctgtggagtatccaatcttggatcggtgtnggaatagagaagaagatgagaagaagtctcgacgttttcgatcaaatgctagggaagatcatatcagctaaacgagaggagatcaaaaatcatgggattcatgactcaaaaggagaggccatggacgttttaacatattacatgactatagacacggccaaatataaacacgtgaaaccgagtagcgataaattcatcacgagacactattttgggtcttgtgatagcggcaagagacacaaccagctcagctctcacttggttcttctggcttctctctgaaaacgctcaagtggtgagcaagattcgccaagagatcatcaacacaaatccatcaaagaatggaaatggccaagagaatttagacaagttggtgtatttacatggtgcgttgtgtgaagcaatgagactctatccaccagtttcctttgggcgcaagtctcctatcaaatcagatgtgctgccaagtggccataaagtccaagcaaactctaagattataatctgcctttatgcgttggggaggatgagagcggtttggggagaagatgcaacagagttcaagccagagagatgggtttctgagtccggtgggttgagacatgcaccttccttcaagtttttatcatttaacgccggtccgagaacttgtcctggtaagcaattagctatgactctaatgaagaccgtagttgtggagatattacaaaactatgatattgatgttatcaaaggacagaagattgagccagaacctggtcttatgttgcacatgaagcatgggcttagagtcacaattactaagagatgttcagcttga

SEQ ID NO: 142995 - DNA, 5432 bp, Arabidopsis thaliana landsberg
  unsure (1)..(5432): unsure at all n locations
ctcctcaagcacaaggcttttactatagaggttgggtttgtgattcatgtatgttttgtttggcttctctgatcagatctctgagctcatggagtttacatgtttcatattcttgtggnatgtgtaagtgtaatactagtggccatcgaaagggcaagtataagccttcctctatccatgattgacttctctagttcttgaattgcatatgagctgttagaagctaatctgaattactttctatgttggggagccaggttatgaaaaccccacaggcgaatgggacgagtattcctcgtatgtcaatgttgaaggattggacatcacatctcctgtgtgtacaccttaccatctcttctgggatctcttctttaaaacattccaaattgttcatattcttctctgatcaaatcaggttggcttcaatgagaatgcttctctggtctaccaaacgggatatggatacaaccctcaaatgccatatgggccatattcccctgcagcaagtcccttgccttctgagggacagttgtattctccacaacagtttccgttttcaggggcatcaccgtattaccagcaggtagttcctcctagcatgcaatatattacttctccaactcagcccgagctcaccagccttgtcggtgttgaccaacaaggtgataacatcggaccacgccaatcctaccatcctcatcccattggaccgtttaatggaaaccagccaaaccttggttttcctgaatggcagcaaggttttgacgggggaatatggtcggattggtccaagccttctgatatgcacaggcattcttcttctatttctccggctttatctcctcagccactcggctcatatggatcatatggccagaacatacccatggttggttcacttttcttatctactcttatccgacatatggatagctttcttctattcatggttacatattggattatatgttaaaagtagattgttctttaatttgtcaggggtcacagcgacagagatcattttacggttttggatctggttcgaactcttataacagaggttatatgcatagtggtggtcgtggccagggttctaactatggaagtagactaatttctaatgtgggtatgggaaaccaaggctggattggggttgacaacagtcgagggcgtggaagggttagtgatccatctttgggtggtgcttataatggtacttttgatatcctcaatgagcaaaatcgaggaccaagggcttcaaagcccaagactcaggtcttagaggagcttgattctgctgctgattctaagaaaaataacaaaggcagtgcaaaggagcacgaggaatccaacaacgcagactttgtcaccgactacactaacgccaagttgttcatcatcaagtcttacagtgaagacaatgttcacaaaagcatcaaatacaatgtatgggctagcacccctaatggcaacaaaaagcttgacgctgcttatcgtgaggccaaggatgagaaagaaccgtgtccactttttcttctgttctcggtacgagtctaatccttgatcaagtgaaaaaaaattagtttttcttctttttgcagattgcttacgggtttgtaaattcaggtaaatgcgagctctcaattctgtggtgtagcagagatggttggacctgttgattttgagaagagcgttgattactggcaacaagataaatggagtggacagttcccagtgaagtggcacattatcaaagatgttccaaacagccagttccgccacattatattggaaaacaatgacaataagcctgtgactaatagtcgagacacccaagaagtaagtagcaatttgtgcctatcaagctttcttgtccataagatacctcttttaagccacaccataaccacaaccaaaaactacaggtaaaactggaacagggcatcgagatgctgaagatcttcaagaactacgacgctgacacgtcaatcttggatgatttcgggttttatgaagagcgggagaaaattatacaagaccggaaggcaagaagacagccaagcttgccatctgcaggagtagtagcaggagaaaatgaacataaacctgcttctgctgcattacccacagacttcatgaagaacatgtccaagagttttgcgcaagttgtccgcttggacgaaggcagcaaagaagcagtcaaggccagttcatctccagatgcaattacaacagcagcagtctcttctggtcaatccaactagtaagtaaaagacatcaattagcaaagactatgttttcaaattccataatatgatcttttgtttgttctaagaaggtatttcaaatgaaattttacgtctgaccgggtctggtttttgtgtaaagtaagcctctttcctccgcccttttctgcttcaggggtatttagccaaaatttgattcatttccctcttttcaatgttctataataccctcactcttctgagttgatagaagaagaagatgaagaagataatgtatgaaagacaatataatgtttctcttgtaaagttggcctcatttatctttgcaggcagtttttcaaaataaaaatgcagattacacacatcaatcaaattcaaagctctcagctttccacatatccaaagtttgtttctttgtgtgttttttctacacatatcttagtttttgagagtccgattgtgaacgtgacaagaaagtcaatcaatgacttatccatatgaatgaattgtcatcaaaagggacactgaattgtgtggttcatactcatagcatgtcaatatattcgtgaccctttttacaagcaagacagattcagatttgtgagatgttatgattcactaacaataatgtggctaagggatcagttgtaattgatattatccatttgtgagaaacaaataaaatagtttcatataaatctaaggactgtctatgtcagtccttagtctattttgccatatttctagatctaatcgggttgcattattacgtagatagatatgatctacttactgatgatttttttttttgaaaccttaatgtataaaaaaatggtttaaaagtactaaccattgttggtccacaaaaataaagggaagaaaggagggccaaatcgtaacattaataaaaaaggggccaaactgtaacaacaaaaaaacaaaaagggccacaaagaaaaaagagagaaaataagaagagtcccggacaggaccgagcttgaggattcgttgttgcctttatgactcagccaacaagaaccagactaatcctagtcctagtcctagtccacgcgcgaatatacaaacgtcttaaagccatttgatagaaccgatttccaagggttttgctcagaaaaaacacagagagagattttggaattcgatgaatagtggtgataccttatcgacgttagctcaatttatctcctcttccgagagatttttccggcgagctgacggtgatgtagtcttttgttattgctgggccaccgtgctcgcacttgtcttcattcttctctaccaattcttcctttcccggaaattccgattcttcagtcatgcttcttcttcttcccctgtcgtctcggtttctcaatctctcagctcccaatcagggtaaagtgttaaactttcaatttagtatctttttgccgaatttgtttgctgcgtaaatctataacctttagcctctttcccttttgtgtgttcatgcttgtgcctcgtatgatttttagttataatcgtctactttatgatcttattattctactctttgattatctctgagacttcatctattgactatacgctttgcagaatatctactacacttgtttctgatgaagatctaaagggtctgattcaaaaattgggggaaagaagtgaggatgctgagatatgggaagatgttattaagaaaagcaaccctcgtatctcctacactgctaaatgctgcaaaccaacagtaatctcaaagttttatctttgtgtagagctttttacttttccaagtgtctagtaagattgtttttttctctggtaactgagtttcttctttggtttcttgtaggatggtagtcccatgaagtatctgagtacaactgtgtttgaggattgctccccagaggttttgagggacttttacatggacaatgaatacaggaaacaatgggacaagactgtggttgagcatgagcaattgcaggttgacagtaatagtgggattgagattggtcgcactataaaaaagtttcccttgttgactccaagggagtatgtattagcgtggaaattgtgggaggggaaggataagttttactgtttcatcaaggtaatgatgcacttatcttaacttggagggcattatttttaatgctattatttctaaattacattattcatttgcacctatgcattcctctttaaatttgctaagtatttctcgtatatgctagatacacagacctggaccatgtcatatattatctgttattcgctttgcctctttacttattgttttgctctttggttattatcaggaatgtgatcacaatatggtgccgcaacagaggaagtatgtacgtgtaagttatttcagatctggttggcgaattaggaaaggcaagtgtttctgtcagggttatcatccatatttcaactaaatcttctcttgatatctcatcagtaacatataccacaaatctctgtaatatgtatgagtggtgaataaggtttttcattcctccatactgtctatgcataacttaaacttgctgcagttcctggtaggaacgcttgtgagatacacatggttcaccaggaggatgctggattaaatgttgagatggcaaagcttgctttctcaagaggcatatggagttacgtttgtaagatggaaaatgcacttcgcaagtacattgcaaccagtcatcgaccccaagggcccacattatctgcagtaagcttaatgaaaaaggtgagatgttagtgtttttttttacctgctctgagttcagttctctggtcaagtgctggatagattgttccctgcaaatatctgtttgtgaaatctcaatgaatatgccttgtttgacccacccttgtcttatcccacagattccatcggagttagaaagtcagacagacgacattacaaactcctcgggaactaccactagtggtatgcacacaggtgaaggagccaaacggaagaaactgttgagaaagccttcaaagaaactgatagcaaatggtatgttacttgtgggcggtgccgttggtggtgcaatctgcctgtctcgtggtcactccgccttaggggcaaaggtcgcgttggcttacttcttgtcgaagatgagaaagcgtggagctcaactgagtcaaacttcccaaaacgctggtatttaa

SEQ ID NO: 142996 - DNA, 3350 bp, Arabidopsis thaliana landsberg
aagatcgggagttgtctgaatcccaagctgagatcaaagcattgaggttgtctgaacggcaaagagagaaggctgttgaagaggttagtgtaatatctgcacttaatctgtctttttccttacatttcacaatgtcctgtaaaggttgtttggattagacttgattcaactgaatatttcacatgaacagaagattgaagatatagcttgacgtaatggattatttgtttgggtctaatcaatggttaggaagaagttaaatttgtgaagcacaatttcaatatttagattctgaaaaatgttatccttcggctctaagtttttgcgcaagttgcattatgtagtataggtggttgaactgaattactcttgggttcgtttctagaccttcattagttttccgatatgtggctgtagtttttttctgttaccgttcctttgtaagcctggtttcactcttgtttggcctgtggtcagtcgctccacgaagcatatacatattcctgaatccttgtcttaagaagatgtattatgatttggctttcattattgtttatagctagatcttgaaatgctttgcgagaaaaaattgtgttcatgcctgcaaaatcttatatgaagtttatatattaggtcacataaatcatctttttttatccatctttgtatattctgacgctctactctttcatttgattgtttaagcttactgaagagttgggaaagatgtcggagaagctcaaactaactgaaaaccttcttgacagtaaagtatgtttgcaatgtttctcagttgcttttcattttccaatctcttttatttttctggattctgtatttgatgatatcgcatcttgtcacagaaccttgaaatcaagaaaataaacgaagaaaaaagggcttcaatggcagctcaatttgctgcagaagcttctcttcgtagggttcatgctgctcaaaaggatgatgacatgcctccaattgaagctattcttgcccctttagaagctgaactgaaactttcgagacaagaagtattttccttcctttgaaccagaattacctttgtatagctcgattcaacaacttacgggacatttaacagctttctcatatgggtttacatgttttgattggtagattgctaaacttcaagacgacaataaatcattggaccgcctaaccaaatcaaaggaagcagctttgcttgacgctgaaaggacagttcagtctgcattggcaaaggcttcaatggttgatgatctccagaataagaaccaagaattgatgaaacagattgaaatttgtcaggtatgtctatatcatttcttttacatattggaacaccaaaatagggtatctcttccttttcttaccactgtggtggccttatttgttgatacattggttaaaataggaagagaatagaattatagacaagatgcacagacagaaggttgcagaagttgaaaagcttatgcagagtgttcgggaattagaagaagctgttcttgctggtggtgcagccgcaaacgcagtgagagattaccaaaggaaattccaagaaatgaatgtatatttcatatgcttctatagtacctcaataacttactgtttttcttgttagtgttttggtctcgtactgatcgtaattgtggtgttttgtgttttccttaggaagagaggaaaatccttgaacgggaattggcccgtgcgaaggtaaatgcaaacagagttgctactgttgtagctaacgaatggaaagattctaatgacaaagtgatgcctgtaaggcagtggcttgaagaacgtagatttttgcaggtcattgctgatacatattaatatttaaattctcttgctgcttcaaattgtgattcatattcacggagattaacttatactattgccaccaccgttatgtttggacagggagaaatgcaacaactacgcgacaaacttgccatagctgaccgagctgcaaaatctgaagctcagctgaaggtagaatcatagctgcgggacaccatcttattttttttaatctcctaactgaggaattgctgcttttacttatttttaggagaaatttttactgcggcttagagtgttagaagagagtttaaaggggcctacgagcagcagcagcagaggcacatctgttggtagaagttcgagcaacgggcctactcgaagacaatcccttggtggagctgaaacaagtccaaaaattacatcaaatggctcgctgattaagagaacaccaagttctcagttgagatcattgactgctagtgcaagcactgtattgaagcatgcgaaaggaacatcaagatcatttgatgggggcaccagatcattggatagaagcaaagtgctaataaatggaccgagatcgaattttcctttgaaccacaagtcttctgaaggaactagcagaggcgaatcgcctagctcaataaaaggggaagaagaatcagctgacaaggcaacaaataatgatagcgtcccaggtgtcttgtacgatctgctgcagaaagaggtcataacattaagaaaagcggcgcatgaaaaagatcagagcctgagagacaaggacgaagcgattgaggtttgctagtgtttggccttttttcctgttctttgccgcctttatatgaaatgttgtataatataagtctaaagatatgggttgtgtatatttagatgttggccaagaaggttgaaacattaacaaaggcgatggacgttgaggcaaagaagatgcgaagagaagtagctgtaatggggaaagaagttgctgcaatgcgtgttgttgataaaggacaacaagatagtaagaccagacgtctctcggtctcaaagggaaacacagctcagctactttctggaaggtattaatgtattatcatatcaactacaataagctttattattacctttagatgtcattattgtttatgtattttatcatttggtagagtgtctggacgaatcgggatgacgaggagcacacagtgacaaactgattcgatcaatcactggttggtctctgtggcttgccttaaggttcttgtaccaaattgagagaagggattcaaaagccgaaagagataatcgtgtaaagtacctgattgattcgatgtgtgtttctctaaagcattccaacattcaaggtaaagggagacattgacttcacttagctgatatatttcttactctgttgcgttatgtatagtagtactgcagtagtagaggtagggttgttttgttcaacattttaagcttttttactctcttgttttgtgtgtgtcactctctcctcttagttaattttcttattaacctcg

SEQ ID NO: 142997 - DNA, 1612 bp, Arabidopsis thaliana landsberg
atggcgtggacgctggatctcagtggcaacaataatcaatatttcacgtggtatggcattaattttgatcatatgcattatttgattattcatcgttatatgcccactttgagagatccgatagaaacaaaaatagaaaagaaaaacatcacaaaagagatctgtggtttgatttggatcaccatggaaaaagtagaggtaccaccaattcataaccatccgctgttaccttttactcgtttttcctacaaggcttgtaaagggtgtgggtatgttggttacatatatggaggctaccattgcaatgagttggggtgtgaatctgtgtttcataaagagtgtgccgacccgttaccagaaatcaaccactcttctcatccagaccatcctctaaagctcctcataaatgtcgaaccacttgcttcttgtagccagtgtccatcttcgtttgaaaatggttatctttgttcgatttgtgacttcaagttggattttcgttgcgcgacgaggttgcctttggaatttattcttgaagaatccactgtccacgagcatccgattcagctctctgatggaacccgtgacggttttgtgcaactttgcaaaacatgcaaatggggagttttcgatgctgttcattacaaatgtaataaatgcgatttacgctttcatgtggagtgtaccaaactttttccacaagctagccacgttttacacccccaacacccactcaagctccttagatgtgaagaagcacccgattacgccgacaacaagtgtcttctttgcgggaataagtttgacggacgaattcaccactgtgatgtttgtaactttaccatatgtggcggctgtatggaaaacccaccgccgcttagtgttgtaagcccgaccacccatgagcatcaactttatcttctttcaaaacctctcggtttcacttgcaatgcttgcgggactcaagctgatcaaagcccttatttctgtcttcaatgcaacttcatgattcattgggagtgtatcgatttgccccgcgtcataaacatcaaccgccacgatcatcgcatctcctacactcgtcgtcttggacatgggcaaaatacatgcggggtttgtcgtaaaaaggttgatggcttctacgggggttattcttgctcaaaatgttttgattattttgttcattcaagatgcgcaaccagaagggatgtatgggacatgatcgaactggaagggacacccgaagaagaggaagatgcgccattcaaggtgattgatgacaacacgatagaccattacggccataagcataacttacgaatttaccgtggctggaatctaccagaaagtgtagtttgtaccgcatgtgtcttccagatttgttcagaaccgttctacgcttgcgcgagaaagagatgcgatttcataatccacgaaaaatgtgccaagcttcctttaaagaaacgtcatgtgtgccacaaccagccactcgaactatccccaaattatggcacctacttaaaacataggtgtagtatttgccgtcaactgttcaccggtttctcctatgaatctaaggaattaaggatagatgtacggtgcgctccagttgcgg

SEQ ID NO: 142998 - DNA, 2769 bp, Arabidopsis thaliana landsberg
  unsure (1)..(2769): unsure at all n locations
acttttaattaaacagtattaggcaggtcctaatcagcagcattaggcagttccatattccgccattaatcaattatttatagttttaacaatttgttaattttcatttccctcgagtttttaaaatttaaaattttagttaatttaaatctataagttttgacttggtgagtacattttatccaactagaaatattttgaaaatacttcataaatgcataaataattttatgtatttttgaaaatacttcagtagttatgaagttttgaaaatactttataaacaattttaaaaattaaataaaattaaattcataaatacattttatccaactatgggtttagtatttagtgtatactgaattgatttgatagttactttatgctgagttataataagattaataaattgatacaactatagtttattcttttttggataataattttttgaattttgtgtctgctcaaatttaacaatcttaatttatcacatgaacttgttttgtctaattcttatttatgacatatgcataatgcttatcacattttaattctttatttgctcgtttattcgctcaaatttctcgtagcctgtgagctttgatataatttttctttgggcgacttaaattcatttccctaactcaaagtttaatttcaggagcaactttggtcaaaggattcaacagagcgataggcacagtatctgctggagggctcgctcttggcatcgcgaggctctctgttttatcaagagatttcgagcaaaccatcatcataacctgcattttcctagcaggttgccgcatttccttgtcttctacatgaggttttgaagataaatagtaacattttcgctttgaacttgacctaccaggtttcattgctagttattcaaaactccacccggccatgaagccatatgaatacgcattcagagtgttcaagttgacatatgntatcgttcttgtttcggggaacaactcaagagacttcttaagcactgcttattacaggattttgcttattggtcttggtgcaaccatttgtttgcttgtgaatgtatttttatttccgatatgggccggagaagatctccataaactggtggctaaaaacttcaagaatgttgcaaattccctagaaggttagataaaacataatctgttataacatggttagcttattatttcaatgtcccttatttcaggtttttgtatttatccttaggatgtgttaatggttacttgcaatgtgtcgaatacgagagaataccgtcgaagatactcacgtaccaagcttcagatgatccattatacagcgggtacagatccgctgttcaatctacaagccaagaagattctttggtatgttttacgcatcgtggagacacatctttaaaatccggattatggtgatacctatagcattaaaagagctctgttttcgcagcttgatttcgctatatgggagcctccacatggaccttacaaaacgtttaaccatccttggaaaaactatgtcaaacttagtggtgcagtgaggcattgcgcgttcacagtcatggcaatgcatggatgcattctttcagaaatacaggttccttgttaaactaattcattaaacaatttgttttgtgttattagttattactatgctccattttgctagaaaggtgaatgattaatagaagagtaaacataactccttgagtgtgtatcgtcataaatgtctagcatgtgaagaaaagaaaagatgacggcacatgaattgaataaccgggggaaaaaatgtctaatccgttttgttataggtgtcataaatgttatagcatacatgtgtgaaaaaatttaaaattgtaattgtaggcccttttcaaaaacatatttatgcaaaggtacttaatgagataaagtagcttttaggtcctcatatttagttttctaaaataaagttagctctttatatatataaggttttcagcattataaaaagttgatgtagttggcttgtatgttactaggttagatataatggttcaattattgtttagtttaaatgttatgggctgtgtgatatggcaggcatctccagagaaaagacatgttttcagtaacgagcttcggagagttggtaatgaaggagcaaaagtattacgtttgtttggagaaaaagtagagaaaatggagaagctaagcctaagcctaggagagattctgaaagacgttcaacgagcagccgaggcactacaaatgaaaatagatagtaaatcatatcttcttgtcaactcagaaagctgggcagctattaaagagcaagctgaagcggaagaagctcgagaaaacgaccaagaagccaaagacgacgagaccaaagtgatcaaatccttaagccagatttgggatactaacaacaacaacaacagcaataaccatcagagtaatgatcaatctcagcattggatgtcaacgagagtatgatgcttaagaaccagagatgtggccaagtgtgtccttcattggtggttctgtggtaaatgagtcagtatataaagtatacgaaagcgcgagttctttgtcttaagctacgtttgcatcccttctcatcgagtttggtgcaaggctggagaaccttgtaaacgcttttgaggagctaagcacaaaagcagatttcagagacccggttcctcttaacgtagtggatcaagaaggattatggacaagactcatgagacttaggagacttaggagatattttggcagaagt

SEQ ID NO: 142999 - DNA, 1595 bp, Arabidopsis thaliana landsberg
agttttccgattgcaagggttaaacggagatgagagggctgcaccatttcaagagaatctcaatctctcgatctctcttatccctatctaatgccacttatcctggggcagtaacgactaggaggtcgctgtattctttgagcaggtcgttgttgtcatcaaccccgtacgccgccggtggatgctgccgagaaacgcctccgcttcattctccgtggtctgctctgcaacgccgcggtgttaaggttaacgcgattcaggtaaagtttaactgcagagattaaagtttcttactcatttgactagggaataaactattattgaacctttttgagctcacacgagtaaagatgatctgtgtccatgttcgcactctgatttcttggtttgttaatttcagctaagggcaggaaatgtaattgagcgaacaggttagctttttgaagttttctccttacatctgaacgtttttggatgagtatgatttaacaaaattttgatggaccattgcacattcagggcgtactttccgggttagtcatttggacgtttggttttctaccttcagttttttttagttccaggtattgagaaacgctaattatctttttgtttgatgttgtaggttgtagaagcagagcataagcaacaaggtagaggaggagcttccatacaggtatgcatacctgaaactctttaatcaacagtctaatgttttgatcgattatttcatatttttctgttgttgatattccgtctcttagcctaaactctcttctctgtgggaaacaggttgagcttcgtgatgttgacactgggaataagcttaacttgcgttttggatctgaggagtcggttgagagtatgttgcttattccatagcttagtgttaattcatcagttagctactaaaagttgttttttttgggttctctaaccattttggtattagcatcgtaggataggtcgattactttttttgtgatattgattgattgcatcaatttactgcagaagtttttgttaagagaaatctttcacgggcttgtatgcatagggagatactgcatatctgattgactgagtccatatttttttgtgtaatctcattacctgttttatatcaacttaaacactgtaggatcttgtgttgctaaagttgatttccttgattatgtaaatccaacaggcctaatacgtttgagcaagttgaagtgccattggacatatttggaaaagctgctgtatatttaaaaggttggtagcaagatgatatctttcgtggtgcatgtcatacttatttcctttgttgatggttgtctcaacaacaatatggatactcttgagtgcagacagtcattgttgagcaagttgagtgcatgtgctagaaatactaacatatttgtcatgtatctctttgtcccttctttcctcgtgtttgacagaggaaatgaaagttcagttgcagctgtatgatggaagagctttatctgcatctatccctaagcatatcacatgcacagttgtagaaacacaacttccaatgaaaggcctaacatcagctcctcggtatgtcctttttctcaaaagtcggg

SEQ ID NO: 143000 - DNA, 901 bp, Arabidopsis thaliana landsberg
atctctagtattgctaaactaacttccttcatatccagaaagccttcatatctcccatctgtgaagctgattctttagatatcctgtgtctttgtttttttgtgtatattaggtggactatgcatgtactccagaggaagtccagcagcattttcaatcatgtgggacagtgaatagggttacaattctgacagataagtttggtcaacctaaaggttttgcgtatgtcgaatttgtggaagtagaagctgttcagaattcgcttattttgaacgagtcagaactacatggtcgtcagataaaggtgcaaactcgttcaatacgatgtagttaattattttccatattacgatttgtcattactaaactttgtttaatctattttcaggtatctgcaaagaggactaatgtacctggaatgaggcaatttcgaggaagagggcgtccctttagaccgatgaggggattcatgccaggagttccattttatcctccatatgcttatgggtgtgttctagaaccttacctgcctatcctctcttttaaagtccatttgtttgattcatcatggttgttcataaaattgacaatggttgatggtttgtgcaggagagttcccaggttcagacggcctatgcgctacagaccgtactgattaggcaaattggtgttaaaaaagtagcagctgcttctccgttttcgggaaagcttatcatcatcaacacggatcatcggacgctgcagttgtttcgattaacagagatgagttgaagaattgtatggcagaagagagaggggaattatattctagattttctgtacaatatttgatgacaagtgcaacattttgatgagttcctttgttattattatcttcaaacacgagtcacgatttcacaat

SEQ ID NO: 143001 - DNA, 942 bp, Arabidopsis thaliana landsberg
tttctttcttcttcttcttccccaacttgaaaaaaaaaaagtaaacacgaaaatgtctccgtcttggctccgcccaaccgccgatcacaatcatcctccaccgcaaccgccgtcgcagtcaccgtctcctttatcttccggtgatccgaatctcacaacatgtctctaccaaacagatcacggcgtcttctatctaacatggtcccgaactttcttaggaggccactctgtgaatctcttcctccattcacaagattactacaaccactcttcaccactctctttctcctccgctgatctctctctttcctccgccgtctctttccatctcaacttaaacacattagctttctggaaaaaacgtggatccagattcgttctcccaaaatccaagtcttctgggacttaagcaaagccaaattcgactctggatccgaacctagatctggattctacatcgctgtagttgttgacggagagatgggactattagtcggagattcagtcaaagaacgttacgctcgtgctaaatcggcgaaacctccgacgaatccgcaagctcttctgttgaggaaagagcacgtgtttggagctaggttttcacaacgaaagcgagatttggagggaagaacagagagatttctattgattgtcgtgttgatgaagacgctaagctctgttttagcgttgattcgaaacaggttctgcagatcaagagacttagatggaaatttagaggaaatgagaaagttgaaatcgatggagttcatgttcagatctcttgggatgtatacaattggttgtttcagagtaaaagttccggtgacggcggaggaggaggaggaggacacgccgtgtttatgtttagattcgagagtgatccagaagcagaggaggtttgtgaaacgaagaggaaagaagaagaagatgagaaaaacagaa

SEQ ID NO: 143002 - DNA, 2082 bp, Arabidopsis thaliana landsberg
gaagcgggccttccatgtttttgatgaagacgatgtattgtctgttgtggaggataatagtgctgtcataagtgagggcttgtttgttgttgatgcaggctctgaattaagcttgtctaatacagctatggaaatagataacgggcgagttcttgcaaccgcgattatcgtaggcgaatcaagcattgagcaggttcccaccgcggaagttcttatcgcgggtgtaaatcaggataccaatacttcggaggttgtcattagattgccagatgaaaatagtaatcatctggtgaaagggagaagtgtttatgaactagattgtataccgctttggggcacggttgccattcaagggaatagatctgagatggaggatgcttttgccgtgtcacctcattttctgaaaatacccatcaaaatgcttatgggggaccatgagggtatgagtccaagtctcccatatctcaccggtcattttttcggtgtatatgatggccatggaggcgctcaggtatgctgtagttcgtaaatccttatactgattttagcagtagaaagttaattcaactatgaacccggaagatacatgagtttatgttttgttgacgtaggttgtatgtatatatgataaagggtttgctggaaacgggattctttgcaggttgttatgtaatatatgacggctttggtggaaatcggattcttgcaggttgctgactattgccatgatagaatccactctgctttggctgaagaaatcgaacggattaaagaggaattgtgtaggaggaacactggcgagggtaggcaggtccagtgggagaaagtctttgtagattgttacctaaaagtcgatgatgaggttaaagggaaaatcaacagacctgttgttggttcttctgataggatggttcttgaagctgtttcccctgaaaccgttggatcgactgctgtggttgctttggtttgttcatcgcatataatagtctcaaactgtggtgactcaagagcagttttactccgaggcaaagactccatgcctttatcagttgatcacaaagtaaaaaatcttctctttccctcaaaaataatttaacacaatctgagaaagtttcttatttctaattcatgaaatttcttaccctttctctgcagccagatagagaggatgagtatgcacgaatagagaaagctggaggaaaagttatacaatggcaaggcgctcgtgtttctggcgttcttgccatgtccaggtccatcggtaggtcaaacttgcacttatgtcttccatcttgcctagtgacagaaatatgaagagagttttataggtcaaaattatcgataaattaaacattcagtaaccttatttagagatgaggatcattcttacctgttacagtctctgcaaaatcatgagatctcctgaaagtgggtttcaatctgcatcgttttcaggtgatcaatatctggagccatttgtaataccagatcccgaagtgacgtttatgccacgagctagagaagacgagtgtctaatattggccagtgatggactttgggacgtaatgagtaaccaagaagcttgcgattttgcgaggaggcggatcttggcttggcacaagaagaatggagcattgcctttagctgagagaggtgtaggagaagaccaagcgtgtcaagctgcggctgaatatctctccaaactcgctattcaaatgggaagcaaagataatatctcaatcatagtgatcgacttgaaagctcaaagaaagttcaagaccagatcttgaaacagtgtatgctcgagctcttacactattataattttattatttcttatttattgaaaaaatttccacaagtttacataaaaataagaagtgaaatgttggggggaagaagaattaagaccttgatgatgcatagctgaagtccattcctttttctcatggacttgaatgtgtatgtttgttatgtataagaagaatagagaagaaatgtttttactttggggtcttgtaggtggatatgttgttgtaatattggagatgtggcttaaggaattgtaactgaaatttatgt

SEQ ID NO: 143003 - DNA, 1373 bp, Arabidopsis thaliana landsberg
atgaagtcatctattctcaatgacgtatgcaattacatgaacagagaagaaatccgctgcggagaagctgacaggaatactctgaccagtccacttacaagtcacaatataaatatcagccagagaacatcgtgcacaagctgctacaccgtgaagtaccagattacaaccacgaaaaggttcgtgcggctgacggaagcaatgacatcatcacatactctgtatgtcgatcatccaattagtccaagccacgtgtaaacctcagctggctgcgcggtcaacgttgaaaaagaaaaaggttggtttttatcacacgtgtccgaaagaaaactacacacgtgtggttcatgaacctccccttcgtttataaaagctccatggactttgctctcttctcctcgatttcaatctttgagataaaccacaaagatcctccgattcgaaggtttataaaaactcaaaatcgaatcttatccacaagaaaacaacaaggtacttttccaaaaatgaaggcggagttgaatttgccggcgggattccgatttcatccgacggacgaagagcttgtcaagttctatctttgccggagatgtgcgtcagaaccgattaacgttccggttatcgcagagattgacttgtacaaattcaatccatgggagcttccaggtaaaacttcagtccacgacaagattgatatatggttttgtgaattgactttgagattttgaagagaattcgaatttttgtttccagaaatggcgttgtacggtgagaaagaatggtacttcttctcgcatagagaccggaaatacccaaacgggtcgagaccaaaccgggcagctggaaccggttattggaaagcgactggagctgataaaccgatcggaaaaccgaagacgttagggattaagaaagcactcgtcttctacgcaggaaaagctccgaaagggattaaaacgaattggattatgcacgagtatcgtctcgctaatgtcgatcgatctgcttctaccaacaagaagaacaacttaagagtaagcttttctgatttttaatttctggtttttttttcgatttttgtgatgatgatgaattgatgatgattaatgggttttttttggttgaaattttgcagcttgatgattgggttttgtgtcggatatacaataagaaaggaacaatggagaagtatttaccggcggcggctgagaaaccgacggaaaagatgagtacgtcggactcaagatgctcaagtcacgtgatttcaccggacgtcacgtgttctgataactgggaggttgagagtgagcccaaatggattaatctggaagacgcgttagaggcatttaatgatgacacgtccatgtttagtt

SEQ ID NO: 143004 - DNA, 1643 bp, Arabidopsis thaliana landsberg
ctcttgtacttaagcatggtggttaatcagaagatatccggccttgcatccgctatgaacgccaaaatcatcggttcaggagagagatcgatggtcttggcacacggtttcggaggcgaccagtcggtttgggataaaataataccggtcttgtcccaatccttcaaagttttggtctttgactggcttttctctggagccattaaagatcaaactctctatgacccttcaaagtataactccttagacgtcttctctgacgatctcattgctcttatggaggagttgaagtttggccctgtcgtgttcgtaggccattccatgtcgggggtgatcggttgtgctgcttctattaaaaggcccgacttgtttacaaatcttctccttattgctgcttctccaaggtacgcttcactcttagtataacacttacccttaatcataattggaagtaaaaatcaaagcatatgtataatctatttctgttctgtataacatcatttaggcctatatattgaatctatttataaaatatgataatatatctgtaaataagatgaagaccgatgatttagaatttataatttacgttcgaaagagaaatctaagcacatgcaatccaaattatagggttatacagtctggccgatcgtacaagattccttcgtgaatatgtgtttgaggaaaaagacaaaataaaaataatgatttgcaataatatgctatattagaaaaataaaaatagtttttatgtggttgatatctatatgtaatgaagagtaactgttgccaagtgttgaacatgtggacatgatcagcttctagcttgttggatggatatgacatatgatcacatcttctcttacttctctgcagtctacgcatatatacgtagatgaatatatgtaaacatgctacatatgctatcaatatgtcaataagacattcatttcatacagatacatcgaaaattagaaaaaatgtgttatgattttattatcatatgatgaatcaatatatttattgtcatttttaaagttagaagtactaaaacttaacccatctttatatatcacgtggaccactaacatactatattctcctatatatagaaattatcgaatgggagttaactgtttgaagtatcatactttgactgattactttagatatttattatagttataggtgagaaagtcggccataatttaatgcaacaattaataatgtttgactatatatatctaatgcaacgtacttataatgtaaaaagaaaatgatatttagatgatcaaattagtaacgttactagattgaaatgttaataggtatataaacactgaggattataaaggagggtttgagtcaaaagacattgacacgatcattaccagcattggctccaactacgaagcttgggcggttgatttctcctcattcgtggtcgacccgagagactctctctcggtccaaaggttcgagaagtcccttaagaagatgaagcccgagacagctcttgccttagctaagatagtgtttggtagcgacgagagagagattttgggacaagtgtcagtgccttgccatgtcatacaaccaggaaacgacgtcgtagtgcctgtctccgttgcatacttcatgca

SEQ ID NO: 143005 - DNA, 2170 bp, Arabidopsis thaliana landsberg
ttcaaatccgcaaaagtggcgacgaatcaacaagagctcttactccgtatctcgatccttggtctcgtctacatcttagctttcatagctcgtctcttcagtgttctccgctacgaatcaatgatccacgaattcgatccgtatttcaactaccgtacgactcttttcctcacagagaaaggcttctacgagttttggaactggttcgattccgagagttggtatcctctaggtcgaatcatcggcggtactctttatcccggtcttatggtcacagctgcgttaatctactggacattgcgatttctccgattcttcgttcatatccgtgaggtttgtgtgttaaccgcaccgtttttcgcgtcgaatacgactctcgttgcgtatttctttggtaaagagctttgggatacaggagctggtcttgttgctgctgttcttatcgctatttgtcctggatacatttctcgttctgtagctggttcgtatgataacgaagctgttgcgattttcgctctgttgctgacgttttatctctttgttaaagcggtgaacactggttcattagcttgggctcttgcctctgcgtttggttacttttatatggtttcagcttggggaggatatgtgtttattatcaacttggttcctctttacgtgttggtgttgttgatcaccggaaggtattcgatgaggctttacattgcttataactgtatgtatatcttggggatgttgctcgcgatgcaaattcgctttgttggttttcaacatgttcaatctggtgaacatatgggtgccatgggtgtcttcttattaatgcaggtgttttacttcttggactgggttaagtaccagctcaatgacaccaagttgttccaaacgtttttgagaataactgtgacatcggctattcttgttggtggtgttgctgtgggtgttggaacagcgtctggctatatatctccatggactggtcgattttactcgttgcttgacccgacttacgcaaaggatcatattcctattattgcatctgtttctgagcatcagcctactgcctggtcgtcgttcatgtttgactaccatattctgctctttcttttccctgcgggtctttacttctgtttcaagcgtttgacggatgctacgatatttattgtcatgtatggtctcactagcttgtactttgctggtgttatggttcggcttattctcgtcgctactccagcagtttgtcttatcagtgccatagctgtctctgccactatcaagaatttaacttctctgttaaggacaaaacaaaaggtttctcagactggttccacgaaaggagctggtagttcaaaagcttcttcaaaggtgaatcttttagtgtccatttttttatattcgtttgtttacttgccacctactttgaactgtagcaagcttctctggagaaggagaaaatttaatctttgtcttctatgccctagcaggttacacttgatcagtctcagcctttccagaagaatggtgccattgctcttcttgttggtgtattttatttgctcagtagatatgctattcactgcacatgggtgacagcagaggcatattcatctccctcaattgtcttagctgcaagaggagcccacgggaacagaatcatctttgatgattaccgcgaggcatactactggcttaggcaaaacactgccactgatgctaagattatgtcgtggtgggactatgggtaccaaatcactgccatgggaaatagaactgtcatcgtcgataacaatacctggaacaacactcacattgctaccgttggacgtgccatgtcttcttatgaagatgaggcgtatgacatcatgaggtcacttgatgtgaactatgtattggtcgtctttggtggtgttactggttattcttcagatgatatcaacaagtaagtctccttacctctctcacgcatgctcatcttctttattactactgaaaatctggtttttgttgcgagtcaaccaattggtggcttgctaacgaaatgccgttttgcttctttttgaaattttgacttatctgaaataactgtgggtctgtgctcattaattattgactagtagtgagcaaatgaatggcgtgggctagtattgagttgatccttattaaccaaatatcg

SEQ ID NO: 143006 - DNA, 1585 bp, Arabidopsis thaliana landsberg
atggaggagacgaagcagtcattgatagcatcgttgccgtcggcaccaagaaaaccaaagtcgaaagtagagagagttgtgaggaaaacgttcaaaggaacagctcatctatcaaatctgctcccaaccggttctgtaatgagttttcaaataatgtgtccggtcctaacccatcaaggtcagtgtcccaccatcaccagtcgctggctcacctgcttcctcgtctccttatgcgccatctcttgcttcctcttctcctttaccgactccattagagacccaaacggcaaggtatatacatacatatctctgtcacattttccgctattttgtaccattcataacaacttgttgacataagcaccaaacttaatgttgcaggttaggtacggattagcaacgtggagtgggctattagtgatggatggatcgattagtttaacggaggaggagagggaaaagtataagctcaagattcttgattttattcacgcaatcatgtcaatgctcgtcttcttcgcagtctccatgtttgatcagaacgtaacccgttgtttattccccgttccttccgaggaaaccaaggagattcttaccagtttaccttttgtcatcggcgtcatttgtggtgccttcttcctagcgttccctacacgccgtcatggcatcggatctccccttaccaaagaataatttcatactctagacaagaactgaaaaacttttgtataacaaaaagatttgtgatcttcaatttttgtttatggaggacatgtaccaaatcttgaaaaaactattctttaaaaagaagacttgtttaacaacacgaaatttaatgaagagggagataattccctataaattgtatattaccaaatttatcccaatctccacacatcacaagacagagatgctttaatcatcacccaataagcttcttaaacccagctttctgttccgcagttaatctcgctggaaacttgatattgaacttgatccttaagttccctttctttgtctgatctttctggagtggcattccctctttaggaaccacctcttcatactctggatggatcacatttgtgatcgggattgtaagtgtacggccatcaagggtcgctatgtttgcggtgtagcctgttaaggcatcagctagtgagactttctgtgtgacaatcaggtcgttgccctcacgggtaaacactggatggggtttctcgtcaatgatgaagactagatccgctggaatcacacctggatgctcattgcctttctctgggaatgtgatctttgtgcctttcttccacccgggtttcactccaatcgttagaatctcttccacttgcattgccttactgcatttaccagaagacagatattagatattgttaagacaacaactagggtcagctcaaatcaacaattaaccatatggaagctggggaatgttgcagaatctaaaagcttgaaactttgtttcatatatgttcatcatacttgggacttgggaggttgtatatttctaaaaccatgctctatgttgactagtagataagcctaataacaaaatggtataagtgtg

SEQ ID NO: 143007 - DNA, 2534 bp, Arabidopsis thaliana landsberg; identical to SEQ ID NO: 33411

SEQ ID NO: 143008 - DNA, 2672 bp, Arabidopsis thaliana landsberg
tcctcgttggtttccatctccacctgtttctctttgcctctttctccaagtccatagcttatcaaaagcaacaccaacgaaaaagaagaagacgaatagactaattacactacgattaatggtcggtgacggaagtggatggattacacctaactgggtcctaagcttatccactatcggatcttccctaaagttactgaaattggcttggtcattggactctttcgaactaccctcttcttcaaattcattcgtaaacctagcaattacaaacctatttgcagcctttctactagaatccgtcaatcttaggtttttcgaattcccacgaaatccacaggaaataaacctaaagttcgaaattttgacgctcggacgcagaacccgactccttgtaaaaaaaaccgcgcggagctcattagagcatggacagagcagagtgcaagacacatcaacaggtaatcggaaatcaaaattcgaagaagaagtttgtggaatcatctatgaatcgtatccgaagaagaaggagaaaaataacgcatatctttagggcaataacagtttctccaatggctcgtagcaaaatctgtagaagctaacaaagttagaaaaattgcagaagaagaagttcattttcttctcttcttacttctgtttttttctctggactgtttgacacgtggatcgaaccctcgtctccccctctacggctattaaaaaaaatatataaaaactaaaccgactgatattcagagtcagttcgattcgattgaatgggaattttggtttaatgtcggttcggttcggttcctttaaaatctgaaaactggaaaattcgaattgaagtattaaccaccccctctctctctcttttgcttacttctcaattcacatgattgagctcaaaacctttcttgatcttccattacactttcttcatctcaagcagatccattgcttactcctcacttctccgatcttctacactcgtcgccatctctttctctcacgtcttctccgtcgctgctgcaccgccgctactcaattccgctacgctcgtcgtttattatgtcaaatccaaactccgagcattcaactatgggattcgctcattggtcacttctccggcgaccgtcggttatcatttcttgcttatcttcatatgcggcgaaatggcgtcgtccctagccgccacacgtttcctccgcttctcaaaggggttttcaaactgagagactcgaatctgtttcagtttcatgctcatatcgttaaattcgggttggattcggatctttttgtgaggaattcgttaatttcgggttattctagttctgggttattcgattttgcaagttgtctttttgatggaactgaagacaaggacgtggtttcttggactgcgatgattgatgggtttctgagaaacggttctgtttcagaagcaatggtgtatttcgtggagatgaaaaagactggagtcgcggctaacgaaatgaccgttgttagcgtcttgaaagctgcagggaaggctgaagatgttcgatttgggagaagcgttcatgggttttacttagaaacagggagagtgaaatgcgatgtgttcataggaagttctctagtagatatgtatgggaaatgtggttgttatgatgatgcccagaaagtgttcgatgaaatgcttagtagaaacgtggttacttggaccgcattgattgctggatacgtgcaaagccgttgcttcgataaagggatgttggttttcgatgagatgttaaagagtgatgttgcacctaatgagaagactctaagcagtgttcttgcggcatgtgctcacgtaggggcacttcaccgaggaagacgggtgcactgttatatgattaagaattcgattgagataaacactacagttggaactacattgattgatctttatgccaagtgcgggtgtttagaggaagctgtacttgtttttgagagacttcatgagaaaaatgtgtatacttggaccgcgatgattaatggatttgcagcacacggatatgctagaggtgcatttgatctcttttataccatgttgagtagtcatgtttcaccaaatgaagttactttcatggctgttttaggtgcctgcgctcatggaggtcttgtggaagagggtcgaaggcttttcctgagcatgaaggaacgtttcaatatggagccaaaagcggatcactatgcgtgtatggttgatttatttggaagaaaaggtttgctagaagaggcgaaagctttgatagaaaggatgccaatggagccaacaaatgtggtatggggagctctgttcgggtcttgtttgttacacaaagactatgagttaggtaaatacgcagcctcccgtgtgatcaagctgcaacctagtcatagtgggagatacactctcttggctaatttgtactcggaatcccaaaactgggatgaagtcgctcgggtaagaaagcaaatgaaagatcaacaggtggtgaaatcgccaggatgtagctggatcgaagtgaaaggcaagcttcgtgaattcatagctttcgatgataagaaaccccttgaatctgatgatttgtacaagactctcgacactgttggggtgcaaatgagattgccagatgaattggaagatgtgactgctgaatcatgac

SEQ ID NO: 143009 - DNA, 2732 bp, Arabidopsis thaliana landsberg
tcctccactacagttgatcatggtaatatctcttgccctgaggtaaagctcaatttgataaacgggaagcttagaactttgggttcagggtatattattgacttgtgctctgtgttcctggaattctaagataaaacttgaactcacctcgcttgcatcatttagttactagtttcatcacattgaggtggcttgaatttcttgtttaatttgcagtttagtgatacttgtttgaactttatctctaagctatttactgatttgatttcagctaaaaccagggttgagcgcatatcctactgatccccgacaagcagcaaactctttggtgtctcttcttgacaaagcagaagcttctgttccccgtgagctgcgtccaaagacacatgtcagagttggggtatggaaacgaattctttccttacgtagaataattgaagctatcttgtattatcgttgtttttttgtgaatcaattgaaatgtttttcttctctaaatcttgtcaggctactgcaggtttgaggacgctgggtcatgatgcatctgagaacattttgcaagcggtaattttatatccataaatttttcatgcacattcgccaggtcacttagctcttatactgtattatacttttgtttataaggttagggaactcctgagagatagaagcatgctgaaaactgaggcaaatgctgttactgtactggatggtacccaggaaggttcttatcagtgggtatgttgtcccacatttgttcgtgtcttatatgaaatcatcttgctgtatttctcatgtgtctgcgtttatgcctttatattcatcgtctccattcggagaagtaaattctggactggtatcctttctagtttcttaattattcaataagaagtgtttcactatggcaattgtaatagttcaaagtctagtatgtaaaatagtattaaaactcaagctgttggactctcaccaacctctaatcaagctgacattttgtcttaatgggctttaactttgcaggtaacaattaactacttgctaaggaacttgggaaaaccatactcagatacggtaggagtggttgatcttggaggggggtctgttcaaatggcatatgctatatctgaggaagatgctgcaagtgcaccaaaaccattagaaggagaggattcatatgtcagagaaatgtatctgaagggacggaagtatttcctctatgttcacaggtttgtcacctcttacgtctctcaaagagcgaggcagttttaggctattctatgtcatctgtatatcttctagacactgtactagttagatatttggtcttccttccatgctagcacacatttttattaattcaaaatctttaatgtgaggtgttattggcttttttcgtgcttgtagttacctacattacggattactggccgctcgagcagagattttgaaagtttctgaagattcagagaacccctgcatcgtggcaggctatgatggtaagagattattgttttgtcatgagagctgttttttttttcttaaactagagttctctgaaattctcctcgtatgacacatgttttcattattgccattatcttcgccatccttttctagaaattctcttagcatattggatcaacagttttcgatttcttctaagatactttattcactgtaggtatgtacaagtatggaggaaaagaatttaaagcccctgcttcacaatcgggtgcgagtcttgacgagtgccgaaggataaccatcaacgcactaaaagtgaatgatacactgtgtacacacatgaaatgcacattcggaggagtctggaatggtggtcgaggtggtggtcaaaagaatatgtttgttgcttcttttttcttcgatcgtgctgctgaggtaattcaaccaaaaacacagtttatcaaatctttcacacacaacaggtttctttgctaatctcggtataatggtattaattattatgacacaggctggattcgttgacccgaagcaacctgttgctacagttcgtcccatggactttgagaaagcagcaaagaaagcttgtagtatgaagctggaagagggaaaatcaacgttcccacttgtggaggaagagaatttgccttacttgtgcatggatctcgtttaccaatatactctgctcattgatggattcggtaagtttctcccctttttacaccaagtcactttcaagagaatccactatttattttaggttcaggatactagaatttgcttaaacctatgcaccaaatacatgaaggaaaaaagtgttacattttaggatgatctggtccaagtttctgtaatgtctttgtatatgtatttcatttgtcttatgtttgtattttcttgggtaaaaaatataacaggattggagccatcacagacaataacgttagtgaagaaggtcaaatacggagaccaagccgtggaagctgcgtggccattgggtagcgccatcgaggccgtatcctcaccgtgagggggcattttgggaattacatagaaccttattcttttgatttctgccaaagctttttttttttttttctctacctcaaatttttaccatccttaaagcatagtacttatcatttttattacaatatatcctatttagagaaattgttttgttacttatgtttacttttttccagatttttgattctttttttgtataatagagtactcttttatgaaaa

SEQ ID NO: 143010 - DNA, 1027 bp, Arabidopsis thaliana landsberg
tgtcatggaatcaagcccacaattctctagctcagattaccaacccttccaacaagcttcgtgtaattttttataacctttagtttgagatcaaaatattacataatttcaaatctttacgtaccatattcatttttcgagtacgtaaatttgtatatgcatattggtatatatttcataagataatttgatctcaattcaaattcactcaattagctaattattttaaaggatttcagattttaatatttctttaacaacatggatgtaaatcagggtaaggtggcgttgataactggtgaagactctgggattggtcgagccgtgggatactgttttgcatccgaaggagctactgtggctttcacttacgtgaagggtcaagaagaaaaagatgcacaagagaccctacaaatgttgaaggaggtcaaaacctcggactccaaggaacctatcgccattccaacggatttaggatttgacgaaaactgcaaaagggtcgttgatgaggtcgttaatgcttttggccgcatcgatgttttgatcaataacgcagcagagcagtacgagagcagcacaatcgaagagattgatgagcctaggcttgagcgagtcttccgtacaaacatcttttcttacttctttctcacaaggtggcacacgtgtgatattttgttgtgacgaagtcaaacctacgtgtggttgtaattgatatattccattttaattttgttaggcatgcgttgaagcatatgaaggaaggaagcagcattatcaacaccacttcggtgaatgcctacaagggaaacgcttcacttctcgactacaccgctacaaaaggagcgattgtggcgtttactcgaggacttgcacttcagctagctgagaaaggaatccgtgtcaatggtgtggctcctggtccaatatggacaccccttatcccagcatcattcaatgaggagaagattaagaattttgggtctgaggttccgatgaaaagagcgggtcagccaattgaagtggcacc

SEQ ID NO: 143011 - DNA, 1360 bp, Arabidopsis thaliana landsberg
atgcagttgctgctcatcggaagggtaatgactgatggtagactaaatgcgaggctgaaagcagatttaactgataagttagttgtgaaggcgaatgctctggtaagtaccacaactttagaaaatctgttttttctaggtgtagctggaaattacgttcgttctctctgtaatatagtgtttgtcatctttgtttactttctttaccagataacaaatgaggaacatatgtcacaagcaatgttcaactttgattacatggtatgaaaattctctgtatataataatttcctatccttgtgatgtacctttttattatacagtatttggttcattgagtttttttaactgtttttatctcacatttatgtagggatcagactacagagctcagcttcaacttggacagagtgccctaattggagcaacttatatccaggtaagtttgacttgtcccgtgctacagtggaaactttctagatttttctgtgtagtcaaatagccagggaaaggttactaaccatctctgagtgttttaaccgtgtactgtttgccttgattcgtctagctgtgacatagatgagaggtgaaccttacgtcgttctattagactttgtgattatgtcatgcttagtttctgtggtcaaagttatatatatatcttttatctgtgggcagtctttcttttgatcagtaatagttaaaattttaagtaaggaatgtatctgtttttttctattcattaaattatcataatttttttgtacagagtgttacaaaccatttatccttgggtggtgaaattttctgggctggtgtgcctcggaagtcgggaataggctatgctgctagatacgagacagataaaatggtagtgcttcatctcagttggtttattatacaaattgcaaggttcaaaaactcagttagctgaaagtagatcagaattttgaacactttgagtttatatacccatcatattaagaactgttcttgatgaacaggttgcttctggtcaagttgctagcacgggtgctgttgttatgaactatgttcagaagatttcagataaggtgatgtaccgttctcatttgattgcatcttaaaaccttgtagagttgagagatatatcatgacacattcaatctttttcatgaatcatgacacacaggtgtcacttgccactgatttcatgtacaactacttttcaagagatgtaacagctagtgtgggttatgactatatgcttagacaggtaagtaacattgccatattttccctggattgtaagtgaattgaaaacaagcaacaaaagaacattctaaatccgtattattctaataatataggttttgtttca

SEQ ID NO: 143012 - DNA, 1234 bp, Arabidopsis thaliana landsberg; identical to SEQ ID NO: 8917

SEQ ID NO: 143013 - DNA, 498 bp, Arabidopsis thaliana landsberg
gcattctccaaactccaattttttttgtttctctcaataatatttgtgttcatactgtttcgctgtttccaatacatactaatggataacacaaaccgtcttcgccgccttcactgtcataaacaacccaagttcactcatagctctcaaggtttgtctttgatttagttggaaatctaattgttcttccttttggtctacgctcattcatttgacctgtaacattaaattgttttgtgatgtacgttttcactgatattttgaatttatatactaactaaaatgcagaagtgagtagtatgaaatgggagtttatcaatatgaccgaacaagaagaagatctcatctttagaatgtacagacttgttggcgacaggcacgtaacatttttcttcttctgtttatatattgatctagttccaaatagaaaaacttaaattcttgaccctaattggattataatatggggtgaaaatatgtggctttaacaattaaata

SEQ ID NO: 143014 - DNA, 1247 bp, Arabidopsis thaliana landsberg
caacactacaaagaagaaacacactctatctctctgtctcaatacatatttcctcacttctgatcagtgtgatcacgtagagtgccttgaaggagaagaaggaaacaaaaagaaataaaaatgggataccttatagaagaaactttaagctctaactctaaaaccccaattgttatcgatgatgataacgagttgggtttgatggccgtgagactagccaatgctgctgcctttccgatggttctcaaagccgccctcgagctcggtgtctttgacactctctatgctgaagcctctcgcagcgactcgttcctttcaccatcagaaatagcgagtaagctaccaactacacctcgtaaccctgaggcgccagtcttgttggaccgcatgcttcgtctactcgctagctattccatggtcaagtgtgagaaggtctccgtaggaaagggggagagggtctatcgagccgagccaatttgcaggtttttcttgaagaataacattcaggatattggatcccttgcttctcaagtcattgtcaatttcgacagtgtcttcctaaatacctggtaattttcacaattcctctttgtaacaaatctgtttgtcgtcaatgttagaatccttattattaaaacttactttatctatatgaaactttcagggcacaattgaaagatgtggtgctagaaggaggagatgcgtttgggcgtgcacatggtggcatgaaactctttgactatatgggtacagatgagagattcagcaagctttttaaccagactggattcacaatcgcggtggtgaagaaggctcttgaagtttaccaaggcttcaaaggtgtgaatgtgttggttgatgtgggaggtggagttggtaacactcttggtgttgttacttctaaatatcccaatattaagggtatcaactttgatctaacttgtgccttggcacaagcacccacttatcccggtgtggagcatgttgccggagatatgtttgtggatatcccaaccggagatgctatgatcttgaaagtaagctcaatagaacttattacttatatgttttggaagtgtatacatgctagctagaactttatacttatgtgtttaaatatgtttttacagcgtatacttcatgattggaccgacgaagattgtgtcaagattcttaagaattgttggaaatcactaccacaaaacggtaaagtggttgttatagaattagtcactcctgatgaggca

SEQ ID NO: 143015 - DNA, 1458 bp, Arabidopsis thaliana landsberg
cgaaatcaaatgtgatagcttttttgtaggtttccaaaagaggtgacttggattatgtttaagggaatgtataaagacttgaacatcaatatagtgtgtcctggaaaagattcaactcttggtatgtgtatccatgtggttaagtgattgtaagtgaaatagtgtttcaagatgttttgtgaagttcttgatgttaattcgtttttcaggggttgagagtgttggcacagttcctgcatcactcgtgacttatgcttccattctagcaattcaaccagacttaatcattaatgcgggaaccgctggtggctttaaggtatcaacattacaaatttctctacatagttctcgtttcatgcctcttatgtgtcagaaataatgaacacccttccttgtttttaaatggtcttttcaggccaaaggagcatgtattagcgatgtttatgttgtctctactgttgctttccatgacagaagaatacctgttcctgtaagtgctcctttgtattgttcatgtatcagtatgagttgcaaagtaaacctgatgttcttgagtgttatacttgcattctaattccatatatttttgccctttcctaaacatttttatactttctgcaggtccttgatatatatggtgttggtatgcggaacaccttccccacacccaaccttataaaggagctgaacctaaaggtgtatactttattagttgctctgagttcaccatttgatcctcatgcaagattttggttatttcttgatatggtttgcataagtggtagatttatgatttagttgcaatgttcccaggtgggaagattatccactggcgattctatggatatgtctccacatgacgaagaatccatcacagcaaatgatgctacagttaaagatatggaggtcaacaatccataagtttcctgtgttgatgtacctggctccatactatgtgtttgtctttgtgtctttatcagttactacgacttatttacggattcttggcatttcagggagcagcagtggcctatgtggctgatatctttaaagtgcctacgattctaataaaaggtgtgactgatattgtggatggcaatagaccaacttctgaagaatttttggagaacttagctgcagtcactgccaaacttgatgagtcacttaccaaagtgattgacttcatcagtgggaaatgtctctcagacctctaacaagtcatacgtattaagtttcatctgttcagtatgtgcattgggcgaagaaagcatatgaagattcaagcaaagggcgtaggtagggaataggtttgagcagaaatttcaactcttcaccttttctcatttgttcctctatttctttttgctgtctttctattgatgatccatcatacatgtagaaactcagcaaatttgatacccaacaacagagtcataattttttaatatcaatttcgaa

SEQ ID NO: 143016 - DNA, 1429 bp, Arabidopsis thaliana landsberg
actgcattttggatgatgacaacgatgttgctcaagttgggagtcagagattggcaaatagaaataatagtcgcattagagggagtggtagagacggtttatcctctgtcacggcagcagagatgtctcagactgaaacatcaaacaatctcaattctcctgtctctttggagctgttctctggttttccagaatttggcctctctggttccttattgagtcatgacagttttcgcagttataatttagatgggatctccgaggtaactattgtctgttacttactctacgagacatctatcttgtctgagcatcatcaaatagtgcttacgacaattcccttaacaccgtttaacttttgttgttttatgtttctcggatgcttttgcagattctgccagaacttgataggatcgaacaagatatcgaacttaattatgaggttgaatattattaacacatgttttgacttttgagtttcagatattgtgatgcgtgttgttactcatattttcctctctttgagcaggatctgcttatcatggaaacaggtttacttctcggtggactaagcttccatgaccaacaccgagacatgaggctagacatcgataacatgtcatatgaggttcgtctttacatctttgaaacccacgttttgttttgggatgtagtatctttaccgttttgtcttttcttttgattgaatacaggaactattagctctagaagagaggattggtacagtaagcactgctttgacagaagaagcaatatcaaagtgcttgaaaacaagtatctatcagatgaaacctttgagttatgggtctatcaccaaaagtcctagtgataacaaggaagatgccaaatgcagcatctgccaggtctgtcccttttgttagtcataatcaagtctttggctttgatgaaatcttaagtaaaacctgtcatgggttgatttagctaagtgaacaacaccgaaatctttgatgattacaggcgtttcattgatgacatgatggtggatatagaactgatatgtatatgtaaaatcagaagttttctttcccttttctctacagttcttcatactctgatctttgttattctcaggaagaatatacgattggagatgaagttgggaggctacactgtgagcacacataccatgtgaagtgtgtgcaagagtggttgcggatgaagagttggtgcccaatctgcaaagccacagccgaaacctgctgtaaataaccgtcttcttcttcttcctcgttcgttgtattagttctttcatctaaagcctgtgaacaacaatggaacctgcgtaaaaaaggcctcaccatttgctttgtgtacataccaattcacaccggctctgtctctctctgccttgtgtctaatgacagagctatcctgtgtttctcttgtc

SEQ ID NO: 143017 - DNA, 1449 bp, Arabidopsis thaliana landsberg
cctaatccttcatcaccaagctaagtctcaaggtactcattcctttttcgcttttgtttcttctgctactgctactgctatgcgtcgtttgattcctccttcaatttcgtcttctccgatcatatctctatacttttcttccggaagtaaatagcaccgatcttttaattgcgtcgattttcaacctaatcggagcataagaacacgttttccgatttataattgttgcgcttcggtgtaattcttctcaattataaatcgcgattctatacgattagtgattttatctcccgattttgcgatttactgttatcctcctcttggtgttttagggttttatctgatttctacagtgatctatagttttccatatatatatttctggattatgattccatatttggttttgcattccagatctgattgtggttgtggttgacttcttcttcaaagtttcacgagttcgataattagtcaaaagggtttgatatatagctgtggtggtaaaggaacagttgttctagcagagcatactccttattcaggaaactttagcaccattgctgttcaatgtctgcagaagctacccacaaatagcagcaagtatacttactcttgcgatggtcatactttcaatttccttgttgacaatggctttggtgagttttctttcttagcctttttctacttgttgataagttgaaagcttttttaatttacttcggatttggtgatgctttgtgattgttgcgtgtatagtgtttctagtggttgctgatgagtccaccggaagaagtgttcctttcgtgtttctcgaacgggtcaaggaagactttaagaagcggtatgaagcgagtataaagaatgatgagcgacatcctcttgcggatgaggacgaagatgatgatttgtttggagatcggtttagcgttgcatacaatcttgacagggagttcgggtctgtctatagctgtaactatctgatatcacttcattgtttcgcattgcaactgtgttctgattcttttctttcccctctaataggcccatactaaaggagcatatgcagtattgtatgagccatccagaagagatgagcaaactttctaagttgaaggcccaaataactgaggtcaaggggatcatgatggacaacattgagaaggtatgcttttgtcgttataagaaaagatgaactagcttagacattttaattaacagtagcacgcagatcttgtacttttttggtttaaggtgacaacatttttatccacatgattttgcaattacaaaaaagtactgtaggaaagatgctgaacaacaaatactttctagaagagatatttgacaccaaataaataggtttacttccatggtagttttactggataaatgtatcaattgcttttctcacaccattctttattaacctatatttggtataattat

SEQ ID NO: 143018 - DNA, 5616 bp, Arabidopsis thaliana landsberg
atgattgctgattacaatgttgttggagcaaagattcgagctccctctggaatcgatcttcgagatccacattggatcctcgattcacacttgtcaaatttgatcgcgtatccatgtagctattagtaaccatctcttcccttcatccgaatcaatattaaacctaatcaaatcaacacctgcaaaaaccagaaaaaaacaaaaacaaattcgtgtcggtgttacgaaatcggagaagaatctatcgatttttgaaaaagagcaatgatcagaatccgatcgcgaatcaaagtaatgaatcacctctctatcgatttcaatgtctacgaagacggaacgataaggttctctgtttcgtgaaaacgcagaggagagaacattgaaggagaaagtgagagagggagtgagataagaaatgtaagtgaggaagattgagagaaagggaaaggggattcaaagaatgagagacgaataaggtaaagaagacaaaagaggcaaatcatggatgtctgagatcgctttcatcctttggtaattctcccaaactgtcacactggaccttttgtaattacataaactaatcttaaaaaaggtgattagaagaagatgcggctattacgacatcgtatatccatctctttgtctgatggacaaattacataaagttaaaaggatgattaattaatgattaaatttgtcacctaaattcaagaatctcttattaaatcgagacaataaataatcacaatttctaacgtttgttttcttaatcagagagaagtttgtatttttcgtttatttcgttacggtcattcatttttctgataattaatttgtaatctttatacagaagtttaattaatatagtttatttacaatagagaaataccctctacggtaatagcattaaaacaaatatttagtatggcttaactcttttaatactaataatgatcaaatatttagttatgtcttactgactatattcctaaacatttccaatcttaagagagcaagattcgcacattttaagaactagcaaaaactcacttgcaaatcctccatattttgaaataattattttcaattttataatttgttagtctagtttattaaattaactcgcacaaattacttctatttttcttaaaaaatcaaaaacactattgtttgtacaaaacagtttttaatcaaaaacttacaaagcctataagaaaaatctcttgcagcccactcaaaccattccttagaacacggaactctctattcatatgaaatgaccaaaccatccccacttcacttaccttctatgtatggaaagttgtgagggtgaaacagtaatttaaaacgatatagtttccattacagagatttctatttccattttttgatatcattcgcaatcattttcttcttcttctttcccatgatcgtctctcgcttcccaacgcaatcttcttcacccaatctctaaatctctcctaaattccatgtctctcgcttccattcgccgtttagctgccggagctgccgtaattgccgctgcatccggtggcgctgtctacctgtctccgtcggttgcctccagcgacaaaggaggtggtccgattctagattcgttgaggcgtaggcttggtgatcccaccgcttctgtaccgtctcgatctgctcaagagtctgctctgattgcagccaccgcttctgatccgctcgatgttctcgtcattggcggtggagccaccggttctggagttgctcttgacgctgttacacgtggcctccgtgttggtttggtggagcgcgaggatttctcctctgggacttcttcgcgatctacaaagctgattcatggaggtacttttaatttttgaattttctatgtggcgtggatttccgaatttcgtataagaagctctctgaattgtctggtaatatgaaaccatttcttagtttactagttggaattgagtggtatgaccattcaatttacgaaattatattgaagaatttgtagctagttactttggtttttgccactcattgttgtgtttttgtttgttaattcaataattgaaggaacatacatgttaaggatatgtattacatttgcggctcttgatgcaccatttgatttagtgctcgtttacacttaggggttcgttacttggagaaagctgttttcaatcttgattatggacagctgaagcttgtatttcacgctcttgaggagcgtaaacagctcattgagaatgcgccacatctctgtcatgctctgccctgtatgacaccttgttttgattggttcgaagttatctacttctggatggggttgaagatgtatgacttggttgctggaccacggttattgcatctgtccagatattactctgcaaaagagtctattgagctcttccccactcttgcaaggaaagggaaagacaagaatttgaggggtactgttgtgtattatgacgggcaaatgaacgattcacgtctgaatgtgggtttggcatgtactgccgcgttagctggtgcggaagttctcaaccatgccgaggttgtctcgcttattactgatgatgctactaagagaataattggtgcccgaattcgtaacaatctcacaggtaaaacgactagcaatttcgtgcaattcagtatacctctgctctgtcatgatttgtgcagtttttgatgagatgtttcaatttgacaggccaagaatttaacagctatgcaaaagtagttgttaatgcggcaggaccgttctgtgattccattaggaaaatgattgatgaagatacaaaaccaatgatttgtccaagcagcggtgtacacatcgtgctgcctgattactattctcctgaaggcatggggttgatagtccctaaaactaaggatggccgcgttgtgtttatgttaccgtggttgggaagaacagtagcaggcactacagactctaacacttcaatcacttcacttccagaacctcatgaagatgagattcaatttatactggacgcaatcagcgactatcttaacattaaggtatatccagattcagattaatgaggaataatcaattctatttttgacccaatagctctctaacaattcagttgatgatgttatgcatcctaaatcttatataggttcgacgtactgatgttctttcggcttggagtgggatccgtccattggccatggatccaacagccaagagcacagagagtatctccagagaccacgttgtcttcgaggaaaatcctggtctggttacaatcacgggtggaaagtggacaacttatcgaaggtgagggtactgtaaaatatagcagaaatttgttaaagttgtgtgatcattgctcatcagtaatttgctttcagcatggcggaagatgcagttgatgcagcaatcaaatcgggacaacttaagccaaccaatgaatgtgtaacgcagaaactacagcttctgggttcttatggatgggaaccatcttccttcacaactcttgcacagcaatacgtgcgcatgaagaaaacatacggtggtaaagtggttcctggagcaatggacacagctgctgcaaagcatttgtctcatgcctatggttcaatggctgaccgagttgccaccatagctcaggtatggttctatatccagactcgttcttcttcatgtcctcggtaggtaatattttggatttcggattgcaggaggagggtttggggaaacggttggcgcatgggcatccgtttttggaagctgaggttgcttactgtgcaaggcacgagtactgcgaatcagcggttgatttcatagcaaggagatgtagaatcgcgttcttggacactgatgcagcggctcgggcgttgcagcgtgtggtggagattctagcaagtgaacacaaatgggacaagtcgaggcagaagcaagagttgcaaaaggctaaagagtttcttgaaactttcaagtcttccaaaaacgcacagtttaacgatggcaagcacaactaaagcggcctctcagagatttactacactattttatgattgaatttattatttcctattttcccatttgttgaattttttgggtagctactagcgagaacgaataataaaactgtacggatggaataataatactgcggctactcatgtttctcggatgatttgttgtgaaatgtgcaagagccacaggattctgagtcagttagattgacatcaatagtctggaagactcaattacttctcttaactaagcgtctactatagctttaagtctagtggagtggagtcagagatttgagattctaaacaagtgtcagaaacaagggttaggttcaattttcacaagatcattttgaacaacaaagtcataaagtgaatagtaattaagagtcatgtttgtttaaatttgatagtaacgtttggcaaaccaaaagccaaaagagagaatctcagattccactctgttgtgtgtgattcggaaaaaatcgaagatgaatagtaaagtattttgtggctttctctctctatttttgtttttacttggaaggaatatgaactcaccttggaaagttttatacaatggaaaatctctaccaaataatttaaacaaaacaaagctctcaaagaaaggtctttggttccgtattagacaaatactcacgaaactagacaagagtttaaaaaagaacaaaaaaaaatgaaaaattgagatactcacgaatccaaactcttgtggcagtagaaagcacgaagaagatatacattttatgtctcctgcttctcctttatgatttcaccattatgatttttctgcagcttatgaaaatcatgaaacaaattggctgctggagaaagctttcgtttaatcacagtaatccgcgaatggctcgaggagttgacattaatgagaaagaatttccaaaaggcgggattgagcatctgaaggagtatctcttccaggaaacattgaccttcagaagattggaatacctgcaagccaaagaatgtgatgtttagtccaaaaaattaactatattagtctaattcttgtgtttatttcgctgaattcaggttaacggaaataaagttgagaagcagactctgtgggtgtaaacatttggtcgtgttctgctatgaaagcgagcaatgcctgcagaaaattaagtaaacatttgagtttcatttggttttcgggtcataataatgctgagaaacccaaaggattaaaaaaaaaaatctccctttttgcttacttcgaatggcatgtttaatagctcaaagtaagtacggacacgatctaggttctgttgtacggtttcaccatcgatatatggaatagctgccatggcctgcagtgtaaatacacacacattaagatagtgaatgcagttggaaattactaaaaatagtgaacaaatctttacctgttccactgcaatagtgttccgacatatttgttgaaccccgaaaaggttgattgatctcatgtcagccaaagcctagaaaatttcgtaataaatactgtcacagtttagaagattgtgataacctattggatatcgaattatagtatggtatattcaaatttgaactagaagtacc

SEQ ID NO: 143019 - DNA, 2803 bp, Arabidopsis thaliana landsberg
  unsure (1)..(2803): unsure at all n locations
gcaggtactacaatttaacttttggtttctctgtcaaaacccttgaatcttgaatcttgaaatcntgaatctttttgtatcntgaatcattctttaggggcaagagagctctcttacaactatctagacattgctttttctccttatgatgattattggaaagaagtaaggaagctcgctgttcaagaacttttcagtagtaaacaagttcactctatacaaccgatgaaggacgaggaggtcaagaaactgatcgattcaatctccgaatcagctgctcagaagactccgatcaacttgaacaagacattgctggctttaactgttagtgtggtctgcaggacagcgtttagtgtgaattttgagggaactgtgctcaacagtgaacgattcaataacatagtccgtgaggcgctcgagatgttgggaagcttttctgcctcagatttcattccgtatgtcggaaggatcatcgacttgttgacgggtttgcaaggacggcgagagagaagcatgagagatctcgatgctttctatgaacaaatgtttgatctgcataaacagaaaaaggaagaaggtagtgaagactttgtggacttgctgttgaggttggagaaagaagaagctgttcttggaaatgacaagctcactagaaaccatatcaaagcgatattgatggtaactaatcatatattcacaatcaaatctgtaagaaaaatttaaacaattgatgtttatatgttgttacaggatgttcttctagcaggaatggatacttctgcaataaccatgacatgggcaatggcagaactcgcaaagaatccacgagtgatgaaaaaagttcaatccgaaatcagaagtcaaatcaagaacaaagaaagaatcagctttgatgacactgataagcttgagtacctcaaaatggttatcaaagaaacatggaggttacatcctacaacacctcttctaatcccaagggaagcaatgtctgaatttgagatcaacggctacacgattccagttaagacacggcttcacgtgaatgtatgggctattggtcgtgatcccgatacctggaaagaccctgaagtgtttctcccggagaggtttatggataataatattgatgcaaaagaacagcattttgagctgttaccgtttggaggcggccggagaatgtgtcctgcagtttatatggggacaacaatggtcgagtttggtttggctaatcttttgtatcattttgattggaagttaccagnnnnnnnnnnnnnnnnnnntatttacatggatgaagcttctggactcacttctcataagaaacatgaccttttacttgttcctgtgaaatctttagtgtaacacttgtgtaagtaaacatgaccttttacttctcataagtaatgtaatggttaaaccaaataaaccggttcaatcagaatcaaaccggttcactgttgtaaaccgactcttctatattcgtttagtttccttagcaagagaaaggagacgccttttttgcgaaatctccatgaagctctatcctcgaacttcttcaggactcttttctctccaatctcttctcaaaagtggcttctctccaacgttaaactctatcgacagatttcttcgatatctctaccgtcttcagaagtttaattgcattcttcaattctactctcagctagattcgaagcaaatcaacatcaatcaccggatttactcaatcgtttcatgggcatttctcaatttgaatcgatacgaagacgcagagaagtttatcaacatccatatttcaaaagcttcgatttttcccaggacccatatgttagattctctaattcatggatttagcatcacacgtgatgatccaagtaagggtcttctgattctccgagattgtttacggaatcacggtgcgtttccttcttccttaacgttctgttcactgatttatcggttcgttgagaaaggagagatggataatgctattgaggttttagagatgatgacgaacaagaatgtaaattacccatttgataatttcgtatgtagtgctgtgatttctgggttttgtaagattggtaaaccggaacttgcgttagggtttttcgaaagtgctgtcgattcaggtgttctagtgccgaaccttgtaacttatactacgcttgtgagtgctctttgtcagttaggtaaggttgatgaagttagggatttagttaggagattggaagatgaaggatttgagtttgactgtgtgttctatagtaattggattcatgggtactttaagggaggtgcattggtggatgcacttatgcaggacagggaaatggtggagaagggaatgaatcgagacgttgttagctattcgatactaatagatgggttgtcgaaggaggggaatgttgaagaagcgttggggttattagggaagatgataaaggaaggagtagagccgaatttgattacttatacagctattattaggggactctgcaaaatgggtaaacttgaagaggcatttgtgttgttcaatagaattctaagtgttggaatcgaagtggatgagtttctgtatgtgactttgatagatggaatttgtaggaaagggaatttgaatcgagctttctctatgttgggggatatggagcagagagggatacaaccaagcattcttacgtataacactgtgattaatggactttgcatggcagggagagtgtcggaggcagatgaagtttcaaaaggagttgtgggagatgtcattacttatagtactttattggatagttatataaag

SEQ ID NO: 143020 - DNA, 6161 bp, Arabidopsis thaliana landsberg
gcaaacctcatccagatggtgtagtgtatactactctttggccacagcagtacgaggtaccagatcagactcttgaacctcagcagtacgaggttgatgatcagttacgagtatcatcaataccagtgtgcaggaccaggctaatgaagatgtccaagatcattcgcaagatgacctacaatatcagccacaaaatcaggagcagtttcagttacaagacgaggctcatgatcaggctcagtatcaggcgcaaggtgatgtacaagatcacaatggtgatgaagtgcaagataaagtagaagatgaggaaggaattcctgagcatcttgagtctctacagaaatcagagcctgaagaagatgcgacagttggaggtgaggagaagaggtggccgggatggcccggagagacggtattccgtatgctggttcctgcacagaaagtgggtagcatcattggtcgcaaaggtgatgtcattaagaaaatagttgaggagacaagggctcgaataaagattctcgatggtcctccaggcacaacagaaagagctgtgagtctctaaatccttttttccctttcatgttatatgagttgcagctattagtcatataatgctcttgaactaaaactaaaatcctagtgataagaaaactaatatagtagaatacatacactttttggctgtgtaagtcactgatctaaagttttcagacactagcttttgttaaaaatgttaaaaagccatgaaattttataaaaggcaacccttttcatattctccccttgacgttaagaaatatataagtaaacagataggaggaaactgaacatcccttcaactcaaaaaagttatgaacaattcttgtcagaaaaagcgttttaatggggcttagtgatatgatcctgagctgctaaaaacgtgttgacgaatgtactgcatcaagcgaaaccatcttagttagtaattaagcctatatggaatatagtaaccagcaggcctgcttatcatttccttccaagtgaaaggaggaagttaatcgacgaagttgataagatgtgagtagggtttccctttattgctgtgaccaccatgaatctgtgcaggttttatcttgcaagttttatggcaacaaatcaatcatcggtaaggtctcaaatatgaagaaccaaagccagatggcaaggattcagccttgagcactacacagtgctgataagtttatcgaataggcaagattcttcttgtataacctcagtgccatgaagctctgcattctttctggtaacttcagtatctggatgattgatgtcttgctgcagactttctgcagcatgcaaggacctgcttaaccggatgtaacaatatgtggacgatgagattatggtttaggcaacaattaagtaaagagaaattttatgattgcatgaaaaagtgtctatgaagaggttttttaagtctagaaggttggtaatggctgctatggcatcttaaaaggcgataacctaattaccatttggtaaaaactttaaatgaagatcataacaggaaataaacatctaactggtcaaagtgcatttaagtctgtacctctttggaattttctttatgatttgagaaatatggcaccaaaataattattggtagagatcctaagatcgctgtttgtgaaatgttttagtcatttggtaatgttctctacttgtttcctctttcttgcaggttatggtttctggtaaagaagagcccgaatcatctctaccaccttctatggatggccttcttagagtccacatgcggatagttgatggtttggatggtgaagcttctcaagcccctccgccttcaaaggtgtcaacaagattactagtcccagcatctcaggctggaagtttgattggaaaacagggaggaacagttaaagctattcaagaagcatccgcttgtatagtcagagttcttggatcaggttccttctcttcacaatttacatgctgaaaaaattctttcttgctttgtttttttggtttcagttgtgctatggactattccctattttccccatatttgtagagataaaggccactataagtttctatgttatcttcatgtgcaaaatttgctgaaccattcaacatcaaattttcagattgacttagattctgaatagtttcaactatgttttggtgtttgtttcgtttattccttatctattactagttctaactgaaatttgttatggtggagttttgcagaggatttgcctgtttttgctcttcaagacgatagggttgttgaagttgtgggggaaccaacaagtgttcatagagccttggagcttattgcatcacatctcagaaagttcttggttgatcgtagtatcatcccattctttgaaaatcaggttatcttttgttccgttgtatctttgaaaatgtttctcagttgtctctatcaacgtttttctttactctgcgttataaacagatgcaaaagccaactcgccaaatggatcatatgccaccaccgcaccagtcatggggtcctcctcaaggtcatgccccaagtgttggtggaggaggctatggtcacaacccacctccatatatgcaaccacctcctagacatgatagttactatcctcctcctgagatgcgtcaacctccaatggagaaacagcctcatcaaggtatatctgcatatggtagagagcctcctatgaatgtgcacgtatcatcagccccaccaatggtcgctcaggtattccgccaatctctgcaacatgttgtgaagttgactgttcaatctactgcaatttatgtacgtaaagtaaatcacatgaaaatctgagtggtgtggggatttgtttgtttttgcagcaagttacgcagcaaatgcagattccactgtcttatgctgatgctgtaattgggacatcgggttcaaacataagctacactagacgtcttagtggagcaacagtaactattcaggagaccaggggagtacctggtgaaatgactgttgaggttagcggaactggctcacaagtccaaactgctgtgcagcttattcaggtacccatatattctcacaccagatttcttaaccattgtaacctttaaagccgcaaaaccgaggcagaagctagtgctttttgatgatgaaatcggactgtttattgtgttttatgacagaacttcatggctgaagctggagcgccggcaccagcacagcctcaaactgtagcaccagagcagcaaggctataacccatacgcaacacacggctcagtctacgcagcggctccaacaaacccgcctggaggatatgctacggattacagctcaggctacggttactgataaaaacttttaagtctctttagaatgttttactagtagttgcaagcaagagtgaaaaacgctatagatgccgaatcgagtatatgttgttattagcgagcaccctgtttactgagaatcaattattatatcacttttccagttgttttgagacttcttcatttgtgtactgttcaaaacgttagtctaccgggaaattttctttatagcagaaaaatgataaatcatcatgtgatcatgtccttcgtgattttacttccctatttaggaaaaaacaatttgctctcttagaaagaggtctatcatcttgattcattttcatatgatgttagagaggtaatctcattaacatggtagtaaaattaagagagcagaaaaagagaataaagaactgagttacacaaaggttgacgacttgacgtaggatgaagtcaacgaatcaaacaattttagaagactaaaatatctaactggtctcagatatggtagaagcctgaatctgcttctcccttctctcctagaaatccacttcacttgtagatttggtaagtttacttgatcctgattcttcataactcgtgtcacactctacattagatcttcagattcattttgagtcttgatactgtgtttggttgcagacttgcagaagcatggactggagattgcttaatgctgcagctacaggggacattagtatccttgatcttcaccaatcagaattcgaacagagaacaccacaaaacaacaatgttcttcatattgcagctaagcatcagaggttggatttcgccacagccatacttaatctctgcccatcactcctccttggagaaaacaacaatggagatacacctctacacgtcgcagctagtgtcggttcctttgaagtttcaaaactttttgtcaattcagcaaatcaagtaacttcagatgtcgaaaaccggggattatccgtcacacggaagcagctattgaggagtactaacaagcaaaacgatacagccttaaatgtagcattaaagaatagacatgttgatgtagctaagttctttgttgaagaagacacaggattgctgatgctagatatggccaatagcaacttcgtatctcctttgtacttagctattgaaagagggcttttcaacattgctaataacattctggaaatatctcctttggtttcctgcaaagggcctaaaggtatgaatgctctgcatgccgctgtggattccgacattgtcagcaccggtaaccgtttacacatctctttttatattgatttcagtcaatcttttgcactttagtgttaagttttatggattttcaagtcaaaactaattggtaatgagtggattggtctagtactattaagtcgcatctcactttctgatgttggattcctaaatcctaacatgtagttatttcttgttttggttaggtttcttaagaaaattaatggagaaaagaccggaaatgatcgcagaaattgatgttattggatggacacctcttcattattcggtatggctagggaaaaccgagataactcgactcttgcttcaacaagatagctcggctgcttatatatctgataaggaaggacaatgcccgcttcatcttgcagcgtctactggtcaaattgatgcatatagagagcttgttcgtagctgtccttatgtttgggaactagttgatggtaaagacagaacatctcttcactctgcagtcatatcaggacaaagagtaatcattcactgtattctagagatgcctgagatttctctttatctattgaacgcatgtgatgcagatggaaacacacctctccatctatcggttagtcacaaatgttactcgatattgctgcttcttttacgcaacaagcgggtggataaacatgttatgaaccgtaatcacttcacagctgcagaactcttttacagtcagaagcaagaggtacaaaaactagcttagtcaagtgatgatgcttttgaattaagctttgtttttttcacagctgcagaactcttttgcacacaacaagctgaagtagtactcaccagtcaccacaacattagcttaataattaaatgaagatacgatgctcatagatttaaagaattgtttttttctactattaactgatgtgtcttatattggtccagattagtttcaaggttgcgatgatatactatgcactgcaaagatactacaaacaaccgtctcagcaacataacatagagacaaagacgaagcaagaaaaggcagatcttgaggtaagcaatgcaagaaatgatggtgcaatgtatgaagttcatcttctagtcgcgggtcttgtcgcaaccgtagcttttgctggagcatttcagttacctggtggttacaaacctgacggaacacctgcgttgatgacgaaaccagctttcaaatgtttcttggtgttcgacacaatcgctttctgcttctctgtaaccacagtctatttcttgttctacgcttccagagacgggtatcgcgcccgctctgctttcctctacatgtctgctctgttaatggttgtgtcgctgattgcaatggcgtctgcgtttgtatcagggatgtatttgatttcgtccaagtcgagaggattagccatcataccgttcttaatggctggtttcttcgtcttgcatggtttcatctactggttcatcgacccacgaggcagctatgtccttggcctcgaacgacctcgtaggattttaaggaaattagtctatggtaactcattgtttcataatttggtacatgaatga

SEQ ID NO: 143021 - DNA, 8008 bp, Arabidopsis thaliana landsberg
aactaaagaatgacgaaaaacgaaataatagaagagaagtggaggagctactacacaactattttcatttttctaaccaatcagagcgcaccggactacgcccactcgcaccaacttcgcgtcacgcgctccggaccacgcccactcgcaccaacctcgcgttgagcgcgtgtcgtcgatttctgtaggggtaaacccacaaaatcatgcctattttacatctactcgctttgtttccaaaacagcctcgagtgactttttcttttgttttttttttctcaaaaccgtactattctaatacaaaccgaaccaaaattaattttcatttcacaaccatctaaaccaaacagaaatcacttgtaatttcaaaacctatgtacgccgaaccgaaatctattgtcatttcatcaaaaccatgtaaaaagcttcttcgattgttttaacatgcaactgaaaataacaatcctaatttatcaacagagaaatatagagataccaacgaaactatggggatgacaagttatcatcttatccacatctctgtccagtgtgagtttcacgatcgttgatttaataggtaacaaggaccagaagctgcggcagcaatgaaagctgatcttgtttcaaagccaccgccaagtcttttggttttgcataccgctttcacacattggaagaccaaggaacatgagacacatacttctgctgacctatataggaatcataagtaaccaccaatgttggcataagcagagagtatgaaaacttttgttactaatttaacataaaaacagtatgataacaaaatgaatacatgcgtaaactctgcttcttctaagacacatatatactaaaagttccccatttgaggctccatttaagaatgaaattgaacaattgaggttcaaattttcttacttgccccacagatgtttccaccaatgcaaaccacttgagctgttcaataaaagccttgcaacacttgggatataatcggaaattagatgacaataaaacgaacctctgagatattcgacaaggtatttcttaacttgagtaaggtctgaaacgatttaactactctacctttgattgttatttttggttttgagaagatgattacagttgtgattttggtggagacaaaaatgtccatctatgtatgttgctagccatcttttgtccaacaggccacctaacactttggaaaaacccgttcaatcttaaatgggccatgttgagccactaatgggcctcaatactatgagattttaagtgtcaagtgttaacctacgcagcagctagggcgcacgttaacaaggaccattcaacaataatatcatcagttttttttttctaggttcgtgtgtgaatccccttcttccgcatcaaaaaaaaaacaatctacagacagacaatcgtcttgtcctggattagggtttcattttctccactgtctagcaaacccacttcttctgattggggcggggattcaatgcctgcgagttcatctggggaacctgtcaccgaaaatcctatacactcccaatctcgcctccggttcttgctttacttggagtgttagaattcgcttctttacttgatggctccgagccgcaggaaaggcggtggtaaggctgccgccgtagctgctgcctgccgaaagcggaaggtgggcgaccttgtgcttgccaaagtcaaaggttttcctgcttggcctgccgtggtatgtatttattattctcttttgcgtttgcttctttatggatggcctataagtttctccacatgttaccaatcctatttatctatctagggtttatttatttggacatgtacctgcttctcctaggattgaaaatcatgttaagtcgattctttcttgtccgattgtagactgagttttaagttcttctgcctaatcgatatgaggtttttctcaaaggagctgaaatccattaattcttgttgttagtagagacgggaacacaactagtttagtttgtccttgtttcagccgcatctgatatcccataatatttctcctctctcagcgctctcctttttagcttctattttttcgatcttctggtctttctgcttattgttggatgcgatttcaggttagtgagcctgaaaagtgggatgcatcacccgattcgaagaaagtgtttgttcacttttttggaacacaacagatgtgagttcttatccctttaaccttttccctcttcaacccagcctggtctacacatgtgggttcatttgagctgttaatgttaatttagttgcagcgtaataaatttaaatatatagatttaagtgtgtaattttcaccctgggggttccctgttgaatcactcacatcgtccttatgtgtagtgcctaatgtctctgtatctagatacttgggaacatttgcttcttgttggacatttagtttatgctgttgggtttaacatagttatctgatttggttttggttgcattctttccctgcaaagtatctttttcatgtttgtttataagagtacagacactagtaggacgttttttaagttaaaatattttatagttagattgtgcttgaagcttttggattggtttatttttgttctcctttgaaaattgttctcaatctgttaggttgaatagagaatagtgatgaattcattgtagtctagagagcattctgtgaacagcagctttgcaagagccaaattttctcagtgctcgctttctgctttgccctcataaatatcagtgagaattttgtttgtatgtaatcatatggagttggtgacattttcttgttttttttttttttgtaattcatatgcagagctttctgcaatcctggcgatgttgaagcatttacagaggagaggaagcaatcacttttgacaagacgccatgcgaaagggtcagattttgttcgtgctgtgaaggagattatagagagttatgagaagcttaagcagcaagaacgagctagtgatcccaaatctgctgaagaaggcactcttgggagtgctgagaatacaacactgatgcctcaggtcattgaaattccaactgcgacaagtctaacacaaatgaattctgatcctagtcatggtagagatgaatctactctgctaaatgaggatgcttcagctgctgaacaaatgctagccctgcgtgataacagtggaccacgtaacaaagcctgtgacagtgcagttgttaaagaaccacgcaagatagctacatattcttcaaggaaaagaaatggaggggtacgatctcaaaattgtgctccacaaaatgaaacatgtccagttcagcgctcgaaaagtccatcaaggttgcaaacagagaagcttcaaagctccatgttacaaaacaacgatggtggacagactattgatgacgtggaagacggagcattaagaagggaaaaaaggatcagaagatcatcaggtcattctgaatcagatgatgtggctacatcatctttaaattcccatggaagtgacgaagaaaatgcctctgaaattgcaacggttgaatctgataataataggaatgaaggcaatggtgtagattctggttccaaagtcgaacaaattgatattggtggaaagtttctcgaaggagattatgacctcaacaaggggctaaatttccaaattaatatcatggttaagagaaagaagagaaagccgaccagaaaacgtggaaccagtgatgttgttgatcctcaggctaaagttgaaggagaagcagttcctgaggctggagcacgtaataatgttcagacatcacaaaattctcatgaaaagtttactgagaggccttgtgaagagaatggggatgagcacttacctctggtgaaacgagccagagtcaggatgagtagagcattttatggtaatcatgaggccaatagctctttgcaggcggaagaaagatcacccaaggacactgtggtcagtgcaacagcacagacaagcccttctgatatcatttctagtcatgatacttttgcagttgaagaatctaaattttttgaagtgtctgctaagctctcaggggacatggtcaatgtagcaccatctcccgtggagaaatctcatgatggaatgtctccatctgaggcttgcgttcagactgtgagagagagagaatatgctatggggtggaatgagcttagcaagacaccagatgataaatcagctggaccccaatataatcaagttagcagtttgccagctggcgaagctcagacagctagcgttccagaagctgtgtgccctgaggtcctgaagctgctaactagtgagtctgatcttccagccgtacaatactgtcaagttgctaaaattgaaccctccatggatcctaatactgtggattcatctgcaaacaatgcctctgagatatgctcattaagcataccttttaattatctggccaggacaggagcaacgaccaagatgcttgtgtatcattggaaaattctcgtgaatatctgaatgaagaaggcagtaaaattgatgcttgtgtggctcaggttgttcaatctgaagctatagaacattctccatcgtcttgtttagtggtgaataagcaggagactgagaacatgccaaaaactgtaaacatgctgctgaaagaagggcatggaagtctgggtgaagaatgtgctattgtcgaaccagctcaatgtactccaaatctacccatctccgcaactgaaagtgatgtgatagatggtgaaaatgtacctttgaatgaaatagggtgtaccaaatgtgaggacgctgttgaggacagtaggcagctcaaatgatgtgagtctctatggtagtatttctttagtgcgtgtattctgcttttactcgtgaatattttcttttaatgctaatctctactgttagtatttcctgtactgtctcgagctctcttggtagaagtttctttttgagccctaaagcacagaaggaatttcttatttcctcatacaaagagtgatgtagcacaaaactagggttctgtctgtagtagagattcacaaaagaattatgtttcctatgattattatttattttctttgtatattttccttttaggatttgttcctaagtatttcgattcctattatagttaggtttttcatatttaagttttttgttaattgttatggagttgtaggcagacaccagtaagcttcagttttttgttatcttaatgtttgcggagttccaatgataagacaggcttctgcttcaccactgaactaatactgcgtgtgctattgcagtggtgagactaatgctcaaaagcagcaggtccaaaccaacaattctgtcttagtatctgagaacctgtcaagagaaaaaatgagtttttctcctgctaatactgcagacactcctgcgaggggcactccacatagcagctcagtttattaccacatttctacttcagaaagtgcaaatgatatgcagaacaacagtagtggcagcccaaatattccaactggtgagaagaaaaatgattgtgatgccattgtcaaagaagaagagaaaatcgaaacaggtgtatgtcagggacagaaagttgttagttgtgatgtgcaatccactcgtgaatcttatgaggatgcactttgctcattggtgaggacaaaggagagtattggccgagcaacttgtttggctatggacttgatgaaatttggtgtgtctgcaaaggtagcaaaatttatttttctgcaatttttgattacctatctgttgccgcaacaagtcatatagagggtgggtcagcttttgcgggtttcaaatttgttgtcctcattactgacgtattgttaatatagtacctagatatgttgcatctgtgtttttgaagcaacattttctatagtaggccatgtaaatagaataatagtacgtatctttgggatagaagaggctgcataataatttcgataaatcaaacatagtattaaggtgaatcatgctattgtttcatgtgcttcgtaggatactgttgacagccaccacttcttggaagggttgggcaacagattatttgagtatttttggattacctggttgatgaagaagggatgacttttgcatattttagtgtgttttgtgagagtattctcgtttgcagtattcgttgttaataagtcttgatgaacctcctgaactaggctatggagattttggctcatactttggagagtgagtcaaatttaaagaggagggtggacttatttttccttgtggattctatcgctcagtgctccaaaggtctgaaaggtatgtcgtatgtgcaatgagttttgataagccgcatcagcaaagttctaaatgcggaattgaccttgaatactaccctatttttcaggtgatactggttgtgtttatctttcagccattcaagtaattttacctcgtctattggcggctgctgtacctgctggagctaccacacaagaaaatcggaaacagtgcttaaaggtatgcaataatatttgctagctctttcggatcgttattgtttctcaacctctctgctatttataggttttgaagctttggcttgaaagacggatcctgcctgaatctattgttcgtcaccatataagagaacttgattcacatagtatagttcctgcttgcctctattctcggcgctcagctcgaacagaaaggtcgttggatgatcctgtgagagatatggaggatatgctggtggatgaatatggaaggttagatttttcgttttttatttaatctatatatgtacccctgtctctagattcgttaaaactaattcatctttacttatcagtaactcaactctccagctccctggattttgcatgcccgcattgcttaaggatgaggagggagggagtgactcggagggagggtgtgactcggagggaggcagtgactcggatggaggggatttcgagtctgtcacccctgaacatgagtccagaatccttgaagaaaatgtctcgtcatccacggctgaaaggcatacgcttatattggaagatgttgatggtgagcttgaaatggaagatgtggctccgccttggggaactgaaaactgcacacacactgatcaagctgataaaacaaaggattccaattgtcagcttggacagcagcatcggcccgtctttggcacttcacatcagcatatgtccttgtcatctccaccactgccatcttcctcgccaccaccgccaccagctcccccttcacagcagggggagtgtgccatgcctgattcctacttgaatgggtttgaaaatggaggatatcgcaacgtgcatgtacgtttgtttgttgtaaaatcgttttacaagaaagatgatgatatatcttgatatggtcacttatcctattgttattggtaaatatgcagggagatcaacaggctggtcctcttaggatgaacccgccactgtctggaagcacaatgcattatcaaggtccggagtcgtcttatatttctggtgtacaacttacgaatagtattccacaggcagatggttctaatttccagcataggccttatccctctcatcctcatccacatcctcctccccctccaccgccaccacagcatcaattctcatttagagagccgggccacgttttgaagtcgcatagggacgctccatcgtactcccacagatctcattatgtgccgaattgtgatgaaagaaattttcatgataaccatgagagaatgaggcatgcaccattcgagaatagagataattggagatatccaccatcttcttcttatggtgaggccttttacagtcatgcgtgtgttaattatatatatatatatatatatgctttctaatgtaatgatgcgggaatgggaagtctgatatgatcgtctcctcgcaggttcgagatatcaagatgaacacaaagctccttatccatccagttcatacaatggtgtccggtgggatagt

SEQ ID NO: 143022 - DNA, 895 bp, Arabidopsis thaliana landsberg
  unsure (1)..(895): unsure at all n locations
agttggtttatttgatgacccttcgttgtacatgtgtggcgggctcaatgatctcaaactaggaaccaaattgctgatttacttctacaaaaacgatcttcaaaagcttcctccacttctcacaagacaacaagccgatctcattcctttcactaagtcaaagcttgacttccttctcgaccacttctctatcaccaaagactctcctcaagggaaagccataaaggagactttgggacattgtgatgctaaagctattgaaggagagcataagttttgtggaacttctttggagtcattgatcgatcttgtgaagaaaacaatggggtataatgttgacctcaaggtcatgacgactaaagtaatggtaccggcccaaaattcgataagctacgctntgcataactacacattcgtcgaggctccaaaggaacttgttgggattaagatgttgggatgtcacagaatgccttacccttatgctgtttactattgccatggacataaaggtggaagtagagtctttgaagttaatttggtgacggatgatgggagacaacgggtagtaggacccgctgtctgccacatggacacgtccacgtgggacgcggatcatgtagcttttaaggtgttgaagatggagccgaggtcagcaccggtttgccatttcttccctcttgataacattgtgtgggtaacaaagtaagaaaatagacgtagctctatataatgtgagtatgtgtttgtaataactatggtttgaaaggaaaaagaaaagaaaagaaaaagacagccttaatgttggctttggtattgcctctcttttgtgcaacttgcagtagcaacgtgagaatactagtaatgttaatgtaaaatataatatctcatgcgtcct

SEQ ID NO: 143023 - DNA, 1454 bp, Arabidopsis thaliana landsberg
ttgaatgtaagtgaaaggagagaattgatccacgcattgtctaaccagcctgaagaagcttcggagcttttgaattcatggagcagaaatgagatcatgaagatcatatgtgctgagatgggtaaagagaggaagtacactggtcttaacaaaccaaagctcatagagaatcttctgaatcttgtgtctcgtcctcttggagagacctcttgttctgaccgtagaaactcgaggaagaaggagaagaagatgatcggttacatcatttgctgtgagaatttagcttgtagagctgcgcttggatgcgatgatacgttttgcagaaggtgttcatgttgcatctgtcgtaagtatgatgataacaaagatcctagtctctggttaacatgtagctcagatcctccatttgagggtgagtcttgcggattctcgtgtcatcttgaatgtgctttcaacactgaaaaatccggtcttggaaaagacaagcaaagtgagggatgctgcttctattgtgtctcttgcggtaaagcaaacagtttgcttgaatgctggaagaagcaattgacgattgctaaagaaaccagaagggtagaagtgctttgttaccgtcttttcttagtccagaaactattgaagagctcaactaaataccgaaatctgtgtgaggttgtggatgaagctgtcaagactcttgaagctgatgtgggtcctctcactggtcttcctatgaaaatgggtagaggaattgtaaacagactttattctggacccgatgagcagaaactttgctcttctgctcttgaatctctagaaactatagcaactacaccttctgatgttgctgcattaccttcacctcgcagctccaagatgcagcaaggtcagaacttttgtacccttcaatgattgagtaatatattaagtttgttgaataatgttgattctctgattttgtttcgtagattgttcttatgtattgagcaatgagatatctgcagatacagcaaccacaggatcaaccaagatcaggttcgaggatgtaaacgcgacttcacttacagtggttctcgcctctaatgaaattccctcacctccaaacatcgttcactacagtatttggcatcgtaaggtaccagaaaaagattacccggagaaatcgacttgcacattgtttactccaaacacaagatttgttgtctctggattagctccagcttctgagtactgcttcaaagttgtgtcctatagtggaaccagagaaatgggcgttgatgaaatcaatgttttgacacgtagcgctgaagaaggagcgaattgctcttcggcagtggaaagaagcgtaagccctctcacaaattgcagcacattgtcttctaatccttcttctgttgaagctgagtccaacaacgattacattgtcccaaagaagccatcttcaaagaacgaagacaaca

SEQ ID NO: 143024 - DNA, 1511 bp, Arabidopsis thaliana landsberg; identical to SEQ ID NO: 28258

SEQ ID NO: 143025 - DNA, 3457 bp, Arabidopsis thaliana landsberg
  unsure (1)..(3457): unsure at all n locations
atggtgacaagtgaagaagatgaagcgtcatctgcctctagcttagaaaggaggattttgaaaacagtcacatcagctatagcaacattaatcgatgaaaagcttggtgctctaaacttacatcaaatcaacccggacgcaaatgcacgtctaagacaagaagacgcaagggaagatgaagaggcaagaaattactatagtcacacctcctctcacagtagccaacgtaggcatcgacgagagagaccaccacttagagatcccttgggaggcctaaaactcaaaattcccgcattccatggaaccaacaatccggatacttacttggaataggagaagaaaattgagttagtctttctttgtcaagaatgtcttcagtccaacaaggttaaaattgcggctactgagttttacgactatgccttaagttggtgggatcaacttgttactagccgaagacgtacccgagactatccgatcgaaacatggaaccagctgaaattcgtcatgcgaaagagatttgtgccgagttactatcatcgtgaactacatcagcggttgagaaatttggttcaaggaagcaaaaccgttgaagaatactttcaggaaatggaaacccttatgttaagagctgatcttcaagaagatggagaagcggtcatgtcccgattcatgggaggtcttaaccgagaaatccaagaccgtctagaaactcaacactatgtggagcttgaggagatgcttcacaaagcggtcatgttcaaacatcaaatcaagagaaagaacgcccgatcaagtcacaccaagaccaactacagcccgggaaagccaagttatcaaaaggaagagaagtttgcttatcaaaaggattacaagccgttcgtcaagccaaaaccggtcgatctagatccaaaaggaaagggtaaggaagtaatcaccagggctagagatatctgatgctttaagtgtcaaggacttgggcattatgcgagcgaatgttccaacaaaaggatcatggtccttggagacaatggcgaagtagaatctgaagatgagcgtgcggaagaagactcaatggaagaagatgtggaatcccccgctagaggagagttgcttgttgcgagaagatcgttgagtgttctaactaaggccgaggaacaagcgcaaagggaaaacttgtttcatacacgttgcttggtcaaagataaggtatgtagtttaattattgattgttgaagttgtactaacgttgcgtgtaggaacatggtcgagaaacttggtttagaagtgcttaaacacccgagaccgtatttttgttccaatggcttaatgaaacgggtgagatgtccgtcaaagaacaagtcaaaataccactatcaattgggaagtatcatgatgagatcatgtgcgatattctacctatggacgctagtcacatccttctcggacgaccatggcaatcggatcgaaaagttcttcatgatggcttcaccaaccgacaaaccttcgaatacaatggccgaaagacaactctcatcccgatgactccgcacgaagtctatctagaccagctaagtatgaaacaacgggccatcaaaccaactgaaccaatcgatacaaagggcaagaacaaggtaagtaaaaatagtttactctttgttttcaaagaaacacttacttgttcaactaatcccgtaccggtgctatcgagtaagatcaagttgattttgcaagagtataaggatgtgtttccggaagacaatcccataagtttaccacccatccgtagaatcgagcatcaaatcgactttgttccgggagccgctctaccaaaccgaccaacttatcgcaccaacccgaccgaaacaaaggaactcgagagacaagtgaatgagcttaggaacaaaggtcatattcgagaaagcatgagtccgtgtgccattccggtcttactagtaccaaagaaagatggaagttggcgcatgtgcgtggattgccgagccatcaacaatatcacggttaagtatcgccaccctatccctcgattagatgatatgcttgataaattgcatggttctagcatcttttcaaaaattgatcttaaaagtggttatcatcaaatccggatgaaggaaggtgatgaatggaaaacggactttcaaaactaaacaaggattatatgaatggttagttatgccgtttgggttaacaaatgcacctagcactttcatgagattgatgaatcatgtccttaggaagcatattggagtatttgttgttgtttattttgatgacatcttggtttatagcaaaaacttggaagatcatgtcatgcatcttaaactcgttttggacttgcttcgaaaagaaaaactttatgcgaacttgaagaagtgcaccttttgcacggataaccttgtttgtctaggctttgttgtgagtgcagatggaatcaaggttgatgaagaaaaggtcaaggcgattcaaaaatggccgagtcctaagaatgtgagcgaagtgaggagctttaacggtctagcgggattttaccaacgatttgtnnnnnnnnnnnnnnnnnnnnnnnnnncgcttacggaagttatcaagaaggacattggattcaaatgggaagatgcacaagaaaacgccttccaagccttgaaagagaagctcactaattctcccgttctaattcttcctaattttatgaaaacttttgagattgtgtgtgacgcctccgggttaggtattggagctgtcttgatgcaggattacaagcccattgcttactttagtgagaagttaggaggagcgactcacaattatccgacctacgacaaggagctttacgcattggtccgcgcactacaaacgtggcaacactatctatggccgaaagagtttgtcattcataccgaccacgagtctctcaagcacttaaagggtcaacaaaagctcaacaaacgtcatgctcggtgggtcgaattcatagatacctttccatacgtgattaagtacaaaaaaggtaaagataatgttgtagccgacgcattatctcggaggtatgttttgcttacttctttggatgcaagattgttgggttttgagcaaataaaagacttgtatgctaatgattctgattttagcaaaatatttcaatcttgtgagaagtttgcatttggaaaatattatcgacatgatgggtatttgttctttgaaaatagactttgtgtgcctcactcttctttgcgagaaatatttttaagggaagctcatggaggtggcttaatgggacactttggagttgataagacgtgcaaggtaatgcaagaacacttccattggccgcacatgaaaagagatgtcgagcgactatgtgaacgatgtgcaacttgtaagcaagctaaggctaaggttcaaccccacggtttgtatacccctttgcctagtcctttgc

SEQ ID NO: 143026 - DNA, 5485 bp, Arabidopsis thaliana landsberg; identical to SEQ ID NO: 16665

SEQ ID NO: 143027 - DNA, 1146 bp, Arabidopsis thaliana landsberg
caatttttctgagcttcaaaaatccactctaatggcttcatctgcatttgcgtttccttcttacataataaccaaaggagcctcaacagattctttcaaatcaacttctctgtcttcttctcgatctttggttacagatttccatgtaagctcacttctctcttctctgcttcatcggtggaaattgtgagactttgtagttgcccatttgatagaatctagaattgaataatgggtttacttcatttttgacacaagtctaacaaatccgaacctttttctatgttaatttattgaaattgaatatgaattagacctatataagtttgcctcttcggttctaatttccggcgaaaaaaatgacagcttttgttctccagacccatctcttccggtcctaaataccaatctgccaagtccgctaaaccggaatctccagtcgccataaactgcttaaccgatgccaaacaggtaaatttcaccacttgaagttttcaattttgtacattgtgctaatgaacaaagccacatagattttgcttggattgtttcaaatactaaatctttattagaattcatgctgaatctatgatgtaattttttatttatgattgtggtgtttgatcatctttatattgataccgtttctttaaggtttgtgcagttgggaggaggaagagcatgatgatgggcttgctcatgtctggtttaatagtttcacaagccaatcttccaacagcatttgcttcaactccagtgtttagagaatacatagatacatttgatggatactccttcaagtaccctcaaaattggatccaagtccgaggagctggtgctgatatattctttagagaccctgttgtcctcgacgagaacctttcagtcgagttttcttcgccttcttcctcaaattacacgtcacttgaagacttgggatcccctgaagaagtaggaaagagagtacttagacagtacttgactgagtttatgtccactagactcggggttaagcgccaggccaacattctaagcacttcctctagagttgcagatgatggtaaactctactaccaagttgaggtaagccaaagtcaagtaccaaactacatcctccttctgtgaattcaactgactcgtgtttcg

SEQ ID NO: 143028 - DNA, 709 bp, Arabidopsis thaliana landsberg
attctattttctcaattcatcttctagacttgtggtttctccttccttggaattcacagagaactgggatttatcctcccttgtccggtttctatgtggccttccacatcacctagattcaccatcaccacaccttatccacacccacgcgccgcctcttcttccttacaggtgaaagctttccaacgcggcgactttgaccgtttggctgataacgttaagtcaggtaaagcatggagagacgcgtggagaagcgctaacgatggattcgagcaattcgtttttgaggctaagaaaaccgctgagcgaattgatcgccaatacgctgtttctcgccgctttagctccgctgctagctcagccgctgaccgtgctcgtgagattgatcgtgagtttggtattactcctcgtgttaggactgtctctgccgatttcagaagaaatttccctaaggtaatacttcatttcactattccgagcgaagaagccagttcttagttatgtatacactctgatatattgaatcattctcatctatataagtggaaagtaattgggtggttttgtagagttatatgttctgtgactttggccattgatgaattttgattccagctgctattggcaaccttgtgctcatgcgtttctttacattacagtacacgaagcaattcagtgcattcttgaatacaccgcttggcggaaggtt

SEQ ID NO: 143029 - DNA, 1579 bp, Arabidopsis thaliana landsberg; identical to SEQ ID NO: 16291

SEQ ID NO: 143030 - DNA, 1338 bp, Arabidopsis thaliana landsberg
gcagtttcgacggtcacgatctactcggagaatgtagtcgtcgtgacaaaccaatcgaacggattaaagcaatggtgacgtggtacatctcaacactccggcctttgatctttggcttggctccatacaatcctgtcatcggcgaaactcaccacgtgtccaatggtcacattaacgttctcgcagagcaagcaagtgttttattcttcttctataattagtgttttagattacttgttagtgtatattgaaagaatttttagtatagcgactaatttatgttacgttttgattttttcttcttcttcagatatcgcatcatccaccagtttctgctcttcatgcaactcacgagaaagaaaacgtagacgttttgttatgtcaatatttcacgcctaaatttcgtggtacgtataaaacaaatttaactcaactttaacaaaacatacaacaataaactaaaaagtgggttttgaaatttaaaaggtgcttacgtggacgttgaggtgaagggtaaaagagtggtgaaacttctgaatcacaaagagacttacgaaatgaaccaaccaaaacttctcatgacgtttttgccggcaatgggagctcactgggccggaaagatcgtgataaagtgtccggagacaggactcggagccgaattgcagttactatccgattcttttctcagtagattcacaggaaacaataaaagagccattaaaggcaagatctttgaatcttcctctaggaaacagctctatgaaatctctggacactgggacaggtaacaaacacaagaagcagaatccatctttcaaagtttattgcagttgaacatataatttacagtgaggtaatgcatttcagaactgttaccgcgaaaaatacaaagactggacagcttgaggttatatacaaagcgagtgaaaacattgcaaagctcaaaactcccattgtcgagaacctgcaggttactgttataaactttctcgggagattatttgttttgttcgatattcgtaattcagttatttctggtttgcaggaggtgagtgagagcgagtcggcggtggtgtggggtgaggtgagtgaaggaatcgtgacgaacaactgggagaaagcaagagaagccaagagagatgtggaggagaagcagagggagtctttgaggaaaagaaaggcttctggacaatcatggattccaaaacatttctctgtagctcgaactggtaaggactgggactgtgttcctctacagcctacggttcctcgagctcctatagttgttcctctctgattctgctgattctctgtagtagaggttcctacaagaagtaa

SEQ ID NO: 143031 - DNA, 4355 bp, Arabidopsis thaliana landsberg
tcattgttaaaggaagccaaaggaaactgttatctataactaatatataagttatctatcatactcctatatgataatttttggagaaaatttgattttagctagttgtctggatgtggtagaatgatttggggactgcttacactctattagaacttagatttttgatgtatcacccaaaaatgtttgtatttgtagtccactcctatggtgatttgataatgttgaactaaaaacaatttcagcacaagaaggctgctgacagcatcctcgggggcaacaattctcgtggtcctgttagtgaaggagctggatcaccaaagtactccgagcgactttctcctgctatcaacaattatctgtcagaggcttctcgccaagaagtcagggtgagttgctaactttatcctatatgctcgttcctctcttctactttttggtaaaaacctacatgttcagctagagtccgtaacattgctgctttcttttggtgggctcctcaaaactaagctagaatgtcctacactttttgcttattatatgttaaacctagggaacgctcaaatgccttctgaatctttactgcagctagagggaacacctgataatgggtacctgtggcagagagttaattctcagttggcctcccctagccaaccttattctctaagagaagctttagctcaagcacaatcttcccggattggagcttcagcccaggcactaagagaatcgctgcacccaattttgaggcaaaaactggtatagttttatgttgccttcatgcctgtcctgaatgttacgcatcatttttgctggcatagtcttcaatgagctagtttactaattgcattcactctcaccaggaactttgggaggagaatgttagtgccactgttagcctccaggttttggagatcactgaaaatttttcatcaatggcagcctctcacaatattgcgaccgactatggcaaattggactgcattactacaatactgacgagtttcttctcccgaaaccagtcattagctttctggaaagccttctttccaattttcaacagaatctttgatcttcatggggctacactgatggccagggaaaatgatcgcttcttaaaacagatagccttccatcttctccggcttgctgtttaccgcaatgacagtgtcaggaaaagggctgttattggtcttcaaatactagttaaggtgaaacatctagagtcctgtaaagattctctgtttcttactatcaggtatgaattcaattgctttgttcttgcagagctcgctatactttatgcagactgctaggctgagggctttgctgacgattacactgtcagaactcatgtcggatgtccaagtgactcatatgaagtcagataatacattagaagagagtggagaagcacggcgacttcaacagtcattaagcgaaatggctgatgaagctaagagtgtcaatttgttgagggagtgtggtcttcctgatgatacactgttgattattcccgagaaatttacagagaaccgctggtcatgggctgaagtcaaacatctttctgacagccttgttcttgctcttgatgccagcctcgggcatgcccttttggtatggtttataatcatcttggcatttcgtaaagatattttttgctggtgtcagtgacggaaaaaatgtcttctgctaaattggtccttaaaattgttatgtggtggaagtgtcatgtcttttacactcgaattcctccacgtcgacacctatttttagttttttatcgaactgataggtaactaagataacaaaggattcaatgtcctgtttgtggaagttggaaattgacagtgatggaacttaaagtgtgtccgagtacatctgcatttcctgtcatgatcgtatggtctcatcactaataggaagataattttacgcttatagagagtaattcctgtccctcccttctctttcctaatatttcctgaactttaaacttgggaatcttagggagttccaaaataggtgagttcagatattactgtgaatgactgtcttgacatcactgatctaaaataagtatcacagccgggcttgtcaaacttacacaagttttccaatcctgttttgtggcatcactgtcatgtttgcaccatttcctgtcacgtttcttcttagttcatatcgtgataccattagattcaaccagtttggaagtcattctgtatttttccaatgcaaaattttgttattacagggatctgtgatggctatggatcgatatgctgctgcagagagcttctacaaacttggaatggcgtttgctcctgttccggatcttcacataatgtggttattgcatctatgtgatgcccaccaggaaatgcagtcttgggcagaagctgcacagtgtgctgtggcggttgcaggtgtgataatgcaggtaataatatatagatctggtatgtgttttacatgcgcagtggatcatctcgcagtctggttggcgtttaagctctgctgtcttcaatcaagtcttcccgtccactaaatactacttccagaacttatgtgcatgtattggctttcgccttgtaggccttggtggctaggaatgatggtgtgtggagcaaggatcatgtgtctgccttgcgtaagatttgcccgatggtaagtggcgagtttacaacagaggcatctgcagctgaagtcgagggttatggtgcttcaaagctaacagttgactccgccgtcaagtatttacagcttgctaataagcttttctctcaagctgagctctaccatttttgtgcaagcatattagaacttgttattccagtttacaagagcaggaaggcttatgggcagttggctaagtgtcacactttacttactaatatatacgagtccattcttgacccaagaatcaaacccaatcccatttattgatgctacatattaccgggtgggattttatggggaaaagtttgggaagttggacaggaaagaatatgtataccgagaaccacgagatgtgcggctaggggatataatggaaaaactgagccatatatatgagtcaagaatggacagcaaccatattctgcacattataccagattcgaggcaagtgaaggcagaagacttgcaggcaggagtgtgctatctgcaaattactgctgttgatgcagtgatggaagatgaggatcttgggagcagaagagagagaatattttctctttcaactggaagtgttcgagcacgagtgtttgatcgtttcttatttgacacaccatttacgaaaaatggtaaaacccaaggtggattagaagatcaatggaagagaagaacagtgctgcagactgagggttcattccctgcccttgtgaataggctgttggttaccaagtctgaatcccttgaattctcgccagtggagaatgcgattggaatgattgaaacgcggacaaccgctctgagaaatgagctagaggagcctcgtagctcggatggggatcacctaccacggcttcaaagtctgcagaggattctccaaggaagtgttgcagtgcaggtgggtttttctcccataatatctgtgttatagattgtgttgtaaaacgtagaaatgctcatcatatgcctttccatggaaatatgcaggtgaacagtggggtgttgagcgtgtgcacagctttcttatcaggagagcctgcaacgagattgcgttcacaggaactgcagcaactaatcgcggcactgcttgaattcatggcggtttgtaagcgagccattagggttcactttagattaatcggagaagaagatcaggaattccatactcagcttgtcaatggatttcagtctctcaccgcagaactctcccattacatccctgctatcttatccgaactttagtgtatctttgtcagtttttgttacgagttttgtgcttttttcttccaccatttggcttggctatatgtttatcatttctgtaattcttagtttaatgacaacaagtgagaaaaaatttataaatgacaattggttgacttctaattcagaagcttatgttatattcgatcgaggacatgagctctctcagcttcaaacacaagccgctcaactatttaggatgcctgcgacatctcagaaggcaatcaagtaatcaacagtcacagtagaagcacaagctgaagaagatgaagaggaggttggtgagaccggtgctgatgctcgtgacattgaattggtcatgactcacgctgtagtttcgggtagcagatcggttaagtcactcatgggtcacgtcttcagacattgtaagtgcaataatatggttctcactc

SEQ ID NO: 143032 - DNA, 1541 bp, Arabidopsis thaliana landsberg
cagcgatcaaaaagattggtaatgcatttggcaacattatcgacgctaagagaactttgagagagattaagcttcttaagcatatggatcatgacaatgtaagcttttgtcttattttatttattattctccacatgttttctagtaattatcctgattctggagtttatctcacaggtcattgccattatagacataataagaccacctcagccagacaacttcaatgatgttcacattgtctatgagttaatggacactgatcttcaccacattatccgctctaaccaaccgttaactgatgatcattcacgggtacgcattaacctctcctgtgcttcttatagctcaagtatcttctgtttaggtcaaagtttataatcagaatctttttggttcgaaggctatgaagttggggtttgatgtataaccataaattttatgtttttgcagttcttcctgtatcagttgttgcgaggcctcaagtatgtgcattcagccaatgtactgcatcgtgatttaaaaccgagtaacttgctcctgaatgcaaactgtgacctcaagattggggattttgggcttgcgaggactaaatcagagacagacttcatgacagaatatgttgttacacgttggtaccgagctccagagttgctccttaattgctcagaatacactgcagctatcgacatttggtctgtcggttgtatactcggtgaaataatgacgcgggagccgttatttccgggcagagattatgttcagcagcttagactcatcactgaggtaaacttttcactttttcacttgactatattatttcgtttcaatttgaagaaagaacattgaactatcctgttgctacgtttgttctgttttggttctgtttttgttgtttgtagtttaatgaacaaactcatgtatggtttatctttttcatacacagcttataggctcaccagatgattcaagcctaggattcttaagaagcgacaacgctagaagatacgtaagacagcttccacagtatccaagacaaaactttgccgctagattcccaaacatgtcggtcaatgctgttgatttgctgcagaaaatgctcgtctttgacccaaacagacgcattacaggtaaagcagacgaaaacctatatatgttgcattctcttttgattttttctttttataatacttttgagcttgttttgagttgcagtcgatgaagccttgtgccacccttacttagcaccgctacacgaatataacgaggaacctgtgtgtgtgagaccgttccattttgatttcgagcaaccttcattgacggaagagaacatcaaggagcttatatatcgtgaatcagtcaagtttaacccttaagattcttagtgtgtgagattttaagagaatcttgaaaagaaactcgaaataagcttttttctttctctgtttgttcattgatttttttattttatttttgttgttgtgtgttcattgaatttctgatatagtaaagtttgtaatgtaaaaacaaaaaaaaaagtc

SEQ ID NO: 143033 - DNA, 2087 bp, Arabidopsis thaliana landsberg
agttgcaaaccatagtgtatctctgaactgagagtagcaggttgcaattaaaaactaaagattgtgtcaggtaaaagaaaaacatttggtctttgcactcattattaatgcagtattgctaggtgggataagcttacctttttattttgaagacagacttatgtattaccacaaccagcaccaaggaaagagcatcctctcttcatcgagaatgcccatttcttctgaaaggcatccgttcctcagaggaaatggcacaggagattctggactcattctctccactgatgcaaagccacgactaaaatggactccagatcttcacgagagatttgttgaagcggtcaaccagcttggaggaggagatagtaagttatcttataagcaaatgaaccatcttttacaatcaggctttttggacataatgtattaatgtgtatacttttgtctgcgcagaggctactcctaagacaatcatgaaagtcatgggcattccaggccttaccttataccatctcaagagtcatcttcaggtaatccatcaacactttatacagtcatatgcccaaggccctaaacttacatgactcgttcatcaattcgattggtagaaaactattaaagtagcacaaaaatgacgatatgtcaagatatgaaaaatctgtaatatctgttttttgcttttacaaagattattaatatcatgatttgactaccagaaatataggctaagcaagaatcttaatggacaagctaacagcagtttaaacaagacaagtaagcttagttattcattactcagatacaaaaatattttaatctaaagattcattcttttttcatactattttccttcaagtaaactaaaagcaacctggtttaggtgtgatgaccatggtagaagaaaacccccctgaagtagacgaaagtcacagtgagagtttaagcattggaccacagccgagcatgtaaggatatgcccatttgcttacatattctaccttagtagattaacaaaaatgacctatatttgtgcacgcaggaacttacccataagtgatgcccttcaaatgcaaatagaggtccagagacggctacacgagcaacttgaggtatctatcatatactgtactctgtgcattcaccatgttcaaagcagctatcagtgttggaattttcggttcctatatttgttctaacaagaccaatcaagatgagtctggtttcattaattctcatggaaaaaaataggaacaatttacagaactatactcaaaattgtagaaacacatagatcagtgaaaatcataagtatagagtatcaatagaggcgagaagaactatatagaaacagagaacagagcatttagttacgatttcattaaaaatattttaaaactgagccaggtacagcgacatttgcagctcaggatagaggctcaaggaaagtacctgcaatcgattctggagaaagcacaagagactcttggaagacagaacctaggtgcagctgggattgaagcaacaaaagctcaactctcagaattagtatctaaagtatcagcagactatccagactctagtttcctcgaaccgaaagaactgcagaatctacaccatcaacagatgcaaaaaacgtatccacctaactcctccctggacagttgcctaacctcaagtgaaggaactcagaaagccccaaagatgcttgacaacagactgggattaagaacatatattggagattcaacttcagagcagaaagagataatggaagaaccattcttccatagaatggagctcacatgggcagaagaagaaagccttagagagaatcacaacaggccatatctttcaacaatggttaacaacgcagaaccgagaatctcgtcttcaagaagaagtcctggaagattgtcaataggagtgggattacatgaacacagaggaaggagtagcaacaacagtgagtatacagaagaaagattcaacgagaataatgaagattgcaagcttgaaacacacacaagaacagctctagatcttaacacacacgacgaaaactatggcactgtagtgcacaaggg

SEQ ID NO: 143034 - DNA, 1973 bp, Arabidopsis thaliana landsberg
atttgaatgatatttggtttacgtctcggtttcggtacgcctaaaccgatcaattgcctaaaaatcaaaactataccgaaaataaaccgatttctacccaaaacatatattaatcccaaccaaattaaccgattttaccctactttatcagattttaaccggcaaaacccaaaaaatcggttcaattcggagaatttcatgaaccgaaatactgagataaccgactcggttcggttttgacggacctgctttgagtgtcctttctgtgctctgttgtggttaactgatctcgcaggcttagaactttaagtcttgaccgtgccattgcatcttagactcgaatcccgatgttttttaatcccaaccaatttaaccgattttacccgatttttaccgggaaaaaatcggttcgattcggagaatttcattaaccgaaataccgagataaccgagtcattgaccgaactcgcaggcctagaactttaagtcttgaccgtgccattgcatcttaggctcgaatcctgatgtttttgaaagtctcctctgttttattgttgcagagatcaatgaagctactagctatctttgtccttccatcgacaacgcttcaagctatctatcgcatttggtggtatgcttcaggcttcaaccaaatcccatacattataaacccaacgctgagccatgtcttagcctgcacactccagctctcttcttggctctaccgtacatcactcttcatcattgcttgtatcctctaccaaaacatctgccaccttcaggtcctccgtcttgatgaattcgcacgctgcttcgcctctgagatcaaagatttcagttccatactcgctgagcatctcaaaatccgtcgtgaactgaagattgtcagtcaccgtttcaggagattcattcttttgtcattgtttttcgttacagccactcagttcatggcattgcttactaccatcagagctagtgttccttttaacatctacgaagttggcgagctcgcggtaagaattcctcttcactttcatatagggatgcaagtttttgaaacattatattgatcaatgtctctgtttcttacagttatgctccataagcttggtgtcaggactattcatatgcttgaaaagtgcaacacgaatgactcacaaagctcaatcagtaacgagcatcgccacaaagtggaacgtttgcgcgtctttagatacatttgatgttctttatgacggagagactcctaaatgtccaacaactacacaacattcccagattttatcgcgtcgtcgtaatgttgttcaatcgtctgatgatgatgaagaaggagaaggagatgacaatgatcttgagatacatccaatctttgcccgcgccatttcttctcagaaacgtcaagctctaggtatataaaatcttgaattagacgatgatttggaataaatcattttcacctttttaactgatttggtttctctattgtgtatatatagtgacctatctagagaacaacagagcagggatcactgtttacggattcttggtggataaaacatggttgcgtatgatcttcagcatcgaacttgctcttcttctatggctgctcaaaaagacaatcagtaattttatatgtttctactctgaatccatattttcatttttcatcactttcctcttgtaaccgataacattcttcatgtttttggtttttggcagtgaacataacatgaagacagaatcagtgtcacacaacacacacgaagagattggtactaagatgtttttatttcaacaatggcgatataacagattctttttgtagatcttctatatatacaaatataaaacgtgtgtatgtaaatcaatgtgtgatcctttttgagttatatatatgtaccagatcatatttattgattgtgtgaaatactgatttttgaacctatgtttggctcattgatgaatcgggcgtg

SEQ ID NO: 143035 - DNA, 910 bp, Arabidopsis thaliana landsberg
gataaagaaaaacaacaatgacgaagctcttcttcttcttcttcttctccttcctctacacaatcacaaccctaacatttccgccattaacaacctcagcagcaacatcatgccgaacattatgcggcaacatcccaataaactacccgttcggcatcgacggcggttgcggatctcctcaatacagaggaatgttcaattgctccaccgatctatatttcaccactccttccggcagctataaggtccaaagcatcgattacgagaagaaaacaatggtaatcttcgatcctgctatgtctacttgctcgattcttcagcctcaccacgatttcaaaatggcggatattcaaaacactcttattagaccttcgtacgacaccgttttcgcacttttcaactgttccaacgattctcctgttcataatcgttaccggaatctatgttttaatgccgcgggccactcttgcgacgagatttatagctcctgtacttcctttcgaatcttcaacaccacttctccctatggtatgaatcgctaagttgaacgatttgaatttcaaaatctcgtcgaaatttctcgattttcccccaaattttgaaatctgtgtttccaggtaacaacagtacggttcatacgacgccgtattgctgtttcactaactacgatacggtgcgggtgatgagtatgaacattttggattgctcacattacacgacggtgattgacaatggaaaaatgagaggcgtggggcctttggattggtcctatggaatcgagctttcgtactcggtaacggagattggctgtgaccgttgccgaaagtcaggtggcacttgtggctttgacgccgagacggagatctttctttgccagtgttccggttccaacaacaaccctacgagagaa

SEQ ID NO: 143036 - DNA, 6496 bp, Arabidopsis thaliana landsberg
gaatgactctgacaatccgttttgacttgtgtagtttattgtatattcagtttaactctgtcacccgccgtgttcaaccttgctgcttaagagttcctcaggtaagtttttcataattttctcacgctgcagtccactagagtagtactctaacacaatgttacaggttggtatggttgccatcaacgatgggattctacttcgtaatcacatccacaggattctcaaagcatttccgtgaaaagccttactatcttgacctagttgatttgttaggatatgaaattcactgatccataaaaaaaaaataggggtacgtttagaagaatacataaagtatagggactgaagctgcaaatttatgttctcagtagatgtccgatctttggacagaactgaagaaaggagaaaccctagactgagtctggttacttgagggggatcatgtgaatacgtcgactggtaaagaaagaaagattgctgctttttagatttagattcgagaatgtatggaagatctggtcttgacaggtttaagaagtcccaaacttcggaacccttctctgtatcagcaaatcctcctccggtggtacaacaacatctgtctccggaggcattgtcggggcaaaaaactcagattggagctgggcaatcaaactggcatccccctgattgggcgattgagcctcgtgccggtgtctactctctggaagttgtgaaagacggccagatccttgatcggattcatctagatagacgaaggcacatcttcgggagacaacatcagacttgtgattttgtgcttgatcatcagtctgtttcccgccagcatgccgccgttgttcctcacaagaatggcaggtttgtcatcgctactcaattctctcatcacagctttggccactgttgacatgagtcttttttattttttgtagcatctttgtgattgacttgggatcagctcatggtacgtttgttgcaaatgagaggttgactaaagatactcctgtagagcttgaagtgggtcaatccttacgatttgctgcctccacaagaatctaccttctgagaaagaacagtgaggctctcttttctcgccctccacctccagctgagattaagcttcctccacctcctgatgcttctgatgaggaagctgttgttgcttacaataccttgctgaatcgatatggtttaagcaatggagaatctggtggtatgttagggaaaaggaaagagaagaccggatcagaagcgggagtggctaagaggatgaagaaagtgagagtgagcttcagggatcaactaggaggagagctggctgagattgttggcatgtcagatggagcagacgtggaaacagagcctggtcctataaatgtcaaagaaggaagcctcgttgggaaatatgaatcactggtgcaagtgacactcatacccaaaggcaaagtgaaggaagagaaagcctttacaggaggaacaagaggaggtgtgacagatcgactccaggaagctatgaatatgttgaaacggggtccaaaaacagggatttacgatgacctttacggtggtgactcacttgccaaggctgttggtacgtcatgggcttctgtgagtcaaccagcagctgaaactgaatgcggaggggttggtgaagaagatgataacgacgatctgtttggtgactagctgattttgaacactgagattcctttaagtaactcttcttcttctctagtgcctacattccattccaaggcatgggtgtgttgtttcctctttgtctatccaatggctgcagcaagaaaagagagcagctctaagcccaggcccattgtcttgtgttataagtaagaaccctgaaatttgatatgagcctgagcctggtcagtggtcattctagttgtgggtcttaacaggagatacatcacatagatagtcattacaaattagtgtggagagtagagagtagggccaatgcaaatggagtgcatttgattagaccactactgacttacagattctctcctcaaggcagaccaattccatcagaagaggacatttgtactcaaatacctctcctctcattctttttcacttttgcctttttgcattattaaaacagcacactaatgatgtgggttgacttccctctcccccacaaaaacagagattccatggggggaaatggacaacaagtaaaacacttgtaaaaatggtaatctgcctctgatgctttaagatatgatttggggatcaatgcatctttgctttgggatttgctttgtgacagttagtataaagaagagagaagctgaatgtgctgcaaccaaattaaaactctcttttgagttaagcctatatccaactcctactcttcctagtgtggtccattgtatttatcataagagtaaactcgcttgtaataaattatagtagggaaaggtggaagacccacttttgtttctcactttctttctgtttggtgagaagttgttttccttatgcaaaagatggaatgcatgaaggacacttgtgtctggctttttatttattttggttgtggatactttcatgatatactttacgacctcaaccctttaataccacacaatctacctccattcatcttttctcttctcttaattttcaccttacttcccaacgagaccatagaggagtcactgactccaacttatagctactagctatgctgcgtaactctcttaaacactaccttggcacctatgacaaatatgttagtgagccaacttttctggctttcagtttcaaaccaaacaagtatgaaggaaatacatatcagacaccatttggagacttgagtccatgcggggagcaacaagtgacgaggccgggacccttgttgccattcaactctctctttcttgggatataatttcactaacactttatgtcaatttgatcattaccactttcacatctctctctcttcttcttcttcttcttcctccctcatatcaacctttgagcacaccagttttcatggtaaaatcaatcatccttttgctttatctttttcggtttttttttctctctcttttggttttcagaattgtatcataaacagactacaggtgtgattgtatcatttaggaatacatataataaaatttcagcttcatcaatatgtaattatcttcctgtgtctttcccacttttacctaaagatttgatcactttctcatcatatgtatatatatattcctcttgaacgcagagaagtctaggatgaagttcatgaaaatcggaacaaagcctgacactttctacactcaagaggcttcaaggttgttccttgatctctttgcctctaaatttcccatatcccatttctctgacaaaatatttacactgcaggattttgataacagacacacctaacgatctcgttattcgaatcaacaccaccacttatcatctccacagagtatatatctcgattgcctctcttatcaattatcatagcagcacacacatatatatatatgtatgttaatagtggtttccatctttgtctgcagtcttgtcttgttccaaaatgtgggctgttgcgaaggctttgcactgattcagaggagtctgatactgttaccatagagctgaatgacatacctggtggagccgatgcttttgagttgtgtgctaagttctgctatgatatcacaatcaacctcagtgctcataaccttgtgaatgctctctgtgcctccaagtttcttcggatgtctgattctgttgacaagggaaatctgttaccaaagcttgaagcttttttccactcatgcattctccaaggctggaaggactccattgtcactttgcagtccactaccaaattgccagaatggtgtgaaaatcttggaatcgtcagaaagtgtatagattcaattgtggagaagatcctcactccaacttcagaggtctcctggtctcatacatacaccagaccaggctacgcgaagagacagcaccactctgttccaagagactggtggacggaagacatatcagacctcgacttggacttattccgctgtgtgatcacagcagccaggtcaaccttcacgttgccacctcagctcattggtgaagctttgcatgtctacacttgccgttggttaccatacttcatatcaaacagccattcaggtttctcagttaacgaaaatgaagcagcactggaaaggcatcggcgtcttgttaacacagttgtgaatatgattcctgcagataaagggtcggtttcagagggttttctgctgagacttgttagcatagcgagttatgtgagagcatctctcacaacaaagactgagttgattagaaaatctggtctgcaactcgaggaggcaactcttgaagacctcttgttgccttcacactcatcctctcatctccatcgctatgataccgacttggttgctacagttcttgagagttttttaatgctttggagaagacagtcttctgcgcatctttctagtaacaacactcaattgctgcattcaatcaggaaggtggcaaagcttattgactcctatcttcaggcagtcgcacaagatgtccatatgccagtttccaaatttgtgtctctttctgaggcagtgcccgacattgcacgtcagagccatgacagactttacaaagcgatcaacatatttctcaaggtatcagatgctctggcctgctcaagggcaactagctatggttgagagtctcaccagcctactttcagaaatcatacattttgcatacagtacttgaaactgataaaacatttgtaacatggcaggtgcatcccgagataagcaaagaagagaaaaaacgactatgcagaagtcttgactgccagaaattgtctgcacaagtacgtgcacacgctgtgaaaaatgagaggatgccattaagaacggtcgtccaagcactcttctttgaccaagagagcagttccaagggagaatcaagtcgatcagagaaccaagaactcttcacaagaggtaaagagactcccactgataaacatagcatgatgctcaagcttcacctaggtccagcttctacagggaaagctaagaacgtgcttgaagagggatgcaaaagaggagaagagaaaatcagatccagtacagatcctaagaagatagtgtggaaaggaacagggtcagaacataagcatcatgtaagtagagacaggtagtggtagactatacgtcttaggccacagagattcagtttcttgtttgcactcgccagatttctggttcttttatttttctttctaaaaagaattgatgatgattgtagatggttaatgtaaacctagtggcacgacctgtattaatacagtgcagagctcaagctccttctcaaccactctctctcttatgtgcttaagaaaacggttctgcaataagcatgagccatggaataatatgtagtaatgtgcttattaggataaataggttcaaggatcacatcttttgtttcaaccttttttttcctagaaatcaagcattgttcccttgttgacaattactgttatttagataaggacataagattgccttgatcgtttcattgtatacataaaaagattattacttgcttacaagattttcgcttacgctcgttctcagggtgattaacacttaacgttcgtttcaaaatcaggctggtttgtgactgagcgcacccaggcccacttgtggtcactcgtgtttacttggttcttagtctgtgccacctcctctaaggggatataagcatagttcccattgatcgggccagggacgaaccctgtgtaaccagccatgactccatggatagccgagtgggccaagagtgtacaatacaagttatccgtagcatttgcaggtacagctcttatcatgtaagtcggatcgatatacttgacagtgaacagttcatctggatgctctcgctcccaccaggccttgaggactgacttaaaccagactcccacatccaagaaaactgcgttgccagattcatccctctcttgtttctgtgattcatttcttgggatcatctcttgacctgccccttcagccacaacaagaacagcatgcccacgttctttcagtctcttctcgagaaactcaaagagcccacctttgccttcaaggtagaagtccatctcagggatcaaacaacagtccacatcacggctgctaagagtggcatgtagagcaatgtgaccagtacttctgcccataagcttcacaagtccaatgccattgactgcgctctcggcctccacgtgagcagcagatatagcctcctgagccatctctacagccgtttgaaagccaaatgatctatcaatgatgccgacatcgttgtccacggttttgggaataaccgtgattcccacctccagtttcctgaggctgatttccttgaagatctcaacagccccacgcattgtgccgtc

SEQ ID NO: 143037 - DNA, 1073 bp, Arabidopsis thaliana landsberg
tgtattttcctccagatttcaaatttcgcttctttcttgttttattgtaaagggaactttgccagatgatgggccacgaccagagataattgttccgtctgctatgtttggtggagctatcattagttttgtgttatgtccaacagagctagtaaaggtgaaatctccagaacaccatttctttccccgcaattatcacctttgatggtttccatggagttttgggacattcactgttttgttcagtgtagaatgcagatccaaggaacggattctctggttcctaacttccgtagatacaacagtcctcttgattgtgccgttcagaccgttaaaaatgatggggtgagaaactctcgttgctaaaatattctacttaagaatcgaatatcaggttgatggggatatctttcaggtaacaggtatctttcgtggtggttcggcaaccttattaagagaatgtacgggaaatgctgtcttttttactgtctatgagtacttacggtatcatatccactcgagattggaggattctaagctgaaagatggttacttggttgacatggggataggagttctcactggtggtcttggaggcatagctgtaggaatctatatagtgtgtttcataaattccatcataaaaaatgttgctattttatatgaatattacttctgcttctatgatgcagtgctggtcagctgttttgccttttgatgtagcaaaaaccataatccagacctcttcagagaaagctacagagagaaatccttttaaagtgttgagctcggtcagtcagccatcttccctctatgaatctaattaccgatacaaaagagtatatgaaatattgtttttgactttaaatcatctctgcagattcacaagagggcaggactcaagggatgctatgcaggtttgggtccaaccattgtgagagcattccctgctaatgcagcagcaattgttgcttgggagttctcaatgaaaatgttgggaatcagcgggggctaggaaaaatcttacaatgtgatgtatttggttcgatttacggatcgttaaaccacaggga

SEQ ID NO: 143038 - DNA, 1477 bp, Arabidopsis thaliana landsberg
gtcacatcgaactctaaaccacactgagatggcgaaatggtggcgaggcctgagatccgtgacggcggaggtggctgatcttccggcttcttcattcggtcgatcgattcgatgtattcatcagtatcagacgatccaggcgattccacgtgaagctacgggtcgaggagtatcggctcgggatcggacgattggtcgtattcccgccgtcgttttcccgcaatcgcttctagatactgatgcttcgaagcgaggcgtgtcgaggaagcagctattgacggcggataagaagcagatcaagtctattattgactctgttggtctcccattcttctgttctaccactttccagcttcagatccgagctggtcagggttcgtcgacgcttgttgaatcgggtcgagtacttcccctcaaggtattgttagcttccactcatttcgatttcaatcgcgatcgtataatgaatttagtaaaatgcagatgttgtgagttaatttggtgatgggattagaatggtttggtgtttctgttaggttcatagagacgaagaaactggaaagatacttaatttagtattcgtatgggctgatgatggggagaagttgaaggttgatgttcctgttgttttcaaagggttggatcattgtcctggtctccagaaaggtaactgtttcttcttttgttcgcatcacttgccttttttgcagctagtttcacaggttatgcttactgagaaatcatgtagaactgataggagtagtattctgtgtattggccttgatactgatgagaactttgcagatcggttttgtctttgtttttgcatggctagtgctcatgtgcttctgttttactgctatccagccattattttgatcgagctaagctttgtaaagagaaatctatcacttgtatctgatagtaaagtttgcattccaatggtaaaaggaactaagaaaccagatatttgatgtgtttgtgttttttctcatcggtgtagagcaaaattttcacctttttcctcattgggtaacatagactagtttcatgaatgttcctagtttaatctatcgtctctgttctgtgagcaggggaaacctgcggacaatccgaagcactctgaaactactagggccagctgagcacattccatctaaaatcgaagtagatgtgagcaatctggacattgaagacaaagtgttattgcaagacgttgtatttcatccatcattaaagctactgagcaagaatgaaaccatgcccgtgtgtaagattgtcgccacaagcccggtgaaagaaccagaagctgttcaagcataaaataagtctttgaaaagagtaatgtaatgtctctctgaagtttctgttccatacaaaaatgatcatttgtagaattctcagaggaaagaagcagatttttagaataaccctttttgtataaacctttcaagtggaagaacacttaaaccctcta

SEQ ID NO: 143039 - DNA, 1223 bp, Arabidopsis thaliana landsberg
acagtacacacttcttctcttaacaacacaacacaactttgaatttttcaccctcactttcatctatctcaaatctccttccaggtatgttacatctctagaaaacgatcacaatccaattaataacaagagataatcattcatttgtttgctaacactttgattgttataaattgtgcagaaaagcgagggaatagtgttgttgagaggtttgtgatttccttttgaaaaaatgatggcttgtggcttaagcaagagccttggcttgtcttcctccttgaagaagcaacaaggcatagtgagtatccttggtggcatttcgtcgaacacttcatctgcaccttcacttaggcgaactttctccgccgatttgtcctccaagacttgggtttcccaaaatgggttttctcctatgaagagaatctcttcctctgagaagcttcgtcctgacgaagaagaagcagaggaagaatcaagatccggtgtcgatatctgggcacagattcaacaagacaagaacgataagaagaaagaggaagagatcgagccgggtcaatccgatgtatggagttcgattttgtctgagaagaagaagactgaatcgagcaaggacactgttcctccaccgtatgttcatccattgatgaaacgtgcgagttccttgagtgagaaaagcctcgagatttgtactgagagtctcggatcagagactggttgcgatggtttctcttcgcatgcatcgtcgaagactggagatggtgagatcgagattcatgatgagaccaatctcgttgttaacgtgacggagacgaaggttgaagaaataacagagactgagattgtggttgagcaagaatcatcaatcattgttccgaatcacataatcgagctgcctcgaggatggtttcctcctccgattcgttctctctcgagccaatctggttcgtctctgcacatgaaaactcgccgtgacaatggccgattggttcttgaagctgtctctatgccgtcgcacaacaacttctccgctaagcgccaagacggacgcctcctccttacttttgctgaaatcagcaacgaacccaactacgacaaagaagacgagattgattcggaggttcagtggttcgacgaggaggaagaagaagaagaggaggaggaggatgaagaagaagaggcaccagacgagtttgcctacaagcccaatgggcttctctataaga

SEQ ID NO: 143040 - DNA, 1677 bp, Arabidopsis thaliana landsberg
cccaggtactaattaaactcttctctttttctcatatgggtatttcaagtgtggtgtgaagtttatttctttttaacaatagtgtatttggggtttatataaatcggaagtggattcaagtcagtgaagccattcagatcaggctactttggagcattcatcaaactccaacctggctacactgctggagtcatcacatctctctatgtgagactagagactcacttaagaaactactttttaattacattagtgatcttaattaaaactaattaaattaattttgcagctatcaaataatgaggcacatccagggttccatgatgaggtagacatagaatttttggggacaacatttgggaagccttacacacttcagacaaatgtgtatattagaggaagtggtgatgggaaaatcattggccgtgagatgaagtttcgcttgtggtttgatccaactaaagattttcaccattatgctattctttggagccctagagaaatcatgtaagccttcttctacttaatgtctcctacaaaaattgtttttatatttttcattttgttgaatctaaccctttaataacgatagtgtatataagatccgtgttcttacgagaagatacgacaaattcattttttggccacggacctaggtggatgtatctagagccatatagtaaacaataaaaatagatatacgttacataacttttattttattttagatttgggaaaagatctttacccttaggttgcattattcgggcaaggaaagatgtaattagagacacgaacaagaaagagacagtgattgtacgacggtgacaattatacttgattttttttggagttttatgaataattaaattattttctcatgtggtatttgtaactaaagtttttaattctcttaactaagtatgagtccttcaagtctatgaggtgcgagtgcgacaacataaatgggacattcacaatctacctaccaaattttagcatttatatttattatttccaattattttatttttaaattctcatacttttatcagaatgctactatgtaacattgatattttaatctatttcttgtataaaaaaggttttttttttttttttgaacaaagaaaaagtaggaaactatatcaactaatatagttattttgttcatttgtaatttcagatttttggtggatgatattcccataagaagatacccaaagaagagtgcgtctacatttcctttaagaccaatgtggctttatggttccatatgggatgcttcttcttgggcaacggaagacggtaaatacaaagccgactataaatatcaacctttcactgctaaatacaccaattttaaagcgctcggctgcaccgcctactcgtcagctcggtgctatccgttgtcggcttcgccataccgttctggcggattaacccgacaacaacaccaagccatgagatgggttcaaacacatagtatggtatacaattattgcaaagattataagcgagaccattctttaacgccggaatgttggcgttaggaaatattcgatgaaagtcccaaagtttgagagttttaatcacatcaaagttaataccagaaagagcttggtataattttgggatttttttcattactattattatgtggttggttgtttcacg

SEQ ID NO: 143041 - DNA, 1285 bp, Arabidopsis thaliana landsberg
aactttttgaactcatctcctgttgttactttcgtttcccaaacttcgaattgggttgaggaagaagaaggtgaggatggaagcatcggaggtacttcagtcactgtagatgagagtttcgagtctgaagacggtgttggattcccggagccaccggaagaggctaaattattcgtcggaaacttgccgtacgatgttgatagtcaagctttagctatgctctttgaacaagctggtactgttgagatttcagaggtatatattgctaatttgtgctttttgacatttgaatccaaatggttgagaaaattggaactaaatttttctgtggcattgttacttcttgagaaagttagtttagtgtttcgaattcatagtttgatttgtcttgaaggaatgattttgtttcatgggtctgctttgaaatctggttttatagtttatttggcttaaaggaatgattatgtttcatgggtctgctttgaaatctggtttttgcaggttatatacaatagggacactgatcaaagtcgtggatttgggtttgtaacaatgagtacagttgaagaagcagagaaagctgttgagaagttcaatagttttgtaagcaatcattttcttgtttctcaatcttctgggtcatttggatagtgattatagatgttgaagttgattggtatacaactgtaggaagtgaatgggaggcgtttgacagtaaacagagcagctccaagaggatcaagacctgaacgacaacctcgtgtatatgatgctgcgtttaggatctatgttgggaacctgccatgggatgtggatagtggtcgtttggaacgattatttagcgagcatgggaaagtagttgatgcccgagtggtttctgatagagagacaggtcgttcacgtgggtttgggtttgttcaaatgtcgaatgagaatgaagttaacgttgccattgctgctcttgatggacaggtaaaagaaatcactcctcactcctccatgcgtttatggttatcttcttgtgactttaccatttcttttattcattgctctctgtgtttgcagaatttggaaggcagagcaattaaagtgaacgtggctgaggaacgaacaaggcgttgattttgatagctcagtgagtgttaatattgtgagttatgattagaaatgttctcacttacaattccaatgtagcgagtatgtgaaaccaaacttgagttcaagcttttgtaaacatattttctttattacccatcaaaacatattacaaaacattacacaacct

SEQ ID NO: 143042 - DNA, 961 bp, Arabidopsis thaliana landsberg
aaaaaaaaaagaggcagaccaaaaaaactttaggggtcgatttcgctcctgggtaatcaccatgtccggagaaaaagaagagaccgccgcggaactcaagatcggagagggtacttctctattctcttcgccatatcccccgctgtgtacctcaaaattagggtttctttgcctcatcgaattgatcttaattcaatacgatttaattgagcttaactgtatcgaaaatcccttaattatttgagatttatcatcgaaattgatgggttttattctctttgacaaaagagtttttgaaggcaaagtgcttaatgaactgtgaagtctctttgattcttgagcacaagtttgaacagcttcagcaaatctcagaggatcctatgaatcaagtttctcagtaagtataattgtgtttcatagagattcattgtatattagccatcatgaattgaagaatttagtcagttttatatgttacttctaggttagtgaatcaatgttgaatattgttgaagaagttatgtttgctccttgcagagtgtttgagaagtccttgcaatatgtgaagcgattcagccgctacaagaatccagatgctgttagacaagttcgagagtatcctttttctgaattagtttgattcatagtttttaagtaatcgttgctttgacatgcttccttcttgatgagtgagattttacagtcactggtttaattctatagttttgtgagaatatgctattccttaactcaacttttgcagaatactaagcagacatcaactcactgagtttgaggtacaatgttaaatctcttgagtttggatttttgtttatcaattaagtcgtttcggtagaagacttaaaacattgcattgttcattattgaacagctatgtgttcttggcaatctctgtcctgaaactgttgaagaagcagtggcaatggttccttctcttaag

SEQ ID NO: 143043 - DNA, 968 bp, Arabidopsis thaliana landsberg
  unsure (1)..(968): unsure at all n locations
attccaaataatcgaagcctgagagaatttagcgtgattcattatgaaatttttcttgctctatttagtttttgttgaagttgtgttagtgtagttgaagattgatatgtttaagctcgaatgtgataactaggggatgtgaagaaagctcttgttcagaaaactggattggaagctagtgaattgaagatcttgttcagaggagttgagagnnnnnnnnnnnnnnnnnnnnnnnnnnntggtgttaaggatgcgtctaagcttgttgttgttgttgaggatacgaataagagagtggaacaacagcctcctgtggtaactaaagagatggaaaaagctattgctgctgttaacgcggttacaggagaggtcgataagctctcggatagagtgagtttttataagcctgtatttcttttggagatgacggaaggattgtgcttaagctagttttttttggtaattaggttgttgctttagaagttgctgtgaatggagggacgcaagttgcggtgcgggagtttgacatggctgcagagcttcttatgaggcagctgctcaaattggatggcattgaggctgaaggggacgctaaagtacagcgtaaggctgaggttagttttcttgctttgttaagcatgtttacacggtaagagtgttaatagagttggaagatatatgagttgtggtttgtgttggcaggtacgtagaatccaaaacttgcaggaggctgtggataagttgaaggcaagatgttcaaatccgtttgtggatcagagcaaagctgcagctgtaagcactgagtgggaatcgttcggaaacggtgtcggaagcttgaaccctcctccgccagcttcgttcggccaatgtaactcaagattgggagaaatttgactgacattttagtactgctacgttgccttggaaaaaaatgcttattgaaactgtttatctttttgattattgtt

SEQ ID NO: 143044 - DNA, 1633 bp, Arabidopsis thaliana landsberg
agatcaagtgagttttctaccataaaaagcttggatgtgtttagattgtagttttttttactaattgattctctactcttaggtgagggatataccatgtggtaccaaaggaggtgtcttgattacctttgagaagatagaagtaagtgtcttaagatttgcttttctgctggcatcaccattgcttttttaatcttaattatatgtattgatcagattaaacatgtttacaggttgttaatcgactacgtaaggattttgtttatgacactttgcttaactatggtgtgaactatgataacacatggatttatgacaagattcatcatgagatcaaccagttctgtagctctcattcacttcagcaagtctacattgacatctttgaccaggtacttgactataatttaaacatataaactttttgatcttaacagtttggaagcttaagctcatgtcattgactggttcatgtttttgatccatatggagtgacgtttccttcctctttttaggaaaacagcagtgattaaagctttctttgatagttttctaattgcgtccaaaatctggaaagtttacgatgatttccgctaattcatttgatcacatgtgtttcagattgatgaacgaatgaaagatgctcttcaagctgattgtacacgttatgctccaggaattgagattcttagtgtgcgtgtcaccaagccgaaaattccagagagtgtaaggcgtaactttgagcaaatggaagaggaacgtaccaaggtaaattccttttgaaccttgtccttggcaattcaatctgcactggtttgctcatatcatcaattccgttataatggactctggacgctttaagattgcttatacaattggaatgaatgattttgaaggtcttgattgctattgagaaacaaagagttgctgagaaagaggcagagacaaagaaaataatggccattagtgaagctgagaagaacgccaatgtaagcaagattctgatgcaacagaagttgactgagaaagacagttcaaggagagaagctgatatcgagaatcagatgtaccttgaccgtcaaaagagtctcgcggatgcagattactaccggtaatagcccgtctttttttcccatttagtttccttatgaatcaaacaaacaaagaacatatacagaataaatggctctaatgtttaaatttttcccctgatcaatgtccttagtgtactgagagaagctgaagcaaataagttgaagctcacccctgaatttcttgaactcaaattcatcgatgccattgctcgtaacaccaaaatattcttcggggacaaggttttactcgactctatctcatttctgaattcacatatctcgtgtcttatctctgttctgctgttctgaagaaagtatatctcttaactgtgcaggtacctaacatggtgttggatcaaaggctgcttgggaatttcctcaatcattcgacaaaagacaaagatggaagcttggaaatggccactgatacatagactagatgtttcagtcccacaattacaatttttcttttgtttttattgcataacataaaacacttatcagtgaaatttggaagcttctcccgtagctttcattta

SEQ ID NO: 143045 - DNA, 5427 bp, Arabidopsis thaliana landsberg; identical to SEQ ID NO: 34922
  unsure (1)..(5427): unsure at all n locations

SEQ ID NO: 143046 - DNA, 1689 bp, Arabidopsis thaliana landsberg
tttccctctccgaaacagaaattcaaaaacaaattcaacacgaaaacgatggcgtttcataacaatcactttaatcatttcaccgaccaacaacaacatcagcctcctcctccgccgcaacagcagcagcaacaacattttcaagaatcagcaccccctaattggctcctccgctccgacaacaacttcctcaatctccacacagctgcctctgccgccgctacaagctccgattctccttcttccgccgccgctaaccagtggctctcacgatcctcatccttcctccaacgaggcaacaccgcaaacaacaacaacaacgaaacatccggtgacgtcatcgaagacgttcccggcggagaggagtcaatgatcggagagaagaaggaggcggagaggtggcagaatgcgagacacaaggcggagatactgtctcatccactatacgagcaacttttgtcggcacacgtggcgtgcctgaggatcgcaacgccggtggatcagcttccgaggatagacgcacagcttgctcagtctcaaaacgtcgtggctaagtactcaactttagaagccgctcaaggactcctcgccggcgatgacaaggagcttgaccacttcatggtaacttaacttctctttccttcttaccactctcaattcccattattttattccttttcttttcttttggaaaataaaatcattaaaaattattttcatcttttatatttaaaacggtttgacaaatttgaatattttgttgttaattatctccaaatttataaaagtaaattagagaagaaaatcaaaaattctttctagacttgtactttgcaccgacagacatgatcagtgggttggataaatcgtcagttaaaaatttggatattagttttgcacagtagtaatttgacagcataaggtttattttgagatagatttttgctgagtgtaagtgattgagcaatttcattgattgcagttacggatacagtgatctgacaaaaactagtttgtcactttctgtatctatatcccatattttactgttcatggacgtatttgtatgattgtatctgttgtctgaaagatatttccatgtttttgtgcagacgcattatgtactattgctttgctctttcaaagaacaactgcaacagcatgttcgtgttcatgcaatggaagctgttatggcctgttgggagattgaacagtcgcttcaaagttttacaggttagtttttaagacttctactaaattatcaactttaatttgtcatttagctgttatggtaacttttgtatttcactatagtatggtaaaaagacacaaggttcttttattttatttctcatttcaatgctgttttttatatatagtacctacttcttgaggttttaatttaacacttgttttgttgaatgagacaggagtatctcctggtgaaggcacaggagcaacaatgtctgaggatgaagatgagcaagtagagagtgatgctcatttgtttgatggaagcttagatgggttagggtttggtcctctagttcccactgagagcgagagatctttgatggaacgagtcagacaagaactcaaacatgaactcaagcaggtaactagtgaaatatactatatccatcattaactactacacatatataagatcaatgataacaaatccttcac

SEQ ID NO: 143047 - DNA, 2446 bp, Arabidopsis thaliana landsberg
gcgaattcaatggctacactttctagaagactctatcgatctcttctatcgaaccctagaatttctcaagcttccatgtctttctgtaccaacaacatcacttccccagaagactccgactttgacgagttagaatcgcccattgaaccaaaggcctcagatccagtttctcgattttccggagaagaacgcgttatggaagagcgtccactcgaaaatggccttgactctggcattttcaaggtatcaaacttagattctaattccaattgatacatactctgtttttgttgtttttcttaaatcgatcgttgcaattttgccttttgtatgatctttgttgagtcattttctgaacatcattagattctcgttctggataggttaataattagtgtgttctagactaatttctggtttaatacaggcaatattggtggggcaagtgggtcagcttcctctgcagaagaagcttaagagtggtagaactgtcactctcttctctgtaggaactggtgggatcaggaacaaccggagaccgcttattaacgaagatccgagagagtatgcgagccggtctgcggtgcagtggcaccgtgtctctgtttaccctgaacgcttggcagatcttgtgttgaagaatgttgaacccgggttagttctcttctgagatcatatttagcttgtaaggttatgtgatgatagaataaggaacaaatgtatgtatcatgtctgatatcgatcaagaatcggtgaaaaaggatgaaactttaggtgaatcttgcttgctagattcaaaatggtagcttgcttttgtgtatgtgtcataacaacttgtttcgtgttcattcaacagtactgttatctacttagagggtaatctggagacgaagatattcactgatcctgtcactggtttggttcgacgtataagagaagtagcaattcgtagaaacggtactaatggctcaacccctaaaactccatttcttacatatttcattgggaaacaattaaatattgatctctgttttctctccttacaggccgagttgtgtttttgggaaaagccggtgatatgcagcaaccgagttctgctgagcttagaggcgttggctactactgatttttaacatacaaaaaattgttgtcataaaggtacacaatttgctattgtagtatttctagtttcgcttttgttgtctcttcttgtaacttgaaggtttggtttagtgttcttcaattggcattggcccttttccatggttttcggcaaataaacccaaaccaaacccaatcaatacgatttagactaaaccgaatctaaaccaaaatctcgattttagacaaagtaaaaaccaagaccaatctccacgtgtttacaaacattgcatgaatgccacctcaaagctgaatctgtcctccatttgttttacccttcctcattctgttctctgtcacacacacacacaaaacaacaatcgctctctacaatggcggaaaggttctctagcggcgaggcccaatattggcccaattatggtagcaccgccaccaccaccgttagcaacagccccatctcgtcgtttttccatcagctccgatcccattcaccaacatcctcgcagctctttggtttcctcgctctctttatctccactggcatcctcctcttcctccttggtgtaagcgtcaccgctgccgtgctcggcttcattgtctttcttccattgatcatcatctcgagtccgatatggattcccgtttttgtcgtcgttggcgggttcttaacggtctccggatttcttgtcgggacggtggctttagtgtcgtggacgtaccgctatttccggggaatgcacccggttggatcgaatcagatggattatgcacgtagtaggatctatgacacggcatctcacgtcaaagattacgctagagaatacggtggttacttccatggcagggctaaagatgcggcccctggtgcttgacctgaaccggttggtatagtctggttcagggtagtattaaccgatcacggttcgatttatggaggaggaacacggttcatggtaatattacattttcttattttgtttccgtttatactttataagatgaagaagaatatctatctagttatgtgtaatgtaagctttgtgtccgtcgcttgaaatgtaatatttcattttgtttttgagttttttttctatacatttttggagagatacttatattataatcaaatgtcttccgttgtgtttgaattcgaagaaacaatgagagtaaataactaccatttttttctatcttcattgcttatttcagacgatatggaagagcatgttacatcctttttgtgttctttttctaataatgaaaattccttattataaatagtcatgttcaaagtttggaaaaaaaaaatccaataagaaccttt

SEQ ID NO: 143048 - DNA, 2337 bp, Arabidopsis thaliana landsberg
  unsure (1)..(2337): unsure at all n locations
atgtcttggctcttcaaatctcgcggcgatgacgatgacgatcccgatcccgatccttccacaactcatggcggtgtcaaagaagatttatcttccttactccgtggcgtcgcagctttcctcgcaccgcctccttctccacctgtaaacgaacgccgactctccctctgataattcaccaactcagctaggtcttgtcgggatccgcaacgatctagccgagattcgtggaaatttctccaatttcgcatctaatttactccaatttcctagtaatctaagagatagagaaagtagtagaagatctctgttgaacgatcaagttcctggaatctctgaagaagtagtcgatttcgccgttaaaatctcgacgagacctggttgttggacagattttccattgtcactcgatactggtaatgctcctgtatagtcaatagaggaatcataaagcttgattctcattagtcttaagttctgcattgaccttttttttttcagtaggcaaacgtaattgttactaaaataggttttatttggaaaagattgattgcttctacagttgattggctttctagagggatcactagggttacagattaagcttatttggacatatttcttcaagcatatctttgttcccagtatataggcttggttagtttggaagtatagtcgaagcacgtagaggtagttgcattggtggtttctaactatctttgtttagttatgattttcttactgtgattattaggaaaagattgattgcttctgcagttgattggctttctagagggatcactagggcaaaagattaagcttgacttgtcgagaagtgtactctttggacatatttcttcaagcatatctttgttctcagtatataggcttggttagtttggaagtatagtcgaagcacgtagacataattgcaatggtggtttctaactatctttgtttagttatgattttcttactttgatttattaggaaaagattttttgtttgtacagttgattgcttgtagcctctggtgttttagattaggttagaccggtcctgccatctcctcttgggatatatttcttcaagcccaggtctttaggatctcgggttcccattactctctgtagatcacatttttcataccttgaaaatattgtcgaagaacttgcaggaataaacatgattgttcttcgaaatatagttgacttgttttcagtcgctaaagatgattgtgcttcagtctttcgctctttatgtgttttattctagacctgtttggacaagattgatcgtttctgcagttaatttgtttttttgaaagtccctgttctttaaatagatctctaggaattacgaataggcttgacgggttctgcagtctcttcttgggatatatatgtagttcaatccacatgccactttaaatctttttattttattttatttcaaagaatatcttcattctgtacaaccttgtatataggcttggtttgcttgaaaattttgtcgaaacacttcctgataaaaagcattggtggtttacatcaattttacctactgaattatgctgaagtttttctccaacttttcatgtccacattgcagaatttgaactgtctgaggctcaaagggcacatgcatcagccattgaagatttggttcctggccttgtagctgtgaagaatcaagttagtagttacatggatgatgaacacttctggctgatttattttattttgctgatgccgagactgaatgggcatgattttgaactcttagcaacatgcaaggtaagactgtatactggaaatacattcttctgaaatgtcagtattgatccaatattattaaaatcgtaaacgtttatgctataatgaccccttcaaccgattgcaataagaacaagtatagcctcaggaaaaactgtaaacgcataatgtactattggatggttcgatatcttttatgctctgcattttttcccaagttactattgtacctatttctgaaactttaataactatattgtgcggcacaggtatttgaaacaagggatcaacttttactaaagctgcaaaagaaagagacagcgtcaagcaagagcactactggtcacgaaactcctgaagaaggtagcagtagggaaacagaaaccgttgagggagtcatcgagaagatagagaatctaaaaattgagcaaagggagataagtgatgagtcatctgaagaaacaacgangagtttcagagatgaagaggtaatcntctttagtgatttagatgtcgacgatctctcggagaagccaagtcccaacaggagtacactgaaaag

SEQ ID NO: 143049 - DNA, 1325 bp, Arabidopsis thaliana landsberg
ataaatttaaagtgaagaatgagctaatcattgtggtgaaagtgagcagtgaagttgcttgattggggtaaagaaggtcatagatcagaagctgagattgtgtctttgagagctgattttgctcaggaggttgctgtttggcataaattggatcatcctaatgtcaccaaggttcatatttcacttctgtttactttttaccattgttatatattgaggatataaataagatttgggtcatcaatgaatgtatattttgcagtttataggagcaacaatgggtgcatcagggttacagttgcaaacagagagtggtccattagctatgccaaacaatatatgttgtgttgttgttgaatatcttccaggtggtgctttaaaatcttacctgatcaagaacagaagaagaaaactaacatttaaaattgttgttcagctcgctcttgatctcgctagagggtacattatattctcccttctttcgccgccttctcaagtcgtttatctgctctaatggttattgttatgttgcttttaggttgagttaccttcattcgcagaagattgttcaccgagatgtaaagacagagaatatgttgttagacaaaacccggactgttaaaatcgcagattttggagttgcgagagttgaagcatctaaccctaatgacatgacaggagagactggcacacttggctacatggcgcctgaggtactatagtgataatgcatcatcaagattggtaacaaaccaactttttataacaaataaactttggctgcaggttctcaatggaaacccgtataatcgaaaatgcgatgtatacagtttcgggatctgcttatgggagatatattgctgtgacatgccataccctgaccttactttctctgaggtcacttcagccgtcgtccgccaggtatggttgaatagattaagcaaagaaaagttaatttaattgaaatgtgcatattggttgtttcacaattatattttgttgtaaatcttgaggaatcactgaagtaaaaaatgtgatctagagtagtgtaaccatttcatcatttcactgaagtaaaaaatctatatgcaatatgctgctacatatgatcaatgcagaacctgagacccgatataccgaggtgttgcccgagcgcacttgcagctgtgatgaagcgatgttgggatgcaaatccggacaagagaccggagatggatgaggttgtaccaatgttggagagtattgacacaaccaagggaggagggatgattcctaacgaccagcaacagggttgcctatgcttccgaaggaaacgtggtccttaa

SEQ ID NO: 143050 - DNA, 1118 bp, Arabidopsis thaliana landsberg
atggtaagcagagagctattgtggaagttacaggtcacaaggcacatggtcctattccagagactggttctgttgtcatagcaagagtgagtcctgcacttatttcattggattcattgatgttcatacttggaaaaaaagagagtaatttcatcactcactattctctgttattcgtgataggtgactaaagttatgactaagatggctgctgttgatatcttgtgtgttggttcaaaagccgttcgtgaaaattttgctggtgtaattaggtgaatttctcatcctcctttggtgtttattttcaaggtttgttcttttatgtgtcgatctaacttgtgtttgctctttcataggcaacaagatgttagagcaacagagattgacaaagttgacatgcatcagtctttccatgctggtgacattgttagagctatggttgtatccttgcgcttatgtttcacacttattgtctagtagtacagtggttaacattgtttattagaggagagacaattctaagatttgttacattatgccatttattttctctttttacttacatatctctttgtatagtttaatttgaatgtagcgtaggtgtagtctataataatagatgatgttttgggtgataatatctgaagttgccttaacttggactcttaaagctgtctcttggtgatgcacgggcttactacttgtctactgctaagaatgaacttggtgtggtctcagctttaagtgccgcgggtaatttttttcctactcttagaaactaaataaagggtaatgagggcaaagattactaattatatagctaatccatcacatatcaaattgtaatacatttctaacttgtagttctcattatggaattatgagtaacaaatattttcgtcctggacttggagtatgttaatgtgtagatgcatttgcttctttgggcagtttataatactatacgaagttaatttccgtttgagtaatcgaaatgtttatgtggtctggtgattgtgcaggcgaaacaatggttccgataagttggacagagatgcagtgccccttgtcgggccaaaccgagcagagaaaagttgccaaggtgggtaattgaattc

SEQ ID NO: 143051 - DNA, 515 bp, Arabidopsis thaliana landsberg
tttggtgtttgtgaatattgccccggtaaacttactttacaaagaaagaagagcgttttccaagtggatatcaatacattttgcggtttatatattataggaacgactattgatttgtttttttggttgtagcaccgtcacgagtctaaagttgatgaaaggagagggtgaagcaaatgagaatgttctgaaagattgcgtcacaggctttgcgattgcacaattacgacttcaaggagccaacatcgatttgataacccttaattacgataaagcgtacgaattggtgaaaactgcgttaaactatcctcggacttgcgaagaaaatctccaaaaactcaagttcaaagattcatctgatgtttatgacgatatcttggcatatagccaactcacctctgttgctaagacgttgatccaccgtctctagatcaatatatatgtcgatctggttatcaaaaatatatttatgtcgatcgtttgctaccactaataaaataaaactccattatgta

SEQ ID NO: 143052 - DNA, 1370 bp, Arabidopsis thaliana landsberg
ctcgttattattcgttttctcttaaatacttaattctttttttttcccaaacagtttctctgaaactaagaaactctaacagagaatccggatgcttttctctgattcttctactctttcctaatttaccgattttctcgggaatccaaaatcccgtttctctttttctcgagttaaaaaactttcgatctgaagtcaattcagattcttcttggaagctcaaagaagaagaagagagaagagagagactactgatttgggtttagttcgttggatcagaaaggtctctgctttgatctttgtagtacacgtggcgaaaagggtcggaatttggagttgtgttgatgatgttccaagtctcagatttcttgtaataacattctcttgtctttctccaatgtctttgtcttgattctcagaaaaagatcttcagatccgtttacttgaggggaaagagacgaatagttttttgttagctaaaaaaaattatgatgaagatgatgagaaacaaaccgacaaatcttccgacgacggcgatgactaatggcggtagaggttccggcggcggtggtggtggcggcggcagggagtcaggcggtcgtgatttggaaattagacctggtggtatgttggttcagaaacgtaacccggatttggatcctgtcggacctccaccaccaccgatgatcagagttagaatcaagtacggtgccgtctaccatgagatcaatattagtcctcaagcttcttttggttagtagtagtctctgttttattgtaacaatctatggaatttgggacttggaaaggaattagagattttatgatctttgaattgatgcaggggagctaaagaagatgttgactggaccaacgggtatacatcatcaagatcagaagctaatgtataaagataaagagagggattcgaaggcgttcctcgatgtttcgggagttaaagataaatctaagatggtgcttatagaagacccgattagtcaagagaaacggtttttggagatgaggaagattgctaaaaccgaaaaggcgtcgaaagcgatatccgatattagccttgaagttgataggctcggcggacgagtaataccctgcccgccaagccattactttcttaggtttgttttgatgaaaatgcggggatcttatgtgtgtttttgtgtgtgtaggtttcggcttttgagatggtaactaagaaaggagggaagattgcggagaaagatcttgttacggttattgaattgttgatgaatgagttgattaagttggatgcgattgtggctgaaggacgatgtcaagttacaaagaaagatgcaggtatgtaatcagaatcatctcaagactgacaaatt

SEQ ID NO: 143053 - DNA, 2413 bp, Arabidopsis thaliana landsberg
caaatcagtttttaaaaataagggaaaatcctaataaaggagaagaaaaacagatctgaaatcccgcttgatactccaccgactttaaactactggtttttgtttgatttaagtatagtgttaatgactcctctctccaccttcctttgattctacctatcacttcccttgccgctgctccatcttcatcactaatcactatacaccaatcttagatccgggaagctaatttctcttctccgatcggtgaatgcagttacattgacctcggatctaaccaagctcttctggtttcttcctctctggaattcaaaaaaatggaggagaaatccaagtcaagaggttggtgcggttggttcatcgccattatcgtgctagcttccgtcatcctcgccgtcgtttacactgttaaattgagaacgaagaaatccggtgacgatgacggtggcggtcccgttcctggacctcccggcgccattgataagaaatacgccgacgctcttaagctcgctttgcagttcttcgatatccagaaatgtaaatctttctaatcgtgtcctccacgatctcccgcgaagtttcaaatctaatttattgtgattttgattcctatgtagctggtaaattggagaacaataagataccttggagaggagattcaggtcttaaagatggtagtgaagataatctggatctttccaaaggattatatgatgctggagatcatataaagtttggttttccaatggctttcactgctacagttttatcatggtcgattctcgagtacggtgatcaaatgaatgcagtgaaccaattggatcctgctaaagactctctccggtggatcactgactatcttatcaaagctcatccttctgataatgtcctctatatccaggtttggacttcaaatcatgcatgctactatagctagattagcaatgattctcacttgttagtgttgtttgatgttaggtaggagatcccaaagtagatcatccatgttgggagagaccagaggatatgaaagagaagagaccacttactaaaattgatgtagatactccagggacagaggttgctgcggaaactgctgcagctatggcttcagcgtctttggtgtttaaggatagtgatcctacatattcagcaacgcttcttaagcatgcgaagcagttgtttgattttgcagatactaagagaggctcttacagtgttaacatacctgaggttcagaagttttacaattcgactggatatggtgatgagctactatgggcagctagttggttgtatcatgcaacagaggataaaacttaccttgattatgtttctaatcatggaaaagagtttgctagttttgggaatcctacttggtttagttgggacaacaagcttgcaggaacacaggtaagcttggaagaagaagtaactgttgaaaattttgtgttttgaatttttgcccgggtaacatttatgcttcccaatcattgcaggtactattatcaagattactcttctttaagaaagatttatcaggaagcaagggacttggaaattacaggaacacagctaaagctgtcatgtgtggacttctaccaaagtctccaacatctacagctagtagaacaaacggtaatctcaccttattattgtatagaagataaagcctctcttgacttaatttccttataaagcttggatcttgttcaataggtggtcttatatgggttagtgaatggaactcgatgcaacaatccgtttcctcagcgtttttagcctcgcttttcagtgattacatgctcacttcccgtatccataaaatatcttgcgacgggaaaatcttcaaagcaacagagcttagagatttcgccaaatcgcaggtaacaagaacaaaacatgaaagtctatagataacgaaatagtcaaagaagaagagtaactagagtttcttcatgcaggctgattacatgctggggaagaatccgctgggaacgagcttcgtggtgggttatggagacaaatacccacaatttgtgcatcatagaggagcttcgatcccggcagatgcaaccacgggttgcttagatggattcaaatggtttaactcaacgaaaccaaacccaaacatagcatatggtgcactcgtaggtgggcctttcttcaatgagacgttcactgactcacgagagaacccaatgcagaacgagccaaccacttacaacaatgcactcctcgttggtctcttgtctagtcttgtcactacatcttctactttacagtcgttgaagtgagctttgcgtgttttagccttcttattgaaaatcacattgcttcatttttatttgtaatatataaaaaaaattcgtgggtgtgtgtgtattcacgttgtgtattgcttagtatgtta

SEQ ID NO: 143054 - DNA, 1761 bp, Arabidopsis thaliana landsberg
  unsure (1)..(1761): unsure at all n locations
ttgtggcggttagctaaagcgcctatgtttagttctggaacttcggtggaagtgagttctaagatgaataacggggaagtcgtttgggttcctgcagtggttattaaagagtttaaggaagatgatgagtataagtatattgtcagggtttatgataagtccttcagctgcaagggtaatgaggctgcaagactcaacaaaaccgttgatttgtgtagtcttaggcctacaccgccttctatttcggttgaagagtatcaattaaaggaatacgtagaggtgtttcatgatggtatgggatggcgtcaaggacgagtgatgaaaattcaagaacgagtgatgttaagtcaaggacgagtgatggtaagtcaaggacgagtgatgggaaatctctctcagaaatgttatatagtgctgttagaggctacaaagaagcaaatatcattcaaacagtcagatcttaggcctttgcaggtgtgggaagatggtgtttggaaggtatttaacgttttctttgcactggtttcagtcaacactagattattgtcgataatgactaatttgtgtgaactgtttgcaagcattttgaaaatatgagactgccgtttcagctttagaacttcagcaaatgtttgctcctttgactgcatttcttagatgttgaatgatggtttgcactgggagtctttgtgttattatcttcctgttgtggtttttgatctctgttagatgttgcagacaagggaatcgtcgttaactcagggatcaggagatgagaccagtgattctgtgaggaatggtaagtttgtaacactctccaaaatctaacagattctcttaatccattttcaatttctgtatgacaattgatcttataatgtcactgttttccagcaaatgnnnnnnnnnnnnnnnnnnnnnnnnnnncgggcataactacaccaccgttgaaacaaatagaggctgaaactcaaagaaagacacttccgaggaatcagaatgcttcagtgaacgattcaacacgagagaatgtaaagttaattcttcactttaacgttattattcgcactttcttggtagtttgttaggtggtggctaatcatcttaatcctctttttttattgtttgaatgatagtgaacctttgaactttttatgcaggaaaatagtgaagatattaatcgaaaaaggaaaagagaagaaagcctttgttctgatgctagtgttgaggacacaacaatgactttgccatttgaaaagaagttgtcaatttggaagacacttgaatcagtggagacagtcccacaaagtcctcatttcaacccgttggttgagactagagaagattgccgcgaaatgtctgcggttgggatgatgctcacctttccttgtttacttgaggaagtcaaatctctgcaacacgacaattccataagcttttttataagcctcagtaataacttttgccgagttagagaaacacgggttcaatgtaaaagcacctcagtcacggatcaataagctgttgtctctcagagatagacaatcaaagaaaacagaggaactcaaagatgccgagaaagtgaccgcagagaaagagagcgtaaaagctgagaacaaacgcaagattctcgagctgcaaaggctaaatgaagagatggacaaagagatagctcaaagtaagtcatgtgcagcaaagattgtccaacagctcgatgatgtgaagcttgagtttctggcaacagcatcagctccatggtaa

SEQ ID NO: 143055 - DNA, 2148 bp, Arabidopsis thaliana landsberg
acccaatccatttccctcaaccaatcataaatctccacgtatgtggtcaccttcttcgatagctcattcatacatatccgacgggcttattaatgtcatcgagccgataatctcccaaatgtcatctccttcatctctcaggtaatatccataacctctcctcgatttcttcagatcttaaaatcacaacgaatttctcagattgtatcttaagatttgcttgattctagatttgaaatcaacattcagattcgcgattctttgtggctacaggtaaaaaaactgagtcaagatttggtgacgtgatgaatcatttggtgataatctctgtgttcttgagctcagtattgttgttatatagaggagaatctggaatcacaagtagttttattcgatctcaatggcctgcggttgatataccacttgatcatcatgttttcaaagtcccaaaaggatataatgcaccacaacaagtacacataactcaaggtgattatgatggtaaagctgttatcatctcttgggttacacctgatgaacctggttctagccaagtacattacggtgcggttcaggggaaatatgagtttgttgctcaagggacttaccataactacacgttttacaagtataagtctggctttattcatcactgccttgtctctgaccttgagggatcttagtttatattttatatttggtggttagattacatacaaatgctgattttcttttttttgttatcagcatgatacaaaatactattacaagattgaaagcggtgaatcttctcgagagttttggtttgttacaccaccacatgtacatccagatgcttcctacaagtttggtattataggttagtagtttgatctaaatgcaactgtgctttaagattcattgcagaggtagtttgtagtattgtttcaatgagagttacttgacttgtttctctagctctgtactagccaaactcagttttacttacgaattgtaggcgatatgggtcagacattcaactcgttatccacgttggaacattacatggagagtggagctcaggctgttttatttcttggagatctttcttatgctgatagatatcagtataatgacgttggtgtgagatgggatagctggggtcgttttgtggagcgtagtaccgcttatcaaccgtggctttggtctgcaggaaatcatgaagtagattacatgccatacatggttaatatctgattcatcttgtacttactttctacctagccaagtaacatataggttatgcataaattcgactcctatggaatttaaaatagtgagtggttcgaactgctacggtttttgcattttaacagtttctcagacagatcaatggaaaaggttcttaagaaagtatgctgaagattagaagatataaatgaactggttacatgaattttgatatgattaaatataggacaggaaaatgaaaaattcattatagctattacttgtaatttctattccgattgtgcgcttgacttctgtttttgcttctcctaagagttctcaaacatgtaaaacatttacagggggaggtgacacctttcaggaattaccttcagcgttacactacgccttacttagcctcaaaaagtagcagtcctctttggtacgctgttaggcgtgcatctgctcatatcattgtcctctccagctattcgccttttggtaataccttaactgctcaacaacatcccctgcttctaacttttttgttctttactttataagtaaaagatttacccaaatgagtggttaagcatgactctttcttataagtaaaagatttacccaaatgagtggttaagcatgactctttctgtgtgttgtacagtgaagtataccccgcaatggcactggcttagtgaagagcttacaagagttgatagggagaaaacaccttggctaattgttttgatgcacgtcccaatatacaacagtaatgaagcacatttcatggagggtgaaagcatgcgagcagcttttgaggagtggtttgtccaacacaaagttgatgtaatctttgctgggcatgttcatgcctacgagagatcggtactttcgtattaccataagctccgcatagaatatatatgtttcagtgtg

SEQ ID NO: 143056 - DNA, 2631 bp, Arabidopsis thaliana landsberg
gctcgtgacatggacacaatccaactaatgacccaaaagccaagttggttgagagctttttaactttttattttttcctttgttgttgttgagacccctcaattactttctgtacataatttattcttttgttccttcctgtatatgggtatattcctttcttggttttggaaagtagtgtagttttgaactttaatgaactattagtaatagtggtacatcttgttaaagtacttcaagctttagctagctttctgtatatgggtatatatttctttctcttacttagcttcattgagttcagcaacagtgatctctttctacttataaaactttttagtcttaaaggcccatcttgaaagaatttgaaacttttacaagaatcctatcagttttataacatcttactacaaacaatcataggcccatcagtttttcagttatcaaagcagagaggcccattttacaattatactaaacgtcatatgatctccattcttcagagaaacaagtccaatcttatcatttacatgaaatctaaaacccgccacgtgattcgtcgattacacagaacccatatacctgaagaaaaaagaaaaaaagaaaaaaaaaagcgaaattgttgtttgaacgtgtggtcgaattttatcgtggcgctgaattagcatccacaagtgaagaaaacagagagagaaagacagagagatctctctctccttcacacacacagatacacatggccatcgcgagcgggtcatgggtagccactgtgaaccaccatgctaatccccacagcttcacttctccgaccaaacccattttctttctttctcaaaagcctcacaatttccatgtctgctcgtctcgatgctctatggttcttgaggaagatgaaaagaagtcaccgagtcctaaagaagacaagtggccattttttgaacctggtccgaatgaccttaaccgggtcttatccaggtttctccgagacccggaaactcggaaactttcttctgaattctacgagaaagctaaggagaactctgagttgagaacgaccaagcatctgataagttacttggtgagttccaagagttgggacttgcttgtttctgtttgtgaggatctcagggaacataaagcattgcctgatgggcaaacgtgttcgaatctgatcaggagttgcatcagagataggaaattccgaatcacacattgcttgcttagcgtgtttagatcagacaaatcattggcggtatctgcatctgatgcagcgatgaaaggctttaacaaactccagatgtatagtagcaccattcaagtatttgataggttgaaacaatctgtgggagttgagccaagcccgggttgttattgcaggataatggaggctcatgagaagattggtgaaaatcacaaggtggttgagttgttccaagagtttaagagtcagaggttgagtttcttggccaaggaatcaggctctatctacacgattgtatgctcgtcccttgcaaaatcaggacgtgcattcgaagctctagaggttttggaggagatgaaagataaaggaattccggagagtagtgaattgtactctatgctgatccgtgcatttgcggaagcgcgggaggttgtaataaccgagaagctattcaaagaagcaggagggaagaaactgttaaaggatcctgaaatgtgtttgaaggttgtactcatgtatgtccgagaaggaaatatggagacaactctagaggttgtggcggcgatgagaaaggctgagttaaaggtcactgattgcatactctgtgcgattgtgaatggattcagtaagcaaagaggctttgctgaagcagttaaggtttatgaatgggctatgaaggaagaatgtgaggctgggcaagtgacttatgcaatagccatcaatgcatactgtcggcttgagaagtacaataaggctgagatgttgtttgatgagatggtgaagaaggggtttgataagtgtgttgttgcatactcaaacataatggatatgtatgggaaaacacggagactaagcgatgcagtgagactcatggctaagatgaaacaaagagggtgtaaacccaacatttggatttacaattccttgattgatatgcatggaagggctatggacttaaggagggctgaaaagatatggaaagagatgaagagggcgaaggtgttgccggacaaggtgagttacactagtatgatcagtgcatataacagatcaaaagagttggagagatgtgtggagctttaccaggagtttaggatgaacagaggaaaaattgatagggccatggcaggaatcatggtcggtgtattctccaaaaccagtaggattgatgagctaatgaggctgttgcaggacatgaaagttgaaggaaccaggcttgatgctaggctttattcctcagctttgaatgctctgcgtgatgctggtctcaattcccagatcagatggctacaggaaagctttgacgctgcacaaactagtacttcaaaatattcgaatacaaagaacacaggaactttaagttgaaagggaaaactgtacaagccaagattatttttcttgtaattaaatgtactatattgccaatagag

SEQ ID NO: 143057 - DNA, 1722 bp, Arabidopsis thaliana landsberg
attgtttttgttttgaagctaaaaagaaatccaagtcagatggaaatggatcatctgaagaaggtatgtcgaaaaaggagattgctcttcagcaagcacttgatcagattaccagttcatttggcaaagggtccataatgtatctcggtcgtgctgtttctcctagaaatgtcccggttttctctaccggatcttttgcccttgatgtagctttgggagttggtggccttcctaaggtatatatacttatctcttttggtgatattattctttccccaatatgtgtgttttagagtttttatcaggttggttctattagctttgttaattgaggttaatgtataagtctatgtattctctttgaagaatctaataatattggtctccccattgtgaattccttaggggcgtgttgtggagatatatggtcctgaagcatcgggaaagacagcacttgctcttcatgttattgcagaagcacaaaaacaaggaggttattatttgtttcttttaactcttcggctatgttctttacagagccatacgtcgtatcctaaagaagttttttgcatacaggaacctgtgtctttgtagatgctgagcatgctcttgattcgtcacttgctaaggcaatcggtgtaaatacagaaaatctgcttctatcacagcctgattgtggcgaacaggcccttagtcttgtggatactttaatccgaagtggttcagttgatgttattgtagttgacagtgtaagtaaggtgatttatatgggatggataatgggttgatgcttttgctattggatctatatttcgctctctcatgttttcatgtgattttgttttacaggtggctgctcttgtacctaaaggagaacttgagggggagatgggtgatgcacatatggctatgcaagccagattgataagtcaagctttgcgtaaattgagccattctttattgttaccgcaaacacttctgatctttataaatcaggtaagagaacgttactagctgagatttgtattcgaaatgtaaagtctcttatgcaaatgtatctttacttccccatgtttcatattcaggtgagatcaaaactatctacgtttggaggatttggaggtccaacagaagttacttgtggtggaaatgctttgaagttttatgcgcctatgcgtttggatattaagcgaattggacttatcaagaaaggcgaagaggtaaacttccgtataccagcttacacattttgggttccaagctcttacttaacttttctgttggctccttagttcttcagaatgaccaaatgttgtctacaaactgcatttttctattggctccttagttcttcagaatgactaaatgcttgtgtttgaatgcttgtgcacacaacgggaagtcaagtctccgtgaagatagtgaagaacaagctcgctccgccatttaagtatcttacacaactgttttaccagagtcaaactcttaaagccagccatcaagtcatgttttagagatctaatatatagataaaaacacacaatttggtgttcacatggttctctctcttcttctttgtttgcttagtatgaacagatacatgacctgcaaagggacgtggttagcaagtgcaggggcttacaacctgctgaagttgtcgaatatgcgtcttgaaagtaggtatttcacttttatgtctcttatgtgcgggttaagtcttga

SEQ ID NO: 143058 - DNA, 1475 bp, Arabidopsis thaliana landsberg
ctcctgaaaattgccaaaggaatttgtgctattttaaaacatagaacattaaactgctaaagttgtggccttattcttgtcacatttggctcgtgcaactaggcgttgaagcttgaagaatttggggtggaaggctcagatgctgaaaatgtttgttacttacgagatctagctgatgcaaataggcttgccactgtgattcaatcaagctccaacgggaatgcggttgttatcggcggtggctatatcggtatggagtgtgctgcatctttagtgatcaacaaaatcaatgtgacgatggttttcccagaggctcactgcagtaagttctctcgattattactaaacttacgtgtacgagagaaaggttgtgtatttagcttgacctttttagtttcttatgacagtggcacgtctctttacgcccaagattgcaagtttgtatgaagactactacagggctaaaggcgtaaaatttataaaaggaacggttttgacatcatttgagtttgactcgaacaaaaaggtaagatcgtttcttttagcttgagattcaactcgaaaaatgtctggttcgttgcatctatgtatacaactaaggatggcaagaatcagtagaaccacaaatacttctggtccagtactcaaactatgaaatcttgagccttgttcaacgtatttgtttattgatatgaggttttttggttttcgatttacaggttactgcagttaatctcaaagacgggagccacttaccagccgacttggttgtggttggtatcgggatacgaccaaacacaagcttgtttgaaggacagttaacaatagagaaaggagggataaaagtgaacagcagaatgcagtcaagtgacagctcagtgtatgcaataggcgatgtagctacatttccagtgaaactatttggcgaaatgaggaggcttgagcacgtggactcagctaggaaatctgcgcgacacgcagtttcagccatcatggatccaataaagaccggagactttgattacttaccatttttctactcaagggtcttcgcattctcatggcaattctatggagaccctacaggtgatgttgtgcactttggagagtatgaagacgggaaatcatttggagcgtattgggttaaaaagggtcaccttgttggatcttttcttgaaggaggcactaaagaagaatatgaaactatctcaaaggcgacacaattgaaaccagctgtgactattgatttggaagaattggaaagagaaggactcgggtttgctcacacggttgtgagtcagcagaaagttcctgaagttaaggatattccgagcgctgagatggtgaagcaatctgcaagtgtggtcatgataaagaagcctttgtatgtatggcacgcagctaccggagtcgttgtggctgcatctgtggctgcgttcgcgttttggtatgggaggagacgccgtagatggtga

SEQ ID NO: 143059 - DNA, 735 bp, Arabidopsis thaliana landsberg
  unsure (1)..(735): unsure at all n locations
gctcctcctcctgttcgaggtgcgcaggttaagaccatatccaatttcgcaggacaagtaccagcacgtcagcggggatgaggtctacatcaatctcggtttagctgtacgtacccttcgcgaagatttgcctctcctcttcaccaaagatctcaattacgacatttacaggtgtgttttcctctttctcctttaggtgattccttccttaaacctgtaaatgaaagcatttgtgtgtgctctttcagggatgatataacattagtggatccaatgaacacgttctctgggattgacaactacaaattgatcttctgggcacttagatttcatggcaagattctcttcagggatatctcacttgagatcttcagggtttggcaaccatcagagaacatgattctcatcaggtggaatcttaaaggtgtacctagagtcccatgggaggcaaagggagagtttcagggtacttctcgctataaactcgaccgaaatggcaaaatctatgagcataaggtcgataacttggccttcaacttccctcaccagctcaaacctgccacttctgttttggatatggtcaccgcttgccctgcaagtcccaatccaactttcatgtttggcgccatggattcatactcatcttcttggattgagttctacaaagcagtgcaaaggtcactagacaagcaagaagagcaaatgcttgtgcaagaccatttcgtnnnnnnnnnn

SEQ ID NO: 143060 - DNA, 1266 bp, Arabidopsis thaliana landsberg
aaagtgaataattgaagaaaagacgttataccttccccatccacattttcttgcttaactgcagaacaacaccaaattcgaccctatcaagttttgattcgtgtctacatagaaagagtctcaattgttctgtccctggacttttttttgtttcgtttttcttgttaagatcgaaaactctgttttggtagatttttgtgttcttgattttgattcaagatggggaggctgtttgtggtgaatcttgaagggaagatctatagctgcaaacactgtaagactcatcttgctacttatgaagacatcatctccaaggttttgtcccttttccaatttcttgacttttctggagattattctaatgggtttgtgattaatctgtttttgttgtttttctgcatgctcctaaaatttgaaatatataatgatagatggttctctagaagatgttgtatgttgataagatgtggttgtatgacttatagaaatacttcaactttcttaacattctttttgttgtgtatttctcttctgcttggaatagggtcatgttatgtagacgagactgttaataaaacccctagatcactttcgaaattttcattttgagttactacattgttgaagtcatggatcagtacttgtattttgcccacttgccattaagcagataatgattacaaccacatagttttgaacattgagctcccctttagctgatcagaccacatagttttgtctttttgattctctctgtggtctaagatggattatctttatgcttcttgagaataacagagagttgagctattgagctttccctgattctgcatggggtgtttcttgagctaagactgtagtgtgttgtgtttttatgtttccttgttcagtcttttcactgcaagcatgggaaagcttatctcttcaataaggtgtaagtgtttcttatttctaaggaatacttgctaaattgggctggcttatctgatgatgattgatctggtttagtgccaatgtttccattggagagactgaagaaagactgatgatgactggtaaacatactgtggctgatattttctgtgtctcgtgtggatcaatcgttggctggaaatacgtaagcaaggcagacatcaaatgttcttaaagaacctatccgtgttcgattcttcccctgcccagttgtatgttctgttttatcaggagaaaactcaaaagaagaaccagaagaacaaagaaggaaaatcagtgcttaggggttgattt

SEQ ID NO: 143061 - DNA, 5355 bp, Arabidopsis thaliana landsberg
  unsure (1)..(5355): unsure at all n locations
gttcttagaaaagatactctttgagtatgtcaaggaaatgcctaaaccagagactaaactgagcttagacatcgcctctctaatcggcccgctcttcttcacatgggtcattctgttgttatttcctgtaagtctttagattatctaactgaaagattttaaaaacattcctcatgtcggctttaaacgtagttttcctctggatcatattataggtgatcttaacaacactggtctatgagaaacaacagaggttaagaatcatgatgaaaatgcatggacttggagatgttccgtactggatagtttcatacacttattttctcttgatatcgattctctacatgttgtgctttgcgatattcggttcactcatcggtaataatagcaaaaccttgctaatgtatttttatgttctttctcagttcttgatgcttttactttttctacagggttaaacttctttaggcttaatgactatagtatccaacttgtgttcttcttcatatgcataaatcttcaaatatcagtcgcctttttagcatctgcaatgttttcagatgttaaaactgctacaggtactgtaccatcacggctttggttcaagatttgttaaaatgatagtcacagttgttacattttcatttgagagtttcagttatagcatacatatatgtctttggaaccgggcttctaggaatctttcttttccaattcttcttggaagatcctctcttcccaagtaagttcttaaaaccgaatcaaaagttttgctagatttattatgattcatgtgatttttctctaggaggatggataatagcaatggagttataccctggattttctttataccgcgggctatatgagttatcacaatctgcgtttgcgggtgattaccgcgggattgatggaatgagatggagagattttggtaatggaatgaaagaagtgacctgtatcatgctcattgagtggctgttactgcttggtttagcatattacattgatcaaatcatttactccaggaaacatccattgttcttcctcctacaaagcacttccaagaagaaacaacacttctctgacaacaaaatatccaaagttgttgtagagatggaaaagccagatgtgtgtcgagaggtaatgaaaaatacaatatgaagataagtttcattattgacaaggctaagtaagatttgcatgcatcttttttggtgtcagagggagaaagtagagcagtgtctacttaaatcaactagagactctgcggttttatgcaataatctcaagaaggtgtactcgggtaaggacggtaatcctcagaagctcgcggttagaggattatctcttgctttacctcaaggagaatgctttggcatgcttggtcctaatggagcaggcaaaacctctttcatcaacatggtccgtataaacaatatcatacctattgatcttttgtctaatgagtcaatcctcaatcttctagtcaacctctttgacattctaatgttctgtgtagatgacaggaatcatcaaaccatcgtctggcacagcatttgtccaaggtcttgacatactaaccgatatggaccggatatatacaacaattggagtctgtccacaacatgagtaatctataaatataacaatctctgtttctttctttactttaaggctgccttgtttcttagtccattactccatttcattgaaatttctgcagtcttctgtgggagaagttgagtggaagggaacatctactgttctatggaaggctcaagaatctcaaaggttctgtcttaacacaagtaagtgtttgttttaacttttaacgtggtcggtttgtgaatggcttatgcaaaaactgatgagtttttaggctgttgaagagtcgcttcgcagtgtcaaccttttccatggagggattggtgacaaacaagtcagtaaatacagtggagggatgaagagacggctcagcgtcgctatttctcttataggaagccccaaagtaacttgagacatctcttggtatctatgttctatgatatgtaataagcctaatttgaggaaatttgtcaaggttgtttacatggatgagccaagtaccgggctagatccagcctcgaggaagagcttatggactgtcatcaaacgtgcaaaacaaaacactgccataatcctcacgactcactcaatggaagaagcagaatttctatgtgaccgattgggtatttttgttgatggaggcttgcaatgcattggcaacccaaaagagctgaagggaaggtacggtgggtcttatgtgtttacgatgacaacatcatcagaacacgagcaaaacgtggagaagctaattaaagatgtctccccaaacgccaagaagatctatcacatcgcagggactcagaagtttgagcttccaaaagaagaggttcggatctcagaggtgttccaggctgtggagaaggcgaagagcaactttaccgttttcgcttggggactcgccgacacaactcttgaagatgtcttcatcaaggttgcgagaaacggtcaggcctttaatgtcttctcttgatcttcttagattcatacgtccatattttgtccaatgtcaatatttgcttattatgtcaaattgctaccacatgatacgaaattagtgtttataagatttcatgtatattactggaaatatgttacaagttcctgatttttcaatgagattatacttgaaacaattactagcggtcctgaagcaaagaggcgacacttcaacacttggagatgttttttcaatgtcataaccatttgttctactctgtttcggaattcatgtatcggttataaaagttgggattaatttgagttggtagcaataaacccatattttcgacattgtcgtaataattaaggaaaaaaaccatatctatcttattatattcatatttgtgtaggttttggtaaagagtacatttcttaggtgagtgatgcaaatgaatactattacttgacctacacgaaatatcttacaaaaaaacacactgctattgtccaatacctgtatgccacttcagtaacgtgtatagttaaagtgttatctcttaatccttgatatttttagtgtaaaaaaaaacatttagagacttcttaaaaactattcaactccatcaaaccttctcatattctctgctatggcggattctagtcctgcaagtttcttgactcaagccgacgctttacttaggaagaattaagttttccaggtttcaatacacttttaataactaaaacggctaacacagagtaaaacttttacaataggttatgttttcttttgtcttgaatgcaganccggaacatatgaagcaacatacgactcatcacaatccctttcttcctctgtttacttctccttgttattcaaatgctcttcgacactcaattcaacgacgtccatggtcaatgtggctgcaacgagaaaacttgcggcttaaggtattcgacttcagagcaagcagctttttgtgccattcctaatccaccacaatggactccactacttcaaatcccggctcctcaataccgaaccgcgatcccatacctgagccatacttcccctgcaacttttctcttcaccgggaataatcagtcgctcggaaatagtatgtaaaccctatcaatctactcctttgagatgtgaaatgtttatatgcaactcttttttctatggtcaacaaatttttttcttttgctagttctaatgggaaatatgtatagaaattcatctggatttgatggagatttagctaattatgtcttggtatgtttcatgaaacaatgtcacatcatgaataggtttttgtgtgtttctcagtctctgactttctaatatatatatgcagggctcatcatctttccctgcatacaccaatcatatggactctgctttcatctcagatcttcccatctacaacatccaacatgaatgctcaccaaacgcttctttctcaatcttaattcaccaatcacctcttgctttccataaaggtataacaaaaacaaactccaatttacaatatcaaaatgttgaatgttttcaagcatgctttgaaaaacagaggatttctttcttatgtctagagataaactgtgtccaaggcttaaatatgtggcgaaatagttcttccgatgtgaacaacgagctttttaagggttaccgaaaaggaaatccagacaagaagatcaatgagtttgttggaggtctctcaacatcatctcatctcatctcacttctttaaaataaagttgtgtgtcttagctttctcttccatagcttttgattttcagaacacaaatgggaacaatctcaatgttagtgtttggtacaactccaccttcaagaacgatacagtggttcgacctatggcactgattcgagtccctcgcttagttaatctggtgcattttgtgcttaacccttttacttaaacatagattttattatttagtacacaatcttgagttcatttttttttttgtttctgtaatttttcaggcatctaatgcatatcttgagttcctaaaaggttctgagacaaagatgttgtttgagtttgtcaaagaaatgcctaaaccagaaactaaacttcgtctagacatcgcctctctaattggtccaatattctttacatgggttattctccttctgctaccggtaagtttgcttaaaataaactgctttaggctgtcactatactcatcgacctatatatgatgatctgtaaatctatgaagcatttatatgcaggtgatcttgaattcattggtgtatgagaagcaacagcgtcttagaattataatgaaaatgcatggcctaggagatggtccatattggatcatttcctacgcctattttctcgctttatccacgttctatataatattcttgatgatctttgggtcagcaataggtattgaatcattaccatatcttatgttattattttcttgtccttatagaacttgctataacagttatggttcctttcaggattgaagttctttctgcttaatgacttcagcttacaattcagtttctatttcgtctacataaatctacaaatctccatagcctttctactttcctcagcgttttcaaaggttgagacagcatcaggtacgaaataaaatcacacgttaactaaatgtgctcaagaacatgaaggtgttaataaaagaaacactttctgtttcatggcaccactatagtcgctgcttacctatacgtgtttggatctggactcttgggtatgttcctcttccagtttctattggaaggtttatcgtttccca

SEQ ID NO: 143062 - DNA, 744 bp, Arabidopsis thaliana landsberg
cttcatcatcatcatcaatggatgagataaaaccaaagaaagaagagaattccaaacgacgtcgtaacgtcaaacccatttgccgtgaaactggagaccacgtccattatcttccaacatgcaaaaccaagcccaaacccacgcgtactcatcacgcgccaccaccgatcctcgactcaatcttcaaagtcactcacaagccacactactacgaatgcaggaagaatcacgccgctgatatcggaaccaccgcttacgacggctgcggcgagtttgttagctccaccggtgaagaagattctttaaactgcgccgcatgtggctgtcaccgtaacttccaccgtgaagagttaatcccggagaacggcggcgttactgagacggttcttgaagttctcaagatttcatcgtgtcagtttcgtcggatcttttgctcaccttacggcggtggaaaaagcgaaggaaagaagaagaagaaggagaaggagagttatggaggggatccgataattaaagatcgattcggcggtgcggaggaggaggaggggatagtgaagaggttgaaaacgaagttcacggcggacgaaacggagaaaatgagggattatgcggagaagcttcggtggaaggtgagacctgagaggcaggaggaggttgaagagttttgtgtagagattggagtgaatacggaagaattttaggatctggatgaataacacaaggataaattataattgatgaaga

SEQ ID NO: 143063 - DNA, 567 bp, Arabidopsis thaliana landsberg
gtttctcggtttaaatttcattatcattggtctggtttaggaattacaattatggtcaaaccggggaggctttgaaagtggatctactgagtcatccagagtatctcgagaacaatgctacgttagcgtttcaagcggcgatttggcggtggatgacgccaccgaagaagcatttaccgtcggcgcacgatgttttcgtcggaaaatggaagccaacaaagaatgacactgctgcaaaacgaactccggggtttggagccaccataaacgttctttacggcgatcaaatctgcaacagcggattcgataacgatgagatgaacaacattgtttctcattatttgtattatcttgatctgataggtgttggacgagaagaagctggtcctcacgagaagctgtcatgcgcagatcaagaacctttttcttcttcctcctctgctcctccgagttctggttcctcttcttgagtgaaagttttataacctctggttcggtgacttttgaaaaagaaagttgactttggtgtatatgtgttttgcatgggcttggttttaatattttgta

SEQ ID NO: 143064 - DNA, 696 bp, Arabidopsis thaliana landsberg
caaaagcactcgacaaaagcagttcagtttaaaggtaagaagacctttccacaaaaaagtttaccaaactctgttggatctaatggttttataggcgtgtcagccgtggaaataaaaggcgatcacaggaaccagatagaggtaaccggcgttgaagttgatatgatccctcttatccaaatactcagaaagaaggtagcgttcgcagagcttgtgagcgtgaccaaagttgaaccaccaaagaaagaagacgagaagaaaggaggggacggaaagggtgcagagggaaaaggcggtgaccaaaaaggtggcgataagaaagggccagatgacaaggaacctccggagccaaaacctgtgccgtgttatccatggcctctgcagggatacggtgtaccttcctcctttcctcatcaaggatacggtgtgccttccacctttccccagggagacggtgtaccttcctcgtttccatacccgtgccatccggcacatccctacaatgatataggggaacccgtttacaatcacgaacccaattgcaaaatcatgtgaaatgagttttacagaggaagattgatagagagagcatgatgaccaatgtttttttttttattgtaaagaactaaagaagcactatgtttactatttagtcatatgaataaagctctgaggccaccaaatcaatttactgct

SEQ ID NO: 143065 - DNA, 1285 bp, Arabidopsis thaliana landsberg
  unsure (1)..(1285): unsure at all n locations
tgatgatagaagtagtgtttgattaggttgtttcgataaagcggtgtttggagcagatatgtaagganaaggttatatcgatatgtcgactgttgatgcagagacttctttgaagatcaatgaggttgaatcttttgtactttagatgctgatgataagattagaagaaggttgattagtttgattgagctgtgttgcgcattggtaggcaatcaccgggaagggtggtcggttcgtagaaggtccggtttcaggtagcaaaaagccagctgaagatggccaactcattatccttgctgctggtgacaaggtacaactcaaaactgtacttatggattgattgatagatctcaagaactgttttagttggacttagtaggaaggagctctcgatgtgcggctataatccgtttgtgttttaatccttttttgtaaggcactctttgaggaatcaatcccagcttttgatgtcttggggaagagatcgttttacttgggacaagttggaaacggagctaaaatgaagctaatagtgaacatgataatgggaaggtgaatgtcccgtctcttttacaattactaccattagtagtaggaatggaacatggcttcatgatcttattgtttttcgtctgatacagcatgatgaatgcattctctgaggggcttgtattggctgacaagagtggacttagctctgacactcttttggatattctggtgaggtgatcaaacttttgcaagctctgaaataatggtgttggtttgaatcggtttctgctatgggcaggatctgggagcaatgactaacccgatgttcaaggggaaaggaccttcaatgaacaagagtagttacccaccagcatttccattgaaacatcagcagaaagacatgaggctagctcttgctcttggcgatgaaaacgcggtttccatgcctgtagccgcggctgcaaacgaggtcagttagttagttagttattcagagacaataacatattggctctccctcctctagattggtttcttagcttgaatcttaaaatatatgtttcggttctcgacaggcttttaagaaggcgagaagcttgggactaggagatctcgacttctctgctgtgattgaagctgtgaaattctcccgcgaatagcaaactgtttcaaaacatccactcatttggattggctgagttactgaaatcattgttatcttcccaaatagagatttactcatttggccaaacacacattttaatccttcaccaaataaaaagtcttaaccaca

SEQ ID NO: 143066 - DNA, 899 bp, Arabidopsis thaliana landsberg
cagagatccaagggggtttggattcattcagtttatggatcctgctgatgctgctgaggctaaacatcaaatggatggttatcttcttcttggtcgtgagttgactgtcgtatttgctgaagaaaaccggaagaagccaactgagatgagaacaagggatcgaggtggaaggtgaattgacattcttcctagaaaaaagcattagtttgtctatacaatgagatgacttgatctcaacttgtatcttttcatgtttgtaggagcaacagattccaggacagaagacgttctcctcctcggtactctcggtctcctcctcgccgtggtcgtagatcacgatcacgtagccgcggctataattctcctcctgctaaaagacatcaatctaggtaactagctctgcatgcctgtgaaattcatactgtcagatattcttacagttaactgatggattaaaccacctctactctccaactctgtcttatggcaggtctgtctcacctcaggatagacgatatgagaaggagaggtcatactctcgctcaccaccccataatggctcaagggttcgcagtggaagtcctgggagagtgaagagccacagcagaagcccaagaagaagcgtgagcccaagaaaaaacaggagctacacgccagaacaagcaaggagccaaagccctgtccctaggcagagcaggagcccgaccccagtccctcgtggagcacaaaatggagaccgttctccaagccagtgatttatgattacaccatatatctctctactcttcagtttttcagtcttgttctgtttgatcagatattttgtttgcctcagattgatatttcctacttagacagatatttgtagtgctattggtattttgctttatgtttgatcc

SEQ ID NO: 143067 - DNA, 3552 bp, Arabidopsis thaliana landsberg
ttatggtattcacgctaacaacacctatcctgctgatttcattggtgtcaatctccagattcagaccaatgtgatccactctgcatatgagcacggtgtgaagaagcttctcttccttggatcatcctgcatttaccctaaatttgctcctcagccaattcctgagtctgctttgttaacagcatcgcttgaaccaactaatgagtggtatgctattgctaagatcgctgggattaagacttgtcaggcttataggattcagcacggatgggatgcaatctctggcatgcctactaatctctatggtcctaatgacaatttccacccggagaattctcatgtgcttcctgctcttatgaggaggttccacgaggcgaaagtgaatggagcggaggaagttgtggtgtggggtacaggtagtccgttgagggagttcttgcatgttgatgatttggctgatgcttgtgttttcttgctggatcgatacagcgggttggagcatgttaacattggaagtggtcaagaagtgactattagagagttggctgagttggtgaaagaggttgttggttttgaagggaagcttggatgggattgcactaagccagatggcacaccgaggaaacttatggacagctcaaagctcgcgtctttgggttggacacctaaggtttctcttagagatggtctgagccaaacttatgattggtatttgaagaatgtttgcaaccaataagttaatggtttctcttctcatatatacacaactattgagtctcaggtaaatcagcttatcaccacattgtgatttaaacctttctttgagattcgagaattgcttttctttttatcaaaattgattcatttagagataagacttgcttctttatacaacattgtctgaggaattttaattttggatctccgagtatgatctattattagctctcttctatacaaattatcaaaacagttgtaagaagtttcaagaaaaacatttgatatctcactaatttggctatccttgcaagttgcaacgctaaaatgacaaataatgaattctcggcccaatgggcttacacaagccttgttaaagatagcgtgaacaaaacgcggctcactagccctaacctgtctctctttcgcttaccttcttcttcgtcttcgttggctcagtcacttgacttcacggccccgctcaagctctgacacgaaactcatttcaaattaatttaataaaaccttaatcacaaaaggggcaaaagcaatcgccggcgattatgccttctcctccggtgccggagacggttgtgagccaccgcttcgcagcttttcttatctggcaatcgattccttcatcagccatcttcttcttcttcaacattttcctcttctcaaccacttcaatcatttcctttctcttcactttcctcgtcttccattcttcacagcttctattctccgtctcactagctctcctctcttctccgactccagattctcctctctcccctctccaattcgctgtcggtcttcaccgtcacctctcggatcccgagttccgccgccgtgctcgcgtatcttcacgcatcgtgctcttcgtctgcgctacttccctcgctggattctgctcctctgctgtgttttgcttgtctagtgattcgtttggacccattggaagaatagggtttaggggattagtgactggattgctttacgcagtcctctttgttactaagcaacgatgggttttggagtttcctatcattcaggttttgtgtctttgcttcttgacttatggaatgtttcatcaattttgtatctttgctgattcttacttgtgttttttcaaaacagcgtccaccgttcttcagcttcaagattggtcttccttcggctctaacacaagctttgaagctatctggtgtgctttatgtgttgtcgacgataatgctattgtttctgctagactggtcaggtgggcttgtgtctgtatcgaaatttttgggtgagcaggtcttatcttatgccggcagtttctgtttgattctctcttgggaagtcactcaccatatacataaggttagttaagttttctctgttgatttgctattgatagatgtaattggttggtcgtatagccgtttagattggtggtatagtgtttagtattttaagatccctgtagcttattagtgaacatagttgaggttagcactcagtattacttgagtgatgcaaaacttaactgagaaaaatttgaaaagacgacaagttagctgtgtttgcaatcaaatgttgcattgatagtatgtgtagaattgttttcctgttttgttagtcatttctgtctttactatttatgttttggaagcctataccaaggtctgtctgtcttctgtgtatgtggatcagttcaaagaagactcatataaatttgtattgatatgtttacttttcttgaataacttaactctattcctacctaaacaactttaagtattcatcggtgagtttgctctgtgtattacttgttacatccataaacttcagctacttttccaggttctagatacaaaagaagttagttataattgttgttttcatatccaggttctgcacacaaaacggttcagctttgctcctccaaaaggatctgctgcagcagaaacgaatccaagcgagcctcttcttgctgctttagaagggagcgctccaggttccctcgagcagtctcttgcataccttgatctctacatggtgtctcagaataatgttgacacatggcgtcgtgctgccttctttgaggagtccaccgagacgtacaaaagagtaattactctatgcttgaggcctttggaagagcttgcctccaagttagcttctgggctagaccacacctttactgaaaaaggttatcagacaccactccagccaccaaccgagtcctttattgatccaaaattcggcgaatcacttaagtctttccaggtaaaacgaaattcaaattttgatcccttttctatgtgataatttcttcatgtagctgtaaccaaaatctgtttgctctgtatccgatatttgcagctatatgcatggtgtgctcaaacatctgcatccctgacttcaatctctcacaaggaagacaggctcggagtagctcaactgtctggtggaaacgctgatgttgtctcaacacttctatcgcttttgctagctatcgaaacgtttatggggaagaagactaatcttcaatcacctcaacaactgatgggacctgctagtatcaaatgggcgacctcgagtatggtcagaaaagacgttaaacccatcaaaaggagtattggcgcaatgtacgcctacgcatatgcagcgacagatgttttgaggatatcagtataccagattctatccacattccgcgatgaaatgctcaacagcgacagagccggacttcttggtagagattggattggaagcaagaaaccaccttttggaacaaacgacatgctcctacagaagcttaagctcttcctcgagttccaagcttga

SEQ ID NO: 143068 - DNA, 899 bp, Arabidopsis thaliana landsberg
gaagccacccacgctgccaactactcctattaaaccacccaccacaaaacctccggtcaaacctccaactacttcggttacaccagtaaaacctccggtttcaactcctccgatcaaactaccgccggtacaaccacctacgtacaaacccccaacgccaacagttaaaccaccgtccgtccaaccacctacgtacaaacccccaactccaacggttaaaccacccactacatcaccggttaaaccacccactacgccaccagttcaatcaccgccggtccaaccacctacgtacaaacccccaacgtcaccggttaaaccacccaccacaactccaccggttaaaccccccaccacgacgccaccggtccaaccacctacgtacaatcccccaactacaccggttaaaccacctacagcgccgcctgtcaaacctccaacaccacctcccgtaagaactcggataggtaataataattttctttcaaaagtgtgatgattatcggtcgttgattagatcggatgtataattggactaaattttggacggtttagattgcgtgcctttatgtgggacgaggtgtgggcaacactcgaggaagaacgtatgtatgagagcgtgcgtcacgtgctgctaccgctgcaagtgtgttcccccaggcacctacggtaataaggagaagtgtggatcttgttacgccaacatgaagacacgtggtggaaaatccaaatgtccttgaacctttatatgacgatggttgttaaacgaaataatttaaatcaatggagtttttataagtttgtaatgcgtttgtttttgttatagtaatattgagttggatctttgtttacgggacgtagaatactaaataatgaaaaaaaccttctcgatgaattaa

SEQ ID NO: 143069 - DNA, 563 bp, Arabidopsis thaliana landsberg
gatcgccacacgggtttgatagtagagacatgacagtctacaaagacgatgataacgtagcctacttgatatattcatcagaggacaacagcgtgctgcatatcggtcccctgaccgagaattacctcgatgtgaagccggtaatgaagagaatcatggtgggacaacacagagaagctccggctatcttcaaacatcaaaacacttactacatgatcacgtctggttgcaccggatgggcaccaaacgaagcattagctcatgccgctgagtcgataatgggtccgtgggagacattagggaatccatgtgttggcgggaacagtattttccgttcgacgacgtttttcgcgcagagcacgttcgtgattccgttaccaggtgttcctggtgtgtttatatttatggccgataggtggaatccggcggatttgcgagattcgagatatttgtggttaccgttgatagttggtggaccggctgatcgtcctcttgagtatagtttcgggtttccgatgtggtcgagagtttctgtatattggcatagacaatggcggttgcct

SEQ ID NO: 143070 - DNA, 2500 bp, Arabidopsis thaliana landsberg
caaaatcttgcatatcggcaaaatggcttcgccgtgtttgaccaagtccgattccggtatcaacggcgttgactttaccgaaaaattccggttagaagattccactctcttagccaatggtcaagtcgtcttaaccgatgttccggttaacgttactctcacctcttcaccttacttagtcgacaaagacggtgtaccactcgacgtctctgccggttcattcatcgggtttaacctcgacggagagcccaaaagccaccacgtggcatccatcggaaaactcaagaacattcgtttcatgagcatattccgtttcaaggtttggtggactactcattgggtcggatcaaacggacgtgacatcgagaacgagactcaaatcatcattcttgatcaatccgggtcggattctggatccggatccgggtcgggtcgtccttatgttctcttgctacctcttcttgaaggctccttccgttcatcattccaatccggagaagacgatgacgtggcggtctgtgtcgaatccgggtcgaccgaagtaaccgggtcggagtttcgtcagattgtgtatgtccatgccggggatgacccgttcaagctcgtgaaagacgccatgaaagtgattagggttcatatgagtacgttcaagcttcttgaagagaaatcgccgccgggaattgtcgataaattcgggtggtgcacttgggatgctttttacttgacggtgaatcctgacggagttcataaaggtgttaagtgtctcgtcgacggtggttgtcctccgggattggttcttatcgacgacggttggcaatcgattggacatgattccgatggtattgatgtcgaagggatgaatattaccgtcgccggtgaacaaatgccttgcaggttggtttattccggtttagcctttcaattttatcgattgttagtaattctgacttgttttaaacggttaagttaggttgaaccagtgaaccggtttaattttgtacattttaaccggatgctatgatacgtttgatactttgattagatgttgaaatcctcgcactgttttttttggccttccttgaaaacggtttagtttgattttaatttttagtccacatgtagtgagaaccgagatttcgtgctggctcagtttaaccaaattctataaaccggaatttctgtttgattattgaaatcctcacaccggtttaatctggttttacaggcttctgaagtttgaagagaaccacaaattcaaagactacgtttctccaaaagatcaaaacgacgtcggaatgaaagctttcgtcagagatctgaaagatgaattctccaccgttgattacatctacgtttggcacgcactttgcggttactggggaggtctccgtcctgaagctccggctctgccgccgtcgaccattatccggcccgagctctctccaggacttaaactaacaatggaagatctcgccgtcgataagatcatagagaccggaatcggatttgcctcgccggacttggcgaaagagttctacgaaggtcttcactctcatcttcaaaacgccggtattgacggtgttaaagttgatgtcatccacgtaagttttccgtctgacttaacggattgttttgtttttccgtttattcattaacttttgacacgtggcctttttaatttgcagatattggagatgttatgccagaaatatggcgggagagttgacttggccaaagcttacttcaaggcgttaacgtcgtcagtgaataagcattttaacggtaacggcgttatcgccagcatggagcattgcaatgactttatgttccttggaactgaagccatctctcttggtcgtgtcggtaagtcttttactttctgtttaaaatgaaacttaaagactattttcaaaattttcatattaaattatttatactataaactaatgattcatttggatttgttgttggaattaggtgatgacttttggtgcacggatccatcaggcgatccaaacggtacattttggctacaaggatgtcacatggtccactgtgcatacaacagtctctggatgggaaatttcattcagcctgattgggacatgtttcagtccacacatccttgtgctgagttccatgctgcttctcgggccatttccggtgggccgatttacatcagtgattgtgtgggcaagcatgattttgatctcttgaagcgtcttgttttgcccaacggttcgattttgaggtgtgagtactatgctctcccaactcgtgaccgtctctttgaggatcctcttcatgatggcaaaaccatgctcaagatttggaacttgaacaaggtaataatgctttcttttcatgagctcttcatttactgttattggcctcttttgaaagcctaattacactaattaaggattaagcaagtagaatccattagaacctccccaatgagcttacattgattttaaatggatatagggtttggtcttta

SEQ ID NO: 143071 - DNA, 2058 bp, Arabidopsis thaliana landsberg
tggtggtggtgtggaaggagaccttatgtcgtggatttgatgatgataggaggggaatcagtctagggtttcggattttcctcaaccttctagagctgatgaggttgatgattgggggaaagagaagaaaccacttccctctttggatcaaggacgacaaggtcgttacagtggcggtggtggtggttttggaggtggtggaagtggttttggaggcggtggtggtggaggtggaggattatctagagctgatgatgttgataattggggtgcagggaaaaggcaagcaccggttagatcatctacatttgggtcgagttttggtgattcaggtcaggaagaacgtcgtcgtttggttttggaaccacggaaggttgagtcaggagggagtgagactccacctgttgttgagaagacgagtaagccgaatccatttggggcagctagaccgagggaggatgttttggcggagaaaggtttggattggaagaagattgactcagatattgaggctaagaaaggaagttctcaaacaagtaggccaacgagtgcacattctagtagaccttctagtgctcaatctaacaggtctgagagttcaggattgaataatgtggtgaaaccgagaccaaaggtgaatccttttggcgatgcaaagcctcgagaagtgttgttagaggaacaagggaaggattggcgtaagatggatttggaactcgagcatcgcagggttgacaggtccttattcatctggaattcttttaaaattttctctgaggattgttgctctccatcaattctatgttgctgcagttatctgaatattgaagtaatatttaattgcttggtgcattatggcataagagtcagtcttaatatagttggatgaattttagagattaaaatgtatggaactgagaacttataatagtttgccgtttggctttaggtttcagatccttagtgtctaatgggattctttgtactttagttataaagtcttcatggttattatgctctttgagttccagatcgcacaatatgatgtgaagttctgaaattgtgtgatactatgtttcatttctttgtcctacttctgtttggtcaatggagctcctttgacattaatcattgtttttagtatgttatttttgttctgcctctctgtgcattgatgagttccagaggctgttagatagtttctgcttgtttctcttgggtatatacccttcggtttatgcatgctatataatctccgcctagattttaagattcttatgttatgaactctctgatgcttcttttttggctttatgataatcggctattgatctcagtgttgtgaaaaaccaacttttccaggcctgaaacagaagaagagaagatgttgaaagaagagattgaagagctaaggaaaaaactcgagaaggaatccattgctccagagatcaaggaatctgatcaagaacctggcagtaataataatcacaatgatgtaccagaaataatacgtgggaaagagaaagatctggaaatactaacccgtgaattggacgacaaagtcaggttcaggcagaaaccagttgagaggcccgggtctggtgcaggtagaaccggaacatattcagaaagaacacattcccgggctggctcaattgatgaaaccaggagttttgaatctacagagagacccagatcacgtggtgccgtcgatgcctgggttagaccagccgatgagcagcgaagaaactttcaaggaagcaaagagcgcggattcttcagcaacaggttagtcccggggattagtatctaaatgactaaatctctttagaagtctagagatatatgcagttggtacaatagatgcatttaggctcatcatatctttaagtttaactaaaattgatgaatcgatgtcacattaatttctaaatctcgggtttttcgacaggtcttcctctagggaaggatggtaagaagaaaacgaagaacaaccaaatgtgggatatgtttaactactactacatagttcccaaattttgaagaagacttagagca

SEQ ID NO: 143072 - DNA, 2174 bp, Arabidopsis thaliana landsberg
atgggaggtgttacatcatcgatcgctgctaaatttgctttctttccaccaacgccaccgtcgtatgaggttatagccgacgatagctgcggtggacgtttatacataccggagattcctcgccgtgatgatgttgatatattgaagcttcgtactcgttgtggtaatgagatcgttgctgtttatgtgaaacattcaaaagctaatggcacgcttttgtattctcatggtaacgctgctgatttgggtcaaatgtttgagcttttcgttgagcttagcaatcgccttcgcgtcaatcttatggggtaaaacatttatgttattgaatcttaagacattatgcataattggtttgttacagcttcgaagttcagacattttgtagaaagattactactttgctttgctttgtaaagatcagtgctttagagcttcaaagttgagacattttcatcgaaaaactaagacttttctttgtttataatttgccccaaaactaggatctgttgatacattgttatagacatgtaatgaattgttcgtgttttaggttttttagtaaaggataagtttttgagaatttaagtagaattggtttttgtggtcttatagtaatatgttgttagaagaatcaatccatgtaaaacaaacagtgtgttatagtttcaaagtttgtgcctttaacctgaggcaattaatccatatcagtcacactttccctatgcttgtcattgccaaaactaggatctgttgttacattttgttataatgtgtgacttaacatttcaactttcctttcgtgattgattcatttccatctaaaggtcttctatgacttgctatcttgctttcgtcaccgttgataaattgtttctcatatattagtgactgttagattgttttctaatgtgttcatcggtttttctttctcaggtatgattactctggttatggtcagtctactggacaggtgtagtttcgagattactactctgtgttatgaaatatgaactttcatggattgtttctcattgatatagacttggtatatgaatcaggctagcgagtgtaatacatatgctgatatagaggcatcatataaatgcctcaaggaaaagtacggtgtaaaagacgatcaactgatagtatatggtcaatctgttggtagtggacctacggttgatctagcttcacgcacacctaacttaagaggcgtggttttacagtgtcctatcctgtctgggatgagggttttgtatcctgtgaaatgtacatattggtttgacatttacaaggtgatttactaaacatcaaatttgcttctgattacatatatagcttctaaaatggcgcaatttcatgtttttcagaatattgacaagatcggctcagttacctgtcctgtattagtaatccatgtaagtgacaccatcatctgacttcttgcattgctttggctttgagtgtgattgttataagacaggtcactgaactctcttgttggtctattagggtactgcggatgaagtagttgattggtctcacggaaaacggctctgggaactcagcaaagagaagtatgaacctttgtggataagtggaggtggacactgtgaccttgaactctatccagatttcatcagacatctgaagaaatttgttgtatcacttggcaacaaacaagcagagcaagctcccacatagcgagatagctgatatgtttgaaatgggttattttcagagaaggctagacagttggctacagaaagttcaaaagaaagtaataagcctgagagattcaagatgagagtggtaataggtttagtcattaaaagataaaaaaaggtctagtctggtgacacaatgggtcaatctggaatgtaaacagtatagtacatttcgtgaataaatgtattttctgctttcatgctttagtaggttccaaagaggttactttgtttatttcacattcatggatcatacttttatgattctataacatgccagagaaagctgtaaaaataaataaatgtattggctactttttttggctttaataggctccaaagagggtttctttctttatgcaacatttatggagcatatttctgtgtatgccgagatatcctctgaaaaagtagaccaattttgaagagttgctgtggggatttgct

SEQ ID NO: 143073 - DNA, 2691 bp, Arabidopsis thaliana landsberg
ttcgcaggtccaaaagggtccaaggaacttcgaaaaagcgcaacagagaaagctttagttgttggtccaactttaccgccaagagacttgtgagtatacattttcatttggaatgtgactagtccatatagttagtataaataatttacgacattctcaagaatgttattcctgttttgtctttgtgattgatgctctacttatcgtgctgattgatactgataattattgattcttgaattgaaggaacaatactggtaatccaggcaaaagcacggccattcttcctgcatctggatcattttccgaaaggtttgtgtcgcatccttatctacttttatggactctctataacgacactacatctagattgcgatacctaggtggtacataaagccgcactaaggtgaattggtggttcagagtcatgaaatttaaatttggccatatttatttaacctgaaatgcatctaacttgtatcaatgcttcagttattcattatttgtccatcatttcccctctatgtgttacagaaatctgtcaactgctgctttaatggagagaatgcctagtagatggccccgtccagagtggcatgcaccatggaagaattacagggtaagatctgtgttactgtaatatttctgcatcttatggatataacatttaagtgtgtaggtattcttaggccatttgttggcgtccagagagtactttatgttcttatgaattgatgcattttttggttgacaggtgctccagggacacttgggttgggtcagatctgttgcgtttgacccaagcaatgaatggttttgcactggttcagctgatcgtaccatcaaggtaacggatcaactctattgaaaatctaattcaatgccttttttcccattcttctgtaaccttttctggattctataatatgaattgtcatttgctaggtcccgttttttagttcttcatgcaacatttacctatatctcatgaattaatcttactgattgcttctgtggctcttgttcactagatatgggatgtagcgactggagttctgaaactcacacttactggacatatagggcaagtacgaggttagactactatttttttccccctcaatttgttagtttatcaatagctcttgtagaaaagtaccagtgtaaaagtttcaactctctaagtttatataattattgtttcacaggcctcgctgtaagcaatagacatacctatatgttttctgctggtgatgacaagcaagtcttttgctgggaccttgagcagaataaggtttaaactcgatgatggatttcatctcatctgtatattaattactcttctcctgatctgaacttttcatgtccaatgtctttggaatttgtctttgataggttattcgatcttatcatggtcatttgcatggcgtttactgtttagctcttcatcctactcttgatgttgtactaaccggagggcgagactctgtctgcagggtatgacatttactgaaaagatgtatcctgtggttataaacatatgtatttttgatgtttgagttctctaactgttgtcaaaaattcttttctacttataggtatgggatatccgtacgaagatgcaaatttttgtactcccacatgacagcgatgttttttccgttttggcccgcccaactgtacgcctcatttcatcttctttttacttaatgtgcttgtggcgaagaagcacacactgctattttatgctcatatagtcgtatgcttttatttcaataactttggaacttactgtgtctgtgatgttgcaggatccacaagttattacagggtctcatgactcaaccatcaaattttgggacctccgatatggtatagttaacatttaacaatctcttggacttttgcttttcttcctccctagcttttcattgtatgcaggattgggctaacaaatatactataaacaggcaaatcgatggcaaccataacgaatcataagaagactgtccgagcaatggctctccatccgaaagagtaattgtcttgctttttcaaccttagagttttgcatgataatgcaccctgatttaatgtctctttctgtttcgttcaggaatgattttgtttctgcatcagctgacaacatcaagaagtttagccttcctaagggagagttttgccacaacatgctgtaagttctagagtccttgtagttatttgagtcttaatccactctcttacatcttccagtgcaatgaaaaagataatgtttcttaactaaactggaaattttagttttctgatgtgttttcatgttatctttctttttggagcagttctctacagagagacataattaacgcagtggctgtgaatgaggatggcgtaatggtcactggaggtattattttcattttcaaatcactctttgatacgggacgaaatactgatacttgtattcacatttcctccacatattatattacccgatttcattatttgaactaaaatgtccccgtctttgtgcaactgaaggtgataaaggtggcttatggttctgggactggaagagtggtcacaatttccaacgggcagaaactattgtacagcctggtatctcctgaacctatttcttgatccgttacccttgcgttgcttgaatggttaaaatatttaagtcttaaaggt

SEQ ID NO: 143074 - DNA, 2404 bp, Arabidopsis thaliana landsberg
ggttgctaggtttgatattcaatacttgaattggcgtgctcgtcaagatcttcttaccatatgtattcttcatgacaaggtttgtttctacattgatctcttttgaacttgtttatgtctagttagttggtaaagttgtgttttatcgagttgtagttaaggacatagctataatctgctacatttagttctagggtatatatagtagacgtatagctatgcctctagtagctcaagttcttcaaatgttgtttttgtagcactctttatagtattgacatttgacaatcattaatggtttatgtttagtgctttgatgctaagtttgtggaatgaatgtatgttaggttgttgatgtacttaatcctctagctcgtgagtacaagtccatcggtacagtgaagaaagaactagctggattgcaggaagaattatcgaaagcacaccaacaggtttttaacaatgctattcactgagaatgattagttttcttatgagacttcctctaactcttagttgaaatgaaacaggttcatatatctgaagcaagggtttcgactgctttagacaagttagctcacatggaagaattggttaatgataggttgttacctggcagagttgtaacggaattagataaaccctcctcttcaaccactgcttctgctgtcgagttagatagggaaaagacaaacacgggtgcgaaaagcttgaatgtttctggtccggttcccccttatagtccacacttgaagaatttttggtatcccgttgctttcactgcagatctcaagcatgatacaatggtatgtatagtggttcttgtttgatttaagcgtcttccattagttacaagcttctgagaaatgctattgtttatttcttaaggtaccaattgaatgctttgaacaaccatgggttatctttaggggtgaagacgggaaaccaggatgtgtacggaatacatgtgcgcatagagcatgtcctcttgatcttggcacagtgaacgagggacgtattcaatgtccgtaccatggttagtaactctttctttagtctacaatgttgataacaagtgagaaaccatatcttattaaatgtgattttgtaggatgggaatactcaaccgatggagaatgtaagaagatgccgtctacaaagttactgaaggtgaagatcaaatcattaccttgtcttgaacaagaaggtatgatctggatttggcccggtgatgagccacctgcacctatacttccttctttacagcctccatcagggtttttaattcatgctgaggtaattcttacatttcaagtatatctccaatccaatcatctcatatgtatgccgcattttctcatttgttctcttatataactctcagcttgtaatggacctcccgggggaacacggtttacttctagataatctcttggatcttgctcatgccccattcactcatacatccacttttgcaaaaggctggagtgtcccaaggtttgttttaactctcattactctgttcagtgctaagatgaaacttggtttaagctttctgtttttggtactgcagtttggtgaagtttttaacacctacctcgggtctccaaggatactgggatccatatccaatcgatatggaatttaaaccaccgtgtattgttttatcgacaatcgggatatcaaaacccgggaaactagaaggcaaaagcacacagcagtgtgcaacacatcttcatcaactccatgtctgtttaccttcttctaaaaacaagacaagacttctataccgaatgtcactagactttgctcctatattaaagaatcttccattcatggaacatctctggagacatttcgctgaacaggtaaaagtacatcacaaatggatcgatcatcttcaaccatcgtcagtcttgtttcttaagttaccgtttctatatttccaggtcttaaacgaagatctacggctagttttaggacaacaagaacggatgttaaacggagcaaacatatggaatttaccagttgcttatgacaagctcggagttcggtatagactatggaggaacgcagtagatcgtggcgatgataaactacctttctccggctaactgttattaaagaaatctaatggaagtttttgcagctccttattcaccagcaacctcagacaagtgtaggttattaatctggtttattctcaccgaagaaagagctttgccgagtaaaagatctggagtttgtggattcatctaaaaaaccgatgaaacaaagaacttttgcgtagataaaaggacaacatccactgtaaatccaaaggagatatattgttattcatttttccctgtgtacagttcactctctatgagaaattgaatatcagttttccccactaaactaa

SEQ ID NO: 143075 - DNA, 1681 bp, Arabidopsis thaliana landsberg
ggatttgaattaatcatcacaaccttttgtcatttatggatcagtccctttttagctttaataaaggttcactttagattgtccatcaatggcaattatctgaaatcatcttactatacagtacaatgtatattctgtatgtattatatttatctcgttcattcaaatcttagtttgattttctctcagtaggtattaaactgtttgatttgggttttgttgtttcaacagctaagaagttttacccgtcgaggcaaagactgactcttcccgtgactcctggatcgaaggacaaacctgttgtcctcaatagcaagaaatcactgaaggagtactgtgatggaaacaacaactccttaactgtagtcttcaaagacctgggggcacaagtttcctaccgcacactcttcttcttcgagtatcttggccctctccttatctaccctgtcttttactacttccctgtttacaagtttcttggttatggagaggactgtgtgatccatccggtccagacgtacgctatgtactactggtgctttcactacttcaaacggatcttagaaacgtttttcgtacatcggttcagccacgcaacctccccaatcgggaatgtgttcaggaactgtgcttattactggagctttggtgcttacattgcttattacgtcaaccatcccttgtacactccagttagtgaccttcagatgaagattggtttcgggtttggtttggtttgccaagtcgcaaacttttactgtcacatattgctgaagaatctgagggaccccagtggggctggaggctaccagattccacgcggtttcctcttcaacattgttacatgtgccaattacactaccgagatttaccaatggctaggattcaacatcgctactcagaccattgcaggatatgttttcctcgctgttgctgctctaatcatgactaattgggctcttggaaagcacagccgtctgagaaaggtaaacatagcggtctcaagatatgattttagcggaactgaaaattctcaaataatgttcttattgtggattgtttgatattggtattgcagatatttgatggaaaagatggaaagccaaagtatccaagaagatgggtgatacttcctccattcctttagaagccattgttgcttatcagtaaaagctcttaataaagctgaaaatgagactttctttgggttctctgtatcgtttccttttttgttcggtctatgtattggttataacatgtttattccttttgtttcaatatgttttgatttttgaagttagagagatttagaaatgtacttgtttagttgtttctcacgcaaaccaattcctctttatgtatcgcatacatgagtcaataataaatatgattactagtaacataaatcagtctatgcggcattctataatgacaattgcaatgagtttagacgtcgatgaaacatacaagttgtataaattaaaaataacattcataagatacacatttttgtttgtcctataaaagaatatgtcaatagatcaaatcaaacgataaaatgttatgctaaacaaaattaccagaaggaaaaagaagcaaatgaagctttcatagaaagaccacaagaaccgggagagagtaatcaagctgatgaattttttccacacagttggtcagagag

SEQ ID NO: 143076 - DNA, 2222 bp, Arabidopsis thaliana landsberg
gccgtctgcaatttctctccccgacgctgataaccctagcggcttcaaattacagtcgcttaacgccgagttaggccaccgagtccgatacgaacctgattcggtcgctgtcgcgaagatccccgtagttttccaatttctggaaaggttttgttgctgtctgttaatttccctttgaattgttgtctgaaatctttgggaaatgttattgattttggaaatgggtctcttttaatttccttaaagtttgtcttttttgtttgttaattgagcttgtgatccaagcatggaaattagttaattttttttgtgttgcgatctgagattttgcctctttatgtctctcctagtatgtaccaagtgtgtgttcttgtgagatgctgataagtattttgcattgaaatcacagagacgaagaaacccttttccagatgcaatgcctaatggctgatggagctctaattactttagattccgacgatattttagctacagaacatgttttagcagttggtaaagagtttcccgatgtggaaacttgcagaagaactttgaaagatttggctatagctctgcattttgatcttcggattgtgaaatcagatcgtagtcgattcatagccaaatgctctaaagaaggttgtccttggcgtatccatgctgctaaatgtccaggtgttcagacatttacggttaggacgcttaatagtgagcatacttgtgaaggtgtccgtgatctccatcatcagcaagcatccgttggttgggttgctagatcagtagaggcacgcattagagataatccgcagtataaaccaaaggagatattgcaggatatacgtgacgagcatggggttgcggtttcttatatgcaggcttggcgtgggaaagagcggagtatggctgcgcttcatgggacttatgaggaagggtaccggtttcttcctgcgtattgtgagcagattaaattagtcaatcctgggagttttgcttctgtttctgctttgggacctgagaattgtttccaacggttgtttattgcctatcgagcatgtatctccgggtttttcagttcttgtcggcctcttcttgaattggatagagcacaccttaaagggaagtacttgggtgcaatcctctgcgctgcagctgttgatgcggatgatggtttgtttcccttggctatcgctattgtcgataatgaaagcgatgaaaactggtcgtggtttctttcggagctgaggaagcttcttgggatgaataccgatagcatgccgaagctcacgatactctctgagagacagagcgcagttgtggaagccgttgaaactcatttcccaactgctttccatgggttttgtctccgttatgttagcgaaaacttccgggatacattcaagaacacgaagcttgttaatatcttctggagtgctgtttacgcgctgacaccagcggaattcgaaacgaagtctaacgaaatgattgagatatcgcaagatgttgttcagtggttcgaactctacctgccgcatctctgggctgtagcatatttccaaggtgtgcgatatggacatttcggtttagggataacagaggtattatacaattgggctctcgaatgccatgaactcccaatcatacagatgatggaacatatccggcatcaaatatcgtcttggttcgataaccgccgtgagttgagcatgggatggaactcaatactcgtgccatctgcagagagacgtataacagaagcggttgcagacgcacggtgttaccaagttttacgagcgaacgaggtcgagtttgagattgtgtcgacagagagaaccaacattgtggatatacggacacgggattgctcatgccgtcgttggcagatttacggattgccgtgtgctcacgcggctgcagcactgatctcgtgtggtcggaatgtgcatctgtttgcagaaccgtgtttcacagtgtccagctatcagcagacgtattcgcagatgattggagagattcctgatagaagcttgtggaaggatgaaggagaagaggctggaggaggagttgagagcttgaggatacgaccaccaaaaacgaggagaccaccaggtagaccgaagaagaaagtggttcgggttgagaatttgaagagaccaaagaggattgtgcaatgtggaaggtgtcatttgcttggacattctcagaagaaatgcacacagcccatt

SEQ ID NO: 143077 - DNA, 1475 bp, Arabidopsis thaliana landsberg
gaacaggctatggctgtcacaagcttggctcctccatgggtcatcttgagactagctttccggtcagtagcagcttcttcttgtctccacacaaatcaaaaaaccctaatcgcgaatctctccattcccacttcgtttcctctccgacagtcaggttcgtccgaagttttgattttggattcaccatcgtacttattcaattgatgaaagtttctcttcatgatgatagtttgcaacttttctttgggaatttagaggttagggcattaacttcatcaaagttttgttttttttctgatgaaatctctaataaaaattgcagctttgagaagatgttacagtgcagaagctataaaaggagatgtagattttctcctcaaaggagttggagaccaagctgttgccaaagaagtcaagcaaattcttgaaatggtatattctctaccttgtttttcgtcattgagagtcttccatcttcatcatctcaatgggatttgtgatttgtttattaggcaagacgtgcatcatcaaaaagagaagttcttcatacagattttctcacaccacctattgttaaggaatcagtttcactattggaaaaatttgctgatgttaagatagttgctcaaggaggttaccctgaggtctgctctttcatctttaaagaacaatttcctctgaaaatgttgaactttaagctgacaatttttgtgtggattcgtatatttcttaggctgaacggtgtaggatctcgattggacatcctgatgtcctaactagtgatccagatatagttgctgctttgaggtacaggacatgaatggtaatgttctcttcttgaggtttttgttcttatatgagtctgagtatgtttatgtttgtatttctagtatcacagggaatttcgggtttcaaccttgttctcacggtgacttccttggtgctattcttggcacgggaatttccagggaaaaacttggagatatcttaattcaggtatcatctgatgtatcctgtctaacaaaaatttgtcagctccatttacaaaatatttcctttaacattgtttctttggctgtttgacttcactgaaggaagaaaagggagcccaagtcctgatagttcctgaactagttgactttgttgttaccgctcttgacaaggtttaaacttttctggctagtttgtgtaaaacccattagccaatatcttaccctgcattactctgacactgtgttgtttttcataggttggaaatgttggtgtaacttgtagtaagatacctttgcttgctcttgaatacgaaccgcctaggtatgagctctaattcctagaaacataccttctttttgcattggaagtttttttgcagtggcttgatttttttgtttgttaggactccttcctttaaaaccgtggaggcctcgttgagaaaagaagcagtagctagtgctggtttcaagatttcgcggtca

SEQ ID NO: 143078 - DNA, 3361 bp, Arabidopsis thaliana landsberg
aagacgttttctgcattgtgtagatgttgttttgttctttgctgcaggctcttgatccaaggactcgtatggttttgtttataatgcttaaccggggtgtgtttaacgatgttaatggatgtatttcgacaggcaaagaagtatgtcacattcactactctcatatttgatgatttagctatttagtcaagaagatgatctgtttggaatcctttgttgaaagtactctctttttattgtttttcaggctaatgtttatcatgccacaaaatctgacggttcggaacttgcaataaaagtgtacaagacatctgttctggtttttaagtaagctattacgtgaataatgttgtttatcatttcttcaaaaactcttaacttaatcccagttttcaactttgatgatttcagggatcgagatcgatatgtacaaggagattatcgttttagatatgggtactgtcgtcacaatccccggaagatggtgaagacatgggctgaaaaagaacagagaaatctcaagaggtaatacctacaattttcatatggaatcttgttaatgtattgtagggttgatttatcttgttattttcaaaacagaagccggagaagtagtcacttttggtcacatatatgtaacaatgattctggtaatttcttagttggttatattatacatgtttcattgccaggcttcatgcagcaggaattaggtgtccagctgttatacttctacgccttcatgttctagtcatggagtttataggttcgctcttatgcattatcttctgttttaatcactcatttccacgcaacactctactctgattcattagcatatttcattgatgaagtaacgatttttcagctaccaaagatagttttatctatttataatttacagggagggatggttgggctgcaccgcgtctcaaggatgccgcattgtctctggacaagttgcgcgagtgttacttagaggtatgtcttattttctcatttagagggtcctgagtgtatcattgtaatactttacttagacctgatatgtcacgattaatctcttcttatttcagttgataattcaaatgcgagtattatatcagaagtgcaaattagtgcatggggatctcagtgagtataacatactttattttgaggtgagttttgatttatctctacaagggtcacttatttgatcgtttcgtggcagcaaaacgaaacaaatataatgatattatcttgactttttcaggggcacctttatataattgatgtttctcaatctgtggatctggaccatcctcttgcactcaactttctacgggaagattgtgaccatgtctcggtaagtgttaacagtatcctgttttaacaatgcttaatatttgactggaatagggtgtctgatgtgtggatttacaatcacacgcaggattttttcaaaaaacatggtgtggctgttatgacaatacgagagctatttgacttcatagttgacccgacaatttcagacgaaaatgttgatagctatttggaagaggtaatgtctaactttttactacttgaagtttgtcaggtttaaagctgtaacgtttattaatgaattatgtaacaatgggtaggtccaacggaaagttatagagcgaggagagatatccgtagaggatgaaatcgcggattctgtattcatgaaggttcgtgaagtgtatccagtcaatagaattgatgtgtgaactatctctgtagaactatcttatcttatcgatttgtaatgatatgatcagtcatacataccgaaatctctggatgctgtgaacaacccagaggctgatgtagcgaagataacaagcgggcaggacacaggagacatgctgtaccaaacgataacggggcttaaggatgctcttcctaaagtagacgagcagcaaatagaggtgaatgctgaagaggaagaagaagaagaagaagaagaagaagaagaagaagaagaagaggaagagggaagtggagaagagagtgaagaagaattgggtcctgaaaacaagaaagctgcaaggaaagagcacaagaagaaagtgaaagaggagaaacgagagtctaggaagacgaaaacacccaaatctgtcaagaagcgaaaaaagaaagtctctaaaccccacaagactcgttaacatgttttggctcccatacttgtatcttttactatggaccctaaggctttttttggtctctttatccaaaaacagtatgttcttgtaagatacatagtacgattatgatagatcctatgataggtttgctggtgttttgggaggactaaaataatttttgttacttgacaattcgactaatggtagtctctaaatttatcaactcgacctttgagattgttggcttcttataaaaaaaataatcctgcagctagtttgtttaggtgcaacgaagtgcagaagatccatctctcttggtagccactttagacgaagttgctttagtacttggacttgagattgatggagatcccattgttggttctaaagttggtgatgaggttgctatggatatgtgtggtagacttttagggaagttaccatctgcggctaataaagaagttaattgttctagggttaagcttaattggcttaagagaactttctctgagtgtcctgaagatgcttcttttgacgttgttgaatgtcatactcgagcttatctcttgtatcttattgagagtaccatttttgctactactgatgcctgatggtgataaagtctctgttaagtatttgcctttgtttgaagattttgatcaagctgggatattatatttgcttggggagcatctgcattggcttgttattaccggcatattggtaatgcttcgcttaagtctcagagcaacatttgtggctgcttgactttgctacatgttactattttaatttttgtggttttagttttatgagagatttcggtatttaggtgaagtaagatatgattgtttctcatatatgtatatagtgttggagttattttcacctgaatattggcaatgtggtggatggagcttacatggaatggtatgctaggatcagtattaccaaactgtactgagaaccgtttctcgagtcccaagtcatgaatatggtaaaacaagtttaatctttctcacttttgttcttaaaacatcttatacttgaaacctgcaaaaatcagtctacgttggttttgtgtagattgcttgtatgagggaatttgaggaagctgcttcagggatttcactggagagattatctccagtagagagggaagtgatggagagtgtgaaagatacgttcgctaatagtttgacgtttgg

SEQ ID NO: 143079 - DNA, 2539 bp, Arabidopsis thaliana landsberg; identical to SEQ ID NO: 29069

SEQ ID NO: 143080 - DNA, 2870 bp, Arabidopsis thaliana landsberg
aggaaagagcgatgttctctgatttaccccagtccgttaagaacaacttttagttcttcaacaacatagagagagtgcatagcttgctttttatgtttatgctttactgtgagagttgttatcctgaaattcatctatgcattgtcaaggcgaaagtaaagccaaaaacttctgagtgaaaatgtggatgccgtagagcgaggaaggttttgtgtctgagttcattatgttttgtggactgaattccagttagaaaactcgtttgatctctttgtgtagtaacgttttagtaaccagtttcacgcatgtctagatgatatgctgagtaacaggatttacttttctccaatcttgcaggataaaactttcccttatgacatacaatacaattggttccgctgtgtatctgttgttactttttgagccatgcagtatagcttttgagaccttgcaggtacttaattgataacagttttcttcttcgtcctactcgttgtctttctttcgtagccatagtcagcaaaatatagagctcatcggaactttttgcaggcgctgttaattcatgggtttcagctgctagatatgtggattaaccacttagcagttaagaactcagactgccaaagatctaagtttattgattctatgacagcaggtcgtttcttttctggtgttatgctttgtttttctattagagcccgaaaatgcattcttgtggacatttttggtttattggaactccaaatctcaagttaaactcttatctttggataggctcactgttggaatggaaaggcctcctcaaccgtaaccttggtttcttcctggacatggctactttggtaatggcactaggtcattatttgcacatttggtggctgcatggcattgcctttcatctggtggatgcagttttgtttctcaacatacgtgtatgtctgttaattggctttctttaaaacagtgtcactctcccggttacttgatactaggcacagcattgaattgttgtatttttacctggttttctgtttggtttggcaggcattgctaagtgcaattttgaaacgaataaaaggatacattaaactaagaatagctctgggtgctctccatgcagccctccctgatgcaacttctgaagagttaagggcatatgatgatgaatgtgctatatgtcgggtacgcttctgctatagtcattttcttataagctttcaatctcaaactcttaaaatacaattataattggcaggaacctatggctaaggctaaaaggcttcactgcaaccaccttttccatcttggatgcctgcgatcctggtgcgcttagctaaatatcgacagcctcgtgtctttatgactcacactggtgatcctgatgatgttttgattcctgcaggttggatcaaggtctaaatgaggtttattcttgtcctacatgtcgtaagcctcttttcgttggtagaactgaaaatgaggtgaaccctcgcacagtggaagtctcaagtgatgagcagttagcccgtcagcttgaaagacaaaacaatcctgtacatgcactagccactggattatttcctgctgaggtgccagattctgtcgaaaatgatacttcgaggttcagttcattcttcgttcttgattttcttattaactacaccaaagtaacaatttatttagaacttcatgattcttttcctgcgactcccttgatcttggtactgagatactaaatttgcactgccttaaagtaacgttattttaaaatgttttgaatagcaagttatatttggtttctgacgaccactatttgtgcatatttcttggatttattttactggattgtataagttctcatccctttctttcacaaaataggaatttaggattggatccaagttggctgcagacatggtcaagtcagggttctgatgtcgctggtccttctaccacttccaggacagttggacttgggcgggttcagatgatgatgaggcatcttgcatctgttggcgaaagctatgctcaaactgcacttgacgatgctgcttggagtctatggccgatgaacccttcacaagcatccacttcttctacaactgtacctcctggtaatggtggaaggacaggtggtctgcatctgagaactgtatcaaacacgacaaatgaaagcttagcaaatatactagctatggccgagacagtgagggaagtcatgccacacgtgcccgatgaaattattttccaggtaaattttaagtgcatattggattatctgtaagctttgatgggatgtgcatacatggttgagttgagttggtggctcatttagattgtcttctgcattgactggaaggaactattttttgcatatattcatacctgaagccgaattttatcagtttatgtatgtggtcaatttgcctgaactggtctctatattcactagactggtccttaagctatggatagttcagttttaagattcacgtgacttgatacttgaacctgttatgtttcaatttcttgcaggacctgcagagaacaaactctgttgctgttaccgtgaacaatcttctccagatgtgatgatagtttgtgtaaaatatactaagcacttccatttcaaccttaggtatagattaatgattggggacatatccttatccgtaagttttacacaccacccaacattccaagcttcacccgctgtagatataaggcactgtgtatcactttttgctatagagaagaagaggctctagtgtatagcttctgttcattgctctcttgcgaaaataagttcggatatttacataaggtgatgatgccctggtggtctggagatatcttgttgcagtctg

SEQ ID NO: 143081 - DNA, 1102 bp, Arabidopsis thaliana landsberg
attgtcatgggtctatttggcaagacagtccccaaaactgtagagaatttccgagctttatgcactggtaagaaaacaatatattgctcattctcatcctatgccaatcgattatttgttaacttttctctgccagcacagcagtttatctaccttgatatgaaaagcttacttaaactttatactcacaggggagaaaggaataggtaagaatgggaaggcgctccattacaaggggagttcatttcataggatcataccaagctttatgctccaaggaggcgattttacacatggaaatggaatgggaggagaatctatctatggtgagaagtttgctgatgagaacttcaaactcaagcatactggtccaggtgagggcttcttcagtattatgtgtttacatcggctctttgcctgtgtgaagtttttacatgattagttgttttcctttttccacagggttcttatcaatggcaaatgccggtcaagataccaacggatcacagtttttcatcacaactgtaacaaccagctggtgagtacagaatcatctgaatttcaaacacataaagccagtttcttatcttttactttcaagttgtttgacaattgtgtgggcaggttactactttctaagcttaagagtttcaattatggatagaattgtcgatatgttgtttccgtctgctgattagaaagtttgcaggttggatgggcgacatgtggtattcgggaaggtagtgacaggaatggatgtggtgtacaaagtcgaagctgaaggaaatcagagtggaactcctaagagtaaagtggtgattgtagacagtggtgagcttcccctgtaactcaacaactctagttttctccatctgatcatccattgatgtgagctctagtgtgcttgatgacttttgtgttaaaacgagtgtcttggttactttatgaaagattctaccggctttatttctttcgtctgctttctagctcgagctatgtctgactttatacacaaatgtctttcagtagcaaaaattctgcacttatgccgttttgcattgtcaacatttgtagaatttatagaagttacacgataatatat

SEQ ID NO: 143082 - DNA, 503 bp, Arabidopsis thaliana landsberg
aaaaccctaagaaatggataaagtataaagcttcattttttacactgcaaacgccgtttcgagacttccggcgaagaagacgaacgcaaagatgcagattttcgtgaaaacgctaaccggcaagaccatcaccctcgaggtcgagagcagtgacaccatcgacaatgtcaaggccaagatccaggacaaagaaggtatattttctaatgctttttaaaaattgtatctttgaaattgtgatctcttagtgattcgtttttgctctgtttcaggaattcctccggaccagcagaggttgatcttcgccggaaaacagcttgaagatggtcgtaccttggctgactacaacatccagaaaggtctctttctcgaatttgaatgctttggattctttagaaaatgaaactagtatagctatgattgttttgttgacccaattctgttttgttttctataaaacaaagaaagctttgcatcttgttctgaggcttaggggaggtatc

SEQ ID NO: 143083 - DNA, 3054 bp, Arabidopsis thaliana landsberg
tgatcattacaattgtgcggttctgtcaatgtttatgtataatggtctcgtctctggtccacattttcagatctctgagattaaggtgccagaagattcctaatattgatctttctcaagttggagtgaccaaatatgggaatttcagtgtagaagttatagatcctgtttccgactatttggagctcatgcaggtaagaattttctcacatgattcttctgtttttgtcttatgatattgggtatgttagacattagatatgttcatggtattctatgcaggatgttttcgactttgatctcatcagaggtcttctttcaagatcagattttgggtatgttcttacatctagagccaaataggctagaagcttttgtcttttttggggttttgatggtccaattatttgcgccttctgtctggttgcagagtcgctcaacatgctaagaaccgaaactagcctatgatttgatgatattttttgttgttcattttccttgcctttaggttcatgtttgatgccatgcatgctgttactggtgcttatgcgaaaccaatttttgtcgacaattttggagccaaaccggtatgtattggacattatgatatatattagatttaactttgaacttctagacattttatatgattgatgttaggcatgttttgtaggattcaatttccaacggagttcccctggaagattttgggcatggccatcctgatcctaatttgacgtaagaaataaactgaagagaagtttcaacatacccacttagtatataacttctataaactttcttacatatagatatgcaaaggatttggttgatgtcatgtatcgtgacaatggaccggatttcggagcagcaagtgatggtatgaccgtggagagatatctttcaaatgttcttgttcttttaggctaagaaacattgaccatgaatttagtcactataatagtgcaattttctggcaggtgatggtgacagaaatatggttttaggaaacaaattctttgtcactccttcagactctgtagctatcatcgcagccaatgcacaagaagcaattccatatttccgtgctggtcctaaggtgggattgctttggataaaatgaagttcactatttaattttagatatagtgccgtttaaacttactggatgcaatcttgttctcaggggctggcacgttctatgccgacaagtggtgctcttgatcgtgttgccgagaagttgaagcttcctttcttcgaggttcaccctttttagtcaacagatgtattttctaggtttgcaaccagataaaattaggaggataaactttttgacaaagcaacttgtatgttttaggttcccactggatggaaattttttggaaatcttatggatgctggaaaattgtcaatctgtggagaagagagctttggcacaggttctgatcacatccgtgagaaggatggaatatggtaatcttccttaaatctaatgctcactaataactggatacttatgcgatatgcaacgtttccgtctaatgggattgtatcatcacacataagtttgcgaatggtgtttagatctattatgcattgtctcacagcatttcaagaaattttacgacaccttgatctctggtaatctagtcaatgaaactcccattaacattgacctgaatcaagttttgatattctatggcagaaatctctcattagttatcatttacctataaactcatagctaagattaagatgtcatttgaatagttcccgactcaatctttgtaaatttacttctttttcacttaagttgttttcaagaagaattcttcatatatggattcttcaatcccagtccatagccttaaaaatgctactctgcttttacgctgtagaatgactctaaccttacatgacagggctgtgttggcgtggctttcgatccttgctcatcgcaacaaggacacgaaaccaggggacaagttggtgtctgttgcagatgttgtgaaagagtattgggcgacatacggaaggaactttttttcaagatacgactatgaagtaagattgtgtatgaattttgttacagatcgcttgggaactaattttaatgtgaaaaccccctcaattttttacgactgtgtgatcaggaatgtgaatctgaaggagccaataaaatgatcgagtatcttagagaaatcttgtgtaagagcaaggccggtgacgtttatggttaggttcatcccaatatattcatttttctgtacgtaataacttattttcactgttcataacaactttcatctcacaggaaactatgtcctccagtttgcagatgacttctcatacacagaccctgtaagtctgataataataaaaagttgatattcaagtatgcatgtactttcgatatactgagcaagtttatatatttctgtttaggttgatggaagtgttgcatccaagcaaggtgttcggtttgtgttcacggatggatccagaatcatatttcgtttatccgtatgttgtagattctttctttttttctttaatcaaattccatgttttatatgtatagagacacattggcccctatcacagtgaactaacttagaattctttgttccagggaactggctcagctggagctacagtgcgaatatacattgaacaatttgagccagacgtttcaaaacatgatgtggatgcacaaatagctcttaaacctttaatcggttcgttcttggttttgtttcgggagagttaaagatgtcccagttttgactttagtaatgattcatctcattgtcatgctacagatcttgcattgtctgtatcaaagctgaaggacttcacagggagggagaagcccactgtcattacatgaagagaagtgtcacatggtccttttgataaggcaagttgggttcctgacttcagttttgtctgccatgtttatttgaaaattccagagcaatgaaatgcttatccttgtaacatatataacttaaatacgtctttctacataaataaaagcatttcttttactta

SEQ ID NO: 143084 - DNA, 1074 bp, Arabidopsis thaliana landsberg
tttctctatcattcccagagataaccaaacaatctcagaagaaaccagaaagagcaaagaaactaaaaactaatattcattaaagtcagtgtttttaaattcgatttcgtaatgggttcttctgcttcaaagaccgcttcttccgtttcttctgcttcttcctcatctgcgttttctccaccgccgaccaaattcagctccgattcatcttcaccggcggtgcagagagctttttcgtttccgacgccgttggttcaccatcctccggcgagaaaaggcgactctcatcaccttgtttcccttacatctacatcgtacgggtctcttctcctccttgatctcgatggatccaaaaactcctcttccgaccaacaaacgctgcctcgtatctcaatctccgggaagaacacaccagatccggtctctcctgattcagtcataaacacttgggagcttatggatggcttggacgatgaattcgaattcgaaattcccaaaccgggtaagcgtctaaattcggatttttgctctaaacccgacccgaatcggaatgtgagtttaaatgggtcttcgttgaaattggatgaatcttacgagattgtgagaatcgaagaagacgatggagattgggttcctttgacttataaacctaagcaacctttgtggaagcatttgtctgaagaatcatttctctctgatttagatcccagcattgtctcatcctacaagaaagctttgtcttctaagctattaagcaatcatagtaatactagaaaccctcatagacccacaaagtctctctcttgtagcccatcatcaaatccatccatcttaataagcgaagaaccaaaatctgtatcctctagtcaattgatttcatcaccagccaaaccgagattaccaggaacagaagacaagattgtactctacttcacaaccctcagaggaattcgaaagacataccgagattgttgttgcgttagagcgatattgagaggagttcaagtgtccgtagccgaacgtgacatctctatggattccaaatacaggaaagagcttcaagcgtgcttggcg

SEQ ID NO: 143085 - DNA, 1923 bp, Arabidopsis thaliana landsberg
cttgagcccaagttaaagctgaaacttgggtttgcaatggctggtattgataataaagctgctgtaatgggagaatggttcgactgtagtactactaaccacaggaagagatcgaaagcggaacttggtagagagttttctttaaattacatcaagaatgaggattctttgcaaattacctttcaagaaagttcacgaggagctcttcgtgaaaggattgctgcgagatccgggtttaatgcaccgtggttaaacactgaggatattcttcagtcgaaatctttaaccatctcttctcctggtcttagtcctgcaactctgttagagtctcctgttttcctctcaaaccctttggtaactttttcttttcaacatttcattatggtctctctctttcgtgaatcagtgctctaaaatctcttatcatttgtaagctcagctatctccaacaaccgggaagctctcatcagtaccttctgataaggctaaagctgagttatttgacgacattaccacatccttagccttgcaaaccatttcaggaagtggccttgatcctactaacatcgctttagaacccgatgattcccaagactatgaagaaagacagctcggcggtttaagagactcgatggcttgttgtgcaccagctgatgatggatacaactggcggaaatatgggcagaagcaagtgaaggggagcgattttcctcggagttattacaaatgtacgcatccagcttgtcctgtcaagaagaaagtggagaggtcactcgatggacaagtaacggaaatcatctacaagggtcaacacaatcatgagcttcctcaaaagcgcggtaacaataacgggagttgtaaaagttctgatattgcaaatcagtttcaaacaagtaatagcagtctcaacaagagtaagagggaccaggaaacaagccaagttacaacaacagagcagatgtctgaagcaagtgatagcgaggaggttgggaatgcagagactagtgtgggagaaagacatgaggatgagcctgatcccaagcgaaggtaaataagaaaaactcatgagactttactgttcctcttacattcatctcttgtgtggttttggttattctgatgagatttaaacaatctttgaatgttgcagaaatacagaagttcgggtttcagaaccagttgcttcatcgcatagaactgtgacagagcctaggattattgtccaaacgacgagtgaagttgacctcttagatgatggatataggtggcgcaagtatggtcagaaagtagtcaaaggaaatccttatccgaggtaagactaaaacctggtcatctagttcaagatagtcattggtctttcttgtttccttaatgctctttgatctaatccacaggagctactataagtgtacaacaccagattgcggagtaaggaaacatgtagagagagcagcaactgacccaaaagctgttgtaacaacatatgaaggtaaacataaccatgatgttccagctgctagaaccagcagccatcagttaagaccaaacaatcaacacaacacctcaacggttaacttcaatcatcaacagcctgttgcacgtttaaggcttaaagaagagcaaatcacttgacagagaagaagaatacgacggcgcttgagcttttgtgagtttaatgaatcttctttttggttaatgaacctgtttttgttgcctcaaaacaccacaggtttctctggacagaatctctgatattacagtttcaaaaggtatgttcttttatttcatgttggaatcttctgtgtaatcttaagaagctttaggaggtaatgtaaaaaaccagattcaaagttatgcccttatgtgaattcttttgtacatgggataaacaaaaattacaggtatcctttttgttcttgttgt

SEQ ID NO: 143086 - DNA, 510 bp, Arabidopsis thaliana landsberg; identical to SEQ ID NO: 77172
  unsure (1)..(510): unsure at all n locations

SEQ ID NO: 143087 - DNA, 1766 bp, Arabidopsis thaliana landsberg
tctcacattgcctaaataactcgtttcacaaaatccacagaaattaaaagttcaaacttacagagcagtgatctcctcagatagaagttcattatcttcatcagcattagatccatggtctttcagctgaccccttcttccgctacctcctcgtttcttctttttcttcgaactgctgcgacccatttcctcagccccaaaacacgccttaatcaatctgctctttcaatcaaacaccttatcctccgatcgaagaatcaccacaatctaccaaaacccaactccttataacaagttcttcgtcaatcgccaccgtttctcacaactcccgccaaacagtttcgatctaagaatttcaaaaaatggcgacggtgactgccagcactaacaaaaccttcgattacttttctctacttgatcccggcgtaaagaattttgaaaaatcgctctcagtgattgttttatataagtctcaatgacgaaaaaatcatcgacggctcttcttcaaagatggcgccatcagagttctatgttgatcctgtccagcacaaacattcaaaacgccgtcgtatttgtatcaaatgataatgggcctatttatacgccaatgagtttaaaggcccattatagataggtcaatctgtgatgttacaaaaatgtgacgtcgaaaaatagctttataacagtgttttgaccgatattgatttcttttaaaacaacaaaaatatgtttttaaaaaccttaatatctactttcaaacaataacgataacgagagaaatgacgtagacatgaaatttgatatcaaaaacaatatagtatgtacattaatattcttagaaattagtgtgaaaaaaaagaaatgaatccctaaaaatcttattttttccaaattaaaatgcaaaatgaaagtatagagaaaaagagaaaatcaaacctgagccataagtgaccaatcagaatcgaccccgcttagtagttcctgattttccacacaccttatctttctcttcttctttaacctctccaacttcactctctatcttcccctgacgtgactcttctctctcttcctctccatcaatggcgaccacaaactctctccaccaccaccaccactcctctccttcttacacacaccaccgcaacaatctccattgccaatctcacttcggaccaacttctctttccctcaaacaacccacttccgccgcaacattctcactaatctgctctgcttcttccacctgctcctccaccaccgccgtatccgccgtttcaaccacaaacgcctccgccacaactgccgaaaccgcgaccatattcgacgttctggagaaccatctcgtcaatcaaaacttcagacaagccgacgaggagacacggagattactcattcagatatccggagaagccgccgtgaaacgtggctacgttttcttctccgaggtgaaaacaatctcccccgaagatcttcaagctatcgacaatctatggattaaacacagtgatggtagattcggatacagcgtgcaacgcaaaatctggttaaaagtgaagaaagatttcacaagattcttcgttaaagttgagtggatgaagcttcttgacacagaggttgttcaatacaattacagagcgtttcctgacgaattcaagtgggagcttaacgatgaaacgcctttaggacacttaccgctcacaaacgccttgagaggaacgcagcttctgaaatgcgttttaagccatcctgcgtttgcgacagct

SEQ ID NO: 143088 - DNA, 969 bp, Arabidopsis thaliana landsberg
tctgtctgtctgagtggattcgtatactatattgtgatgagagtcaccacaacaaattcgttgacatgagcctttcatatatttttgaattatactgaactaaaacccatttaaaagcccatttaaagacccattataagagtagagatactcagcccatttaaagataaaattacgtcatagcgatttttccattaaaagagtgaggaagagacaaaagtgattgattggtcagaaaaaaatggaagcggcgaagaaacagagtgttacaaatcagcttctcgccgtgaaatcagcttccggcaagacttttagccagttagcggcggagacaggtctaaccaacgtatacgtagctcagcttcttcgtcgtcaagctcagctcaaaccggacacagtcccaaagcttaaggaagctttaccagctctgaccgatgaactaatcggagatatgatgtctcctccgtggagatcctatgatcctaatctcatccaagaacccactatctacaggtttgctctggaaagtttacatttttgggtggcttagttttgatgtctgggtttgattttgatttaggttgaatgaagcagtgatgcattttggtgagagtataaaggagattatcaatgaagattttggagatggcatgtaagtttctatgttctttaagtatgtaaagtttgagttgtgatcgttgctttaaagggtcattgttagtagcatacttgtgtgattcattttgttcatatgttgagatgattgaattgaaagattcttgatttattggtatgtgtgctatgatcatatagagaaccttgtaaagaatggaactttactcggttaacactttatagctgagcttgaacctactcttgaattttggggtctgcgaagggatgattgaataagaaggaatttgttaaaggataagcttcaggtgtcgaactttattccagttggttttg

SEQ ID NO: 143089 - DNA, 3263 bp, Arabidopsis thaliana landsberg
agtattattgtggaaaacaatatagtgattgatggggtcgtttttttttttttttttgtgttgcttagtatgatgatgttctggggagaggagctttcaagactgtgtatgttttctacaccatattatgcttttatgtttttagttgtaaaggaaagtgattctgatttgtttgttaactcttgtataaaatcagatataaggcgtttgacgaagtagacgggattgaagttgcttggaacctagttagcattgaagatgtaatgcagatgcctggtcaacttgaaaggctatattctgaagttcatctactaaaggctctaaaacatgaaaacatcatcaaactcttttactcttgggttgacgaaaagaacaagaccattaacatgatcacagagcttttcacctctggtagtctcagggtgtaagtatctccccacttctcttttgtattgatgatctttcattctttttttttctgtgtatcacatgggttgacaccatttttcatttgatgtgaagatatcgtaagaagcataggaaggttgatcccaaggccatcaagaactgggcaaggcagattctcaaaggcctgaactatttgcattctcagaaccctccggtaattcaccgggatctgaagtgtgacaatatatttgtcaatggaaatactggagaggtcaaaatcggagatctcgggctcgcaactgtactgcagcaacccactgctcgaagtgtgataggtaatacaccataaaacatcttccttcctagaccctgaaaactttactgtaactgaaaattttgagcgttttcaggtactcctgaattcatggcacctgagctgtacgaagaggaatacaatgagcttgtggacatctattcttttggcatgtgtatgttggagatggtaacctgtgaatatccatacaacgagtgcagaaaccaggctcaaatttataaaaaggtcacctcggtaagtctttcacaatctttattttcatcaattatctatgcaattgggctcccctctgaaactttgcatttgcagaacataaagcctcagtctctcggcaaagttgacgatcctcaagttaggcaatttatagagaaatgtcttcttcctgcctcttccagaccaactgccctcgagctctcgaaggacccattccttgcaagggatggaggcaagaactctactctgcttgcttcatcaagcacatcatctaaacatgtgagaccaccacagcttgaacatcttcccatggatgtggatcataatgagaataaaagtgtttcaagcaacgaagactacccatggtcccaaaccattgaacttcagaggattgcagagaataaagagttcaggttgagaggagagaggagcgatgatgtcacagcgtctatggttctccgtattgctgacccgtctggttcgtcttataaaattaaatcttctatccaattcattcctttcacagttttcacttgctgaaaatcaattcaatgccctaatacaggtaaatgtagaatcgtacattttgcattctatctggagtcagacacagcaacagcaatcgctgaggaaatggttgaggaactgcatttaactagccaagaggttattgtgatagctgatatgatcgatgacttgataatgcaactagttcactctgaccggacctgttcgcatgataaccaaaactctccacgtctaatccatgaggatcatgaagcagcaaatcagcaaactgtgaactcgaaagacgaagaagctactggacaatcaatgaagtcagacatatcagcagactattactttccctactccacaaacaacggaaatgcttccatggaagctggtcgagatgcagaatcgatgagctcgtatctggattcttgctcaatgatgtcaaccatttacaatctttccatttcagacaatgattacccagaagatctcaagacagaactaaacctgatcgagtcacagtttaaccagtccttccaagatctgctgaaactgaaagaggatgctatagagaacgctaagcgaaaatggattacgaaaaagcaaaaagcagttaacatctcctgattcaatagctctgtttttgatattttactctccttttggtcttcaacttccctgatatcggtgtgttatacatttggtgttttggatatatatatttgatttgatttgatacaacaaacataaatagtggtatttgacttatatcatttctaacagactaaacacacgaaacctgttaaaaaaaaactaaaaagtttagaaggttgacatattttggacataatggttccaaagctcagatgcaatctcatctcttaaccttaaactatcttcaacttcttctggtctaaacccatgttcctgccccactatctctacttgttcctcttctaaagccacttctctatcttctcctgcttccgccagagtgtcttcttcaaacatcctaaacactaaatcatctggtttctccaagcggacatagttgtgcaatgcacaagccgcaatcaccagtttcacttgcgtttgtagaggatacggaggagctgatagtagaatcggaaaccgttctttcaaagccccaaaagtccggtggatagctcgatgcaacaacttgtgtcgctcattgaacatttcctttgcttcttctcttgaattggttgaaacaccgtgatacggcgcgataaagccagcaagattcggatacttattgtcaacaatgtagtattttccttgagggacttgtaacttgttacgccgagtcaaagctgcattgagaacttgttgatcagaagctgaaccttccccaccacctaacacataattgaatctaagatcgaacgacgaagctgcaagaacattctgagtaagcagtccattgccgtttcgaaacggaccttgctcatcgaccccaaccataaccggaatgtggaagctatcaacaacaccaacacagtctttgaaatacgaatcatcattctccaaagtatcagaatttgaattgggttgaaaaaaatccttagagattgcaataactgcattcaaaacattgttgaaatggcggctaatggtttcaccagagtaacagaagagttcttgaacagctcgagtacgaagattatgaccaatgatgaacaaaaagattgctaactgtgcctcaatcttgattcgattagtgtgacgcaataagcctctggtctgaaggagatcacagagtttattgaag

SEQ ID NO: 143090 - DNA, 495 bp, Arabidopsis thaliana landsberg; identical to SEQ ID NO: 15066

SEQ ID NO: 143091 - DNA, 1058 bp, Arabidopsis thaliana landsberg; identical to SEQ ID NO: 51986

SEQ ID NO: 143092 - DNA, 918 bp, Arabidopsis thaliana landsberg
gacggtttcgttatcagtggtagtccacatgatgcttcgaagacgccgattggattgttaagctttgcgaagtttgtcagaaacttgatcacatgaagaagaaagttctcggcatctgcttcggccaccaggttcctttcaattcagttttgctcaatttctgatttggatctgatcggttggaatcttagggtttagattgactcacatttagctcatttcaatttttagatcagactcgagttgttccaatgccattatagttagattgatatctttatattgttggtttattgatggagagagtgtttgttgatgaacgtttgctttgttctggattgtgtctctgttcttttggctatagataattactagagttaaaggtgggaagataggaagagcactcaaaggtgcagatatgggacttagaagcataaccatagcgaaagacaatgaaaaactacgaggttactttggagacgttgaggtcccagcatctttagctattataaaatgtcatcaggatgaagtgttggaacttcctgagtctgctacactacttgcttcttctgaggtatgtaacgtcgagatgttctctattggagatcattttttctgtattcaagggcatccagagtataacaaagagattctgtttgagattgtggaccgagtccttaatatgaagctgatggaggtttgttctccttctctatgatctctatttttgctagataaacatttcggagtgttcttgttctcaatgtagttagccttatcaagaattgcaatgtgattgatttttttcagcaagagtttgcggataaggcaaagagtacgatggagactgcgcaaccagacaggattctatggcagaagctctgcaaaaacttcctgaaaggttgatgatccgagact

SEQ ID NO: 143093 - DNA, 1534 bp, Arabidopsis thaliana landsberg; identical to SEQ ID NO: 37788

SEQ ID NO: 143094 - DNA, 2072 bp, Arabidopsis thaliana landsberg; identical to SEQ ID NO: 49389

SEQ ID NO: 143095 - DNA, 815 bp, Arabidopsis thaliana landsberg
gaagaagcttagcttataatcgaatctaagccgtttcgggaaattctgtttgtaggtgacaaaatcctcttatagggttattcttagctatgaatttcctctgcaatttctttttttgccccgccaaaatttctacctgaagcaaatgtagctttttacttgctaaactagggttatgttcgattttggttcctctttcctatgctgattttgtcggaatttctgggtttgggaagagaaattggagtcgttattgattgaaatgaagaagcttttatgaggtccgggaactgtgtgtggtctgttactgagaatcggacaatgtgcttcagctgctgcttcaatcggcgttatggtctctgctaaagagttctctgttcacactgctttttggtacggtttcgctttcttcaagttttgatttgtttcctttaaccttgttttgttcgcttagttgtcggatttagtagaaatggtagtggaatttctgcaagcaattttggtgtttattagtagtagtacaagtctcgttgatgttgattatgattttggggttggtttcagctacttgattgcgtcaatgggtcttcaattgttgtggagctttgggctagcatgtcttgatgtttatgctctcaggggaaagaaagatctccaaaaccctatcttggttagcttattcgtcgttggtgattgggtatgcaacactacatttttatggctttgctacattaaattcagcgttctctcctatgattttttaaaggattgaatattgtaaaattgttttgcaggtgcggcaatgttatctcttg

SEQ ID NO: 143096 - DNA, 2638 bp, Arabidopsis thaliana landsberg
ctcttctccaattcgtcaactatctcctcctggctcctacggtcacggtattaaacagatctctcttctaaagacagacctttctttcttctaaatcagtttctgttttaccatcttctctccttgttgaattggactggccttacttgtttgtttgttgttctgttatgtttcaatttttgtttctctccagttctgctggtattctagcaaagtatagagaagaaatctgattctattttgcttctccaggacttttctttccagccaaggatatggatactaattccttgatgctcattgataacaatggctcttttgagatcgatgaccaatcccatgtccatgtcgatgcctcccatacccttgaacctgtcaccctacccaccaagcgcaggaggaagaagtctgacgtctggaaccacttcactgttgaaactgttagccctggatctgccaaagcttgctgcaaccactgccgcaaatccttcgcctacattaatggccaaaagttggcaggaactagccatcttaaacgtcacattcaactgggtatttgtcccatgaaccgagacgacagcagcaccctcgcacaaatcgttactcccaccaccaccactgatccttccaagaaacgccataagtcttctgcttcatacacccctctagatcaagaccgttgctacaatcagatggcaaagatgattatcatgcatgattatccccttcacatggttgagcattctggatttactggtttcgtgcaggccctttgtccccagttcactatggcaagcttcaataccattcatgctgattgtgtcaatatgtacttgacccagaagcacatactttcaacctccatcactgacattcctgggcgggataaccttaccgttgatctctggacatataatcaatcacttgggtatgcgtttgggacggtacacttcattgatagggattggaaactaactcacaggcttgtaaatgatgctgacgcaccttctcctgactcagattttgctttgaatcagcctattgcagcttgtttatccgactggaatctgaagagaaggctttccagcatcactgttgggcaatcagtggtaaacaaaacctctattgaaaacctcagatgctgtttgtctgacaggaaccagaatgtattgaatggtcagttgttgttgggtaattgctatgcccgcctcctaagcagtatggcgcaagatctgcttggagctgaggattttaaaacacccataaaaaaagtccgtgatagtgtcaagtatgtgaaaaccaaagatagttgccaagagagatttgatgaactgaagaaacaacttcaaaccccttcgacaaaagatcttctcattgacaaccaaacgaaatgggacactagttacgacatgttattggctgcctgtgaacacaaagaggtcttctcttgtttgggaaactgcgatcttgattataaaatattaacatctcctgaagaatggagaaagattgagatcctttgctcgtccttgaagatcctttttgacgcggccaatgttttgactggctcaactcgattgacagcaaacgatttgttccatgaaatgacaaagcttcagctagatctaggcaactcagccacgagtgaagatcaagatgtaagcaacctagcaaacacactgaaagataagtttgacgagtactggagagaatgtttcctgcttatggctgttgctgtggtgatggatccacgcttcaaaatgaagcttattgagtttagtttctctaaggcttatggggaagatgcagataaatggatcaggagtgttgatgatgctgtacatgagctgtaccatgactatgctgaacagagtcactcctggctggatgctttatgtagtccatgggaacgatggcttttctgaaacagatatgtctcaagttcacttccatcatgaataccacaactcaaatgggctttcacatgatcaaatctttgaacaacctgaagatggaaatccactgaatgaaaaacctttggagggactatctggagaaggtcaggctacggggacagaatcggtgggaggcaataccacacagggagtagaacaagaaggccatttgggagatgctgggacacaggagaacaatattgtggaagggcagttggaagagagcaaaccaatggatgggctgacacaaaagcctcttctgacagaagaaaatctgcaatccaatggagagccaactacggcccaggagagccggctaacagatgagacaatggaggaaacacatgcgaaccagtcagctgaggagatggcccatgagacccagctggttgaggaatttccatgtgagagccagccttctgagaacgtaccccttcagagccagtcaggggaaggaaatgtaccggagacactgccaatggaggaaatcgttgaagacactcaacctgttgaagaagtgatgcaggaagaaacgtcacaggtgagccggccagtggaggaaataccgctggaaaaccagcaagtggatgataaggatataacccatcacgtacagccggtagaggaaatgctcgaggacactcaaccagttgagggagtggatcatgaggctcaagagctgg

SEQ ID NO: 143097 - DNA, 2173 bp, Arabidopsis thaliana landsberg
aaagtttcactaactctcttctctctctcggagtattaattcccggcgtttagcaatggcaagtctccgatttcacagatctgattttcaactctctctctctcttatctctaccgttcgaattttggtttgtcaaattcgatgtcgtgatttgattgcaggaagaaagtagaaaactcgaatcgtcgattgatcggctgctgaacgaagagaaacagatgaggctcgcagaaaatgtcgccggaactagaaaagcagctaccgagattcttaagctttgtttcgaagctaaggattggaaacttctcaacgaacagattttgaatctctcgaagaaacgtggtcagcttaagcaggtcacactactttctatcgatttagcttttgaaacctgcttgtggtagtttaaggttttcgattacttggaacggtttctactgagttctgaatcttactgagaaattgaatgaagaactgagtgagatattgaaagtggttaggtctcttgatttgcaggctgtacaatccatggtgcaacaagcaatgcagtatattgatcagacactagacatagaaactcggattgagcttattaagactctaaacaatgtagctgctggaaaggtgcggattagagttggctattgttgttgttgttgtagttatatttgcttgaatcttgatcactccgtgaaagtttttttcttgatgaatatgtgtgtgtgagcatgtgtagatatatgtcgaaatcgagagagctcgtttgaccaagatgcttgctaagattaaggaagaacagggtttgatagctgaagctgcagatcttatgcaagaagttgctgtaagcttttgtgcatttggctattaaatctcctggaaatcgtttcttcccttgttaacccctgcaatgtgcattgataaataattaactataggtggagacatttggtgctatggcaaaaactgagaaaattgcatttatccttgaacaagtaaggacttgtgtagttacgttgcaattaataatttgctggtgttttctttcattgtgataactatcaaactattgtggtcaaactttaaaggttcgcttgtgcttggatcgtcaagattttgttcgtgcacaaatcttatctaggaagatcaatcctagagtttttgacgcagatacaaaaaaagataagaagaaacctaaggaaggtgataacatggtagaagaggctcctgctgatataccaacccttttggagcttaagcgaatttactacgagcttatgattcggtacggccttcttgagcttctctatcacattgttcgtgatttgtatttccatcatttatcatggcattttaaattcttatatgactgtttaattatggacctctctctctgtctcttaaattctatcaatctgtgtggcttttgcttgctatggttttctcagagatgcatattacaactttttcctggaggacagtatcgaaatttggatgaatctccttttgtgtcaaatttatgactctcttttcatggccaacgattttggacatcaattgcattatgttatccactgaattctgacgtaccatgattgatttctgtggcattctcatcttttttattattaaccataaaaaatttcaactatgtaggtactattctcataacaatgagtacattgaaatctgccgtagctacaaggcgatatatgatatcccttcagtaaaagaaactccggagcagtggattccggtaagctcatgccgttgattggatgtatagttagtatacattctatagggttagtgtaataactttctttgatcttcaaaacattaggtcctgaggaagatctgctggttcttggtcttggcacctcatgacccaatgcaatcaagcttgctcaatgcaactctggaagacaagaatttatcagaaatccctgatttcaagtatattttattttctgataaattttgttatttcaataactgattcttttgtactcaaatgggttctcagtctttttttctttgtttgatatcacccgtttcaggatgcttctaaaacaggtagtgacaatggaggttattcaatggacatctctgtggaacaaatacaaggatgagttcgagaaagagaaaagcatgattggaggttctttgggtgaca

SEQ ID NO: 143098 - DNA, 2292 bp, Arabidopsis thaliana landsberg
tcctttcccactgttaaacacacaactaaaggttcctgtttgcaggctgatattaattatcttggtaatcttctccatcccaatcttgttaaactggtgggttattgtatcgaagatgatcaaaggctgcttgtatatgagtttatgcctcgaggaagtttggagaatcaccttttcagaagtaagtaaaacaactacaaccttcatattctaattacactgtagagttattttctttccttttctttgttttcgatttgggtaacaagtgtctacaatttagagatgtgtctactccatattgttaaagtgattagaatctatacagctaaaattggaacctttctgctctatatggtaaagttggtaccttttagtgctgtcttagatggtttatattgcttgactgtattgacccacgaagcaataagtaaatccctcgcattcattgtttcaagatttttcggcgtaaaaaatgtgtttaaaaagacacagagcttttgtatgatttatcttctcagttatcattgatgcaaatcttttaatttgtgaattaacttgtgcttcgtgttgaagggtccttgcctcttccatggtcaattcggataaagattgcattaggtgaaaaaaaggatctcagtttcctccatgaagaagctttgaagcctgttatatatcgagatttcaaaacatcaaacattttacttgatgcagtacgtatctcttactctttaggatcaacatcttatatttgcaaattttttaaccaataaatcccattgtcaggactacaatgcaaaactatcagattttggacttgccaaagatgctcctgatgaaggcaaaacccatgtttctactagggttatgggtacatatggctatgctgctcccgaatatgtaatgaccggtgagtcctctttggtttcatccattttcttcaacttgaaaacattcaatgtttacatctttgttgatttgcttcctgttgaacttgttaaggtcacttgacatcaaagagcgatgtttatagttttggggtggttctacttgaaatgttgactggacgacgatctatggacaaaaaccgcccaaatggtgagcacaacttagtggaatgggcaagaccgcatcttcttgacaagagaaggttttaccggttacttgatccgaggcttgagggccatttttcaatcaaaggtgctcaaaaagtgactcagcttgctgcacaatgtcttagccgtgaccccaagattaggccaaagatgagtgatgttgtggaagcacttaaaccacttccgcatctgaaagacatggcaagctcttcttactacttccagacaatgcaagctgaacgtttgaaaaatgggtcaggtcgatcccaaggatttggatcaagaaacgggcaacaccaacccgtgtttcgaacactgtctagtcctcatggttcttcgccttatcgacatcagattccttcgccaaagcctaaaggagcaactacatagctcttacgtggtggaaataggccacaaacgaacagagctagaaggctcaagcttttatcgtcgtttttaagcaacaaggagatatttttaaacaacgttagggtaactctttaattgattaataatgtacgatggagaagggtaaatccaaatggaaaaaaaaaaaactgattttgtcttccattgctgaaagcatagaaaagttataaattgaaaacatttttgatgctctttataaattgaaaacaccaagtatctaccattttcaaacgcaaaagccagtattccggaaacagaggtatcgtgtttgttcatctacttctggtggtcagaatgatagattcaaagtagagtacactccttggcttatcgttgggttgggcaatccaggaaacaagtatcatggaacaagacacaatctttttcttttactgatttgctggatttgatctcggcaatgctacaactttgtgttgttttcaggttggtttcgagatgatcgatgtgttggctcgaaaagaaggggttttgatgaacacgatacagtccaaagctctaatcggaataggttctacttctcttgcttttggttctttggtttgaagaataataaaactgatgactttttggttctatgtaagaatcagtacaggtgctattgaaggtgtacctatcttgttggctaaacctcagataaaaatctgaccaactagacaaaattaattagacatgtaagaagaacctcatagaaaaatccactaagggaactccaaatggaacaaagtat

SEQ ID NO: 143099 - DNA, 563 bp, Arabidopsis thaliana landsberg
ctccatcaaccaaaaaaaaaaaacattttttgttgtttgtttgcattgaagcttataggcttctttagtgaaaatggagatcgaatccgtgagatgtgagtgttgtgggttaatggaagattgcacacaagactacattagtgaggtcaaatctaacttcgacaacaagtggctctgtggtctctgctccgaagccgtgagggacgaagtgagtcgccggaagatgaccacagttgatgaagccgtcaaggcccacgtgtcgttttgtggcaagtttaaaaaagataatccggcggttcatgtcgctgatggtatgaggcagatgctacggaggaggtccggtgagttgacgaattcctctacgtccaagaagtttggtagatctaacaccaccaagttgtactgatccatttttcttctatttcgctaattacttaatgtataatatttgatgcttctttcttccttgttttgtttaattaatgtcataaataatggtcggtgatatgttatataactaatcaattaatttcaaacagacttgtcatttagtttccacacat

SEQ ID NO: 143100 - DNA, 1792 bp, Arabidopsis thaliana landsberg; identical to SEQ ID NO: 28849
  unsure (1)..(1792): unsure at all n locations

SEQ ID NO: 143101 - DNA, 1242 bp, Arabidopsis thaliana landsberg
gatcatctcctccgatatcaaccaccacttcctccgtcggagtattatcgttcgaagtagcacgtgtcatgaccaaactcctacatctcactcactctctcaccgattccaatctcctcactcctcgagaccactctctttccttagaaggtctaaccaaaatcgtcaacggcgacgaaacattccacctcagcctcgtttgtgctgagctcgcagatagtctcgcccacgcagctaactctgtttcaagactgagcaaccgctgcaccacggccagcctccgttctttccaccgcttattccatgaatttgccgacatgggtcgtgaccctcatggatgggtcatgaactgtaaagacacagaagctaaaaacaagaaaatcgaaaggtaaaccaaatttctctatatttaacacacaaaaaacagagtaaaaacagagcaagaaaacagagtacaacacagagattgattttgttttttctttggttaatggaaacagatacgtgagcgtgacgacagctttgtatagagagatggaagaaatggcgatattagagaactctctgcgaaaacaaagtttacagattgggatcgaattcgaagaagaagaagactacgagaacaagaaagatgttatgaaagtgatagatctacagaacaagattgagagacagaaacaacatgtcaagtatctaaaagacagatctctctggaacaaaagcttcgacattgtcgtgttgattctcgccagatcggtattcacagcactcgctagactcaaatccgtcttctcctccgccgcagccactgggtacatggttccaaccgtcgtgtcttctctccctcgttctctctcttcttcttcttcctctatgaatcttgttcaccctagcccaaacgacgaagagagagacaagacgacgacgtcttctgcgtttcttgaagaaagctcaagactgttgaaaccaccggagacaactatcggcggagctggcgtggcgcttcactacgcgaatctgatagtagtaatggagaagatgataaagcaacctcagcttgtaggtcttgacgcgagagacgatctgtattcaatgttaccggcaagtgtgagatcgtcacttaggtcaaggctaaaaggagttggtttcacggcgacggacggtggtttagcgacggagtggaaggcggctttaggtcggatcttacggtggttgttaccattggcgcagaatatgattagg

SEQ ID NO: 143102 - DNA, 746 bp, Arabidopsis thaliana landsberg
ccaaaaacatttacaatccctcgaaaacgacgtcgttctcgccaccatacctaaatccggtacaacctggctaaaagctttaactttcaccatccttaaccgtcaccggtttgatccggttgcctcgagtaccaaccaccctcttttcacttccaaccctcatgaccttgtacctttcttcgagtacaagctttacgccaacggagatgttcccgatctctcgggtctagccagtccaagaacgttcgcaacccacttaccgttcggttccctaaaggaaacgatcgagaaacccggtgtgaaggtcgtgtacttgtgccggaacccgtttgacacattcatctcttcgtggcattacaccaacaacatcaaatccgagtcagtgagcccagtcttgctagaccaagcttttgatctgtattgccggggagtgatcgggtttggcccgttttgggaacacatgttgggatactggagagagagcttgaagagaccagagaaagtcttctttttaaggtacgaggatctcaaagacgacatcgagaccaacttgaagaggcttgcaactttcttagagcttcctttcaccgaagaagaggaacgaaagggagttgtgaaggctatcgccgagctgtgtagcttcgagaatctgaagaagttggaggtgaacaagtcaaacaagtcgatcaagaactttgagaatcgattcttgtttcggaaaggagaagtgagtgattgggtttact

SEQ ID NO: 143103 - DNA, 1935 bp, Arabidopsis thaliana landsberg; identical to SEQ ID NO: 17337

SEQ ID NO: 143104 - DNA, 3559 bp, Arabidopsis thaliana landsberg
  unsure (1)..(3559): unsure at all n locations
agttgaaaataaaacataactcttctttatgtaaggaaatcaaatttgatcataaaaaacttaacaaactgtgtcaattaaaagcaaggaatactatataccaccacttgttattgaaatatatcagtttaatgaattattcaagattacagtgaagtaaatccaaaaaaggtacaaagggtttgccctgtggtttaatcactagctcgcctcttcttcttgctggaattgagttaaacttggaacataattaaacaaaaatggccagtttgaaaagaatcctaaatccacttttctgacttgattgtcctctccaacatgtatagcacgtttttgaagttggttccatcatatctagaatatttatcacaacacacgaggactttcttctcctcatcgaccaaaaagcttttaccataccaacacctcaaataattcaaatccaatgctacgaccatgctccaagacaaaacgttggtcatctcatcaatcttataattatgacccatatctctgtccttgaggtaggattaagttgtaataacaccgaaagtttctcttctttaacaaccaatagagacgcaattgcataaaaaggatactgacacggaagtagcagacttctaaatctctctgttttataatcaaaactaactaaaaatgtgcaaagatcaacttcctttttatcaaatatttatctttttcgcaagcaaaccaatgagtatttctcttcaaattttttggttactatatctcttttttatcacctaagcgccgtcgtttctcttcaaatctctctgttttataatcaaaattcagttattttttaacaactgattttttgtgattatttagaaagtgaagacaaaatgttaatcctcacctcatggaggatttaccaaaataacagagaaattaacgctaaattaacagttacagtattacttttgtcagaattaccaattaattataagcaaaaatatgaattatttgattaatgagtaatgactatcggttccatcttccccaagttcctctgctccaaaacctcttaaaccctaattcgaatttagcctaaaccctaaaatggccaaatggagacttgcgactgcgacgctccgtcgacaacttcaatcctcatcgccaactatctctaccttcaagaatccaaccaaagcattgtctgcggcggctcatcagtctactcgcagctacagtacaactcagaccgatgattcgagagggaaatggttaactttacctcctttttctcccaccatcgatggcaccgccgttggaaaggatctcctttccgacggagactctgtcaaatcttcaacggataactcaaaaacgacggcgcttaggtggattcttcgttgtcgtcccgatttacccagaactctcgttcagaaactcttccgcttaagacaggttcctagtctcttccaatcttgtattcaacgaattgttgtcagtttcttacattgtaattgattcaggttagaagagaaatgtctatgagtgttgatggtgatgaactacaaagaagccagcttaaaagggtaatgttattttgctatctattgattggaacaagaactgttttgttgaaaggctgctcttttatctgatgatgttgatttctgacccttgaaaggtggcagctaaggagtccttgaatgtaagagatagaatttaccatcctatatcggttgacaatgatacgccgcagacgccacctgctaagaaagaaaagctttcaatgtagtgatgaagaacgcanattcgtttgcagtttggtgttgtataaggttttgaaactgtatactattggtttgcttttttgtttttttattgatgttatatacttatatagattgatagatcttaactgtgtgttaatgtgccaggatccagccattattgttttgaataaacctcatggtttggctgttcaagtgagtcatttatacttcgcattctgttgtattgtgtatcatattcttggagcttgtgaaatgtgatgacatttgctctttaatagggtgggagtgggatcaaaaccagtattgatgaactcgctgcctcttgcttgaaatttgataaatcagaatctccccggctggttagttgcgaatcatagtaaagcactgattaaaactgtatctaaacgaaagtgtatgatttattatgttgtttttgttaatttgaaaagtatgaatctattggcttatgcaagtatgggatatgtattaggtgcacagacttgacagagactgtagtggacttttggtgttggcaagaacacagacggctgcaacagttcttcattccatattccgagagaaaacaactggtgcatccgcatatgtaaatcctctgctttctctccgatctttccattgcttgtcatggatcgtgggaaataaacataagtttctcttccaatgacttttattttacttggcagggtgtcaaaaagaacgtaaaatccttgaaaagaaaatatatggcacttgtgatcgggtgtccaccacgtcaaaggggacagatttcagcgccactcagaaaggtcttcacactctgttttagctagagagttttatccatctgagtttttagtctattttgttttatctaggagttgctttgtttgttcgaattcggtcattgcttttgctgctttactggagtcaaatttgaaggtaaaatatatgttaaatatctgggtaggtggttgtggatgatggaaaatctgaacgtatcactgttaatgacaatggagaactcgtttctactcagcatgctatcaccgaataccgagtgattgaatcttcaccacatggttagtgagactgacttccatttctattcagttaaacttaaagcaaatgattttgccttgagtttttagcacattgttgaattgcaggatacacatggcttgagcttcgccctttaactgggagaaaacatcaggtctctatagatattcagtttttgtttcaactttctctcgtttttatgttctcttaatactaatctgttttcaactgttcttcgattgccacagcttcgtgtacactgcgctgaagtgctaggaacaccgatagtcggggactacaaatacggttggcaagctcataaagcccgggaaccttttgtctcttctgaaaacaacccaaccaagcaatcatcatctccttttggattggatctggatggtggagatgtctcttcgaaacagccacaccttcatctccattcaaagcaaatcgatctgccaaacatatcacagctcttggagaaaatgcaggtctcttcagactctgatatttcggatctcgatagccttaaattcgatgctccattgcctagtcatatgcagctaagctttaatttgttgaaatgtagagtcgaaacttgtgacaaaaattagattttttttcttaccgagctttcttctttgtgttcattgaggcccaagtatttgtgtatttggacctgaatattctcatacaaagataaataactataattaaatgatttttggcat

SEQ ID NO: 143105 - DNA, 1777 bp, Arabidopsis thaliana landsberg
tgtatcaggaacagtttcatgtagccatattccagactgacaaaaatgagagcttgttttcagagagggtattttatttttgttctcaacaaaaaaagtctttgtaatccatttgcaaacaatgacattaccctatcacacaggtcttcgatttgttcgacacaaatcatgatggattacttgggtttgaggagtttgcccgagctctctctgtctttcatccatctgctcctatagatgataaaattgaccgtacgtctctgatctcaaaaactagacccgatatattaaccatctacaaacaaactgttcacatgctacctatatatattccatgaaagcttattaacggttacctggaacattatttggcagtttcgtttcagctatatgatcttaagcagcaaggttttatcgagaggcagggggtgaaacaactggtggtggctactcttgctgcgtccggcatgagccagtcagacgaaatcgtagagagtataatcgacaaggtgtgttttccttccttctattttttggttcgactctagtctatagtatagccaactaagtttaagcagctgatgaatatgaagtgaagagtgatttttgagtttatgaggcagacatttgtgcaagctgacacaaaacatgaagggatgatcgatgaggaagagtggatggacctagtttttagacatcctcttcttctgaagaacatgactctccagtatctcaagtgagctcctaaaccaaagactaacccgaggtttagccaatgcaacttcaaatttttctgcatcacgtattattaacaccatgatatctgatattgtgtgcagggatatcacaactacatttccgagctttgtgttacactcgcaagtggaagatacctgagaaaaacaatagcatattagcagaggagactgtttgggaattgtgtttgttttctgattatgtatcatgtttatttgttttcaatctctctcaacattttcaagattttgttgttcctttgtgtggaaaaaaccgaaatccgttcctaaatttctcctcgcatctgtagatctactactaatcttgagacatgtaaaagcaaactgctagagcattgaaagagcaaactgctagaaaaaaaagagagaagaactcaacaccaatgatcggctatgctctaatctgaattctcaagtcaaaattgaaatcgccggtttgatcgaaccggatgtatttaacaaaataaacaaaaaaagaaggaaaaatagatcctcacgcgttaccgtagcgcgtatttttttcacaacaaaattcataagcagtgtgggtcccacaggtccactaagtttagtggtgggttgctccgtagctaatctcatctctcactctttttcttatccactatccatagaagaagaagaagaagactgttgacgacgacggcgatggcgatggctatggagatttctcttcctttcgttggatcatccatggccttaaggtagattcgtatgttttggaatctcataattttctatctccgtcgatttgagagtatggtcgctggagattgaaccttttttattttatttatcagcgcgggaaaatcaaggaacagcgtttctaggattagtcgtgttggattctcttcggtctcggctgtacatgtacccagaaggatgtttatgcagctgtctggatttggttcggtcttgacgcttctggattttcctagtttagcggcgccggttcctcagatgaaggaacctgaagtgatcag

SEQ ID NO: 143106 - DNA, 3147 bp, Arabidopsis thaliana landsberg
agagagatgaacaatctgagttatcttgaaccagattactctgagtttgttgaagttgatcctactggaagatatggaagagtaatgtttcctcctatcaatcaatcaatctcaattattttgtttgatcttttgttgacttcattgttcttgttgttgcagtacaatgaagttcttggtaaaggagcttcaaagactgtgtgagaatctctcccttcttctcttctttttctgcttcatgtttctctcaaagtttgcagcttttttttcttctggatctggtgatgatttaagcctaatctgttgttctttcttcataaagtttgaaactttttgttttcccagtcaaaacccatttgtgatccaacaaatttgtccttacgatttttgtgtgttttggattcatgattgaatcaaatcctttaaaagaggaaataaaaaagttgagcttttgtttttttttgcttcattgaatcacttctagtttggtcattaattccccacaagagaaatttccaacaactttgctttttttggatctctttattgctttgacttatacgaaattcagattctgcaaacaaaaaaacttctttgctcatacatacattaatcttctttctttcttttgattttgtagttatagagcatttgatgaatatgaaggcatagaagtagcatggaaccaagttaagctatatgatttcctacaaagccctgaggatcttgagaggctttactgtgagattcatcttctcaagactctaaaacataagaacatcatgaaattctacacttcttgggtcgataccgccaatcgaaatatcaatttcgtcactgaattgttcacttctggcaccttaagacagtaagattctcttgtaaacatacttttctgtcgttggttttagtttatctttaacgataacttcatttatggatacagatatagactcagacataagagagtgaacataagagctatgaagcattggtgcagacaaatcttgagaggcttacattatcttcacagccatgatcctcctgtgatccacagggatctcaaatgtgacaacattttttttttcgggaatcaaggagaggtcaagattggagatcttggccttgctgctattttaagaaagtcccatgctgctcactgcgtcggtactatatgcaaatccaaatcatatcctttctgctttttagctgagtttctttgtttctgattgtgtaaagttttgatcttttgttagggactcctgagttcatggcacctgaagtttactaagaagcatataacgaattggttgatatatactcgttcggtatgtgtattttggagatggttacgtttgattacccgtacagtgagtgtactcatcctgctcagatctacaagaaagttatgtccgtgagactcttccgttactaaaaacacttagataaaaaagctttaatctcttttctgttcaaaaggcttaaagttccggtttcagggcaagaaaccggatgcattgtacaaggtaaaagaccccaaggttaaattgtttcattgagaaatgcttggccaccgtatcgcatagagtctctgctcgtgagttactagatgacccttttctccgtataggcgatggtaagtttgatttaagatcagttgatatggaagattcggtcagccactctataggcaggcggcaccatcttcctgactactacaattacccgtcgaatagtagctctttgaatcgtcagtactcaaatggcaactacccgtcgaatagtagctcattgaatcgtcagtactcaaatggttataatagtcatcacgagtatcagaatggatgggcgtataatccagctgagacagaggagactcacggcatcgagctctttgaatctcgaaacaatgatgatcaagaagaagaaaagaaatctggtaatgttgacataaccatcaaagggaagaggagagatgatggtggcttgttcttgcgtcttaggatcgctgacaaagaaggtaacaatattctctttatcttttccttgtttcataacctatgaagaagagtggaaaaaatgcagtttctttcatttgattcatggactggtttgttgcaggacgtgtccgaaacatttacttcccatttgacattgagacggacaccgcattgagcgttgcaacagagatggtagcggaactggatatggacgatcatggagtcacaaaaatagccaacatgattgacggtgagatatcttctcttgtacctagttggagaccgggacctgaattcgaagaatgtcttgcggctgcggcggcggcaaatgctgcgagcatttgcaacaactgcgtatcaaaccgcacctcaatgggctcggtgatggatttcctgagaaccaatcctggggcaaatgtgatacaatgttgcagaaacgggtgcggtgagactcatggtcggtttgaagagatcacgatcagagaaaccgaggttcgtcttagagagctatggaagctgcagcaacagcaagaaagccgcgagctaagctcgatagattcaggccataaccattccgaagaagaggaggaagaagaggtgctatacgaagaccccgaaaacatgttttcttgcgaggcaggtaacgagataaaccatatatcgggttctggatcgttctcgtttatgccatctaaatactgcgatgagccatccgaaaaaaacgaaaatcaggtccaacaagagttgagatggcttaaagccaaatgccaaattgagcttagagatattcaggatgaacaactaaaaacccggtggccggaatccggagaagaggtggaaatttctccgaaagacgggttcttgggttcggtttccgggttaggaagagaagaagatacggtgaaagagatgtttggagaaagattggtaccaaagtgtctgaaaagaacaacttcacttcctgttgatgccattgattcttgattacattgtgtttcttcatgtatacatacatattgtttcctattataaagacttttacagtgtaacaagaacaacacacaagtatacttaagagatcctcttcaaattcttttggggttatttgtacaataatacccttcaatctaataacttcaaaatgcaa

SEQ ID NO: 143107 - DNA, 2142 bp, Arabidopsis thaliana landsberg
aatttatcatcctttctctttcgtcttctcaatttctgaatcaaacccaattcccttctcgaaatctagtttctctacagtgcggaaatcgaggttaattgagttcgtcggaaacgatggcggtgagtttgacggagggagtgataatgaagatgttgaacggagaagtgacgagcgagacagatatgatgccagtgctacaagtaacggaattgaagctgattcagagcaagcttcatcaaaatcaggaatctagcaatcgatataagtttttgttatcagatgggactgacttggcagcaggaatgcttaatacttcattgaacagtttagtgaatcaaggaactattcaattgggttcggttataagactcactcactacatctgcaatctcatccagactcgaaggtaatattgcaatatcttaaccctagattcatagttgtctaaagaaccaatcttttttttttataaagtagttctgatgttgttgaattacaggattgttgttattatgcaattggaggttattgtggagaaatgtaatataattggaaatcctaaagaacctgggcatagctcgattagtctacaacgtggtggagttaacacacaaagcaatggtggttctgagcagcaacaagctagaaggagtgatgtgaatggtgggagatacggtgtatcggctaattcacctcagcctcaagttgttcataacagttccgacgctggaagatacggtgtatcggctaattcacctcagcctcaagttagtcataacaattccgacgctgggagatatggtgtatcggctaattcacctcagcctcaagttagtcaaagatatggtactggttctggctctcgggaaacatcaccttccactagaccgtatgcgagctcaaatgcaggttatggaggctctaggcaggagcaacctcgggctcctactgcaacaactgcttattcccgtccagttcagtcagcttaccagccacaacaaccaccgatgtatgttaacaggggacctgtggctaggaacgaagctcctccgaggataaatccgattgctgctcttaatccttaccagggtcggtggaccatcaaggttagggtcacgagtaaggcagagctgaggcggtttaataatccgcgtggggaagggaagttattcagttttgatcttcttgatgctgatggtggagaaatacgggtgacttgttttaatgatgcggttgatcaattctttgacaagattgtagtgggtaatgtttatctgatttcaaggggaaatttgaagcctgctcagaagaactttaatcatcttcccaatgattatgaaatacatttggactctgcatcaacgatacagtcttgtgaggatgatggtaccattccacgctatcatttccattttcgtaacataagtgatattgaaaacatggagaacaacagcaccactgatctaattggtattgtttcgtccatcagtccgacagtagcaatcatgcggaaaaacttaactgaggtacagaaaaggtctcttcagttgaaggatatgtcaggccgaagtgttgaggtaaccatgtggggtaatttctgcaacgccgaaggacagaaattgcaaaatctttgtgattctggggtattcccggttcttgctttgaaagcgggaaggatcggtgaattcaacgggaagcaagtgagcacaattggagcaagtcaattctttatagagccagatttccctgaagccagagaattaaggcaatggtatgagagagaaggaaggaatgctcattttacctccatatctagagagttttccggtgttggcagacaagaagttcgcaaggtaattgcacagatcaaggacgagaagctagggacctcagagaagccggactggatcacagtctgtgccaccatttcattcatgaaggttgaaaatttctgctatacggcttgtcctatcatgaatggagatcgtccatgcagcaaaaaggtcacaaataacggagatgggacatggcgttgtgagaagtgtgacaaatgcgtggatgaatgtgactacaggtatatattgcagatccagttacaggaccatacagacctaacctgggccacagcattccaagaag

SEQ ID NO: 143108 - DNA, 1889 bp, Arabidopsis thaliana landsberg
attttgttgtccgtaggattctgattccgagtctctagttccaaagagaagagaacatctgtgagagatctgagacgtctggaaatgtgaagaaaacaaaaaaaaaaaagatctgagagagagtttcgaaattctcgtgttcgtaagcaaaaatggtttgggagaaagagaagatcgtcggaagttgtatagtcggaggagctgcgttcgccgtcggagcttctttccttcatcttttccttaaaggtgagcttccgttaggattaggtttaggtttgtcttgtccatggcgcattttgagaaaacgaaaacctgttcgcgtttacatggatggttgcttcgatatgatgcactatggccactgcaacgctcttcgtcaagctcgtgctctcggtgaccaattggtcgtcggtgttgtttccgacgaagaaattatagccaacaaaggacctcctgttactcctcttcatgaaaggtttctctttctcgagattacaaattcattgtttctggtgatttcaattgcgttttgtttgattttgattttgatttcgttatgtatagaatgacaatggtgaaagctgtgaagtgggtggatgaagttatatctgatgctccttacgctattacggaagatttcatgaagaaattgttcgatgagtatcagatcgattacattatccatggtgatgatccttgtgttcttcctgatggtactgatgcttatgcacttgctaagaaggctggtcgttacaagcagattaagcgcactgaagggagttctagcactgatatcgttggtaatttgacatatccccttctgatttcattttaagctcgcatcagctgacttttgaaacgtctaatttcatcattttcgatttgtgatttctgagcaggtcgtatgcttctttgtgtaagagaaagatccattagtgacactcatagtcgttcctctctgcaaaggcaatttagtcatgggcatagtagcccaaagtttgaggatggagcttcttctgctggtactcgtgtctcgcattttcttcctacttcccgcaggattgttcagttctccaatggaaaggtatgcatattttaagagtttcttgtcctcaagttaatgtattgcatacttgtatttgcaagtttatcgtagtgtttgttgctttatgatatactaggtaggacaagtacatgacccttgatttctaatagctatgcaaggggctctgagagtctgagcttactgtttttctagttgttttggttattaaagagaacggtctcaaacagcagtttcgtcatcattatggaacactgtctggttcagtcttgttcttgaagttactggttcacactttctatgactgtttcaccaattattggatacttttatgtgcttatcgtatatttttcttcttaagtgacagaatgttacttcacatctcattttatgacctattccaagtcatatacctgctagatgtatctcaagattatttttcttgatagattcacgaatccctttcttctgtcattttactccattacctcagtgctccttctcatattttatctggggttgatcaagtttacattcttattgtaacaggggccaggacctgatgcacgcattatctacatagatggtgcttttgatcttttccatgctggccatgttgaggtatattaattggtgcatacaacatacagttcactttatatgtgaggagtggtgttttaataccgttacatgaacaatgggtgtaaggttaaccatattaatgatacattttatgcttatataaagtaaagaagtagaagtgagtgggattgagcgaccatttagtttattctgccaatttatttgctattaaaatacttaattc

SEQ ID NO: 143109 - DNA, 1072 bp, Arabidopsis thaliana landsberg
aatgaacagagtttgatgaaatttttgtttaggttcacatggaatatttggaagctggtgcagacattgtggttacttcatcttatcaggtaatattataaagcaaacaccaatattttatttgatttgttcattctctttcttgtttaacaatctatctcttttgtttcttttccaatctttaaagaacttagaaagatactttacttcgttgtatttttttatcgttgttgtaaagatttacaaagttaggatttgtaattagtttcagtctgacttcactttgaaagtatttagattttgacttaccggctttgttatttcaggctacgatcccggggtttctttcgagaggtttatcgatagaagagagcgagtctttgcttcaaaagagtgtagaattagctgttgaagctcgtgatagattctgggagaaagtgagcaaggtttcaggacatagctataacagagctcttgtagctgcatctattggaagctatggtgcttatcttgctgatggctctgagtacaggtgcccttttaagcataaatgaattcacaatacacattgttttggttttgaatagattttcaagattctgtcgatgagggacttatagttgttcgatgttcttcttgcagtggtcactatggtgagaatgtaagtttggataaactaaaggactttcacaggagaagacttcaagtcttagtggaagctggtcctgatcttcttgcttttgaaaccataccgaataaactcgaagctcaggcttgcgttgagcttttggaggaagagaaagtgcaaatcccagcatggatctgcttcacatctgtagatggtgagaaagctccatcaggagagagctttgaggaatgtcttgaacctcttaacaaaagcaacaatatttacgcagttggtattaactgcgcacctcctcaattcatcgaaaatctgattcgcaaattggccaaggcaagtagtagttgaaaccttgccggattgtatggcaaagaaacataaaaaagacatactttctatgtcactttatgttttcagctgacgaagaaa

SEQ ID NO: 143110 - DNA, 1343 bp, Arabidopsis thaliana landsberg
cgcgattttctgtgtggatccaaaatgaagaagaaggtgtctcagcagaagttactgtacagatggaagaggaaggtatacgccacgttgatgttcgctttctgctttgggactttcgtatttatacaagctcgtttcgcatctatacaagctcgtttcaatcgaatctctgcgtctctcgattcgcttaaaaagcctcgtctagatcagagaccacagattgccttcctcttcattgcccggaatcgactccctctcgagtttgtctgggatgctttctttaaggtatatactcttctcttcctcctcctcctctaattgggatcagaaacactgactctcgtatttgagcttggtccataatgacatgtgcttctgcagggtgaggatggaaagttctcaatatatgttcattctagacctggatttgttctcaacgaggctacaacgcgatccaagtactttttggatcggcaacttaatgacagtatacaggttgctgctatgagaatgtatcaatttagatattagcagcattgttttttataagtcgtatgatttatttgctaattacaggtagattggggtgaatcaaccatgattgaagcagaacgtgtattgcttagacatgcacttagagattcatttaatcaccgctttgtttttctttctgataggtgagattgattctgttaataccttttcatgtttggattgtagttgatgacttgcttaacgaattttttagtttttttggtttcttctcatctgcatacctctgtacagtttcagctacacgtataactacatcatgtcaacaccaactagtttcgttgataggtccgtgctgcttatttacataactccatatttcaactttgacaccaaattactaaatatttttctgtattgcagctttgcagatacaaaagatagccgttataatcctagaatgaatcccattattcctgttcgtaactggagaaaaggatcacaggtgaagttccaaatcacttgttgtgtaaaatgtgtttctgaatgactacgaattctgtcattctgaatgtgtgcagttaagctgacaatattatctgctatgttttctttaccccattgtcttctctaagtgggtcgttctgaatagaaaacacgcagaaattgtggtgaatgatacctctgtctttcctatgtttcagcagcattgcagggtaagttgttaaaaccttcacttcattagcaagtttgttaatactgtaactgaacttatgagctgtcctctatagtgtgatactgtaaagagggatatatgctttttgttttaactcattaattttcaaaggaaa

SEQ ID NO: 143111 - DNA, 1842 bp, Arabidopsis thaliana landsberg
  unsure (1)..(1842): unsure at all n locations
atggttattaaaaggtatcggttttatgaattgtgggtatgagaaattatgagtaaactacatgctagttcaaccatcattactctaaatttgtgatttttttctgaaaattagattatgtgatgtgtagtgttggaatggaggtggtgatggtgtagcaactgcaaccatcatggttcttggtgatacttgtactcgtggctgtagattctgtgctgttaaaacaagtagaaatcctcctcctcctgacccaatggaaccagagaacactgccaaggccatagccagttgggggtatgtaacttttatttgattcctgatctgagtaatctgcttatattgtcctttagattctcttcatggtcgtgttcagaatttttaactagataggataaatggagaggggatgaaaattaaaaatagtgtctctcaacagtcactactgcatctttgttaatttatgatgggtgtatcatgatatgctattttgcattttcctttgttgcagtgtagactacatagttattaccagcgtagaccgtgacgatatacctgatggtggaagtggacattttgcgcagactgtcaaagctatgaaggttattaatattctatttgtttatgcattatgttatttaagcatacctttttgtgcatttctcgaatgttgtttcagagtatttatgaaaatgaaaatatatatctcatctctgtagagacataagccggatataatgatagaatgcttaacttctgattttcgtggggatttggaggctgtcgacactcttgtgcactcgggattggatgtttttgctcacaatgtcgagactgtgaaaaggctccagcgacttgtgagggatcctagggctgggtgagtgctgtttcttgttcttcatttttttatatgttctgcaaatttggttatggcatagatgggctgagcagtgaattgatcctctgctccgggatgtcaatctcatattacacagtcaaatatctcctaaagtgagacataggtggtgttctgcatctttagttgtagtaaatctccattttaatgtggatataatgtggagaatgcagatatgagcagagcatgtcagttttgaaacatgcaaagatcagcaaacctggaatgatcacaaagacatccataatgcttggtcttggagaaacagacgaagagttgaaggaagcaatggctgatctaagagctatagatgttgatattctaacacttggcnnnnnnnnnnnnnnnnnnnnntcacttcaacattccccacatcattcgcaatattcctatttccaagatagaaagatcccaaatttcaaagaacatctacgatttaaaaccgtttctcttgttccacaatgaagccaactccattgcatctgactgtgaaagagtatgtcacacctgagaagtttgatttctggaaaacatacggagaatcaataggatttcgttatgttgcaagtggtccactggtaaagccacaaactatttcttactctttatgtcaaaaaatatctgagaacatagaagatacagaaatgtacttgtttgatattggatatatactttttgcaggtaagatcttcatatagagcaggagagctttttgttaagacaatggtgaaagaaagctactctaaatccttgtcttaataacaacaatggctactataatgccaaaaatgattgctgagaccacaaagccttcttcctatcttttttgtttgtttcttttaatagacttcatttattttggtaattgatttggaaaccattgtggatatataaaagtttatatatactagttttgtgttattataaaa

SEQ ID NO: 143112 - DNA, 1893 bp, Arabidopsis thaliana landsberg
atgagtatctcctcagtcgctaagcgcttcgcgccagcaatcgctccgtacaaaaaatcccttccattgagaaattcgtctcgatttctcgaagaaactatccctcgtcgacttagtttacttctacaagcttgctctaacccaaatcttcttcgacaaggtaagcaagttcacgcctttctaatcgtaaacagcatttccggtgatagctataccgatgagaggatcttggggatgtatgcaatgtgtggtagcttttcagattgtggtaaaatgttttacagactagatttaaggcgtagtagcatcaggccatggaattcgattatcagcagttttgttcgaaatggtttgttgaatcaagctttggcattttacttcaagatgctctgttttggagttagtcctgatgtatctacgtttccttgtctcgttaaagcttgtgttgctttgaagaattttaaagggattgactttctttctgatacggtttcttctcttgggatggattgtaatgagtttgtggcgagttctttgatcaaagcttatcttgagtatggaaagatcgatgtgccgagtaaattgtttgatagagttcttcagaaagattgtgttatatggaatgtaatgcttaatgggtatgcaaagtgtggagctttggatagtgttataaaagggtttagtgtaatgaggatggatcagattagtcctaatgctgtcacctttgattgcgttttatcggtgtgtgcatctaagttgttgattgatctcggagttcagcttcatggtctagtggttgtttctggggttgattttgaaggctctatcaaaaactcacttttatctatgtattcaaaatgtggtcgttttgatgatgcgtctaagttgtttcggatgatgtctcgtgctgatactgtgacgtggaattgcatgatatctggatatgttcagagtggattaatggaagaaagcttaacctttttctatgagatgatttcttcaggtgtcttgcctgatgctatcacattttctagtttgcttccatcagtttctaagtttgaaaaccttgagtattgtaagcaaattcattgctatattatgagacatagcatatcgttggatatcttcttaactagtgctcttattgatgcctattttaagtgtaggggtgtttctatggcacaaaatattttcagtcagtgtaactcagttgatgttgtagtgttcacggccatgatctctggttatttgcatacatcgcttatacattgattctctggagatgtttaggtggcttgttaaggtaaaaatcagtccaaatgagataactctggtgtctattttacctgtaattggtattttgttggcattgaaactcgggagggaacttcatggtttcatcatcaagaaaggtttcgataataggtgcaatattggatgtgctgttatcgacatgtatgctaagtgtgggagaatgaatcttgcttatgagatttttgagagactctccaagagggatattgtttcgtggaattcaatgatcacacgttgtgcccagagcgataatcctagtgcggctattgatattttccgtcaaatgggagtttcaggaatctgtaatgatggtgttagtattccagctgctctctctgctggtgcaaactaaccttcagaaagttttggcaaagcaattcacggttccatgataaagcattcactggcttcggatgtatatagtgaaagccatggatagacatgtatgctaagtgtggatcctgaaaactgccatgaatgtgtttaagcgatgaaagaaagacattgttcatggaaagcacattgctcatgtggaccacgggaactaaagatcctctgtttatcatgaatggtgaaaac

SEQ ID NO: 143113 - DNA, 1395 bp, Arabidopsis thaliana landsberg; identical to SEQ ID NO: 38147

SEQ ID NO: 143114 - DNA, 2117 bp, Arabidopsis thaliana landsberg
gtcaaaattggagattaggattgagttagggcttattagagatttgagaatttctcctcaaggaaggaactttgcaactcaactgtgttggaaaggtaggaactttcagacagaacaaaaggagattgtggatcaaatactcgtagagatttgggtttgttcaaggtttttatagaaatcctcaggaagatttcttggtgccacatccgaaaaatcctgttcttatgaccttatatgttttgattatggaactctgttttctttagtagaaattgttcctttagacaggcctttgctatattctcttttgatagggttgtcttgtttaatgtctctggctctgctttatcttgactctgaatctgttgaatctgtctttacctattttgatgtgtgctttgatttgttttagcggttcttgacctgatatgtaacattgtgcagggatcatatggaatgacacatcagcaagctctagctcaagtcactgctcaagcagttcaagccaatgccaatatgcaaccacaaacagagtaccctcctccctctcaagttcaatcattttcatcgggtcaagcgcagatcccgacctcggctccactaccagctcaaagagaaacctcagatgtaaccatcatagagcacaggtcacaacagcctctaaatgttgacaaaccagctgatgatggctataactggcgaaaatatgggcaaaagcaagttaaaggtagcgagtttccacgaagctattacaagtgtactaatccaggatgtcctgtcaagaagaaggttgagagatctcttgatggacaagtaacggagattatctacaaaggtcagcacaatcatgaacctcctcaaaacactaagcgaggtaacaaagataacaccgcgaatataaatgggagttcgataaataacaatcgcgggagttctgaattgggggcatcacagtttcaaactaatagctccaacaagactaagagagagcaacatgaagcagtaagtcaagctacgacaacagagcacttgtctgaggcaagtgacggtgaagaagttggtaatggagaaactgatgtgagagagaaagatgagaatgagcctgatcccaagagaaggtaaagttataagctctgttgatggttgatgataatccatatttttcgttttttttgatcagagagatgtttgaatgtgcagaagtacagaagttcggatttcagaaccagctcctgctgcttcacatagaactgtgacagagcctagaattattgtccaaacgacgagtgaagttgatcttctagatgatggatataggtggcgtaaatatggacagaaagttgtcaaagggaatccttatccgaggtaaaacacgttacaacattggttggtctagctattacactctttgaatggcggattctagtgatcgatatatttttatgtattgaaacattcttgtttaatgttctctcttgatccttaggagctactacaagtgcacaacaccaggatgtggtgtgaggaaacatgtagagagagcagcaacagatccaaaagctgtagtaacaacatatgaaggaaaacataaccatgaccttcccgctgttaaatcaagcagccatgccgctgcagcggcacagttaaggccagataatcgacctggcggtttggctaacttaaatcaacagcagcagcaacagcccgttgcgcggttaaggcttaaagaagagcaaacaacttgagagaagaaaactcttgaccgtttttcattacaaaagctttcaaattccactcacacacttgtctgaaaaatctagcagtttgcaggaaagaaacagcttcaagaggttgtaattcttctatgttctggtgtaaaacttaaaagctttttagggttttcagatttctgtttactaatactgtatgtgaattcttttgtacatgaggaagaaaattacagggggatattttgtgttgtatcttttgtgttattgtttcagtaaaagataggtcttacattttgtgtatgaaaatgaaagtatttgttgtaatatcaaactttttcttttgtttattatcacactattataatacataatggcctatgacccaaa

SEQ ID NO: 143115 - DNA, 1129 bp, Arabidopsis thaliana landsberg
taaacgatcagatgagaagggtcgttggacaaggatgcgagttgctaaagttttccttgtgatttgtccgttttggtttttggcgcagcttacatttaatgtctctctcaagtacacaacagttacggtaagaacatattggacacccatcatcttgttgcttattctgaatctactaaatgttttgctgaagtttttttttcatttttgtgtgtttgcagtcaaataccatattaagcagtgcatcaagccttttcacctttcttgtttcactaatattcttgggtgagaagttcacatggttgaaactcttcagcgttcttctttgtatgtctgggactataattgtaagtatgggtgactcagagtccaagtcaaatgcagtagctaagaaccctcttttgggagatattctttcgctggtctcagcggcgctgtatgctgtctacatcactcttatacgcaaaaagcttccggatgatgatgaaagaaacggccgggtcagtatggctcagttcctcgggtttcttggtctcttcaatttcttcattttccttcctcctgctctaatactcaacttcacaaagcgagaacgcttcaacgcacttaccttgaaacaatttggcctagttgttggcaaaggtatgcaaacaccatcccttatttccgctattgtctccttgaagctattggtcaataaatcacattttctcatatcaatgggaattgatggcacaagtagtaaattaggattgatgtaggaatgccgatttgaaagactaatgtgtgtttcatcacaactgcaggtttgttagataatgtgcttagtgactatctgtgggcaaaggcagtactattgacaacaaccactgtagctacagctgggctaactattcaggtcccattggcagccattgtagacagcttatcagggaacaaaccaagcttcaccgactacattggtgctgcagctgttatggttggctttgcagggattaatattccctcagagatgttttgcaaatccaaagagactgctattgagttagaacctgggacttcgttcacagatcctcctccgattgtgccagatagcataagagtagattcttcactgactgtagtataa

SEQ ID NO: 143116 - DNA, 3484 bp, Arabidopsis thaliana landsberg
ctgtcctcaaaccagtggactccaagtaaagcttttgaattctttgtcataatcttggtctagttatgatttctgtggttttggattgttaatatgatgcttctttcttttgcagattcagttgaatttctttgatccagggagctctgtaacagcatcaccgatttcatgttctgatcaaagatgcagttggggtattcagtcttctgattcaggctgttctgttcagaacaacctttgtgcttacacgtttcagtatggggatggaagtggcacttcagggttctacgtatctgatgtcttgcaatttgatatgattgtgggaagctctctggtcccaaactcaacggctccggttgtgtttgggtgagtttatttcagcgaatcctttgtttcatagtcatcaatatgggccattactcttgactttgttggttgctatgtgggattgtttttctggaaccagttgcagcacctctcagacgggagatttagtgaagtctgatagagcggttgatggaatcttcgggtttgggcagcaaggaatgtctgtcatttctcagcttgcttcacagggaatagctccaagagtgttctctcactgcttgaaaggagagaatggaggcggaggcatattggttcttggagagattgtggagccaaacatggtctttactccacttgttccctcacagtgagtgttcatttatccctcgaaaccgtttcattttaaatagttgttcaaatgttcattagagagtgactgataagcatgatcttatttaaatagttgctcaaatgttcattagagattgactgataagcatgatcttatggcgtgttaaaatgtcaggcctcattacaatgtgaatctgctgagcatctcagtaaatggccaagctttacctatcaatccatcggtcttctctacatcaaacggccagggaacaatcattgacactggtacaacattggcatacctttctgaagcagcctatgttcctttcgttgaagctgtaagtcatcagagctcacgttgctatatgcttttgatatcaccgaaccatctgtgaaatggagttactataactgtactccattgacttgatactctgcaatcttcgttcaatacttaaatgttatctgtcttatggaatttttcagattacaaatgctgtttcgcagtctgtcagacccgttgtttcgaaagggaaccaatgttacgtaataaccacaaggtctatcctctgaccacatcttcttatcccaagcatgtcttcttaattggtaaacatttgaacttttttattgtactgtgatgatcagtgtcggagacatatttcctccagttagcttgaactttgctggtggagcatctatgttcttgaatcctcaggattacctcatacagcagaacaatgtcgtaagcactttaactcgcaaccttttcataggaacctggtttcagaatctgaacctaccttgacctgaaacagtgagttttttttctttctgttcctggtataacattggcctctgcactctgttttctagggaggtactgcagtgtggtgcatcggttttcaaaggatacagaatcaagggataacgatccttggaggtaacccgaatcgaaagctgaagcctttgttatttgaaatctacatttggtaacacaaaacatctgtttttgtcatctttttttcttctgcagatttggttcttaaagacaagatctttgtctatgatctggtcggtcagagaatcggatgggcaaactacgactgtaaatctcatctctttaactcaaatgacaccctaaagcaatgaaatcttaccacacttaaaaaattcttaaccttttttatctttcttcaggttcgacgtcggtaaatgtctcagcgactagcagcagcggaagaagcgaatatgtgaacgcaggacagtttagtgagaatgctgcagcaccgcagaagttatctttggacattgttggaaacactctaatgttgttactaatggtaatcaacatgttcttatagcacacagcttttcacaactttgcctaaattgtagtttcttcgatacccttttgatgtggtcgtcggcgtgttaatttgtggtcaccggcgagtaagtttctcccaaccggcgaatcccagcaaaagaaaaattaacttgtttgttgtttgtttgtatgtttttttattcctatttcattgttgtagtttttgatgtacataattccttttatacatagttgtgtctatgtgtgtgtattgttctcctgatcaagttttttagtggaaattctgcaaagttaaaaacgaaatcatactatctcacaattctattttgttcatcatacttcccgacactcttacttagacagagtcaacgaaagccctattttttttatctgacacaacactaactcgggttcataatttatctgttattaatgttatgctcaaattaggtaatttatcaattaatctctttttttatttggtcgtcttctaaaaatctccaactttcttctcttccatagaacctcaaatttctagggttttaggggtttttcctgaattgaatttcccagatcgagattcgctgtttctcgattgggggtacttttcaactattccggcgatggcggatgagaagaacggtggacgtctgagtgacgctagtgactactcatcagaggacgaaggaacagaagattacagaagaggaggttaccatacggttcgagtcggtgatacttttaagaatggatcttatgtcattcaaagtaagcttggttggggacatttctccactgtctggctcgcttgggacactctcaactctgtaagtcactactttcacttctatgcttcgtttctcagagaatcaattttagggtttttagatagtagggaaaaggaactggcttgagctagggtttaggcagtatatattgaattgcattgttgtgattgaactagctttgttagagaatgagcaagttcttgtagttagagaattgaatcttgcctttgaattcatttgtttgtagcgatacgtagctttgaaaatccagaagagtgctcagcactacactgaagcggccatggatgagataaagatattgaaacagattgcagaaggcgatgcggaagataagaagtgtgttgtgaagcttcttgatcatttcaagcatgctggtcctaatgggcaacatgtttgtatggtttttgagtatttgggagataacctcttgtcggttatcaagtacagtgattaccgaggggttcctcttcatatggttaaagagatctgttttcatatcttagttggtttggattatcttcatcgtgaactttctattattcatactgatatcaagccggagaatattctgctttgttccactattgaccctgaagcagatgctcggaaatcggggattcctcttgttcttccaactgtgaaggac

SEQ ID NO: 143117 - DNA, 831 bp, Arabidopsis thaliana landsberg
atgaatgttacgcttacgtcatattgtgaaaaagagaaaggtacaaaatgggcaaaaatagtcaacaaagaacagcttctccgactttcgtagcctttaaaaaagcatccgcgtttgcttttctataaatatcttcgaaaccccattactctcaaatccaaccaacctttcaaaacagaacacgaagacatggaccgaacacaatctccaaagacagctctgttcgccgtgttggcaacactccttgtcttaaccgtgaacggccagtcactttgtaagacacacaggttcaccaataacctcgccttcgcagattgctctgacctctcggccttaggctctttccttcactggacctacaatgaacaaaacggtaccgtctcaatcgcctatcgccaccctggaacctctgcttcttcttgggttgcttggggacttaacccaagtagtactcagatggttgggacgcaagctctcgtagccttcacaaacacaacaactaaccaattccaggcctatacctcttccgtgagttcctatggtacgcggctcgaacgtagtagcctaagtttcggtgtgagtggcctctccgcgactctggtcagtggcgaggttacgatctttgcaactcttgagttgtctccgaatctgatcacggccaaccagctttggcaggtgggacctgttgtcaacggtgttcctgcgagtcatcaaacctcaggagataatatgagatcgagtggtaggattgatttccggactggtcaggcatcagctggtggtggtggttccggtgacaggctgaggaagagaaacgtaagtccaagtctt

SEQ ID NO: 143118 - DNA, 1956 bp, Arabidopsis thaliana landsberg
  unsure (1)..(1956): unsure at all n locations
tttcatttcaactccaattttgattatctgggtttcgaatattcctcattttctccaatcacaggacgaaaagtaatcatctttttgtcttttcttctccggcgagagactacaatggactctnnnnnnnnnnnnnnnnnnnnatcgaaagagaaattcgtggcttcacgaccatcaacggctgattcaaagacgatgagaggttgtggactcgcgaatctggcatgggttggtgtagataaagtagagcttcgtcagaggttgatgatgcctgagtatcttcgtctcgctatgcgtgactgtatcaaacgcaaagattcctcggctattcctgatcatttacttcttcctggtggtgctgttgctgatatggctcctcatgctcctatggttgttttcattaaccccaattctggtggtcgtcatggtcctgttcttaaagagaggcttcaacagttgatgagcgaggaacaggttttgctctcactgaacttgtattacaaatctttttctttgggtttttgggggaatttcgaatctaatttgtatctactttgtgttttgattatgttagtttggaaactttcttaaagtctctggcttttaagtttttaatgcttgacttatatgtttatgcttaactgatgttagatctagtgttttgttggaactttgaaggatgagttacgtttaaagattgagtcttttggaaagctgagtgatgttgatgttgtcaagttattggtttgagcttttgatattgaaacttcatggtgacttttgtgttgatacaggtgtttgacctcacggaagtgaagccgcatgagtttgttcgatacgggttggggtgtttggagaaagtggcagcggaaggagatgaatgtgcaaaagaatgcagagcaaggttgaggattatggtgagtgtattgaccatatttttctccaatctctatagatccacttgaatgtttttagcaatcagaattgtgaatggaattggttggataggttgcaggaggtgatggtactgttggttgggttcttggatgtcttggagagcttaataaagatggaaagtcgcaaattcctcctgttggagttattcctctcggtacagggaatgatctttcaaggagttttggttgggtgagttgtgttttctttgttctctcttatgttgtcgtgacaaaacttttgaattggtactgactatggtatctcttcttcagggtggttcgtttccttttgcgtggagatctgctgttaaaagaacactccatcgcgcaagtatgggtccagttgctagacttgacaggtaaaagtcttattttgctcaaaacatttagcttttattgtatttctcttgttgtaaaaatgtatgcgctttggttatgtggtgttgcagctggaagattttagtgtcaatgccatctggagaagtcgtagatcctccttattctttaaaacccgctgaagaaaacgaacttgatcaggttttgctctatttcattaggcttgcttcttctcattgaatcatcagcatgtgattttgtaaattgccacggtttagtaattaaccaggctttatggtggtttcagggtttggacgcgggaattgatgcgcctccacttgcaaaggcttatgaaggtgttttctacaattacttaagcataggtttgttgaacttctctttttgatatcctaaacaattttcacaattgtttttctgaccagattcttgtgtttgtctggtttgtttaggtatggatgctcaagttgcatatggcttccaccatcttcgcaacattaaaccatatcttgctcaaggccctatttcaaataaggtttgtttattatatttgcacctaaactttggactcataattagtctttgttaaaagctaaagtagttatgttggttttgagaaacgacattacctaccacacaatgtttg

SEQ ID NO: 143119 - DNA, 3471 bp, Arabidopsis thaliana landsberg
  unsure (1)..(3471): unsure at all n locations
ggaagggttttgatctccttgagcaaatcggagattctttctacagttgtgcgaacgttcttataataagtttttagttgatcgatctccgatttagtgaactaggcgtcatcttaagaaccctaatttgttttctccggttgtgaaaacttctgttgttcgtcgtcgaaggtcagttcgtgattctgagtttgtacaccttttcgtttcctctgttggcactcgaattttccaggaagtgaaactagaatttgattctgcgtagtattgaacattaagataatgtctggaagaaatcgtggacctcctcctccatcaatgaaaggtggatcttacagtggtttacaagctccggttcatcaaccgcctttcgttagaggcttaggaggaggaccagtgcctcctcctcctcatccttctatgattgatgatagtagagaacctcaatttagagtagatgcaagaggtcttcctccacaattttcgattctggaggatcgtctcgctgctcagaatcaagatgttcagggcttactcgctgataaccagagactggctgcgactcatgttgcgcttaaacaggagttagaagttgctcagcatgaattgcaaagaataatgcattacattgattccttgagagctgaggaagagattatgatgagggagatgtatgataaatctatgcgatccgaaatggaattgcgtgaagtcgatgctatgcgagctgagattcaaaagatccgtgcggatatcaaagagtttacttcaggtagacaggaactaacgagtcaggttcacctgatgactcaagatttagctagacttacagcagatttgcagcagataccaacgttaactgcagaaattgagaacacaaagcaagagctgcaacgcgcaaggttttgaccagtctcttttttaagatttgcctttgttcatattgatgataatgtgtatgttaagctgtgatttctgttttgtagagcggctattgattatgagaagaaagggtacgcggaaaactacgagcatggcaaaattatggagcataaattagttgcaatggctcgggaactggagaagcttcgagcagagattgctaactcagaaacgagtgcttatgctaatggtcctgttgggaatcctggtatgataaacttgaataagtgtaaacctttataagcagtcaccacaatgcctattaaatgcacaagtagaaaggaaaactaataactagcaatagacagtcgatcaacagttgaatgcatatagcaatgttaatcaaaaaacatggttttgatcaggtggagttgcttatggtggtggatatggaaatcctgaggctgggtatcctgtgaatccttatcaacccaactataccatgaatccagtaagttataaaattttgactttttatatttttttacattgcgtgtgcatagtagatgatatgtctgaacgcaccataattctctctacacagtttcacactttgtttgaactttgaatttaaaccgaatttcagtagccaatagtacagcctaaagttcgaacaagtcaatctgatgtaaaacggaactggcttaatcgatttattagaccaatctaagtcaacaatgtgagctgatgtcgatgaaacctgtgacagaatatgtaactgaacaacatctatcttcatatatctcctattcttgtagttttaggtgcatacattcatacacatgtaaagtaatgtgctgatatgataacaatgctggttcaggcacaaacaggcgttgttggctattatcctcctccttacggaccacaggctgcgtgggctggtggctactatccgcaacagcaacagcagcagcagccgccaccacaaggacaaggacatcgatgaaaaagtcaagattcaaagtcaaagtcgcccatttttcaagcgactctcatgaaattgaagcagcctcccttttgtatactctgatagtctctgatagattgtgaacaaagccaacatattaaagtgttgttaagtaagaaacttggaaaccacagtttttttaatttaaataagcccattaacatcttcaatggaccgaataaaggcccataagagaccacctccctcgctctttttaacaattggcgggtaaaattctaaaattttagtttcagttgatgaaccaaaaacagaagaagaagaaaattancgaaattttaaaatcggaacaaatttcagaaatttggcgcacaaagnagtccattggcgggtaaatatcaatttctcatgcctttaatttctccgagatctacgactgttccattcacacaaacccagagatctgaaactaagaagccatggatgctcaatatcaagatctacctcctctcaaaagattaagactgttgcagagagatctcgaagctgctcaacagcaccagctaccgaaccaaccggagatgaagtcgttgcagttgccggcaaagaagaggaagcagactcgtgttgattatgacgatgacgacgcagagaactccaatcccacctatcattgtcttccggcgaagaaaaggatctgggcgattgatcccgatcttctctccggtggtggtaaccccttttcgccttttgatctaaatgtagagtataagccttatgttgaagagaaatcaattgagaaaaagtcaactctaaatgttgaatctagtctagaggtagaagaagatgatgataaagagaatatagatcctctagggaaaggaaaagctttagatctctctgatagagaagtagaagatgaagatgggattatgtgtgctgtatgtcaaagtacagatggtgatccattgaatccaattgtgttctgtgatggttgtgatttgatggttcatgcttcttgctatgggaatcctcttgttaaggctattccagaaggtgattggttttgtagacagtgtttatcgtcgaagaaccgagaaaagatcttctcttgctgcttgtgtacaactaaaggcggggcgatgaaacctacgaatgatggtagatgggctcatattacttgtgcgttgtttgttccggaagtttactttgaggatcatgaaggaagagaagggatttgttgtagtgaggtattgagtaagagatggaaagataggtgttatttgtgtaaggttagacgcggttgtgttattgagtgttcggagatgagatgtaagttggcttttcatgttacttgtgggttaaaggaagatctttgtattgagtatcgtgaagggaagaagagtggtggtattgttgttggtttctgtaatgagcataccaaactttgggaaagggtaagatttgtatccaactttcttctgatctgtgtagttgtggatgttttgtatagggctcaatttttgatggtaacttttttttgtcagcaacaggaaagtggaaagtacaagattgttgccagagaagaagataaaaagtag

SEQ ID NO: 143120 - DNA, 1104 bp, Arabidopsis thaliana landsberg; identical to SEQ ID NO: 11247

SEQ ID NO: 143121 - DNA, 2690 bp, Arabidopsis thaliana landsberg
aagggtcaaacagaagctggaaccaacagggacgcagggttcaggcaatgagttccacagcccaacggaaattttcgctatcgaaaggcgactccgatgacaaaaatgaacctgatcatcttcttgttcttgtacatggtattttggccaggtattatttctaagtagttcatcaattgaatggtactgggtttgcatcttgggaaaccctcatggttttgttttaggttggatagaaacttgcaagtatttgaatttgaaagttatgtctatgattgtcaaaaaaaagaaagaaagttatgtctatcatttctgctactttgttttcagattgaataatttatagactccaaatttactaagacacaattacttgcagtcccagcgactggctctacgtagaagctgagctgaaaagacgccttggaagaagattcttgatttatggtatgctcatcttgttctaaattgttatcatctattagtttagttgagtagttgttggattgtatgtataatagaagagaatttttgggaatgaaatggtaacgtaagttgaatgcatgtgctgggcacaaaattgaaaacacttcaaggtcttatataatctttagcggcaagaggcgaaatatacattttcttgaaaaatttaagatcttttcgtctggaaccacaactcttctttagttttgtattttattataatactcatgtgcttttatgctatgcgtggaatggatcacacgtgatgtgttttaatttactctgtttctcctgaacattcacagcaagttcttccaataccttcactaaaacatttggcgggatcgatggagctggaaaacgactagcagaagaggtgagttttaatatcttcatttgcacctcgtgtataggtaggtcttggttttctagcccttaacttcagtacatgagctgatttctgttcccattctggatgtgagagaggaataggttagacaagttgtccaaaagagcaagagcttaaagaagatttcgtttttagcccactccctcggtggcttattttccagacatgctgttgctgttctttactcagcagcaatggcacaagtaagtgatgttgctgtctctcaatctggcaattcaaatcttctgcgaggtaggattgcggggctagaaccgattaatttcatcactttggcaacacctcatctaggagtgagaggcagaaagcaggttctcttcttctctacttatcataattggaattttggaatcaaagagtttcatatatatctcgcagtacctgtacgtagatgtggtgtatgcgtaattaagaaagtagttagtcgtttttcacatgtaaatttcatctaccttctccttgtgttcagacagatatcataagtttcatcaaaactgtcttgcgttttttgctatttggtcccctaagtgtctagactgatgagtgatgaatattaattgataatccctgtaaattctatctcattctctcctctttttctggaaccccttgtatcagctgccttttctgttgggagttcctattcttgagaaacttgctgcaccaatagctccattctttgttggtcggactggtagtcagttgttcctcactgatggtaaagctgataaaccacctcttcttttgaggatggcatctgatggtgaagatctgaaattcttgtgagtaatgctcttaccaatttaaatcattcgaccccttaatgacttatctgtaatcctaatgcatttcattgtctggcagatcggcgctgggggcatttcgaagtcgcattatatatgcaaacgtttcttatgaccgtatcctgtgcatttctgttgctgtttaactagtacagatgtgcctagctgtgtctgcatttgttttctgaactgtttcctttgacatcaagtagacatggttggttggcgtacatcttccattaggagagaaactgaacttatcaaggtacgtttcatgctatatgaagcaatggaacctttctatttaatattaccccacttgttttcatgttccttctattatgtaagttgatttcgactctgaaacgtgtagcacacactagctagatgatggggtcatcgatattgatagttagcttgctgtgaaatgctaacggtagctaacttatcctgaattttggaattatgagtaatcatagagggaaagtttcatagaggtaaagagtctaagaaatgaaacaattgtctgtagagaatcaccaaaaatactttcggcaattcatttatctcaagtagcttcgtgcaagaagctctctgtggcttgtaaccagtcaaatgaaactttgaaaattatttagctgtcacgagtgagatctgatagatatgtttttcccctgttttaatatagccttcacgccggtctctggatggatacaagcatgttgttgatgttgaatactgtccacctgtttcatcagatggtgcccatttccctccagaagctgctaaagccaaggaggccgcacaaagctctcctagccctcagaacacacttgagtatcatgaaattgtggaaggtgtagaattagcccaaacatttgattgattcttctaaatcggcatgagatttacaatttatacaaatattggtgcagaggaaatgatccgcggtctgcagaggttggggtggaagaaag

SEQ ID NO: 143122 - DNA, 1424 bp, Arabidopsis thaliana landsberg
ggaatggtgcttttatggctaactgcaatgttaccacaagtgaagccatcgccttgcgatcccacagcagccggaagccactgtgggtcttcaactgcgtctcagctggctcttttgtattctgcatttgcccttatatcgatcgggtcaggcgggatcagaccatgttccttagcatttggagctgatcaactagacaacaaagagaacccaaaaaatgaaagagttctcgagagtttctttggttggtactacgcttcctcagctgtggcggttctcatcgcgttcacgggtattgtatacattcaggagcatctcgggtggaaaatcgggtttggggtacctgcggtcctcatgttgatcgctgctttgctattcattcttgcgtctcctctctatgttacacgtggtgtgaccaagagtctcttcaccggtttagctcaagcgattgttgcagcttacaagaagaggaagctaagtctaccagatcatcatgactcctttgattgttattatcacatgaaagattctgaaatcaaagctccaagtcaaaagttgaggtaaaactactatatatacatgtacttcttaagtctcctgagttttgattactttacaagcaagaaagaccatacgctcttgattaggtttattgaagaaagcttgctatacaagaaacatgatcaatgcatttttctcacttttgatatttactatcataggttttgaaaaattcttgttacaagagaaatataatgctctctctttacttggataatatatcttgatcaggttttttgaacaaaccctgtgatattgtcctgtttatattttgattctctcttgattaagttcttaaacgaagctttgttaattgttatacaagagacatgatagattttaattttctcttggttaggtttttgaataaagcttgtttaataagtaaccgtgaggaggagattgggtcagatgggtttgctttgaatccatggaggctatgtacaacagacaaagtagaggagcttaaggcattgatcaaagtcataccgatatggaccacaggtataatgatgtccataaacactagccaaagttcgtttcagttactgcaagcgacttccatggacaggcgtgtgagccgccatggttcaagctttcaagttccagctggatcattcggtatgttcacaatcatagctctagccctatgggtcattctatatgaccgtgcggttatcccattagcttccaagatccgaggcagaccttttagacttagcgttaagctaagaatgggattaggattattcatgtcattcttagcaatggcaatttccgcaatggttgaaagcttcagaaggaaaaaagctataagccaaggatatgcaaacaattcaaatgctgtggtagacatctcagca

SEQ ID NO: 143123 - DNA, 1978 bp, Arabidopsis thaliana landsberg
tgtttctatactctccactaatactaacatttttccagaaattttgttaataccctacaaaaatttgaactttttaaaaccctagaaatttccaaattcgtaaaaccctagccaagttcctctattgcgtgaggggaactcatcagaacccacgaatcgaaatgaagaacccagaaaaacccttacttctgtttctaattttagcttcaagcttagtatcaatggcgactgcaaaatccacaatagagccttgctccagtaaagacacttgtaactcattgctaggctacactctctacaccgacctcaaagtcacagaagtcgcttctctcttccaagtagacccagtttcaatgcttctgtctaactccattgatatctcttacccagacgtcgagaaccatgtccttcccgctaagctcttcctcaagatcccaatcacttgctcctgtgtcgacggaatcagaaaatccctctcgactcattacaagactcgtacttctgatacactaggatcgattgctgactctgtttacggtggtctggtctctccggagcagattcaggtcgcgaattcagagactgacctttcggttctcgatgtaggtacaaagcttgtgattccattgccttgcgcttgcttcaatggtaccgatgaatctcttccggcgctttatctatcttacgttgtgagaggaatcgacactatggctggaatcgcaaagagattctcgacctctgttactgatttaacaaacgtgaatgctatgggagctcctgatatcaatcctggtgatatcctcgctgtcccattgctaggtaagatccaaagtctctcttctttatttagttagaagagttctaaagtttcaatctttgaatagaaatttgccaattaagcacagattataacagattattgaatgttctgtctatttgtatcaaaacttctcagcttgtagttcaaatttccccaaatacgctacggattacggattaatcattccaaatggaagctatgctctcactgcaggccactgtgtacaatgcagctgtgttctcggaagccgaaggtattaagcgattgagttttgttagtcgaattttggatgatttgctgatatttagcattggtgtgatgcagtatgtattgtgagcctgcttctatatcagtctcttgttccagtatgagatgtagaaacagcaacttcatgcttggtaacattacttcgcagcagagtagctccggttgtaaacttactacttgtagttacaacggtttcgctagcggcactatcttgaccacgtaatgagtctttccttatcacatttcccctgctaatgaatttaacaacctatataaccaatctccctccgtctctctttgtttgtttttcaggttgtccatgtctcttcaacctcgatgccctggtaagtatactgtctcatgcgttatgataaaacacaatgagtgaaatcttgatctccaactgaaatgcaattggtaaaaacaatttgcaggaccgcaacaattagcaccgcttatagccccgcctgataatgttccaaaggaactaatgtatctaccttcaccttcaccttcaccttcgccatcaccagagtttgatgatattgctggtggaggatcatctatagccgcagtccccgcggcttcacctggaggagctacggtttcttcaagcaattcaatcccgggtaatccagctaatggtccaggcggaagtatttctatagcttcttgtccattgagctattactcattcattgcgttactaatccccattggttcttgcttttttgttttctaagtttgaatgcaagacaatctcatgaacactgctagtactttggtttgtcattgttaaatttgtattgaatgcctggccggttgacggttttttccggtttaaaattgtccggttcacagtcttgcaagtctgggcaaccaaacccaatt

SEQ ID NO: 143124 - DNA, 1247 bp, Arabidopsis thaliana landsberg
gagatgacatatggaggtgaattatacaaaggttgctgcaacgataacattccccttaattcagtttttgtgtcagaaacaagcaccaacaaggtacattgcaactcggttacaagcactcagtggacttttggccaagactaatttttttttttttttctctctctctaaaatgttatggatacgaatcctttgttgaataaaggaaaaagttaaacatttgattacacataagactttacataatccaactctttttttatatgaagctacaaagaagatttaaaaaatcaaagattccacctaaacttcattcatcttcaatcttcaacatccttcaatgactagtatgtatgtacataagtaaaattgttgataagaaaacaaaacaatgatgggctaaaacagcccataaaaggcccattaaacttgggtttagactttagattcaacgacgccagattagtgagtcacataaccctcttggaaagagtctcaacacttgcagagaaaaagaacaaggaagatcccggaaaatggcaacggcgattgtacgttcagctctttcccgagcagcgactcgcgcagctccgaagacatccgtcgctcctaagcgaaacttttcctcttctttcggttatgacgatgcttgtaatttctctggtgtctgtttttaccattttccattgacgacgatctaggttttctgatttgattttggagaacgcctcgatgagtttatagattcgtagattggttttgagattcagtataatttcacccggattccaatttttgaaccgatacctaattttgaattgatttggtagatcgattggtcaaatttgaaattgatttttctccataatatctgaagcgtcttattggatcaaatctacaacatttctctgttgaaaggatcgattttttttttcttggaacatgataacttttgattattcatcaaagttttgttctttttaatatttcacagatgaagctgcgaagtgggagaagataacttatctgggtattgctagttgcactgctctagctgtctatgttttatccaagggccatcatcacggcgaagaccctcctgtaagcttctcttacaactcctccattggtttagtattataacttctgatttggaatctcacctagtgtgagacaatgttaatatcaccagtgaaaacggatagaagtatgcagatgatgagaatgttacgaaagctacatttttt

SEQ ID NO: 143125 - DNA, 781 bp, Arabidopsis thaliana landsberg
caaataaacattaaacccaaatgatatattttggtagatcaatcgacaatcattatacaacaatgatgacaaaaacattggagattgatttgagatcagcagaagggcttaagctaaaccggagacccatcaagaaaaagactttcgccgtcgtaaaaatcgacgagaaatgtcgaaaatctaatcttgacgaatcgagaagaagcaatcctacatggaactataaatcagagatgcccatcaatggtaatgaacagtttatcttcattgaggtattttatcgaacaggttctgggcatgataaaaaaatcggagaagctaaaatcccaacgaatgatttcatgggaaggtattcacctgaaggtcacttaaacttcttgagctatagattgagagatgagtttggtgataagtgtgggatcgtcaatctttcgattttggttaaatcggatccgactagggattacggcgcgtgttcgtcgcaagcggcggttactggtttgtggaggccgagattagagacggcatcgattgatggatacggtggccggactgttaccggagttccggtttggggtctgtatcaacgccaattttagtaacttttttttttgggggatgcacatattattaattcttcgtctttgttccatagattttcccaatttggaattgaggaacaaagatgtgtgattaatttttgttataatactcacgaaaccaaaattgaaaatagaaaagtcaaatttgttcgacgatgatatctaagaacttgttgtta

SEQ ID NO: 143126 - DNA, 445 bp, Arabidopsis thaliana landsberg
aagctcaagaactttctcatagcaacagaatgtatccttatgtccttgggccgagaatttacatataggctaaattgatggctgcagatggagctcaacatatagcaagtgctcaacatatatagcaagtgctgagtttacaaagtgaaaaaactcaaaatctagtacaaaggaaagtaaattccctgcagacaatttgcatctcactgtgtgagcagcaaggaatcacatgccactatcttcacccggctcacattctcttgacgatcgccactcttgaacattgcgtcctgaaatatgaaggtccagacattgtcacagaaacctgtaagtgtgcaggtgtccctgaaataataaataagaaacgatagtcagaatctgattgttttatctgccaaagttttctcttatttctgagatccagatttgacttaaaaaaaaaaaa

SEQ ID NO: 143127 - DNA, 1208 bp, Arabidopsis thaliana landsberg
ctttagacactcgccgtctccattttctctctctccgtagaaaaccaatcccattcgtcaaatctcctgtggtctccggcgcagcttccgggtcgggtcaatactttgtggatcttcgtatcggacaaccgcctcaatcgttacttctgatcgccgacacaggaagcgatctcgtttgggttaaatgttcagcttgccggaactgttctcatcattctccggccaccgtcttcttccctcgccactcctcaacattctctcccgcccattgctacgacccggtttgtcgtttagtacctaaaccggatcgagctccgatatgtaaccatacccggatccattccacgtgtcattacgagtatggttacgctgacggttcattaacttccggtttattcgctagagaaacgacgtcgttgaaaacaagctctggtaaagaagccaggttaaaaagcgttgcttttggatgcgggtttcggatctcgggtcaatccgtatcaggtacgagtttcaatggagccaatggagtaatgggcttgggccgtgggcctatttcttttgcttctcagttgggccgtcgttttggtaacaagttttcttattgcttaatggattacacactctctccgccgccgacgagttatctcatcatcggtaacggcggcgacggcgtttcaaagcttttcttcactccgttgctcacgaatccgttatcgccaactttttactacgttaaattaaaatctgttttcgttaacggtgcgaaattacgaatcgatccttcaatttgggaaatcgatgattcaggtaacggcggaaccgtcgtggattccggcacaaccttagcgtttttagctgaaccggcgtatcgatcggttatcgccgccgtgagacgacgggtaaagctccctatcgctgatgcgctgactccggggtttgatttatgcgttaacgtctccggcgtcacgaaaccggaaaagatattaccgaggttgaaatttgaattctccggtggtgctgtgtttgttccgccgccgaggaattactttattgagacggaggagcagattcagtgtctggcgattcaatcggtggatccgaaagttggattttcagtgattgggaatttgatgcaacaaggtttcttgtttgaattcgatagagatagatcacggttaggtttttctcgtcgtggttgtgctctgccg

SEQ ID NO: 143128 - DNA, 1953 bp, Arabidopsis thaliana landsberg
  unsure (1)..(1953): unsure at all n locations
ctccatctcatttgattcgtttctcgaatcgaagcgatggttttctacttcaaggcccgtcttgatgctggtgactacaccatcttcatggggcttgataagttcgagaacgaggagctcatcaagtacggcttccctgaagatgtctggtaannnnnnnnnnnnnnnnntcttctcgatttttcccgatcatctattgcttttgtttcgcttctcgagttttctcggatcggtatcagctttgaattgcccagcttttcatttagttggctttaatcgtattttgagtttgtggacagatgttttgttatgtcatgatctattgctgattcatttattggaattgaaagaggaaggaaatgatgatcaagttctagtcctttcgatgggaacagttcttatcttatatatacatatcgaattttgttatcttcagtcaaaattttgctgaaggggatatatagttggtcactgtttctgaaattctttgtttgttgtgtgagatggattagaattgactgagaattatgatgcttgcttaaactttttcgtgggtatatagatagatttgtgttcttatggttaactagtactgaaaaggtagatatattggggccccttatcgccgagtcttggtgttcattcaagtgtggtgatgtttggaaactttctgaaatgttgtttggtctggttttgcagctgccatatgaaaataccgtgataatgttaattgattagtccttctttgagttagatttatggatttactggaagttgtgtactcacccctatttgagagctgtttttttggcatgtctattgtccactcatgttgtgttggctattttcaaactttgatgtttgttgatataaataagggtttgttcttccttttttcaaaaacaaactagagttgagtttcatagcatttctattgatcatatgctgctgagcaaatcgtttgcggttcagtaagtttattcataactgggatgtatgagtaaacttatggtaaatcatgtctactctatactcattctttttttgctaatgtcaatctttgatgtgtttagacatgtatagggtgtctttatcttctaatttgaatattttatttttcttataaactttaggagctttacgaccaagctgttaaaagtaattttcatttgatgcaggtttcacgtggataaaatgtcgtcagctcatgtttacttgaggcttcatagaggccaaagttttgatgacattagtgaaggtgtgctggaggactgtgctcagcttgtgaaagctaactccattcaaggtaatctttttttctacctgtcgtgaacttaacatttgcataaccattagtcttagagtaccagtttgttttttagaaggagggcacatataggttttttctgttttcttaccgactggtgtctgggattatgtgccaggcaacaaggtgaacaacgttgatgttgtgtacactccgtggtccaacttgaagaaaactgcctccatggatgttggtcaagttggtttccacaattcaaagatggtaagcttcttcatctctaaagaaattttggttgcgcatacataaactgctcaaagtatggttgtaaagcttcgatgatattgatacctaactcatatttgtttcgttcaggtccggactatcagagtggagaagcgagtcaatgaaatagttaacagactgaacaaaacaaaagttgaaagaacccctgatctgagaggttagtatttgttttgtgagctcttcctcagattctaataggtagaagattgatcatgcatacatctttctcgtttaacaattttcctgctgatgaagtgtcagttaagtgtctgtagtttttccagtcagtataacttaaagataaatgaaaataatttgattgttcataactgtgttgatgaagccgagagagaagcagtgaa

SEQ ID NO: 143129 - DNA, 821 bp, Arabidopsis thaliana landsberg
aagaaaataagaaaaaacaaaagatgaaaaccattatcctttttgtaacatttcttgctctttcttcttcatctctagccggtaaaatctcaattcacagtccattacataaatgatgcaatagtcgtcttaatgtttggaacgtaatgtatgatttaattgatgcaaaactctgagaagtattttgactcttgttctcctgatattttgcagatgagacagagactgaatttcattacaaacccggtgagatagccgatccctcgaaatggagcagtatcaaggctgaatggaaaatttgcgggacagggaagaggcaatcgccaatcaatcttactccaaaaatagctcgcattgttcacaattctacagagattcttcagacatattacaaacctgtagaggctattcttaagaaccgtggattcgacatgaaggttaaatgggaagacgatgcagggaagatcgtgatcaatgataccgactataaattggttcaaagccactggcacgcaccttcagagcattttctcgatggacagaggtaagggaaaacaaacccaaagattgacatcatttctgatatatatatatatatagtagctacgagctaataaatatcaaacttggatttggttttaggttggcaatggaacttcacatggtacacaaaagtgtagaagggcacttagcagttattggagttctcttcagagaaggagaaccaaatgctttcatttcgcgggtaatgttaaccgcgattgcatttacgataccgttacaaccttttcctgaaactctcagcctattctttgctatgt

SEQ ID NO: 143130 - DNA, 1288 bp, Arabidopsis thaliana landsberg
aagcatcgaggacgcaacattcgctcgttcctcttgcgaccctgattggtagggagctgaggagcgagaaagtagagaagccttttgtcaagtatggtcaagctgctctcgctaagaaaggagaggactactttctgatcaaaactgactgtgagagagtacctggtgatccatcatcggctttttcagttttcggggtaattgaggcattcttccctttaaggattctctgttttagtgacgaatagcttaccctttttctgttttgtcttcagatatttgacggacacaatggtaattcagctgccatatatactaaggaacatcttctggaaaacgtggtgagtgcaattcctcaaggcgcaagcagggatgagtggcttcaagctcttcctagggctttagttgctggctttgtgaaaactgacattgaatttcagcagaaaggtcttagcttatgcttattttttaaaggctatttgctttctattcttgtttttcaagcatgctctaaccgttaagatctgttgtgcttacaggggaaacttcaggaacaaccgtgacttttgttataattgatggttggactattactgttgcttctgttggtgactcgcgctgcatattggacacccaaggtggtgtggtttctctactgactgttgatcacaggctagaagagaatgttgaagaaagagaacgcataactgctagtggaggtgaggtcggaagactcaatgtatttggtggcaatgaggtatgatcatttccagtgaatttaagttactgtttcattgtgttttggctgtggtgggtttgtaatgtgtaagaagtccttggattttcaatgatattaatgtgctttgattatgccaatgcaataggtcggccccctacgatgctcgcctggtggtttatgtctttcgaggtccattggtgatacggatgtgggagaatttattgtccctataccacacgttaagcaagtgaaagtaagctccctttcccttggtacatttttcattaattcttatatttgacattgatcaaaaagtatttttatctgtacgttcagcttcctgatgctggagggagactcatcatagcttcagatggtatatgggatatactgtcttctgatgtggctgccaaagcttgtcgtggtttatctgccgatcttgctgctaaacttgttgttaaggttggtgaacaacccccttgattccattgtgttcttcctctggtaaaaattcctattttttatgaatcatatgttttacagcaccca

SEQ ID NO: 143131 - DNA, 1990 bp, Arabidopsis thaliana landsberg; identical to SEQ ID NO: 71375

SEQ ID NO: 143132 - DNA, 3949 bp, Arabidopsis thaliana landsberg; identical to SEQ ID NO: 70642

SEQ ID NO: 143133 - DNA, 1715 bp, Arabidopsis thaliana landsberg
tctcattttgtagtttagttttatcctcaacaaccatcttcttcgttatattccttgagataacaacaaagcatcgttcttcacctttaccaaaaagataaaaaaaaagaaaaatggcaaaagaaaatggatttataggatcaatcgatcaaggaaccaccagcaccagattcatcatttacgaccacgatgctcgtcctgttgcttctcatcaagtcgagttcactcagttctatcccgaagctgggtaaaactaatcaccttttattgtttaaattcatgtattcattggttatgactagtagagtgagactttttatagtggatgatcccgatcttgtctgattggacactatttccgtatctttgaagctccatcggaccaaagttttgttttttgtttttctgtctgtgtgtctaagcgatctgttcgttttaccgttgggtcttgtcttcctatttgatttcgaatctgtgttcttcttcagtggattttggatgcatataccccatcccatctctagtctcttgttattgatttatttaaaatgtatttgaagatgggtgtgaacacgatccaatggagatactggaaagtgtgaaagtgtgcattgcaaaggctctcgacaaagccactgccgatggacacaacgtcgacggtggcttgaaggccattgggcttacagatcagagagagactactgttgtttggagcaaatccactggccttcctctccacaaggctattgtctggatggatgctcgtaccagctccatctgcaggtacataactttcattgatctctttcttttcttcttgtatggtttgtctactatcatcttcaggattgctgagggatttggtttctgatgaaagctttctttggtgatccttaattacaggagactagagaaagaactctcgggaggaagatcccattttgtggagtcttgcggcttgccaataagcacatacttctctgccatgaagctgctttggctcatggagaatgtggatgatgtcaaagacgctatcaagaaaggggatgccatctttggcactatcgacacatggttgatctggaacatgactggcggtatcaatggcggccttcatgtcactgatgtcaccaatgcttcacggacaatgctcatgaacctcaaaaccttgaactgggaccaggacactttgaagacacttggcataccggctgaaatcttgcccaagattgtcagcaattcagaagtgattggagagatctgcaaaggctggcctattcccggtatcaagattgctggatgtcttggtgatcagcatgctgcgatgttggggcaagcttgcagaaaaggcgaggcgaagagtacttatggcacaggtgctttcattcttctcaacaccggagaagtgccaatcaaatcaggtcatggtcttctgaccacgttggcctacaagctcggtcctcaagcacagacaaactatgcattggagggttcgattgccatagcaggagctgctgttcagtggcttagagacagccttgggataatcaaaagcgcctctgagatcgaagatttggcagcaatggtagattctacaggaggagtgtactttgtgccagcgttccacggcccgtttgctccttggtggagagaagaaagaacgtggtgtgtgcattggaatcacgaggttcaccaacaagtctcggattgttcgg

SEQ ID NO: 143134 - DNA, 950 bp, Arabidopsis thaliana landsberg
attctcggctgtggtagagtgtacgggctactttgtttgggtagggaccaggtgttgctgctgggatttgcgtctctctctgtatctgtgaggcagcctcagtgtctacgtttgtccgaggctgggctgcgacagccagaggggattctaatgatcaggtgagcactcctcaatatgcagaggtggccatccatcctgcagctgatatctctattcatggctcaccgttcaatgccttgtccgaggttagagaaaaatgtgtcacaaatcggtttgtgtttgaatcagataagatcacaaagctcaaaatcgtggccgccagcaagagtgtgccgtcccctacacgtgtggaagccgtcatgtcacttatatggcgatgtgccagaaatgcctcacacgctaacttgatcgtcccaagggccacaatgatgactcaatccatggacttgcggcttagaattcctactaatgttttgtcacctgacgcgattggaaacttacaaggggtattctttctcaaaagaggcccagggagcgagatagaaatcagtgaagtcgtggctgagtttaggaaggagaaagaagagttcaatgagatgataaaagaaaatgttaatggcggccatactaacactacacttggtcagaaaatcatgagtggtattgcaaattacatgtcggagttgaagcccaacatagatacgtacaccatgtctagttggtgcagaaaggctttttatgaggtcgatttcggatggggtcgtccagcttgggttggactcggccatcaagatatccaggatggtgtgatgtatgtcctgttggtggatgctaaggatggtgaaggtgttgaagcatgggtaggcatacctgaacaagacatggcagcttttgtctgtgaccaagaattgctttcttatgcatctttaaatcccccagtcctgatctag

SEQ ID NO: 143135 - DNA, 1905 bp, Arabidopsis thaliana landsberg
aaatgatatttttcccaattgaaaatacactttccttttttattgttctagaagacttatccctctataaagtagccacactcttctgtcttctctcatcacctcattcatatctctctcaacctgaacattttcatttttttctaaatcaagaacttcaaatcttgaaactttctaaaaagatggagcttattcctgatcttcccgaaactgtagcctacgagtgtctcctacgctcctcctacaagcaattccctcttatggcctctgtttgcaaactctggcagcgagaaatcagcctctctgattttttccgacaccggaaagcttcaggacatagtcaagagcttgttgtcttgtctcaagctcgggtcgacccggttaaagaactcgtatcgggtaataaaaccatccccacccccgtgtaccgaatctcggttcttgaacttggtaccggtctaaggagcgagctgcctccggttccaggtcattccaacgggttgcctctgttctgcagattagtctctgtcgggtcggatcttgttgtattgggcgggcttgacccggttacatggcgtacctctgattcggtcttcgttttcagcttcttgacctccacgtggcgcgtcgggaagagcatgccaggtggaccgcgttccttcttcgcctgcgcttctgattctcaacggaacgtctttgtggctggaggacacgacgaagacaagaacgcgatgatgtcagctctggtgtatgacgtggcagaagacaaatgggctttcttgccggatatgggccgtgagcgagacgaatgcacagctattttccacgctggcaaattccatgtcatcggtggttactccacggaggaacaagggcaatttagtaaaagtgctgaatcgttcgacgtcaccacatggcggtggagtccacaaggagaagagtttctctcttcggagatgactatgtggcctccgctttgtgctgccggtgaaaacggagatttatatgcttgttgtcgccgtgatctgatgatgatgaaagatgacacgcggtataaagttgggaatctacctgctgacgtgtgcaatgtatcttacgtggcgataaggaggtctgaaaacctggttgtgatcggttcggctcggtacggcgaaccaagtgtagggtataattgggatatgagcaattctcgatggttaaaactggaaacacatgataaatatgaaggccacgttcaagctggttgcttcttggagatataaaaaaactttagaaaaggttccgaatcttttgtacgtcgtccttgcgaaatgacggtaaatttggtcggttgattttttcaagtgtgactgtataaatattatattgttatagataaatttgttagcttgattgtaaaaaatttattgtcgagtgattttatagtttttaaacttatttttgaagttgttgtgtgatgttactaaagttagcggtagattttatacttaaaaattttaatgttagtcctaataagcccaactaaagtacacttactctattgatctaacgaagcttacaaggacaagagtgtcgatacgttatgttggtcccatttcgtgttagaattgaaaatttaacattcgtgtcatttcgccaacaatcttgacaccttaaaagaatcccaaagtgcagttgccgagatagagcgtatttgaagactcgggttataaaaaatctggaaacatgggctaagctaagccaagcccaatattccaaagtatcagtttttaaaaaaacactaagaaacccaaccagcaagaaacataaaataaatttgggattttcttttctcatgacaacgacgcaactataaataaccaaaagggtcctcaataagttgtgggcttgtggctttagttcatc

SEQ ID NO: 143136 - DNA, 1647 bp, Arabidopsis thaliana landsberg
gcaaaatcagtgaattttgatattcaaatcttaatcggcgatggaacgaacaagcaacggaggaatgttgtatcacgaggttcaagagtcaaatctgtgcgccgtacactgcgtcaacacggtgttgcaagggcctttcttctctgaattcgatttggctgccgtcgccgccgatctagacgggaaggagcgtcaggttatgcttgaaggtgctgccgttggaggttttgctcccggcgatttcttagctgaagagtcgcacaatgtttccctcggcggcgattttagtatccaggtacgaattcgcgatgaaattgataaatcttgagttgcattcaacatttatatattgtaaagcctttttgttattgtgttgttggaagtttaggcaaaattagggtttcgattttatggtgcttttgattgctgtgtttatgctgaagtgataaacttttgaatggttggattcgtttttagatagattcaagaagaattgagatcagtaatggtgtgaatttgcgatctttactttgggttaaaactcatttgttgaaggctagtttcattgtgcgaacattgctatgctgataaatggaggaacttgagatgattttttttatcttgggactcaattgttttggatatgttagttattagtgaggttctgtatattcaattatcatcttttgtttcttggatagctttaaaccgagttggttgataacttgatatttgattaggttgctacaaaagtcaggtttgattgcaagatttatgtattgagattcaagggtatagtatggtgttttacatcacatttttagatatctaaaattaaagctattttaacggattacgttgaagttggatgcggataaaacactgcaaacagagggtttatgcgattggtgtagcattttaatcttgcaaagttgatctagtctttgcttattcgtttcactgagaatgcttctgtttgattgacaggtcttgcaaaaagctttggaagtgtgggatctacaagtaattccactcaattgtccagatgcagagcctgcgcagatagaccctgagcttgaaagcgcctttatctgccacttgcatgaccattggttttgtataaggaaagtgaatggcgaatggtataactttgatagtctccttgctgccccgcaacatttatcgaagttctacctttctgcgttcttagactctctcaaaggcgcaggatggagtatcttcatagtgaaaggaaacttccctcaggaatgtcccatgtcgtcttcttctgaagcttccaatagtttcgggcagtggctttctcctgaagacgcagagagaataagaaagaacacgagctcaggttcttctgccagaaacaagagaagtaatgacaatgttaatcaacaaagacggaatcaggcattgtcacgtgaggaagtgcaggctttttcagagatgaaagatgatgacttgaaggcagcaattgcagcaagtttgcttgatgcttctgctgctgaggccaatctcggagctgtgggcacttctgaaaaggaaactgaaaagcaaaagtagcagagaaaatagagaacaagtgttattgatggaggtggtgggatatacactcccgttctccgtttggttatg

SEQ ID NO: 143137 - DNA, 909 bp, Arabidopsis thaliana landsberg
aatactaaacgtacacgtcaagctaggtttaatcgtcttgttttcaatcttatgattggttttttgcttcctttttaggtgcgtttgagaagtttatcaaggtgacaatgaaactgccgttaacgggacaacaatattcggagaaagtgacggagaattgtgtggctatatggaaacaattagggctttatacggactgtgaagctaaagctgtggagaagttcttggagatcttcaaggaagaaacattccctcccggttcatcgatcctcttcgctctctcccctaccggctctcttacggtaatttttgcttgatttatactttgcttgaattttgttaatcgttagtgcaaatatcaaattggaatgagatacttgacatgttttcgcatttaaaccacttgcgaaggtactgttttaggttttttaaatgtaagtactattgtaaaagttggcgtttggaagtttggaacgatagtagttgtaacgtgtaggtttgaatactttgttgacatgtgtttgttgtgaactatactgttttgtaggttgcgttttcgaaagatgatagtatccctgaaaccgggatcgctgtgatcgagaacaaattgttggcggaggcggttctggaatccatcatcgggaagaacggtgtgtcacctggcactaggttaagtgttgcagaaagattatctcagctaatgatgaagaacaaggacgaaaaggaagttagtgatcactctcttgaggaaaaactagccaaagagaactgagaatgatagatttttcttgtgtttttgtcattttctatttcttatgttttctatatctaagttcttatgcggtactcaagtggagaataaagaacatgcatttacattataataaagtttaggaatttcggtgtttt

SEQ ID NO: 143138 - DNA, 2023 bp, Arabidopsis thaliana landsberg; identical to SEQ ID NO: 33901

SEQ ID NO: 143139 - DNA, 1266 bp, Arabidopsis thaliana landsberg
aggaaacttctatgataacttcaaagttgatgtggttagtctcacaaagacagatatggaatttgatatgattggtattgatgcagcgtttgccaatgcattccgaaggatcctaatagttaaggtctgtcaagttttcatccaacctctgatgaatccctcattggttgtaatctttggcttaaagggtttctttctttatggcaggttccttcaatggctattgaaaaagtgttgatagcgtacaacacatcggttattatagacgaagttcttgctcacaggatgggtcttattccaattgccgcagatccaagactttttgaatatttatccggtaagcatatatttcagtggtatgtgatccatctacatatgatgataattcttctgattagcttacttctttatctgtgtatgatagaacatgatcaggcgaatgaaaagaacaccattgtattcaaactccatgtgaaatgtccgaaaaatagaccacgtcttaaaggtaatatatgttcattagttagcatcagaagatttcttgttttattatcagctccatctctcatgaaagatatcatttcgttttcttgtagttttaacgagtgatttaaaatggttaccaaatggaagtgagcttctgagagaatcggaaaataaaacctcaaagccaaaaacttacacttcattcagttgcagccaagattcattacctgaatttgctaataatcctatcactccatgcgacctcgatatcttgatagcaaaactcgcccctggtcaggtagtgtttctgtacattctttttatatacacccaagcagaccatacttgcaatgagagatgaaacatgtgcatcttcttttatctcttttttcccaggaaatcgagctcgaagctcatgcggttaagggcattggtaaaacacatgcaaagtggtctccagtagggactgcttggtatagaatgcatcctgaggtgagaagtatatacatcaatctatcatatgctttatgggaaacagctctttgttttgtctttcctcatcccaatatatatgtttcgtaatgcttttgtttatactatcttaggtggttctacgtggggaagttgaggatgaacttgctgaacgacttgtaaacgtctgcccacagaatgttttcgacattgaagacatgggaaaaggtgaagtataaaatattaaacaagctgatgaacttggctgcatgacttacttaaatttggtttcatactgacatgtggaaa

SEQ ID NO: 143140 - DNA, 2079 bp, Arabidopsis thaliana landsberg
  unsure (1)..(2079): unsure at all n locations
ggttctactattggttctctaacattgtcgttatgatgtccaacggtggtgattcgtcggaaattgtccgggaactggaagagttaaagctcaagaaggcagaaatagagcaccgtatttcgaccctcgaagctaagctccaggatacggcggcagttgaactgtacgacgccgtatccaacggtgactcttatctgacggcaccggagcttgaacatgggttatctccagatcagatttaccgttatagtcgtcaactgttacttccttcgtttgctgttgaaggtacttttgctcaaacactcaaatgcaaactcttttcacgtttgtatttagccaataggaagataatctgagatggatgatcctgagttttgtgatgatatagctgaaagattgaaactgtatattggatttcttctgtttccatttaattgttttgattcagtttagtgatgtcggagaaatttgaattctggattacttatttacttattcttctgttctgttctatctgtgtttgattatagggcagtcaaatcttttgaagtcttcggtattagttattggagctggaggactaggttcacctgccttattgtatcttgcagcatgtggtgttggtatggtttccgactcttacctcaaatttatcttcagatatcgatagagtagcttctatataccgttctttctccagaaactattggttctccttccttcattattaatgttctgtgttatctctttgttgtgttcctttaggtcgcttgggtattatcgatcatgatgttgtagagctcaacaatatgcataggcaggtacgacttggaacactctgcgttggcaactctttctttttcttggctctaatctgtggtcactggctgaatgtaagtactacttttggctgatttgtgtctcttttgatttgtttgttattcagattatacacacagaagcatttattggtcatcccaaagtgaaatctgctgctgctgcttgtcgctcgtaattcaaactccttgcggattaatatgatttcgtatagaattatcacaagcattcgagaaaattatgaccaccttgactcgtttagtctaatcagaattcctttttccttatttccaggataaattcaacgatcaaagttgatgaatatgtggaagctcttcgcacttccaatgctttggaaatcctcagccagtatccttagatatgcaaacatgttttaggatgtctcagttttctgtatctttattagtctcctcaaagtaaagcattgaaaggctgtgtttccgtaactgtataaattagatatgatatcatagtcgatgcgactgataatcctccaagccgttacatgatcagtgattgttgtgtcttgttaggaaaggtgaatcattttctgaactctctgtatatacgctgtaaacaatggtgatacctgagtacttcaatagaattatgtagtcagttttataggcaccggtgttgagtattggctgagcgtttgtactttgtatacagcctttggtgtcgggtgctgcgcttgggatggaagggcaggtatgtgatatgacattcgctacattattgtgttactctttatagatgttaagccacatattaaacacttaactgtcattatgatttttgtgttcaagcttacggtttataatcataacggaggcccgtgttaccggtgtctttttcccactcctccacctacctcagcgtgccaaagatgttctgatagtggagttcttggagtaggtacttgaatggcgattttttctttttctattgcttgcaaatctctaccaatttcgtccatctttaaatgatcttttccactttatctgttctcagtgccaggtgttattggttgtctacaagcgctagagacaattaaactcgcaagcctggtgggagaaccactctctgaacggatgcttctttttgatgctttatcagcaaggatgcgcattgtaaagttttactattttcatttctgatcataactacactcaattgtgtntccatctgcataaactgatggagagtgtttgacaggtc

SEQ ID NO: 143141 - DNA, 4474 bp, Arabidopsis thaliana landsberg
atggtctcaaacacatcctcggaagcagacgctaaagattcacttgacaacaaagacggcaaaagcttcatcgcaatggctatggatcttcttcctcagtttctgcatactgacatgtcatgcatcggtatgtgaggatttctcatgagggactctttcattggttggtgataggctgatagctagggtcgattctagatgatggatttattattagtaatataggttttatttaattgtgtcttctttaccaaactcgaaatttaaaaaaatctcagataagagctaagctgaactggatctcagctaaacacaaaaatcttcaagaaccttttgtctaagtacagttctagatatgtagatttatgatttacaatttctagattcataaattaagcttctacaaaacgggcgcttgtacattttctaactatttttcttataacttgcttatgttttccatatattttgcatagtttttttcaacttgttttcttttaatcttatttcaaaaaattaaacatatcattagatataagctttttccacttagaatgtcgcataactacttactttttagaaatatttctactaaacccaaatagggtaaaaggggataacgctgataccactttaaatttctaatctaaaggtgacgttttattatgacagagaaaatacgaaatagacgatattatgttatatagcaagccttttgactttatagaagtgagaagcgaggattaaggggtcaaaaaaatgaaacatatatagaaagtaaactttgaaaaatataggagttggtgaagaaaatgaacatgttggagtcgaggattccctaatatgttctagaaaatatgagcttttagcaactataaacgcgtcttggtccatcttagcttactttttgtatgaacgcaagacaaatattggaatgactgcaaaataaaaaaagcgaaaaccaaatattggtcaatcgaaaagtaagtggagacaataaaaggcgagcaagaaaacctcaatgctttcttattttaaaactattgaaattcactgcaaaacaaaaacaaaaaaaatgcttatttcaaatcggacatatgtgcttacgactaatgaataattaattcaatccatgcactagcagcaatccttatccatgatcgttaaattaaattattactaatagactttaagcattccttacactaataatgacagtttggtacctatttgaggtgggtttttactattacatacactaaaaatgacagttcggtacctatttgaggtgggtttattctctgtaatagtttatttgaaaatttcactcttcttaaattagtattaaaaaaaatcttgttgacttatataaattcaagttggggggtccaatatggctgccaagtttgatcctccgacaacattcccgcagcctcaaatacaattatttgttttttttttccctttgatttgtgacattgtacaattattatgatttgtttctaacatcatcgtatattcgtacatttaaaaaaataaaaaaaggggaaaagaatcatttacataaataacaattcataatgtaatatcgcaccgagttttataaaagtctacacatatctaatctcaaaatgaaagtggcttacatgtttcttaaacttttattaaatttgttatatgtttggtgggaaaaaataaccaataatgaaaaagtgaaagttgtctacacgaggtaatggatgaagagagggacctacgacgaaggatgactccgtccacgttcttcttcactgtttgacaataagctccaattttcagacttttcatttcaaacttgtgggtctcattttcctctggcctatataaatccactatcctccacttctgtctttcatcatcattccacataaacaaaatatcttcttgctcattattcatcatcaatctactactccgtaaactttgcttcctctgtttgtattagctcagaagagatatgggaagtactccgactgatttacccggtgaggatgtcgccgataacagatccggcgtcggcggtggtatttctgacgtctacggtgaggattccgctaccttggaccagcttgtcaccccttgggttacctctgtcgctaggtgagtcaacccacctttagatctcaatcatacccttttgttttactttttgtgatccatcacaattgcttcagctaagtaaagtttgcttttttaagtttctaaacttaccaacttctgtgaaatatgaacttagtgtttcttcttgttaaagttccgatttttctgtggggcttatagtggattgaaatgttcttgtattgaacagtgggtatacattgatgcgtgatccacgttacaataaaggacttgcttttactgataaagagagagatgctcattacataactggtcttcttccccctgtgattttgagtcaagatgttcaggtaacttgaggttttatataaaagaactcacttttgtttagtttttgagttgggttttgtctgtgttaacttctgttttgtgggtgattttattaggagaggaaggtgatgcacaatctccgtcagtacactgttcctctgcagcgttacatggccctgatggatcttcaggtcagtgattgttcttcgaattcatgtttagtagagtagagaatgtgtccaaagctttgtttggttagtttttcttttcttacaactggtggcttatgtatctgaatcttgcaggaaaggaacgagaggttgttctacaagcttttgattgataacgttgaggagttgcttccagttgtgtacacaccaacagttggtgaggcttgccagaagtatgggagcattttcaggaagccacagggtctctacatcagtttgaacgagaagtgtgttttaaaatctctttaaccaggtcgcttccattttgtttctttaaactaatgtgaatgaatgttctttaggggcaagattcttgaagttttgaagaactggccccagagaggaatccaagttattgttgttactgatggtgagcggattctcggtctgggagatcttggttgccaggtaataaataagttcttgagttacacttgaaacttaaacattttgtgttgaaagttcacatctatcatctgtttgaacgatttcaatattttccagggaatgggaattccagtggggaaactttctctttacaccgctttgggaggaatccgtccatcagctgtaagcactagaacaaaagctgctctagaaattggttctacttgattgataactcaataactgttttgatcctaaatgaaaatcggctttcaaatgcagtgtcttccaatcaccattgatgtgggtacaaacaatgagaagttgctaaatgatgaattctacatcggtcttaaacagcgaagagcaactggccaggtttactaatcaattcctatcagtgttttctcttcttatagcaaatactatgatttttcaaaaactgagaagtctatttgcttttgtgattcaggaatatgctgaattcctgcacgaattcatgtgcgctgtaaagcagaactatggagagaaagtgttggttcaggtgagccataggatactctcttaagaactatgattgttgtcagaactacgataaaagatgtccggaattaatatcatacactcatcttttcagtttgaagattttgcaaaccacaatgcgtttgaccttttgtctaagtacagtgatagccatcttgtcttcaatgacgatatccaggtagcatcttctcctcaagattgatcttttttttcttaaatttttggttgtgatgtcagagtgcttaccaagaacttgattttgttttctgtaattgcagggtactgcatccgtggtgcttgctgggcttattgccgctcagaaggtgcttggtaaaaaactggctgaccataccttcctgttcttgggtgccggagaggtgagaccagaaagcattatactctataagcttataattcttacatttattttttgctgcttacactttatctcgctgattctttgaaggctggaaccggtatcgctgagctaattgctcttaagatttcgaaagaggttagtcaatctgggagttttcttgcatttgatctgttttttggctaagagtatgtgattgatcatatcttttttttttttgtagactggagctcccatcactgagacccggaagaagatttggcttgtggactccaaggtattgttaggcgcaaaccaccaagatcagtctcatcttttttagctataccgttcttgttcatatatgtttctcttttgaacattattttgcagggactgattgttagctcacgcaaagaatctcttcagcacttcaagcagccatgggcacatgagcacaaacctgtgaaggacctcattggtgctgttaatgtacgtgatgaactgatct

SEQ ID NO: 143142 - DNA, 1111 bp, Arabidopsis thaliana landsberg
cccaaccatactcatcgtacggatctatcagcttccacgtataatcatgacaatctccgatccgtaagtgcgactatcaacagacctaaaccctaatggtggtagtgagccgttgtggtgccgcagtgaccaaggctcaaggctgtgcttacttttggccaggcgtgacgtccacaaagggtcttggaactgcccaaaaggcttttgtaaagctccttacaatgtttcagttcctttagaagaaagagtcgatacgatcttgaactatttcgatcttccagagagagaaatccctgatttcatggctctgtatttcgatgaaccggacatacaaggccatgagtacggccctgatgatcctcgcgtcacggaagccgtctcaaaggtcgataaaatgatcggtaggatcatcatgggattggagaagaggaaggtttttagtgatgttcatgtgatattgcttggtgatcacggaatggttactaactgtgacaagaaagtgatttacattgatgatttagccgattggatcaagatacccgcggattggatccaagattatagtccggtgctagcgatgaatccgcgctggggcaaagatgtcaagaatccaggacagaagaatgcagaactcgtaaggaagatgaacgaagctttgagctcagggaaagtagccaacggagagtttttgcaggtttacttgaaggagaatttaccgcaaaggctgcattattccgatagtctcggattccaccgatcatcggaatggtgggagaaggtctaatggttaaacagaacagaacatacgttcaagaatgttctggaactcatggatacgataatatgttcttttctatgagatcaatctttgttggatatggtccaaggtttaggagaggaataaaagtgccatcgttcgagaatgttcaggtctataatgctgttgcagagattctcggactccgaccagctccgaacaacggttcttctttgtttactcgtagtcttctcttgccatttggagaaacatcacaagtagaatggagctaaccaataatctaagcaagttgccgtatggcgtttactttcggatgaaatttgatatattagg

SEQ ID NO: 143143 - DNA, 2425 bp, Arabidopsis thaliana landsberg; identical to SEQ ID NO: 32466

SEQ ID NO: 143144 - DNA, 793 bp, Arabidopsis thaliana landsberg
ttccaatattaaagatgctgaaaaatcattttatctagattcttatcactctttcatatttgttggcattattatccatttcaatttcgttataaaaaaaacaggtggtaagtttgcaaactgagctttcatatctacaagcacacttagcaactctagagctgccacaacctcaaccaccacaggttccggtgtcgtcttcaggatctctacaggctctttccataacggacctcccaacaatatcgccgtcggtgtacgacctctcctccatcttcgagccggtcatgtcctccacttgggccatgcagcaacaaccacgaccgtctgatcatctcttcggcgtcccgtcatcgtccagtatgggcggaggcggtgagctccaagcactggcgcgtgagtttattcacggtgggcaaatgccagctcagccatcgccgggaaccagtggttctgcctcgtcagtgataaaacgagaatgaagttatttttatcgtatgtttgtttatttggaccgtaagagatctatagttagccatatgtttctccttgtaatatatatacttggtcgaattcgtatttaaattgttgtctagaatgttaatataagaactatatgatttacattgattaaatggagtatcttataggccaatatgttgaagttgctttggtctcttggaccatcgaatatgttgttttaatcagcctagagtacaccggttctccacaacatgggtggaatcttgagcgtgaaggaggcttgattctggcgcgagacacgaaccaatga

SEQ ID NO: 143145 - DNA, 1972 bp, Arabidopsis thaliana landsberg
gttgtaaagaaaaaactactctaaggccttttggttcttttcttcaaattacagcgatccagaactcatatttctaactgatggagcgagcaaaggtgtgatgcaaatcttgaattgtgtcaaacgcggtcagaaagacggagtaatgaaccttaactcgcttgttcctttatctaaagtttttgtacatggatatatgagccatttcatttggttttatcataaatcggttcatatcaatttggcattaaagcaggccctagtaagatatgggttgtatgttataatccctcatcaactgtatgtgggatttttttgatggctaagagttcagattcagatttcttgcagatggtataggttttttaggcttggtttatagtagcatctggtcacaagttttcttggttggcagattctggttccagttccacagtatccactctactcggctactatatctctgttaggtggtactcttgttccttactatcttgaagagtctgaaaactggggacttgatgttaacaaccttcgccaatctgttgctcaagctcgctctcaaggaataacagttaatactcttccactatttttctcgaaactgttgatgcagaggcttttttatgacatctttacctctgctcttatttttgtttttttcacatatggtaaatgcaggtaagggcaatggtgattattaaccccggaaacccaactggccagtgtcttagcgaagctaacataagagagatactacggttctgttgtgatgagagattagttcttctcggagacgaagtgtatcagcaaaatatataccaagatgaacgtccctttatcagttccaagaaggtaacaacgatgtctttcattggtatctttaactccttagcttcaattatattagcctatgcatgtgctttgtgatcattggtctgcgtgatagtccttcattttatcatgaatgttgcaaaggttttgatggatatgggagcaccgatcagcaaggaagttcagctcatatctttccacaccgtttccaaaggatactggggcgaatgtgggcaacggggaggttactttgagatgacaaatatccctcccagggtttgtacctgaccgtctctttttcacccgtgattttggtaattgcaagagcctttttaatttctggtaatgcagaccgttgaggagatatacaaggtggcctctatagctctcagccccaacgtctctgcgcagatatttgtaagctagcccttcttagtttcttagcaagttctggttactgaatgatctcactgctgaaacctgattgtttttgtgtagatgggtttaatggttagcccaccaaagcctggagacatttcatatgaccaattcgttcgtgagaggtatatatagtcattctactctaaataaacacgctttgatgaatgaaggatcacgatcatcgaacttcactggaacattattaacagcaagggaatactagaatcactgagaagaagagcaaggatgatgactgatggattcaacagctgcaaaaacgtcgtcggtaatttcacagaaggtgctatgtattcattccctcaaataaagttgccgtcgaaagcaatccaagcagcaaaacaagccggaaaagtccctgacgttttctactgccttaagctcttagaagccacaggaatctccacagttccaggctctggatttggacaaaaagaaggggagaaaaaaaccctctgtgtttacagtttcatgttattcttgcagcaagctcatatttgtttgtctgtttgtttcagggtgttcattaaggcaacaatctgcagcagaagagaaatgccagagattatggacagtttcaaaaagttcaatgatgagtttatgtctcagtacgctgataactttggttactgcagaatgtgaaaagaaagaacttagagtcagagtcagagatcactct

SEQ ID NO: 143146 - DNA, 1986 bp, Arabidopsis thaliana landsberg
ttgaaggtcgttcttaactattgctactttcgagtaacatacgctcacaggggatatggtggaattggaactgttcttgtgatcaaggtttgtcactgtctatgattagtctggtttttgtttttttggcgggtcaatcaaatttgcttctgcgttttggtttttaggtctctcctgaatcagccagccaatttggagaattggttgcagatccagttactaatgagctgcttcattacaccgagaaacccgaaacttttgtatgtacatttattactgagatgactcaatctttatagcatcttcaagctttgattcttatgttttattttggaaacacaggtcagtgatcgaattaactgtggtgtttatgtatttacacctgaaatttttaatgccataggagatgtttctactcagaggaaagatagaggtaaagcagtaacaaagatcttacacataatttgtgttttcttgtcttagctttctatctttaaagacttctcatctttttcctctgttttgttgtagcaactctaaaacgtgtttccagcttcgaagctcttcaaccggcaacaaggtttgtcgattgtctccttgtccataattgaaaaccattcgaatcatcttcttaaaatgatcttttaacttctttaaaataggatcccgacagattttgtaagactggatcaagacatcctttcacctctagctgggaagaaacagctatatacttatgagactatggatttctgggagcaaatcaaatctcctgggtatgtattgcttgccttgtgttttcatttctttgaagccgcaaggatacaaaatgtttagcagcagctgaaacagggatagtgtttatggctctgacttatgagttgactttcgcacagaatgtcgttgaggtgttcaggactctatctttcccaattccgcttgacatctccccaactgttggctagtggtgatggaacaaggagtgccattgtgattggtgatgtttacatacatccttctgcaaaagttcacccaactgcaaaggtacttacatatggttttgtccctcgttgaagcaatttcttctgattccacttttatcacaaagcattaagtttcatctattaacagattggtcccaacgtctcaatctctgcaaatgctcgtgttggaccgggcgtcaggcttatgagctgcatcatccttgacgatgttgagatcatggtatgtctacttatacaagacacaaagtgaaaaacggttaaattttctcgaggttgacccttcagtgactctttgcccaggaaaatgcagtggtgactaacgcaattgttgggtggaaatcttctatcgggagatggtcccgtgtccaggcatgtttccctcttctgctcatctcttaagagcctgactcattctttttggaccttgaaatgtttttgtttgattcctttacaatcgtgaacctgaagttgtactttgttgatcacaggctgagggagtctacaattcgaaactcggagttacaattctcggtaaactgttcctccattgtagctccttctctttatatacagaaagcaaaatctctttatagacagataactaacctcaaacataatggttacaggagactcggttgcagttgaagacgaggttgtggtgaccagcagtattgttcttccaaacaagacactgaacgtcagtgttcaagacgagatcattttgtaactgaaaaacggaagttgaaaaatggaaccaacccagtggggagcagccacactatctccctctgattcaatatctactggagaaccacataagcaaatatttgggaactgattcacatgtatcatttatttacaccaagaattttccaacattgtatcaattcattttctatactcacaacacagctactgtaaaaggcactgaatttttgcccagaataataaagcacttgtgtagttttggcattgataagaa

SEQ ID NO: 143147 - DNA, 4427 bp, Arabidopsis thaliana landsberg
gcataacactgatttcttcgagatcgtgctgaccccaatgctctaaaggttctgattcactattttttttgtttatcatcaagcggctattggcttaataagtcctataatcacatgaagttttgatacatattatctttatgcaggaacatttgctaaagttcactgcaaatcatagagcagaagcagcggcaaagcgtggtgggagtgtgagtacatgcggagaaggttagtcataatagcttacgagctcagtcatttaggaaaattcaggaaactgatccaattatcgactttattccgttctaggtaatgtggatgttggaaacggttatggtataccgggtggagttgcatacgcgggtcactccgagctcagtgggaagcttgaacctaccaatgcttcaaacaatttgcctgaatatctcaaacaaaaattaaaggccaggggaattctcagagatggtgcaggggctgttacatccaacccacaagatgtaattattcatccctcagactgtaatccagggtgacatatgtctgcaatgacttgtccatatttcagcccctttgtttcagtttatcttattaatatttgttaaccttttgacgtttttgtttgcttgtgtttcttctcttttccagacatcagcggttagttggaatagacaggcaactttaccttttcaggctaatgcaagcaccttaccattaggatgggtatgaatgagatacacttaaaagtcttttcttcttcatttttgtctttgctttactatctggtgcagcaatattttctgctgtgaaagtgcggtaatcgtttgagattctccaaatgcatgtgataatgtggtcatacacaaatagtctttagatctcaatccttaaggatgaccacttatggttctgatgatgtgtttatagttgttataccacttaaatttgttctgtttcattcaggtagatgcaaaagatcctgccagtggtgctacctattactataaccagcacactggaacatgccagtgggaaaggcctgttgagctttcttatgccacttcaagtgcaccacctgtactttctaaagaagagtggattgaaacatttgatgaagcatctggtatgattttcacacatttagtcatcataatgactagctcgttgctacaatattcatatcaaagattataaaagtatgatatctttctccttttcttattgtggtattatgctgttagcaaaatgaatttaatagcttatgatctttttcatcttggaaagaaacttacatcatcacatgttagaaataagaatgaggaaatccttgtgttttctgctggaagtttttgcctcttattgaccagcttcttctgatttctgttgtactgtacacgcaatgcttgcttaatctttggatctgttggttgcatctttgaactctgaaccttttgattcctatgcacaggccataagtatttctacaatacaaggacacatgtgtctcagtgggaacctccagcttctttacagaagcccgctgccacaaactctaacaacgctgttacccaaagtacggctaatgggaagggggagcatcctccatctcagctgccaagatgcagcggatgtgggggctggggagtgggccttgtccagagatggggttattgtgttcattgtaccaggtaggaacccttccatttcttgttatgctttttgagttagattgctgcatagagactgcttcggttgaagactgttaataatgtatatacctctagtcctctaccatgactccctttttattactggctcagatttgtgttataggaagcatttattagtgtgcatcaagaccttaaatacactttgtttacttgcatattttgaggcttaagcccctctgcctttggttaacgggactcatattatatgggattcagggttttcaatctcccagaaaagcaattcttgccagcacatttaaaccatttcacaaatgcaggcgattctggccaaaaggatccgaatcagaggtacgcatctctcaaaatcttagatttagaaaaaatattcttctatgcccgttatctttctaaaatacatagtgttccataagagagctattggtggactctggtcatcttcttaacatctgttaccagatatttagacaacccatttggatacaaatgttgcccctcttttcggagggacataatttctgttaaaaagcattccatttatcagcagtaaaatgaagatggaacacattacatgtagtagtgaaccaggaggttcccattgactatgtttacattgtacttactcttgtggtattttctttacacatgatggaaaaatgaaaatggttgaaacaggtccagttcaaaacctcccatgaaaaaagtaataggcaaaaagcgtgctcatgccgaagatgatgagttggatccaatggacccgagctcttactcagatgctccacggggaggctggtaatgtccataacacccattttaaccacttcatgaaacggcatgacctataatactgttctctatctctctctgctatgtcatctgaattgaggagaaccaagttcttttttggttaacaaccaagctaattatgctcataggaatcataatatcaggttgatctgattgcttctcatcttgtagggttgttggactgaaaggagtacaaccgcgagccgctgatacaactgcttcggtaatggcatttaccttttcagactgggatcttctttaaattccaaataaccgacctcactaaaccagatgaaaaaattgaggttctaactaaacgagatcaaatcgtgtttcagggtcctctgtttcaacaacgaccatatccatcacctggagctgttctgaggagaaacgcagaggtggcatcatcacagaagaagaaaccaaactctcagttcacagaaattacaaagagaggcgatggaagtgatggtcttggagacgcagattgagtgagagcttccctcatcttataagttggttaccgtgtcttcttgtgctttgtctgttgctttctccatatatgagatcaaggagagtagtttgtttactttttagtgaatacaaacaaaccatacttcttcatgtgaattttttttaacaccagattcaaagtatgtatacatataattactcagtagcaagcaacggtcttcaacaatctccaaaaccaggcttttgatgcttttgcgatccatattcaaaacatatttgtcacgtagcaacaatttagttaggcctagaagaatcataaggtacaagtacaacgttgtgacttgtgagcaaagaatccactcgatcatgtggatcctgtttaaccaagtaataatatacctttaaaaaatagatgaaaaagtgaatggtgaaaacgagaagtgtgcgtcttttattccggcttaaaacatagctcaaaattcggacaacacatttattgctccagactctgttacaagaaacgcacaatttgtctgagcaacgagatttcgtataaattgagccaaaacatctctctgtgctcgttgatttttaagctccatttctctgctcaaatggcgatggcggctctaacatcttcttcttctgctattactctcctcaacaaacctttcttacctaaccgctcttccttcttctcctctgattcacaatctcctcttctccgattctctgcttctacctctgttcgttctcgttttccatccgcagccataagcgccgttgctcccaaatcggtgcgttctgcttttttgttaattcacttgatttgatttacaagctttgtatatgtatgtaaaccttgtacaatggtattttcaggacataaataaaaatgaaactccaaagatcgaaatagaggaaactcaagtgttcgcgtgtcctgtttgctacgaaccacttatgaggaaaggaccttcaggtatcaacctgtaagttctttacttacttcctcagattgtaaaatgatttcaaagttttgccctttttcttatttctctaaagcatttttgtgaatctgctgcagacaagcaatctacaggtctggattcaagtgtggacaatgtaacaagacatattctagcaaagatgaatacttggatcttactgtcactgctgatttggatgattataatgaagtcaaacccattactaccgagctctttcggtacaatttacatgattttatcaatactaaccatcactgctctcttagcttaagtgtcatgtgagcttcttcttttttttttggtgtgtgtgtaggagtccattagtatcatttttgtatgaaagaggttggcgtcaagcctttaagcgaagcgggtttcccggtccagatgaagaggtacttacatctttggtctttcatgttggatg

SEQ ID NO: 143148 - DNA, 1247 bp, Arabidopsis thaliana landsberg
agatcttgatgggtttcttttgaattctgtgaaacaggtgctcctctcgttgatggtttgaagattcagaacaaaaacggtgctgtgaagagtcggcgtgccctcggtgacatcggaaatcttgtttctgttcccggagttcaaggaggaaaggctcaacctccgattaatcgacccattactcgaagtttccgtgcccagttattagcgaatgcccaactcgaaagaaagccaatcaatggagacaacaaggttccagctcttggtccaaagagacaacctcttgctgcaagaaacccagaagctcaaagggcggttcagaagaagaatctagtggttaagcaacagacgaagcctgttgaagtgatcgagacgaagaaggaggtgactaaaaaggaagtagcgatgtcacctaagaataagaaagtgacgtactcgtctgtacttagtgctcggagcaaagctgcttgtggtatagtcaacaaaccaaagattatcgatattgatgaatctgacaaagataaccatttggctgcggtggagtatgttgatgatatgtactcgttctataaagaagttgagaaggagagtcagcctaagatgtacatgcacattcagactgaaatgaatgagaagatgagagcgatcttgattgattggttactagaagttcacatcaagtttgagctcaaccttgaaactctgtacctcaccgtcaacatcattgatcgattcctctctgtgaaagctgtccctaaaagagagttacagctagtgggaatcagtgccttgcttattgcttccaaatatgaagaaatctggccacctcaggtcaatgatttggtatatgtgactgataactcctacaacagcagacagattctagttaaaaaacccaatgctagagcccctcacccggttcgcaagcgaaccgccctctccccgccagcagggagaggggattttgcacgacatcaaacacccccttgcttgtcccatagccttgggctatatactgaaccaaatggttcagtatatagcccctcttgatgcctcattcgccgcgctttcggatcccacccggcgcggggtgctggagcagcttggccggtcggacgcctcgatcaccgatctggccgatcgcttccacatgaccctgacgggcatgaagaagcatgtcagcgtgctggaagacgctggtctcgtcgacacgaaaaaggtcgggcgcgtgcggacctgcaagctgg

SEQ ID NO: 143149 - DNA, 4603 bp, Arabidopsis thaliana landsberg
ggttttctaatttcatgtaaatcaaatggattggatttgaaaggctatttttacaacttccaaaccggaccggatttgtagtgttaaaatacaccggtatatataaaccgatttggtactttgattttaaattttaagaaataaaataagaaaaaggagaaaaatggatggcctgaaattgcaagcgaagcgtctccacatattatacaccaacttcttgcccgccatgtggatatcgtcgtcatttctctctctaaccccttctctcttcagtctctctctctctagacgatctctatcttgaataaaataccgataatgacctcaaccaatccggtggtcgccgaagtaataccggcggaaacttctacagatgctacagagacgacgattgcaacgacggaagctggtgaagcaccggagaagaaggtgaggaaagcttacacaatcaccaagtctagagagagttggactgaaggagaacacgacaagtttctggaagctcttcaattgtaattttaccgcgctctttttttcttccaccagctatttgattgactgattctttgtgtttcgagctctaatttatagctgaattttgcgtaatttcgcgtaatttctacttaatttgcttaatcagatcgaagtttggttatgtggtagatcatctggagttttgcgtatgcaattggattttgcagaagcaacaatgtcttctttgatttgttaggttggattgtatattcgatagatcagaatttatattaatcgctgatgaatgtttcttctcataaaaccgaagtatggtttaagcttatcttaggttgccaaaatgattgagtagaggacttggcatctggtttctgcataaatagtggtattttgcagaagtcgtatctttctttattaaaaatgtttaacatgagaactgaaaaaacttactacaagtcagcttttagagctatgcatgaaaccaatttccaactacagtcctaaactacaattcagattttggtaatggttcgttacttccacatattacattgctcttttgtgtgtgtgaaaggcttctctctcttttagaaaaaagaatcttactttgtcctgacaattttctcgtgtccttaggtttgatcgtgactggaaaaagatagaagattttgttggttcaaagacagttattcaggtttgagatcagcttctttggatttttggtttaatatacaaccttggcacatttccccactcaatcatcctgtgcctgtttgatttactgcagatcaggagccatgcccagaaatactttctaaaggtccaaaaaaatgggactttagcacatgttccaccccctaggcctaagcgcaaagctgctcatccatatcctcaaaaggcatcgaaaaatggttagttctattgtaatagatattactttgggttgacagatggagtaacatgtaatcaatctgatttcaactcaaatctgcagctcaaatgtcgcttcacgtttccatgtcctttcctactcaaataaataacctgcctggatatactccatgggatgatgatacatctgcattgttaaacattgctgtaagtggggttattccaccagaagatgaacttgatactctttgtggagcagaaggcatgcgttctcatctgtactcagtttttatattttgctttggtagtctagtcactctatcttctgaagttttcatatgctaaatgcggcttacatatcattgtttcagttgatgttggatcaaatgacatgataagtgaaactagtccttcagcatctggtatcggaagctcaagcagaacactatcagattctaagggtttgagactggcgaaacaagctccctcaatgcatggtaattatctgaacaattgagggactatttcttagttttcattttgtggttgacgctgttgtaatggttgctttgcaggtcttcctgattttgctgaggtttataacttcattgggagtgtgttcgatcctgacagcaaaggccgcatgaaaaagctcaaggaaatggatcctataaatttcgaaactgtgagttggagctttacttgcctttagattaactgatatgtgtgttgcagcatatcaatcatttagtcttcttctttgagttcccgaataaattcagctgtgtgagaagattaaatataaagatcagtacttgcaatatatagattcacgagttggaaacaccaaaaagccaaagtaccatgattctatggagatgttggtcaaataatgggattgttacaaccatgagtcagttttaggtgtcatggtacctatttgtagctgtcagtgattgttctttttcctagtatccgtcactaatcacagtttttcttgcaggttttgctgttgatgagaaacctcacagtgaacttgtcaaaccctgactttgaacctactgtaagttataattttatcattacttctgtgctcgttgagtatgtgaggcacatttgtcttttcgtgttaagaatgagtgagaaaaagtctctaacagctaacaaacctacttactatctgccttgaagtttaactatagaaattaagactagttcgcctttagtgtgttatgtttttaaccgttccaatgattaaatgaggattgttgtgctctatgagatataatctaaccataatttagtctgaatatgttgatgctgcagaggaaggtcatgaacacttaagctcttagctgtttgtgcactcaacaagttatatatcttcttgacgacttcttgctcgcaacaactctctaccagctatcaagtaagtttggtgttataccgcatccctccgacaccaatataaaacactataataagaacgttcgcattgacttaatagattatatcgaaacctaacaccacagttcactaaggttttcaccttaatgtttctcatttgttactgtagttattgtctcacatgatcgaacgtcataataagaatgatctgtagatcataactgttatattctcagcgttgctgctattattctgattacactacccttaaggtcttaagaatattgctcttacggtctaccaaattgctattgatctctgtatatggtggattgtgtcagatgcatcgtacggttgttgtctgaggagaacataactgagtcgtcgtcacaaacaagaggttcatatgttttttcggtcagaaccagtcgtgtgaatgggagatatatgtatgtgtgtgtagaaaatggttaccaattgtatcttctttttgataattattttttcatgccttttgtaatatgtaagtttctttacctcgttctctgattggttattttctcgttatctgtttaaccaaaagctatgtaacacagtagcaaattgttacttaactcggaagtgagatacataactctgttgtattgcacttgtatcaagcgttaacgtccatgattcgtctctgttattgtcaataacaattgttcgaaagccaggttaatggtaattaggaaattgaaccgtatcggtatggttttagcgggtctttagaaccttctaattgatactgagggtttgcgaattttgtataaacagttgaacactaaacagagaagagaagcttcgtctctttaattatcttcgatttaagagattctttcgccgtcggcgaagatgctacagcatcagatcgtacaatctccggcgagattagggttaacaggtcctggctctccttccgtacaaaatccgacgcctactcgtcatggccatccaacctcttcttcatcttcccaatctcagcaccaacagatccaacaacagcctaatctacttccttcctccaccgtcgccgccgcttcctcagcctcagcttcggcggctgtttcatcctccgccttgctatcgctccttcctccattaccgcgagctcaagctcttctccagcagatggcggttttgacatctaagctcttcgacgtctctcccaatcgagctatctggctctcagctttccgtggctctctcccttcgttcctctcctcacactcgttaccacctccgccgccgcttgaaaaccctagtccttcatccacgaaggagatcctctctcaattcaattccctccagactcagctcttcgaagccgttacagagcttcaagagatcctcgatctgcaagacgcgaagcagaaggtggcgcgtgagatcaaatccaaagattcatctcttctcgctttcgctaacaaactcaaggatgcagaacgtgttctcgatatgcttgttgacgactactccgattaccgcaaaccaaaacgaagcaaaattgaagaagatgacgaagacaatgataatgagtcttcttcttcttcaaccacagtttcatctcagctcaagttaaaggacatattagcttacgctcacaagattagctacaccacatttgctccgccggaattcggtgcagggcaagcacctctccgtggtgcattaccaccagctccacaagacgaacaaatgagagcttaccagctctacactttcgctgatcttgatatcggtctgccgaaagcagtagataacataagaagaa

SEQ ID NO: 143150 - DNA, 3644 bp, Arabidopsis thaliana landsberg
gtcggctagagactcgaccgacctatgaccacccggactcagaggagcgggctcaggagctagagctttgagatcatctttcagctcggcgataaagcgattgaggttagcctcagcatcggcgaaatccttcaaccactcatcaacttgttctttctctctctccagaaccccgcctagattagctacgcatttgctcgcgcctgagataggtaaatgaattgggcattgacctcatcaaggagcgacactttgtgctcggcagcttttaacttggcggtgaaggcttccgaaacctcccacctcgtcgtctgaatggcccgagtcacctcgctatcacgaagtcctctctcctcagacaacatccccctgagaaggacaatctcagaatccgccttgagattctgctcggccatattaatggcgttttctttgtttacgaaggccatccgctcctaaaccctccctctccaaattcgccgcggcagctttggaaagcgcttcattcttctcccgctcggcggcttgaatccgagactccgcctcagctaacttgccaaccgcctccatattactctgcatagccaaatcatatgaatgtaccatccggttcatcaaagcaacggcctgaaaaaggaaaagttagatttacaatggcaacaccaaaacgagttacatgtaacaaagctgatacccgcagaaaatgagatgccgcctcggcatacttccgagattcaagaagagtatctggaggaggaagcaaggggccaacacatcccccgagcagattggccgaggcagtacgatcttcgaagatcgggagtattttctccgcctcggagccagatgtcttctttttcttcttcttcttctttgacgattcatcgtcaacccgaacgcgcttacccgccactttgtcacttacaggtaacaccacaaccgcctcgggcgcaccaatagacggcttagttccctgagcctcagcgggtgccgcgtcaaccggcacggcagtatcgggaataatgttcccatctcgggacgcatcaggagcagcccgcggcaagatcaaccccgcatcaaccggcgcggcagcatcgggaataacattcccatcttgggtcgcctcaggatcggcccgcggcgagatcaatcccgcattaacaaggcgcctctcctccgccaatcgcctctccttatcctctttcttcttggcgtagacctcccgcaaagtaagcttcgtcgattgcatatctacgaaaaattgagtgcgatggtcggaagactcagagctagtaggacaagaaacgccgtgaagaagacgaagcgcacgttcaactcgctcccgagagaaatgcttcagctaatcgcactttcgagccgataacgcgtgaaaagccgaaagaaagtcgtctggaatcggctcgaggaacttgagagtgcgttctgcaaaaggaaaactgcaattagagaacgaaactaacatcgcatcgggtactaatgaatttctaactacaactacccaaaattccccatctcgtcagaacagtcccgaggagatcttcatgaacaacgtcttcaatggctacaaagaagaagtgatcggtatatggctcgtctttgctcgggaacccatcgataattttctttcccttagcgggggaaatgtagtaccggtccacttcagatttttggcactcgccggatctcgagaaaatttttcagatgagccagcgttatctccgtttctgactcgtaacttttaataccgcggaccgagcatctcgatcatgacccgaggacaacttaatcacggctcggaaaggtctcgggttagacgaggaaaaacttcaaaagacttagccgatgtaagttcaaaacacttcacctccgaaaaccccggaagagataatcttcgaagatatcaccggatacagaaatcccagaatcctcggaagatataaacaatctccttcaacaagataaagataaagaggaatctttcgagaatatcgcgagaggtgatagtctcggaccctataaaagcaccccagagaacaaacaaaaggggacgtacaaaaaatgctctaaacttcaggctatcaaaaacgctctgactttgaaggcaaaaacacctatttctcatattctaacacacttgtacgataaaatcattattttctcattaatacaatcaagaacaccgtccgcggtaattgagaattctgttgttctttgagaacctcacaaagatccattctttgaagatcggattaaccaaccaaagttagcttcaccacctccatggggatggtcgacagggttcataactactcctcttactacaggacgtttactgtaacgcccgcgatcctcaataggatcgttggctaggacttggtccgggagaagaaggtggagtctcggacaagtgagaaagagctggctataagctcggacaaaggggaaatcatgcaggctaagctaggatcgtaaagaaatcacttgggtcagctcgcccaaagctcaagctcagctggaaggagtgacagttactcaggtcgagtgacagtccagctcgggcagctggacgagtgacggttgagctcgaggtagctggacgagtgatggacgagctcaaggcagctggacgagtgacggttgagctcgaggtagctggacgagtgacggacgagctcgaggtagctggacgagtgacggacgaactgggcggttatgggcgaagagatacaactctctggaaaggtgcaactcttcggaagggcgcaactcttcggaaaggtgcaactcttcggaaaggtgcaaggaacggatgtgttgattcgggaagcatccattcgccccctatataaggaagggcgcccaggaccattccactcaccacaacacaccgaaaacacaagaaaactcaccattaaaactctctccctcttgggagaataaatagtcttaggattcggtagccgggctgtggccggcaataaagaaggagggtcggatcgacctaacctcgagaaggaaggtaagggatcctagactttgagtctaagggttctaggatgtgagttagtagtcggatccttgaaaggaccgactagagggctgagtagtatccgggtcatgtgcatcctacacaagactcggtccgggtagggatcggctgaggcggggacgcggctcggcggaggaccggcgggtcttaactgacctgccgagaatcggccggactgatgcgcgatcttcccctctctgaattctctccacggatccgagtagtgtatggcatatagagcattgcatggacttgcatatgattaagtaaataagattacttatggctctatgactttcaggaacgaatggtgatcgtgggaaggacttggcttaggcgcgagagactcaaggccgggaagacgggtggtgatagttcggatagtctagggatcgattatatgacttgtaatagcttatatgcaaactcataggttgtatcgaatcctttgcttaattaataaaatatccgattgtttgtttactctattcgtctcatatattgaatctcggaatcatatgaaacggtttagactaggaaagaacctcataaacggttagggccgagtcactta

SEQ ID NO: 143151 - DNA, 963 bp, Arabidopsis thaliana landsberg
cgcttgaagaaaaacgccaaataaatgtcttttgatctcgtgaagccaaatcgccattagtcaccaccttaaatgactcacctagtatatatatatatgcaccatatgagtttgatcaatctcattcaatacaatggctgaagaaaagatcaagaagagcttgcttgctgcggacgacagcgacgatgagtactcaggaggtgatacagtttcagatcagacagaactgagttcgattcttgataaacttagtctagaacctaagacggagaaaaagaaactcttggtcttgagtctaagtggtcttcttcttcacagagtccacaaaaaagagttgcgtaagaaacccaagaaccgctctcctgatgcttcttgtgggccaaatcttggtaacgtttcattattcttttgttaattttgctacctttttttatttatagtttatttgtgtttgttttgttgtttagtgtataagaggccgtttgctgaagagtttatgaagttttgtcttgagagattccaagttggtatttggtcctctgcttgcgagttagtctctgcttaactttcaataatttcaatctttttctcttaagagactaagagtacctgatctgtttcttccatggtttttgactgataggaaaaatgttgacataattctaaacattattcttgaagatctagaagataagcttttgtttgtgtgggtaagactcttatactatatatacatgtgtgtgtgtgagtgtgtgtttgtttgtctatatatatatatatatctatacactttcgtgttcttttttcttgttaggatcaagaaaagtgtacggacagtggatataaaacgcttgagaacagtgaccagcctctgttctttaaggatctctctaaagtgtttcagtgcttcaaaggtttctctgcttcaaacaccatcttcattaagaagagccttcaaaacta

SEQ ID NO: 143152 - DNA, 537 bp, Arabidopsis thaliana landsberg
ctccaaagtccaagctcacaatgaacacttcgtaagtctctctccctctctcaaaatgttctttttgtctgaaatgtaaacacaattttttgttgctctcgttgctcagcccaaaaatggaaatggaaatgaaaatggaaacgaaggcggctcctgaagctggtatgatcaaaaagtccaacgaggagtggcgtacggttctatctcctgaacagtttaagattcttagagagaaatctattgagtaattagatccaaactttttttcttcttcctctcttaaattcattttaggtattttgttttcttaagcctcacggtaggtttgatgacgtttttttaaagttttcgactgatgaatgtagaaagagagggtcaggagaatatgtgaagttgttcgaggaaggaatctactgttgtgttggttgtggaaatccggtttataaatcaaccactaaattcgattccggttgcggttggccggcttttttagatgctattcctggcgccattaaccgaacagtaaacctatcaatc

SEQ ID NO: 143153 - DNA, 568 bp, Arabidopsis thaliana landsberg
atttggatgatctcactgctcaggtgactcatctacgtaagaaaacgctcagatcgtcgccgaaatcgccgtcacgacgcagcactacgtcactatcgaggcggagaacgacattctcagagctcaggttcttgaacttaaccaccgtctccaatctcttaacgagatcgttgatttcgtcgaatcttcttcttcaggattcggtatggagaccggtcagggattattcgacggtggattattcgacggcgtgatgaatcctatgaatctagggttttataatcaaccaatcatggcttctgcttctactgctggtgatgttttcaactgttagaaaacttcacatcattatcatcgtgagtgagactaatcatcgcagcaggggtaaaactgtaatttttcttataaattatgtgatgatgctttgtttctttattttataagatggttaattagtgtttaaaactgattgtaatgatagacagtgtaagaaatgtgtgatatcatggagatggtgatgtgagtttggtacaaatattttaagatcttttctttctatatattaaaa

SEQ ID NO: 143154 - DNA, 1364 bp, Arabidopsis thaliana landsberg
ctcttttccttatatgtacaaggtaatgttggtaacagcacagcgcttgcagaagttgtgaagtcttggtcagtggtagcaggacggtcgacaaaagagctgcttctggtgagtatccttctcgttctctagcttcatatatctcttctcatattgatgttgtctttctatgtaaaacagaatgcagaaaaaggtggatatgcagttggagcatttaacgtgtataacctggaaggaatagaagctgttgtagcggccgcagaggaagaaaatagtcctgctatattgcaggttagtgttctgaccaaaagtggatttctgatatacaatagcaaccaaagattaacattctgttctgagttgttcaaagatgtccgacacaaagagatttgataactgaactttttttggctaccttttttaggtgccatccaggtgcctttaaacaaggaggcattcctttggtttcatgttgcatctctgcagctgaacaagccagggtaagtggctttgtaactgtacgttgattctgcattagatacataccaaaattttaggcaatcatgtacttttgaactcgctctctagctttcatctgtggtttttcggaatagacattgaaatcaaaacttaatagctgatcctaaatacccagtacatgggtctgactctgagccccctgattaatacgcacaatgtggcaggttccaatatccgtacactttgatcatggaactacaaagcatgagctattagaagctcttgagctagtaagtttgagatctctatcacttatgtgcaatctctgtgtcatcttttacttattcttatattgaaaattcataccaaatcgatttcttgcagggactagattcagtgatggtagatggttctcatctttccttcacagaaaatttatcctacaagaaatccataacagagttggcccgttccaaaaacattatggtggaagatgaactaggccgactctcaggaacagaggatggcttgactgttgaagactatgaagcaaagctcaccaacgttaaccaggtccttgttggttttaagccccgataaatccaatctctcacacaacaaatttatgttgctaaaccaaactacaatttattattatgagttttcaggctcaggaatttatggaaactggtatagatgctttggctgtgtgtataggaaatgtccatggaaagtaccccaagtccggtccaaacctcaagcttgatttacttaaggtgaattatattcttgtgctgactgaagtaagttctatgagtttgtgtcattcttattctaactggtcgccgtgtatggagcgcactgctcgaaaaaagccccacggt

SEQ ID NO: 143155 - DNA, 3094 bp, Arabidopsis thaliana landsberg
  unsure (1)..(3094): unsure at all n locations
cttcttcttcttcgtttagagctaaaacccaatagaaccctaattctcatctcccttaaagcttatcccttttctctctctatatatatacgcggatcaaattcaaagtctcagtttttgagctttcttaacagccgccgaatcgatttgtgattttcccgctccggagagattcggatctggatttttcgagctgatttgtaggaatttctcgttttctcgcggtgaattatatcaactgtggaaaaaaggaaaatttctgggtttttttggttttggagattggaaaatctttgagagatgggtgaagacggcggaggaggcgaattcccgccaaaaaaggacggtgttgaagagggttttccgacgaagaagccagcaaggcagctcgacttcactggtggctccgatgaacattcactgtctaaaccagcggctcctaccgtcgtagctacgtcggtgaaacccatcattagtagctctgtcccttcgncgatacggccgggtatgaccatagcaatcggtcaggttactcaggtacgaccgacgttaccaatggcgacgacgatgtcaaatccgccgtcacagtcacaaatcgttaacgcgccaattaggcatccgtaagattttatctatcgattgagaaattcgaactctttgtgttatcttgactcaatggaggttgtgcaaatttgatcggggatgatgaaattggtttaaagtttaatccttttagactaattggtgaagctaatttaaaatggatgatgaaaatttcaaaattttcctctctctatttagacagaaggccggaatctccaaaagctagaggtccaaggcctaatgtggaaggtaaaaaagggacccctcaaaagaagaagcagtgtaactgtaaacactcacgctgcttgaaattgtaagttttccccatcctgttgtagaaattgacactcatcaaattttgttatgttgtagtttatttagtttcctggtgacttgtttgtgtgattgcatgttcatatcttttccttttcttctgctgcatgtctaagaaactcaaaagtctgattttttaagtttaccaatttatgttgttaattgtggatttctgcactatcttgtcaggtactgtgaatgctttgcatccggaacatattgtgacggttgtaactgtgtaaattgtttcaacaatgttgataatgaacctgctagacgagaagctgtggaagcaactctggagcggaatccatttgcgttcaggcctaaaattgctagcagtccacatggtgggcgggataaaagggtacgtggtcctgaggaacttgttctagatcgtgggagagttctttaagcttctaagttattgttgatttgcctttgtaggaggatatcggtgaagttgtgttgttagggaaacataacaaaggatgccactgcaaaaaatcaggatgccttaagaagtattgcgagtgctttcaagcaaatattctttgttccgagaactgcaaatgcttggattgcaagaactttgaaggaagtgaagagagacaagctttgtttcacggtgaacattccaaccacatggcttatcttcaacaagcagcaaatgcagccattactggagctgttggttcctccggctttgctccttctccagcacctaagagaaggaaaggtcaagagattttgttcaaccaagcaattaaagattcatctaggcttagccactttccacaggttccaatttaccattttgcatatatatgctttttggtaaccatttatagaactgaaaaatatctttttctcttgctgttggcttagtgaagtgaaatcttattatttgtatttaggtaaataatggaagaactggtggaccaacctcaggcacatctccatcacctgtttctcgtgctggtggcaatgcatcgtcagttccatcaaagtttgtatacaggtgaaatttctggtgttcacaagttatttagtttgatccaagagctgtctaaaactgacttgtacgttgtaattttttgaaggtcccttttagcagatataatccaaccacatgatgtgagagcactttgctctgttttagtcactgtagccggagaagcagcaaagacatcaacaggtgagactttggttaaaaccatctctcctcctccctctctctaacatgttttgaaatttcaattttctggattatattcgccggttagatttgcgtggcaatctcatcgtacggttcttgttaaatacgatgatccaacgatgtcaattcataaatgctttaggttttgtctctttccaccgtccgatctacggtgaagcaaatatccaaaaagcccttttaatatgcgtgtatttagctatcacccaataaaaaactgacacgtagatagaccactcgtgaactcatagtacgcaccttctcaagcggaagccgaaacggaaggggaatattaagaagaagcatattttttgtttcggccctaaatgtttctttaattacgaaagagcaccaaaattgcttctcatttgtttggtttttgcactaatggcacaagagttttgctaacaagaacaaagaatctaaggtgtaatacaaggtcacattccgcgaaaatttgaactgtctaaaccaaaatcccaagacatacacagtttttgcatcagtaagagtttcccattctgcctctgccgccacgcccatcgtctcgtctttctctgtcaaagtgactgtcacggcggtaatctctgtgcagcggtggaccgcctcctctcaatgacggtggtggaccatctctcaatggcggtggtggaacatctctcaatggcggggatctgctcctctctctcaaaactcgtccccatctgccaccacgaggtggactgagaggtggtcgtctgtcataatgaggttttgggagcggctctgtatgggcccagtcagatgctatccgtctgctaggagggtactcatggtctgagtaatgcggacggtctcgttctctgtctctccatgtgggatggtcatgccttggcggcgggtagtctctgggccagccacgcggaggagatcggagccatt

SEQ ID NO: 143156 - DNA, 2043 bp, Arabidopsis thaliana landsberg
tctctttctactcgagactgaggaagagaaacagagagcataactttatatccagctcgattttttcaaatttcttaccttttgctctcactaaagccatgttcttacctttatagtgagtgttatctaaactcttttgggtcttttgcaaaagaaaccagttttcaaagttcaaaattttgtttttaaaaatggagaatttagtgaagagctgcgcagggatcgagaagaaaagaagcaatttgactccatcgatggaagatatacttacagagtcaaaggagagaagcagcactagcggagcgagctacgaaagctcctccgccaccaccgtcgcttcgtcttctccaccaccaccaccgtcgcagattctgggttggccgattagaaaagcttcatttcggaaaaattcgaaggagagtgttaattttgatcataagaaattaacccttcacgatgattctgggtttaaagcgaaagagatgaattctgcaggttagtgagaaaaaatcaaaaattgaaactttttttctcagccctaagatctcatgtgttttctttgttgttgttgtttttgttgttgttaatctgattgtggattagatgtggagatgatgaaggagagatttgcaaagttgttacttggtgaagatatgtcaggttctggtaaaggtgtgtgtacggctttagctatctccaacgccataacaaatctctgtggtaagtcttaaaaaaagacgaagctatcttgtgtttgttaaaatgcttgaaccaaagtgttgaatttgatgtttcttcttttagctacgattttcgggcaactatggagattagagccactttcaagcgaaaagaaggagatgtggagaagggaaatggagtggattcttagtgttagtgatcacatcgtcgagttaacaccttcaacacaaacttatccagacggcaacaagtttgaggtaagctcttgattttttaagattgttgcaactgcaattactggagtttgaattgtgaatcttcttcaggtcatgacttgtcgaccaagatttgatcttttcatcaacctccctgctctccgtaaactagacaatatgcttctcgtgagtttcacttaactttcttatacgatgatcctctcaagtgaaacctgttttgatctctgatgtaattttcttttgcattaggatatattggcgagtttcaagaaaactgagttctggtatgttgatcaagggatcgttgcttcggaaaacgatggctcagcttctttccgcagaaagattcagcgccaagaggagaaatggtggttgcctgttcctcgtttagcaccgaatggtcttactgaagaagcaagaacagaattgaatcataagagggaatgtgcgacgcagatacttaaagctgcaatggctattaacagccttgctttaaccgaaatggatgttcctgaatcataccttgaaacccttccaaaggtctacatctttaactcaaaacatccctataaaaaccattgtaaggttttttttttgttctaacattaaacttttggtacagaacggtaggtcctgccttggggatgttatctacaggtatgtaacatctgacaaattttctgcggagtctcttctcgattgccttgatctgtcctctgagcatattgctcttgatatcgcaaaccgtgtggaagcttcgatatatgtttggaggagaagagttcaaacaaaacttggagtcaacaacaataatacttcaagcactactccaaagttaacatgggaaatggtcaaagaactaatggctgctggtgacaaaaagggattgcttgtggagagatcggaaactctcttacgttgcttgaagcagcggttttcttctctaacgcagacttctctagacataagcaagattcaatggaacaaggtccaaacacacaaaatcctctaaataccattacaagtacaaaaattgggctttgctttggtcctttaatatatttccagacccttttgaaaaaattttcaagggattatttgggga

SEQ ID NO: 143157 - DNA, 1295 bp, Arabidopsis thaliana landsberg
ctctctctctctctaagattccttgctctcgcgcttttctctctctctctctctctctcgcgttcgttcttatccacgagctctgcaccgtcgcaatctccgtcttctccatttagatccaacacagagccttttctacatgaaattcggcaaagagtttcgtactcacctcgaagaaactttaccagagtggagagacaagttcctttgctataaacctttaaaaaagcttctcaaatattatccttattactccgccgattttggacccgccaattccgatcacaacgattcgcgtccagtatttgctgatactactaacatctcttccgccgcagacgacggcggtgtggttcccggcgtcaggccatcggaagatctccagggttcgtttgtgaggatacttaacgatgaacttgagaagtttaacgatttttacgttgataaggaagaagatttcgttatcagattacaggtttttgcttccgaatttattctagcttcaggattttaggtcaagttagaacttggttcatgtgattactgattcagaagctaaacaagtttctagaattgaatcattccataggttatcttcgattggatgattaatctcgaatcctagaacaaaattgctagtagttgaaaccggaggtagttctagtgatgatctctaatcaaattggatctagtttctctgtgcttcaagtgagtttgtctgtattgatgtaatgatacagtggtttatttgctctgtggtatatcacaatcgagatcacattgcttagatattagtatggtttatgagccttggtcatcttcttgctctgcttgtttatagacatatgaagctctaattgattagtgtgtgttcatcattttgcaaacaggagctcaaggaaagaatcgagcaagttaaagaaaagaatggggaatttgcatcagaaagtgagttcagcgaagaaatgatggatattcggagagaccttgttaccattcatggcgagatggtgctggtgaggggctacagctcccttaattttgcaggtaatcatatattttaactagaaaaccaatttttgtaacacattactactgtatgctaaaaacatcttccattctaggacttgtcaagattttgaagaattacgataaaagaacaggaggacttttacgtttgcctttcacacagcttgttctccatcaacccttctttactacagagccacttactaggttagtccgtgaatgtgaggccaatctttgagcttctttttccttcataagcggaagtt

SEQ ID NO: 143158 - DNA, 949 bp, Arabidopsis thaliana landsberg
tttcagtgtaggaaacataaagatctctacatgtggatggtcaaatcccctaatggaccatctgtgaagtttttggttaaagctggtaagagtcgagatcctctgactttagtttaagtggcaagagctgatagatctagtcacgtatttagctatgatgggttcaatcagcttgtgtcttgttctatagctgagttctgtgtctgtaactatgtattttttggtaaaagggtttttacttttgttttctgtatattgaagtgcacacaatggaagagatgaaactcactggaaatcatctaaaagggtcacgtccacttttgacattctcatccaactttgataaagatgcgcactggaaactcttgaaggagatgcttactcaggttgttgccagattcatatccttggataatgtttttggtccattagttctcaagactttcacatcctaattatttttgttttgtttatctctcaggtcttcggaattcctaaggaacacaggaaatctaagccttaccatgaccatgtatttgtgttttcaattgttgatgagcatatatggttccgaaattaccagatttcggttcctcacaatgagtcagataaaattgcaaaaggtggcctggataaaatgacccttatcgaggtttgtggacacaaagagttacaagcttttaataatagtctttcgactatggttttgattgaaatggatacactattgacaacaggttggtccaaggttttgtctgaatccaatcaagatattcgcgggcagctttggaggtcctactctttatgagaacccgttatacgtatctccaaaccaggtatcattgattaatctcttatttgcaagcaaaagatataaccaaatgaatcttagaactttccttaagcaaattttaaatcaatgtatttagattcgagcatggagacttag

SEQ ID NO: 143159 - DNA, 1754 bp, Arabidopsis thaliana landsberg; identical to SEQ ID NO: 75722

SEQ ID NO: 143160 - DNA, 1164 bp, Arabidopsis thaliana landsberg
ccaaaagatttgcagataattttgacaaagcccccccaaaaaaaaaagagttcaaaatgaaaaacgtgagaaatggatttgtcatcattcttctcaccgtccttagtctctgaaaataaattctgattttgatttcgaattttagggattttgagagagttatcagttatgagtagttcggagagagtaccgtgcgatttctgcggcgagcgtacggcggttttgttttgtagagccgatacggcgaagctgtgtttgccttgtgatcagcaagttcacacggcgaatctgttgtcgaggaagcacgtgcgatctcagatctgcgataattgcggtaacgagccagtctctgttcggtgtttcaccgataatctgattttgtgtcaggagtgtgattgggatgttcacggaagttgttcagtttccgatgctcatgttcgatccgccgtggaaggtttttccggttgtccatcggcgttggagcttgctgctttatggggacttgatttggagcaagggaggaaagatgaagagaatcaagttccgatgatggcgatgatgatggataatttcgggatgcagttggattcttgggttttgggatctaatgaattgattgttcccagcgatacgacgtttaagaagcgtggatcttgtggatctagttgtgggaggtataagcaggtattgtgtaagcagcttgaggagttgcttaagagtggtgttgtcggtggtgatggcgatgatggtgatcgtgaccgtgattgtgaccgtgagggtgcttgtgatggagatggagatggagaagcaggagaggggcttatggttccggagatgtcagagagattgaaatggtcaagagatgttgaggagatcaatggtggcggaggaggaggagttaaccagcagtggaatgctactactactaatcctagtggtggccagagttctcaggttttgcttatctctcttttgatttttttggctaagaacagtttagttttttctgttaatgagcaagtgagattaagtggtgaaatgtttttgtgtaaggtcaaatatagtcactctgtgtggttttatggtttctcaagaagataaaaaaatgaaaggtttcttaacctgtgttgtgaacttgtatacagatatgggattttaacttgg

SEQ ID NO: 143161 - DNA, 764 bp, Arabidopsis thaliana landsberg
tatcatttcaggaatagaggctcgtggtttcctattcggtccaccgatcgcgctagccattggagcaaaatttgttcctctgcgcaaacccaagaaactacctggttcttatacttgcatacctttcatatgatttatttttgaagtagtactaacactaaatccaactaggtgaaacaatatttgaggaatacgagttggaatatggaaatgaccgcctagagatgcacataggagccgtcgaggctggcgatcgagctttggtcgttgatgatcttatcgcgactggtggtactctctgcgctgccattaacttgctcggtaaaatccctaacctatatgacaatccaattgagttttaaatttccaacctaaccgatacaagatatttattgccctttttgaatggtttttggaccatgttagagagggttggagcagaagttgtggaatgtgcatgtgtgatcgagttacccgaattaaaggttcgttgtcgtggaatttaattcaatacagtagtaatattcgaaaacaataaattgagatcgttttgtattggtgtgacatttaatatttttgaggtgggaaatttaattttttgcagggaaggcagagacttaaggggaagccactatgtatgcttgtggagtaccgatgatgattttagctttacttatttggataaaattattcggttaattaatttatgctccgaaaattcggattatgcagacttcttattattggatctacaatattttggg

SEQ ID NO: 143162 - DNA, 2021 bp, Arabidopsis thaliana landsberg
aaagaaaagacaggtccgcataagatgcatccatggttggctagaaatcagcatcgattgatcaaacacgagagaccactccaagtggcgttggtatggatatgatctctaaccagtaaccttgtcggattaatcctccatgattgatcagagattgtgaaatattagagagacctctctcgacatggcgttggtaaagatcggcgacgtatatggatcatcaatttcacggtttcgaaatcgacgatcgtctttgtaaaacagtagcagagaaaagaagaattttgtttttttgtctcttaaagaaaaattatgatttcccaacacaagacagatgaatatttataaggaaaggctcacgcaaagaaaaaaaggaaacatccggttgttttccttttttcatatttggaccttaacaaaaaaggaaattgaatcgcacaattaaggagcgtttacaacggtcttatttttctaatctcaatttgcagatttcgttaaaaggccacgtgttcgatttttttttaacgcataaattgtattgtaattccaaaactacatcgtttgaggtttagccattaaagtcacagtcacactttcgcttttcccaatacgaacaagcggtgacgcatatctcctgtatcatcactcttttacttccggcgatctctctccgacggccaatggacgccgtcctttactctgttccactctccttcactcccctacgcgaatcatcctctccttcctcgccgtatcttcttctgccgaggtttctctccgttcagccatgtcacaaattcaccttctctcgaagcttcccttccaaatcccggattccctcagcttcttccgccgccggttccacgttgatgacgaattcctcttcggtaagctccttcactcaatttccagttccaaattcctctttccgttttgggaattttgttatgcaagcgaatatctgatcattgggtgtcttagattctgagaattttcgtagattagcttcttgtaacgattctatgtaacgattgaatggtatactagttactagcttagaccggattcttcgagattgcacattttagatacgggattcgatcttagcctagtggaaatttgaggaagcaaagtcgcttactcgcttaagtaatgagatagtgaccaattttggaatcgagattttgagaatttaggcagccactggttggaaggttaatcaatattgtacaagtagaggattagtttgagttttgtatatgactattactgtagccaagaagtggagtgtacactgttggtgagttcatgacaaagaaagaggacttgcacgtggtgaaacctacgactactgtggatgaaggtagctgtttgttatcctttaaagttcatcagattctttggagcataagatactgccttgttttcatacttatggcctcttttgtgccttctctacagctctggaactccttgtggagaatagaatcactggatttcctgtaattgacgaagactggaaattggttagtatcaacttttgttattcaggtcttaagttttgaaagggagctgaatctaatctacagatggaggttggatgcttatgagggattctttgttgctgcaggttgggcttgtttcagattatgacttgttggctttggactccatatctggtaagtgggccagctacaccacttaattaatgtatttggtttcctttgctttcaagagattttataaacatggagatttctctttgaagtggagaaagaagaaagctacttgatcacatggtggcataaagccagaaatatctatgttatgatgaccttctgtctcattctttgcgagatagcacgctcaccgtgaaatgatcaaaaagctttttcccttaccccttgaatcttattgctgggttttttgtgttgctaataggtagtggaagaaccgaaaattccatgttcccctgaggttgaccagccccctggaaaaggtatgttggcccccttcccttt

SEQ ID NO: 143163 - DNA, 1167 bp, Arabidopsis thaliana landsberg
gaatggaatttcgtcgaacacttggagggcattgactcggttgattctggaagggttaaaatctaattgggaagtcgtgggcttatggatttgtgtgtgatggcctctaagcttgcgtatgaaaatgctaaggttgttgaaaacgtcgttgatcttcattggaaggcaagtttttgttaagtatagaaactttaaacacacttttatgacaaaaaaagtttcttacttttataaagttttcatcttttaatgtctgcagatgaatctggtggagttcttggattgttggaatggtgagaattgaggattcgatagcaaggtttagccttatttagcattgcttgatcagagagttttagtttagttatggatgtgttgtttttgtctttctttgcagattatcagaagcagatgtctacacaagtttttgtgtttacggataagcagaaagatgcaaacttgatagtaatcagcttcagaggtactgagccgtttgatgctgatgattggggaacagatttcgactattcgtggtatgaagtccccaatgtgggaaagcttcacatgggtttccttgaagctatgggtttaggcaacagagacgacactaccactttccattacaatctctttgaacaaacctcctctgaggaagagaatcgtaaaaagaatcttctggatatggtagagagaagcgcttattatgcagtccgagtcattctgaaacgtttgctttcggaacacgaaaacgctcggttcgtagtcactggtcacagcttaagaggtgctttagcgatactgtttgccacattgttggtgttgaatgaggaaacagagataatgaagaggctgcttggagtttacacgttgggacaaccaagaatcgggaacagagaggtcgggttattcatgaaagctcaactgaatcaacctgtggatcgatacttgcgagtcgtttactgcaacgatatcgtcccgagattgccctacgacgacaaaacgttcctctataaacatttcggactctgtcttttctatgacagcttctacaacgaaacagtaatgttatcatcatttgaacaaaatttaaagacttcacatttaaaaatgtgaactcgatttgtaactaataatggatttcttgaatatttgacagaaagcagagga

SEQ ID NO: 143164 - DNA, 1056 bp, Arabidopsis thaliana landsberg
cggtccacacacagcaagactctatttactcgcaggcggaagaacaaaatggcgggaagagcgattttctctgtatcttgttcatctactccttccttgtgtatcccttattcaactgcttcgttttcatcgatgaatcgactggcgccccccgccgtccggatttctccccgaaccaacagatttcccagttaatatctctattcgcttctttaaattcgatgcaggcattgattttgaaatttatattcagacacggttgatttttgcagggattcactgctctatgtctgctaacgacatcaaagcgggaaccaatatcgaagtcgatggtgctccttggcgtgttcttggtattcttcttcctcaattcctcttagtttaggttattatctatacttggaacttggaaggtttctgaatttgtagatactgttactagttcatgacgatttaagcattgttttggttctaatgcttccacttcgctacttagctacttactagtctactgagggttttttcttgctttgttggagcagagtttcttcatgttaaaccaggaaaaggtgcggcatttgtgaggactaagatcaggaactatgtaaatggtagcacagtcgagagaacatttcgtgctggaatttctgtaaaaaccatccctttttctcttatatcttaatctgatgaatgattttttagttgcaccattttgattatgatcattctatgttacaggttgaggaagctaatatatacaaagaaaccaaacaattcacatacaaagatgggtctcagtttgttttcatggatttggtatgtcacattggatccttacttctcttcttcgctagtatggtagtagtagcttaaagtttgtgtactaatgattacgttttctcttggttatcaaatcttttttttatatagaccacatacgaagaaacacgtcttaacgaatctaatatgggtaagaagacgaaatggttgaaagaaggaatggattgcattttgctctattggaaagacaaggtacactcactttcagaatggctg

SEQ ID NO: 143165 - DNA, 2443 bp, Arabidopsis thaliana landsberg; identical to SEQ ID NO: 29864
  unsure (1)..(2443): unsure at all n locations

SEQ ID NO: 143166 - DNA, 1420 bp, Arabidopsis thaliana landsberg
cactggcctagtctcagttgtggttctccatcatcatgcaatggtgggaaagggtcattttggggccacgaggtgattatcttttcacatctgttattaacttttcatagataggtgtttccatctcctatgacattgtctttcagtcttcaccaaaactaactctgtttcatttgttggttgtcatgtatatctttgcaatacacgctggcagtggggtaattatattcaatctttacttctttaatttgatttttctttcgatttccttccacataatttgtatagaacttgattcattggtgttgttatagagttccatgcttaatctcacaaccttttgcttaacagtgtgttagttagcagaatacattcgggtttggttatatgctaattcgataacataggttctctctctaacgattttgctgataattttttattttcagagaaacatgggacttgttcgtctcctgtttttcatgatgagtataattacttccttaccacgcttaatctctacttgaagcataatgtcacggtaagtcttcaccgagttatgcttttatgttatgatataatgcatagtggactggttaaataagaaagttgggcatacggaagatttacatgtgttaactatttgcttgcattcttctgcaatgtagtttttctatgcgatgtaaatgatcatgtatcttagatttcctctgctctgtcagtttatcagtttgtgaagacactttcttacattttttctctcttggataagttcttaatgcctctgcatctgtaaatctggtaggatgtcctttatcaagctggctatgttgcttccaacagtgaaaagtatcctctaggaggtatcgtaacagccattcagaatgcatttcatatcacccctgaagtggtttgcaaaagagatgcaatcgatgaaatacgtatatgcttctataaagattttaaggtttgttttcgagattcattcttagattgttgatttccttttaaagtctgaaattgctctcgcatgataagaaaactcaaataacatgtctccaagcattatgaaattatcagacaaagtcttaaagctgtgtgtagaaattgcttggtttggcaagagttgctaatcattaacattattactgtttttcctggtttaaagctaaaacatcttgctagactttgagaatggcaccagtttctgacagttttgttaattcatgactacagcccagggactgtgttggttcacaagatttgacatctagaaagtcatgccccaagtacgtaagtttgccggaatacacgccattaggtaagtaaaaatcatatcttgaaggaggcataattgcaagagtattagataagtaatggatatatgataaaaatgataagaaagtatgtgatgacatct

SEQ ID NO: 143167 - DNA, 2124 bp, Arabidopsis thaliana landsberg
tacctagcaggccaggttcctagtgtgccaactactgctactattccagggatgttctcaaacatgtttccaatggtccctggtcaggtataaaaatttgtatttttgtgtctcttatgttcctcttttcttttgttttatgcgaacatgctcagaacttctcaatcttttttctcacatagcaactaggtgcgcttcctgtactgccagttcaggcaatgactcaacaggtacgatctatcaatctatcttattcttaggttcttcaccttttgtcacgattcccttcctaaaatatgtagtcgcaggcaactaggcatgctcggcgagtctatgttggtggccttccaccaactgctaatgaacaggtttgttacttttgttttgtttaaggttttgtgactttttgtttattattgtctatttaaaccacatttcaatatccattgtatgcctactgagaatgggttttcatgtcctagtcggtgtcaacgttctttagccaagtgatgtcggccattgggggaaacactgctgggccaggtactgaaaagttcattatatttttgtcatattggccgcaagtctatacgaattctcatcctttttttggattattaattcataggtgatgcggtggtcaatgtttatataaaccacgaaaagaagtttgcttttgtagagatgagatctgttgaggaggctagtaacgcaatggcattagacggcattatatcagaggtgatttattagctcttctacactttagatgtttggtttttattagttacaatctgtattatgagtattgaaacctatctgaaatcatagcttttttcatctctagggagttcctgtaaaggtgaggaggccaactgactataacccgtctcttgctgcaactcttggtccgagccagcctaatcccaacctcaacttaggggctgttggattgtcttcagggtctactggtgggcttgagggtcccgaccgcatttttgtgggcggacttccctattacttcacagaggtacagatcagggagctcttggagtcttttgggcccctaagaggtttcaacttggtcaaagacagggagactggaaattcgaagggatatgcattctgtgtttaccaagatccgtcagtaacagatattgcatgtgccgctctaaacgggattaagatgggtgataagacacttacagttaggcgtgcaatccagggtgcaattcaacctaaacccgagcaagaagaagtcttactttatgcccaacaacagattgctttgcaggtaaaggattctgattcactctatctaaatgatcagtaatgctaaatctgtctcaaactttgttgcagagggcttatgttccaaaccagaaggtactcccaccaagattgtctgtttgactcaagtggttacagctgatgatcttagagacgatgaagaatatgcagagataatggaggacatgcgacaagaaggtggaaaattcggtaagcaattagattttcttattgtctgttctgacattataccaatagcacattactgaggctcatggtctaaaatgaactttgatacatcattgttgtgtgtgtaggtaacttagtgaatgttgtgattccgaggcctaatccagatcatgacccaacaccaggagttgggaaggttagatttcagtcctcagatacaaatgtctaccaaattcatatataaattgcatactctaatggtaatactaatgcaggttttcttagagtatgcggatgtggatggctcatcaaaggccagatcggggatgaatggaagaaaatttggaggaaaccaagtagtggctgtgtattaccccgaagacaagtatgcccaaggcgactacgaagactgagctatctatcgtcttcttcttaagcttttagtttggatctcttagcaacaagtttggttcttttttattttaaagttttttacatgtttagttctctctctactaaatggagaaatttgtctagaatctgactgcaatagtacttgtccgggcacaatcaattaaggtgtgtgttggtaatagtagcttttggtttcattgaacactaaccaaaccacatcagtttatatta

SEQ ID NO: 143168 - DNA, 1772 bp, Arabidopsis thaliana landsberg
tatcttaggaaaacttgtattgaggtgactgttggttccaagcttgcttttatctcagaggagttgtgtatcggttgcggtatttgtgtgaaggtatgtatgcataggctctttccgatatccaagatgcctctagaaatggtacctaaactgggatgctaaatgactctgttgttacacaattgcagaaatgcccgtttgaagctattcagattatcaatcttccaagagacttggagaaagatacgacccatcgttatggggcaaacacttttaagttacacaggttcgtttatctactattttttcctgaaacaaattgaccgctcttgtagttttcagacaatgaaatctttgtctttacttccaggctcccagttccaagaccagggcaggtgctagggttggttggaaccaatggtattggaaaatcaactgctctgaaaattttggctggaaagctcaaaccaaatttgggccgtttcactgtaatagcctctcttgagtttctaaacttttatcttcgaaatttggtctctttcatagttgatgtgttcatatattccttgttgaacagagtcctccagactggcaagaaatcttgactcacttccgtggttcagaacttcaaaactacttcacacgtattctagaagataatcttaaggtacagttgaaactgatattaatatttttctccatgaggtagctaggtattatttgatgtttaagcagctcaattgagcaagttctgataccctgtgcatggcaggccattataaagcctcaatataacgaccacatcccaagagcagttaaaggcaatgttggagaggtccttgaccataaggataagaaaaataaaaagccagagctctgtgctgatctggagctgaaccaggtcattgaccgtgatgttaagaatttatctggtggtaagctacaaaggtttgcaatcgctgttgttgccatacaaaatgcaaagatttacatgtttaatgaaccatctagttacctcgatgttaagcaaagactcaaagctgctcaagttgttcgttctctcctgaggcctaataggtttgaatttcccagcttctgaagttttttttttcaaaagggataaaaaataaggtacttacattgttttttttttgtttttttttgtttcccagctacgtcattgttgtggagcatgatctcagtgttcttgattacttgtcggatttcatttgctgtctgtatgggaaaccaggagcctatggtgtggtgactctccccttctctgtcagagaaggaatcaacattttcttggctggatttgttcctacagaaaatttacgttttagagatgaatctttgaccttcaaggtatagatattttgtatgatgaaaggcaaagttttgtcgccaaggcaataaattgttttcctcaatgtttttcttttgtttgaaggttgctgagactccacaagaaagtgctgaagagatacagtcgtacgctaggtacaaataccccacgatgaccaaaactcaaggaaacttcaggttgagagtgtcggaaggtgaattcactgactctcagattattgtaatgcttggggagaatggtacagggaagacaacatttattcggatgctggtattctcttcttccatgatatgttctcttgtggttagagttttagaaagtactgtactgtaaagttgtaatattggtaatatttgcaggccgggttgttgaaaccagacgatacagaaggaccagacagagt

SEQ ID NO: 143169 - DNA, 1750 bp, Arabidopsis thaliana landsberg; identical to SEQ ID NO: 59641

SEQ ID NO: 143170 - DNA, 1485 bp, Arabidopsis thaliana landsberg; identical to SEQ ID NO: 25776

SEQ ID NO: 143171 - DNA, 843 bp, Arabidopsis thaliana landsberg
tgttggtgtttgaagaagataacggaagcaatagaaagttttattattccttaaattaggttggactcatcaacctattgttagcttatttattattggtagtgagaaaatatcatatggttagctaagaagtagttagccttcttccagcttaattattctgttaatgttaattaattaatgtataaatttttatttacaggggttaattcggttgctattgatagtgccaaggatttggttatagttaaggggatcattgacgtgaaacaactcactccttatcttaacgagaagcttaaacgcacggtggaagttgttccggccaaaaaggatgacggagcaccagtggcagctgcagcggcggctccagctggcggtgagaagaaggacaaagttgctggtgaaaagaaagagattaaagatgttggagaaaagaaagtcgacggtggtggtgagaagaagaaagaagttgctgttggcggcggtggaggaggagggggagggggaggagacggtggtgctatggatgtgaagaaatcggagtataacggttacggttatcctccacagccgatgtattactacccagaaggacaagtatacggtcaacaacattacatgatgcaaggtcaatcatcgcagtcgtatgtacaagaaccgtattcgaaccaaggatacgtgcaagaatcgtatatgaaccaaggttacggtcaagggtatggacaagaagcaccaccaccaccatatatgaaccaacaaggttacgcagatccttatggtcacatgcgtgcgcctgagttgtttagtgatgagaatccaaatgggtgttctgtgatgtga

SEQ ID NO: 143172 - DNA, 2243 bp, Arabidopsis thaliana landsberg
acacaattcgatcgatatgtttgcaactcttgacaaaccttttatccttttttttctttctttctactgcttatagaattttttccgtttcttataaagcaggctctaaagaagattgctgatgttgtggtcgcgaaggatgggaccggaaagtacagcacagtgaatgcggccattgcagcgcacctcaacacagccaaaagaaattcgtcatctatataaagacaggcatttatgatgaaatcgtcgtcattgagaatacgaaacccaatttaactcttataggtgatggtcaagatttaaccatcatcacgggcaatttaagtgctagcaatgttagaagaacgttcaacaccgcaactgttggtaagaatttgtattctcttcttgaataatttatagttttctcttctttataccaaactataacattcttaaagacattactaattattctaaaaatatatttgaagcttctaatggtaatggattcatcggagtagacatgtgctttcgaaacacggccgggccggcaaaaggaccagctgttgccctccgtgtgagtggtgatatgtccgtcatttatagatgtcgtgtcgagggatatcaggatgccttgtatcctcacagtgaccgccagttttatagagagtgctttattaccggcactgtagatttcatttgtgggaacgcggtggcggtctttcaattctgccagattgtagcaagacaacctaagatggggtagagcaatgtcataaccgctcagtcacgcgcatttaaggacatttactcgggcttcacgattcaaaaatgcaacattactgcaagctcggatctagacacgacaaccgttaaaacgtatcttggaagaccttggaggatattttcaacagtcgcagttctgcaatctttcatcggtgatttagttgatcccgctggctggactccttgggaaggagaaactggtctatcaactctccactaccgcgaatatcaaaacaggggtccaggagctgtgactagcagaagggtgaagtggtcaggatttaaagttatgaaagatcctaaagaggctacagaattcactgtagccaagctcttagatggagaaacttggctgaaagaaagtcgaattccatatgaaagtggattgtaataatgttgttccatgcttcacatgtataacgtataaaataaaagatattattcttctataattttttccatgattttctacaaagatggtaagaaagtgatatctgggaaatatcacgaagggctttactatcttgaaggcacggttgttaaggctgaaaagagtgtaccacatgctgaaaatggtggaaaaagtgttgtcaaggctgtagttggagtgaggaagaagaagtcaaggaaggtgactttcagcgtgaatttaatttaaggacctactccatatggctttggaacaaaggaataatcagttcaaggaggagatgaatcctcaacagaagaatcagattgtttagaggaggttaaatctgagaaaagtgaaggaccttctcataaccagccactgttgagagatcacaacaaggagtggatgttgtgtgatagtaaaattaaggatgaaaggattacgatgccagaaagtatcattaagaaaggggactcgttaaagttgaaatgaaagagttggaaaaagcttcaaggattcagggaatgagggttaacagagataaagctaagggagttctagctctgttacaagaaagtcaggaaaaggaagctaaaactttcaaaatgaatgaagctacagtagttggtaccaactacatctcatttcagattaatgagcttaactacagaagggaaggaatcgggaaccgaacttatggacacaagatttcagatcatcacagatttggtatccaaaggagatgttgtcctaaacaagatactaaaaacaattgaaccaacagatgttatgactcaagcaatagatggagaggactttcatgcttgctacgatctcctcaacatcgtaaggaggacgacacagctccaggtaactccactatcgatattgtacgctggaaggaagaacagcagagaaacaagtcaactttgggaaaaattgttatgtcgataggaagacttcataagggttaatgacgttccctgtaggcgcctggaaatacggtgaggagacaaatattccaggtggagctgcagattctgattccatgtggagtttgtgt

SEQ ID NO: 143173 - DNA, 3963 bp, Arabidopsis thaliana landsberg
tacatgtcccttcacaacatgttagtgtctacaaaatcgtttttggttactgtatgccaaatgaatacacaatttgatgatattgaacatggatggcagtaaaggccaagtaatgttagaaaattcgaggaggctaaagaaataaatctgttaatctggattcacttttactgtaaatattgaataaataagtgtatgaggtttcttgtgtataattgtaaatatgattgtttccccttgcagcaagagtgagtatgtacgttgcttgcagttcacacaggaagataccatttatgtggccacaaaccatggttgcttgtaccacgcaaggttattgtcatctggaaatgtaaggtggactgaattagttcgcatacctgaagaagggcctattattaccatggatgtcatgtctggtggaaaggtacgcgagtcttgtgcattagacgattgggttgctcttggagatggcaaaggaaatatgacaattgttcgggttattggtgatatgtatccacatgctggcttgaatcaaagttggaaggctagcccagagagacaacttctaggggcattctggtgcaaatcattaggctataggtaaatagatgttggacctgaataatgatttatctgaataattttctcaggcaatgcatccaatgtgtggaatcatttggttggaatatttttgagattacagttttcagtctctggcttccaggtttgttttttcttgcaatcctagaggactcttgaagctatggaaactatccggttctttagaatctgctgctgaaacttatgatgtctccctcttggctgaattctcctctggttttggaaagcgaataatgtgtgttgacgcatcagtagaagatgaggtaatatccgtttcaattattgtcatgtttctgtattctatcgctttctttatactctctagttgatgcatattaatttatcaccatggtcaactaaacgtggagcaaaagaacaccaatctttcttgggtgggcgaaaactaggaaataaattttcttaagatatcaagtctaaaaagtttgcagccaagagtttgtgtctaagccttgttatgttagtaatttgcattgaaagattgttgcttgtaggtgattctgtgtggagatttacgtggcaatatcacactctttcctctgacaaaggacatgctgcacggagtttctgtttcttcagaattgaagataccatcactaaaatatttcaaaggtgcccatgggatttcaactgtttccagtctttcagttgctagattaacttcgaacaaagctgaaatatgctcggtatgactaatttaacttacgttttttttttttaatcttttgctgttggtagtttgtttgttttggagaataaatcatgcaatcctcagtagtattttcttgtcacgctgacaatgactttattgtgttgatctttctttttttcgcaatctcatgtttagactggagcagatggttgcatatgctatttcgaatatgacagagagatgcagactttagagttcatgggtttgaaacaactgaaagaattgaacttagttcaatctgtttgtcaaggggtgcaattttccaaagaccatccaaacaatgactatgcagccggatttgcgtcaacagatttcatactgtggaatttaacagctgaaacaaaggtccaccctcgccgtctccttttttttcaccttcttaatgcgagctctaacgatattctgtcaataggttacacaaatctcatgtggtggctggcgccgaccccattccttttatctcggggaaatccctgagtggcaaaactgttttgcatatgtgaaggtgcatcctttgtctctccgttaaagttgtttaggaatgtttggtctttgactgattgtcaacctgcctctttttttaggatgatgtcattcatattcatagacactgggttggaggacagaagaccaaagtctttcctctaaatttgcatacacagtttcatggcagagaattgcattccttatgcttcatctctacagatacaaaagcgggattcgattctgaagaaagtaaaatatctgatcggtctagttggattgcaacagggtgtgaagatggatctgtgagattgactaggtaggtactagtcttattaaacttaattcagtgatatttgctggcggtttagaaatcattttatttaaatgtcttaaaagtatttggggttcatctaggtatgcatctgagtttggaaattggtcaacatcagagcttttaggagaacatgttggaggctcagctgtgagatcagtttgctgcgtatcaaatatgcacatgatgtcttcggacgtacctaacttaccagacgtgtgcgatcaagactctgcagtggatgattgcgaaagtcctcgcttactgatttctgttggagccaagcgtgttgtaacctcttggctcctaaggaatggtagacacaagaaaaagggagaatcttgtattagtgataatggacacgatagagcgtcatcggaagtgtctccagtgacgttccaatggcttgctactgacatgcccaccaaatctcgtccttgtggaaagatcgagaaatctccaaaactggaaggagttgaagaagatacttctgcaaacgtcacaaagttaggatctaatacgtataatgagcgagaaaactatgaagatgactggagatacatggctgccactgcatttcttgtcaaatgtgttggttctaggttagagggacagctttcacttactttgattgaacccatcaatggtagacaatgttgagaaatcttttctcttcatcttttcaggctaactatctgttttatcgcggtggcttgttctgatgccacccttaccttacgtgctctagtcttgccacatagattatggtaaccagaagtgttttacttgtttgatgagttgcattttcaccttgagtttgtgttttattttgatatactctgcgtctaatttcaggtttgatgttgcatccttggttcctctaaaatctccagttttgtcattacaacacgccgttgtgcctctggatccccctcatgaaggttcagccattgatattaatacttctctatcagttgacttcttatcaattcgtttccttttatgctaaatgaaattgttttcctgaaatcttcttgtcgtaatagttttgataactttacctgacaggtaatacatcatatagtgatgtttatctgctcatcagtggggccacagatggaagcatagccttttgggatgtaactaaatgtgtagaagcttttgtaaagcaagtatctagcatccatattgagaagtacattgattgtcagttacgaccacggactggaagaggaagtcaaggtggtcggaaatggaaactgttaggctccaaaatttctaagagagcacaagagaacagcaactcagttggtgaagctgcagaagaagatccagcctcgtctttggaactcacaaatgaccatcctcaggaaaatggtgaaaacgaagatgcagattctcttcctgtgacaagcgagataaagccttcacatgtcgtgaagaatgctcatcaatctggagtgaattgccttcatgtttctcgctcaaacagttctccaagttatggcaatggtttgatgttcaatgtaattagcgggggtgatgatcaatcccttcattgtcttagcttcaacatcctcagtagtagtaataatcgagccacaatatctgaaatcatggatgtaaaccaaaccccaagttacagaatcatgctcacagaccgcggaggtattgcatcagctcatagctctgccatcaaaggtactttacccggaaagctctatgtgccactctcaaatcatataagtctctactagataaatcttctctttcaccatttcccttataaaagact

SEQ ID NO: 143174 - DNA, 1226 bp, Arabidopsis thaliana landsberg; identical to SEQ ID NO: 8316

SEQ ID NO: 143175 - DNA, 2553 bp, Arabidopsis thaliana landsberg
  unsure (1)..(2553): unsure at all n locations
tctttctctctctnttatcagtaagttanaaacacctatttcaattatttttgtgtgtgccnccgatctaactactaaatacttttcactattttctctgtgaaaatgacgtaagtaataatgttaattatatatatatatacagctcacatttattatgtatttaattacctctagtgcgatttatatgtaaaacacttttacntgtatcgaaatattctcttttatcggaactaatattcgttttttgttttttatttttaaaataacttatatacaattgtgatatttcgacacttctcatgttctgattttgtccggtacttcatgcaaataaacatacgcacgaatctcttattagcctaccgctattgaaagtaacttttcttaaataaaactaatttatttaaagtaacttacattctgctcttggtttcgtttttatgccatctccaatttacgacaaagatctgattctaacaatttttaactaatttgaatacttaatgatatttatagttaatcagataacatattaaaaaataacactgctctattttaatatttattaaaaaggtgaaatgaatatgaacttatcgtacgcttttcgctaaaatcgaggcaagccgcaagttgcatacgatgctctcaacttgcaacattagtcatgcgcattttatcattaacaattaaccacgactaagttacgctcttggggattcgcaggttgtgtcaaatgaggccagggccatgtacaacggtggagttggtgggcttacgtattggagcccaaacgttaacatattgagggacccacgttggggacgtggacaggaaactcccggtgaagatccagtagtagccggtaaatacgcagcgagctacgtcagagggttacagggaaacgaccgtagccggttaaaagtagctgcttgttgcaaacatttcacagcttacgatctcgataactggaacggcgtcgacagattccatttcaacgctaaggtttaatttaatcttttattctttgtcttgcttcaacttctttctttgttctcacgtgtttggttttgataggtaagcaagcaagacatagaagacacgttcgacgtaccgttccgtatgtgtgttaaagaaggtaacgttgcgagcattatgtgttcgtacaatcaagttaatggtgttcctacatgtgctgatcctaatctcctcaagaagaccatacgcaatcaatggggtctcaacgggtaagatcacgccacgtcagctcaaaacattccgtatatgtaatttagaatttcgttgaccgttgaccgttgattttttttttttttctgcaaacaggtatatcgtgtctgattgtgactctgtcggtgttttgtacgatacccaacattacactggtactcctgaagaagctgccgctgattccatcaaagctggtaaataaaattattgatttttagtagaaaattaaaattgaatatttttccttaaactaaccaatcttgtgtgttgattgtgtaggcttggatttagattgtgggccatttctaggagcccatacaatcgatgcggtgaagaaaaacttgttgcgtgagtccgatgttgataatgccttaatcaacacgctaacagtccaaatgagactaggaatgtttgatggcgatatagcggctcaaccgtacggacaccttggaccggcacacgtgtgtacaccggttcacaaaggactagctctcgaagcagctcaacaaggaatcgtcctactcaaaaatcacggctcgtctctacctctctcaagccaacgtcaccgaactgtcgccgtaattggacctaattcagacgctacggtcacaatgattggtaattatgcagggattgcttgtggatataccagtccggttcaaggtattaccggttatgctcgaaccattcatcaaaagggttgcgtggacgtacactgcatggatgatagattgttcgnnnnnnnnnnnnnnnnnnnnnnnnnnnnnnntgcgacggttcttgtgatgggtttgatcagtctattgaagcggagttcaaggacagaaacagtttgcttttgcctggaaacaacaagagcttgtctctagagttgctaaggccgctaaaggcccagttatcttagtattgatgtctggtgggcctatcgatatatcttttgctgagaaggatcggaaaattccagcgattgtttgggccgggtatccgggtcaggaaggtggtaccgcaatcgccgatatcttattcggcagtgctaatcccggaggaaagcttccgatgacttggtatccgcaagattatttaaccaatttaccaatgacagaaatgtcgatgcggccgctccattcgaagcggatcccgggtcggacttaccagttctacgacggtccagttgtttacccgttcgggcatggtttgagttacacgcgctttactcacaacatagccgacgcgccaaaagtgattcctatagctgttcgtggtagaaacggcaccgtttcagggaaatcaatcccgtgtgacgca

SEQ ID NO: 143176 - DNA, 1540 bp, Arabidopsis thaliana landsberg
atgaaagttgctatggaactgtgtcgtagttctcacccattattacaagtatgcggagggactcgtcattttcagggtattatctaaactttcaaacattatttacattttaccatcgactatgtaggtttagggaccacttattagtttgatggattcaacatttagaaaatcgcagagaaacttcacttatctgttcgaacgggttagaaacagatacgtgcgtaattactagcacaaagatcgcagctataatctcgtaaggcaaagtggagcagaggagtttcttatcaatcctctgttttattcttctagcctttggtgttgcttctgtttcagcacaaacatgcatagagaaccgtggatatttcacacccaacggtacatacgactcaaatcgtcgtcttatcttctcttctcttcctaacaataccgcctctcaagatggtttctactacggttcgattggagaagagcaagatcgagtctacgcattagggatgtgcatcccaagatcaactccaagtgactgttctaattgtataaagggcgcggcaggctggttgatacaggactgtgttaaccagacagacgcgtattattgggcacttgatccaacgctgtgccttgtccgctactccaacatttctttctcaggatctgcagctttttgggagattgagccgcagtatttggtgttgaacactgcaactatcgcctcaaatctaacagagttcaagacaatatgggaagacttagcatctcgtacgattactgcagcctccgcagcaagaagcacaccatcgtccagtgataaccattacagagttgattttgcgaacttgacaaaattccagaatatttacgcattgatgcaatgcacgccagatatttcctcaaaacgaatgtaacaactgtctccatcaaggcgtacttgagtaccagtcatgctgtggaaataatactggagggtatgttatgcggccaatctgctttttccggtggcagctttttacattctctaaggcttttcataacattaccttggctactcctccttctcctcctctttatcctcctccactgcaacatcctgtggttgcgtcacaaccaccttctgcatacaaccgggacaagaagagagacaatagtaagtccttgcaaacttatgacttaaagttacagtcaaaagactctgtccaaagacttataagggttgttttttcattctacaggtagcggaaaaatctcaatgaaaattattctagcaattgttgtggttggtatagtcatcctcatcatcatctcgggaattcttgctcgccggtttgctcggaaggaaaaaccatatcaagaagttgaacttaatcaaagtgagtgttgttcatttgttttatttggcctctaagcttttaccaaatatattgtctatggaactaattagatcattctattaccattgtagctggtattacatctgtacgctccctgcaatacaaatttaagacgatcgaaactgcaacaaataatttttcagaga

SEQ ID NO: 143177 - DNA, 841 bp, Arabidopsis thaliana landsberg
gacaattcaggatgtgaatcgtgcatcgtagtggacgctctggtcgctacgtggtggatcttccggtccaaatacctagtcgtcgtataataacgtgaagcaggaagatagagtcggatctagcagtcctggatcggattcgaagaagcgaaagacatcaaacggtgatggagatgacggtggcggtgtggatccggattcggcgatggcagcggaagaaggagattcaggaactgaagatctatctgggaaaacacttaaacgaccgcgtttagtgtggacaccgcagctacacaagagattcgttgacgttgtagctcacttagggatcaaaaacgctgttccgaagacgattatgcagctgatgaacgttgaaggattaactcgtgagaacgttgcgtctcatcttcaaaagtataggctttacctcaaaaggatgcagggattgactaatgaaggtccctctgcttcggataagctcttctcttcaacacctgtgcctccacagagcttccaagacatcggtggcggtggcagtagcagcggtaatgttggagtgccgattccgggagcgtatggaacgcagcagatgatgcagatgccagtttatgcacatcatatgggtatgcaaggatatcatcatcaaaatcataatcatgatccttatcatcagaataatcatcatcatcatcatggagctggtggaaatggtgcgtttgagtcaaatccttatatgatgcagcagaataagtttggatccatggcttcttatccttctgttggaggtggaagcgcaaatgagaattaaaaagagtctatagatggattcaatgggggagga

SEQ ID NO: 143178 - DNA, 2952 bp, Arabidopsis thaliana landsberg
gacacaagcttgaggaattaatgtcattttgtgaagaagaagaagaagaagaagaagaagaagaagaagaagaaggagagccatgtcatatgcagagacactcatgtgaccaacagctatcgaattaggcaaaacctcaacgacaaaaatcaattattcatctcaccatgccacatttttttaacctatcaattgctttttttaaaaacaattatacagatctttttgttcggaactttcccaaatgtgtagattatgcttcttaatattcattttctctatcaataattggacaaccgtcatatcaaatctgtgttagaagtcataattttcaatttctattatttgcttagatcatctagttaagaatgtgattaattataaaattagccatgcttcatttaaataaacaataaattgtccttcaccaagagaaccctttttccatgttgtcaaaaacgcttcaccaagaaaaccattacattatttttccccaaagaaaaccgttatcatatttaaaatatagtaattaacttgattatatctcacttttaagaatttcggtttcatgcttgattaggctttaacaacaacaagcgatgatagtaaatgcctcgatgaacaatgaaatcgtgaaaaaattgtattaattaaatgcaattggaaaacaaatagtattattattaaaacaggggaaacttaagagagatctggccgaaaacggtgattatgttcactatataaattatgaaatactatacgagaggccttcatcattaaaaagattcataaaaacgagccccacaccactcttttttttttcttgttcttgtaatgctaatctttttgttgaatttattacaaaaaatattgtctaaagtctaggcaaggaaataagatactattgctcactcctttctggctaataaattgaagcagcgattttacttctctctctctctttctttctgactctgaaaaagatgaagtggagaagttaatgttcaccaacttaatactgcaaagtcgaaatctttctttcttcttctttgccttctttcaagtgctttccctctctcattctccttcttcctcctctgtttctttgttgttctaaacttaaaaaaaggtatcttcctcagttacagcatatatgtctatgtaatggtgtgttctcttctttgcgtctttgaatgtgataaaaataacaatttgtgggttattatgttgtccagattgaagttgcaagtaacagaggagctgtctcagatctggttctaaagcgagagaaagagattttgagttgaggaaaaatgagtaaagaagagttcatgaagatccaggtttcttcaccattccttctctgttttctttttaaaatgaaagttttctgttgacttaatctgagaatattttatttgtagacttgtgttcttaaagtgaacatacactgtgatggctgtaagcagaaagtcaagaaaatcttgcagaaaatcgaaggtagaggagacaaaaatctgttttgactttttaaagtctcgaatcaaagtttttttcagtttgttgactaaaagtcttgaaactcatttttgtgttttgtctgaaaccaaaccaaaaactcaggtgttttcacgaccaagattgactcagagcaagggaaagtgactgtctctgggagcgtagatccttcagttctcatcaagaagctcgccaaatctggtaaacatgctgaaatctgggagctccaaagggtaacaacaatcccaatcagtcccaaatggccaatcagtttaagggaatgcagattgaccatggaaaagccggaggcggtggtggcggaaacaataataacaacaagaaaggccagaaaaacggcggaggaggtggcggcggtggaggtggaggtaacagtaatgcgccaaagatgggccagcaactgaatccacaacatttgcagcagcttcaacagcttcagaagatgaaagggtttcaagatctgaagcttcctcctcagttaaaaggctctgttcctgtcaacaagaaccaaaaccagaaaggagtcaagtttgatgtccctgaagatgatgatgatgatgatttcagtgacgaattcgatgatgaatttactgatgatgatgacgacgagtttgatgatgagtttgacgatctccctcttccgtctaataagatgaagcccaacatgacgatgatgcctaatgctcaacagatgatgatgaacgctcagaagaatgccaatcttgccggtggtcctgctaaaaacggcggtaaaggcgctcccgctgctggcggcggcggtgccggtggtggaaagggtgctggcggcggtgctaagggtggtcctgggaatcaaaaccaaggtggaggcaagaacggcggtggtggacatccacaagatggcaaaaacggcggtggaggcggtggtcccaacgccggaaaaaagggtaacggcggaggtgggcccatggctggaggagtttcgggaggtttccgacccatgggaggcggaggaccacagaatatgagcatgccaatgggtggtcaaatgggtatgggtggtccgatggggaatatgccggcggttcaggggttaccagcgaccggtccaggcggtgcaccacagggttatttccaaggggccgggatagatcctatgcaaatgcagcaacagcaacaacaacagcaatatttagcggcggttatgaaccagcaacgagctatggggaacgaacggttccaaccaatgatgtacgcaaggccaccaccggcagttaactatatgccgccaaacccgcaccaatatccgaatccgcatccgtatccgtacccgtatccatatcctccaccttatgggaatgatcaatactctcatgcctttagcgccgagaacacatcaagcaccgatattatgtagatggttaaaaatcgttaagc

SEQ ID NO: 143179 - DNA, 1348 bp, Arabidopsis thaliana landsberg
acagtgttgttgatgctgcatctgcttcggtttttgaaagaagtgctgatgcagctaaagctggttctagtgataaaacagctgcaagaatagctatgcatatggctggagatagaacacctgttaattctaaaatggttagcttcttcttcgtaataaactcggttaaaaggtttgtgtattgttgttaaagcgtttggtgttttgttgcaggtgaagagccgttattcgtcgggtgctgcttctcgttctttcacttcctctgcctttactcctgtaaccaaaaacgattttgaactaattaaagtcgagaaaaccccgaaaaagaaagggtatgttcagtttcagacaacacatggcgatttgaacattgagctccattgcgatatagctcctagagcatgtgagaatttcatcactctctgtgaacgtggttactacaatggagtggcctttcacagaagtatcaggtatgcatacatatatgccttggaaatctgttttgttttaagagtttttatggggcaattaaacatgatcttttgacctttcttctacaaaggaacttcatgattcaagggggcgatccaactggcacaggaaaaggaggtgaatccatttgggggaagccattcaaagacgagccaaactcgaagctgcttcactcaggaagaggcgtagttagtatggctaatagtggacctcacacaaatggttctcagtttttcgtcttatacaaatcagcgacccatttaaactacaagcacacagtgtttggtggagttgttggtggtttggcaacactagcagcaatggagaatgtacctgtagatgaaagcgaccgtcctcttgtaagttccaaaaactcaactcactgtgttctttagtagtttctgtctcctgagagtattttgtaatttctgcaggaagagattaagataatcgaggcaagtgtgtttgtgaatccatacacggagcttgatgaagaggaagagaaagagaaagctgagaaagagaagaatgaagacaaagacattgttagtatcatcccttccaccaaatatgatctctctttgctctcttactttggattggtctgataagattatatatgaactatgtaatgtatcaggagaagatcgggtcgtggtacagcaacccgggatcaggaacaacagaagctggagcgggtggcggtggtgtcggaaaatacttgaaagctatgagtagtacagccactaaagacactaaaggttccctagactcagatatttcaaccattggagtgtctaagaaaagaaaaactactgcgtcagcctccacagggtttaaagatttctctagctgg

SEQ ID NO: 143180 - DNA, 1483 bp, Arabidopsis thaliana landsberg
ggcaaaaaaatgtcggactcgccaacttcttctccaccagcaccatccgctgattcccgtccgccgccggatacctcatccgacggatctgctgctcctccacctacggattcagcaccacctcctagtccaccggctgattcatctccgcctccagctcttccatctcttccgccagctgtcttttctcctccgccaactgtctcatcccctcctcctccgccgcttgattcatctcctcctccgccgcctgatttaaccccgccgccaagttctccccctcccccagatgctccgccgccgattcccatcgtgttccctccaccgatagactcaccgccgcccgagtccaccaactcccctccacctccagaggtgtttgaaccaccaccgcctccggccgatgaagacgaaagccctcctgctcctccacctccggaacaattacctcctccagcgtcttcaccgcaaggaggacccaaaaaaccaaaaaaacaccatccaggaccagccacatctcctcctgctccttcagcaccagccacatctcctcctgctcctccaaacgcgccgccacgtaacagttcccacgcactaccacctaagtctaccgctgcaggtggacctctcacctcgccatctcgcggagtccccagcagcggaaactctgtcccgccacctgcaaatagcggtggcggctatcaagggaagactatggccggttttgcaatagccggtttcgcagtcatcgccttgatggccgttgtgttcttagtcagaagaaagaagaagagaaacattgatgcctacagtgactcacaatacttgcctccttcaaacttctccatcaaatcaggttaaaatcttgatccattctctcatcttcaagaagatgcacaaatgtttaaacatatttctttcgctttaacgtgtagatggattcttatacggtcaaaatcctacaaagggatactctggtcctggtggttacaattcacaacaacaatcaaattccggaaacagcttcggcagccaacgaggaggaggaggttatacacggtcagggagcgcacctgattcagcagtgatgggaagtggtcaaacacatttcacatatgaagagctaacggacataacagaaggattttctaagcataacatacttggagaaggaggttttggttgtgtgtataaaggtaaattaaatgatggaaaacttgttgctgttaagcagcttaaggttggtagcggacaaggtgaccgtgagtttaaggcggaggttgagattattagccgtgttcatcatcgccatttggtttctcttgttggatactgcattgcggattcagagagattgcttatctatgaatatgttcctaaccaaacattggaacatcatttgcatggtgaggttcttttttaccacttttctcatcagacaagattttattgtgtgtttttttttacttacatgggttatttc

SEQ ID NO: 143181 - DNA, 1050 bp, Arabidopsis thaliana landsberg
ttagacccattaaataacatcatagtttcatccgataactacacaaatttaaacagtgtcaaaaacaactcaagtgcaggctatgctggatccaaagattgaatctcgagtttcaggcattgcattgacttcaccagctgttggagtccaaccatcccatccaatcttcgctgtaagttaatccgaaaggtcaagtcataatttacgcgttttcagccaagtcttagcaatctgatcagttctctttgttgtattttatcaacaggttcttgctccaatcatggcgtttctactacccaggtaccaaatcagtgcagcaaacaagaaaggaatgccggtttctcgtgacccagcagctctcatcgccaaatactctgacccattagtcttcaccggatccatccgggttaaaaccggctacgagatccttagaatcactgctcacttgcaacagaacctgaacaaagtgaaagtttcctttcttgtgatgcacggtactgacgacacagttaccgatcctagcgcctcaaagaagctctacgaggaagctgcctcgtcagacaaatcactcaagctctacgacgggttgttgcacgatcttctttttgaacccgaacgagaaatcatcgctggagccatattagattggctaaaccagcgggtttagctcgttcaaaccaacaatcactatcgcatcgaatcaagagattcttgattcagacaagaataattaattcgcggaattttctgagtgtgttgactgagaaacgtgaggaaaaagaagttcttggtcgaattttctcaactcagaagtagaaggaagataagagaaaaagagagactccaaatctggactctcttgctatgcttcttgacgtcggcatattgttataaatcaataattttgtaaccttggattttaatatcttatacctgtaataccaattattatttatatcgaaactatatatgattttggctatttcgatagtttatccctaaatattattctttgattttgtgatgttttgttgtttgtccaagaaccac

SEQ ID NO: 143182 - DNA, 1743 bp, Arabidopsis thaliana landsberg
ggaccggagtttagcgtgaggagaagattcagagacattgttacattggctgttagattagctgagtcttatagagggttctggattccaccgaggccagataagagtgtagttgagagtcaagtgatgcaaaagcaagagtttgtggagcagagaagagttgcattggagaagtatttgcgtaggcttgctgcacatcctgtgatcaggaacagtgatgaattgaaggtttttcttcaagcgcaagggaagttaccgcttgctacgagcacagatgtggcttctaggatgttggatggtgctgtgaagctgccgaaacagttgtttggtgaaggcggtggagcttcttcggttgaggtggttcagcctgcaagaggaggtagagattttctgagaatgtttaaagaacttatacagtcagtttctaatgactggggtggatcaaaaccacctgttgtggaagaagataaagagtttttggagaagaaggagaaaatgtatgatcttgagcaacagatcattgatgcttcacagcaggtagagagatttcatacttgttacttcacaaaagatcagtatttttcatggtttttgttttttgtaggctgaatccctcgtgaaggcacagcaagacatgggggagactatgggggaattgggattagcattcattaaactgacgaaattcgagaacgaagaagctgtcttcaattctcaaagagctcgtgccaatgatatgaagaatttagccacttcagctgtgaaagcaagcagattttacagagagttgaattcccagacggtcaagcatttggtaaactagatacttgtagagatatgaagaatctattccactttcattgagctgggatttagtttcactaagagctctgaattattcatgtcaggacacactccacgattaccttggcctaatgatggcagtccagggcgcctttgcagatagatctagtgctttattgacagtgcagacgcttctatctgaactttcttcactggaagcaagagcagaaaagctagaagttgcatcatcaaaggtctttggcggtgacaaatcaaggattaagaagatagaagagttaaaagaaaccatcaaggtcactgaagactctaaaaatgttgccatcagggagtacgagcagatcaaggtattcgattcagtcatgtccatatacaaaacaactcttatgctgatttgaggtcatatgtaactatgtatattgtgacaggaaaataactggagtgaggttgaaaggctggatagggaaaggcgtgcagacttcttgaatatgatgaaagggtttgttgctaatcaggtacatataaggactttgactattattaaacctctgtctcttcatagaattagcgagagagtgtaaagcaagatcttttagctctgaaatggaagagaaaagtcagtgagtgttataggggatgctatgatttggggactttctttcatgaaatggattcaccaaaaggaatatgatttgagatatttgaatggatgcttgaaaattggtgaaatctgctctcttgcaatgctagtgaatgctgagaaatctgagtgagatgtttgaaataaagagatgaaaatatgtaaaaaggtgtgaaaacagagttgttggtatttgaatgtgcaggttggatatgcagagaagatcgccaatgtgtggacaaaggttgctgaggaaacaaggcaatacgatagagagagct

SEQ ID NO: 143183 - DNA, 2566 bp, Arabidopsis thaliana landsberg
taattagtggaatcatgaaagatcagcatgtagaaagacaccgtggttcacgggcggtttacccttttgcagtcatcctctcaccaacaagggaattggcatgccaggtaatatacacaccaacaagaatagagtttcttcagaaagaaaaaatgtacgtgtatataatatacacatttctcattctgtgattttcttgcagatacatgatgaagccaaaaaattctcctaccaaactggtgtgaaggttgttgttgcttatggaggaacacccattcaccagcaggtaattatcatacacttttttgtttattggtttttagcttgtcattggagtttggattttgctacatgattctagcactgttttttgttttatgtgagtagcagctttcgcttactgatttgagttctgctagctctttccttcccaatgccagtctcctttgtcaacatatgttctgattttgaagtcagcaatgcataatgttggcgaaaatcaaatcttgtattacaaattttttcatatgctagttaacattgtcgtatcgcttgtatcatctttacataacatgcagaagcattggaatttttaatccttgttacaggtgttagttagtcaaacagttttcaagcatcgatttgttgaccacatattttattgtttattcagctcagggaactcgagaggggatgtgatatccttgtggcaactcctggccggttaaatgatttgcttgaaagagctagagtctcaatgcagatgattaggtttttagctctagatgaggcagacaggatgctggacatgggttttgagccacagattagaaagattgttgagcagatggacatgcctccacgtggggtgagacagacaatgctgttcagtgctacatttccaagtcagattcaggttggtttacttgtccatgaaacacctttttcttgctcttaaattctattctagtgaagtagcatggtaacaaagaacaggataacagtgttcttggatttatgtctgtaactctgttccttcccagatcatgaggtgaatctttgatgatttagtctttagagtgttatatttcttatgtgagaacagctgcataatattcagcacgcacaagaatgattggttcttaacgtttcttttaatattaccgtatttgtttcctgtgcagagacttgcagctgatttcatgtcaaactatatatttttggctgtgggaagagttggttcaagcactgatttaattacccaaagggttgagtttgtccaagagtctgacaagagaagccatctcatggacctgcttcacgcgcaaagagagacccaagacaaggtaatgcattatttaccatctgttcacttatccaagatttattatcactgaagctctgactaattctgcctttcttcactttttatacacagcaatcattgacattagtttttgtggagacaaagaggggagctgatactttggaaaattggctgtgcatgaatgagtttccagcaacctccattcatggcgatagaacacaacaggttcgttgattgagttaagttgaaatttggataattgtgcacactaaagctaaaaccaaactatagaaacaacctcgatgatattactgaaatgaactctttaaagatcatcatcagtaagttgttctctgttgactcaatctgattgacttctttatgttgttatgaattcaaaggaaagagaagtggcactgaggtccttcaaaactgggaggacacctattttggttgcaacagacgtggcagcacgtggtcttgacattccccacgtggctcatgttgtaaacttcgatctaccaaatgacattgatgactatgtccaccgtatcggacgaacaggacgtgcaggcaaatctggaatagcaactgccttcttcaacgagaacaatgcacaactggctaggtcgcttgctgagctaatgcaagaagccaatcaagaggtccccgagtggctcacacgatatgcttcacgtgcttcatttggtggtggtaagaaacggtctggtggtcggtttggtggccgtgacttcagaagggaaggctcttacagtagaggaggaggcggcggcggcggaggaggcggcagtgattactatggcggaggaggctatggtggtggtggatacggtggtgctccaagcggtgggtatggtgctggagtgaccagtgcttgggattagccaattaggctccccaatttttcctctttttaacctgaactatttatttcttctcttctacattcccaagagagcacgtgttatttgcccccacctttgagatctctcattcaagagatggatttaactaatcttgctattaggtggatctctctgttttttcaggctatttttaggatttgtcctaaaagatagacagtagtttttccgattttgatcttgttcttggtttcttctaacaatttcatttgttagtttgaaatccaatttgtctttttgtttccctttgttgttgacaatctttcttggtgaaatacaatctctctttatatca

SEQ ID NO: 143184 - DNA, 1235 bp, Arabidopsis thaliana landsberg
ttaactggaagttctaagcattcaggaccaagggtcgggaagtcaggagaaaatgttctcttaaataaggcagatgaatcaaacacatctgccatgtctgacagtgagagtgaaaatgatcctgaaatgctagaacttgatgtaagtatgctgttttgtctcatattaggaagaatgaaagaacacatctattttgttggctgaacttttgcctcttttttttttttattaatgtttactttcatctcctagtgacaaaaatctcaagttaaaatgttctctatgttgttgagcaggtaaaagtatgtgatacttgtggagatgcgggtcgtgaggatttacttgctatctgtagtagatgcagtgatggtgcagaacacacgtaagcctgcttctgttcatgggaaagaaaagatcaagtactttttgaagagtgatcaccattgtctctactaagtatatagttgtgttttcttttgactcagctattgtatgcgagtaatgcttaaaaaagttcctaagggttattggctttgtgaagagtgcaagtttgctgagaaagcagaaaagcataaactaggtaaagatacatgttgttagtgcaaaacattaggaacttgtttttttaatttttgtctaacaaaattgagttgaagcgtgcagaaaccaagcgaaaaagagagagtgaagtaaacgttaatacacagatctccagcaaaaggcacatagataaattcgaggcagttcctgattctaaaagattggcagttggggctcaaataggatcacccaagagatctgttctcccaagaatgtccactttatcccgagaaacatcatttaagggcttagagaagccaacgagaaagctagctcattactcatctttcaatagccactccagtgatgacacagaaagcacacgatctactgactcacagctccagtcccctaaaggtaggacatatgatacaatttctctccaatgcagttcttccttgtttaatttgccgtacttctggtgattttgaaggttgtataatattaccttgttttttatttgtataggttcgtttttgaagtccaattcgtttaattcttcgagctctagatcaaaagtgagaccagtggatgatgatatgctttcacgacagaagactgggaacgaaaattcttcctttgaagctaaggaaggattttcaaaaaaagtaagcaaatcaatgtcaagtagatga

SEQ ID NO: 143185 - DNA, 1427 bp, Arabidopsis thaliana landsberg; identical to SEQ ID NO: 8525

SEQ ID NO: 143186 - DNA, 2440 bp, Arabidopsis thaliana landsberg
atggatgaccttgaacaggcaatagtaattagctttgaaactggtgctgttgattcggctttaaagtctcaagctgttacttattgtcagcaaatcaaagagactccttctatttgtagtatatgtattgagaagttatggttttctaagcttgtccaagttcagttctggtgtttgcaaacgcttcaggatgttttaagggttaaatatggatctatgagcttggatgagaagagttatgtgaggaaatcagtgttttcaatggcttgtttggaggttattgataatgagaatgctggtagagttgtggaaggacctccttttgttaaaaacaagcttgcacaggttttggctactttgatctattatgagtaccctttgatttggtcctcggtgtttcttgatttcatgcttcatttgtgcaaaggtgctgttgtgatcgacatgttttgtcgggttttgaatgccttggacgatgagttgattagcttggattacccccggacaccagaagagatatctgttgctgctcgagtcaaggatgcaatgaggcaacaatgtgtccctcagatagccagagcatggtatgacattgtatcgatgtacaagaattccgatcctgatctttctgctactgtgttagattgcatgagaagatttgtatcttggattgacattggtttggttgccaatgatgcatttgttccactgctgtttgaattgattttgtctgatggattgtctgaacaagtccgcggtgcagcagctgggtgtgtcttagccatggtttctaagcggatggatccccagtcaaaactgccccttttgcagacccttcaaatcagtcgtgtttttggtttagtatccggagatgttgattccgatttggtatcaaaagtatctgctttgcttactggctatgctgttgaggttctcgaatgccataagcgtttgaactcagaggacaccaaggcagtctccatggatttgctgaacgaagttctgccatcagttttttatgtcatgcagaagtgtgaggtggattctacttttagcatcgtccagtttctcctgggttatgtttccactctcaaaggcctccctgcattgaaggagaagcagctgctccacattacacagattctcgaagtgataagaattcagatttgctatgatcctatgtatcgtaataaccttaattcactggataaaactggattggaggaggaagatagaatgtccgagtttagaaaagatctctttgtcttattacgtacagtgggccgtgttgctcctgaagttactcagcatttcattcgtaactcactagcaaatgctgttgaatcttcatcggagagcaatgttgaagaagtggaagctgcgctctcgcttttgtattcattcggagagtctatgaccgaggaggccatgaaaacaggatctgggtgtttgagtgaactaattccgatgctcttgaccacacagttccctggtcattcacatagacttgttgcactagtgtacttagaaaacataacaaggtacatgaagtttattcaggaaaactcccagtacattcccaatgttcttggtgctttccttgatgataggggtttgcatcaccagaatttctatgtgagccgtagagctggttacttgttcatgagagtcgtgaaattgttaaaatcaaagcttgtaccattcattgacaagatcttgcaggtaagggtttgattttcattttctcttatctacagctcgtttgatctgaaggctagttatccatttttgtatatccgatgtattttcttgtttaatttttttgtctaactatctttttatgaaaaatcagaaccttcaagatacgttgccccagttgacgactatgaactttgcatcaagagaactttctggaactgaagatggcagtcacatttttgaggtttgactaccacttgaagctgctgttttcatatatgtacttctgcttggaaaaaaggaaattttttcagtactctaaaaaaaatctctcaactcctaatacttttttctgtaggctattggcataatcatagggttggaggatgtcccggctgaaaagcagtcagattatttgtctttactgcttacccctctctgtcaacaggttttcgtttctaccattctcttgttcatgaaactttttggcaataattatggtcaggtgtactcacactctttccatgtgatatgattgtaccagattgaggcaggacttgtgcaggcaaaagttgcaagttcccaagactttcctgtgaaaattgcaaatatccaatttgctattgtggcaattaatgcgctcagcaaggtttgtgttcgtttattctagtttctgcacgtgagatttgttacttggtacttcaaattttaccctcttctgggcttgtccttacacttttgc

SEQ ID NO: 143187 - DNA, 1734 bp, Arabidopsis thaliana landsberg
tttctgatatacagagaaggagttactcaagaaaatgacgcatacagaaaatgttttcattttgatggtatatacttggtttattccatactcttatgatatgatcgtttttttttttttgctcacttactctgcgcttttacaggattcatgtcgttgtacttgtataaacgattctataggtgtaatacatctcttgacgggttctcttttgataatgggaatgtggaacgtaggagaaatatctccttggatgagttttctaaggaatacgacgccaagaaacctgtaaagttccaatctttgctagtacatgagattttgatctgttaaaacattttcagatatgtgatgttgttcctgtctatgatttaggttttgctttctggccttgctgattcttggccagccagtaatacgtggactatcgaccaactctcagagaaatatggtgaagtcccgtttagaatatctcagaggagccccaacaaaatttccatgaagttcaaggattacatcgcatatatgaaaactcagcgggatgaagatcctctatacgctttcgatgacaaggttcgagaaacagttttgccatttatattagacttcattcacgtcagtgatagagttgtagtagtaccgaaactttgtggtgataatatttgaaggattcaacatctcatgtagtttggagaagctgctccagaattattgaaagactatagtgtgccccatttgtttcaagaagattggtttgagatcttagacaaggaaagtcgtcctccatacagatggcttatagttggtccggagaggtctggtgcatcttggcatgttgacccagctcttaccagcgcctggaacaccctgctttgcggtcggaaaaggtagacacctttatggacaaaaatacaaataatttttcttcctttcctgcaatattattctcattctgatgatgatgtcataatgttttaaataggtgggcattgtatccccctggaaaagtgcctctaggtgttacagtccatgtcaatgaagatgatggtgatgtcagcattgatacaccctcatctctgcaggtatattgctaaactgtttaagcactgccattttgattcgtctttactgtatccctcttaatgttttcaatccctgtacagtggtggctagactattatccccttcttgcggacgaagacaaaccgattgagtgcacactactacctggcgaaacgatttatgttccaagtggttggtggcactgtatccttaatcttgaaccaacagtggctgttacccagaattttgtgaacaaagaaaactttgggttcgtgtgcttggatatggcgcctggttaccatcacaaaggagtttgccgtgctgggcttcttgctcttgatgatgaaaattctgaagatttggaagaagaaacacacgatgaagaagataatactttgagctattcagcccttaccaggaaagagaagaggacacgaatgaatggaggtggagagtctgataaccgcgaagaggatgtgaatggagtatcgaagagatataatatgtggaagaatggattttcatatgatatcgatttcctcgcttcatttcttgataaagaaagagatcataacaatttcccatggtcaatggggacccctgtaggccaacgagaaatgagagcctggaaatccaagctttgggttatgaagcctgagatgagagaactaa

SEQ ID NO: 143188 - DNA, 936 bp, Arabidopsis thaliana landsberg
tggtttttgatattttttattaataatgtcttaggttaagacaagggaagagcaaaagtcagagaagaagatcaaagtagaggctgagacagagtcaagcatgaaaggaaaatcaaacatgggaaacactgaagcatcttcagacacttcaaaggagacatcgaaaggagcttcagagaatcagaaattagattatatccacgtgagagctcgtcgaggccaagccactgacagacacagcttagcagaaagggtaataaaaataaataagtttcttgtgatacaagaatcatgatatatctagggtttctgaatggatttggatttgcaggcgagaagagaaaagatcagcaagaaaatgaaatatctgcaagatattgtgcctggatgcaataaggtcacaggaaaagctggtatgcttgatgagatcatcaattatgttcaatgtctccaaagacaagtcgaggtaagcaatgaaaccatgattctctgtaacttaacttcactattaaccaaagagaataagtctaattcttaaagagccatactttgcagttcctgtcgatgaaacttgctgtcttgaacccggaactagagcttgccgtggaagatgtatccgtaaaacaggtgaaaacacattgtctagaccctcaaagtcatattgatattgctcaacaaacttaagggttatgaaattttcagtttcaggcttactttacaaatgtagttgcttcaaagcaatcaataatggttgatgtgccattgtttccgttagaccagcaaggatctctagatttgtctgcgataaacccgaaccaaacgacatctatcgaagctgtaagtacagctttatatgaaactgaaaaacttgtcagagtttttgttccttgtcagtgaagtaacctgtctctgtatctctctatttcagccatctgg

SEQ ID NO: 143189 - DNA, 8423 bp, Arabidopsis thaliana landsberg
ttagaaagatagccacgagtggcaccggtatcgttacaaggtaaatcattgtgttctttcttttcatatgtaattgtagttaaatgtatatatccactggtattcatatgtgtttcatgtaatataataatagatcacattggtctggatttccagatgcacgctcagctatttgtttcataaattgctcacccttaaaagaaatggaatgtggcatagtaattttaatacctgattgttatctttttatttatttatgccactcgaatataatttctttttactttcaataaatttagtgtgctcgattttatatattgtttagaacatttgtgataagtaatattgaagtttctaccctgtagatattgtttggaattgatacatctttaaattagccaaatcatgagtaatatcatagaaatatacagcagctgtaatctttctgtttagctagtatcttttaaatacaccatatttggttcctgcagggatgcatttatcaagtattgggttgatggacatatgttggcaatggacgtagcctcacagatatataatattttaaggcagccaggttgcaagtaccttagacaggtctctttgttttcttttcccagctcttcactgctgttttgatttgtttaccaatgattattgtctcacttgatttctttagtcctgaaggctaatgtcttcttttggatttgggataggctgacttcaaaccagttcttgatgagcttctgacaactcatcccggcttggaattcctgaggaatacacctgagtttcaagaaagatatggtaagaacttggtttttgatacattgatgttatggtgtgaaatagttctaccagaatgtctgttttctactaagacgttcgtacaatttctttccatatatatatgatctttcaaaacgcattgacgaacttgaaagtgacatctttagctggcttgattggcctaggcaataattcttctaattttaattctatgtacttgatcattataattacattttgaaaattatgagatgcttcttaaatatagtatattttcaggagcttactgttttatacatctattgactaattcataatctttttcccgtgcttgcttcattcttctctgtgttctattccgtcaacccagctgaaacggtcatctacagaatattttactacattaacagatccggaactggctgccttactcttagagagctgagacgtggaaatttaattgctgctatgcaacaacttgatgaagaggacgacattaataaaattattaggtgagtttattttttcttttcataatttcctaacaataagtatttgaaattcaaacatattctgttgttatataaggagtaaacaagcttacgaaaatatattaaagttcgagggtttatcacatatgtaacattaaacagttcaaaatggaagagctatatgagtattggcttataccttcatattgcttctgtaacagaacttatgcctgattttaccatttgcaatcatgtcgtttcttttaattttcaggtacttctcctatgagcacttctacgtgatatactgcaaattttgggaacttgatggtgaccatgattgttttattgataaggacaatctcatcaaatatggtaataatgcccttacctacaggattgttgatagaatattttcacaggttggttcccaaaattgttcctgcctagaccttcttaaaagctaagttatatagtatgatgtgatcctttttatttgatctccatgcgtcttgtggctatgtttctcttttagattccaaggaagtttacgagtaaagttgaagggaagatgagttatgaagattttgtgtacttcattctcgctgaggaagacaagtcttccgagcctagtcttgagtattggtacatgtctcttcccctcttctctttttgtctttagtgacttctctttagccattttgtcctttagctgcttagctcacagtatgtcactataaatgtataacttctgagccaaaacttgtggcatatgtggccttcttgatgatacaagcctacctgatattttgaacgcactaaacatttagtagtactattatttcatgaacataggatacccatcttgaatctaagacattttcattcatcatctcatgaacctagaacattttcattcatcatctcatgaatctagaacattttcagttgaaccgctgatatgagggcatacctcgctggtatgctcatctatctcccatcgatgttaaacacaggttcttggcagttttttgtttttcgttttcccttgatattgattaaaaccatctttgcaggttcaagtgcatagacctagatggagatggggtgatcactcccaacgagatgcagtttttctacgaagagcagctgcatcgcatggaatgtataacccaggaacctgtactctttgaagatatcctatgtcaaatattcgacatgattaaaccagaggcaaaatttcttttaaaccataacatggtcttttgatattcctggcttgtctgttcctttgctcttattcgcatcatcaatttgtcgaatgactctttcagaaggagaactgcatcacactccaggatctgaaagcatccaaactttctggaaatattttcaatatactctttaacctgaacaaattcatggcgtttgaaacccgtgacccttttctcattcgtcaggtaaacataggttttctatagagttttcctccctttggttattcaatccttcgtttagctgttgaaactgttactactgaatatttattaatgccataaaaattcgcaaaaattattataagttcagatagtcacctgctactgcagccggttgtatctgttccagtctctgctacttctaaaccaactttgttttccatttgacaggaacgtgagaatccaacattgacggaatgggaccgatttgctcagagagagtatgtgaggttgtcaatggaggaagatgtggaggaagtctcgaatgggagtgcagatgtttgggatgaaccactcgaatctccattttagtgactcgtaagaggtactttgttcaacactggtcagcatcatgttccttatgcatgtatgaaatagcaaaattgatgtgctcaatgttacaagtttgtatcttttggtatattaaacgtattaaaagacgttttcgttgctttttttactagtttcttgggaagaagagggagaagtcagatcttcttgggtggtaagagcctcggaaacaattttcagacagacaaccacgaaagccagtccattccacggttccacctagagattggcgaccaagagacttatccgatgcgtaagcttgtgttagtttcatgaaatatttgtcttgcttaggtttctcaggttggaccctctttcaatcttatgtatattatatacgccgctttatagtgttttgtggaaccaacaacaacggttttatttaaaatcgaaagaactatgtacaaagacactttttttttgtgggaagaaatttacaaaccttgaaacttgttttacatgatcattgtttttgctttttcctcattagcaaatttgtgcctatgatatcaactacaattctcgtataaactatagaatatcaaatcaaattatatactatatatcagtttttgattggtttgagccgacattggttatttgtttgtataagaatcattaaaactttgtttgtcaatatgatattttggaagatgtgttaaaaagtcgtgcattttgttttaacaagcatgaactcactttctatggcggttaaaaacaagggaatttgacacgtttagacacttttaaagaattttattctttttgaggcacttgtcacggatgaagcacttttctaacttttcattaaacttttgaccaatttacccttgaaaattaagaaattataataaaaaaaaaagtttcatctttccacgttcctttttttttcttcttcttcgtcgcttcttcttttcactctctttctctctcttctcattattactttttttctttccttgcaaaatcaaacatttgatagtttgtcaagatcgtgtagcttctgtatttttctttacggagaagcctctctagagaaaacggagaataaatagtaagggtgtcgttgcgaccacttttacacgagatgttggtgtcgtcggcatcactagactaaacggcgatcacttttatagtcgttgcgactctttcatgagaatgatgatgttagtctctacatacattacacgcaagtaagttaaaaaaaattcagtcgccgatcgctgacgtatcgattacaaaaagaacagggccattccttttcaaaagccatagaatttgatagcaaaaaacttagagacaagttcaagtaaactgagataaaagagtaaagaagaacgtgtccagaaatcgttgtccacataagtatgttcatttaactctgttaagatgatcttctcgattttgtctaaattttaacatctatatcttaaacacaacgtagaatcagtctatcgtctgtgaatgaaaattagtatcagatgtaagttaaaatgtccatcaatttcacagaaccagaactagcaacaaggttcttcaataagtgaatcaaccatcaaaaaacttataaaccgtttatgatgaacacataaaataaccagattttctgaaaagatacaacccaaatataatcatgaatcaaattcacagaacatgaactaagcaacgagttccatcaacgagttccatgaacatgaacccaaatattaaacgattcgaagtccactacgaggctttaatctccaattcaagagaataatctcgaatatgaaattggaaaagcaagacaaagaatcaaagagcaagtaatgagattaattttgcaacaaacagcaaaaacataaaacgaaaaccaaaccgtaaatccaattcaagcattcaacgagtcatgtaactaaatcggccagatagggcagattctcaaattgatggtgtgaattttttttccttcaagtcagatcaaagcacacgcgaaaaattaaagaaggtgaatctcaatctctcttttcataaaagctcatgatttgttaaagagggaagaaagaaaaaggaataaatatatttttttggcttgagttttgtttatttttcgacaacgtgagagaaagagagagaaagagagagaaagaatagaaggaggagagagataaagtaatatatggttagagggtaaataggtcaaattatccatttaaagtgccttctcattagaaagtgtctaaccacggaaatatttttaaaaagtgtcttagaatgtaatatcctcttttcctttatctcctcacctttttcacaaaaccaatacaaatctcacactctcctcaaagattccttcaattcaccaaaaaccctaaattttctcatatttcaatggcgatttcatctcctgctgctacttactcatcgtcaaaatccctcaattgcttcacttccccatcaatctatatcatttaaccaaaatctctaactctttcttcgtctttcccccatcaatatcatctctctccatcaccataatcataaatgatggaattaaaaaataaaattctaattatagtgactggagattaaaaaccccgtgaagaagacgaagtgaaaggaaaaatacgaaataaaaattgaaaggattggatgtgggctcgaaccgtggaattgagattaaccagactgggcgttaccagaccaagacaacataaacgaaattttttgtaaacctgttattatataattaaaatacgtaaggttaaaatttaacactgtcaaataattccgttatgttcattgacggctgttaagtaccaggttcaaaattagcaaaattaaaaatatgatggttttaaaaaacaacaaaaaataagtgagatatttttattccaaatttaaaactacaagtattaaatgattaaatgatggttttttttggcttatttcccttttagcaaatcaccgccattattcaacgcccgtctcttcttccgttatatttttgtttaacaaaaaaatctttgttagtcaatttaattaaatttttaaatattcgctttccttgttttctctaatttttctcatcggtcgtttctctcgttaagctactattcaactccgtctcctcaccgtccgatagtttgacttttttttccccgatcaattaaaactttgaccggcaacaatgggccactgttacagccggaacatttccaccgtcgacgacgacgacgaaatcccctccgcaaccgctcagttaccacatcggtcacaccaaaaccaccaccagacttcatcatcatcatcaattccccagtctccggctacttcagaagtcaacccttacaacatcagcccatttcaaagcccgttaccggcgggagtagctccatctccggcgagaactccgggaagaaaattcaaatggccattcccgcctccttcacctgcgaaaccgattatggcggctttaagacggcgacgaggtacagcaccacatcctcgggatggtccgatccctgaggatagtgaagccggcggaagcggcggcggaatcggagaaaggttagataaaaatttcggatttgcgaagaattttgaaggtaagtatgagcttgggagagaagtagggcgagggcattttggtcatacttgttgggcaaaagcgaagaaaggcaagatgaagaaccaaaccgtggctgtcaaaatcatctctaaagctaaggtctgtctcttctcttctgttttgtttggtttcagaatgtagggactcttgttttgttactattcacaacataatcactatttcagattcagaggaatgtagaatgatatagttaggttctctgtgatcattggttagacgatgaattggaattttgtgttttcagatgacgtcgacgttatctattgaagatgttcgtagagaagtgaaattgctgaaagctttatcagggcataggcatatggttaagttctatgatgtatatgaggatgctgataatgtctttgttgttatggagtaagttgtttgactctatatggtttgttctttattaaatgaatctactgttagatattcaaatcttcttctccgatatggtttcaggttatgtgaaggtggggagctattggatagaatattggcgaggtaaatccaaagttacctttcttagtcttacttttatattagtgcttatatttcagcctactcaggctagttagctttgcattagatttaaatccaaccttgtcttttgcagaggtggtcgataccctgaagtcgatgccaaacgtattcttgtgcagattttgtctgcaacagcattttttcaccttcaaggtgttgtgcatcgtgatctgaagccggaggtacactgtctgcttctataatttgataatatttctgttaatgccacctattccctcttctgtgttatgtatggttgcttaaacatatggtacaactgtgtatccagaattttctctttaccagcagaaatgatgatgttatactcaaggtcatagattttggcttgtctgatttcattagatacggtaatgatctatttctttggttctctctcttattacatgattctttacatatcatatgtctggcattgacattaatttatctaatgagtttagctacaatgtgtaatggtcatttacgatatccatatatgtccccttggaattatttgtcttgccaaatctcatttgtacaagttttccgctcacatttcttatttgttaatcttttatatatgcagatcagcgtctcaatgatgttgtaggaagtgcatactatgttgcacctgaagtactccataggtcttacagcactgaagcagatatgtggagcatcggtgtcataagttatatacttctctgtggaagcagacctttctatggaagaactgaatctgcaatattccgttgtgtgcttagagcaaaccctaattttgaggatatgccttggccttctatatctcctactgccaaagacttcgtgaaaaggcttttgaacaaggaccataggaaacgaatgacagctgctcaagccctaggtaagttcttttccgtgggttaaaacagatatgatcttgaaatggaaacaatcatatggctttagatcttataagttaactgttttattttttccattagcggtaatattatatgatctatatttgtagctcatccgtggttacgtgacgaaaaccccggtttgcttcttgatttctcggtctacaagttggtcaagtcctatatccgtgcctcacctttccgacgatcggcacttaag

SEQ ID NO: 143190 - DNA, 2367 bp, Arabidopsis thaliana landsberg; identical to SEQ ID NO: 41823

SEQ ID NO: 143191 - DNA, 1644 bp, Arabidopsis thaliana landsberg
  unsure (1)..(1644): unsure at all n locations
caatttttcagacaattttctttccaaatcttttcgtaattctgttttatttttcaacgttttaggtttttaccaatcccccgtagttatatccaacattaatttttttccctcttctcagaaaaaaataaaattcaactcatctctagagtttttaggttcttccaagaaattgaatttggaaggaggctttgatgggtttgaattttccataatcgtcccttgtttacggtatttttctcaaggaatccctgaaaaactatttcttggtctttgtgtaattgtctggtgcaaatcaagttattgtttttatcttgtgttgttgattcagactcttgttgtttgaaaatgctatggctcgtgaggggatgttgttttgattttgggaaagtcttgtttgaatggtcacggcttttctgaacattcgcgtgttctttcttgtctcggctctgcttcgaaatgtctctcggccaagaaaatgttgatcctgttgaagtttcaggtaaaatcctacacaatcctttaataattattatccaccaagtttttaaacttgtaaaggtttcaaatttttggctttttgttttatagggtcgcatgcttgcttatatgaacttttatgttctgagacacccaaatggactcctcttagggttgaagatttgcaaacatcttcttctggtaattattacttaatgatggagataaacattcttaagatatgttttaagtgttagttggagacaatctcatgtcctgtttgttttgttttagatcccagagatcggttggagaagttgctgaagcaacctgggaataaatattgtgctgactgtggctctcctgaaccaaaatgggtgtaagttgattaatacttctgtgttgtttgtacatttcttttgatgaactggattgattcatttcatttcgttttagatcgttgagtcttggtgtatttatctgcattaagtgttctggtgtacacagaagtcttggagttcatatatcaaaggtactttcttttcataaacaatcttgacttttctctgcttctgtgtgtttctagagtcttttatcgataaatttgattgaatgatgatcgcaggttctatcagtaaagctagacgagtggacagatgatcaggttgacatgcttgtaggttacggtggaaacacggcagtgaacgaaagattcgaagcttgcaacatcgaccagtcaaagaaaccaaaaccagattctactaatgaggaacgaaatgatttcattaggtgacattttttacttaacaatttgtataatggtattgtatgtataatcatcttgtccctaaatctttaaatctttcagaaaaaaatatgagcagcaccagtttatggatccaaaggatggtgctttgtgcacttatcagcagcctagcagaacaaacacttcaccaccgtctttatgttctgcaagccaccgttctacaaaaaaccgtattggtcatgcatttaggaatagctggggaagaagagaatctgatcacaaaggaccaaagaagagcaattccatggtaacaatcactatacatacatacatacatgtttgngtagttactgttgccaacgttagttaatttttgtgggtgttttataggcaagtat

SEQ ID NO: 143192 - DNA, 877 bp, Arabidopsis thaliana landsberg
ttttttgttaattgtaatagtaatgccaaaagtgaatttatatgtgatttgaatgttttgttttgtttaggagtggtaggagatggattcatggctcgtgatctaacgttccagaacacggcgggaccagacgctcaccaagcggtggcgtttagatccgacagcgatttttctctgatcgagaattgcgagttccttgggaaccaagacactctctatgcccatggtcttcgtcagttctacaaaaactgtcgtatccaaggaaatgttgactttatctttgggaattcagctgctgtcttccaagactgtgaaatcctaatcgcaccgcgtcaaattaaccctgaaaagggcgagaaaaacgcagtcactgcccaaggaaggattgacccgtcccagtccacgggtttcgtgttcttgaactgtttgattaacggaacagaggagtacatgaagctgtttaaagctaaccctaaggtgcataagaacttcttggggaggccatggaaagattactcaaggactgtgtttataggttgtaatttagaggctttgattactcctgatggatggttaccttggagcggggatttcgcgctcaagacactttattacggtgaatctaagaacacgggtccgggatcagataggtcacaaagggtttcatggagcagtcagataccggacgagcatgttcatgtgtattcggtggctaactttattcaggctgatgagtgggcttcgatgtctgcttaaatcaatctttaagactataaggggtttaggaatgttttaaaagaagaaaaccatctcattgtaatttagttgataaactgttttaaacataaaagcaaacattgcattcatgttatatcaa

SEQ ID NO: 143193 - DNA, 396 bp, Arabidopsis thaliana landsberg
catattatttattcttaattagttgattagttatgcttgataaactactatatggacatatatgaatcagaaattgtgctacaaaatatgttctatatagaaaatgtttacatgattatttaaattgtcacaggagctaccagttcatcaaagagctgacgcggtgaatagtctggtttttgaagcaaacgcaagagtaagagatccggtctacggctgcgtaggagcaatctcctacttacaaaaccaagtctcgcagcttcagatgcaactagcagtggctcaagccgagattctttgcattcagatgcaaaatgagccaaccttacagtctcatcatcaagtacttgaaatagaacaagaccacaaagctctcttactaaacaacaacaacat

SEQ ID NO: 143194 - DNA, 1525 bp, Arabidopsis thaliana landsberg; identical to SEQ ID NO: 3663

SEQ ID NO: 143195 - DNA, 1529 bp, Arabidopsis thaliana landsberg; identical to SEQ ID NO: 10980

SEQ ID NO: 143196 - DNA, 2213 bp, Arabidopsis thaliana landsberg
agatgacgaagatcttttgagggttgagagagaagaagctaagaagattgggatcaatcaaaaacgatggcgaagaaaagtctcaagggtaaaattggaattagaaaaaacatgtggagagcacgtgacacgtgggatttatctgagtttcacagtagacctgtgaagttcatcctcttcatcgttaacttcgcagactctgttgattagtcaacacagatcagaatctgaggctttggccgagacgagagaaaagcagaagaagaaaatggcggagactgtacattctccgatcgttacttacgcatcgatgttatcgcttctcgccttctgtccacctttcgtcattctcctgtaagctcatcaatttgtgattcgcaagtctttattctagttctcagatcagactcgcacacttttctggctccttaattcatagcgaggggtgcatagccgatatctttaaatcctttcccattaagtaggacttgataagagtctttaattgaaaaagcgattcaatgattctttctctggccaatgtgagtttccagatttttaggaaacaagggtagatttaaagctacaaaatcatatttagtgagttttaagtaatgctcacaagtttcatttctttatgatgcagatggtacacaatggttcatcaggatggttctgttactcagacctttggcttcttttgggagaatggagttcaaggacttatcaacatatggccaagacccactttgattgcttggaaaattatattttgctatggagcatttgaagctattcttcatctgcttctgcctggtaaaagagttgagggtccaatatctccagccggaaaccgaccagtttacaaggtatgttcaattagtcttgtgtggtggaagttgatgcagatgacaactgtacggttcttttcttgctggccaatggtctgtctgcttactttgtgacactagcaacctatcttgggctttggtggtaagaaatgtttccgatgactttggtttggtttaagttattgtttacgtatcttaagcttggattaagtgttgcacctatgtgagttcatttctgtgcgttattcaggtttggaatcttcaaccctgcaattgtctatgatcacttgggtgaaatattttcggcactaatattcggaagcttcatattttgtgttttgttgtacataaaagtaagtgtctattgcatgaatggtgtgttctttgttttcttagtctctatttttgtagaatttgaccttttgtgttgctaaaacttatttttttttcttgtacagggccatgttgcaccttcatcaagtgactctggttcatgtggtaacctaataattgacttctattgggtgagttatttctgctgatcagattctcattctttttgaaattgcttgttgggatttatttgaggaactctggtcttactagccatctcctcataatatttttgcctcttttctcgacatttggaggtcaagtttcactaaagtttccaattttagtagacctgtaaacggaaatgttcttagcagtatttatctttttattgatttaagtacaagagaactagtttggtgtgaatgtctgtcggtgaaggaaaagaacaaagtatgcagtagttattataacaatatcaagttgagatcttctctcaccatgtactcttttgctccaacttatcattaacacaatccaatttgtggcaatctttttctcactgtgtttttcgcgtcgtgctttgcagggcatggagttgtaccctcgaattggtaagagctttgacatcaaggtgtttactaattgcagattcggaatgatgtcttgggcagttcttgcagtcacgtactgcataaaacaggtattttctggataattcttatgtaaatactacactctgacgacatagtctggtggtttctttaagtccttatttcattagagagcttcacctctttctgatttgtgattcctgtactttctttaaccagtatgaaataaatggcaaagtatctgattcaatgctggtgaacaccatcctgatgctggtgtatgtcacaaaattcttctggtgggaagctggttattggaacaccatggacattgcacatgaccgaggtatgcttctagaacataaataaaatttatatcatcacatcctcatatagggtacaaggaaaggacccc

SEQ ID NO: 143197 - DNA, 1334 bp, Arabidopsis thaliana landsberg
tcataagccacacaagaaagtcgctacgagttctactccttttgttttccctggtctcccaggagacatagttattacggaagaccaagccaatgttgccaaagaagaaacgccaatgggaaagtttatgaaagaggttagggaatcagagaccaatagctttggtgtattggttaatagcttctacgagctggaatcagcttatgctgatttttatcgtagttttgtggcgaaaagagcttggcatatcggtccgctttcgctatctaacagagagttaggagagaaagccagaagagggaaaaaggctaacattgatgagcaagaatgcctaaaatggctggactctaagacacctggttcagtagtttacttgtcctttgggagcggaactaatttcaccaacgaccagctgttagagatcgcttttggtcttgaaggctctggacaaagtttcatttgggtggttaggaaaaatgaaaaccaagggaatttttttcctccccagccattattaatcaatgtagtctttattagtatatttccaaaaatattaacatttgtgtatacattttcctattgccaaatatgctatgatgccatagcaatgagtagattggtttgtgtacttgatatattactttgtagaagttctagcaattatgacttggtgttggtgtagttgggacaggtgataatgaagattggttgcctaaagggtttgaagagaggaataaaggataagggctgataatacgcggatgggccccgcaagtgctgatacttgaccacaaagcaatcggaggatttgtgacgcattgcggatggaactcgactttggagggcattgccgcagggctgcctatggtgacttggccgatgggggcagaacagttctacaacgagaagttattgacaaagtgttgagaataggagtgaacgttgaagaaaccgagttggtgaaaaaaggaaagttgattagtagagcacaagtggagaaggcagtaagggaagtgattggtggtgagaaggcagaggaaagcggcatatgggctaagaagctgggcgagatggctaaagccgctgtggaagaaggagggtcctcttataatgatgtgaacaagtttatggaagagctgaatggtagaaagtagaggaagagaatatgtttaatgttctgagatagattattgactttgtgttcctctttggagttgttctttatgtcatcttagcttttgctactgtttagtaagagaaagtccattgtgtgtttctatataataaagctttatcaagtcaaaaagaatagacctgaagataggcattttcaa

SEQ ID NO: 143198 - DNA, 1495 bp, Arabidopsis thaliana landsberg
ataatgagggaaaaggaacctggtgatggaaagggttatccatttgtaacattcagatgtaaggacttagctgctgaagcaattgataatctaaataacactgtattcagagtaagttctttgacctgattcttaatagttacctagaattttgatggattggtgtttccgaatatttctggctcttatttgtttgtttacttattgttattcaatagggtaaaaggataaaatgttcgactacctaagcaaagcatcgtctctttcttggtaatgtccctagaaattggatggagtcagacattaagaaagcagcaaatagaattggtccagtcgttcaaattgtcgaactcctaaaggtttgtctcctgcaacttggataagtttcagcctatagtgtatatctagttagttctgtaactttcatctcaacttcacgtataattgtaaatgtagaaattaatacatttcttgatcagtttttctatttggttttgttaaaatcacaggaaccacaaaatatgggccggaatcgtggatttactttcatcgagtattacaaccatgtatgtgctgaatactcaaaacaaaaatgtcaaatccgagtttcaagcttgatgataatgccccaactgtaagctgggctgaatcaaggagtggaggagaaggagactcttctgcctctcaggtttacttctttagaatctatcttacaaataaattatagtagcagcaacagtaaccttaccaacaaaatgtcactaccaagaaattattatcatagagacgtgttctgcaaatattcttctttctaaacaatgaaaagctgtgtggaatgattgcaggtcaaggcattgtacatcaagaatttacctagagatataacacaagaacgtctaaaggcattatttgaacatcacgggaaaatactgaaagtggtgatcccaccagcaaaaccaggaaaggaagacagtagatacgaatttgtgcactacgcagagaggacaagcgtaatgcgagctttgaaaaacactgaaagatatgagattgatggtatgttccattccgaaatcacaattgcaaccaaactatcctcctcttcttagttatggcatggctcttagtcccttggtgctcttggtggatttggagcttctgcctattcacaagtgagatttctactacttatcaatcaaatcattatctcttgagaaaaacgttaaaaaaaattgagtataattttgtgggaattatgtagccattaatgcatgcgggaggtcacgcagctggtggaatgtcgatgatgccaatcatgttacctgatggaaggatccgatacgtcttgtaagttcttatctatactccatatactgatctcatgtgtttgctataagacacgtttactgatctgatgtgttgaaatgtaataggtaacagcctggactagcagcgatgccacaaccaccaccgaggccttttccaccgtataggggag

SEQ ID NO: 143199 - DNA, 2850 bp, Arabidopsis thaliana landsberg
atggatttggactaccttgtttgtggatcaacaagattggcagccgactttcgtttcctcgcgaagtttcagcaacggttccatatgataaagtttttgtatcagatacattctgatgcagaagatgagattgcatttccagcattggaagccaagggacagctaaaaaacattagtcactcgtttagcattgatcatgagctagaaactaaacacttcgacaaagtttcgttcattttgaatgagatgtcagagctgaacatgttggtttctaccatcaataccactgcagctgaccacgaccgaaaaatgaagtatgagcggttatgtctcagtctccgagagatttgcaaatcaatgcacaagctattgtctgagcatatccaacatgaagaaactgagctttggggtctattcaggaactgcttctctattgaagaacaagagaaaatcataggatgcatgctcgggagaataagtggggaaatattgcaggatatgattccttggttaatggaatctttaacctctgatgaacagcttgccgcgatgtccttgtggcgccaagcaacaaggaaaacaatgtttgtcgaatggctaacagaatggtataacggtcatgttttacaagaggaagcaggagaagcaaacaacgatccatttggggattcagatccactagagattgtctggaagtatctctttgaagcatctgctgatggggaaaaagggagcatgcgcagcagccttctcaaactcccgaagacggattttacaggtattatgaatcagcctcctcctaattacaaggttgaagttggcaaaaaagaggaaaaagatctagaacggtcagaaagtaaaaagatatgcagaggatctaaccaagagggggacaaagaacaaactgacaaaatgtctcagaaggttagccagtttggtccatccaagaaatatgaacaactgttaacaatgagtgaagaagaacttgtggttgtgattaagaaaatatcatgcgactcttccctggatcctcagaagaaagactatatcaagcagaacttgttaatgaggtaagctctactaactctcttttggtgtcctgttccaacatatttagataagcaggaaatctatttagtcttgtattgagactaaactaatgtcaggttcttctttcagtcggtggaatatctcacaacgtacatataatttggaaccatcctctctctcgagcaacatggaaacagttcatggtcaacatccatcatatcgagatcctcacagtttgatctttggttgcaatcactacaagagaaattgtaaacttcttgctccttgttgcaacaagctctacacatgtatacgatgccatgatgaacaagctgatcactcggtggataggtaggtgcttcattttcttgtatcaaacatcagtaacttttgttacaccttgatctgtctttaagtttcttaaatacttgtgcagaaaacagatcacaaagatgatgtgcatgaaatgcatgataattcagccagtaggtgctagttgctcaaatatttcatgtagttcatcaatgggaaaatattactgtaaaatatgcaagttgtttgacgatgataggtaaatcttctacgactatttcataaggcaattcatttctgatgtctggtcaaaactggagtagtttttgacggctaaaggttttctttgcagggaaatctatcattgtccatactgcaatctctgccggctaggaaaaggactgagcatagactactttcattgcatgaaatgtaatgcttgtatgtcgcggctcatagtagaacatgtatgcagagaaaagtgcttagaagataattgtccgatttgtcatgaatacatatttacctcaaattctccggtgaaggctcttccatgcggtcacgtgatgcattcaacatgctttcaggtgctttactttctcggtttgttatatgcaatgatgaaacacttgatacacatttactaagaatgttacttaagggtgtgatgtttatggttgtaggagtacacatgttcgcattacacatgccctatctgcagcaagtcgctcggggatatgcaggttagatactccaaagtctggttctctcattaaacaattactaataatagtcgcgtaaaagatagctaatgggagcattttatcaaatgctcctaaaaagaaaaatctcaacgtatacagtgatgatcaaacactgaggtgattcactaatcaaagaactgtcttctctcacgcaggtttactttagaatgttagacgcactgcttgcagaacaaaagatgccagatgaatacttaaaccaaactcaggttcatctttcgttctcacacactcatacttaatgcaaattatcagttccattgtctaaatttaacttaagcatatggataaatggatgcaggtaatactgtgtaatgactgtggaagaaaggggaatgctccttaccattggctctatcacaagtgttcttcttgtgcctcctacaacaccagacttttctagttccttctccaattttccttctttgttttcttctttgtacatctgcaaatcttttaacaagtttttcttttctttttggaagcatttgattttgtatgaaaaaaaatactctacatattattaaatctagataattgtctacacctcaatcgtttcaagtaatctcaaattattacgagaggaagatacaactgagaagctgaggacaaaagactgtagagacacttcatcctgtctagctctaacctttacttatgacttactagctaaacaatttcataagacacaatcgccaaagataaa

SEQ ID NO: 143200 - DNA, 1010 bp, Arabidopsis thaliana landsberg; identical to SEQ ID NO: 37285

SEQ ID NO: 143201 - DNA, 1449 bp, Arabidopsis thaliana landsberg
atggtgtcgacgcttatcgagtgttggttgatgataatcaacggcgtgatcatcatccatcacatgcacgtgcgtggtactttctgtaatttgaagcaatcttatgactcttttggtaaagttgtccccaccactataccataattgcacatgtttgattcaattaatcctttaatgaagtcaaaaatatttcccacctttgtgtttgtcaactaaccaaattctaattttcccaacaaatttatggcttagtaactaggaaagtgtaaaaataaataactccccacaaacgtgactacacatgtgcttgtacaagcatgtaaaccaactaaaataacactaataattacaatttaacaaaggaaaaaaaactagtaaaaataggaataatagtaagtagtgagtgtaaaaagaaataattcccataaaaactcctttgtcttcgtcaaacttttccgaattagacctcttgtccccttcaagcgcaataaaagtgaaagtaaaataaacaaaagtttatcttttctacagagaaaccataactttctctaactttactcctttttaaactcacattttcccctcacttcactctctcctctctccaaagacctccgacgagagtttaccggaaaaaaaaaaaaaaaaaacaactctttagttttaatcaacgaaacttatggaagatgaagcacatgaattcttccacacatctgatcattttgccgttgatgaccttttagttgatttctctaacgatgatgacgaagaaaacgatgttgttgctgattccaccactaccaccaccataaccgacagctctaacttctccgctgctgatcttcccagtttccacggtgatgttcaagacggcactagcttctccggtgacctttgtgtacctgtacgttaatattaacgatgtttggtatttcttgaattttagttatgttttgtaataaaaagaacaaaaaagttatgttttgtaatttgttttgttttgtttttgttagtctgatgatttggctgatgagttagagtggctttcgaacattgtggatgaatcattgtcgcctgaagatgtacacaagctcgagctaatatccggttttaagagtcgaccggacccgaaatccgataccggaagcccggaaaacccgaatagcagcagtccgatttttactaccgacgtttctgtaccggccaaagctagaagcaaacgctcacgcgccgctgcgtgtaattgggcctcacgtgggcttctcaaggaaacgttttacgacagtcctttcaccggagaaaccattctctctagccaacaacacttgtctccgccaacctcgccgcctttgttgatggctccgctagggaaaaagcaagccgttgatggaggacaccgacggaagaaggatgtttcttcaccggagtctggtggcgcagaggaaaaaa

SEQ ID NO: 143202 - DNA, 364 bp, Arabidopsis thaliana landsberg
ttaggtatgggatcttggtgggcaagataggctaagaacttcatgggcaacatactatcgtggaacacatgctgtgattgtggttatagatagcacagacagagccagaatctctttcatgaaagatgagctagccaggttacttggtcatgaggatcttcaaaactcggtcatactagtttttgcaaacaaacaggatctgaaagacgcaatgactcctgctgagatcacggatgcacttaaccttcacagtatcaagaaccatgattggcatattcaagcaagttgtgcggttactggagaaggattgtatgatgggctcggttggattgcccaaaaagttaccggtaaagccacgagttaa

SEQ ID NO: 143203 - DNA, 1286 bp, Arabidopsis thaliana landsberg
gaaaaaagcaaaagtgtgacaagacgattctggattctggatacagctggaagagaattaaaagaaaaagaaaaacacttccaacgaagaagatcgatttgcttcgagtctctgaaagaagaagaaaaaataatggggcgtatggattatctagcgatgaagaccgacgacgtcgatacggtggcgttagtcaattccgatatggaagagctcaaggtcgctgcgaagaaactgtttagcgatgtttcgaagcttggtggattaggcttcggtgtttcttttctcaaattcctcgcttctttcgctgccatgtgagtttttcaagtcgccatctctgatttcgtgtctcgtcgatttattttgaatttgatttgattttctcgtgggtttttcgataagtcgactactgtgtaatctcgtacatgttgaattcgaaaaagccgatttttatgtcaattgaaattgggaaaaattcatgatcggatattaatgattatgcaagtgaatctctgattgatcattatcaactgatttttactctgttattgacacagtaatccgagagaattcaatcctactgttaccacagttaaaaaaaaaagtgattaattaggctttaaatctgtttatttctgttaaattgttgacatttgcagtaaccctattgtttctagcaatagcatctctgattggttgaaactataaaattgattagtgatcagtgagcacaaacatgataagggtgtctttgtttcttttactcaatttagagaaactttctggttattcatggtttccttaacgtttttgttttggtattttgatgcagttacttgttaattttggatcgtaccaattggaaaaccaagatgcttacatcactcctaataccatacatcttcggtagccttcctagtgtcattttcaacttcctcaggtaacacaatcttttcttgtcaaaagacacaactaattcttaaaactatagtctataatctatatactggactggtttacatggaatttttcaatttttgttatcagaggagatgttgggaaatggattgctttcgatgcatttgttctcagacttttcttccctaagcatttcccacgtgatgacatcttcatattgttgtgccttcttgatttgtatctttgtattgatgtcatacaatcgctgaagatgtctcgagaacctttaaaatgctttgaggcaaatctatactaacattcaagtcagtgtaattgctgaaacaaaattaaagtctcacacttttgttgct

SEQ ID NO: 143204 - DNA, 1913 bp, Arabidopsis thaliana landsberg
tcttccttgtcgaggactgccataggtacattaactacaatggtgatcagacgaggccaaccatcattgttcattcgcgccgtgttacctccataccgcctccttcttcagttagcaagtatgcagtgttgaatcttgtagacacgttttttggtttggtatggcataaagggcaagtaagtaaaattctctctaaaatccgttacgcggttagattagagactacccagcagtaatctactattagactctcagatcttagacctttcatggtgtgggaagatggagtttggtatagcgatctaaaggtatcaattacactagtttcaatcaacattctgacagttttggtttattggtatgaatgctttatgtttgtttctattttcagcaaaaacccataaaagaaactcctccaaccatcttgaaaaggaagccaatgcgctcttgttctgctgctaagtcaatgactcctacgagtgccacaaagcatttgagaagtttcctgaattctaaggaaattagcgagacacccactaaagcaaaatttgtatctgtaagttagacactcactagtttcctttgctttcgccatgtctttgattatgcttaacatatctgcgttacctgaaattaggccactagagaattaggaaaaaacaaggctgatgctgtgatgaatgacaaaactcatctgctcataacccctcaagaaacatcaataggtaaacataatcttccttaactcattgtgtttagtttctacatcgcttaatactgatctttaatgtcaatgtgaatctgtttcacatgtaccccagccccggtcataacagtcacaccattgaaacaacaagatgctgaaactgaaggaaaaaaatccccaaagaagacacctgagccagtgaagcatcagaatggcttggaaaatagttcaactcaacacgaggtaaagctagtttgttgtttgaaacataaccattctcacttccactagatggtgcttattatctttagccttcctgattgttaattgtttttgaatgcagatgcctgaggaggagaatagcaacgaaaagagtagaaaaaggaaaagagaacaaaatcaaaactctaacctgaatgaaactggtatgtctaaaatcagcattggccatattagttttggtattctttgtttcttgccaaactttatcatatccttggttaaaacttgtagatgagacttgcaatgtttcaaaggctggggtcaacggtacaagtgatactatacgtgttgatgatgttgatgatcagcctctctcttcttggataaatatacctacaggttcggttcaatatactaaagcaatttctattcaaagtagcttagatgtatcctttattaaacaatcaggtttatatgcttgaacaaattttttataattttattttgcattggtttatgtagtgctatcctctgatcagagctcgaatgtggtggataattctgctgctgatgttgaggaaactcaagcaaaaggtgcactaacgattgagccttttacaaagaatttgccattttggaagacatatgaaatggagaagggatacaagacagtgccacagaatcctcattttagcccgttgttggagttcaaagaagatattcgtgaatggtcagcagttggcatgatggtgagtttctatgggttattagaagaagtaaaaaagctgcagctcgatgtttcttcaagcaaactaggtagcctcagtacttgttttgccgagctagagaagcatggtttcgacattgcaacccctcagtcacggataaacaaagtgttgtctctccaagttgggcgagcaaagaaagtggaggaaaggaaatgtcttgagaagaggattgaagctgaagagattgaaatgcaaag

SEQ ID NO: 143205 - DNA, 1656 bp, Arabidopsis thaliana landsberg; identical to SEQ ID NO: 40991
  unsure (1)..(1656): unsure at all n locations

SEQ ID NO: 143206 - DNA, 701 bp, Arabidopsis thaliana landsberg
gggcgcttagacaatctttgtatacaggcgaatctaacggatgaagatttaaacgagctaaaaggatcgattgagctaggtttcggtttcaatgaagaagcaggacaaaagctttgtaatacattaccagctcttgatctttactttgcagtgaatcgtcagctctcgcctctcccttcacctagcagcagccgtagcagcagtgcatctgcgtcaactttctcatacagtataccttgtagtccaaagaaaactgattcagattctgttaaaatcttatgcccaggtatctaaactcatgtttttggtattttgttttgaatgcaataacatttataaactaatggtttaatatgatcttttttggcaggggacgatcctcaacaaatgaagcagaggttgagacattgggcacaagcagttgcatgttctgttatgcagtcttattgaagattataagcactcagattttcttttgagagataggaagaagcgaatcttttacaattaggattcgaaagaaacaaaaaacaactagaaaattttggagaaaaagagatgaaaattgtggctctgtatataactcacaagatgagagaaagaaaaagaaaaacacctcttgttcataagctgtaatgatgtatacaaaaaaaaagattacaatatgatcttggattggataataaaatgaacttttttct

SEQ ID NO: 143207 - DNA, 652 bp, Arabidopsis thaliana landsberg
agttcctcatggtgcgttgtttgtttcaataaccacaatcttgtttgtataatgtattagcactttcattactatgctaagatagaaactttgatcacaatatcatttttcaggctgtaatcggactatgggtagctgcaatggtcgggagctgttgcaatttcctaactgttttgtatatcggtgagtggttcttattagtgtatcctcttttgagattggaagttgagtaatacaagactttaaagggatgcattttatgtgtgtgtgtgaagggtttgttggggcacacacaatgccggttctgtatgagagatacgaagacgaagtggatggttttatggattctatgattatgaagtttcatagtcattacaagaagcttgatactgggtttctcagtagaatcccaagtggaaagtttggattaaagaagcgtgagtgactaaatcactcaagcattttcttattttaccttgtttgttgttagaacaatatggattatggtttgctaaatgaatgttttggagaatattattcattcatgtagattttgtgtatttccttactaaacaataccttgtccatgtatttgtcaataccttggttaataacagaatcatcatatttgtcaaaattatacaagtagatt

SEQ ID NO: 143208 - DNA, 5295 bp, Arabidopsis thaliana landsberg
  unsure (1)..(5295): unsure at all n locations
tttcctatttgatccaacttctctactagattatttgactatgagatagctcatacgttgcaggttgttcaagacttacttaattgccttgatagccctgaactcccatttcttcagtggcaagagtgctttgcagttctggcgacacgactacctaannnnnnnnnnnnnnnnnnnnnnnnnnnnnnnnnnnnnnnnnnnnnnnnnnttatatattgatatttgttttgagttcaagacttttaatcatatctaaataaaactctttatcagctagaatcaaagtatagggaatttgagagtatttccagaaactctttgaccaccgatttccctgccaaacttttaaaaggcattcttgaggtaattgactattatttcttccattagaattaccatcctgtttcttactctctgaattgtttctgtctacttcttgcaacaggcacatttatcttcttgtgatgagaaagagagaggtgcccttgaaaggctcattgaaccattgatgagccttgcaaaatcttatgaaggtggtagagaaagtcatgcccgtgttattgttcattctctctttgaagaatatctatcagtagaagaattattcaatgataacatgctggtattatatggctcaatagctaattaacagatttttggttactagcgatgtctgaggcgtctaaataatcattttatttttcttgaataggctgatgttatagaacgcatgcgtcagctatacaagaaagatctgttgaaaattgtggatatagtgctctcacaccaggtctgtgatcatctttctcagaccaggtttttctttccgtcatgactatgtcactgaattggttcttcttttcagggcataaaaaacaaaaacaaactcgttctccggctcatggagcagcttgtttaccctaatcctgctgcttacagagataaacttattcgattctcaacacttaaccatactaactactctgaggtgcgtttggttgctttatgttttataatatttttgtctacactctcaactaatgatcagtttgtgtgtgtagttggcgctcaaggcgagtcaattacttgaacagaccaaactaagtgagcttcgttcaaacattgctagaagcctttcagagttagaaatgtttacagaggacggagaaaatatggatactcccaagaggaaaagtgccattaatgaaagaatagaagatcttgtaagcgcatctttagctgttgaagacgctctcgtgggactatttgaccatagcgatcacacacttcaaagacgggttgttgagacttatattcacagattataccaggttcgagatcattcttcctaaccttatgtggaaaattcgttttggagtgcaattgattagacagaatttgttttgactccattttaacttgtctcatgtcattagccctatgtcgttaaagaaagtgtgaggatgcagtggcaccagtctggtgtcattgcttcttgggagttcctagaacatttcgaaagaaaaaacactggcccagacgatcacgagatatctgaaaaaggaattgttgcgaagagtagtaagagaaaacgggggactatggttataatcaaatcgctgcagtttctgccgagtataataaatgcatcattgagagaaacaaaccatagccactgtgaatatgcccgagctcctttatctggtaatatgatgcacattgctattgtgggcatcaacaatcagatgagtctgcttcaggacaggtacttgacacagtataaactagctttggtgatatagtgtctagctaatctgttatcatgtctggtttgtttatctcagtggggatgaagaccaagctcaggaaagagtaagcaagttggccaaaattcttaaagaggaagaagtgagttcaagcctctgttctgccggtgttggtgtaatcagctgtataattcagcgagatgaaggacgaacacccatgagacattctttccattggtcgttggagaaggagtatgatgtagaagagccgttgctgcgtcatcttgaacctcctctgtccatttaccttgagttggtatgatcatgacgatgaaatttcttgtttaaagcatatcatattctttttaatggctatttactgtttgtctgatgcaggataagctgaaaggatactcaaatatacaatatacgccttctcgagatcgtcaatggcatctgtatactgatacagacaagccagtgccaatcaagaggatgttcctgagatctcttgttcgacaggctacaatgaacgatggatttatattgcagcccgggcaggataagcagcttagccaaacactgatctccatggcgtttacgtcgaaatgtgttctgaggtctttgatggatgccatggaggaactggaactgaatgcccataatgctgcaatgaaaccagatcacgcacatatgtttctttgcatattgcgtgagcagcagatagatgatcttgtgcctttccccaggttgctatggctgtgtccttgacaagttattgtttgtaatgtcagacaatatcctaataatatcaacgtgtttcttacaggagagttgaagtgaatgcggaggatgaagaaactacagttgaaatgatcttagaagaagcagcacgagagatacatagatctgttggagtgagaatgcataggttgggcgtgtgcgagtgggaagtgcggctgtggttggtgtcctctggactggcatgtggtgcttggagggttgtggttgcaaacgtgacaggccgtacatgcactgtccacgtaagttccgcttacaaaaaatttggttgtacaagcaatacagagagtaagagtacacatctcgatgacttacctgctgtgatttaatatttcagatataccgagaagttgaaactcctggaagaaacagtttaatctaccactcaataaccaagaagggacctttgcatgaaaccccaatcagtgatcaatataagcccctgggatatctcgacaggcaacgtttagcagcaaggaggagtaacactacttattgctatgacttcccgttggtttgttactgaattcataagattcacacatacgcttactcttttggctatttccaaccccccttatgttatttctttccttttcaggcatttgggacagccttggaactgttgtgggcatcacaacacccaggagttaagaaaccatataaggatagactcatcaacgtcaaagagcttgtattctccaatacagaaggttctttgggtacatctcttattccggttgaacgaccagctggtctcaacgannnnnnnnnnnnnnnnnnnatcttagagatgtcgactcctgagtttcctatgggacggaaacttctcattgtcgccaatgatgtcacattcaaagctggttcttttggtcctagagaggacgcatttttccttgctgtgactgaactcgcttgtaccaaaaagcttcccttgatttacttggcagcaaattctggtgcccgactcggtgtagctgaagaagtaaaagcatgcttcaaagttggatggttggatgaagtttcccccggtaatggttttcagtatatatacctaagctctgaagactatgcaaggattggatcatctgtcattgcgcacgaagtgaagctccctagtggcgaaacaaggtgggtgattgatacaattgttggtaaagaagatggtcttggagttgagaatttaacaggaagtggggcaatagcgggtgcttactcaagggcgtacaatgaaacttttactttaacctttgttagtggaagatcggtcggaattggtgcttaccttgcccgactgggcatgaggtgcatacagagactagaccaaccgatcatcttgaccggcttttctacactcaacaagctgcttgggcgtgaggtctatagctctcacatgcaacttggtggcccaaaaatcatggggacaaatggtgttgttcatcttacagtctcagatgatctcgaaggtgtatcagcaattctcaactggctgagctacattcctgcgtatgtgggtggtcctcttcctgttcttgctcctttagatccaccggagagaattgtggagtatgtcccagagaactcttgcgacccacgagcggctatagctggggtcaaagacaataccggtaaatggcttggaggtatctttgataaaaatagtttcattgagactcttgaaggctgggcaaggacggtagtgactggtagagccaagctcgggggaatacccgttggagttgttgcagttgagacacagactgtcatgcagatcatcccagccgatcctggacagcttgactctcatgaaagagtggttccgcaagcagggcaagtctggtttcctgattcagcggccaagactgctcaagcacttatggatttcaaccgggaagagcttccattgtttatcctagcgaactggagagggttttcaggtgggcagagagatctttttgaaggaatacttcaggcgggttcagctatagtagaaaatctgagaacatatcggcagccagtgtttgtgtacatcccaatgatgggagaactgcgaggtggagcatgggtggttgttgatagccagataaattcggattatattgaaatgtacgctgatgaaaccgctcgtggaaatgtgcttgagcctgaagggatgatagagataaaatttagaaggaaagagctgttagagtgcatgggaaggttggaccagacgctaatcaatctgaaagcaaatatccaagatgccaagcgaaacaaggcatatgcaaacatcgagcttctccagaaacagattaaaacccgagagaagcaacttttaccagtttatacccaaatcgctaccaaatttgctgaactccatgacacttccatgagaatggctgcaaaaggtgtgatcaaaagtgttgtggaatggagcggctcgcggtcattcttctataaaaagctctatcggagaatcgcagagagctctctagtgaggaacataagaaaagcttctggagacatcttatcatataaatctgctatgggtttgattcaggactggttccgcaaatccgagattgcaaaggggaaagaagaagcttggacggacgaccaactgttctttacatggaaagacaatgttagtaactacgagcagaagctgagcgagttgagaacacagaaactgctgaatcaacttgcagagattgggaattcgtcagatctgcaggctctgccacaa

SEQ ID NO: 143209 - DNA, 1295 bp, Arabidopsis thaliana landsberg
aacatgtcctactaccaagaccaggttattttctcggttacaccaagaagaattcagcattagtcttttatgagatgagtcttcaatttactttattggtttctcacagcttctttgtacttcatacttgtaaacagattcttccgctggtgaagaagtataaggtggtacatctgaacaagactgatactcgacttgctaataacgaattacctgttgagattcagaagctgcgatgccgagcaaatttcaacgggcttaggtttactccaaagattgaggaattgggtagaagagtagtcaagattctgagggagaaaggtccctttctagttctgcatctcagatacgaaatggatatgttggcattttctggttgctcacatggttgcaaccgctacgaagaggaagaactaacaagaatgaggttaatacaactatctcttcataattatatgaaaagttccgacattggtttcctgatattgatgttatcatttcgtttcattgcttagatatgcttatccgtggtggaaagagaaagtaatagactccgagttgaagaggaaagaaggtctttgtccattgactcctgaagaaacagctcttacgctatctgcattgggtattgaccgtaatgttcagatttacatagctgcaggagaaatatacggtggtaaaaggcggttaaaggctttaacagatgtttttccaaatgtggttagtacttggtgtctaaaattattccttaatatttcactcaaaagtcagtgaccaataatattttattgtgatcaaaccaggtgaggaaagaaactctactcgattcctctgatttgagtttttgtaaaaaccattcttctcaaatggctgctcttgattaccttatctctcttgaaagtgatatattcgttcctacatattacgggaacatggcgaaagtcgtggaaggtcatcgcaggtgaatcattcattctaacttttctaatctaattgtttatatcatcaaagctaatggcatttaaatcacatacaggttcttggggttcaagaagacaattgagctaaaccggaagttgttggttaagctgatagatgaatattatgaaggattgttgagctgggaagtgttttcaaccacggttaaggcctttcacgctacacgaatgggagggccaaagagacggctagtgattccaaataaaccgaaagaagaagactacttctatgctaatccatatgaatgtcttcagctattacatgagaataatggcaattcactagaagaaacctaa

SEQ ID NO: 143210 - DNA, 1237 bp, Arabidopsis thaliana landsberg
gaagaagaagaaagaaaatggagttattcaacaaaggaacggtcgttagattacggagctgtcacgaaacatacatctacgccgtcgaggatgaaaaaaccgtccgtcaaagctctgacggaacgtcacggcaatcgctatggacggtggagatggttccacgtaaaccaaaattcatacgtctcaagagctgctacggcaagtatttaacggcgagcgagtcgtcgtttcttctgggaatgaccggcgcgaaagtcatccaaacgccgccgtttcgtcaagcggagcatgaaagcgactgggaaccaatcagagaagagtcaacggttaaactcatgtcgtggaacgagaaatatttacgtgggaacggaggagctccgccgtggaggaactctgtgacgtgtgatcgtgagccgcacatctcagcgacgaagaaatggatcttgtggtctgtggaggttgttgagaatcctgataaggttttgtttgctgatcggttttcatcaccggcttctagttttaactcgtcggtctcctccgacgggtcaaatctcgggtcaccaagtcagaaattggtgacttttggatcttctgaatctatcgggtcggatcctgggtcacttgtatcagtttcttcttcgaaacttatgtttactccgtcaaggtcgggtacattgtccccaaaaccaacagaggtacacttacattctaattcatataattttgtcacgcattatcacaaattactatactatataattaaaatattgattttgggggtattttgttttgtaacagaggaaatgttcgaagaagataatagtagaaaatgtatcggcgatggaaatattccgggatgcgaaatcggtgcgtttacgaagctatgcacatcatgggaaatatttgattgctgatgacgatgaagagggtgtgataatgggcaaaaacgggtcatctaaagaggctcgatggagagctgaaatggtaccaggatccgaaaaggcgatccggttaaagagctgccatggtggatacttgacggcgtcgaatgagcggtttttgttgggagcgaccgggcataaggtggtgcagtctaggaagattcgtgccgatgagccggcgggagagtgggagccggtgaaagaaggttcaagggtgaagttaaggagcagaaacggcgggaattatttaagagccaatgggggagtgccaccttggaggaattcggttacgcatg

SEQ ID NO: 143211 - DNA, 3535 bp, Arabidopsis thaliana landsberg; identical to SEQ ID NO: 5149

SEQ ID NO: 143212 - DNA, 570 bp, Arabidopsis thaliana landsberg
gatgatgatgctcatagactaactctgaatcttggtggtaataatatgaggggaatggtgtgaaaaagacgaaacttgaggagggattccgagtcgggcgatttgttgtcaggtagacaactgtggagctgatttaagcaaagttaaggattatcatagacgtcataaggtctgtgagattcattctaaagctactactgcacttgttggaggaattatgcagcggttttgtcagcaatgtagtaggtaagggttataaaaggattcaactttagtatcgggtcttagtaatgagatttggtttaatccaattgagaaaaatatttgtctgcaggtttcatgtgcttgaagagtttgatgagggaaagagaagttgccgtcgacgtttggctgggcataataagcgtagaaggaaagcaaatcctgatactataggcaatgggacttctatgagtgatgatcaaacaagcaattatatgttgatcactctcttgaagatactctccaatattcattgtaagtagttcatgaaagttacagttaagatatccaaattttagtcctagagga

SEQ ID NO: 143213 - DNA, 1670 bp, Arabidopsis thaliana landsberg
  unsure (1)..(1670): unsure at all n locations
tcataccaacaatgctattgcttgattgtgctcctccaatacatcccaagattctatttgataattccgttaagttctcaaattgttaaagcaactggagttgttacaaagactgcttgggctggagctgcttataatcttttgctatacatgctggctagtcatgtatgaatcccattccttcttcttccattatttcattccttaaatgtgatgataatcaaagctacaatgtttttgttgggacaggtgcttggtgcagcctggtatatattatcggttgatagannnnnnnnnnnnnnnnnnnnnnnnnnnnnnnnnnnagctggccaagttaattgtcagctatattacttagactgtgattcaatgtatgacaataatcagatgacttgggcaaatgtcacaaaagtgtttaaactctgtgatgcacggaatggcgagttcaagtatgggatctttgggaatgcaatcacgaaaaacgttgtgtcttcacagttcttcgagagatatttctactgtttgtggtggggattgcagcagcttaggtaatggcagagatcatagaaattttttgataccaattattactctccttttgattacaagttttagaatctgatgacattttcctgttattgtcatattctagttcttatggacagaatttgtccacgaccatgttcatgggcgaaaccacatttgctgttctcattgcaatctttggtcttgtcctctttgcccatctcattgggaatatgcaggtatggattcctgcgttaggataagttctaaaagtatctgcttttgttcttatgtttcttgggttttgccttttgtttgttagacatatctgcaatctttgactgtacggcttgaggaatggagattgaagaagagagacactgaggagtggatgagacatcgtcaacttcctgaagagttgagaaaccgtgtgaggcgatatgagcagtataagtggcttgcaacaagaggagtcgatgaagaggttctcctgcaaagtttacccactgatcttcgccgtgatattcaacgtcacctatgtttagatcttgttcgaagagtaagtttttctattgatttgtttatcctacaaatggttcaacttttaggttaactactatcttgaatcatgcaggtcccatttttctctcaaatggatgatcagctgcttgatgcgatatgtgagcgcctggtttcttctctgtgtactgaagggacttaccttgtacgtgaaggtgacttgatctcagagatgctcttcatcatcagaggtagactcgagagttccacaaccaatggaggcagaaccggtttcttcaactcgattatacttagacctggagatttctgtggggaagagcttctttcttgggctttgcttccaaaatcaaccttgaatttaccatcttctacaagaacagttagggctttagttgaagtcgaagcattcgctcttcgagctgaagatttgaaatttgttgcaaatcagtttaggcggttacacagcaagaagcttcaacatacattcagattctactctcaccattggagaacttgggctgcttgcttcatacaagcggcttggcgcaggtacaagagaagagttatggagaataacctcactgcgattgaatcaatggaaaatg

SEQ ID NO: 143214 - DNA, 1635 bp, Arabidopsis thaliana landsberg; identical to SEQ ID NO: 11979

SEQ ID NO: 143215 - DNA, 2561 bp, Arabidopsis thaliana landsberg
atctttgttattgcttcagatcacttggtggtggtttgtctaatctcaagtacttctttgaggcggcttcagttggggagcgaatcatggaagtgataaacagagttcccaagattgattcagacaatccagatggccacaagttggagaaaattagaggagaagtagagttcaagaacgtaaagtttgtgtatccatcaaggcttgaaacatcgatctttgatgacttttgtctgagagttccttctgggaaaactgtagctttggttggaggaagcgggtcaggaaaatcgaccgttatatctcttttgcaaaggttttatgacccgcttgcaggagagattctcattgatggtgtatccattgataagttacaagtgaagtggttgagatcacaaatgggtctagttagccaagaacctgcccttttcgccacaacgataaaagaaaatatattgtttggtaaagaagatgcatccatggatgatgttgtggaagctgccaaagcctctaatgctcataatttcatttctcagttacctaatggctacgaaactcaggttacatttcagtttcgaaacacatatatatctattacataatcttttattagaggtttgatttagattttgttttgaaaaaaataggttggagagagaggagtgcaaatgtcaggaggacaaaagcaaaggatcgcaatcgcgcgtgcaataatcaaatcaccaactattcttcttctagacgaggcaacaagcgcattggactcggagtcggaaagagtagtccaagaggccttagaaaatgcatcgattggtcgtacaactatccttatcgctcaccgtctctctaccattcgtaatgctgatgttatctccgtggttaagaacggtcacattgtggaaactggatcacacgatgagctaatggaaaacatagacggtcaatactctacacttgttcacttacaacagattgaaaaacaagacatcaacgttagtgtgaaaataggtccaatctcggatccgagcaaagatataagaaatagttctagagtgtcgactcttagccgttcaagctctgctaactcggttacaggtccaagcactataaagaatctttccgaagacaacaagccgcaattaccgtcgtttaagagactattggcaatgaatttaccggaatggaaacaagcatcgtatggttgcataagcgcaactttatttggagccatacagccagcttacgcatattctttagggtcgatggtctcggtttattttctaacgagccacgacgagatcaaggagaaaacaaggatctatgcattatcttttgttggcctagccgttctttctttcttgatcaacatcagtcaacactacaattttgcatacatgggtgagtatttgactaaacgtatccgagaacggatgctttctaaggtgttaacgtttgaggtcggttggttcgatagagatgagaactcaagcggcgccatttgctctagactcgcaaaagatgctaatgtggtaagtctacataaaaatctttttaacgaacaatgttatagtgtttcttgattttgcttatgtttttttttttgaatgataaggtgagatcgttagtgggtgatcgaatggcattagtggtgcaaaccgtatcggctgttaccatagctttcacgatgggcttggtcatcgcttggaggttagcacttgtgatgattgcggtgcaaccggtgattattgtttgcttctacactcgtcgggttctactcaagagcatgtcgaaaaaagcaatcaaggctcaagatgaaagtagcaaactagcggcagaggcagtttccaacgtccgaaccatcactgcattttcatcacaagaacgtatcatgaaaatgctcgaaaaggcccaagaaagtccgcggagagaaagcattcgccagtcgtggtttgcaggcttcgggcttgctatgtcgcagagcctcacgtcgtgtacgtgggctttagatttctggtacggtggtagactgatacaagatgggtacatcacggctaaagctttgttcgagacgtttatgatcttagttagtactggtcgagtcattgccgatgctggaagcatgaccacggatctagctaaaggttcggatgcggtagggtcagttttcgctgtgttggatcggtacacgtcgattgatccggaggatccagatggatatgaaacagaaagaataacgggtcaggttgaatttcttgacgtagatttctcgtacccgactagaccggatgtgattatattcaagaacttctccatcaagatcgaagaggggaagtccacagccattgttggtccaagcgggtcaggtaaatccactatagttggcttgatagagcggttctacgacccgttaaagggtatagtgaaaatcgatggtcgcgatataaggtcgtatcatctgagatcacttcgtcgacacatagctttggttagccaagagccaacattgtttgctgggacaatccgagagaacatcatatatggaggagtgtcagataaaatag

SEQ ID NO: 143216 - DNA, 857 bp, Arabidopsis thaliana landsberg; identical to SEQ ID NO: 61131
  unsure (1)..(857): unsure at all n locations

SEQ ID NO: 143217 - DNA, 1370 bp, Arabidopsis thaliana landsberg
cctccggtatatatgtgatcgaatagtattacattttttcgttgttgatgtgttctaacagtggtaacattgtggaattccagaagtatcggatatatctgagacggcttggaggagtatcgcaacaccaaggaattatgaaccattcgtttatgactggtcaagatcagagttttggacctctttcttcgttgaatggatttgatcttcaatctttagctgttactggtcagctccctcctcagagccttgcacagcttcaagcagctggtcttggccggcctacactcgctaaaccagggatgtcggtttctccccttgtagatcagagaagcatcttcaactttgaaaacccaaaaataagatttggagacggacatggtcagacgatgaacaatggaaatttgcttcatggtgtcccaacgggtagtcacatgcgtgtgcgtcctggacagaatgttcagagcagcggaatgatgttgccagtagcagaccagctacctcgaggaggaccatcgatgctaccatccctcgggcaacagccgatattgtcaagcagcgtttcaagaagaagcgatctcactggtgcgctggcggttagaaacagtatccccgagaccaacagcagagtgttaccaactactcactcggtcttcaataacttccccgcggatctacctcgcagcagcttcccgttggcaagtgccccagggatttcagttccagtatcagtttcttaccaagaagaggtcaacagctcggatgcaaaaggaggttcatcagctgctactgctggatttggtaacccaagctacgacatatttaacgattttccgcagcaccaacagcacaacaagaacatcagcaataaactaaacgattgggatctgcggaatatgggattggtcttcagttccaatcaggacgcagcaactgcaaccgcaaccgcagcattttccacttcggaagcatactcttcgtcttctacgcagagaaaaagacgggaaacggacgcaacagttgtgggtgagcatgggcagaacctgcagtcaccgagccggaatctgtatcatctgaaccacgtttttatggacggtggttcagtcagagtgaagtcagaaagagtggcggagacagtgacttgtcctccagcaaatacattgtttcacgagcagtataatcaagaagatctgatgagcgcatttctcaaacaggtttgattattactcgaatacagtgcactctaaaacagccatgaattgatagcttgacacttacttcattgtcatgcgtaaatgcaggaaggcatcccatccgtagataacgagttcgaatttgacggatactccatcgataatatccaggtctga

SEQ ID NO: 143218 - DNA, 1563 bp, Arabidopsis thaliana landsberg
cgttctgctctgggttcgccataagccaaatctatttactccattgatggtattgttatctctcgtgtgtaatcttttctttcgaaatactgtgtctttcatttgattgtgatgtgactttgcaggtgtggttcgagttttctttgggtcagattttgtcactgtaactaagtcagatgatgtatcatgggatattctcaagcctgagatatttgcagcagtcatggatttctattcttctggcgagcctttgtttctcgactcacaagctgctgctgccaaggatactgccatcagcgaggtaaaacccctcccgctctattaccctcgtgatcgcttcctcactttcccattagtttgttttgtttagagtgtgattttctggacctcctggattcttcagggtgattgtttcttatatagtttgtgttggttgtctggtgcatgattgaacatcttcttgagcatttgttgagggattggagagtgatagtttgctgtaaactttatatagacatgatatacttggttatggaatttatgccagttgctttaatgagctgatgcatatgagttatgatcttcaagtagtagcggagcgtcacaactagaatgagagaggtcattttcccttacttatgatgttctgtttgattatggattggcgttctgcaatgctctccaaggttttggtagataagctaatggtgacaagtgtaaatgatgctatttcttgctcattggtgaaactttgtgattcaggatgactctgaaacagtagcaatgatcaaggaactcttagaaacacgcatcagatcggcagttcaagatgatggtggggacattgagtagtgtgggtttgatccgtaagtttatacttctttgagttgtagcaatggtcaatcagtcctgtttctttttctagtctcttcagtcttaagtacaaatcctttgggtgggtttaatcagggatatcggtatagtcaagctgagcatgcaaggagcttgtagtggttgtccgagctcatctgtcactaaaacatcgggaattgaaaatatgctcatgcattatgtatccgaggtaacagcgatcctcctaacatttctcttactacatatggataattctagacctatctgtctgtgttcaagttttggtgttaactgttaagcaaccattggagaatcaagaacttgttaccgtcacattcttctaatgaaagttttttttgtgtaggtgaaaggtgtagaacaagagtttgatggggaagatgaagagggaacgttgtctggagagatgagagtagagtaggagacctcctctttgctctttagtgtacagaaaaataaatcccagtgagtgcacttttttcttcaatccttggtgttgtttctgggcttttgaatcacactcaaggatctgtttactgagagatctgagttgttgtttttttgtagcttttattgacttacacttgttttgattatttgaggttaagcaacgaaagatgtaccagaatatttgaaatttccgagtattataacacgatttacaagaaaaca

SEQ ID NO: 143219 - DNA, 1536 bp, Arabidopsis thaliana landsberg
gctgattttgattgaccaatattttttatgatatacctcttctctacattgcaagaagcatacgttattggttgatttcattacccaagtaacgttttttatcttttggttgattgtttcagatcttttttcttctccagtgccgtgaaggatgtgtggtcttgctaagaagctggatatagaggatactttgacatcactgtcagaccaagagaatgaatctttggccaaacccatgaatgatgctgctgaatgggaacattcgttttctgccttgcttgagtttgctgcagacaacgatgtggaggggtttaggcggcaactctctgatgtgtcttgtatcaaccagatgggtctttggtacagacggcagaggtttgttagaagaatggttcttgagcaaagaaccccgctgatggttgcttcgttatatgggagtttagatgttgtgaagtttattctttctttcccggaagaggagttgaatctgtcttgtggtcctgataaaagtactgctcttcattgcgctgcttatggtgcttctgtgaattccttggatgttttcaagttgcttttgagtgtaggagcagatcctagtatccggtatgcttatgggaatcgtcctgttgatgttcttgttgtgtctccacacgctcctggtttgagaaccatccttgaagagatcttgaagaaagacgagattatatctgaagatctgcatgcctcgtcatctagcttgggatcaagtttccggtctctctcatcatcccctgataatggttcctcgttactctccttagattcagtatcctctccgactaagccacagggtactgatgtaactttcgcatcagagaagaaagagtacccaattgatccatcattgcctgatatcaaaagcgggatttattcaaccgatgagtttcgtatgttctcgttcaagatccgcccatgttctcgagcatattcccatgactggactgaatgtccatttgcacacccaggtgagaatgcaaggagaagagacccgaggaagtttcactatacgtgtgttccatgcccggattttaagaaaggatcctgtaagcaaggtgatatgtgtgaatatgctcatggggtttttgaatgctggctacaccctgctcagtacagaacacgattgtgcaaggacggaatgggttgcaaccgaagggtttgcttctttgctcacgcaaatgaggagttgcgtcccttgtacccttccacaggatctggattgccatctcctcgggcttcgtctgctgtttccgcctctactatggacatggcgtcagttttgaacatgttaccaggctcaccatctgctgctcaacattcgttcaccccaccaatatctccttctggaaatggtagtatgccccattcatcgatgggttggcctcagcagaacataccggcgttgaatcttcctggaagcaatatccagttgagtcgtctgagatcaaaaattaacgctagagatattccttctgagcagcttagcatgctgcatgagtt

SEQ ID NO: 143220 - DNA, 1222 bp, Arabidopsis thaliana landsberg; identical to SEQ ID NO: 70722

SEQ ID NO: 143221 - DNA, 980 bp, Arabidopsis thaliana landsberg
tgggaattatactaacgaaaagcgatacggtttttgggtgtgaggtttagctcctacaattttacagttgagttttaccgatcggttttcttagttcagcctgggaggctgcgttggcacgcacctaaacgtgttaagtcaacgttaaagttagatgttttagatgttattaaccacgaatggagctcagctgattttctcatattcaatactggtcaatggtgggtgcctgggaagcttttcgaaacgtaagctgtcttcaaagctttatggattatagaatgttttgtgatcgaaattcttatatttttcgcttgtttctgattatgtgtttggaacgtcaggggatgttactttcaggttggaaattcactgaggctcggaatgtcaattcctgcagcgtatagagtagcattagagacatgggcatcatggatagagagtacagttgatccaaacaaaactcgggttttgtttcgtacatttgagccatcgcattggaggtacaaactttagctttaccatttcgtcttctatgtttgcttagatcagccttaatctaagttcttgttgttttcgttgttgttgttgtttagtgatcatagatcatgcaatgtgacaaagtttccagccccagacactgaaggaagagacaaaagcatattctctgaaatgatcaaagaagtagttaagaacatgacgataccggtatcaatattggatgtaacttcgatgtcagcatttagaagcgatggtcatgtcggtttgtggagcgataatcctttggtacctgattgtagtcattggtgtctacctggagtacctgatatctggaatgagatcttgctcttctttctctttagacaacaagtaagatcttgctaatcttcccctttagaaaacagcatcagcattttcttatgtctgaaattttttctaatttgcaggttcaatgaagtggatattgcaacatagaaaaa

SEQ ID NO: 143222 - DNA, 1016 bp, Arabidopsis thaliana landsberg
atgaaagttctttggacacaaaaataaattgcataccatcgatgaaaaacctaggacttaaagacatcccaagctttatccgtgcaactaatactgaagacataatgcttaacttttttgtccatgaggctgaccgagccaaacgcgcttccgctatcattctcaacacattcgatagtcttgagcatgatgtcgtccgttctattcattctatcatacctcaagtgtacactattggaccgcttcatctatttgtgaatcgggatatcgacgaggaaagtgacatcggacagataggaacgaatatgtggagagaggagatggagtgtttggattggcttgatactaagtctccaaacagtgtcgtttatgttaatttcggtagcataacagtgatgagtgcgaaacaactcgtggagtttgcttggggtttagcggcgaccaaaaaagattttttgtgggtgattaggccggatttagtagccggtgatgtgccaatgcttccgccggactttctaatagagacggctaaccgaaggatgctagcgagttggtgtcctcaagaaaaagttctttctcatccggcagttggagggttcttaacgcatagtggatggaattcgactttggagagtctctccggtggagttccaatggtgtgttggccgttctttgcggaacagcaaacaaattataaatattgttgtgatgaatgggaagtggggatggagatcggtggagatgtgaggagggaggaggttgaggagttggttagagaactcatggacggagacaaaggaaagaaaatgaggcaaaaggccgaagagtggcagcgcttggctgaggaagcgacgaagcctatttatggttcgtcggaactaaattttcagatggtcgttgacaaggttcttttaggggagtagagagactacaatttattttagatatgatcgttacaaaattatgttatgtactgaaatttaataaagtgttatcatatatataatgatgaacaa

SEQ ID NO: 143223 - DNA, 3076 bp, Arabidopsis thaliana landsberg
ctttacggttctgtctaaattgaagaatttttttatcacaaattctcagatttcttgatcttcagattaaccgaatcaatggtctctcatcgcatggaagattcaggaaaaaaaatcagagtttctcttctttggaaaggaaacaaatactctgttgagatcgattctggagcttctctgaaagatttaggttacgaattgagaaagttaaccggcgttacatcggagacgcttcgtttgatcgttccaaggttgaatgaaaaaggatcaagcttgatgttacccttttctgatgaacactcgagcttgagtttgcaggaatcaaacataattgaggttagtctttgtttttttagttatatcttaatcagtgcattgaaatcaatcttcttcattgttatgggtaggtttttgcttaaggttagtggtaagaaaataaaagtttcttcctttattgatcatgaactggtggttacaattaggaagctaagagataagttgattttgtcattagtgttattgcattatagcttaagagtgcattttgaggttattgatatgtagcagagtaagtaaaaattcaattttgttcattttcttaggtagatttttgcttaaggttcttgattagcacagaaaagattgttcctttattaatcatgaattggtggttattatcaagaagccaagaacaattgaacaatacctaaagcttgcacttaccaattggtgaaagtcacttaatctgttttaaatatacttctttggtactttcttttcgttttataggataaaactatcagaatgatgggagtgtctgaagaagaggtcgaaggtgttctaaaagaggcagtgtctgacatgaggatacttggctttgaggattaggaaagaaggttcattccaagaagtcgcatgttccgagcggttcaattaagcttgcgcaagggactcacatcttcggtgatttccgcactcttcatctcccgggaatagaggcaagtaatcctctgaatatccatgtctaacattagcacttacgttatccagtacgtaatatgatatgttcagacttttgtctatgtcctttggtgctactatcttgctctcttatgtaccataaacttatttcctgataatctgcccgccccgaacttatagatctgcctggctataaagtgacacgagatgttcggttatggagttaaacccgcctgctggtgctgctctaaagagaatgcacatgcttgcagcagaccctggtattattgctgttatgaacaaggttatatctaaattgcgagcaacttataattcaatggtctgtttattgatgttgaactaatagattctgtttcatatttgtagcatcgatggagagtagggattatgactgaacttgctccagttggttatgttggtgttagtccaccatgccttctggggtttaacaaggtacgcatgttttgtttataagacaaaaccacttcttgtgtttctcctagtctgttctgattttgattttcccaaatcttgagtagaatcaaggagaggagatttctctacgccttcggactgatgatctcaagggattcagaaagtatcagagcataaaaaagactctattgcatgagcttgtacagttccctgataactatgaacatttctatacgaacttgaatttgagagcttatattctctgaatcaaaatgtcaggctcacatggtatactcggagcatgatgagaaattttatgctcttgatagccaggtaatgtatatatacaacagtgatggtttatgttattttaatcgcaaatttagtttcggtagagattttacgaatgagtgtttgtgtgacagttgaacaaagaagctgaaagcttagattggactaaatcaaggggtcacactttgaatggaacaaaatttatcaatgacgatgatgaggaagactacttcttcgatgaaaatgaaactgtttctcaaaggcttggtggaaaccagtccgataatcttggaaatgctcgtgaatcgtctgttgctgctgcttatcgccgtctctcccatacaagtgtttcaaaactcagcgaagaacctgatcctgatgacttggttgatgttcgtgatgagaataaacagcttgttctccctaaagctcagtctgattctatgactaagtttgagcctgatcctgatgataccaatgcagatgatgcaaccaaaaccgaatcatgtcattcatatgaaatggcaagtgatcttgcgcatcctactaaagatgatgatgagcctgatccggatgactcagaaacacacacaagtataggggaagttgaaaatatgaaaattgtaaatgacactgtaatgttgtgtgggaatctgaatgcagatgaagctacgcaggcgacacctgagcctaataatgcagaaccgtatccagactataacctggtggtcacagagagggaaacaatcatggaggttgatgagccggatccagatgatcaagaaatccagaggatccaagactctgttaccatcatctctaaccgtctcaagaaagccataaaggccttgagaaatgaagtcagccccggtcaagcaaccactgtgttacaaatgcttctcaaaatagtcaggtacttttttcagctcttggaaacttataagcgtgtctgtagatgtaattccattgttatatgactgaagatactatgtttgttttttgtggttcaggaacatcattgaacaaccaaatgaaatgaaattcaaaaggctgcgtaaggtgaggactcattaggctgctgatataatatatagttcctttgagttatttttaactgactgtgtgatgatttgttcaactacatgaataacatttcagggaaatcctgcaattaagcgcaacattctcaactttgcaggtattgttactttttccatcttctcacaacagattgtttttatgatatatttgtgtttaaccgtctgtgttcggatgttaaacagcaaagagttgagatactttccgtcgttggctttgtcgatgagatggtatcggaaagcacaggagc

SEQ ID NO: 143224 - DNA, 1454 bp, Arabidopsis thaliana landsberg; identical to SEQ ID NO: 34178

SEQ ID NO: 143225 - DNA, 744 bp, Arabidopsis thaliana landsberg
ccaccgtgaatcttctcgtttcggactcacacacgagactctcctttggaagtcgttaaaccacaacggtagaacagtgttcatcgaggagaatcgttactacgcggcttacttcgaagaaatccacccggagatcgacgttttcgacgttcaatacacgacaaaagctcacgaagctggagagctcgtcaccgcggctaaagaagccgcgggaaacgagtgtcgtcctgtgcaaaatcttctcttctcagattgtaaattaggtctcaatgatttgcctaatcatgtctacgatgttgattgggatgtaatctttgtggacgggccacgtggcgatgctcacgaaggaccggggaggatgtcgtcgattttcacggcggcggttcttgctcggagcaaaaagggcgggactccgaagacgcatgtgtttgtgcatgactattatagagacgttgagaggctttgtggtgatgagttcttgtgccgagagaatcttgttgagtctaatgatttgcttgcacactacgtgttggataagatggataaaaacagcacaaagttttgcaatggtcgtaagaaacgttcggtttcgtctttgtcttaaaagtgatgccagaagacttcatacgtacatttgcttattgtaagaaataaagttttttccttgaagttttgctttttgtgctggtgtaaattttcgatcttggatttattgaagactttaatttaatctctgggtaccga

SEQ ID NO: 143226 - DNA, 718 bp, Arabidopsis thaliana landsberg; identical to SEQ ID NO: 7517

SEQ ID NO: 143227 - DNA, 2233 bp, Arabidopsis thaliana landsberg
atgattcgcggcggaagaaacaacattacttccgctccggcgttttcgaaagacgcaaagaagcttcttttatgcacagccaacaccgtctctgtttacagcgtcgccactggcttaaaggttttatctctcgactcgagcatccttccttttagggtttccctctaatcttcttctctcattagcgtatgcgtgtgtgtgtttttaagattacttcactcgaggatcatacagcgcctgtgacgtctgtgattgttgatccgtcttccgacgaaaccgtcagttactgttggacttcgtcgctcgatgggaaaattcggatttgggagttctctgcgccgaagcttttgaagatatttgatacccaccttccaattcactctctggtctgttaaagttccatactttgcagcttataaacagaaatttgataactttcaattgcccttttctaagtgtctgttgggactttgtaggtgatgattccagttcacgtgtcacattccgtgattgcttatgtttcggttgaggactattcaagtgtgtccaaagatttgtttggacaaatccggagatatgatctcactcaagaccctcttcatagtggagacactttgaaagaggtcagatttgtggattaaccatttttcgattagcctcatgtttgattctataatcatttttgttaatgtgcagatggaagaaccaaaacctattgttttaagtccctctggagagtttttcggcgtctgtcataactgcactatacatatatggaatgtggcatcagagcacctcatgccaaaggagacgacattacatcatacagagttgattactgtttttgctttccatcccaatcagagaatattagcagccggtgatgtaacaggaagagtgttaatttggaaggataatggtattgaagaatttacttcagtgaaaactgaagatgatgctgaatcttgcactacatggcactggcattctgctgaagttaatgtccttaatttctcttccgatggagcatatttgtattcaggtgcggccgagttatattctgatatccattggatttatgaaccgacatagactaataggtcatgagcaaatttactgtttgaaagtaatgtcctgacttcttactccatattgcgtctgttttctgactctttagggggaagggaaggggtacttgtcgtttggcagctagacacagggaaaaagaaattcttaccaaggataggatcccccttgctgtatttcatgtggtctccagatccaactctttcttctgtaagtcggagcttactctttcattctaatctaacacacaactgctgaaagcaaaagggaatgttttactgatttgactacgaatgagagctgcaggtggtttgtgcagataatcagatccatttgcttaaaatgccttccatggagatcttaaggaccatttctggaatcaaggttcgtcttggaaacttaataattaaggacctgtaatcattctcgtcagttttgtcaacgattctaggattctagaaactctcgcaaccgctttacctttttcttggtgtttacttcaatgtgtgttattttgttacagcctcccccatcattgcctaggatgtatgaaggcttggctagtactgttgcctttgatcgatcttctggcatagctgctttgtgcacagagaattattgtgtacagctatataatcttctcaatgaccggggaatttcagaggttagaatttggctccaatatatccttaagaaactctatgccactttctcctgtctatgaaatctctaacttctttaatcaatgcttttgcagattcaagtttgtgagagaaaccatcaaccaggagatgagatcacagtaagtacatttccttgctgtttatttgatagtatatctaagattattttcgtttgggtgataatttgagtaaacggtaataggttgtggtgacagcggttgctctctccctggatggctcagtgatgagtacaaccgaggtgaaacttccggaagatggaataggaggcttagtgtccctcaagttttgggcgtctgaaccagacagcaaaactttcaccttatccacaatcgtatatgaacctcataggttaatatttccccctctgctaatggataaagctttattttacaccattacccaattttcttgtcatgttttatttcttgtaagccttgcaaaca

SEQ ID NO: 143228 - DNA, 895 bp, Arabidopsis thaliana landsberg
tcacttgtaaccgagctagactccaaggattgggttttggtctgtgatgctcttaataccattcgtcgtctttccatattccacaaggaagaaatgctgcatatgctgtaagtcattttctttctactcgtgattatgatcagttttagtagatcgagttacacgtcgagagaattttctagtctcacgctgtcagctcttacagggagaaagtgatcctgtttatcgtgaaatcactgaagaacccaagaagtgctgtaagtaaaaccgcatgtatgacatctgctgacatcttcagctcatataatgaccatacaatcgatcaattggatctcttggtaaatcatcttttgcagatactcttggaattctcctcaaatagcggacatttgtgtgttcttataacagtaactccgaattcccttcttacagcttactcaactcctccttaaatcttcccaagacaagcgatttgtttgtgaagcagcagaaaaagcattagtagcaatgactgcacatgtttctcctgccttgctgttgccaaagcttcaaccttttctcaagaataggaatcctcggatccgcgcaaaagcatccacgtgcttctcccgatgtgttccccgactggtaaatcaaactgcactcgatatcataaaaccagtcttgttcttttgttttggatttgtcatgtcatcaccatgacaaccaatttggatccagtccatgttcccaccaacatcacctttctttggctgtgtaatcattagggcattgaaggcattagagaatatggaattgagaaactagtccaagcagcatcgtctcagctcagtgacaaactcccagaatctcgggaggctgcacgggcagtcttactgaacttcagagagtgtct

SEQ ID NO: 143229 - DNA, 1156 bp, Arabidopsis thaliana landsberg
atgaacatcttagcggattttgcagaagttatttcacacagaaggcgtggatgggtagaagcagcagcagaagaagcttattggtatggcacgtgcgacgtcggatcatgcctttaatgctacaatttgggatgttcttgttgatcatgaatatcaggttaatcaaaacaaatgatatggtttttgcatttagtttttgcttgccaatataaatgctttgtgtttgatgttaattggtgtattgtgtatgttttcacgttacagggtcaagggctaggtaaagctcttgttgaaaaacttgtaagggctcttcttcaaagagatattggtaacatatctctgtttgcagatagtcaaggtaaaacatcgaatcactgtttaatctgcaatttttgtggtcaaaatatttggatttgttcttacttagttgttgaatctgtgttccttttttgtagttgtggatttctatcagaacttggggtttgaggctgatccagaaggcatcaaaggcatgttttggtacccaaagtagtacttggtgattgcaagaaaatgggattgttacttgtatgtataatttctttgctttcttatatggaatctataaggaagtttgaactgtgcaatttgtaatccaaaagctatttgacattcaagtattcaacatgagtatgatcaataggataaaactgttctttcttttgcttagttgatttgtggtttgaatctactttgatgctgtaaagaacaaattttgaaggcgttctataaactgaactgttattgctctgctattcacttctctacattacaggctttttctttttatctccacacaaattacaaacaagcaagaccgtccttttcgccatgaaaattcgcggtaaacaacgcataaagaaagaaagaaataagaaaaagaagaaactgcggatggatttatcgacgcgttctatttggcttcgcttcgtttgttttaggctttagcttctgcacgagcagtggctttgttggcaatgagctgctcatagagatctctgatcttcaatccaacaatggtttggaaaacaccagcaccgttgttgctacccgggaaatcaacatgtatgagcatttgttgagtgacttctccgtagaatttggtcgagaggttgct

SEQ ID NO: 143230 - DNA, 689 bp, Arabidopsis thaliana landsberg
gaataatccactcgaatcttaaaacgacgtcggtttaaccaaatgcgagtcaacggatgctgctgcaatgcgtcgtgttgtgttcgtcactcgccgtcgtcgtcatctccgtcgcttcgacctctcccctcgttggtgttcaccctttaggttacttcttcgatgactcttatctttattatatcgacaaatctgaaaaatgttcttgttctctgattcttacttacttctttgttgtgaggcagatgaaaagtatttcgactcagatgttatcaaatgcaaagatggctccaaatctttcacaagagatcgtctcaacgacaacttctgcgattgtctcgacggcaccgatgagcctggtacacacttttttctcaatttagaatccagagagctgagatgacatgagactttaaattctttccagataaaaagatttaggactagaattgatcgaatcttattctctttcacaatttcaattatgaaaaatgtgttcttgtgagtaagtttctgaatttctgattttgcattacaggaacttcggcatgtccaaatggcaaattttactgtaggaacattggaagttctccaaagttcgtttactcttctcgtgtgaatgatcgaatctgtggtcagtagttactaatgttctgaattcgactaaatgattctcgtttaagctgtct

SEQ ID NO: 143231 - DNA, 918 bp, Arabidopsis thaliana landsberg; identical to SEQ ID NO: 10265

SEQ ID NO: 143232 - DNA, 2397 bp, Arabidopsis thaliana landsberg
cgacctggatgggagcttatttgagattagcgttctttgattctccattgcatttggatatttgagttatggtttacacttatcaattatatttgcagaaaagaaaacgtgggagggacagttcgtcgccatcgtcgagtaagcggaagaaattgactgataagacacattctggagctgagaacgtcgagtcttccagctagactgatacgggcttgactgctctagcgaatggatctccaagaatagaaaacttgagcttgatatggtgccctaacgtttcaagtgtgggtttgtgttcccttgctcagaaatgcacttcacttaaatctcttgatttacaggtaatttaacagccgttgtcgcttatttagatctgttaatattcatttcccatatcctcttgataaaaacaataggatctcatatgcttaggatgtggtctttagggttgctatgttggagatcaaggcttagcagctgttggaaagttttgtaagcaacttgaagaactaaatttgcgcttttgcgaaggcttaactgatgttggagttattgatcttgttgttggttgttccaagtctttaaagtctatcggtgttgctgcgtcagcaaaaataacagatttatctctggaagcagttggttctcactgtaaattactagaagttttgtatttggattctgaatacatccatgataaaggattgatagcggtggctcagggatgccaccgtttgaaaaatctgaagcttcaatgtgttagtgtgacggatgtggcttttgctgcagtgggagagttgtgtacttcgttggagcgattggcattgtatagctttcagcattttactgacaagttagtgatcctgttccgtttaagtgtctttggatttttgatgagcacaatccaatccttctagtacctaaattttcaactattagagaagtcaggggatgaggaaaatacaggctttggtctcatcttgtgtgcttctattagatattgtcttctgaaattattgcccagtgttggttagaccattcgaaggacatggaaggacacttgccttatagagagacctttgtttatctttgggatggccttgtgtaggatgatcgttttacttgatttttattttgtatttcaggggcatgcgagccatcggtaaagggtctaagaagttgaaagatcttactttaagtgattgttactttgtgagttgcaaaggtttagaagctattgctcatggttgtaaggaacttgagcgtgtggaaattaacggatgccacaacattggtacacgtggaatagaggcaattggaaaatcttgcccgtacattttcttccttactttctttatttcttgttgacagcatcagagatcactatgggatggatcattgattgaaccgttattttcgggtgtatgcaggcgcctcaaagagttagctttgttgtattgccaaaggattggtaattcggctcttcaagaaattggaaaaggctgtaaatccctagaaatacttcacttagtagactgctctggcattggagacatcgctatgtgcagtattgctaaaggctgtcgcaacctcaagaaacttcatatccgcagatgctatgaggtataatctctcatctcttaaaataaagtattttcttaatctattgacatagcaactggtatatgcgttttttcttatatacagataggaaacaaaggaattatatctattggaaagcattgcaaatcactaaccgagcttagtctccggttttgcgataagtaaatcctgcaactcgttgaatcttgtttcttaaacagtactggaacaaaagctaatcatttcttttatcttattcagagttggaaataaagcattaatcgccattggaaaaggttgctccttacaacaactaaacgtaagtggttgtaatcaaatcagcgatgctggaataacagcaatcgccagaggctgtcctcaactcactcacctcgacattagtgttcttcaggtaaatagaactaacattttctaaaagcgtgtgtgtttgtttgttatcgagatctcaaagctgggacgtttgatcacaaatttcagaacattggagacatgccgttggctgagcttggagaaggatgtccaatgctgaaagacttggtcttgtctcattgccaccatataacagacaatggtctgaaccatcttgtacagaagtgcaaacttctggagacttgtcacatggtttactgcccagggatcacttccgctggagtggctacagtcgtctcgagctgtccacacatcaaaaaggtgttgatagagaaatggaaagtgactgagaggacgacaaggagagctggatcggttatctcttatctatgcatggatctc

SEQ ID NO: 143233 - DNA, 1865 bp, Arabidopsis thaliana landsberg
agacaggatgtttttgcaatcctggcgcatgtgcaaagtatctcgagttgtcccattcggagctactgtctaatgtagaggtataattgttcaattattttgcttatcattctttctactgctcctgattttagtagttcttgtattatatacttgaccgtgacatccttttaatgtaacacaggctgggcatatttgctgggatgacaatgatgtgataaatggaaaaccaacaggggctgttagggtttcgtttggttatatgtcaacctttgaagatgcaaaggtatatgtaggttccttgatttaaatgtttcccaattccatgtatattgtcgaaattataaacaaagctcattttcgacttgctgctacctaataaatattatatgcttcattcacagaaatttattgatttcatcataagttcatttgcttcacctccaaagaagactgggaatggaaccgacgtcagtggaaggtttcctcaacttcctagcgaagggactttctctgaatttatgtacagtgctttgttcctagcaacaattcaactctcttggagcatttattcattcacatagtcacattgacataaaagggacttcgtatagttgattccgccattcattctctgggatgtgacttcaattaaagccaccatgtttacatgcttacctttttgtaatttggtaattgatacttgtgttagccacacaaataaagtgcatgtagcttgtcaacttcgtatgatctttggaaaaccacagagtcttaacttgcgagatagcaaatacttcataaagtataaatggcgtctcttcccctttttgttgatttgcagaccttgaaagtaaagaatcttttccaagccactaccttaagtcaattactgtatacccgatcaagtcatgtgctggattttctgtgatacgttggccactttgcagaacaggtatttcattcaacttgcttggttactccaaattggtgctgctgtttctattagtggttgggctgatctctttggcatttatgcataacctgtgtttattttttgaaacataaaaggcctgctgcatgatcgagaatggatggttcagggtctgaccggtgaaattcttacccaaaagaaggtaatagagcatcttctatcaacagctatgtcaccaaaattttgattttcttgggaatggcttctaggtgcctgagatgtctcttataaaaacctttatcgaccttgaggaaggactactgtctgtagaatcttctcgctgcgaagacaagttgcacatcagaatcaagtctgattcatataacccgaggaacgatgagtttgattcacatgccaacatgtatgcattgctccttatcatgtgctgtcttacatcagctgcttgtaataaatttgattttggttgcagacttgaaaaccgtaatgaggaaactagaatcaatcgttggttcaccaatgccattggtcgacaatgcaagttgctacggtattctagctctacttccaaagactgcttgaacagaaacaagagtcctggtttgtgcagagatttggaaagcaatatcaactttgctaatgaagctcagttcttgttaatctccgaggagagtgttgctgacctaaacagaagattagaagcaagtacgtttctatgtccgtttcatcttacatcttcttccttttcgcttgataaaaactgatttggttgcagaagacgaggattacaaacgggctcatgaaaaactcaatccacataggttcagaccaaatctggttatatctggaggtgaaccatacggggaagataaatggaaaactgtcaagataggagacaatcatttcacagtaa

SEQ ID NO: 143234 - DNA, 2694 bp, Arabidopsis thaliana landsberg; identical to SEQ ID NO: 69507

SEQ ID NO: 143235 - DNA, 593 bp, Arabidopsis thaliana landsberg
tttcttgtcatcgaatgaagtccttctgtgtttgaggttaaaagattgtttgttcttattttttttttaacttctgtgttacttttaggacgcttaccgacaacatggttgtgggagtatcaaagggatttgagaaaaagcttatacttgtgggtgttggctatcgtgcaacagtagacggaaaggagctggtgctaaatctcgggttttcacacccggtgaagatgcagataccggatagtctgaaagtgaaagtggaagagaacacaagaatcactgtgagtggatacgacaagagcgaaatcgggcagtttgctgcaacggttaggaagtggaggccaccagagccatacaaggggaaaggagtcaagtattccgatgagatagttcggaggaaggaaggaaaagctggaaagaagaaatgatcttcatttttcattattatctacttacttatctcttcctttcaatgtttatgtgtatttgctcaaatttgtttagaaatgaagatgtttgtgttgggattcttgagtaagtttttaaaggaacccattaattgtttttgatgctctgacaaaaatttctttagtgct

SEQ ID NO: 143236 - DNA, 842 bp, Arabidopsis thaliana landsberg
  unsure (1)..(842): unsure at all n locations
atggcagcgtttatcagcgttgactttcagaactgtttcatcttcattctcctatgcttcttctccctcctctgttattctctcttcttcaagaaaccaaaggactcacgaggctgtgatctacctcccagccctccgtctcttccgattatcggtcatcttcaccttctcctctcttctctatcccacaagtctttacagaaaatctcctctaagtatggacctctcctccatctccggatctttaatgtccccatcatcctcgtttcatcggcttcagttgcagacgaggtcttcaggatccacgacatgaacatctcctctcgcggtgctgctgcgatcgatgagtccctcgtgtttggatcttctggtgtcgtctacgctccctatggagattacttgaagttcgtgaagaagatcattgccactaagctgcttcgacctcaggtgttggagcggtcacgaggtcttcgtgctgaagagctacaacgattttacaacagaattcttgataaggcgaggatgaatgagaacgttgagatcggtaaggaagcgacgatgctcatgaacaacatcttgtgtaggatgagcatgggaaggagtttctcaaaggagaatggtgaggcatagagagtcagaggcttggtggctgaatcatatgccttggcgaagaagattttcttcgcatgtgtactgcgcagactgcttnnnnnnnnnnnnnnnnnactattcaagaaggatatcatggatgtttccaacagattcaatgagctgctagagaagattctcgtggaacacaatgagaaactggacgaggaacataaagacacggatatgatgga

SEQ ID NO: 143237 - DNA, 1593 bp, Arabidopsis thaliana landsberg
tcattccctgagcaattccttacttctcaccagctcgagatattccggggcacttagaagaaccgcagctgctactgctactgtgaatacccatcctccagctaatactatacctcctacagacaatccaattcctagaccgaaagttactcttttcttaaactggcttctagatttttgcttctgatcatctaaactcgaatcttcttcaacattttgcaattcttgatctatgttgtgttcctaaacagacaatagttacagcaatgccatgataagtttctcagcatcacatagcaatccacaagaacgattattcgtactactaagctaacacatcaagagaaagaggagtaaagttacctcctttgagttggcatcgtcaccaatttgatttgattcagctcgagcaacggccgtgataactctccggttaacagaaatcggagtaaagcgagaatgagacaacaatggtttcgggtacttttcagagaattgaggaagaataagatatttccttggagaggaacggcaagggcatgtacagagagagctcaatgaaagcggtaatggcttatacctacagacttcaacaaaaggcgccattggaatccggtaatcggaaagaagaagaattcaaaatcctaaaatttggataaaggacaaatctttacgataacggaatcatggaaggaagagattttgaagattgtgtgattcggtgaatctaatcggagcttatacgttttgtacggtgcagatgctaatggtggaccttggtggtcgacaaagagaggatctgaaacccacgcgcccctgttagcgcgttgataactctccttctttgttattgcccgaaagtctctggctgcaaaggaaggtcttacgtggaactggaagctgacctgagtgtcaagtggcatattgttttgtttgttccttggataaaggattgtcttgttcttcatgtgtgttttaagcgttcctcaaggtcttcacaatttggatggtgttagtcctacaggagtgaagaagtttgcatcttacatcttagtatcagaggaagaaacagaggaatcggatggagactgtggtagggcataaaagagcgaagaccccaaagggcaagcaacttttgatcagtagattttgggatctttgttagtcttcgagttgaacagattctcaaggacaagcaacttttgagcactgtgacttatgtggaaccttataaccttgaaacttgtcttggagtaatatgcaaatttaccaattgttcatgttagagggaaaatgtatgagattggtgaattgctttcagaaatattgctctattagatgaatcaactactagtcaaagcccttgctcgaggacaacgtctacatcctttgcacttttaaagagctcaacaaattcctgtggagggaaagaggttactgtggcgatccatggctcagagtcttctccatgttcaaatgatcttgaaggtgattcaacagactctgctcttccttgcaatctaattcccacgagaacattgacagcggtactcacaaactcttgttggtcttgtctcaatggtttctaaattc

SEQ ID NO: 143238 - DNA, 546 bp, Arabidopsis thaliana landsberg
gtttgataacggtttcggttaacttcagtacgtttttagtgattggaaagacatctccggtgacataccaagtcttgggacatctcaaaacgtgtttggtgctcgcatttggttacactctccttcacgatcccttcactcctcgtaatatcgcaggaatactcatcgctgtcctcgggatgcttctctactcctacttctgctcagttgcttctaaatccaaacaagcctcctccgattccacttttcttgtacgttaaccacacaaaaagaaaagatagaaataatgagtgttgaaagtttctaagtactttggttttattccttttttgacaggggaaagatagagatacgacgccgctttgggacaagaaaatgagaaccatcatgaagccaagaaattagacaagcattctccagtatgaaatagtacaataactctttctttatgtttcgactctataattgtgtcccttttttttgttcattcattgataatgtttttgtaattgagaaaaaattgaaatagccaatgggcattttctc

SEQ ID NO: 143239 - DNA, 1121 bp, Arabidopsis thaliana landsberg
ggacagcacactttttgtggatgatgatctttggatccttcactctattggtatgtaaagcctcccctgtattctattcttactgatcattgttattggttctttgagaaccccagtactagtatgtggtatgccacaaagtagataatcgctggtacataatatcccaaagctgagaagatcagaagctctcaaagaattgaatcagggttgcattttattaaagcgagacaaaattttggaaggtattcatactagtaaatccgtgtgttaaaacagttaccttgttcaaatttcaggtattatcagtcataccatttttctggacaccgtttcttggtgtttcacttgtgttcatgcttctttatctctggagccgagaatttccaaatgccaacatcagcctatacggtcttgtcactcttaaggtattgaaagtgtttcttttgtaatcaaatccactccttggtatatataatgttaatggtgaaagttggaattactccacaggctttctacctcccatgggcaatgctagcacttgatgttatcttcggttctccgatcatgccagatcttcttggcatcatagctggacatctatactacttcctaacagtccttcatcctcttgctaccggaaaaaactacctgaaaaccccaaaatgggtgtatcctttattcaaattctcgattatttccagatgattgtttctctcgcttctcagtttttgttttgctgttgtaccttgacattctcaacagtaataaaatcgtagcaagatggcgaattggagctccagttgcaagtgttcgacaagcaggtggtgtaggagcagcaggacccggagctggaggaggagtaggaggaggaggagcttattcaagcgctcgtgccccacccgagagttcaaacacagcattcagaggtcgatcatatcgtctcaccgactgaaatagaaatcttctcgagtttctttgttttcatcatatcaaatctttttcaaacaatgccactaactaatcccaggtagctttgtgttttcgaacagtacagtttttgaatatatgactctgtaggaagaatctttgaggttttaatacaatgttcttttcaaaat

SEQ ID NO: 143240 - DNA, 1899 bp, Arabidopsis thaliana landsberg
atgatccgtatcggtggagttgtcactaggcgttctggggtctttcctcagctgcagcaagtgaaatatgattgtaacaagtgtggagcagttttggggcctttcttccaaaactcttattcagaagtcaaggtcggttcttgttctgaatgccagtcaaaaggaccgtttactgttaatgtcgaacaggtaggattctgtaatctctctatcattattttcctttaactctacgaacttcaatgtaagttattggaatgtgaaattgaccatactgttaattactcccttgtttcagacaatatacaggaactatcagaagcttacaatccaagagagtccaggaacagtgcctgctggacgacttccaagacacaaagaagttatcctgctgaatgaccttattgattgcgctcgtcctggggaagaaattgtacgttcatcatatattagccttctagaatacttgcacacatgtatatgatcaatcattcatgttatcttgcatgggattttttgcaggaggatactggcatatataccaacaactttgacctatctttgaacacaaagaatgggtttccagtctttgccactgtggtggaagctaactatgttacaaagaaacaagacctcttctctgcgaacaagctaacccaagaagacaagacacaaaaagaagagctatccaaggatccacgaatagtcgaacgtgtaagttggatatcaatcctcctaataaatcctttgaattgcttcagagttcatctcttttaacattatttcaatttctccttcagatcattaagtcaattgctccgtcaatatatggccacgaagatatcaaaacagctcttgctcttgctatgtttggtggccaagagaaaaatatcaaagggaaacacagattgcgtggagatattaatgtacttttactaggtgatccaggaacagcaaaatcacaatttctgaagtaagaaaactatcctgaccagcttacttaattaatatctttggtgaatattttcattaactgcattaatgtttcttctaggtatgttgaaaaaactggtcaaagagctgtctacacgactggaaagggagcttctgctgttggtctaaccgcagcagtacacaaagatccagttacaagggagtggacgcttgaaggaggggctcttgtacttgctgaccgaggaatttgtcttatcgatgagtttgacaagatgaacgaccaggacaggtaacaaaatgcaactaatgatagttacttttttgaaggaaatggtgctgacgatataagtttttgtaaccagggtgagtatccatgaagccatggaacaacagagtattagtatatcgaaggcaggaatagttacttctcttcaagctcgttgctctgttattgctgcagctaatccagttggtggaaggtaagctagaaactaatgcccttcattgacctaaaatttgtaattttgatcttgctaatttgtttgtgacattgcaacttcaggtatgattcatcgaaatcatttgcacaaaatgtcgagttgacagatccgatcctttctcgttttgatatcttgtgtgttgtcaaggtattttttcaaacctctgctcttgttcttgcatatcattgattgtattaattttttggctattgaccaattatatggctgcaggatgtggttgacccagttacagatgaaatgctagctgaatttgttgtcaatagccacttcaagtcacaacccaaaggtggtaagatggaagatagcgatcccgaagatggcattcagggatctagcgggtcaactgatccggagggttgtgaatatcatgtgtagctgcttctttgaagtttccatgtttacaggtcttgatctatatgtaatt

SEQ ID NO: 143241 - DNA, 1152 bp, Arabidopsis thaliana landsberg
ggtcatggctgctggacgtcaactagcaaaaagcttggagtcacattcactcaatgacttaggcttctcaaaacgatatgttcggtgtctgcaggtatctctctgcctactttcttgcattttcctggtggcgtgtctcctttttactgtttaactcttgccatcttctttaaacagatttctgaggttgtcagcagcatgaaagatatgattgacttttgccgtgaccaaaaagtgggtccaatcggtaagttaatacataaatcccagagagtccctgagattcatcaaaacgctttttttttacttggctgtgcttataaaaagctttcttgctacctttttacatttgcagaggctttgaagagctatccatatcgaatgaaggctggtaaacctcagatgcaggagatggagcaactagcggctgcccgagggcttccacctgataggaacagtctcaacaagctaatggccttgcgcaattccgggataaacataccaatgaacaacatgagcggtcaaggatctcttcccggctctgcacaagctgccgcttttgcgcttaccaactaccagagcatgctcatgaaacaaaaccatctgaattcagacctaaacaacaccacaatccagcaagaaccatcaagaaaccggagtgcatccccgagctatcaaggaactagtcccttgttacctggttttgtgcatagcccatcaataagtggtgtatcttcccatctatctcctcagcggcaaatgccaagctccagttataatggctcaacccagcaataccaccaacagccaccttcctgtagtagcggtaaccaaacattggaacaacaaatgattcatcaaatatggcaacagatggcaaacagcaatggaggctccggtcaacaacaacagtcactttctggtcagaacatgatgaattgcaatagcaacatgggaagaaacagaacagattatgttcccgcagcagctgaaacaccaagcacctccaacagattcagaggcatcaaggggttagaccaaagccaaaacctggaaggtattatctctaatacatcgctcaactttgggaataacggggtttttagcaatgaggttgatgaaagcatgggaggatattcttggaagtcatga

SEQ ID NO: 143242 - DNA, 1494 bp, Arabidopsis thaliana landsberg
  unsure (1)..(1494): unsure at all n locations
aagaaaactctcgtctgttaaagctttcctctgtttaccttcggagtcaatcttgattccgatgggactcgaatcgggttttggagcgtttgggtgaagacatggagaaactaatgactgaatcaggtttgaaaccagttgttattgattcgaatcaagatttatctcgtgtatattgtgggatctgctctaatattggtgatgacgattatgatggtgatgttgttgttgttgatggtgatttgatctacacgcctttttgttctcacaagttctgcaaagcttgttggagcaagtatcttgagaaaaatttcttctctgtggagaaaaaccacactgcaattccttgtcctgatcgagattgtcgagctgctgttggaccggagacgattgagaagctaaccgtacgtgatcaagcgatgtacgagttgtatgttctgaaatcttaccgtgagaaatacctgggatggaagctcaaacagtgtcctgcacggggttgcaattacgtgattgagtttcatctggcgagtgaagatgaagagcatagcttaaacattgtatgtctctgtggtcatatcttctgttggagatgcatgcttgagtcacacagaccagtgacctgcaacaacgcttctgattggttgtctagagacttggagcaattgatagaagaagtagacaagccatcgaccgtcttctggattgatgccaataccaagccttgccctcattgctttattcctgtggagattgatggtgaacgaccatgggcccagttcttgacttgtgtctgcaggtttcactcttatgaaaataacactggttttttgctattcgcagattattagatttctctatcttaattatttgatcatactaatttgtgtgttttcttgattcagcggtcgtttctgttggaagtgttttcggtcaccggaaactcacggaacctcaggatcctgtttggcaccggcgcgttcgagcaatgttggtttcaatcattggaacagagcaaaaccggggatttcgtgtttggatctctggaatgcgagtcaagtgaatctggtgaacgctaaatacgagctagaagctttcgaggaatccataatcaagaaacctagtgacttgaaggagcaagacgttaaggtactaagggaaggactgatgctcattgttcagtgcagacagttcctcaaatggagctgtgcgtacgactatatccacacagagtatgatatggcgaagagagagtacctgcgattcctccnnnnnnnnnnnnnnnnnnnngtccatagtttctcacagagtataaaggaggaaacagaagccaaagagcttacttgcggtaagctattgagcgagacaaccaacattgggaacttcttttatcatttcatcaagactttacgagaaggtttgcccgaggtacaggcggagtcgtacgacaactatggtggtccttactggttgtgcgatcgctgcacatatggaaac

SEQ ID NO: 143243 - DNA, 720 bp, Arabidopsis thaliana landsberg
cagcttaatgaaaacatatgtagaaattagggttttgtttattgaccatgaaattaagatctaatgcatgagatcttgttatttatatattttctcatcggttctcaatatttgttcgttcttataaattttcagggctgcttagatgcagcaagagttgtagacttagatggacaaactatttaaggccaggaatcaaaagaggcaatttcacagaacatgaagaaaagatgattgttcatctccaagccctcttaggaaataggtaaaaaataataatgacttttcaatttctctaattttgtctcttcacacattttctttcgaaaattagaagatttgttttgatttttaatagagagcatttaatatttggtgtagatgggctgcaattgcgtcatatcttccacaaaggacagacaatgacattaagaactattggaacactcatttgaagaagaaactcaacaaagtcaatcaagattctcatcaagaacttgaccgttcctcgctctcatcttcaccatcgtcttcttctgctaattccaactcaaacatctcaagaggccaatgggaaaggcgacttcaaaccgatatccacttggcgaaaaaggctctctctgaggctttatctcctgccgttgcaccaatcattacatctacagtgacaacaacgtcttcctctgctgaatcaagacgctctactgcctgagctagcgg

SEQ ID NO: 143244 - DNA, 967 bp, Arabidopsis thaliana landsberg; identical to SEQ ID NO: 50279

SEQ ID NO: 143245 - DNA, 3604 bp, Arabidopsis thaliana landsberg
cttgagtaccacagtcggacctctgcaatctttgcatgcttcttggatatgaagggttttggacacttttctttctttctttctttgcgttcctaagcttcctctttctttttatatgtagtagtctacacaacatagatcttttcttatccttggtctcaattatttccttgaattgcttaagacgaactcacatgttttattaccgcaataggttatcggataaaatttactcgctagcgggagaggtactgaaaaagttggctgccgtagatgttactcatcgcaagttttttacaaaagaactctcagagttggcgagtggtttgagttcctcaactgtccgtgtgctggcaacactaagcactacacagaagatgagtcagaatacatgttccatggcaggtgcttcaattctccgtgttctgcaagtgcttagctccctaacttccactattgatgatagcaatgtgggaaccgacaaagaaacagatcaggaggaacaaaacattatgcagggactaaaggtggcattagagcccttgtggcaggaacttggccagtgtatcagcatgactgagttgcagctcgatcatactgcagctacatcaaatgtcaatcctggagatcatgttctagggatctctcctacgtcatctctctctccaggaactcagagtctcctgcctcttattgaggctttctttgttctctgtgagaagattcaaactccgtcaatgttacagcaggatgcaactgtgacagcgggagaagtaaaggagtcgtctactcatggttcttcatcgaaaaccattgtagattctcagaagaaaattgatggttctgttacattttcaaagtttgtggagaagcacaggcggcttttaaattcatttgttaggcaaaatccaagtttgctggagaagtctttttcaatgatgctcaaggcaccaaggctgattgattttgacaacaagaaagcgtacttcaggtcaagaataaggcaccaacatgatcaacatatttctgggccattacgtattagtgtccgccgagcttatgtattggaagattcatacaaccagttacgtatgcgctccccacaggatctgaagggacgtctgaatgtgcagtttcaaggtgaggaaggtattgatgctggtggcctgacccgagaatggtatcagttattgtcaagagttatatttgacaaaggagcgttactcttcactaccgttggaaatgatgccaccttccaaccgaatcccaattctgtttaccaaactgagcatctatcatacttcaaatttgttggtcgcatggtaatatttcagaaccttctcaatgcactcacctgattgttggtttttggttctctctgatgtgtttgtgatgtcactgcaggtggcaaaggcgttgtttgatgggcagcttttggatgtttatttcactcgttccttctataaacacatactcggtgtgaaggtgacctatcatgacattgaggcggtggatcctgattactacaagaatttgaagtggctattagaggtttgaggacctagcctttattaatctttatctattacaaagctcaaaaatcgaagtcaggtcctgctttttgagactcatatttgtgcctttttctgttcatttagaatgacgtgagcgacatactcgacctcacatttagtatggacgcagatgaggaaaaacacattctttacgaaaagacagaggttcgcttgatgtgtttttgttttttgtttttttggtgctttatcccaaagtgccactgtattgaattgatcatattatctttgatgaaaaaggtgacggactacgagcttaaacctggaggacgaaacatacgggtaacagaagaaacaaaacatgaatatgttgaccttgtggccggccacatacttaccaatgctattcggcctcaaatcaacgctttcctcgaaggctttaatgaattaatacctcgtgagcttgtatcaattttcaatgataaagagcttgagctcctaatcagcgggttgcctgagattgattgtaagttggattctattgatcaatatctatgtgcttatccattaagttattataataacaatctttttatttgttttagttgatgatctaaaagccaataccgagtataccagctacacggcaggatcccctgttattcattggttctgggaggttgtcaaggctttcagcaaagaagatatggctagatttcttcaatttgtccctggaacatcaaaggtagaccaatattagcagcttctgtccaattcacttgagagtctcattgagagagatatgtacaggcattttgttgtatggatggtttgatctcaattttgatatccttcctctattccccttttggttcgctagaaattcatagtaaaggtaacctttcatatgtttaacaagcggtgtacatgagtgcaggttcctccaaaagacatcaaggcactgcaaggtatttttggccctcaaagattacaaatccacaaagcatatggagccccagagcggctgccatcagctcatacatggttagaaatcattacaaagctcttttttattttaaaattttagttgttggcgtaatttaacaaatcttgttctgttgcagttttaaccaactagacctccctgagtatcaatataaggaacagcttcaggaacgcctgctacttgcaattcacgaagccagtgaaggttttgggtttgcttgaagaaagcttgtcgaaaccaacccccgtcacattaagaatcagtgaaaacccatcaatccttcattcttttgactcctctgtacatgtaagctagctttcatacttgtacattctttaagattcaccataaattgcttagtttggaaaaataaaagtctcatgatttctgttgtggcagatctcgaagattttcaggcaggataaggagaaagagcttttgattaagactgcagaatgaatagaaatcgcaagtggctatttttgtctgtccatattatgttagtattagtctatttattattagggtttctctctgtccccttaggattttgtatatcaaaaatcttttgaaatagttgcaaactctcaaatattagtagttgatatttgctatccattctagtaagcaaaataagataagaaaattacatattataactgctggtcattattttgattacttttttgactgttgttaatcaatcttacaaaaacgctaaacaggtacaggcagataaagctaaaacaactgatttaactgtaacgctcattggcatctttcctttgtcttgcctcaacaacatacctttatacagaggccagtttatgacaactagtactcctgttatcacaaattgcatccccattgttttcaaatctccaccgtctccggaaacaagtctcgcaaccgctgcggcgaagcagaagagattgagcataccgagtgttccgaggacgagatacatgggagactccactccaaactccattacctcttccttgtatctctctgctgcttcttcttctgctacttttgctgtgatcacaaacgcagactcagaaac

SEQ ID NO: 143246 - DNA, 4948 bp, Arabidopsis thaliana landsberg
cctccggatttcgcgctagtccaaccaccagaggaaggtgcttcttcaactgaggatgaaggcacaggcagcaagatcagggaagacggtttccttctcttcaaaaatctctgtaagttgtctatgaagttctcgtcacaagagaacaccgacgatcagattcttgtgagaggcaagactttgtctctcgagttgctcaaagtcatcattgataacggcggcccaatttggctctctgacgaaaggcaagttgttttatctttcatttcacaggttagtctagtcgtctctcagtagtaatgaactccaagagctcactctccctccccaaaaaatatgcaggtttctaaatgccatcaagcagttgctctgcttgtcgctgttaaagaatagcgcactttcggttatgtctatttttcaacttcagtgtgctatcttcacaaccttactacggaaatatagatcgggtatgaaatcagaagtaggtatattctttccgatgcttgtcctccgggtccttgaaaatgttctccagccaagtttcgtgcagaaaatgaccgtgctcagcttactcgagaacatttgccacgacccaaacctaatcattgacatatttgtgaactttgactgcgatgtggagtctcccaacatcttcgaaaggtattggagtttttttatttaatatctcccctagatagttttttggtttctttttccggaatagtattccagttgttgtcagattacagttatttagctgaaagtgttagagatcagatcgagccaccagggtagcgtacgcggttcatatttgtattccattagtggtgttgtactttaataaagtgtattaaagctcttataattctatcagatgtttgcaggattgtcaacggtcttctgaaaactgctctagggcctcctcctggttcatcgacaatattgtccccagtccaggatattacttttcggcacgaatctgtgaagtgcttggttagcattattaaggcaatgggaacatggatggaccaacaattgagcgtgggagattcacttctgcctaagagcttagaaaatgaggcacctgcaaacaatcattcaaactcaaatgaagaagatgggacgactatagatcatgactttcacccagatttgaatccagagtcatcagacgctgcaactcttgaacagaggagggcatacaaaattgaacgccaggtcttatgttatttttttttgatgaaatgtgaatttctattataaaatggaacattgttatttacatatgctctggggaaaggtgcttctatgaccaaaaaaatattaaaaagttatagctactacaacatactaagtaatttagaggatgcttaggatagattagacatatgagaaccattgagcgagcagacgtccacatcctttgcggtaacgacgagctaagagagtgtatattatgctccaggtcttatattgcatcataaaagaactaaaatattgtccaccacattcgatgatattagtagaattgtttttctcttcggtcatgttaattgcctttatcatctttcttggtttatgtgcagaaaggcgtcactctattcaatagaaagccgtcaaagggtattgagtttcttatcagctctaaaaaggttggcaactccccggatgaggtggtgtcgttcctgaggaataccacaggcttgaatgcaaccatgattggtgattatttgggtgaaagagaggattttccaatgaaagttatgcatgcctatgtggactcgtttgatttcaaggagatgaattttggtgaggcaattaggtttttcttaaggggcttcaggcttcctggggaagcacagaaaattgaccgcataatggaaaagtttgctgaacgcttttgcaaatgcaatccaaattcattcagcagtgctgacacagcatatgttcttgcatactctgtaataatgcttaacactgatgcccacaatatcatggttaaagagaaggtttgtcttcttggctgtcacaatttattcaatccatgactgatagcttttggagtgtatgggcatgtgttaacttttttggctatttctgtgctcagaaaattgcttttgaaatattctaaattggagatgctttttggtgtaaaggtctttacagtgtatttaacgtctgctttctggtttatgacaatcagatgaccaaggctgattttatcagaaataaccgaggcattgatgatggcaaagatctcccagaagagtatcaaggtgcgctttatgaccaagttgtcataaatgaaataaagatgagttctgattcttcagccccagaaagcaggcagtccaatggcctgaataaactactgggtctggacggtatactcaatctggtttattggacacagacggaagaaaaagcggtgggggctaatggtcttcttataaaggatattcaagaaaagttcaggtcgaagtctggaaaatcagagtaagctcgtttaccttaaggtctagtgtgaagagatgcttatgagcgagtcaggttacctgcaacattagcgaactaagatgaaaccatcgtttccttatacgttaataaaccatacttccccttagtttaccttgttcattgtttgtctctgaaattgtgtattcctgagaattgagaaactatctttttaaaaggattaatattgacaaataccgtggacggatgttaggatctgtaatcataacattgatctaatgtactggattatttttttggtcttgtagatcagcttaccatgtagtcacagacgttgcaatattgcgttttatggttgaagtttcctggggaccaatgcttgccgcattcagcgtgacacttgatcagagtgatgacaggcttgctgcagttgaatgcttacgaggctttcggtatgcagttcatgtgacagcagttatgggtatgcaaacgcaaagagatgcatttgtcacttccatggccaagttcacaaatctccattgcgcaggagatatgaagcaaaagaatgtcgatgctgttaaagtaagtttcttactttcttcatattaaattcgctgttcagaatgaaaggagttgttcctctctgtgttttctttcctcgcatctgatttttaatgtatacagagagatgaagcattctgaggcatactgacctaagtatatcatatgtttcaattttctgtttccactgcttttaatgtctttctctagtagaaagcttctccttcacttgatggagagaagcatgtgtgattcacctcttcataacttcattattgcttcttatgttattcaggccataatttcaattgccattgaagatggtaatcacttgcaagatgcttgggagcacattttgacttgtctttctagaatagagcatttgcaattattgggcgagggtgctccaagtgatgcatcttattttgcttcaaccgagaccgaagagaagaaagccttgggttttcctaacttgaagaaaaaaggagccctccagaatccggtgatgatggctgtggttcgagggggctcatatgatagcagtacaattggaccaaatatgccggggcttgtgaagcaggaccaaatcaataacttcattgcaaacttgaatttgcttgaccagatcgggagttttcagttgaataatgtatatgctcatagccagcggctgaagactgaagccatagtagcatttgttaaagctctatgcaaagtctctatgtcagaactgcagtctcctacggatcctcgagtatttagccttacaaaattagttgagatcgcgtaagaatttcttcttttgatactctctttagaacacatagaatgagaaatggacatattgaatacatctcatcttggctacagaactggatatctagtgagcatcatgatagtctaataagatgtcaacatatcatttacatatctcttttcttgctgtacagccactacaacatgaaccgcatcaggctagtctggtctcgcatatggagcatcctgtcagatttttttgtatctgttggcttgtcagagaatctttctgttgcaatattcgttatggactcactacgacaactgtctatgaagttcttggaacgtgaggagctggctaattacaactttcagaatgaatttcttcgaccatttgtcattgttatgcaaaaaagcagttctgctgaaataagagaactaatagttcggtgcatttctcaaatggtactcagccgtgtcagtaatgtgaaatcagggtggaaaagtgttttcaaggtacagaatgttttcctagcatctgcctgtatgtgaatatacagtatatgattaaggtttaagagaaaaaacgttcaacccaggatagaggatactatgcttagtagtttatctgctcgtgttttggtttttataagacacactctagtgggccacatgttttactgaatggccaatttcctttcaggtttttacaactgcagcgcttgatgagaggaagaacattgtactgttagctttcgagacaatcgagaaaattgtgcgggatcattttcattgcataatcgagacagagataacggtatacgcagactgcattagatgtctcatcaccttcacaaacagcaagtttgaaggtgacattggcttcaacaccatagaatttcttcgtttctgcgctttaaagcttgaagaaggaggacttgtcttgaatgagaaactcaagaacaatactatctcagcgttaaaggaagatttttctgatacacagagttttactgaccttgatgaacaagtatcctattggattcctctgcctacaggttacaacaagatcttgcttatgtgctttacacactaagaaatatcctctgttttgttaaataatttgagtattttgatttgttcaggtatatgtagc

SEQ ID NO: 143247 - DNA, 2297 bp, Arabidopsis thaliana landsberg
aaacttgtggcctcatcataatcagtgggtcgcgttctctgccgagtcctcgtctttgaagcgagtggacgagtgggtaagaggactggatgtcgaaaccgtggttccagtgaacgaggataaggatgtcttggccatcttcccaacctctcctaatactgagagatcacccttaggaaatgtggttcagtccggaaacgtctcagaggctatagtgcacgcaaatagccttattcaatcgctgagcaaatcatcgagcgtggctcacatctcgagcatcggcttgaaagctatcccgagcatctcacattttaccagcctcaagtcgattgatctatcaaacaacttcataggtacacactcttggatactacacattgttctgttttctaaagtgtgtgttgcttactggacattgttctgtttactgcagttcaaattactcctgcatcgcttcctaagggcctccacgcgttgaacctttccaagaacaagatcagtgttatcgaaggactaagagatttgacacgcctaagagtactcgatctaagttacaaccgaatttctcgcattggacaaggtaagattgcagtcattaagtagaaaacatacaatgcttgtttgtttccctgtcttaatcaaaagctatttatcaggtttatcaaactgtacactgatcaaagaactatacctagctgggaacaagatcagcaatgtagaaggcttacacagattgctgaaacttattgttcttgatcttagtttcaacaagatcgccaccaccaaagcaataggccagcttgtagccaactacaactctctcgttgctttgaacatcctcggaaacccgatccagaacaatgtaggcgaggaccagctacgcaagaccgtttccagccttctccctaagctagtttaccataacaagcagctcattaagccacaacgagccagggaagttctcaaagatagtgtagcgagagctgcgtttggtggtggagattctttgcaccacaggcgcaaaagaacatccaccaagagtgttgttggatcagcctcccctagcgttcaccaccgaggccacattgcaaaaggacgtggctccaaaacagaagccaacgtcaactaagaaaaacttcagctgcatttacgccatcacattgaattgttctttttgtttgagatctcatgaattggccaatgcaaattgcaaagccatctccattctttgattttgaaattcagcatcttttctaacgcttatgtttccggttcggtttcaattctggtttactgtctttttactttttagttgatccggttctcggaaacatgtaaaaccgaataacactttccggtttaactcaattttggagatttttcatataatcaatttcaaaaagaatcgtaactaatctcgggttaattccggtacggtacaatgttgggtaagtatctcggcttcggtgaacaaacagagaaactcagtgaaaatttacttttttgctatgaacttatttcataaacatgtggacaaatatcgaatcatattcttttttcgctgtataataagagttgttataaaaccaaagctgcaaagaaaaaaaaaatctagattctgaaaaatgggaactcacgaaaccagataaagaaatttcaccggcggtcttacgtccccggcgggataatatatttcatcccattcctcctttcttccccagatcgccaacacaagtttggatgatttgattccacactgtgaggcattggaacaaaaaaattaaacaagcggacaaaaacctgcgtctatgatcttcctcttcttcagattgattggcggtcggtgaatggtttttggcagatgagaagtctttgttcactgctgctttcaacctctattactcgagcttcccacttcaactgcgttatcgtctctctcgccttttccaccagctgtgccgtgtcacggattatcacccatccctgtacaaagttttgtttattatagctaccagaatacaagaaacaataatgttctttccaaagtaaacaaatgtgtacctctggacgaagcaatcggtcaatctctgtgaatatatcaataagtagacatgtttttcggggctgacttgtctgaagcgacaagagattgtctgcatgtaccaggtcatatgttctcgggtaagtcgggaatggttcacacctgaaaaaaaggagctgttcagaaacacttctatggctaaaatgaaaattcaataagacttttgaactgaccagttgtgcaatactccgacaaa

SEQ ID NO: 143248 - DNA, 1227 bp, Arabidopsis thaliana landsberg
gtgtctttttcacactgtgcaaaaggatttcacagcacagactggtgatccaacttttacggtagctggtggagattcaatctacaagtaagttgctgttattttaccttttgatatgtggtctttgtatattttgattactcttttaccgtttgagtcatttaatgtgttgctttcccacctccttgttcgtgttttctctggtcaatgtttgaactttccttaaccaccttgtgcttgttatgttggatttccagatttctgtacggtgagcaggctcgttttttcaaagatgagattcatcttgatttaaaacattcaaagaccggcactgttgcaatggccagtggtggagagaatctcaatgcttcccaggtaagcttaatcatttttgcctgaattactaagtttatgaaatctcttgggaaaagaaatgttctggtgatcgatatgtcctcatgtgaacttttctattctcttttcagttctatttcacacttcgtgatgatttggactatcttgatgggaaacacactgtaagtgcaagataattaatgatctgcctaatctttctttggtatatatcggtcacctttgatatgccattttatgccatttttaggtgtttggacagattgctgaggggtttgacactttgactaggataaatgaagcttatgttgatccgaagaacagaccctataagaacattagaatcaagcacacacatatacttgatgatccatttgatgatcccccacagctggctgaaatgataccagatgcttcccctgaaggaaaaccgaaagaagaggtcaaagatgacgtgcggcttgaagatgattgggttccaatggatgaagaacttggtgctcaggaactggaggaggttatccgcgaaaaggcagcccattcaagtgctgttgtacttgaaagtgtaagtatcaccgattcaattgtcttgtagctttcttgatgttatatcaaatcatttttaatggaccttgtattgctgtgcagataggagatatccccgaggctgaggtaaaacctcctgacaatgtgctgttcgtctgcaaactgaatccagtgactgaggtaggtgtttgatatttgaaattcgaagcaaagccttcctctgtttgtgacatttttgttcttattttcttgtctcatgcaggatgaagacctccataccattttttcacgctttggaaccgttgtatc

SEQ ID NO: 143249 - DNA, 277 bp, Arabidopsis thaliana landsberg
gccggagaacaaaaaatgaagcatctcatccgccgcctctctagagtcgccgactcatcctccgaattctccatccgccgttccacctcctccttccgcaaccgtcacggtcaccatcgtctccacgcgccgccgcctccgtggtcaatatgtccagctagaagagtcaacaccgtccccgctggtcacgtacctgtctacgtcggcgaggagatggagaggttcgtggttagcgcagagcttatgaaccacccgatcttcgttggtttgcttaacc

SEQ ID NO: 143250 - DNA, 929 bp, Arabidopsis thaliana landsberg
taagttctagaatatggcattgcatttttgttttttccaaggaatactgatttcagttgtactgctgtcactaaccctcaagacatttctttctttgcaaaaaggtcattcattgaggaatctaaagctggtattaagatatcccctctggataataccttttacgggttgagcgataggttagtgacattatctgggaccttcgaggagcagatgcgggcaatcgatttgattttggctaagcttactgaggacgatcattactcccagaatgtgcattccccatattcatatgcaggtatatcaactcagtactagctaagttaggtttgttatcctccgtgaagcttcttttgttatcgtgtactgtatgtctttgattgcatttattcatgttggaaagcaatagagtaaatggttagatcatttccggagtatcctttgacaattgaattgacactatcaaattatttgttttaagactctttagtcactacacatggacaggcgtagataggctagaaatcacagtacaaggtttttgatttcttgttttagggtcatgtgaacaatctaagtgtcaagtgtagatgttggatcatatcccttgttaaaaatgtaagattagagtaggattttctactgagttttagattgtcagatgtcaactaaggtatagtaatggcatttagtatctttcatctcacatggatcttctttccattttgagggttgtgtatgatggttgtctgttgtagcttaattctcttgtaagttcctttaaactcggcattttaggtcttttctactctggttttcatggtcctccatatgcgtatgcgcttccttctgttgcaacagcgggatacaattcggttaactacgcacccaacggttctggaggcaagtatcaaaaccacaaggttagc

SEQ ID NO: 143251 - DNA, 3379 bp, Arabidopsis thaliana landsberg
aaacatataaacataaacgccaatcgcagcttttgtacttttggcggtttacaatggagaaaggtttgacgatgtcttgtgttttggggggggttgcattcttagccatggttcatgtctctgtttcagttccgttcgtagtgtttcctgaaatcggaacacaatgttctgatgctccaaatgctaacttcacacagcttctcagtaacctctctagctcacctggcttttgcatgtaagtcaatccacaactctttcgtccttttgataatccaaagattatggctatttatgtgttcttgatacttaagacgtgcaaagtgactatttatgatgatgtctttggtttaatctgattcttgtttttttttttttggtatggaatccagagaaattggcgagggaaatccaataggcgcttcatggttaataccacttacacaacaagcggaagcagcgtgtgataaggtgacgcatatggaagagttgagtcaaggatacaacattgttggaagatctcaggttctttcttgaaaaccctaaaatagatttcgtgatctttatttacatattgtttcagtttcatggatgtttgatgaatgatggaacaggggaacctagtggctcgaggcttgatcgagttctgcgaaggtgggccttctgttcacaactatatatccttggctggtcctcatgctggcaccgccaatcttcttcggtgtaatactgtaagcttttttatttcctctaaatatcaaatatatatctttgatttcatttttaatcaatcaatcacagtaacaacattgtatttttctgttgtttttgtttttttccttgttcaagtctggcttaatttgtgacatagcaaatgggataggcaaggaaaatccctacagcgactttgttcaagtattgatctctttctctctctttacatcatatgattaagtcgtcaattagaaaattaattaaaatctttgaattgacttttgcaggataatcttgctcctagtggttatttcaaaaaccctaaagtatgtctctattcaccatagtttattaggaaacttgcaaaatcaacaaattagtatctacctaagcttaacattattttttctgtttcacagaatgtgacagggtacctgaaagactgtcagtatctacctaagcttaacaatgagagaccatacgaaagaaacacaacttataaagaccgtttcgcaagtttacagaacctggtttttgtcctggttcgcttctcttctcttaactattatagttgtctactatcttctgattcctctcgtgatgatttgtttttcttttatacagtttgagaacgatacggttattgttccaaaagagtcatcttggttcgggttttatccggatggtgacttaacacatgttctccctgttcaagagacaaagctctatatagaggattggataggtctgaaagcattggttgttgctggaaaagtgcagtttgtgaatgtaaccggtgaccacttaataatggcggatgaagatctcgtcaaatacgtcgtacctcttctccaggatcaacagtctgccgcaccaagactcaaccgcaagaccaaggagcccttgcatccttaaaaagagcaaatacttcaatcgctatactaattcatccaatgtcgaataagctcagtgatgattgtgtgacacaataatccttcttcttatatgaataataaaagcatactatctgaataaattgaattaatcagtagagaaacgactcatgagatcttcatcaccagttttcttcaaggcttcaatgattttctcaacatgagaaactttcaatctcattttcttgtcaagcattgatttcgcaagcttagcagcttcccaagaattcccctgttggcagagaccgagcaaaagaaccgcatgtatatccgagtctattgttgatttcacatccttcttctcgatttcttgatacagaaggaaacaatcgagatacctttccaacaaacataactccctgaaaacatgactgcacgcaagaccaacaggtctaaccccgcggaccaacatcagacggaaaatcttttcagcctcttcccatcttttcatacggattagcgacacagtagccgaactaaaacactcagaaagagaaacaccgcctagtttcaccaacttatcaatcaacttagaaagagccttaacatcctcatcattctccaaaaccccctgaatcaaaacacaagcagtaacacgattcggcatgcaccctcggtttcccattctatccaataccaacaacgcctcttcaaccctcctcttctcacaaaacgcttgaatcaccaaagtataagtaaccgcattcggactaatcaatccaccaccgtcttctttctccatctccgccaacaactctaacgctctctccatatcaccagacttgcaaactccttcaagaatcctagaatacgtcacagtgttaagcacgcaatcatgcttactcatctccttagctaacctccaagcttcatcaatcttacccgcattgcaatacccattgatcatcgacgtataagtaatcacatctggataaagaccaacacaatccatctcttttatcaacatatcagctatattcaaatctcccttatcagcaaacaacctaatcaccaaattatacgcaacagtgtctgcacatacattaaattcaggaaacttccttaatacccacaatgcctcatcagcgagattcgcttgattacacagagtcagaacaatcctcatcgtcttaacattaacaaagcattcttctttccgataagattcaataacgtatttgatcaaatctggctttgctctaatcttaagaatgtcgcaagctttggtatacatgtaagcactgtgtctatggctggatagagttcctgcccatatgaaaaacctaagacccgattgaaattgatttggatcgcatcttcttagtacctcgttgatacaagaggagtctaattgtacattagccgaagctaattctttctcgagattacttgtgcatccttgaagctggccgtataatctctcggcggctgagacagttgttaaaaaccgtaaagctgagatttttgagggctgagatcgtaatgaaggagataccagacgagaaatcaatgaatttggcatctgggtcgctataagtgtagcgattgatgaaagatttcgttaagagaatcgtaagaatgagacttgagtgagagaaataggagagtttcgctttcgcagatggaaacgacgacgaaagactaaacgtatgggccgacataataatgtagcccattaagacccaataagaattgctcatacatctttgtcagat

SEQ ID NO: 143252 - DNA, 1571 bp, Arabidopsis thaliana landsberg
aagctttggatagtattgaagatgttgaagatgcgttgagtccgtgggcagagaggcttagtaacaaggagagaacgattatattaaaggagcagatacattgggagagagcggtggagatattcgaatggtttaagagtaaaggttgctatgaattgaatgtgattcattataatatcatgctcaggatacttgggaaagcttgtaagtggaggtatgtacagagtttatgggatgaaatgattaggaaaggtatcaagccgattaattcgacgtatgggactctcatcgatgtttatagcaaaggcgggcttaaagtacatgcgctttgttggttagggaagatgagtaagattgggatgcagcctgatgaagtaacaacagggattgttcttcaaatgtataagaaggcaagagagtttcaaaaagcagaggagtttttcaagaaatggtcgtgtgacgaaaacaaggcggattcacatgtttgcttgagctcttatacttacaacacgatgattgatacgtatggtaagtccggtcagataaaagaagcttcagagacgtttaagaggatgctagaagaagggattgttcctaccacagtgacttttaataccatgattcatatttatggcaataatggtcagcttggtgaagtcacttctttgatgaaaacaatgaagcttcattgtgcacctgatacaagaacgtataacattctgatttcacttcacacgaagaacaacgatatagaaagggcaggagcctacttcaaggaaatgaaagacgatgggcttaaaccggatcctgtaagttaccgcactctcctatatgcattctcgattagacatatggttgaggaagctgaagggcttatagctgagatggatgatgataatgttgagatagatgagtatacacaatctgctctcactagaatgtatgtagaagcagagatgcttgagaaatcatggtcatggttcaaaaggtttcatgttgcgggtaatatgagttctgaaggctattcagccaacatcgatgcatatggtgagcgtggatatttatcagaagctgagagagtgtttatctgctgccaagaagtgaataagagaacagttattgagtacaatgtaatgatcaaagcgtatggaattagtaaaagctgtgaaaaggcatgtgagttatttgagagcatgatgagttatggggtcacaccggataagtgtacatataatactctcgtccagatacttgcgagcgccgacatgcctcataaaggtagatgctacttggagaaaatgagagagacgggatatgtgagcgattgcataccatactgtgctgtgatatcgagctttgtgaaactcggtcagctcaatatggcagaggaagtgtataaagagatggttgagtacaatatcgaacctgatgttgttgtatatggagtcttgatcaatgcttttgcagatactggaaatgttcagcaagctatgagttacgtagaagcgatgaaagaagctggaatcccgggaaactctgttatatacaattctctgattaagctctacacc

SEQ ID NO: 143253 - DNA, 3188 bp, Arabidopsis thaliana landsberg
tgtttcgaacggtttcctattcttcatgtttagacaactttcatctcttgtgtgcaatggactcggtatttgtagtatttttcattaccttgcaaactattacataaaattaaataagtagagaccgtagtgactcaatgttgtccggctactcttatttttcaatcccaggaactcattctaccactgagtataactgccacagagtttgagaaactcaggtgctgggaggagccttacatgacggtctcgtttttagcatttgcatcaacgataatcttcaggttggttcaccgacatgtgataccatgtatctcatgctcgttacattcagaatgatcctcaggtttaagacttgtaatcgcatgcagagaaatcttattctcattgctgcttaaagttagatattgttatatcctcattgctgcttagtaatgatttgataccactgaggatacttttttgcacctcaggaaccttttgcagtacgtttttcctgtgtctttgatatttttggcaactgggatgcttacgttgaagggactcagacgacaaggccgtctaggaagattgtttggaataattagcattcgagatcagccatcttcaaatactattcaaaaaataattgctgtcaaagacgccatgcaaaatctggagagctatctccaaaaggtgaatgtagtgcttctaaaactacggacaattgtattatctggtcatcctcaggtatgttctaatcactggatcaggtttcagagctttttattgccattccttctcttacttggtaattttggaattgggataagaatcatgtgattgttttgccattgatagtggtcgtgataggtaactattttttgttgttatataacctggtgacgcgatttgaaacttttctcagataactactgaagtagcactggctatgctatctattgcaacggttctagtcattgtccctttcaagtatgttctggcttttgttctctacgatcaatttactcgggagctcgagttccggaaagaaatggtcaagaaatttaatgctttcttacgggaacgttgggagatggtaccagcagctcctgtcattgttttaccgtttgtaaatgaagagtctacaccagcaactcaggaaaacaagcagctcagaaaaccaacaccgagaggtgattgataaaaagtgccaaatttgtataatctagtggcgtgtgcatgttttaactagaagctcaagaaggaacaaatattaaattgtagttgacaatgattcattaaatgtatatgaaaagtagtatagatgttagttgtttatgcttattgctcatcttcttaaaaatctatttccaaaacctgtcagccttaagaaattcattatgatccgctcgtggcaactctatccgttagtctcagataatcctgtgctcatttatttcttttgatctttatctgaagaggtttagaaaaattttcgtcatggtcatgtctccttgcgtatgcagttttagtctcttattaaggaaatttcaagcatgatgcaagctttttgactcgcttacatgcaagcagtcgaaacgtgagagagtaagcagttacaaagtgaatcagaaattccggaagataactcctttgtgtcacatgcagcatgttttgcttagagccttttatataacaatctttccatgttcacaagttaagtaaaatgaacacaaacagaaagaagatgaaagtccatattggaggatatgtgttgatacttgccttgacggcttctgttatattacagcagcctgagttggtcactggacaagctagagttcctgctatgtttgtacttggagactcattggtcgatgctggtaacaactactttctacaaactgtagctcgagccaatttcctcccttatggcatcgacatgaactaccagcctactggcagatttagcaacggcctgactttcattgatctgctaggtaagatttcagacacttgaacgcagttcatttcgtcaagattcatcagtttgtcttagtattctcttatcttactaaaaaacacaatttcttctgtaaaaaacagctcggttgttagaaattccatcaccccctccctttgcggatccaaccacatcaggcaatagaatcctccaaggagttaactacgcgtctgcagctgctggcatcctcgatgtatcaggctacaactatgtatgtttttgagttttgtgtcgtaactttttgttcaaagatacgttagtgttaaatggaaagaggaacgataatgtggtgtgcagggtggaagattcagcctgaaccagcaaatggtgaatctagagacgacactaagccaactgcgaacgatgatgagtccccaaaactttacggattacttagcaaggtcgcttgtggttctcgtttttggaagcaatgactatatcaacaactaccttatgcctaatctctacgattccagcataagattcagaccacctgactttgccaatctacttctcagtcaatacgctcgccagcttctggtaatgttttacatcaaatcttcatatggtattattttattaatcaatcttctgataatcttttgaatctatgtgtagactctttacagcctaggtctaagaaaaatatttatacctggagtagcaccactaggctgcataccaaaccaacgagccagaggtatctcgccacctgatagatgtgttgacagcgtgaatcagattctaggcacatttaaccaagggctaaagtcacttgttgatcagctgaaccagcgatcacctggagccatctatgtatacggcaacacctatagcgcaattggtgacatcttaaacaacccagctgcttacggtacacttattctcggataacatggttgtcaaaggagtttcttctatgatttctactctgatcaaacatggtttatatggtacaggatttagcgtagtagacagggcttgttgcgggattgggaggaaccaaggacaaattacatgtctgccgttgcagactccttgtcccaacagaaatcagtatgtcttttgggatgcattccatcctactcagactgctatttccattctggctagacgagctttctatggtccacctttcgacgcatatcctgtcaatgtccaacagatgacactccttcactag

SEQ ID NO: 143254 - DNA, 922 bp, Arabidopsis thaliana landsberg
atcatcgtagatcgtgattgaagaagcgagagataaattaggagagcgaagatgagcgagggccagaagttccagttgggaacaatcggcgctttgagtttgtccgttgtgtcatctgtctcgattgtgatctgtaacaaagcgcttattagcacccttggcttcacattcggtaaccttttcaattcttccttcactgttacaggctcctttgattatccatgttgcgctgctgatattgtttcctctggatctattcttgtgtttgtatactaatgcttactctgcgcgattcgtttcgagccttctcttatttgatgaaattgaggaatagattgttgatcattttacttcatactatgttctgaattgtctgttggttatattttaggtcccttatggtacataaacgagaattgccttcatgattgtatatgtttaagattgtttcttatcgctttagaatttaggtgctcctcttcttttctgtatgactcaatattctttcctaggatacaccattgattcttatgtagtattattatacttgcaagacactgttttatcccattttgatgtctgtgttgccataacagcttttatgtcatcttatgcaattttgatctcataagctatctgttcttactcttgttattttgtatgtacagcgactactttgacaagttggcatcttttggtcacattttgttcccttcatgtggcattatggatgaagatgttcgaacacaagccttttgatccacgagctgtgatgggatttggcatattgaatgggatatccataggactattgaacctcagcctgggctttaattctgtcggtttttaccaggtatagctttttccatttcagttactgcatgatgtgatatccatttttaactagtgttggtctaatttc

SEQ ID NO: 143255 - DNA, 440 bp, Arabidopsis thaliana landsberg
tgtgtttatgaaagctacctatgctttttggttaacttagaacagattgagtttcgcttttgtaatgaaatttgatctctttgttttttttcctttgaagattgtgttgaagctaattaaaaatcagatggaagggtcggaggattttgagccgttcgatgtatacgacgagggattgaacggaatgaatgatccagattgcgacacgtgggaagaatggatgggatgggagggagcaggaacccgtgattactcctctcacgttaatccttacgcttgataaacgaatgatttcactaattaatttcgaaagaaatcatccaaatgtgtataaataacaatcagagagagactaaaagcacaacaatgtaaataggtgaaatttgtctctgataatgattgcttaaatgtgaataaagtaatctctcctttgtgtaaaa

SEQ ID NO: 143256 - DNA, 1619 bp, Arabidopsis thaliana landsberg
atgcgtttgcgctcttgcgttgacagtcgtacgtctaccccaaaaatcagcaatgtacgtggattgcaactatttgactttttgttccatgggcaacttaatctgtcaagaaaccccgagaaacaactctaatctcttcactaataaaataatccgacgagcataacgtgtgccatcaacttaatttacaaaataagaaaccttcttaaaaattaatcaaaaaagaaaaagaaaagttaaataatcaaacctataaatattcgtaacgactacaaagtacaagaaagtctcatttgagaataattgagcaataaagaaacggtatgacgtcgttttgctccatgatttctcttcttcttcttctctctctttcatcgccggttttctccgatgacgcttctttccagaaacttccggtgccggaaactaggtcaggtcccgaagctttcgcttttgattccaccggtaaagggttctataccggtgtctccggtggtaaaatcctcaagtacctccccgagacgggttatgttgactttgcccagatcactgaatcctcgtaagtcttgttcttttctaagatcataactttttgatgattatgcttcttctgggggttttgaaattggaatctaaatggcattcgtttattaacactcgtttctttatggctacaatattatggaattatgatttatgactgatcagagatgatatagccttcttatttttacaaaaaatatatcatatccgcattttaatccgattctcttttggactatttgaagttacgagatgatgattttatggtttcttaaggaaataatctaaaaactcctctaagctacttatcatgtaacttgattaaaatttcacatgtgaaatcttgttacatgtgttgtatattacaaataatggatgatacttactcaattttgtccacccgtaaaagaattcatgtagggacgagtggacgaaaagcaaccttttttagttccttgtttttatcggcttacgttagcaatctgtcatataccggtttaggtgaccaaaacgcatctcggcgttcacacacacacatgcctccacgtgaaaaagagtcaaaaactaagatacacatgatacctatggatactaacatataattttgttgttgtactaatcaaaaacatttttatactacatgggaactcttataagttcatggttatttgtttctcttgttcttaaaatgttttttggtttgaatactttaggaactcttcatggtgcgatggtactattggaacggctttagccggacgctgtggtcgaccagcaggaatagcattcaacgagaaaacaggtgatctttacgtcgccgatgctccgttgggtcttcacgttatttctcccgccggtggtttggctacgaagatcaccgacagtgttgacggaaagcctttcaagtttcttgacggtcttgacgttgatcccactactggtgtcgtctacttcacttccttcacgtcacgcttctccccaatgtaaagtttctatcttcttctatacataaattaattgttttagtttaaattaaattttgaatcgaaactctaaatttaaactcaaatggcaat

SEQ ID NO: 143257 - DNA, 957 bp, Arabidopsis thaliana landsberg
cagaaatctctcttcttcttcttctctacaaaagttcaatggaagctgttcttgtcgcaatgtccgtccccgccacaacggaagacgacggattttcgttaatcaccgataaactttcatataatctatcgccgacgtcggacgttgagatcgttacctccgataaccgtcggattccggcacactccggcgttctggtaagttgttatttattttggtttacggtttacatttttctggtttggtttttagctaaaatttgtggataatgcaggcttcagcttcaccggtactgatgaacatcatgaagaaaccgatgagacgttacagaggctgtggatctaaaagagtcatcaagattcttggcgttccatgcgacgtcgtttcggtttttatcaaattcctctactcttctaggttggtttggttcggttattcttattgaattttccaaatgtagaaacttcaaaccgatggttatttccggtactacacaattttcccagtttttctttttcatacacggatttgaagaaactctgtttgtttttgggctattttcttgggaaacaatagctgtcaggaaatgactaaactacccttgtgcgtctctgttttagtttgacggaggatgagatggagagatatggaatccatcttttagcgttgtctcacgtctacatggtcacccagctgaagcaacggtgctcaaaaggcgttgtacaacgtttaactacagagaacgtagtcgacgtcctccagctagctcggctctgcgacgcacccgatgtttgccttcgatctatgcgtctgatccattcgcagtttaagaccgttgagcagactgaaggatggaagtttattcgagaacatgatcctttcctcgagctcgacattctccagttcatcgatgacgccgaatcggtaaacttacttatatgttttgaaaacacagca

SEQ ID NO: 143258 - DNA, 774 bp, Arabidopsis thaliana landsberg; identical to SEQ ID NO: 6387

SEQ ID NO: 143259 - DNA, 1892 bp, Arabidopsis thaliana landsberg
gtataacattaactggaactatgggttgcttcctcaaacatgggaagatccatctcatgcaaattctgaagttgaaggatgttttggggataatgatccaggtaaatctgtgatactctttcatgtaatggaaaatttaatcactttggaacaaagagattatgcttattcttggtttggatatatgtagttgatgttgttgagattggtgaaacacaaaggaagataggcgatattctaaagataaagcctttagctgctttagctatgattgatgaaggtgagctagactggaagattgttgccatttctttggatgacccaaaagctcatcttgtgaatgatgttgaagatgttgagaaacatttcccggtacgagctactactagtataaaccattccccatacgttcatgcaaaaacaaaattctgttgttgactctaaatctgttgatcagggtacactaacagccattagagactggtttagagactacaagatcccagatggaaagcctgctaacagatttggtcttggagacaaaccagcaaacaaagtaagtccttctttttaatcttctatagtggtggtggtttatgtttggtactgaaactgagaagagctatacacttgtggtttgtctgttacaggactatgctttgaagatcatccaagaaacaaatgaatcatgggctaaacttgtgaagagatcagttgatgctggagacctttcactttactgaacatattttgcaatgtcgacttatgaggtcgaataatgaatagactcaagattcctatatcattcttgttgtttcctttcaattgagatgtaaacattgggatttggattttgtttttcaccattgatgactgagaagtaataaaatgactttctgctttggaaatatttaaatggaatatgaaacagggtctgttacttgctatgaaacagagcctttctgattagactttagagttctacaacaacacaaaatcattgaagatttcacagaatagcatgtggcaaaattacaattcactgaacattagtcttaaactgtaacaacaacaaagagagaaagagagagaagcgagtgagaatctttagagaggttctccatcaatccatcttctgaacataagagagcattgatctggagtatactccgctgtgtgtcctcctccctgcaaaacattcaagtaaaaaaaaaaactctatcactttctgtttttcctgcagaagctttggacaagacaagaaagaaatgtttgccttgatggttgcaaatgtcatcttgtttgcgtaagtccttgtatagctacaaacaccgataaaaaagagcgtctttaaagataatgaaattgaggagaatggagttagaaacaatgtatcttttgttaccctgcgacttgattgctactcatcatccaaggtctccagttattaacaatggaatagttgagagctctgatccatgcttgagttgaagaaaatggtaccatagaatcatgatcaccactgtttcaagtacatgagttttgtcaaattataaagatacaaaaaaactagttcttgtacttagacatcaacaaatattaatcttgcctgtagatgagagagcggaagcctttaagactattgtttacgtgataaggaactgcattgaaaatctcaaatgtatatggtatgttttggctgttgcatcggttccattttcctacttcctgcatcacattttgaattggtgatttttgtatagaaccaagtcaattcaattcacgtaggtacctttttcacgcctagagctctgcgtacattttcatcggttgcccaaaaggcagacagaatagacctataagtctgagaaaaaagtgtaagacatatcaga

SEQ ID NO: 143260 - DNA, 1263 bp, Arabidopsis thaliana landsberg
cgaagctataaatcatgttttgaataagaaaacaccttgcaaaggacaacatgatgaaggttgctgtcatttgttaatcttgcaggctgacttcatgaagatgccattcccggaaaacaatttcgatgcagtttatgcaatagaagcaacttgccatgcacctgatgcggtacgtaaaattataaacagctagttgtgttgttttcttccttctattatatgattcatcattatgatctcaacaacagtatggatgctacaaagagatctacagagtgctaaagcctgggcaatgttttgctgcctatgagtggtgtatgactgatgcatttgaccctgataacgccgaacatcagaaaataaaggttagtgtgtcccttgcatctatccatattatttatttgtgcttttattatcaacatgaatacaaacaaagactccatttttcagggagagatagagattggagatggtcttcctgacattaggctgactacaaaatgcctcgaagctctgaagcaggccggttttgaagtaagtatctgattttatggatcctctgtatttccaaacacatcaacatttcaacatctaaatactattatcctctgcgttggatgaaggtgatatgggaaaaggatctggccaaggactcgccggtcccatggtacttacctcttgacaaaaatcatttctcactcagtagcttccgccttacagctgttggacgattcataaccaaaaacatggtaaaaaacttgctctaactaatctgccaaatcccataaactattagtagttcatttatccgaacttgtcattgttatttatgtggtaggtcaagatccttgaatacataagacttgcacctcaaggaagccaaagggtctcaaatttcctggagcaggctgcggaaggattagtcgacggcggaaggtgagaggattccaacttttatttattcagaccatcaagattcactttagatttatcttttttggggtagaattctaaatctcttcttggataatttgtttttcaggagagagattttcacgccaatgtatttcttcttggcccggaagccagagtaagcggatgagagatggcgatggtcatcgtaggtcgaatgaagtgacaaaatttctcaatttgcagtcttattttctatgtttatcggatttgttgcagagtttcttattcaccaactatattttggatgttcgtaacatgtcacgtgttgttcatgtgcactctgcctga

SEQ ID NO: 143261 - DNA, 751 bp, Arabidopsis thaliana landsberg
caattcttaacttcgatctctaacctgcaaaaacattcattacactcttcagatcctccttccctttagccgccaaagcaaaaccgtcatcgatctctcttcttttatacagtcaaaaattagattcagattcttcaagaactctgtttttctagtagcatggtgtgtttggtctcccgtacgggtcgtcaatcccaaagatacaacaagggacggcgtcaagtcgtcgggtatgtttcatctatatctttttccactaatcaccattctaagagttgactttgtgtgagtttaaaatttgcaggtgtattccatacagactcaagatttcgagtgatggcacaattagcgacgaatttgaggttcttgttatttcatcacaaaagggtcacgctctgatgttcccgaaggcatacaaactgtgactcctaacaagaacagctaataaatcatagctattcgtttataatattagtcttataggttttagctaatttaccctgtaattgattttaataatgccagggtggttgggagtttgatgaatctgtagaagaagttgcgtcaacagaatctctagaaaaagctggagttgttggaaacgttgaggtaaatttgaaactgaacacatgattaccctttgggattgtttaacttccctctttctccaaaatttgtaaagaaatttaatatttggtgcagagacaacttggaaaatgggatttcttagcccaagcaaaggaacattcta

SEQ ID NO: 143262 - DNA, 4611 bp, Arabidopsis thaliana landsberg; identical to SEQ ID NO: 4236

SEQ ID NO: 143263 - DNA, 1084 bp, Arabidopsis thaliana landsberg
ggtgacggaaatgatggctctcgccggagtatttaacatcggagatttcgtgccgtcacttgattggttagatttacaaggcgtcgctggtaaaatgaaacggcttcacaaaagattcgacgcttttctatcgtcgattttgaaagagcacgaaatgaacggtcaagatcaaaagcatacagatatgcttagcactttaatctcccttaaaggaactgatcttgacggtgacggaggaagcttaacggatactgagattaaagccttgctattggtcagttttttgacaattaatttccttaaaaatcgtatataatgaaagttagattgttttttttggttgtaaatacagaacatgttcacagctggaactgacacgtcagcaagtacggtggactgggctatagctgaacttatccgtcacccggatataaatggttaaagcccaagaagaacttgatattgttgtgggccgtgacaggcctgttaatgaatcagacatcgctcagcttccttaccttcaggtaccgttaacccaaaccggaatttggaattgttttggttagcgagctattgttgttaatccggttttggtttaaaacaggcggttatcaaagagaatttcaggcttcatccaccaacaccactctcgttaccacacatcgcgtcagagagctgtgagatcaacggctaccatatcccgaaaggatcgactctattgacgaacatatgggccatagcccgtgacccggatcaatggtccgacccgttagcatttaaacccgagagattcttacccggtggtgaaaaatccggcgttgatgtgaaaggaagcgatttcgagctaataccgttcggagctgggaggagaatctgtgccggtttaagtttagggttacgtacgattcagtttcttacggcgacgttggttcaaggatttgattgggaattagctggaggagttacgccggagaagctgaatatggaggagagttatgggcttacactgcaaagagcggttcctttggtggtacatcctaagccaaggttggctccgaacgtttatggactcgggtcgggttaa

SEQ ID NO: 143264 - DNA, 1610 bp, Arabidopsis thaliana landsberg
  unsure (1)..(1610): unsure at all n locations
caggattactattgccttattccaatgggtatgacttcagaaaatgtatcccaccgatttaatgttttaaggtaggagcaggaccaacctgctggatgtgagctatacattcttaggtctaatgcatgtattacattttgccctacataccttagttgatcgaggcagatgtgtgagatgagtctcacagnnnnnnnnnnnnnnnnnnngcttacggaaagcataaggatgagataaccccagtgaaaaccaaggtacatgctggatttcaccttgcaacacctgacaacatgctatattctgtaggatgcatgaagtgctatctacccaatgaaatgaatattgatattacatttcagattggagacccaaagacaggtgatgagaaacccataacagtttctgtggatgatgggattcgacctaacacaaccctttccggacttgcaaagctgaagccagtgtttaaggaagacggaaccacaactgctggtactttccccagattaattggtcattttcagagaaaaatgtttgtttgatccatctttttcccaaatcccttgtttcctttgtgtcaaacagggaattctagccaattaagtgacggtgctggagctgttctccttatgaggagaaatgtcgcaatgcagaaaggccttcccattcttggtgtattcaggtgggcttgatagttgatactctatattgacctttctttgcttcatttagtaacagcactcttggacacattacaggacattttctgcagttggtgtggacccagccatcatgggggttgggccagccgttgccattcctgctgcagtcaaggcagctggtttagaactcaatgacgtcgacttgtttgagattaacgaggtttaagataatagaacaactcttcttcctttacatttactccagctcatagtctattacttataggccttatattctttgtctaaaatcctactgtgtgttcaggcatttgcatctcagtttgtttattgtcggaacaagctcgggctagacgcggaaaagatcaatgtcaatggaggagccatagccattggacatcccttgggcgctacaggtatgcttcctctttgttcacatatcattaatttccttcctcatctaacaactacacattctcaggagccagatgcgttgcgacgctgctgcatgagatgaaacgacgtggtaaagactgtcgttttggcgtagtgtcaatgtgtataggtatgtaatatgttcactctcactctccttttgactcccactctctcgtacacactaacactctcactgtgactgggaaaccgcacaggttcgggaatgggagcagccgctgtgtttgagagaggaggcggtgtggatgagctctgtgatgtccggaaagtctaatgacaataaggccttttgaccaaggaccctagctaaggaccaaattagaacacagtactacaaataaacattatcacaaataaatgcgttctagatgaataaatcataacgatagtacaatacatgagggaaaacttcttgttattttttaactctcttttgttatatggttggaatatatacagatactctttgagaac

SEQ ID NO: 143265 - DNA, 2034 bp, Arabidopsis thaliana landsberg
agcttatctcatcactcaccaaacaactctcatcaatataaagagaagagagtgggagagttatatattacacacataaacttagatatagtagtgttatattcttgattaagtaataaagatgaaaggtggaagcatggagaaaattaagccgatattggcgataatttcactgcaatttgggtatgcaggcatgtacatcatcaccatggtctcgttcaaacatggcatggaccattgggttcttgctacataccgtcatgtcgtagccacggttgtcatggctccctttgctctcatgttcgagaggtacaactacacacacatattatccacatctatgtacatgcatgcatagatatgagaatacttattttaataattgtatgtttgcaggaaaattaggcccaagatgacactagcaatattctggaggcttcttgctcttggaatattagagtaagtctctttcattagaaaaccatcttttctgctttacaattagaaagttcggttcatacaacttttaaaggttttcgtaatatttatcaaacaaaaaaatttggatatagtaaggctttgtatatagaaaacattgttttcgtacatgaagaaatcttataactaattaataataaatacggtgtaaaaatcaaaagttactttttatagttgtgatggcaaattcatgtgttcgggtacgttactttatcatgctaattcgggtacgttacttatggagatggaatacatactcacatatcgtacccaaaaaaaaactaaactcatataaaatatgattttggtttaggtattcgtcagtcataattagagttatagtcagagattgtttaacgtttaaacaattccactatcacgataaacatataccaaaattcgtctagagttgaacatacaaaatagatttttttttcttgtttgaaaaattgatttacaagtaaaatatataattatctattattacatagtatttattttgattaaaaaatttaccgtgaaaatgtagaaacaaatgaatgaaattggtaatatagtattgattattgattgggaatgagatcagcacccacaacaaacatctttaatgtgaatgtttggcttacatgttatcctacgtacacgttttccttttgatctttggaaaaagcatctacttattattgcacaaacaaaaagatgatgtgaaaaggctatgtaattaaaaaaacaacaataataatttgtatttatttgtgaatgatttcaggcccctcatggaccagaatttgtactacataggattgaaaaacacatcagcatcgtacacttctgcctttaccaatgcacttcccgccgtcaccttcattctcgccctcattttcaggtacttactttcactcaaaaacattttcttctaatgacttacttaatcataatattgctagacattagtaaattattaaccagattatttaagactttctagacatgaatttccaattaaaccccgagtaatttatattattttcaaatgtttatacgtagttatttaaaatgattagttggccaaaacattactattagtgaaccaaccaatttagtagttgttctaacacaacttctcatattatttaggcttgagacggtgaactttagaaaggtccacagtgttgcaaaagtggtaggaacggtaataacggttggaggagcaatgatcatgaccttgtacaaaggtccggccattgagattgtgaaagccgcacataattctttccacggcggttcgagcagcacacccacacggccaacattgggtccttggaaccatagccattatgggcagtatctctacatgggctgctttcttcattttacaggggatttattttttagaaatcaatcttaaatttttacattttgagaaaaattatattgatatataagaaaacattatttttcttttgcagtcatacacattaaaagtctatccagctgagctatcacttgtaacgttgatatgtgggatagggacga

SEQ ID NO: 143266 - DNA, 894 bp, Arabidopsis thaliana landsberg
aatgagcaaaaatgactctttcataaccaatctttcttcttcttcttcttcttcttcttcctctttccttatctctccatctctgtggagagacacaaaacttcccaaaaggaacattctttcagttctttacttaatctttcacaatgctaaatcattagccgttgataaagtcttaatctttgattcattcaaacgcgtttttgtttagtaatgtcgtcgcgtttttctttgacggtggtgtgtttgattgctctgttaccgtttgttgttggtatacggttgattccggcgaggatcacgagtgtcggtgatggcggcggcggaggaggtaataatgggtttagtaaacttggtccgtttatggaagctccggagtatagaaacggcaaggagtgtgtatcttcatcagtgaacagagagaacttcgtgtcgtcttcttctagttctaatgatccttcgcttgttcacatcgctatgactttggactcagagtatctccgtggatcaatcgcagccgttcattctgttcttcgccacgcgtcttgtccagagaacgtcttcttccatttcatcgctgctgagtttgactctgcgagtcctcgtgttctgagtcaagacgtgacgactcaaatatccgactgagtgaactgagaaagttacgatttttagggaagatacggtggtcaatctcatatcctccccgcatagacgagccctggtgaatccgttgcactgtgcgcggcactatctcggagatgttcctgatcggagtgtagagcgaggcatgtatcttgactcggacctcacaaagctaggtgacacggttaggcccgggtcacgtgtcatcggacccgctcagtgttgccacgcgaacggcgagtaggattgcac

SEQ ID NO: 143267 - DNA, 808 bp, Arabidopsis thaliana landsberg
taaagctgatatttggtcgtgtggtgttatcttgtacgtgcttctcgctggattcttaccgtttcaagatgagaacctaatgaaaatgtatcggaagattttcaaatcggagtttgagtatccgccgtggttttcaccggagtccaagaggttgatttcaaagcttttagttgttgatcctaacaaacggatctcgataccggcgattatgcgaacaccgtggtttcgtaaaaacatcaactctccgatcgagttcaagatcgatgagctcgagatccaaaacgtagaagacgaaacaccaacaacaacagcaacaacagcaacaacagcaacaacaacaacaacaccggtctcgccgaagttctttaacgcgtttgaattcatctcttctatgtcatcaggatttgatctatcaagtttgttcgagagtaagaggaagctgagatctatgtttacgtcacggtggtcggcgtcggagataatggggaagcttgaagggatagggaaagagatgaatatgaaggtgaagaggactaaagactttaaggtgaagttgtttgggaaaacggaagggaggaaaggacagatcgcggtgactgctgaggttttcgaggttgcgccggaagtcgccgtcgttgagttgtgtaagtcggcgggagatactttggagtataataggttgtatgaagaacatgtccggccagcgttggaggagatagtgtggtcgtggcacggtgataatcataataataatattgtgaagagtaatggtaattatgttagtgatgaaaattctggtagtgactgc

SEQ ID NO: 143268 - DNA, 293 bp, Arabidopsis thaliana landsberg
tgtcttgtcaaagggggaggccgcgagacacttagagacaaagagcagctcgtcagctcacccgtctgaagtatctcgccagccggcccgtctcaagcagctcgtcagctcacccgtctgaagcatctcgtcagccggtccgtctcaagtagctcatcagctcgcacgtctcaagcagctcgtcagctcacccgtccgaagtatctcgccagccggcccgtctcaagtagcttatcatctcgcccgtctcaagcagctcgtcagctcacccgtccgaagtatcccgccagccg

SEQ ID NO: 143269 - DNA, 2307 bp, Arabidopsis thaliana landsberg
aaaactttttacaaaatccgcccctaaattttgaaaaatcaaaatcaaacccctgaaaagtcaatgttgcggcgaaaggaagaagaagagagagagaaaaaaacgagacgacggtggcgatcgaaaccctgtgccctaatttaaacggaaacttggttcgccgccgttctgcgtcgcccggcggcggaaatgtgcgcttggggcgatgcgtttaattctcaccgtcatgtgctcattcattccttacctttattcatcttctcctcaccgtccttgctcttccccaatctctcgtcctcctcctcgaatccgtccttgtcgtctcagtcgtttcgccaccgcattagtcgctacctccgctcttcttctcgcttccgtcgcttggctttctctcgtcttctcaccaaccacttcccgttgttggcatcttcttaaagattgggaagacaatcatctctggaacaaacggtaccatcatccaattgtaactcctcctccgccgccgccgtcgccgccgtctcttccagctcttccgttattcgatcatgaatttagaaatcgtagtctctcagagattgataaacttgatctgtctatgaatcacttgatgtttggtattgctggatcttcacagctttgggaacgtcgtaaggaacttgtgagattatggtggaaaccttctcagatgcgtggacatgtctggcttgaagagcaagtttctcctgaggaaggtgatgattctcttcctcctataattgtctctgaagacagctctcgttttcgttacactaatcctactggtcatccttctggacttcgaatctctcgtattgctatggagtcttttcgtctctctctccctaatgttcggtggtttgttcttggtgatgatgatactatcttcaatgttcataatcttcttgctgtgttaagcaagtatgatccttcggagatggtttatattggaaacccctcggagagccactctgctaactcttactttagtcataacatggcttttggaggcggtggcattgccattagctaccctttagcggaagctctctcccggattcacgacgattgtctcgatagatacccgaagctatacggtagtgatgatcgtctccacgcctgcatcactgaactcggagttcctttgtccagagagcctggctttcaccaggtatgtttcatcatctctgcttctatgatctcttggatcttcaatctgatgataatgctaatgttaggtttttgtgacagtgggatattaagggaaatgctcatggtctcttgtcctctcatcctattgcaccatttgtctcaattcatcacgttgaagctgttaatcctctctatccgggattatctacattagatagtttgaaactcttgacaagagctatgagtttggatcctaggagtgttttgcagcgatcgatctgctatgatcatactcacaaactgacatttgcgatatctcttggttatgttgtacaagttttcccaagtattctcctaccacgggatcttgagcgagctgaactttctttctctgcttggaacgggataagtcaacccagtgagtttgatcttgacataaagcttccaatttcgtctctctgtaagaagcctatcctcttcttcttgaaagaggttggccaagaaggtaatgctacacttggaacgtactcaagatccttggtaaaggatgatttgaagacgaagcttctatgttttccacgctctctacctctgcacaaagtggataaaatccaggtctcagggtttcctctgagtaaaaattggcacttggtgaggttttcttgtttatctttttatcacctaatgtttctgtcattttctttatgattttgctaattgatgattctccactcttcttaacgacaggcgccgagacggttgtgttgcagagcaaccccaactactactaacgagcctctcagattaacagttgggcagtgtggtaagataattttgggttccacgattagttctcaatgaacacttatggtgaatactggatctctctaagcatgttgtttcagctctatcctgtacttgtacataggtaagatccagaaccttgactgttgtctgacctagaatgctaatatgcccaaaattgaatttgtcactcttttgtttgttccatgttccactttctttttttgtacatctgagatttcacgaactcaacatttcctgttgagaaacgagtgtaatgtgtacaacaacaaatctttaccagtgaaacctatccatctgtgtgttaagtaagaa

SEQ ID NO: 143270 - DNA, 2218 bp, Arabidopsis thaliana landsberg
aatttcgggctttaagtatagtatctggttgatcgttctgaataggttgaacatgttagagctgagaggaacttgctagccgaagttgctagtgactgtattgtgaagctttattattcgttccaagatccagaatatttgtaccttatcatggagtatctgtctggtggtgatgtgatgactttgcttatgagggaagagactttgacggaaactgtggctcggttttacattgcccaaagtgttttggctattgagtccatacataagcataattatgttcacaggttagtctacttgtttctggtctcatcattctgaatggagaattaaattgtatatatatttgaggtagatcttttgcagggatataaaaccagacaatcttctgttggacaagtatggtcatatgaagctgtcggattttggtctttgtaagcctctcgattgtagaaatatttcggctatgaacgtaaatgaacctttgaatgatgagaatataaatgaatcaatcgatggtgatgagaactgctcgataggacgtcgtggaaggcgttggaagagcccactggaacagctgcagcattggcagataaacagaagaaaactggtgtagtacaaaactctgtttaaaaccttttatttatcatatcaatctttggggtatgctttaaactgctcctttgggtttatgtctaaactctctggctttggtgtgctcttgttttgaaacaggcatattctacggtaggtaccccagattatattgcaccagaggtgttgctgaagaagggatacggtgtagagtgtgactggtgcgttacattaatgatcttatagatattctccatagaacccttccttattatatcattagggttatctacgttaacattacataaaatattcatgatcagcttttcatcttttcttgctgcttatctactagttgatcgacacatatctattttctttcatcatcgactcatatgcattcatttgagtgcaggtggtctttgggggccattatgtatgagatgctcgttgtttatccaccattttactccgatgaccctgtaacaacatgtagaaaggtaattaatccattcctttttgaatctttcattttaatattgaaggcagactggcgatttcaagtcttacatttaattttagtctttttgtatctctttggtaattctaatgtggaaacttacctcttctcgattcattatcttcccccttatgcagatagtaaattggagaaattacttgaaattcccagatgaggttagactatcaccagaagccaaggatcttatttgtaggcttttatgcaatgttgaacaaaggcttggaacaaaaggagcagatgaaattaaggtgttgtatgcgttgttcaactttgagattcaaagttcccttatgtaagatcattgtgtgcaattcttaaaaacgatttgactggtttctttcagggtcacccttggtttagaggcacagaatggggaaaattgtatcaaatgaaagctgcctttattccccaagttaatgatgagttggacacccaaaattttgagaaatttgaagaggtaacacactgatactatcagctaatgatgtctatagtgaaatattggtgcaatatatgccaccaaatgatgtggcatgatgtatatactgaaatattggtatcacagatgatttttatgctcctgataaggaaaataatgtatactcttctttgattccttctggaacagactgacaagcaagttccaaagtcagccaagtcaggtccatggagaaaggtacagcataagcactgactttttggcattatgtaccatcaagcttttttttttttatctaatagaagagtgatcatacttcaaaatttatctataagtgggttccttgagatatgttgttctttgatgatactacagacgtagcttaaaatattacatgcaacaaagagctcacaatgatgaaattggctcagtttctgtcacaggcgtttctatctttgtactatattcacaaaaacgtgattcactcttttaggttcaaattttcttatggtaatttagaatttggagctgattgggatgctactaacagaattatgttgttaatctgccagttctgcatgttgacgtgtgttagatgaatcacttatctttttggaccaacatgatataacttagaacctgtt

SEQ ID NO: 143271 - DNA, 1527 bp, Arabidopsis thaliana landsberg
ataccatgactgcagatcagttcttttatcggctagtcagcggcttaatcaattaccatatggcaatctgttacttattgtatattataggtcagtcttgcttcgccgttctgtcctctttgtggaatttgattttctagcatcggtgaaaataggtcttgatgcttggcttagttgattcaccttacgtttaatgcttatggaatatgcctcgatgtaacaaatttcaggtttcatgtggttcattctcacattaaagaagaagatgtacaagtaccagtttggccagtatgcatggacccacatgattttgatagtcgtgtttactcaatcgtcgttcactgttgccaacatatttgaagggatcttctggacacatttaatgtcaccatatgaagtttatacttttctgtctttacatatattaagtttgctaagaaatcatttttcctcgctgtaatgtaaattgtctacttttgatggtttccaatgcaggtttctacttccagcatccttaattataatcaacgacatctttgcctacattttcggtttcttctttggaagaacgcctttaataaagctgtctccaaagaaaacatgggagggcttcattggagcctctgtgacaactatcatctctgcatttgttgtgagtatatgttacctttgccaccacatggcacatcgaaatgcttacatcatttcatcatcttcttcttcaccatgcttctgaaatgttttgtatgcgtaatgtttcagctggcaaatattttgggtcgtttcccttggttgacatgcccacgacaggttagtcattgagcacaaagaataacactaatcttgcagacgatcttttagggagtttatagtaaatctttgaatcatgatgcaggatttgtccactggctggctacagtgtgacgctgatccattgttcaaacctgaaccttttgctttacctgcatggactccagaatgggtaagctttggtatcatctcgcatcgcgtagaagaaacttatcggtactatatattttggcgtttgtacttggtatatttctaggaatgtgtaagtgaatgtaggcgaagtccctcagattataacttatttcatagtgtattcttagatagtttcggatcctggccgttttattagtttctgaaattggtttggattctagccattttatgggggttactcagttagctcttgttacctaacaaatagtagtgcggttagtctttctgtttgaatagaataatgcatgaggtttctcaactttctacttcatttgtgcagtttccttggaaggaaatgacaatcctccctgttcagtggcatgctttatgcctcggtctgtttgcttcaatcatagcaccttttggaggatttttcgctagcggtttcaaaagagctttcaaaatcaaggtcagtaatcaatacctccaaatttgagccaagcttcactttccatacgcatctaatctctaacaaaaccttgcttgacaaaaaccgtgatcgca

SEQ ID NO: 143272 - DNA, 2170 bp, Arabidopsis thaliana landsberg; identical to SEQ ID NO: 9372
  unsure (1)..(2170): unsure at all n locations

SEQ ID NO: 143273 - DNA, 3989 bp, Arabidopsis thaliana landsberg
  unsure (1)..(3989): unsure at all n locations
atgcaaaggcgcttcctttcgtcaatctccgccaccgccggcaatactaaaaccctaaatcaaggaagatggagtgtaaagcaagtgaaaaaatccaactttcatgtaactctcgacgagattcgtacttccatcgattcatcagacttcatagctctctcattacaaaacactggctcatacgccgccgcgtggcaccgtgtctccgccattgacacgccgcaaactagctacttaaaagctaaatacgcagccgaacgttaccagattctccagttcgctctctgccctttctctcttcaaggctctaaactcactgttcatccgtatgactcttaaaacctctctcttattgtcaagtttcttcctttttggtaaattgattgattagggtttatggtctttcgttttttgtagatataactttcatttgtttcctcgtgatgaattgaagtgtggtatgccttctattagcttctcttgtcaagcttcacgtttaacagctatggctagagaaggatttgatttcaacatttgcatctatgaaggttttattattttctgctctatctccatttcgtttctttgaggagtctggtctcttaattgaatcattttacaggaatctcatacttatctagagcacaagaggctgcatcgaagtttctttccgagaatccgatattagctgattctgttactgtatcttcttctccagctactgtagctgatactgtctttgttggaaggattaggtcacgtgtcaagaattggagacagtcttgtatagactcgggttcaaagacaggagatggtgtaatagctagtgttagacactttcatatgaatctcattttgcacttaattttcaggtttttttacatgattcatctgtttgtttaaatttcagatgatttggtgagctctttgagaaggctggtgttggggagtgagcagtatggttcaaggctgtgtttgactattgatgtttgcagtgagcgtcaagtgcaacttatcctagaggtagataagcttagttgatacttaggatgacaaatgcagtctgtgtatcgatggttagtttgataaattttcttcgtgtggttctgaatttgtgaccacagatgttgactgagttctctgatgatgttgtccctctactggtcgcttcaaagagcagaggaacacaagctgttcgtactgtctttatgagttcgaaggaggacaaggatctttttaaggtagggagattattttggatattccttagccggaaatgnnnnnnnnnnnnnnnnnnnnnnnnnnnaataaaacgaatctgaatttatgttcttggacagagagagcttcaagatcttaaaaggaagaaaacaggcgagttcgtggctttcgggaagtggtcgattttatttcttcttcacagaaacctgtcgtttcccagaattatcttagcggtaatctcacttttgtcctccttagtttccacacaaattagagtttccgctcttgctccattgataataatcttatgcttaacttgttgcagattttacttccattcatgctaaattccttggtcctctaccttcaaatgtggatgacttcagcagttcactgagctcagcatttcccaatgttgtggatctcagtcagttcatgaaagaaattagtcccttaagtaatataagtaatctacctgcagctatgtcctccttggataggttctttgcacctgtggatgtagaagtagcaaatcaaggtcacagttctctttcaaagatgttgatttctgcttttatgcggtttggatgaatagatattgacttttgattgcatctcttattaggttgtccggtcaaattagacgaaggccatcagagtcacgggcagaatgctgtgatgatatctcagctctttgcaaaactgtgtaccatacagaaatcagatctatcaactatccaatcaaatgaagatttccaagctttggcttctgatgaacatgcaaattctgtcacctcttgctctaaaaacgcaggcgatgaaaatgttaaagtctggtcaaagaacagccggagagtaagctctgagaacttggtgttcatatgggggttagggaaaaagatgacagctgcaaagctgaagaatatcctacaaaagtcacaccccgtcttcgcgagagagtttaatgttaagtacatagaccggagctctgctattttggtgttttgggagtcaggtccttcagagactttcctcagtgcggtcaacaatgaagagcaacttgatggttcattaagagagatggttgcagaagggctaagagtggcaggttacaagacttacaagagagcttgtagattaggcttctgggaggctgacttggcggaatctttagacaaagcattggaatcttcagataccgatcctgattcggacactaaaccatcagagattgattggtcaaacgaattagctattaattttgatgagctatgaatagttctggttcacttacagaaccaatgtataccgaaattgagaacgttgattcatttttgttcttccatgaattgatttggctaacatctgaagttacaaagctaagtaaggattacagaaattgaaccaaaccgtgacccaaaaacaattgaaccaaaccgaaatattggtttggccttggctaaacccggtttatgaacctgtaattgttgctcctctacgagaagaggcagagtcagttaaacaccatcggcgagaagaaatggggtttctgacggcggcgattagggtttcgacatcagcagcctcaatgcttctatgccgtaaatctcggaagctagggttcctagcctcctcctcgccgcttttttccagcttgaattccatgaatcgccctatcaggtactactaatccatcaaatcattcaaagctcgagcttttgattttgttgatgtgattagattgagattagatgcacagagattaacttataatgaagtagctctgttgatattgtgtgcaaggttttgcataaggaatctcttaatagaccaatgtggaacgttagcttcttaagatcctcttcgtttcattcaactccagctcgtgagactggtgatgacattagcaaatctgtgaacagttcgagtcaagatggagacagttctactaaattaaagaggaagaagctgaaaggtaagcgtgcggttgtgcggtggctaaagtttttccggtggaagaaaaagaaagagtttgaaagaatgacttctgaagaaaagatacttaacaaactaagaaaggttagattgttactgatttagaccagcaaaattgtattatgtttcgtgtttatatcggttattttcgcaggctcgaaagaaagaggaacggcttatggagacgatgaagaagctggaaccttcagagtcagcagaaacgacacatgaccctgagatattgactccagaagagcatttttattatctgaaaatgggtttgaagtgcaagaattatgttcctgtagggagacgtgggatttaccaaggagtgattctgaacatgcatcttcactggaagaagcatcagacgctacaggttgtgatcaaaacgtttacacctgatgaagtgaaggagattgctgttgagttagcgaggttgactggagggattgtgcttgatgtacatgatggaaacacgataattatgtacagagggaagaactatgtgcaacctccgactgaaatcatgtcgccgaggaatactcttccgaggaaaaaggctttggacaagtctaaatgtagggatgcgcttcgtgcggttaggaagtatattccgaggcttgaacaggagctccagttgcttcaagcgcaagctgaaacgaagcgggattacacgaatgtgaaggttgatgatactcaagagaggtcagaagagttgaagaagattatagaaagtagcgaagaagtgtttggaggatgagcaagaagaa

SEQ ID NO: 143274 - DNA, 843 bp, Arabidopsis thaliana landsberg
  unsure (1)..(843): unsure at all n locations
tctcgcatcctccaattcatcgtcctcacgttcccttttgtttattcatcttccttccttcttcacatttctgattttctctatttggggggtttgtttccacattatacatatctagggttttgagatggttaattgaaagataatggtcgaagtttcggaggaattggcttcacattgtgggtgtttctggcttcctcaggtttaaatctgaggttgatctcttttgttttttggtaaattgtgacatattttggctcgaagaagaagaagaagaggcaatgagcgcatcaaggttcataaagtgcgtcaccgttggtgatggagctgttggtaaaacctgtttgctgatttcttataccagcaacacctttcccacggtattcatcaatcattctccctcctttttttgatatctgattcatttgattctgattgtgccatatatgaattgggatccatacatactaaaaatgttgtatacatttccattggaacaggattatgttccgactgttttcgataactttagtgcaaatgtggttgtcaatggggccacggtgaatcttggattgtgggatactgcaggtaaatgaannnnnnnnnnnnnnnnnnnnnnnnnnnnnnnnnnnttccgtgatgaatcagaggtcgaaattatgtttttggtttatgcagggcaagaggactataacagattaagacctttgagttaccgtggtgctgatgttttcattcttgccttctctctcattagtaaggctagttatgagaatgtttccaagaaggtcagttttgtccgaactggttgatttttaacaatgagagttccaaatttgatgc

SEQ ID NO: 143275 - DNA, 1215 bp, Arabidopsis thaliana landsberg
aactccttcagtgtccaattcggagaacttagctctacctgaacctgcatcgtccccgacggttcagaaagacctctgtttccgaagaggatttccagctcgctccgccgaaattgggcgtgattttcgtgatctcttcgcttctgtgttcgctttatctttaccttctctgtttccactacaatgttgacaatgagctcaagcgtccgatcctcattaacgctgggcttagcttggttggattctttgtcacactcaagttgattcctgtagctgctagatacgttctgaggcgtaatatgtttggttttgatatcaacaaaagaggcactcctcaaggagaagttagagtgtatgtttttccttcttagatttgtctttgtttagttctcagattagtgttcagcgtttttctagaaatggatgtctcttagatttgattttttgtataggaggaaaactatgagatgtctcattttctgattgatgttctatggatgtttacgcttgatttgatctcaggggacttaaagtcttttgatgtgcttattttcagcaatcttatttctttgtaggcctgagtcattgggaattgttgtcggtattgtcttcttgatagtggcgattgtatttcagttctttaatttcactgaagattcggtggtaagtgtcctggtctcaaaagctcaagcttgatcatttatttattgtgaactatgaacttggtagctcttggctcatttactttgaatgcaatttatcaatctggctaaatgactcggtgcagtggcttgtggagtataatgcagcactggcgtctatttgcttcatgatattgcttggatttgtagatgacgtccttgatgtgccttggagagtgtaggtgcagttctcattttgttggattaaaaattcatgatttagttttgttttcttattaactcttgtcaatttgcaggaaacttctcttgccatcttttgcaacccttccactgttgatggcttatgctggacatacaactatcgtcataccgaaacctttagtttcttatattggcttggaagtgtttgatctaggtacaattcatcttgtatatagtgttaaaccatcaatagctattttgaaattcatttccttagttgtatatttatcgtggcaggacgtatatataatttatatatggcgctactggctgtcttttgcacaaattctat

SEQ ID NO: 143276 - DNA, 4869 bp, Arabidopsis thaliana landsberg
ttctttcaggcagcagaagaatgcacttgtgttcttgagcttgatcagaaacatagcggagcgttgatgctgagggctcagactttagtcactcttaaagaataccaatctgctctttttgatgtcaccaggcttatggagttgaaccctgattctgaggtttatcagaacctcgaagctcgcttgaggacgcagttggtatatatatatactctctgtcttgctttcccttattgatagtgttggctcgttggatttggatctaaaaagtgtgtcttgtttctcttggtcaaggaaagtcccttgctccaattcctgagtctgaagcagaattggaagaagagagtgacgttgaacaagacgctgaagataaagaaagtagagaagttgagcttggtgtcaatgagagaagagataagaggtttgagtcggtagtttcccttagaagagatctagagactacaggagaagatgcgataaacaagggggaagttgttgcacctaaaacaccagaggttagagaacagaacagcaaggaagtgccaatgtctggaaagcaatctaatgcatggcaagccatacctaagcctaagggtcattcaacactcgattacgcccgttggaatacagttgaagatgattccagtgaagaagaagacgatgaagacagcgatgacagtgatgagtcgccacctcagtacagattccgtgttaagacagtcggggtgcgtcctgtgaagtgaaacattgtagataggaacatgggatggtttctttcatcctgatatattgcatattgcacaggagagctgtgaaaaaagcattagagtgaaggggatagtgataccaaagcagactagtcatgttttgaattgcctcttctgtaattggtttcagcggtcaccatgtatcaatgtgctgtgtctttttatacatcttcgaaaagaaacataccgagtttagataagatacacaatacagaagaccatgttcaaaccaaatggcctgttgttctatttgttaatactttctttgcctcagagactctgctttgttatcaccatgaagatgataatgatttagaattgaacagaaatggaatttacaagcttcattattgataagtcacaaaaatacatcactgccaaagttttgtattcatgacattaccaaagctagatttgattagctcatatgaataggcccatgcctttatctattccttctcccatcccttgcttctctcccatttccactgtgtgtctctcttgccgttcctttataatctctatgactccgacgatcatcatctctatctcgtcaactctccacatggtgtattcatcttccctattgtctctttcttttctctctgtgtttcttctccctaccaataccatcatcattcctcctctccatttcccttaactcatcccgatgatgctgtcttctaccaatgtacttatctgccttgttctcattgtcactttcatctctgttgccatcttttgccttctccattaccacgaggacttgtccgacgaatcttctccctaacacccctctcatccctgtcatgactcatgactatgaaccctcttggggatttcaggtacatcaccctcaaataccatatcatagccgtacaaaaatctggaaatccaacataacaggaggttagaaaagttgacaaactaatggcattgacagtaggaaacacaaataaggaggtggcaaagcagcacattaggcaacacagagtaaaggactcaaaagattaagtatggccaaaatatccacatatgattagagatcgtaagaagaaaacaacatcttacttgtacattgaatccccaccagctcctgtgatcaccggtctgtgctgtgaaatctttttgcactgtgtggaagagacacccattgtagtacttgatcctatccatatagtaagttaaaccccttaagagacataatgaatatcatggaaatgttacttagtagataggcaaaaagacacttacttgcagatcttaagaaagttttttgcaggtcaaagggcatttatttgttagatatcaatcactctatccccaagacttgtcacaataagaactgacatgttcactacctgcataacctgaaaccaaaaattagaagtgagaagaaagtagtacgctttttcactagcttatctcattcatcaacaaacccgagcattactgttggggaagggaagaaaaaagaagaaccaaagttgagtttttcagatatcgttcaagttcttggggtttaaaagaagggttaaattgtgacaaaaccaaagttgaaggtatttaaataagaacaaatagctaaaggggtttaaacatgaaatatataaaaggtcagggtttcatggtcaatatataactatctctctctgtctcggacaaagacaaataaaaagtgcgaatcttccaataaaaacacgccacgtagtttatttaggcagccgaagatcccgagggccctttgcgatgtctcaaagcggcggtgacttcaacctctccgacgagattctcgccgtgatttccaccgacccttttgagcagctggatctcgcgaggaagattacatcaatggcgatagcttcaagggtgtcgaatctggactctgaggtggttgaattgagacagaagcttctgggtaaggaaagtgttgtccgtgagcttgaggagaaagcgtctcgcctggagagagactgccgcgaggctgattcgagattgaaggtcgttctcgaagataatgtaagtcaaagagcttcaatttcattatccaattctgttgcttttatggctccgatacttctgcattttaggtttcgagatttggctagatatgattgctgagatcgttgcttaacattgaagagatagtgtctcgggcttgactggtatgaatagattcaggactttcttggtgttacaggatacttaagggtatttctaagtttgggagcaattttgtgtgtgttgttatatgtttagagatctgtatgatgatagatagtctgttttagtttgttttattgagatttatgctcttcatcaaatcagtgattgaatatatgtgctcaagaatcgaatcacctggtgtcacgcttttttggtttcctctgctcttatatgattgtaaccttggcttatgttgttctttttaatgtgatgtctttattttctggtaaagatgaacctgacaaaggagaaggattcactggcaatgactgtaacgaaactcacccgtgatttggctaaggtgagaattttgggggttttccgatgatttttgtttgtattataagagagtttcacatactatacttttgaggggagatagcagctaatgttctatttttagctggagacattcaagcggcagttaatcaaatccctgagcgatgagagtggtccggtaagacattcaagcttttgttattacacattcttttgttgtttgtatgttttttttgcactccaacgggcctctagcttttcctgctacttctctctatcttgcaagcttctgagctctgattcttctccatttgttattacagcaaacagaacctgttgatattaggacatgcgaccagccaggatcatatccaggcaaaggtactgcatcaataaccgattcccaattataagatacgtcttgtttttttctatctgtgaactatttatctttcaaccagtgcagatggaaggatcaatgcacactcaattaaacaagcttacagtggatctacagacacgaacaatccagttgttgaaggtaacattgaatcatctatccagtgttatacttctctctatatgctgcaactaaagaataacagagtttttatttgcagcttcaaaatacactggaaacaaattttcaatgacatcatacatatctccacgtcttaccccaaccgcaacaccaaagatcatctccacaagtgtgtctcctcgaggctattctgcagcaggttctcctaaaagaacatcaggtgcagtttctcccacaaaggcaacactctggtacccgtcaagtcagcaatcatcggctgcgaattctcctcctcgcaaccgcacactcccaggttcataggatcttaaagattgttacttgtataaaattggtaaaactcaagtatattttctcatgtataaattcttttccagctcgtacaccgcggatggatggtaaagaattcttccggcaagccaggtgagtatttatttcttcagttcttgtcttagctagtgtcggtttttcattaaccagaatctgaaattgttgatctttttctgtttcatttgtaattcacaggagccgattatcctatgaacaattcagttccttcttagctaacatcaaagagctcaacgcccagaagcaaacccgagaggtaaaatttgtcgtagttcatgcgcccttttttctttcgatatgtccagattacggattcaaaaaagttaatgcatttcacaggaaactctgaggaaagcagatgagatatttggggaagagaacaaagatctttatttatctttccaaggtctccttaacagaaacatgcgttaaactttcataagccgttatcttgaatctgggccaatgtgataggatggatattaaccattgtagtatgtgtattccctacgggatttagtttgcaaagtgttttttttgtttcatcacaaacaaagaagaagaagtatctcgttttgggaagtgttgagtttctctcttataattggctttgaataaagctttatatgaaagtatgtctaatacacacacttatcaatatgtaaacatattctttctctacagaattaa

SEQ ID NO: 143277 - DNA, 1044 bp, Arabidopsis thaliana landsberg
gtcacatgttgatgtctctttcgtttcacgaccttttcgtgactttctcagccgtcaaccaccgtcggtctccccgacgccatcctaggaagctcatttctcagcccttggattaacaaagtagctgatgctttctctattaagtccattagtttcttacccatcaatgctcattcgatctccgtcatgtgggctcaagaagatagaagcttcttcaacgatctcgagactgccacaacggaaagctacgggctcgtcatcaacagtttctacgacctcgagcctgagtttgtagaaactgttaaaacacgtttcctgaatcaccaccgtatatggaccgtcggaccgttgctcccctttaaagctggcgttgaccgtggcggacaaagctcaatcccgccggcgaaagtctcggcttggttagattcgtgccccgaggataactccgtcgtatacgtcggttttggaagccagatccggctcacggcggagcaaacagctgctttagcggcggcgttggagaaaagcggtgtgcgtttcatatgggcggtgagagacgcagctaagaaggtgaactccagcgataactccgttgaggaagatgtgatcccggcgggatttgaagagagagtgaaggagaaaggactcgtgataagaggatgggccccacaaactatgattcttgagcatcgagccgttggatcttacctaactcatttgggttggggttcggttctagaaggaatggtcggaggagttatgttgcttgcgtggccgatgcaagcagatcatttctttaacacgacgctcatcgttgataaactaagagccgcagtgcgagttggagagaacagagactcggttcctgactcggacaagctcgctaggattttggctgagtcggcgagagaggacttgccggagagagttacgttgatgaagctgagggagaaagctatggaggccattaaagaaggtgggagctcttacaagaacttggatgagctcgttgcagagatgtgtttgtaataaatatcctcttct

SEQ ID NO: 143278 - DNA, 418 bp, Arabidopsis thaliana landsberg
ggtctcaggttcgcagtcgttaaccgactcatcttcaagctctacaacatcttcgtcgtcctctcctcgtccttcaagccctctatggctcgccagcggtcagtttcttgatgagccaatgactaaaacacaaaagaagaagaaagtttggaaaaacgctggtcagacgcaaacgcaaacgcagacgcagacgcggcagtgtggtcattgtggagttcagaaaacgccgcagtggagagcaggaccattaggagcgaagacgttgtgtaatgcgtgtggtgtgcgttacaaatcgggtcggttactacccgaatatagacccgcttgtagcccaacattttcgagtgagcttcactcaaaccaccacagtaaagtcattgagatgcgtaggaagaaagagacttctgacggtgctgaa

SEQ ID NO: 143279 - DNA, 503 bp, Arabidopsis thaliana landsberg
ctggctcctacatttgggcctaatccccaaaatttcaccaaaaaagataaatcaaaagctgaaaggaggaaaccagaggaaggagacgacgaccaccaccacaacgcatctgagctcttccttaatccatggcagtacgatctctctccctccctctctttttgtctccatcttgttcaatctatgaatcttgatatttcctgtttcttctgtttctagtttcacatcttttgattttgatgtttctgtggtttcttatttttggtggaattgttaaagtttgattcttttcttttggttgttcgcctggatttgcttcgagattgatcatttctctcgttttttctttgtgggcctttattcttttggatttattcgtatgtgaaatattttgacttggtttttgcttgttgaaaatggagctttctttgcttgatcttacaaaaagttatatggtttggatagatttttcaattacctgttggaaaaaatcaatacctttt

SEQ ID NO: 143280 - DNA, 433 bp, Arabidopsis thaliana landsberg
tgagaacttctcttttgcgctgttttctttttctccaaaactcgtaaaacctataaccacaatggctcgttctctcgctaacgctaagatccaatccgtcttcggctccgaaaagctctcgaacgccgttttcaggtaacatctgtttctgaaacaaaaacgttatgtattgctctgttttctcgtcgctttaacaaaacgctgacgttttggattttggattctcttcagacgagggtttgccgccgcagccaaaacggcgttagatggaagcgtttcgaccgcggagatgaagaagagagctggggaagcttcaagcgagaaggcaccatgggttccagatcctaaaaccggttattacagaccggaaaccgtttctgaggagattgacccggctgagctacgagctattctcttgaacaacaagcaataa

SEQ ID NO: 143281 - DNA, 895 bp, Arabidopsis thaliana landsberg; identical to SEQ ID NO: 13534

SEQ ID NO: 143282 - DNA, 1066 bp, Arabidopsis thaliana landsberg
taaggtttttccagattgatggaaagaggtacacctagatccagagcatttttcttgaggactgtcccattcgtaaagcggctatcttgcccaatggctctcaggtcattgtctccggaagaagaaagttcttttacagctttgatttggacaaggcaaagtttgacaaaattggccctttggttggtagagaggagaaaagcttggaatatttcgaggtgtcacaagactctaacaccatagcttttgttggcaacgaaggttatatcttacttgtgtctacaaaaacaaaagagctgataggaaccctaaagatgaatggttcagttaggtctttagcatttagtgaagatgggaagcatttgctgagctcaggaggtgacgggcaagtctatgtctgggatctgagaacaatgaaatgcttatacaaaggcgtggatgaaggcagcacttgtggcacttctctttgcagttcgcttaacggagcattgtttgcttctggaaccgacagaggaatcgtaaacatttacaagaaatctgagtttgtgggaggcaaaagaaagccgataaagacagtggacaatctcacatccaagatagatttcatgaagttcaaccatgatgctcagattctagctatagtctctacaatgaacaaaaacagtgtaaagctagtccatgttccatccctaaccgtcttctcaaactggccgccaccaaacagcacaatgcattaccctcgctgcctagacttcagccccggaagtggcttcatggctatggggaacgctgccggaaaagttttgctgtataaactccatcattaccagaatgcttgaagtggtctttaacaagggcagttttgggattgttgtgtttcctctttttttgtcgcaagtactctttatgttatcaattttcctatccaattatcgatcaatgaaaaattttctttctgattcttgggattgagtgggccaagttttgttttctcacgattttgacagcatcaaccacttatttggtactatcatctaaaaataaatatgcaggagaaaaagaaaga

SEQ ID NO: 143283 - DNA, 879 bp, Arabidopsis thaliana landsberg
actatccccgacggtcttccttggaccgacgtcgacgctaagcaagatatgctcaagcttattgactccacaattaacaactgtttagctccattcaaagacctcatcctccggttaaactccggttctgatataccaccggttagctgtattatctccgacgcttcaacgagcttcacaattgacgcagcggaggagcttaaaattccggtagttctcctctggaccaacagtgctactgctttaatcttgtatctccattaccaaaaactcatcgagaaagagataattcctctcaaaggtacgaatcgattgaagatcatcaactgaaaaattctcaactaacaatttcgaattccatcagattcgagtgacttgaagaagcatttagagacggagattgattggataccgtcgatgaagaacattaagctaaaggattttccagatttcgtcaccacgacggatcctcaagatccgatgattagtttcatccttcacgtaaacggaagaatcaaaagagcttctgcgatcttcatcaacactttcgaaaaactcgagcataacgttctcttatctctgcgatctcttctccctcagatctactccgttggaccgttccagattctggagaatcgcgaaatcgataagaacagcgaaatcagaaagctaggattgaatctatgggaagaagagacggaatctttggattggcttgatactaaagcagagaaaactgtgatttacgtcaacttcgggagtctaacggttttgactagtgagcagatcttagagttcgcttggggtttagcgaggagcgggaaagagtttctctgggtggtgagatctggtttggtcgacggagatgattcgattctt

SEQ ID NO: 143284 - DNA, 4707 bp, Arabidopsis thaliana landsberg
  unsure (1)..(4707): unsure at all n locations
ctgcctgagttgcgctaccatttccgaaccatcggatgactatatggcccctttaatggccagttggaatctggaggagagaaccgacggcattgggctgggaccagagttggttctctcctgccttgagtcaatgttagtcttaatgggcatttcttggctcttgctcttctttctcgtgtatggaattctttgtagctgcaaaatattctcacggttttttggagatggttcctataggcttcttcttaagaacgtatagcttctctaagagggtgtgaatgtaaatggaccctatgaatagaagaatattacgatgttctctcagaatcacgtatcaatcgggtatataacaatattcagtataatcatttgttgtcccttactggtaattttagtttctactagtttgctccgattacaatacatacattaatatttttcttcaaatgtaaatgtataagaattacgaagttccacataatcttcataaggctatttgtaaaccgtgatgctgcaaagttagaaataaatacaaatgcttcatatatttcaaacttagctgcagcttccaattaatgcaaagcaggctgttgattaaatataaatcgaaaattttaaaactctaacgaatgtgcccgtaaaacctctttgaaatttcagatcggaaattgttgatgaccagaatcgaataaaaacgatttaatttcaggtctcttgagttcaaatctggtctcgattattcaagattcatacatacaaaatatacattcttttgcccgcgtaaaaacaaccttatactttatgtaagacaaaacatatgggcccaagaaggcccaataataatcatttacattggttcgtaagtcagtttgatttttgtttcctcacctccccgatcgtcggaggatgtagaaggtggcggcggcggctctcacctgcttcatcgcagtttagaaatgactagaggagatcgacgtagctccccgagtttcttctccggctcgaagcggagttggctagggtttcacggtggctcacggtcgccacttctattgattccgagctgatagatgatggtggctcgaggtcaatcgtgcgtatgggtttgcggctccgatcatccctgtgacaagaaatcgagcggcggatcccgcagctgaggggtgatgacggctatcgtcggaggtattccgtgctcgctttctcttttcgggagtttcagcgacggcggttcatgtgatggggttaggtcctgcggtaagatacggttcctccggcttgcgggattggtggctccagtctcgggttgttggcggtggctgtgctcgcaaccgtcgaataagggatagcctcgttgagagaatatcggttttatttccggtttaaatctcatcaacaaaccatctctaaaccgggttgtacttatgaattgaaaacatcacgtagttttattatctcttctatctgaaaacagcacgcatgttatagcattttgaatgattttttataagggattatttagaggcctaaggcgcgtaaagaagagctaaaagcgtaacagaagaatctctctcagtcgcaacagtttccggttactccaagatcgccgtcgtgcacctttcttctctcgctctctggttctgaggttagctcgtaaatctcatcgaccatcacttcttctactactcgttccaattaccatagtacgaagacattgctcgagaatctctcagtcgcaacagagtccgactactccaagatcgccgccgtgaacctttcttctctcgctatctgtttctgaggttagttcctatatctcattgatcatctcttcttatcctactctgattcaattacgatagtaagacgacattgctcgcgaatcttggtcaggttgatgtttcttgtaaccgcaactttgcaaaggtttggctatatcgttcctttgatgcttagatgagaaattttatagcttttctggagaattcccaaaggaaatcagtggaaatgagataatttagggattaaactgagtcattgattgttggagatacacttgtgtttggatattcgatttggattgtaaagatcagtttatccagtagtctaacttttcaattgccttccaccgttcagtttttggtttcaggttcgagaaattaataaacatgtcagttctaattgacacggatttagggattgtgtttcttgatctctacacggataaatgccctagcacctgctataattttcttaagctgtgcaagtaagtgttccttttgcctatacctaagaaacatctctatctttaagggttttaacttacttgttttgtcaggataaagtactaccatcagtgccttatccacactgtaaaggatttcatagcaaaaacgggtgatccaacaggcacaggaacgggtggagactcaatatacaagtaagatgacggtttcttaccttctgatgatatgtagactgcttatctattttggtcattctttatactctgtgttgcctagttgtgctgctactgctttatatttccctatgttgaatttccagacttttgggagatgacaatgctaggtttttcagcgatgagattcatgccgaattgaaacattcaaatactggcaccgttgccatggctagttttggagaaaatctcaatgcttcccaggttagtcaaaacgttttgcttgaattaccaagttctttgtgggtccgtggatcaacttttgtggtattgcatgtcttcatctgatttgtctgttttcttttcagttttatatcacactttgtgatgatgtagactgtcttgatgggaaatacactgtaagcaccaattattaatgacccgcctattctttttttttatgtgtatataatataaatctttttcaggtgtttgggaagattaccagcgggtttgaaactttgacttgtatagccaaagcttctgttgatgcgaagaacagaccaaataaagatatcaggatacgacacacatatatacttacagatccatttgatgatcccccacaactggctaagatgataccagacgcttcccccaaggtaaaaccgaaggtcgaggtcacagatgacatgcaacccagagaggattgggatataagggatgcagaatttgactttctggaactaaacgaggccttcgccgaaatggctgccaatcctgttgaagttgcaattaattctgtaagtatcaccgatgtagttgctctcttttgatgataaatcaaatcatgtttaatgctttctgttgcagatgatcataagagatattatggaggatcctgagaatgagggcccccacaatatgcgttcagactttgaacctctcttatcgtaagtgataattttcattgcttccttatccgtatgagaaactcagttctcagttttttggcatatggttgtggtagagtgctccgcctccgggattacgagacaggtgacatcatagagtttgatagtacagaggcaagtgaagaagcgctttctgacattacagagtttgggagtacggaggcaagtgaagcacattttgaggtgaacattgaggaatgcgtattcgaacgtgctttacatatctggcagaaagaagaatggcataatcatacttctaaagcttcaaaatcctcattccttagcaggagccttactctgcacgcataaagaaagtagagaaagaaatcaatgagctcgccgagaagatctgcaatcttggtatgttcgcactcttgttgctgaagttttgggcttgcttggagttagtgacttctgtttagggcatgactaaagtgaagctttcactttcattgcaggtatcaaggagtccgatactggtttagctcctcccaatcaatgggatcttgtatctgataagcaaatgatgcaagaggagcaacctctgcttgtaggctttttattcttttagttctctgaattttgcttcttctctcacggcaacaataaatgtgttttcctatccaggttgcgacatgcacacagataatcagtccaaacactgaagatgcaaagtatgtcgttgatatcaaaaagataggcaaggtaaacaatatccctacgttgtggttgctacacgatcagttctgtgttgtagaaccttttgttgttcggtttattgctgatattagttttgcttcttaactgcagtatgttgttggacttggcgataaagcttctcccactgacatagaagcaggaatgcgtgtggggtatgtacatttcttcagttcaaatcctatttgaggctgtacatttctcatatgaatgaaaacttacgagaacgttatgtctctgatctgtacttgcagagttgatgagaagaaatattagcatatagattcatactaggtgaaagatcgatggtagtgccgaacatgatgaagcgttgaagagacangtgctggaagttacagtgatatcggtggacgaacggcgcagactcaccacatcaccgaggcacatgctgagtttagttattattgggtctcgagctcttctctgtttaacacgtagacttctaaatttactgctgtggtctagcttctcacggaacaactttcttaacagctctgcagtntgtatttgctcgattgcaggctgttgcantgtgaatgcttactgagagaaacttgtgaggcttggaatcga

SEQ ID NO: 143285 - DNA, 1541 bp, Arabidopsis thaliana landsberg; identical to SEQ ID NO: 9460

SEQ ID NO: 143286 - DNA, 3512 bp, Arabidopsis thaliana landsberg
  unsure (1)..(3512): unsure at all n locations
caccatagagcatcaaaacctaaatggcttctagctcttgagatagtcacagggtcaatggttggtttgctccttctggttgcacttttctctgcagttcaccgctggaacaatagatcaactctcatcattccttggaagaaatcttcaagtgaaaaggaaaagttcacagtctacgtaggttagaatctttcctaattctttaccttccaatgtagaatccatggagcaaagaactaaaaaaacgtggcatgtttttattttaactacagattctgaaatgctgaaggatgtttcgagattaacaagacaagagctcgaagtggcgtgtgaagactttagcaacatcattggtttatcagcagatagtcagatctataaaggaacgctgaaaggtgggtctgagattgcggtgatctctctttgtgtaaaggaagaagattggactggatatcttgagctctatttccagagagaggtagcttcctctcatgttatcatcatcaccaagccacttggattgaacaatctttaaacatatcctccttttttctgagattttaaatccatctcctcactgtttcaggttgcagatttggctagattaaaccacgagaacacagcgaaattacttggatattgcaaagagatctcaccatttacaagaatgcttgtttttgagtatgcatcaaacggaacactatatgagcaccttcactgtaaatagtctaacttacctcagagctttgttgcatcatcctgtattgttttagctagataaacattttatgtgaaatattttgatgcagacggggaagcggcgttagtatcgtgggcaagacggatgaagattgttataggcatcgcacgtggtctcaagtaccttcatatggaacttgatcctccgtttacaatctctgagctgagctcaaacgcaatttatctcacagaagattttactccgaaggtaaagtaaagtgagacctgcttgttatctgagcaatacaattagctaagctaagctttatgttcacattctttcttttttctgactttctctgatgcagctggttgatttcgaatgctggaagacaattcttgcaagatcagaaaagaatttgagaaatattagtagccagggttcgatatgtgtactcccaaacggaatggagagccgatatcttgatgtgtcgggtaatatctatgcattcgggattcttttgctggaaattgtcagtggaagacctccttattgcaaagacaaaggattcttaattgaatgggtaagacaaaaacaactcagtttctctaaacacttgaaactgagttacttcctcctcctcttttttcaccatttatatcaaaaactttgttactgttagcctagtaggaatggagtcttctgctcagggagagacgagttttcgtctggatgtggaagtcttgaccttgttcacatttttagttatatcgcacctcaaatgtggtttttgtggcaaaagttttgaatttgaaacgtatctattgcattttgcaggcaaaggagttccttgaagcaccagaggcaatgtcgggattggtggatccagagctgaaacattttaaccaagaagatcttgagacggtatgcgaagtggctagccaatgcttgaaccgggacccaaccaacaacaacaacaatcacaacaagccctcagtgcaagagctatgcgagacattggagagcagaatcagtctgtctatttcagcggagcttagatcatcttctttggcttgggccgagctggcgcttgactcgtgatgagaatgatgaaaggaaagaaaacgagtgttgaatgatgcaatgctaactaactaaaaaccaaactctcaactctgtaaatcaatcgactgattacaacatttgatattgtttttttttgctctgatcttgacgagtgtgtctgtgttcttgattagttttgagttttgggtggttcaaagtgtttgtaaatgaagagatgaacatagtttctgaaagattttctctattatttgaaaatctatgagaggttgaagaatgttaatgtagtgtgtttggatctaacctttaatcttatattatatagagcattgtatctattgtttgacatgattagtctcattggaaaaagcttcaaggcaatcaatttgagatcaatatcagtctcagacaagtgtttgcggaccaagaagaagaagaaacgtagttgaagttcataaatcataatgcatggatcaacttaataaaaggcccacatttaggcctcgtatcagtctaaatgggccacacaagtcaataggcccatttatcaatgctttgactgttttcaatcttcaattttggtatgacttcttcttacgaggttgagtgccataaaagattagacagacacgtaaaatagattccattttacctttagttaaaacagatatggattagccaagtttcgttagtatattgtcatattatttgattgaaacagaaaaaaacaagtaaagattacttaatcattcttaatcaggcctgttcttaattatcaaaaaaaaaaaagattacttcatcatgtcgtaataatatcagtaatcaatccttttttttttgtcatcactaatcaatccatttttttagcgaaccttaaagtcaaaggtgttgttactttggacgattaaatttgaattatataatttaaaagaaaattggaatttaatctgttgaggttgaaattctctcttttcatatatggcggttgaaatttaaaagtaaagtattgtttggtagggccctatagtttaaacatttacaaatcggcccacacatttttgtcattttagatgtcgtaaaccgctttccctcgtcttcgttccaatttaaaaagcaaaacaatttcaaaaagtctcatcatttcccataaacctaaaagctttttaaaaactcaaattcgatacgagaagaacaagattcgcgcacaagacgatcgannnnnnnnnnnnnnnnnnnnnnnnnnnnnnatgcataaggaaagagagattcagcgagcgttaccctctggtgcggaagcaccttaccaggtctcgcgacggcggcggaggatcatcgtcggagacggcggcttttgagatcgatgatccgatttccagggcggtttttcaagtgttaggaatgacttgctctgcttgcgctggatctgttgaaaaggctatcaagcgtctccctggaattcacgatgctgtcatcgatgctctgaataatcgtgctcagattctgttttaccctaactctgtcgatgtaagctatgatattctctcgaatctcggttgaattgtttctgagaagacttgatttgggatttaggttttctttttctgtgtaattgtggatttataggtggagacaattcgtgagactattgaggatgctggatttgaagcatcgttgatcgaaaatgaagcgaatgagaggtcgagacaagtttgtacaataagaattaatg

SEQ ID NO: 143287 - DNA, 3653 bp, Arabidopsis thaliana landsberg
ttatttcgattttgccactgattcaaaaaaatacgtttcaccgaacacacaaagaaaaacgtaattgccaaagctatggagaagaagttgttggatataactcggactgactcggctgagaaaaagcgagtcagagacgagtcattcgacgaagcggttcttgactcgccggaggtgaagaggttgagagatgatttattcgatgtcctggatgactcggatcctgaaccagtgagtcaagatctcgactcggttatgaaaagtttcgaagacgagttatcaacggtcaccaccacgacggcgcaaggttcctctaccgccggcgaaactcagcctgatctcggatatcttcttgaagcttccgatgatgagcttggtttaccaccacctccatcgatttctccggttcccgtcgcgaaggttgaggtatacgacggagacggtaacggatttggtacgagcgtcttctgattcgtcaggaatcgacgagatttggggatttgaagatcacgtgtcgaattacggtggtttagattttggttccggcgtcggagatggtggagattacgtggctgttgaggggttgtttgaattttccgacgattgttttgactccggcgatctgttttcgtggcggtcggagtcgttaccggcggaataaataaataacaaactttttttttaattaggtgggaaatgaaacgatatcgttttgttaaagcgtttggctctccctcgcttttttttttaacccgatggttaatatgtattaactaaaattattaggatttaggaaaagttaaatattttgttagtaagggtaatttgctagattagtattagcgaattcgtttgtttgttcttccagatctttttttcatagcttttgttaatgtgaaatttcagaatgaaaaactctctttgtcagtttttattatacgttcagtttcacatatcgaacggtaagtctgatttcattttcagactggtgtgaataagatggcccatgaatcatacgggatatagcccaaaaggccccaaaccaacaacaactacaaattaaggattgggtctaaccgattatgccagattaaaagattggtcaagttaactgttcaatctgtataaataaaatcattaaatccgagaaccggtcaaattaactggaaatataagtaaacctgggattcgttgatttatatatccggttaaggctaccgcgtaaccatacaaatcagttaaatctggtaagtcttttttcacggatacacaaattgagagagagcgcgcgacaaaatcgaacctaaccctaattttgcgattttcccctaatttcgacgatctgatggtgagtgacaagcatgtagaatcaaaccaccgcaaacaccgacggtcgttttcgccgtccgacgaggtctttaaatctccgaagcggcacaagtcccgtcatcaccatcgcaggcatggccaccgtcatcatcgtgatgaggaagttcaatataacgatgatgagaatgttaacggtggtgatcttgatatggaagaaggtgagatattaggaaaagaagggattggggagacattgaagaagaaattagagtccgtcgacgagtttggggatataaaatctggtcaattccgggagaataatctggtctgttctattcgcccttttacttcattttattgtttccggtttgctagcttatcttcttctcggatggtggaatcaaaaggcttttaattgaaagtagggaaagtctagatttttctttcgtaatatgtggttttgtgccatttatcttattataatgaagttcgttcttggtctgtgtgtgggattagataacctgaatgtctcatgcatttgtaagaaatgcaaaagcagttgcactaggcgttcaatggagatgatggctttcccttgatttgtaagagctggatacgcgtttataactatctttcatataaatgtcatgtatgctcatgcttatttattctacgccatatatttctcttgtaaccagtcttttaatatgttgtggcggtgattgcaggggagaaatcagcggagggaaagagaatgtgagaaaagaaaagagatagagcctgaccgtgaaaggagaaaagagaggggaagcgttgatagagatagcaggggagacagggaaaaagattacctacgggatagagacaacgacagaggtaggagtagagataaagccaggtatagtagtagagagagggggagggagaatgaaagagagagacggagtgaaaaagatagggataaaggacgagaattccagagtgatagagagaagcataaaagtcttgatgatggatatggtgaagtgaggcataaacattctggacactcaagacatgatgcggaagatgacttagagttaagaagcccaacttctgtaaatggccatgatcctaacagtggcgatgtcaaagaaactcggggaaatgttgaaaggtatattcacccagaaaaaactttgtcttgtgaatgtttaggttggttataaatgtgcaacaccttttacaatagtgtttgattgtcttatatttgaaacaggaccagaattgataatgatgataaaggtgacgttgttgtttgggaagttgaacaagaagatgaagagctaaatttaatcgaggaaagcaggaggagaacgcaagccataatggagaaatataagaaaaagttggagcagcaaaacggattttcttctcatggtaaggggattatcagttttcttaatgatcattgctctgaacagcgcatgcatgaagaatttatatttgctcatttagtatatgggtgttgttcaaagttgccctttctctactttgtgtgtgtacttgttacatttagtttacattgggtttctgttagtcgacatgggagtagtcattttgttcaaatcttttgtattgtgtaccgaaactatcacttatgagcaacttgagcctttcaagttagtatctgtgggttgtaattcgattagtagaatagtcattagattttattaattgtgtcactgaaagtgtcattcatcttggccaaccctcccacatttacttacacaaatattttatgaatccagatcttgagctagcaaacattcccaagcagtcctctactgtggcagatgttcttggaagtggtactctggggcctgttacttctgcagttaatcaagctaaagctgggttggatattgatgccgtagatggtgaagtcgccaagctttcatcggcagttggggaatcacctgcacagcttgtaatttcagactcagataggacactagcttccacagggcttggggaaggcagcccaaaggtgcgtttgcaaaggaaatttgtttgttggggaatgctttttgtttattttattttccccggtcttatattatgctatatttttaggataaaatatcagatgacatgttcactgatgatatctttggggagtctccagctgatagtcagaaaatggtatgtactcttactcaaattattgaccttgtctttatagagttttctaactctggtttcatctgctttgttttccccgtacatcatctgcaagatactcaagaaatggacttcagttttgtcactacatttttgtagtg

SEQ ID NO: 143288 - DNA, 422 bp, Arabidopsis thaliana landsberg
atgccaaaaatcttgtggaaaagcctccatctttgcttcccgtcaaatctcaccaaatgctattcttcgccgtgtattcctccgtcctccgccgatcccgacggtatcatccaacctaaccgtccctccatcgttcttctcaataacttcaacctcctttaccacaatgacaaccaccaccacccccatcgtgtcattgacttaccttcttcctccaccacaaccactccggccgccacctcctcctcatccacgtcatcatatgaatctgatatctctcctgatgtatccgccgcttttgcttcccgtcgcttcttcttctcttcccctggtcggtccaatgcaatcaccgactcaccagaaccccggtcaagagaattctctgataattacgatgaggggatcctctagagtcgacctgc

SEQ ID NO: 143289 - DNA, 606 bp, Arabidopsis thaliana landsberg; identical to SEQ ID NO: 78483

SEQ ID NO: 143290 - DNA, 6245 bp, Arabidopsis thaliana landsberg
agcaagtcttcgctcttcaatttatattttaccaaatcatcttctctctttctctatctctcaaaacaaaaagtaaccatgatcaagacaaagacgacgtcccttctctgtttccttctcacagccgttatactaatgaacccatcttcctcctcccccactgacaattacatatacgccgtttgttctccggctaaattctcccctagctccggctacgagacaaatcttaactccctcctctcttccttcgtcacctcaaccgcccaaacccgctacgccaacttcacagttcccaccgggaaaccggaaccaaccgttaccgtatacggtatttaccagtgccgcggcgacctagacccaaccgcctgctcgacgtgcgtatcaagcgccgtcgcacaggtcggagccttatgttcaaactcgtactccgggttcttgcagatggaaaattgtctgatccgttacgacaacaaatcgttccttggggttcaagacaaaacgttgatcctcaacaaatgtggacagccgatggaattcaacgaccaggatgcgttgaccaaagctagtgacgtcatcggttctttaggtaccggagatggatcttacaggacaggtggcaacgggaatgttcagggtgtggctcagtgctccggtgatctaagtacatcacagtgccaagattgcttgtctgatgcaatcggacggctcaaatctgattgtggaatggctcagggaggatatgtttacttgtcgaaatgttacgcgcgtttcagtgttggtggtagtcacgcgcgtcagaccccaggcccaaactttggtcatggtcagtcttcctctaaacttattttaactaaactagataaaaaaataaaaagtcgtaatcactaaaaaaaaaacctttttacgtaacctcagatgaaaatttaaatattagactgatcttaacaattagtctaatggtttatatatttgtgtacgacgctaaatttttaaacccataaaattgatagtgttgaccataaataaaaatatgaacattatacttgatggagaaaacaaatttattaaaaactttagaggtggatggatagttttaaaattatatttatatatttggcagaaggagagaagggcaataaggatgataatggagtgggaaaaacattggcgataataataggaatcgtcaccttaatcatcttgctcgttgtgtttctcgcttttgttggaaagtgttgtagaaaattacaaggtatttttgatattgatttacgtttttttttcagttcttttatcgatcataaaatctaaattactatgtatatgccttttgcagatgagaaatggtgtaaatgaaaggacaaagtgggaaagatatcaatcaacaactcgagtcgagccacactgttagttgtatttttgtaattttttttgttctccctcataagatgtacgtagttataggtcatgttcgacacgttaacgctgcgtcagggatccgcgattgaaatttaaacgtcaacaatagcaaaagaaacagaaaaaaattagtaacggtgtcgctgcggccacttttacatgtgatgccggtgtcgtcggcatcgctaagaaaaagcggcgaccatttttatagacgctgcggctcttttcacaagaacgattatattagttttcacaaacattacatggaagtaagttataatttccggccgccgaccgctgacgcagcgataacgaaaagaacagggcaattggctttatatagccttgtcaatacaacgatcctctcaagaggaattcattaactttcatggtatcagagcatcatcgctccttaaccttttctctcatttctctttcttctttccttttttccttctttccttctttcatctctttcttcttcttcaaaagtctccaatggctgctcaacttccagcgatagagcgagcgtttggggttacaaatatcaaagcccacatactcttaattctcgatctcaatgatcacaattatgatgcttggagagagcttttccagacacgctgtctgacgttcgatgttctaggacaccttgatggtactatgcttcccagtggagataacgatggttcttggctgaaacgcgacggactcgttaaactctggatctatggaactcttgctccagatctgttccgctcatcattcaagactggaggcactgcacgtgacgtttggatccgaatcgaaaaccaattccgcaacaacaaagaggctcgagcgatccaactggataatgaattgcgtaatcaagagattggagatcaaacgattcaggcttattgtcaaaaactcaaatcgcttgctgatctgctcgccaatgttgatgcaccggtcaacgagatacatctggtcacttacctcctcaacgggctcattgacaaatacgattacatcgtcaacgtaatcaaacacaaagagccgtttccaagttttgagacggctaagtcaatgttggaattggaggaaactcgcctcaaaaagtaacaccgagctttcgcaacacacaaggataactcattatcatccactgttttaaccgtctctgcaaccccatcaacaacctcgcctatacagccgcataaattcaacaactacagaggaaacaaaaagaagaacaatcatttcagaggaaacaagaacaacaatcagtttcaccccaatcaacaaaattggacttactcaaatttctggcccagaccatttaatctgtggcccaatcaatttgcgaactggggacccaactctcaactaggctcataccgaggcccatatgtctttcctcaaatacaccagtaccctcaacaagcccatctgacggaaattcagtcgacgactgacttcacacaagcttacacgataaagactttggttgatcctaatggtgcaccatgggtcatggattcggctgccactgcacatctctcgggcacagcaggtaatcttcactctaatcttaatcataacatcactcactcggtcatcgttggtaatggttcaaaaattccttcaatttacggcttatgtcaaaaatcaattcaatacccaaataaaatcttgtcaatgcgacaatggaggaaaatataataaccatgagttcaagaattatttggattcaaatgaaattacagttcgtttttcttgtcctcacacatctcaacaaaatggaaagtctgagcgaatgatacgcaccattaacaatgcgattagagctcttctctttcaagctcaactctcgccaagttattgggtagaagctctccatgtcgatgtccacctattaaacattcttccctcttccgccatccaaaaccaaatcccctacactcgtctttttaataagaaaccaagttatgatcacttgagagtattcgactgcctttgttttccaaacttaaatcattccaatcttcataaactttctccaagatcaagtccatgcttgtttcttggatatccatcacaacatcgtggctacatatgtcttgatctaaaaactaataagatcattatatctcgtcatgtatactttgatgaggatatttttccggcaaccgaaacacatcaaaaagacacaaagtatctatttctcgatgatgatgttccttcttctcaattgcaacctattcttcaaactccatttcctactcaaaaccaacacctactagtgttcctgctcaaagaacccagccacaaacacaatttatttccattcagccctgtcactcaatgatgacacgtgcaatagctgggattcgaaaaccaaaacaggtcatctcacttctcaccaccacaaaatcgcctctcccaaaaagtcacattcatgctttttctgatccaaattggacaccagcgatgactgatgagatagatgctatgcttaagactaagacttggagtttagtgcttagacctcctaaggtcaatattgtaagatctatgtggctgtttaaacataaatatgatgcagatggcagcataactcgtcacaaagcaagattagttgctaatggaaaatcacaggaagccggtgttgatttcacagagacgttcagtccgatggtcaagccggcgacaatacgaactgttctcaatgttcgtgttggtctcgattggccaatacgtcaattagatgtcaagaacgtctttcttcaaggagacctcgaagaaacggtgtatatgcatcagcctccgggatttattgataagaactctcccaatcatctgtgtcgattacacaaagcgatctatggtctcaagaaagcaccacgagcttggaactccaggtttgcaaaattcatcacccaccttggctttgttacaagcagggcagatgcatcgctgtttgtttacagaaaaggagttgaccttgcatacattctcctatatgtggacgatatcctcttaactgcttcttcgaccaaacttctggaaacatcattgcttcactgaaagctgaatttccaatgacagacatgggaaagatacaccactttcttggaataaaggcagaatacaacgacaaatgattgttcttagtcagtctttgtatgcaaaggagatactggaacgtgcatgaatgagtgattgtaaacctattgcgactcctgttgacttaaagtccaagctttcagtagatatcggagatggtgtttcagatcccactttgtatcggagtctcgccggagcgttacagtatctgacttttacaaggcctgatagaagttacgctgtcgatcaaatatgcttgtacatgcacgacccccgtcaaccacattttcaagctttgtgcagaaccattcgatatataaaaggcacattaacgcatggactgcagctggttaaaggccaaatagattgtctcacggcatattcagacgcggattggggcggttgttcagacacaagacggtcaacatctggctattgcgtatttctcggtccgaacttggtctcttgatccgcaaagcgccagcctactttctcaagatcaagctcagaagcagaatacaaaggcgtcgctaacactgtggctgaactatgttggctacaaaacttgatgttagaacttcatttgacgataaaaagcctccgtcgtttattgtgacaacatcagttcggtctaccttgctactaatccagtcaagcatcaaaggccaaaacatatagagctggacatacactttgttcgagagaaggtagttgttggcgaggtcaaagtagttcatgtcccatcctcccttcaatatgcagacattttcacaaagggcttacctacgtgtctgtttaatgagttccgaaccagtttaactgtccttcaaccggccgcttcaactgagggagggtgatagaatatagggatgttctgttacaatttgttttatatattctgtatatatgattttgtaatcccttgtcaatacaatgatcctctcaaggggaattcattaactttcaatccattaatacataatcgattaataaaaaagacgatggagaagtgaatttccacgatgctttcgataatgaagccttactcgccaacagattattaaatctgtttctttccttctccaaattcaatcccaaaagtgatgagattgttgttcttggctatcctctcatggaagaaactccattggcttttgatgatactcaatatcttctcttgcattgattcgtcaattctctgtaactttgttatgcctgaccatgcccagttggatttataaatatatttttgttataaaaagaagggtgagagagaaatctcgatttagtcattaatctttgttgtcttaatatccgtttagttctaatctcggtttaatcagaaggagttggttatgttttatagaggaagatgggcttcagttttattaaaaaaaccgagaagagaagtttttttttttggtaggagagaggagactaatgtctccccaatttattcaaaccaaaacaaaattacaagcaaacatatctccgaaacgcagtttcgccaacatttttcaaagaaagtaacttaacactatctggtgtaggttcaaacaaatagaaacctagtggaaatgtaaatgtatagttcgccaaaccgtcagcaagtcgatttgtttttctatacacgtgagatatatggacattccagtccttcaataaaaagccatatcacaaacataataggaatgacagcagatgagtat

SEQ ID NO: 143291 - DNA, 1284 bp, Arabidopsis thaliana landsberg
ttgtgaaggcttctttggatgagaagaaacattatatggagaagaggtttctttaaactcttactaggaaacgctgctgctggagttggcttgcttgcaagtggaaacgctaatgcagacgaacaaggacaaggggtttcttcgtctagaatgtcttattctaggttcctagagtatttagacaagggaagggttgagaaagtagatttgtatgagaatgggactatagctattgtggaggccgtttctcctgagttgggtaaccggattcagcgtgtacgtgtgcagctacctggattgagtcaggagcttctccagaagttgagggctaagaatattgattttgcagcacataatgctcaggaagatcaaggttctgtgttattcaacttgattggtaatcttgctttcccggcgcttttgattggtggtttgttccttctttcgagacggtctggtggtggaatgggtggacctggtggtcctggtaacccacttcagtttggtcagtccaaagcaaagttccaaatggaacctaacactggtgtaacatttgatgatgttgctggagttgatgaagcaaagcaagatttcatggaagtggtggagtttttgaagaaacctgagagattcactgcggttggtgccaagatcccgaaaggtgttcttcttattggtcctcctggtaccgggaaaacccttttggcaaaagccattgctggtgaagctggtgtgcctttcttctccatctctggttctgagtttgttgagatgtttgtcggtgttggtgcctcgagagtccgtgatcttttcaagaaagccaaggagaacgctccttgcattgtctttgtagatgaaatagatgctgttggtaggcaaagagaaaccggaattggtggaggtaatgatgaaagagaacagaccctcaatcagctcctaactgagatggatggttttgaaggtaacactggtgttatcgtagttgctgcaaccaatagagcagacattcttgactctgctttgttgaggccaggacggtttgaccggcaggtactatctgattattacacattgatatgttttgtaatcctgtactactcctagagcttgtgcttacttataatttctggtgcaggtaagtgttgacgttcctgacgttaaggggagaacagatattctcaaggttcatgccggcaataagaagttcgacaatgatgtttcacttgaaagaatagcaacgagaacacctgcaaataacgacaaagatctcgctaacctcttgaa

SEQ ID NO: 143292 - DNA, 881 bp, Arabidopsis thaliana landsberg
gctgtcttagcccatgaactaggccatctgaagtgtgatcacggcgtgtggctcacatttgcaaatattcttactcttggggcttatacagttcctggtagataccacactcttctacatgtccaagtcacttgtatctactgttctgtgtcagtctgacaaaattatagtgacttcatcccggaaatctatttatcgactcacataagtttcagtttgcagccggcgtgaaactctgttattgttactaaactggattctgttgtttgtagcttttgggcaaatgatagctcgaaccttggaagaacagttacttcgctggctacgttcagcagagctgacttgtgatcgcgcagcactactcgtcgcccaagatccaaaggtaccacttctaaaaaacaagaagaaatcaagcagaatgcgaaaatacctagtgatgtttatgttattgttcttctaatctctcttatgtcgcttccaagaggttgttgtatctgttctgatgaaattagccggaggatgtccatcaatcgctgatcagctaaatgttgacgcatttctagaacaagcccgttcatatgacaaagcttcttcaagccccttgggatggtacataaggtgagaaaattaaaactatacaaaatttagattattcttccttcagattcacttctttgtttgtttacatattttccttttctacagaaatgctcagactagtcaactttcgcatccattgccggttcttcgtgcacgtgagattgatgagtggtccaggagtctcgagtacaaaagtctcctgaaacgggcaaatcgaaaaagcacagtacagaaggtttagtgacgttgttaaagatttaaaaggaaggaagcgaaataaa

SEQ ID NO: 143293 - DNA, 507 bp, Arabidopsis thaliana landsberg
gtggtaccaaggcaagctaggacttctcaggaagcctggtttttgaagagccaaaagttttgtacttcttcaacattttcctcttagaatggtgatgatgaaactgagaagtaagttactatgtcagcaaattctcaattctttcatatgaagaatgtgcacacacagaagtattcatccagcattgaagcaatatttcctgatagtttatcataattttgatgttttcaggataaccataatctttgttgataaggacggagaggaaattcctgttaaagtaccaattggaatgtcagtgctcgaagctgctcatgaaaatgatatagaccttgaaggtgcacacttctcttccatttccttctcgtttcaattgcttattctcatagctttagatgggttctaacatttagattgatcctttgtcgaatcgaaaattcatggattgctttacttgatctccaggggcttgtgaggcttctttagcgtgtacaacgtgtcatgtga

SEQ ID NO: 143294 - DNA, 3299 bp, Arabidopsis thaliana landsberg
tagagaaagaaagaaataatatagaaaaagagaacttgttgtagcagttgaagcagaaaagaaacagagtaacgaatccaacatcacaaaacaaaacacaaactgtgtgttgtctctcttctttggtcttctcttcttcttcttcttctttttctttttaagtatttttattttttggtttcttgatctcagaaaaaatggctctgaatagtgtctcctctgaagaatttaccttcccatcgctagcttctcatgattcttctcaccattccggtattgattcacctcctttgtggaaacactcaccggttacttcctttcgccggaaagattacgactttggtttggcaagattagtcattggaaaagacggtgatcatgatcagaggaagagcttctcgtacgtggagatgagaagtcgttggatcgacgacaaagaagaggagaaaatggatatgttatgggaagatctcaacgaagaattgcctccaagaagtcagagtttgagaattgtacatggcggcgacggtggagagaagaaaacggctttgtttcccgatgagagctctgccgtggccgtggggtgtgggatgaagttatcgaagaagacaaagaagaagacgaatctgaacgttttggtgttgatgagggttttgaagaagcttattgtgttgcgaagttcgtctcagaggtcgccggtgaaaactcatccacggtgattgatctccaccgtgataattgtgaattgggggggttattttgtgaacttcagaacttacggggcttttgtggagaaaattggaatcgtctgaaaatgatttatttgtagtttagtttgggtggttcacaaaaattaattttagggtcctaaatttttaataacacatctggagtcttttttggttcctcgtcttgattcatttgcctgtagcgtggggtttgatttgaatatgtatgaatttataaggtgaaaaatgaaaaagggtcagaatactagggtgcaatagtaaaggaaggtaaaagttattttatcattttaccgcccgaaaacttttaagttctatttgagacaatccacttgtgtgttatttgatatcacttttcaaatgtgtgatcaaaaggatttgtaacatctaaaacttttggtggtctttattttaaaatgggtctttatgaaacactactttagtctgaatcaaaaaggttttcaaaattgtcaaaatgtttgtagtctactagtcttgtacacttactcactactcacttggttcatgccaagaaccgccctgcctaaaatactgttccaatttgttttctccttaagttcacaatcgtagagttttgttttctccctaaaagttatattaaagaagacatgttttttttccttcttgataaatcgaagattctagactttgatccataatcccttggatcggaaattagaatgaatattaatccccgtcgaagaaagaattgtacagtagttagttcttctctttatactaacgtgaccaactacttcttggttcaaaacaaacatgtttaaattctcaatttactaaaactatgattctatagtaacatgtcaaatgagaaacatttcaatgtcaaaagtctggtccaattatcgaactacataaaaacattttaataccttttatatatatgaagaccaccattaatgtcgacagaaaagatagccatgaatcatattcaagcatcaaaactgatttaggtatctccggaatcattgggagaaaaattaggtgaccttcatatgaaaaagataagagtagacttttttatttaacactacacttggaagactttcttacctactctcactatagacccgattcgtcagaaccgggttttggattcaatttcggataacccctaaattggtacgccaattctcagtcactcggaataaaaaaaaacctcacctttgtccacgaatcgcaagtgggtcatagaaaaatcgaagcttttgactgatctcagtcactttagtctctctgctcacgacccttctcgtctacttagggttatctccatttgcccctcttcctgtcacctttcaggtattacttgtcaataagatgtgaaattgagtatgtgcatcagatgtttcctctagattgaactgattccacctttgatatgcgcagacacgaaaactgatgggtgtgatcaatgttcagggctctccatcgttctctattcattcttcagagtcaaatcttcgaaagtctcgagctttgaagaaacccttttgctcaatccggaatagggtttattgtgctcagtcttcaagtgcagctgtagacgaatccaagaatataactatgggagactcttttatccgtccacatttgagacaattggctgcttatcagccaattttaccctttgaggtgatatttagattgcattgaatttattttttgacaattatagatgattggattgggttggattggatttatcttctaaaatgtgtatgtttgtttgtaattaggtattgtctgctcaattaggaagaaagcctgaggatattgtcaagttagatgctaatgagaacccatatggtcctcctccagaggcaagtctatatctttctttcactcattcatagatatgttgatgactggaaaaaggataattttgttagttagttagttgtcctctctaacttcaggtttcagaagctctgtgtaggtttttgaagcattaggcaatatgaaattcccttacgtttatcctgatccacaaagtcgtagacttcgtgatgcactggctcaagactctggtttggagtctgaatacatacttgtaggctgtggtgctgacgaacttattgatttgatcatgaggtatggcttcaagatttgattttttcagtcaattgagcttctaccagaatcgtattttctgtctaagactctgcttcttgcagatgcgtgttagaccctggggagaagattatagattgtcctccaactttctcaatgtatgtgtttgatgcggctgtgaatggagcacgtgtcattaaaggtgaaagatttacgattttcatgtgtttcattctcttcgattgtgcttctctctctctctctgaatgtatagtcttaaacatgttggtctttgtttgtttcacagttccaagaaacccccatttcagcttgaatgtagaccgcatcgctgcagttgtagaactagaaaaacccaaatgcatattcctaacttgtcccaacaatccagatcgtaggtaaaacaccacctctctaaacaac

SEQ ID NO: 143295 - DNA, 1376 bp, Arabidopsis thaliana landsberg
ttcatcttccacaatctccgatcgaatctctctactcagccgtatgttttcacttctctcgtaattgactctttcatgttgggatttgaatcgccgaatctcaaaaccctaattctggtttttcgattttagttccggagtagttattgagatcaacgtgtttactgattccgattgtatgtagaaatctcatggagattttggattgtcgtcgatatgtttttttttcgattgtactggtttcgttgacgcgtctcttattgaaccgccgcgtcccatgcacggattcattatggactttggcttgttagattctcgatttcgatctgaaagtttgatactttggattaatttaagatttgctaactcaattttattggattagtgtataatattagtttctttgatcgggaagatgttcaatttgaactgttattagtaaaactgtcgatctttttattctgtgccactatacgcgaatgttgctgaattactaaagtttaggtagttttgtcagtatggtttgcttttgcttgtatgtcttatgatgagacatgattccagtctttttatctctgtcttgttcaggaaaaaaatgagtgattacggtgaaaagacttgccctttgtgtgctgaggagatggatttgactgaccagcaattgaagccttgcaaatgtggctatcaggtccagacattctctctgattttcattgttttttgtgatcaggattaaaaattaggttcagttgtgctatggtttactttgaaggcttgtggtatatacttagagcataccaatttatacttattgtggtggcctcagagatcattgacatttgttctgctgataattttctgatctgatatgtatttacctacaatcttacagatttgtgtttggtgctggcaccatataatggacatggcagagaaagatcaatcagaagggcgctgtccagcttgccgcactccatatgacaaagaaaagattgttgggatgactgttgatcaggagaggttgagatatgatatgacacctgagatgtgaacttttgttcagtgtcagttttagtttgctgatgtttcttatctattttctgttctcagactggcctctgaaggcaacatggatcgcaaaaaaatacaaaagtcaaaaccgaaatcttctgatgggagaaagccactaacaagtgtccgagtggttcaaagaaatcttgtttacattgttggattgccccttaatctagcagatgaagatgtacgtcattttttcctcgaaaaacctgtaattatatcatacgatctgcttagttacggccttacgggaatttttcttttttcttttcagcttctccagcgtaaagaatattcgt

SEQ ID NO: 143296 - DNA, 4430 bp, Arabidopsis thaliana landsberg
gctatttgcaaagttgtatttggagcttaaaaccctaaacccagaaatccccaactcggaaacttgagaagatgatggctgatgacactgaactcgtcagtaacactgaccagaagatggaagacgcttcagccgaaaaccctgcccgagctgatcccccctcatcggatgattccggcgattctgattccgactcagaagatgaagccgagtcgaatcagcagattgtaaccttggagtcggagctctccgctaatccttacaactacgatgcttatgtccaagtaacaatcactctctctaccttcccttttgctacaaaatgtcgttttagctcactcagaacctagcaggaaagcagaatttgctaatcttcatttcagatttccttgggagaaaatgatattgcttgtgtatttggaaaacctttgagttgtgtcttctctcttgttggaagatggatggttttctcttggctacatttgtttctgacttttttgctttcttatttcagtacattaagcttctcaggaaaacagccaaccttgaaaagctaagacaagcaagggaagctatgagtgccatatttccgttgagtccttccttgtggcttgaatgggcaagggatgaagcgtctttagccgctaggtaaattttttcttgcgcttctttggctcatacttccggttttattgtaggcttcagatggtttcctttgatcattatttgttacagttcaagcatgcaatttttaacacaccctctgaaactgttgttatatttatccttgcagtgagaatgtgcctgaaattgtgatgctttatgaacggggactttctgattatcaggtatgttctcttctgtactggatccaacagcttgaataaaaaagcttcgttaggcttatatattattaccattttgttagagatagatagactgaataaatactctggtatgctatatcgatttgttctgttatttatctttgtatttcaaatttcttcctcaattgattataaagacagtgatactttataatcgatcattcaactagtaattcgttccacattgaattaataagctaatagcttttcttttatgcagtctgtatctctttggtgtgactacctaagctttatgctagaatttgatccatcagtgcgtggatacccatctgaaggtatttccaaaatgcggagtctttttgaacgtgctattccggctgcgggcttccatgttactgaaggcaatagaatatgggaaggatatagagaatttgagcaaggtgtcttagccactatcgacgaggctgacatcgaggttggatccatttcttgattttgttcatctacattcgttcactgtagtctagcagcatgttagcaagaattgtattctaggatgattcctttactaagtgaaatagaagtatggtagtgggttgctgcgcatagttttcagtggaaagaactaacatcttgttattaacgagagatagtggttgctatgtaaatatcatttaggtctctaggctctaaagtagaaataaatcagtttatgcacatctctttatagttcttttgtggcatcatgaatttttagttttattttacaggagagaaataagcagatacaaaggatcagaagcatattccaccgtcacctgtctgttcctctagaaaacttgagctccacccttattgcttacaagacttgggagttggaacagggcattgaccttgatattggatctgatgatttgagtaaggtttctcatcaggttgctgttgcaaacaagaaggcacagcagatgtatagtgaacgtgcccatcttgaagaaaacatatctaagcacgatttatctgacacggaaaagtttcaggaattcatggtacgtattgtttatcgtgcagttgatatatatcataaatgttgtgtagaagttggattccatatgcctaccattagtgctcatattgtgtgaaagattcggaatctgcagacttgggcatgtttttttgctactgttgcatcctttttgttcttgttattggctttaccaagtaaacgatgttatctatatgaaaacgtgatgattgtaattatttctttgtagaattatataaagtttgagaagacttctggagatcctacccgagttcaagctatatatgaacgtgctgtggctgaatacccggtttcaagtgacttgtggatagactacaccgtgtatcttgataaaactttgaaggtctgtcaagaacttgttgtgtagcgtctttttggcattttatctatcatcttcttgaaattgtctttttatggtgctgtttcttacaatttttacttgatctgtacaattgactttctttcttcaggttggaaaagctataacgcatgcctattctagggcgactagaagttgtccatggactggagatctttgggcacgttatttacttgctttagagcgtggttctgcatccgagaaagagatttatgatgtaagtctcaacttgttaaaattgaaaaacaaaagaaatatagtgaaggaaaggatacttgccctaacattgatttatgtctgtcatcttcctcttaccatatccgatgcgttatgctatgtgattttcagaaagttatgctgagaatattctattattcaaattgttgcgtacaggtctttgagaagtcattgcagtgcacattttcctcctttgaagaggtacacctttgctttcatgattatttattcagtttctagcatgtatatattaatctctatccacgtatttcttacgagttgtttcttatcagtacctggatttatacctcactcgagtagatggcctgagaaggagaatgttatcaactaggatgctagaggctttggactattctctgataagagaaacttttcaggtttgtctgctgcctttaccatcaatagtattctcaaattcttgttctcagctttcaagatattggtatccttgcagttcttttagttaattgcattctcttcgtagctttccatataagagtctatataggattatcttttctgtaagaatagtgttcttttgtgtagcttttctcctgatttagatatcttctgaaacactcgaattaactcaatgtttctttctgtcagcaagcatcagattacctaacgcctcacatgcaaaatacagacagtttgctacatttgcatacttattgggctaacttggaacttaatattggaaaagatctagctggcgcacgaggtgtttgggatagctttctgaagaagaggttttgcaagctctaccctttatattgattacttacagatttaaacttgaaataattcaggcaaattatagcatttgtcagcataaggcaatctggttcactttggttcatcttaccttgttctctccagtggtgggatgctagcagcctggcatgcatacattgatatggaagtgcatttggggcatataaaggaagctaggtctatttaccggaggtgctatacaagaaagtttgatggaactggctcagaagtatgcactcgattctttcttgtttaatgtgttactgtaacttcttttcttgttatctaaggaggattatttgactcgaaacacattctttagcttcacttgcaactgaaacgaccgtctattaaatgaaaagtagagaaactgagaaacagtgtataaataaagcaactgcaatgcaagcgcgtttaatggaggggtttttctgtttttgatggtttaggcatgtttacaatacatgacattttctttgaaacatgagaagcactgtatgcctgagttgtcatctctaatttctaatgcctatactcacttcctaagaagagcaattttccaggacatatgcaaaggactgttgcgctttgagagggagcatggggatttggaacattttgacctagcagttcaaaaggtattgtttactgttttgcatttccagaatatgatgaatattgatatattttgttgggtttgaatttttttgttaactcttatgtgataaatacattagatcgatctgttaacttaatttttgattcatagctactgtgatgttcttggcttcttatgttcagtttccctatatttgaccctgatgggcagttataagagcgatgcattgtttgctaaaaaagaatgcaaaaaaagttgtggaagctgtaaattatacgagttgcttgatttttattctgcaggttatgccacgcttggaagagctacaattgatgaggttacaacaagagtctacaccagtcaaaccgtcagctggtctgaaagagcatagctcacaaaagagaaaagcagaacagaatgtagaagaagagtctttggctaagcggcagaagaggaaaagtcaaaaagaagtggacctaggtggtc

SEQ ID NO: 143297 - DNA, 1144 bp, Arabidopsis thaliana landsberg
ggtccgaaaaatctgacaaggatgaagcaatcaagtgtcgtcgatctgttacttcttctcctggcgatcgctcttcttgcgacgccggcgttctccgatctggttttatccaaagtcgaacgtcgtgtaagtctctcaatctctcaccacataatatcttcgatctggttttggattcatgaggttcctgaatcaagtcccacaatttgcatttgttgatctgtgctttaacacttcgaaatcagttcaaaagatataacctttatatggaattcttataatctcgttagaattgaaatcattttcgagagtcttttagcttcatttcatgctttattcatcaaagtttgttgcttttttgcagatcgatgtgacttcacagattgctcgtgttactaagacccttaaggtaatttctatgagactatcttagtcacgaagttatatgttgtgttggtgtctctaagtcctggtttcaaatttggtattaggttgtaaattctggctctgaatcagtttctgagtttgctttgacattcccaaagtttcttggtaacaacttggcttatctatcggttgctcctagtgagggaaaggggaaatctaaacgaactttagtgaatctctctgtgagagaagctgatcagaaaggtttacctgattcaattagtgtttactcagttgcattacccaaaccactgagtaaaggcgatactttgacgctggaggtagttgctgcattcaccaatgtacttcagccatttcctgaaaagataactcagggtgaaatccatcttgttatgctccaagaaagcgcacaatatctctctccttacgcggttgagtctcagtcattgtctatcaaactaccgaatgccagaatcgaatcttacaccaaattcgagaatacaaagctccagggatcagagctcaaatatggtccttacaagaatctccagtcgtattcatactctccaattgttgtccactttgaaagcaaggctgcatttgctgtggctgagaagcttgtgcgagagatagaagtgtctcattgggggaatgtgcaggtcacggagaattacaatgttgtccaccgtggggctcaactcaagggcgagttttcaaggttaatattcgtactaaa

SEQ ID NO: 143298 - DNA, 577 bp, Arabidopsis thaliana landsberg
gtcgtctcttgttccttccgctgccaacaaaatggagctgtcgctgcgtccgccatattaagccactcctcctccgccgctcagcttctcagacctaagctcgggtttattgatttgcttcctcgtcgagcgatgatcgtttcttctccttcttcttcgcttcctcgatttttgcggatggaatctcaatctcacgttcgccaatctatctcttgctctgcttcttcttcttcttctatggcattaggtcagttttgggtctagacatggctgagattaagctcatttcatgattgatattatttctgttcactcaaaaagtcgtcgtttttaatctcaatcaggtagaattggagaagtaaagagagtaacaaaggaaacgaatgtttcagtgaagattaatttggatggtactggagttgcagatagttctagtggaattcctttccttgaccatatgttagatgtaaagtctctgcctttaaacctttttgtcatgtatttttgatttcttcagtttccattggaagagagcttaacacagactttttagggatcctctagagtcgacctgcag

SEQ ID NO: 143299 - DNA, 2444 bp, Arabidopsis thaliana landsberg
gagtgatggaaaatgaaagaaccatcgttaagaaagagattatccttgaaaatttacaggaaaagatttcgggtgccaagtccgaattaacagagaaagaagaatctataaagattaagctaaatgacatttctttgaaggaaaaagtgagttatctaggtgcaactttttttgcttccggtaccttctggcttatatattaattttgtgtctgttttaggactttgaggccatgaaggctaaagttgatatcaaagagaaggagctccatgagtttgaggagaatcttattgagagggagcaggtcagcctcagcttccctgaaactttcttctatttgtttaatatatatcgccttttctttctaggtcattgtaatggtactgaatcttacgttaagggatggaatgaaacggaagaagatgtgctttatgttttgaaatcctatacagtgacgcatatacgcattcacaatcactagttgtttagggatatcctgtttttttttttgaaatgttatcgtcgactagttaacaaaatcagagtttgtatacagagcgttggtgtattaagaggaatattttaaaactatggtaatatttcttgcatgtttaaagtcactttcccaggttaatatttttctttagtttctatctgctaagtgccagaatagagatacttaaaatagaattgacatggtgatttaaatttaacagatggagattgggaagcttcttgatgatcagaaggctgttctatattcaagaaggcgagagtttgaaatggagcttgaacagatgaggagatcccttgatgaagaactcgagggaaagaaagctgaaatcgagcagctgcaagttgagatcagccacaaagaagagaagttggctaagagagaggcagctttagagaaaaaggaggagggagtgaagaagaaagagaaggatcttgatgcaaggctcaaaaccgtgaaggagaaagaaaaagctctgaaagctgaagagaaaaagctgcatatggaaaacgagagattgctcgaagataaggaatgtctgcgtaaactaaaagatgagattgaagagatcgggactgagacaacaaagcaggaatcaaggatttgtgaagaacatgaaagtcttaggattacaaaagaagagagagtcgagtttctgaggctgcagtctgaactgaagcagcagatagataaagttaagcaagaggaggagctgctcttgaaggaacgtgaagaactgaaacaagataaggaaagatttgagaaagagtgggaagctttggataagaagagggctaacataactagagagcaaaatgaagttgctgaagaaaacgagaaactgagaaatttgcaaatatctgaaaagcataggctgaagagagaagagatgacctcaagggataatttgaagagggaattggatggtgtcaagatgcagaaagaatcatttgaagccgacatggaagatcttgagatgcaaaaaaggaatcttgacatggaatttcagaggcaagaagaagcgggtgaaagagattttaatgaaagggcgagaacatatgagaagagaagccaagaagagcttgacaacattaattacacaaagaagctggctcaaagagagatggaagaaatgcaatacgagaagcttgctctggagagggaaagagaacaaatttcggtccgaaagaagttgttgaaagaacaagaagctgagatgcataaggacatcactgagctagatgtactcagaagctctttgaaggagaaacgaaaagaatttatctgtgaaagggagcgtttcctagtatttctggaaaaacttaagagctgcagttcctgtggagaattaaccgaaaattttgttctgtctgatcttcgactacctgatgttgaagatggggacaaacgtttcgggaaacaaaaattaaaagcagaggaggctttgaacatttctcccagtgcagagaatagcaagagaacatctttgcttgggaaaatcgcttcaaagctactgagcatatcaccaattgggaagacagataaagtcactgatctgggtataacagttaagcttccagaatcttcgcaacctgatgattctctggatagagtgtcaggcgaggatcatgaaccgtctgctactgaacagagtttcacagatagtagaatacaagaaggtcctgaaggttccctccaatcagagatgaagagtgataaacctagacgaggtagaggtagaggtagaggtaggggtaagtctgttagaggaagatcgcaagcaacaaaagctgtgtccagagattcaaaaccatctgatggggaaactccaaggaagcggcaacgcgaacagacttctagaatcacagaaagtgaacaggcagctggtgatagtgatgagggtgtagacagtattacaactggtggacgt

SEQ ID NO: 143300 - DNA, 1836 bp, Arabidopsis thaliana landsberg
agcatgtatagtacaaagatacacatgcatgtgaaatggacaagttattaaaaaatcattaacctactgtaaaagttatttgtaagaaatttatgccctcgttttgcttgattaatgatatacttcttctgcaagcagatgactagtgatcagtgtaaaaactagatgatccctcgtttaatctcttgtccaatttatctattcatgctttaatcgcttccgcattttaattcattaaaagtttcgctctacacaattttctatttatctaatcaacaaaaaagaaaagtttacagaaaatatcgtggagagtactccatgagttaaacgaatactctcatggagacaatacatcaatccttagaacgccactcaaatgcagtacatgtatagcccatatgggccttaatgcatcaaacgttatgcccatcgaaaatacgatgaattaactaaaagataattttaagacaaccatcaccgaagtcgtcactttcccgaatgttcccaagaagaagttgtcacctattgacaacaggtggtggttacaccctttcagacctcagcgttcatgagtttatagtttaagagttttggttttggttttttaaactgttttttttttttttgtgtttttctttttttacattgttcgtttatgttatgttgttattcagtttttcataaatattcaaagttttagattgattgatcatgagaatgccaatgcaatgatgtttagaccagttggcaatggagaggcagccaaaatcttaagcagctgatgagatgtgttacaaaacaaaaagctttgctcaatcatgtggcctataattaacttcttaattaaactgtggtttgttagtatgttaccactcatctcaattcgactttcgtttaatactggttaagtagaaaactgaaaatcaaacaaacgttatgatttatctaagagaagatcggtttagaggccggtaaactagacaaccaagttttggggtatggaatctattagtttagctctgattcatggagggttcttgatgtcctccctcccgactgctttccatcatctgctaatggcttgtctttgaagggaaatgcttattggcttaaaaaggacttcttactcagttttgattttacaaccaagagactgtatggccctatcatttgttagagaagaacaactctcactgttacatcgaattgatgaatcgaagatggagatatatgtaaccaagaaagtagatactgatgaagttgctttgttgcggagcaaattctctacagtagatttacccattggtggtaatcatttcgagctttacacgagtctattaatcgacgaggagaagaaagtggccttatgttgtaacagatatttgagaaccagctggaagatagtttcgagctttacacgagtcttttaacctttttactgaactgattcttaatatttgtccctcattttcttcagcctattttaattaatatggtcatcaattcattactttatcaccacggcattgatttacaatagcattagataaatgaaaccaaaaaaaaaaaactctggagtgacacatctttactacgatggttctttacttggcgcaggcttaactcgaaaagaagtctttacttggcgcaggctacaccttcacaatcctgactagtctcaccggtcttgagatgattcattactcggagcaggcttgacgaaagagaactctttagaatcagtttcagtgtcacggctagtctcaccggtattggtctctagcttatttggttcaactttcacaacaagctcgaagcttggaggagatctgggag

SEQ ID NO: 143301 - DNA, 796 bp, Arabidopsis thaliana landsberg
gacgaaaatgcccctgtcggcgacggcggatacaagcaagacggtgaagctggagaggtacaatagctacctccggaagattcacagcaccaaagttctcaacgcttcttctaaagttcttttccgagcaacgcttctcgtagctcttgtcctcgtcctcatcttcgccatcaactaccctccactctccgatagccgcgccgccgcagcacaccacctccaccgtcgtagcttcttatccaccggactcttctcctcctcctcttcttcctcctctatcggtggagccgcgtgggaaaagcgcgttagacaatcctcaacagccaaacgaccacacggtctctccgtcctagtcaccggagctgccggattcgtcggatcccactgctcacttgcgctgcgaaaacgtggcgatggagtcttaggattcgacaacttcaacgattactatgacccatcactcaaaagagcaagacaagagctcttggagaaacaacaagtgttcatcgtcgaaggtgatctcaacgatggaccactcttacgtaaactcttcgacgttgtccctttcactcacatccttcacttagccgctcaagccggagtacgttacgctatgaaaaaccctcaatcttacatcgcctccaacatcgccggattcgttaaccttcttgaagtggctaaagcagctaatccacaacctgcgattgtttgggcttcctctagctctgtttacggtctcaacactgagaatccattctcttgagaacacagaacagaccaaccagcgagtctttac

SEQ ID NO: 143302 - DNA, 953 bp, Arabidopsis thaliana landsberg
gatactataaagtagtagtagactagtagttagtatagaaacgtttaaaaacatacaacaaacttttatcatctctttttgtgacaggcccacactatcaattcgaaaagtctaaacaaaagtcgccgtcatgaaagtagaacttgtgttcataccatcgccgggcgttggccatatccgagcaacaacggcgttagcaaagcttctcgttgccagcgacaaccgcctctccgtcactctcatcgtcattccttcacgagtctccgacgacgcttcttcctccgtctacacgaactccgaagaccgtctccgctacatcctcctccccgcccgagatcaaactactgatctcgtatcttacatcgacagccagaaaccacaagtaagagccgtcgtgtccaagctcgctggagatgtttcaacacgttcagactcacggctagctgggattgtcgtagacatgttctgcacgtccatgatagacatcgccgatgagtttaacctctcggcttatatcttctacacgtcgaacgcttcttatctcgggctacagttccacgttcaatctctttacgacgagaaagaactcgacgtaagtgagttcaaagatacggagatgaagtttgacgttccaactctgactcagccttttccggcaaaatgtttgccttcagtgatgctaaacaagaaatggtttccttacgttttgggtcgagctagaagttttagagcaacgaagggtattttggtaaattcggtggctgacatggaacctcaggcgttgagtttcttttccggtggaaatgggaatacaaatatccctccggtgtacgcggttgggcccattatggacttagaatctagcggcgatgaagagaagagaaaggagattttacattggctaaaagagcaaccgacgaaatctgtagtgtttctctgttttgggagcatgg

SEQ ID NO: 143303 - DNA, 1838 bp, Arabidopsis thaliana landsberg; identical to SEQ ID NO: 7093

SEQ ID NO: 143304 - DNA, 1034 bp, Arabidopsis thaliana landsberg
aaaacgttatgaggcttcaaaactgaatctatgtataaataatacacacgcatatatttaactttgttttttcttttcttttccatataacaaaccaaacactactcttttctaaccaagagaaaggttttatatatgcagaatgaagtttgagagagcaaggccattcatagccattgttttcatacaatgtttgtacgctttgatgtctatagtagcaaaattagctttgaacaagggaatgagccctcacgtcttagttgcttaccgaatggcagttgcttccgctctcattacgcctttcgctctcatcctcgagaggtttcttttcttcttccggtccatgcaaggcctgtaacacaaaaacatacactttgaggttaaaataatggttccttttgctccaaatgcaggaacacaagaccaaagttgaccttcaagattttgttacaaatagccatccttagtttatttgagtaagagtttgtttaaatcatttctgatgcacaatgatagtctgttgtaacttgatttaaatgattaaacacaggcctgtggtcgaacaaaacctgtactactcagggatgaaacttaccactgccacattcacatcagctttgtgcaatgctcttcctgctatgacattcataatggcctgcgttttcaagtaactctctcactctctagaccgatattatttgctgatgcacacatcattgcagtactgaaacaatttgactcggtttctgtttcttgaaaggctcgagaaggtgacaatcgaaagacgccacagccaggcaaagctggtgggaaccatggtggctattgggggagcaatgctcatgacattcgtgaaagggaatgtcattgagctgccttggacaagcaactcaaggggtcttaatgggcacacacacgctatgaggattccaaagcaggcggatatagcaagaggatcaattatgcttgtagcaagctgcttcagttggtcatgttacatcattttacaggtatgatccattcccgcttccatg

SEQ ID NO: 143305 - DNA, 1260 bp, Arabidopsis thaliana landsberg
atgtttagatcatcaccgagaagaggacagagatcaaagggtttcaaggtgaagcattgtattcaattgactttgttgcttagtgttgggatatggttgctttatcaagttaagcattctcatgagaagaaagctcagtttgaggaaagtgcaaagattgttgttggtggtgttgataaagttgtcaagcttggtaggaaagatcttatccctcgtgttgttgaggtagatgaaggtgaggatgaagaaagtaagaatgttgttgagagttttaattcgggtaatggtgatgataaggagaatgagattgttgaaggaggtgaagagaataaggagaaggaaagtgaagggattgtgtctaatgaggattcgaatagtgagattgaggagaagaaagacagtggcggtgtagaggagagtgaggttgaagagaagagggataatggcggtggtacggaagagaatgagaagagtgggacagaggaaagtgaggttgaggagaggaaagacaatggcggtactgaagagaatgagaagagtgggacagaggaaagtgaggttgaggagaggaaagacaatggtggtactgaagagaatgagaagagtggtaccgaagagagtgaggttgaggagaggaaagaaaatggcggtaccgaagagaacgagaagagtggtagtgaagagagtgaggttgaagagaagaaagacaatggcggtactgaagagagtagggagaagagtggtaccgaagagagtgaggttgaagagaagaaagacaatggtagtagcgaagagagtgaggttgaagagaagaaagaaaacagaggtatagacgagagcgaggagagtaaagagaaagatatagatgagaaagcgaatattgaagaggcaagagagaataattacaagggagatgatgcttctagtgaggtagttcatgagtctgaggagaagactagtgagtcggagaacagtgagaaagtggaagacaagtcgggtataaagactgaagaagtggaagattctgttatcaagagtgttttgcctaacacaacagataatggggaaagcagtagtgatgagaagagtactggttcgtcttcaggtcatgaatcggattcctcggagggaataaaatctgagggtgaatctatggagaagaatgagttgttggagaaggagttccaccattctaacggtgagtcctctgtgaaaggttaatccacgggttctggagacggaggttctcaagaaacttct

SEQ ID NO: 143306 - DNA, 3213 bp, Arabidopsis thaliana landsberg
  unsure (1)..(3213): unsure at all n locations
gaagggatgtcgagaggatctcgattcgttagggctcctgggctcttactctgtcgcgttaatcttcaacctcaacccaaaatcccatctttttcctacagtcttcgctctgattatcgtcttcataatggtttctccaattacatcagacgtaactcaattcgaacatctccggttatcaatgccttcctctcagataactcaccatccccgtcaccatcaccatccccaattcgttttgttcaacggagttcaatgcttaatggtcgtctcttctcgacttctactcccaatccagaccaaaccaccaccaagactaaggaaatcaagacaacctcgtcggattcagactcagctatggctgacatgaagattctccgtacgcttgctggctatttgtggatgagagacaatccagaattccgtttcagggtcatcgctgctttgggttttctcgtgggtgctaaggtcttgaatgtccaagtccctttcctcttcaaattagctgttgattggcttgcttcagctaccggtactggagcctcacttaccaccttcgctgctacaaacccaactcttcttactgtttttgctactcctgctgctgttctcattggatacgggattgctcggacgggttcttctgcttttaatggtaactctcaatagctctagttttctttaaaaaagaatgcacttttcactcttggttgttacttttcatcatcgcagaacttcgtactgctgtgttctctaaggtagctctccgaacaatacgatctgtttctagaaaggtatgctgctgctgctctaaactatcttgtcgatagagatattttaatgtatgaatcaatttcatatggtcgctttgcaggtgttctcacatttacatgatcttgaccttcgttaccacctaaggtatctatctctcctctcttactcttgtgagtagtctcgctcattccatcttagattcatctcatcataacttccttacttaattgcttatgtccagtcgagaaacaggcggcttgaacaggattattgatcgtggtagccgtgcaataaattttatcctctcagctatggttttcaatgttgttcctaccatattggaggtaaagcttgtctgaccacttggtgctttctcatgatcattgttttttttctcattttgaataattggcagttgctcattcatatttggatttcactattcattcgtctctaaaaacactcgacgtaattaatatgtatctttcagatatctatggtatcaggtatactggcatacaagtttggagctgcttttgcctggattacttctctctccgttggatcatatatcgttttcacattagctgtgacacaggtactgtgcctttttcggtattctcttttcaatgccaactataatgcaatacttgcgttattatcatgataatccagcaataactgtgatattttatttaagaaactactatagtatacattgttctggaattcgttactaagcttctctaatcttaactgtatcaactctttggatcggcttaaatcattctagttgtgatattaggtttgatgatgtatagaaggatagttgtcttcatacattctcttcaactttcattatcttgttacaaatctttttggtgtcaaacgctttgctcacggttttatttattttatccagtggcgaaccaagtttagaaaggctatgaacaaagctgataatgatgctagcacaagggccattgattctctgataaattatgaggtaaatttttaatcttaatcattttgcttgacttgcagttttgacagaatttctttttcgcttcagactgtcaaatattttaacaatgaaggttatgaggctgaaaagtatgaccagttcctgaaaagtaagtaactctactagctgtttagatgaaaacatttatcttaatttccaaaaaaaaagagaaaattctccagttttagtttgagcaagaatagtagcaacaagccaacaagtaacaaatgtagatcagaaaatgcgctgatgactctttttacatctttatttacacgttctttttctaggaagaaaaccgattgatattttaccataatatattattgctccgtccatttaccttaatttatcttgtgacgattctgctgcttatcccagaatatgaagatgctgccctgcaaactcaaagaagtcttgctttcttaaactttggacaaagtatcatatttagtacagctttatcaacagcaatggtgttgtgctctcagggtatcgtgaatggccagatgacagtcggtgatttggtcagtgcgtcctttgatttttccttgacattggtattttatgtttctctgcattttttatccaaattgttttctaataagcttttgcatatttgggtgatgcaggttatggtgaatggacttctctttcagctgtctcttcctctaaactttttgggtagtgtttaccgtgaaacaattcagagccttgtggacatgaaatcaatgttccagttgctagaggtatgtgaggatgttataattgtttctttaaactctgcatttggttaagtttcttaaacacttttttttttatgataatgctttaaatgcatgctttttagtatgcactcctggcatgttgaattgattatgtggtattctcttactgtttcaggagaaatctgacatcacaaatacaagtgacgcaaagcctcttgtactgaaaggtggaaacattgagtttgaaaatgtacacttcaggtaggtgttgattttagtggaacattactgtcatactaatcgttggagccatagtatcttgggtatgaaagtgtgttaagattaatatgagtaattaactcaaattttatttaacttatgatctcaatacaccccaaaaagtctttaataattagctctgttgagtttatccaagtggccaattataggccagtgcatgattggcatatcagcttcnnnnnnnnnnnnnnnnnnnnnnnggttaataacttatgtctattgtcacatcatctttctctttttcttcaatgacagtggccttccagatagccaaatattagatggggtttcctgtgtcgtaccggcaggaaaaagtgccgcaatccccggtactagcgggagcggtaatacataaaccaattctgtttaagcatcttagttctgtgt

SEQ ID NO: 143307 - DNA, 2068 bp, Arabidopsis thaliana landsberg
ctctctcacacacacacacgatccaatgacgacgagcaacaacgtgaacggatgtttcggagacacgaagctgaccaaagtgttcgtaggaggattggcttgggatactcacaaagaagcaatgtatgatcatttcatcaagtatggggacatcttggaggcagtcattatctccgacaaactcactcgccgttccaaaggatatggctttgtatgttccttcctctctcgtttcttttctttcacttttgtttctttgctcctttctcattttgttttaaaatatgtttttgataggtgactttcaaagatgcggaagctgccacgagagcttgcgaagactctactccgatcatcaatggccgccgtgccaactgcaatctcgcctccctcggtggccgtcttcgtaaatcccctaccatgacctctcctcaacaaggtccatcttcattttattttatctaataaaaaagctatatatatatacacattattggccataatgtcctataaaaaagctaattatgttttcacttacaatttggaaaaaacactttgccatagataggagacaatgtaaggattaaaccttgatatgaatggaatcgaaagaccactttgccattattcaacctttttagaatcaattttcaaaaccaatattaacattatcatcaatgatgttttgacatgtgaaggaccaaaaaatgggaacagggccacgccaccacatgttggaaatcattctcagtggtactacccgtccggattcacaaaccagcaacatcaacaacaaaatcatcaagccgttcctttctatgggtaaataattgtctagggtttaatcttcttgaatatgtaggtatgataatttgattagtcccgtcttaatattgaattaaggtacctttccgcatacgttgccccgaacatgaccttcaatcaagtaagtctcatgaattctaattcattaaaaaaaatcgatattcttctatgattttccacttaattatgaatttcttatgtgattgtttaatgaacagaaagttggatatgtcggaggaacctatatgaacggatactatgcacaaatgcaaccacaaccgcaatcgcagccacaaccgcaatattaccaccatcacatgtatggtggaggacgagttatggttggggcagcaagtccaatggtgcctttctacactgtctatccttatcatcaatctcaagccatcgggtttccacaaccttcattctcgaaacctctttctttttccactcctcctatatcaggtatttgtcattctattaattataacgatcgaaagctagtcactaaaaagatatcgaaaattacatatttggataattaagtactatagcaataatcatttgagaaaaaaatatacatatcagagtcaacatttgtttcacatacgtatttactatttagttaatataaatttactgctttttttaatatatatatatatatatatctttacaacgactacaatttacaaattagtaatattatacattaatgtgtcttcttcacatagtgttgttcttaaatcttaaccatctagcttctgtctatccatcatttttgtgtgtactctatatatgtgcaccagataaaactgatgagacatacgcacacatgcgtacacaagttggtcacgttattaagttgatgtcagtcatggcctcatgtgcccatgatgtaattatcacatggatccaccctcagctagctaggccctgctttggcacgtgatccctcgctgtagcacgtgtgtctgtaataatttagttggatcttggtgcttataggttaataaaaaacggaaaggtctcttacatgcaagatgttgtgatcttcgtgtgtcggaaaatctattaaactgattttataaagatttgcgtttttgactctgttgaataggcacagttggaggagagagcatacagaagaaggccatacattgataggctagaagctgttgatcaaacgattgactcagcccaaaattattcattttatccatctcactaagctttatttttt

SEQ ID NO: 143308 - DNA, 1544 bp, Arabidopsis thaliana landsberg; identical to SEQ ID NO: 59993

SEQ ID NO: 143309 - DNA, 879 bp, Arabidopsis thaliana landsberg
agtttattctatctttatgagtttcattcatcaatgttttgattctctttttttcagtgctgaatttgatggttattgtcaaggcgagcttgtcaaggtattattagattactgactcgggatcatgtttcatggatgtgagacatgtgctgtctgattcaatactactgtggataatttacacaatgatgctatttttagtttgtttttctatctcttactagttaagtgaccaaaagctttgaacttgtgtatcaggttacattatcaggtaaccagcaaccaattcgcactgatatcactgatgcagcaatggagttaggttctgaagtgagtaaccttcacctttactttctcttgcacttgcttctacataggaatgatcaaagctatgttcagcttctcatgtttcttgttttcctttggcagaaactttcactgctggtcacagaagcatacaaagacgcacattcaaagagtgtactggtaaagacttcgcatactatattttacgatacaactataagtgttcattttctttcatctcttgcttatagaaccttttgaatttcacaggctatgaaagaaagaatgagtgatcttgcgcagagcttagggatgccaccaggccttgatggattaaagtaacaaaacttaattttttttgtgatttctttcaacttataggtatgagaagtccagttctttttgttgtatatcgatcaggcagagagaaatagagctctgttctactgaatcagagagagatatttgaacctttgtcttcttttgattatcaacaattactcaaatgctctcccaaatagttttgtagtttccaaattgtggaaatgaatcgagcttttaacagaaaaaaaa

SEQ ID NO: 143310 - DNA, 760 bp, Arabidopsis thaliana landsberg
aaaatgggtgtgtgattggttagctgatgatccattggttatgtttatagtttgtggaaccacgagttcttctgggagtcaatgaaaccaggcgcaggaggaaaaccatcaggagagcttcttgctttgcttgaaagagatttcacttcttatgagaagttctatgaagagttcaatgctgctgcagccactcagtttggagctggctgggcctggcttgcttgtaagtgtttcaaatgtttaagagctttagataaatatattaacttcttccttactcttatctcaatgctttcagattcaaatgaaaaactcaaagtagtgaaaactcccaatgctgtgaatccccttgtgctcggctctttcgtaagtttttcattaaggaacttgaatacacaatttacttgattaaatatcaccgtagagttaatgcaaatccttaacttttaatcttggttaattttcttgcagccattgcttaccattgatgtctgggaggtaaataaacacttttatagcttgtttgtcttaaaacctattttctttcttacaaattttattgataatttttgttttcttttgctacatgaacagcatgcttactaccttgacttccaggtaacagcttattcataattgttagcaacaaggttttcttgagtttctttgtgttgttgattgtttcaatctaaatgtatatgagcagaaccgaagaccagattacataaagacattcatgaccaatcttgtgtcttggaac

SEQ ID NO: 143311 - DNA, 1116 bp, Arabidopsis thaliana landsberg
caaccgtaatgcagcagccgagagaggttatggccaggaggggtcttgaccaatctacaatagaaacgttcaagaaaatggagttgggagaaagcagaaggctttcgggtactaatggtattgtgtgtcccatttgtttatcagagtatgcgagcaaagagaccgtacgtttcataccggaatgtgaccattgctaccatgtggaatgtattgatgtgtggctcaagattcatggttcatgtcctctttgtcggaactcatgtgcgtgaaggaaatgctattgaacgttttagataaatgctttttctggagtgatgatttatgttattgattagagattaatgatattattcactttaatcaaacagattcatagtttcatgcccacgatgaatttgttatgataattacagggacgagagatgcttaattgccacagattaattccttaattacttttgctaaagttgctaaattaatctccacaagtttatatgctaatcattcaaagtttcaatcgtaaacaaacattttcgtttcttttacaaaaaaataaaaatacaatgactgacattatttggttctcaaatacaatgattgagaagtttaattaaacagagattagcaaaagttaacaacctggaattgatcatcatcatcatcaatcatcttcaccttcatcaatcgtccatcgtagctgtttattagatctgctcggttcctccgtcgcagcattatccaccggtaaatctgatgccagatttgagagcgaagaagacgaagaaagcgattggagattagaagaagacgacgatgaggagaagagattcatagccatgatgttgccttcgctccaagaccttcggatcgggaacgagatgctctctgagcttccgtggcggcgacaagacggcggccgtcgctgattttgatttttcccagcgccacttgatttatcgtgaagagcacatccgcagtttttgtggtaaggacgccgttcgatggcggaatcaaggccggagatacaaccctcgaagatgctgcggaatattccgtcggcggccatcgtttggctaattctccgatttcgagatccggtggagaagaataaggatc

SEQ ID NO: 143312 - DNA, 3174 bp, Arabidopsis thaliana landsberg
  unsure (1)..(3174): unsure at all n locations
ctccgtctgatcaactcttcttctccacctctaggtttctaattttccgattaggataatggccgccgccatggttagttccgccggtgggttactggcaatgctcaacgaaccccatccttccttgaaacttcacgctctctcatatctcatcagattggttgaccaattttggcccgagatctccactagtgtcccaatcatgtattcaattctctcttctcttttttttaattgtttcccttcgtgaggctattctgtttgcttactgggagtaaagcttatgggatttggatgagttttagcactcttgatatttcttagttagggtattacattccaagtttttccactcttgtgtcgagttagatttgaatgcgttaattcacaagtgacaaactttattgaattgctttacttaattctgttgattctgaatagaaccattgttatctgggctaaggacgctcccttaccgtcatgatgcggaaaatttgttcttttgaaagttgtagagactctacttttgcttgagatcttaaactgtttttgtgctattctgagacctttttttgatttttttgtagagagagcttatacgaagatgaagagtttgatcagcatcaaagacagcttgctgccttgttggcctccaaggtacagtttatctttttatttaacttacatgatgactggttttatataaattgttagtggagatacgagtgccagttaaacggataccttaaaagctggtagattgctacagaagttcagagcttgaatttcctgtaatcaagttatgttattgtattataagacttgttttctaacgtttatgttaatcttgttttatctcaggttttctattacttgggtgagcttaacgattccttgtcctatgcccttggagctggatccttgtttgatgtgtcagaggattctgattatattcatactcttctatgtaaggattttgaagtttgctactttcttctcttctactttttttatccaattctgtgacagtagacactagctcggttatcattcttaataggcgtaaattcaaaatcattccaacctgattaaatggaagattaagaaaatagtttatacgatatattttctaactaataagacttgaacgtccatctttcttttaataagattgtgctgctagaaagttacgcaaagacatgataagatagtgatcttacagttactaactgtttaatgttgaatgttttactcatggatgcttctgttttccttatcagccaaagcaatagatgagtatgctattctcagatcaaaggcagtcgagtcaagtgaggtggtggaaattgacccgagattggtggccattgttgaacgaatgctagacaagtatgggatgcagaatttatttatttatgtctgtctacaagtttttcgtttttccttacatggttttctgttttatagatgtatcactgacggaaagtatcaacaagccatgggcattgctatagaatgctcgagattggataagttggaggaagcgatcataaagagtgagaatgtgcagggaacattatcttactgcatcaatgtttcccactcttttgttaatcaaagagaatatagacatgaggtgagtctggtggccacaaaactggattttaatagatgtattatgttaatgatactatgagctcatcttctttattcttttcttacaaatataatggttataattcattgcattctttatgtcaactcaaaacatttttgtaggggctgttaatttgtaaatgataacatccttacttcgttcttgcaggttcttcggttacttgttaatgtttaccagaagctggcttctcctgattatttgagcatttgccaatgccttatgttcttggatgaaccacaaggcgttgcaagcatattggagaagcttcttcgttcagagaacaaagatgatgctttattggctttccaaatctctttcgatcttgtacagaatgagcaccaggcattcctcatgagtgttagagatcgccttccagcgcccaagacccgtcctgtagaagcaattcaagctgttgaaacctctactgctcagaatgagaacactgcaggggatgttcagatggcggatgaaactccatctcagacaattgtgcatgaaacagatcctgttgacgctgtgtacgctgagaggttaacaaaggctaaggggattttatctggagagacatcaatacaactgacactccagtttctttacagccataacaagtgaggcagtttatttaccttttttgatatctcgaaggatatttcattcttaagtcgtttcttccacatagtaaaatttacagcaatggccattgtttctttgtagatcggacctgctgatcctgaagacaatcaaacaatctgttgagatgcggaacagtgtatgtcacagtgctacaatttatgctaatgctataatgcatgctggaacgacagttgacacttttctcagggagaatttggtaaaatttattttctctaccactttttaacttgtttcaacgtcaactatgtggcatattatttaatcttcttttcttttccattcatgtttgaattgtcaggattggctaagcagggccaccaattgggccaagtttagtgctacagcaggattaggtgttattcataggggtcacttgcaacagggtaggtcactgatggccccatacttgcctcagggaggagcaggtggtggtgggagtccttattccgaagggggtgctttatatgctcttggccttattcatgctaannnnnnnnnnnnnnnnnnnnnatttctacgtgatagcctacgcagcactaatgttgaggtgattaattaatatcttacttcaatatagtctctcatattccctggcagcctaattaatacttattggaaaaatatggatgcaggtcattcaacatggagcttgtttaggtcttggcttgtcagctctcgggacagctgatgaagagatatatgatgatgtcaaaagcgtgctttatactgaccagtgcagtgctggtgaagcttgctgcatcacatggctttatttattcttggaactgctnactgaaaggcaagtgagatgctcgcttatgctcatgagacacaacatgaga

SEQ ID NO: 143313 - DNA, 1280 bp, Arabidopsis thaliana landsberg
taacatggattctccgcaagaatcttattggtggatgtgtacaggtgctaatggtcttgctgcatcaagagattttcttgcaccaacagcatggtttgaggatggattgcggccctgaatacaccatttttcaaaaggtttgcgggtgaactctttactgctaaacaagatttctctccattcaatgtggttgcctggcatggcaattacgtgccttataaggtgagtacattgtttattgagcctaatcttgtaaaacgttaatgcattgtttttctgagaatttcaatttctgtctgcagtatgacctgaagaagttctgtccatacaacactgtgcttttagatcatggagatccatctataaatacaggttggtggtcatctgcgctaaatcgattcttctttttgttttgttatgggttggttacttgttctttattgtaatcacactctttgggtgaattattgtactctcagtccttacagcaccaactgataaacctggtgtggccttgcttgattttgtcatatttcctcctcgatggttggttgctgagcatacttttcgacctccttactatcatcgtaactgcatgagtgaatttatgggcttaatctacggtgcatacgaggtaagctgcttgaagttcctgcttctgcaaatcattagctggcttgtgttatcctcctactgaaatctgtaaactgactccaccattcacaggcgaaagctgatggatttctccctggcggtgcaagtcttcatagctgtatgacacctcatggtccagatactaccacgtacgaggtatcaatccatcttatgcacagcagcaactacacgtttgctttcattttcctccgagatcatgtctaaatctaacccctgaatgtaaaattaagtctgaagcatttttataattgttttgtaggcgacaattgctcgagtaaatgcaatggctccttctaaactcacaggtacgatggctttcatgttcgaatcagcattgatccctagagtctgtcattgggctctggagtctcctttcctggatcacgactactaccagtgttggattggcctcaagtctcatttctcgcgcataagcttggacaagacaaatgttgaatcaacagagaaagaaccaggagcttcggagtaaagaacacataattcacctgcaccactttcaatacccaagctgtacagacttttcaccatatacttgtataagaaagaagcatataacaagtacatatgtaataataagtaggtac

SEQ ID NO: 143314 - DNA, 4130 bp, Arabidopsis thaliana landsberg
gcagtaccatctttaccagtatcatagtcttccttgatgtcttcagcgtgacacgattgcagctatgacacatatatataaatgatccatgagcactcaggagaatctcaaaaaaaaaatatcacagccagaaagaatctgtcacctgattgtaaagaacacctaaaagatcaaatgtgacctcaactcccatttgaacctgggagaagaaacaaacaggagtaatgaagttgaacaacaaaagagacaataaagaaaaagacattttctttggacttgaccagacaagaaggagcagttttcaagcaatcagatgtaacaccaccatatgctctaacaagacctccagttccaagtttgattcccccaaaatacctatcatcatcatcatcctatgaggagattgtattctcaaaacttgtaaagattcaatatttaagtttcaagactgaagaaagctaacctaatgacaacaaccataactctgtctaatccagaagagagaatagcagactgaatcggcttccctgctgtgccagatggctcaccatcatcgctacatcgatggtgatgatcaccgatcttataagcccagcaattgtgagaagcgcgaggatcacggacctgagagaggaacatttgagctgattgctcggaggagattggtccagcgattgcgatgaacttgctcttctttatctctttctccacggatacggtttcttttagtgtcgtgaatgaacccgaattcgaagccatcgacctcttgcctgatgcagccactaacaccggtattctgcggccgccgacggtggttactgctgctgctaccggtacgcccacccacatctgattgttgcctttttgccgtctagctagctatattataatcttctcaatttaattgctaaactagattagaaaacatttgatagtaacatttgaaattaaaattgatttttaggttcggtatacattggtattgaaattagaattgatttgcggtttggtttatactggtttagagaagaaaacaaacaaattttcacgcgatgagaattttggagactagtgcgtagattgaaaaaggcatgatttggaaaggggtacacccacagaattgctctcacgcgctcaacgctcactttgtgcgagtgggtgtgaaatagagcattctgattggcttagaaactctaaaaaaagtgaaatagtatacatgttgctagcttctgctgttattatctagtttctgaaagttgttttttttttttagttacgattgattctagataatatctgatggtagtgataattttagataactataaagttcacatttagtggtggttggtgatttttgatgacttgaagctctctgcagaaacgcacttggacatggaaatgttacatctgaaccccatatagtgcttctgctccaatgtcatcttcaactcttctcctaccttcaagtatgtagtggattaaaaacatcggttgttcagcattttagacccccaaagtcgtcaaaaatgtctcacccttccagttctatccatgaggttattacaatatatgattgcaagttttatgtttttaaaaccatgactgccattattccattcatgtttctgttttcttgtacagatgagcttctcgtatgagttgttgtttgtgaaactttattgtcacccatttggccttgtgaacttagggaacatatttaagctgcacaccaaaatcatttcactgctcttattgaaactatgtgcaatcttatcttgatagttggattttcaggtagaaagaagagttggccttttgcttgtgagtttgaacacttaaaactttttaaaggctacattgacgaggatgaagaaatgcacaaatttggacacaaaggaggtaaggcctgaagcttatttaagccttttttggacaataatgagaaatttaactgagtataagattttgtgagccatcattggttcgcctcactttcatctaaagcgctgcttacttaagagtttctattcatttgcctagctaaagttgaacaaaagttctggtggctcgcgaggaagaagtacaacttctgaagaatctttcacatccgaacattgttgtgagttggcgaatccattcagctatttttcatatgtttaatgtctgttccacatgcattcttcttattatctttgtttttgcagagatacttgggtactgtaagagagagtgattcgttgaatattatgatgcagtttgttcctggtggatcaatttcatctttgttggcgaagtttggatcttttcctgagccagtaagttctgactgtacctgaactttgctaaatcttgtatttgagcttcgctggcgatgaatgttgtgtctttaacttttttaaataggtgattattatgtacacaaagcaacttctgcttggtctggaatatcttcacaacaatgggatcatgcatcgagatattaaggtactttcctctttccaacatgtgatatgcttgtggtttctcaaaattccgctataactcttgtcatattctcctagggggcaaatattttggtcgataacaaaggttgcatcagactcgcagattttggtgcttccaagaaagttgtagagctagtatgattgcgcttctctttctctttaatcatatttcaatatgttgcctctctcttcagtactctaaaactttgtgaactttatgcttctaggctactgtaaatggtgccaaatctatgaaggggacgccttattggatggctcctgaagtcattctccagactggtcatagcttgtaagtatttcaagaataccctaccagttatgttcttctccccatctccttagtttttgtaagataatagattatacatgctctgagtagtgggaatgggttctcatctatttttccatgtgtattgcaactttcattctgaccttcttctttaatctgaagctctgctgatatatggagtgttgggtgcactgtgattgagatggctacggggaagcctccctggagcgagcagtatcagcaggtaaagagtcactgggtgaaggacactttccagtattgttgatgcatatgacgctgtcttttattttagaaacctaagaagacctaaaaagtttttctttcagtttgctgctgtccttcatattggtagaacaaaagctcatcctccaattccagaagacctctcaccagaggctaaagactttctaatgaaatgcttacacaagtaagtcataagttttttccccagttcgtttttgtctttatctagatagctcctgtaaagatcaatgtccaccattctatttcaagagagcatctatatctgttgttctattaataagagaaattatcttttcagagaaccaagcttgagactctctgcaaccgaattgcttcaggtgttgtgaataacatatcttctccatttcacaattgtgaaaatgttctttactctcaatgcacaatactaagttattattgttgctcatagtgctgacagcttcttaacatttgcagcacccgtttgtcactggaaagcgccaggaatcttatccagcttaccgtaattctcttacggttagtacattatgcagtaaacttttttctggttcttcaaccttctgacctcctttctaatatatcaggaatgtggaaacccaataactactcaaggaatgaatgttcggagttcgtaagtttttttcttgcagctctagtttcaatcttctcactatccatgattttgatcccttgattcttattttacttcctctgttgttccagaataaattcgttgatcaggaggtcgacatgttcaggcttgaaggatgtctgtgaactgggaagcttgaggagttccattatatacccacagaagtcaaataactcaggatttggttggcgagatggagactctgatgacctttgtcagaccgatatggatgatctctgcaacattgaatcagtcagaaacaatgttttgtcacagtccaccgatttaaacaaggtgataagccccccctccagattttaaaacatgtccgttaataacagtacttatactgacagtggaaaggaacttttccctt

SEQ ID NO: 143315 - DNA, 1635 bp, Arabidopsis thaliana landsberg
atgttgcagtttcattgtttcattctcgaacaatgcaccagacccggaaaaagattgtgctatggttcaggagttcttttctaagatggaggctgctttcagggctcatccactttggtctggttgttctgaggaggaattggatagtgctggagatgtgagtatcagtattcttctttttctgtctgtgaattgttttcatctttgtaccataatcattgctcgtttgtatccacagggcctggagaagtatgttatgacaaagctatttactcgggtgtttgcttcaaacactgaggaggttatagctgatgagaagctatttcagaagatgtcattggttcaacaattcatttctcccgagaatttggatatacaaccaacttttcaaaatgaatcgtcatggctggtaagccgatctagtcaaaagctagctcccggtagtgtttcctctttttgttagtgttcttacttgtgatcctttctctccttttggcagctagctcaaaaagagctccagaagataaacatgtacaaagctcctcgtgataagcttgtgtgtatccttaactgttgcaaagtgattaataacttactgctaaatgcttcaattgcttcaaacgagaatgcacctggagcagacgaatttcttcctgttttgatatatgtaacaataaaggtattgggaacgattgaacaacttatgcatactggtatctgaagtcgtatttttgttgtacatgattatgtttcgaatgtgcaagaacatctactagtgctaattctgttctttctttttgcaggctaaccctccacaacttcactcaaacttgttgtatatacaaaggtataggcgtgaatctaaatttgttggtgaagctgcgtacttcttcacaaacatactctctgcagagtctttcatctcaaatattgatgcaaaatctatttcactggatgaagctgagtttgaaaagaacatggaatctgcacgggcacgaatttctggtttggacagccagacttatcaaactggtcatggctctgccccaccccctcgtgatgagtcctctcttcagaaaactcaaagtctgaatcccaagagggaaaacactcttttccaatcaaaatcgtctgatagtctttctgggaccaacgaattactgaatataaacagtgaaacaccaatgaagaaagctgaatccatttcagatttggaaaataagggtgcgacgcttctgaaggataccgagccaagcaaagtctttcaagaatatccttacatatttgccagtgctggtgatttgaggataggagatgttgaaggcttgttaaatagttataaacagctcgttttcaaatatgtgtgccttaccaaaggattgggtgatggaacatctttagctccatccagttcacccttgcaagcgtcgtccggttttaatacgtctaaggaatctgaggatcatagaagatcgtcttcagatgtacaaatgacaaaggaaactgacaggagtgttgatgatttgatccgagctctacatggtgaaggggaagatgttaacaatctgtcagatgtaaaacatgaagaatatggcgcaatgttggtagagggaaaggatgaggaacgtgattcca

SEQ ID NO: 143316 - DNA, 1070 bp, Arabidopsis thaliana landsberg
gagaagcaatgtgtaacgcagaggtggatgatgacgtcctcggatatgacccaacggctagacgtcttgaagaggagatggctaagatgatggggaaagaggctgctctgttcgtgccatccgggacaatggggaatctgatcagcgtgatggttctctgcgacgtgagaggcagcgaggtgattcttggcgacaattgtcacatccatgtttacgagaatggagggatatcgactatcgggggagtgcatcctaaggcagtcaagaatgaagaagacgggaccatggacttggaggccattgaagcagctattagagatcctaaaggaagcacgttttatccatcaacaaggttgatttgcttggagaacacacatgccaagtaagtacgatgaattattaaatatttgactgttaaagcagagcctcgttcgaatactatgcttatatgtgtcaataaacggccatgcacctgataatgcagctctggtgggagatgtttgagcgtggaatacactgagaaagttggagagattgcgaagagacatggcgtgaagctccatatcgacggagcccgtcttttcaatgcttccattgtaatatcaatcacctaactgttttccattcttaatccataagactcataaataaaagacttgagatatctttttgtaggcacttggagttccagtccataagcttgttaaggctgcggactccgttcaggtaccattttctctctttctcgtctataacatctgaaaattatagctaaaagataagagtcattcacacacactctggtttcaggtgtgtctctctaaaggtcttggagctccggtaggatctgtaatcgttggttcgcaaagcttcatagagaaggcgaaaacggttaggaaaacattaggtggaggaatgagacaaataggtgttctgtgcgcagccgctttggtcgcactccaagaaaacctcccaaagctacaacatgaccacaagaaggctaagttgttagctggtacgttacgttggcaccactcatttactcactacaataattagcctgaagcaca

SEQ ID NO: 143317 - DNA, 815 bp, Arabidopsis thaliana landsberg
agcttcaaagatttcgttctcgattactagctcgacgtgacagttaccgtataaggagattctctttgaaactacgttctttggaatttgattcagctaagtaccatcttgtcaacgaatgtctacgcaatgtgttgaatcgaggtgttttggatcttgaattggacatcaatgtcaatgaagtttacaaattgccatttgaggtcttcacttgcaagaaagttgtgaaattgaaactaggttctgattttgttattgacaatatccctaagaacgctttgcttccagctcttaagactctctttcttgataaagttcggttcattgataaaagtggtggttgtgcgtttacaaggcttgtttctgcttgccctgtgctagaggatttagtgatatataggaacaaccgtgaagattgggaatggtctcgcattgtgtctagtaagatccttaagaaacttactattcggcgtgaagactgggaagatcttgatggctctagttatgagtcaattagttttgatactccgagtcttgaatacttcgaatactttgatgttctccgagatgggtatccagttgttgatctcaagtcccttgttgaagctaagctagaacttcctctttttatggttggcgatacctacgatgttaagaatctgattaagggcttagaaaatgttcagattctgagcttaagcgttgttgacacgatgcaggtaagtgatcgctattggttctctttaatatgttactggagcttaacaactagtagagcatgaggaaatttaaatctaggaaccattgagatacta

SEQ ID NO: 143318 - DNA, 3892 bp, Arabidopsis thaliana landsberg
atgatactcgaaagtggtttctttcatgcggatccacatcctggttatatcttgatttgcaaaggtcaagaggcaagtggtattttgcttgtagtcattatttggtagtttcttaattcgcttagtgttaccttctggcagaacttgcccgtctatatagtctgagttgtaatcttgtttcccgtcattaggttgcattgctggactatggtcaagtgaaggaactacccaacaagttgagacttggttatgcaaatttggtcattgccatggctgataacaatgcttcacgagtatcacagagcttttggtaactcaaaactcattaaatctccatgcactactgaagtaactttgtgatctaaattgttcgtttttgttcatatcatctgttttgtggctcaaaagcatttttgtcattagcaaatctttttcttttgagaaagatattccaataagaaccagtccataaaaggtgaaaccatttgttaccacaaaagttattttgtgagcgaggatttcattttgtttaggctatgaagattaagtacttgatcattatgttcaaaaaacggctttgccacttttaaattgaatagtttagtatgtgagaactgttttgaggcaagtatgtggtggattattatgattgaaagtgataagaaaacgtttttttttgtccaatattggaatattcactgtcaacagtttggattactgcagcactaaattccttaagttattgtggctgtgaatgttcagggaaatgggtttacatacagtggccaagtgtgagaatgagcagcaagaacttctgcggttagcacaaacactttttgatacaaagatgcctactggtcagacagttttgcaacctttctcagatgactcttcgattaaaaagatagccgttgaggtaagtaaagctccattgatggtcacaaagtaaaaaaaagttgtgtgttctacaggtaataatatataccaaactaacttgaatgtgttctttgtcggtagacatttccagaggaactgttctctgtacttcgcactgtggttctgttaagaggactcagtgttgggatgggagttaattattcgtgtgcagaacaatggagagcaatggccgaagaggctttacttgcatctggaagagtgacaagaggtaagtggttatatcgtatagtactcactacactttttgcataaaaaacaagtgctgatggagttggtaacataacacctgagttttacagatggcaaagaaagatctcgtagacgggcttctctacgaaggctacgcacaggaagttaggaaaaagataggagtatttctcatcacttagactctcccatgagcaggatctgagattttttcatttattgttctttcttttgtgagaatttgaatgataggagaagttggataacacttgaatgtaattggctgatataaaattatgatggaagatttgtaaatcaagatttaattcccaaaagataggattatatgttttggtactccttctccacaatagttggagaggactattatctccaacagctataagccatcttggctattacgtcggcacatatatatgccattacgattcatggagtcattctcaaagatgactgcctcaaaacccaagttatcactgcacatcattgtctaacacaaaaggctggtgcttcagcatcttaaggagactgaatcttcatatagattttggttccacaccattttatgtcttttctgttgcatcaaaaaaaaaattgaagcgttgacaaaaaaaaagttaaacagattaaaacgatgtcgtttaaaggatttcattaacacaaaatctgcgttcaacgagttcgctattttcccgtaattttggtctgaggttttggtgactatggcgactgcggtagtgatgaacggctagctgaaaaagcaacctcggccatgtaaatgcggctatcaaggccgtggattaactgaagaagaagctcgagttcgcgccatatctgagattgttagcaccatgattgagcgttcacacctgaactagaatgttgacctaaacgcaattaaaaccgccgcttgccggaatacggcctagcacgtgcgcctaagctcgtggagatgattgctgcgcttcctgattcagagagagagactcttctcccgaagctccgtgccaaaccggttcgaacagcttcagggatcgccgttgtggcggttatgtcgaagcctcataggtgcccgcatatagctacgacggggaatatatgcgtttattgtcccggtggacctgactctgactttgagtatagtactcagtcttacactggatatgagcctaccagcatgcgagctattcgagccaggtgaagagtgtcttctgtgttatggaattgaaacttgtattacagcttctggattgatctagtaaagggtttggggtttaggtagttttgggtgaaatttgtgatttctgacccaatctaccaccggagtttgaacttagtttcagttgctgacaataggtggtagatagttttggggactatgttgtgtggatagcttcatgaaagcttcaattgagaactttgcttagggtcatagttagtttgtttgtgctttgatatttaggactcaaaatgattgctagaattcaaacattgtagattacaagaaatgtttatgaaatgagaaaaagatctagattatagatgagaatgtagacttgcttgataacacagctgctaaaaaatccataaggaaaatgctataagctggaaagtttattcttctttatgagtgaattaaaaagacatagaattcttagattgaaattatggactcagtttgctgttcatgtgatgagaaggatgcacgtttcatgtttaaattgattttgctaaagccctgtttatggtcttaggtacaatccatatgttcaggcaagaagcaggatagatcagctgaagaggttgggtcacagtgtagataaggttagagtttgatatttctagtaacctgtgagtattattttcgttctttttaccagtctcttagcctagaggattactcctgattatatgaatgacaggttgagttcattttgatgggaggtactttcatgtcactgcctgctgagtatcgggatttcttcatacggaatcttcataatgctttatcaggacacacttaagccaacgttgaagaggcagttgcttactctgcacatagtgcaactaaatgcattgggatgacaattgaaacgtgagttcgatgcagtaatcatgcacaacatctaaatttgaaatctgtcttttttgcctcaatgttttctctaaaagccttcatagtatctatatattgatttcattgtattctttgtggcactttgtggaaatggtcaagctgagtgaaattgtgaaaatatatataaaaatctaacaccaattgtttgtgtgaatcagtccttgttattttcattgatcattcattatggagtctagtctctaatctctgaagattcaaatatcagaatacattctctaatctgttttaaaaattcaccaggaggccagattactgccttggacctcatttacgacaaatgctgatttacggttgcacccggctagagataggtgtccagagcacatatgaagatgttgcccgtgacacaaatagaggtcatactgttgctgctgtagctgactgcttctgcttggctaaagatgctggtttcaaggtattcccttatagattagtcttttataaatatttttagttttctcatgttagtatcaagtttatcccggcagctttcgcctcctaagtttctgttcataaatatccttgaaaccaatgaacatttcttggttt

SEQ ID NO: 143319 - DNA, 3000 bp, Arabidopsis thaliana landsberg
aagtaagaaaagatgtgatcttctgtgatttagctactcgtacacacaaataaacacaaatttaacatcatccgagtgtagagaaatcaaaacccttcaaattgagtagtttctctgcgcacaaaggttttcagatgcagctacgaggtaaccccagctgtgtattcatccaacaggcttttgatcccactggacttcagttcctacaaaagaagaaccgaaaagaaagctatatgatgcatacattgaagactaacgaaagcttctggagtttgacttgctgccagaaactcacagacaatactcctgccaaagctgcagaaggctgattagctggttttgcaacacgaatagctacaacaccgttcattctttccttctcttcagaataaaagtttcggtaaacttgaacacctgcagatagaacatcatttcaggttagaacaaagtccacatagcaaaagagacgctttccaaacgttctatgttatggtaaagatcttcaaaccttcttctatactttcaactccaggaagaactttggcaagaccctccactttcagcatttctgagaatgaagtataacggtgaacgtcctgccctcatcaaaatggttagtaacaagaggtatagtgtttgcctcacaaggaagaattgacagagatacaagattgatgactacctgaacttcaagcagcaagcatttattgaacaaaagaaaagctcctgaactaattctgtgagtaaaccaattttgaagtcaataagacaatctaaagctattggaatcagcaaaacagaaaacccggaaaagcaagcacaagagatgaatgtgaattaacatttgcacaaagataaaaacatcagacctcatgtagtctcccactgcgcatcttccttcaacagttttcaaaccatctgacaaattgagaggcacccggaaataaaagtgagattgagcaaatataattgtaatactacaatcaagtaaccagaaaatgtacctttcaattgggtgaagtaaggctcttggacatgaagctcaaagttcacctccttcaacatctgaaacaaagaaccttttctgtgtaaaaattccaaaaactaacttttcccactctgttttgatgcaataatagttgagaactaaagttttcatatagacttacatttattaagtcatatcccaagccatgaatcagtttgatgtatttttccaagttagaatttttatcaccctcggaagctagacattcagtcaaaaccgttgctaaaagcttgtacaccgcagatttttctgttaattgaaacatttatgagaaaatttcagttatttctctccagcattcaagtttcataatttgcttcctaattagcaaaacgtacctgttgaatctgtagcttccccaaggagatgaagacaaaaatctctggtcaggtcaagatcgaaacttggaacagattcgtttaaatgagatctcagactaaaacggagaagtgattccatgcattctcggagatccaccgacttcgttcccggcgacattggttgctccattttcgtcaaaaacgccaacgttaagcctcttaattaagaaatattcgtgtaaaacaccctcaagtttgtagatattacaagatgttctaacccaatctgaaattggacagtaacaccttgatgtcgttttaaaacggaagatcagagatcagacgttgtcgtttgaagacggaagatcagagcgataagtcaggtatctagaaggtgacacgtgaggagcacgtgaagcttgcgtgtagacagtcacagtcacagatggcatattctcagaaatcctcattgttgactaatgtacctctgataagtcccacttaccattttctcctgaactctgtagaaagatccgaattgaatatttcggacccgaaacctgacccgctttgatgggctggattccgtgtccgtgctggggaaccaacgacgatgaaaacgccggcgaggtggcggatcgtgatccggtgcttctagtatctggaattggaggctctattctgcattctaagaagaagaattcaaagtctgaaattcgggtttgggtccgaatatttctagctaaccttgcctttaagcagagcctctggtctctctataatcccaaaactggtaaattttgaacctttcttgatatttatagaaatgtttatttgagcttgataatagagaggatttcggaatttagattactgttgaagtcatggacttttagaaaagtgagttatgaagcagatcttgaacttgaatgttattttgttggcaggttatacagagccgttggatgataatattgaagtattggtccctgatgatgaccatggactctatgcaattgacattctagatccctcttgggtatatttccttaaagtagctagatattactttgtgcattggctacttgtatgcagttgttaagtttaggagtgaggataagtaagatggaaattgtatctgcaaccatttttgtatcataaagaaggttgctaatgaggatatttccagtcttggagatttagtatctgttctttcaaagctttctaggggtgctcgtgttccattggaatatatgtctcacactgatcgtcatcgcaagaaggtgatatttcttgtttaaacaatctttttgcttaacttcctaacccactgtaagcatatacttgtcaaaatttgatgctagcatttatatatgatattttcttaggctactccatatcagcatcttcattcttgcaaacagtttgttgattctgtgataatattacctctctactcggtgttcctagtgtgtgaaattttgtgctactcagtgctgctagatctctgtgatcactttttcggaaaaccgttatctttaagactataattttcacaactgtggatctttttgcgttagcaacgttcctgttattaacatgcttgcttgtccacgttgttcctaactccat

SEQ ID NO: 143320 - DNA, 1615 bp, Arabidopsis thaliana landsberg; identical to SEQ ID NO: 30596

SEQ ID NO: 143321 - DNA, 856 bp, Arabidopsis thaliana landsberg
tagtcacttaattctcagtcacacactttccttctctactctctgtttctttcttccatggagctcttctcactctcttctcttctcctactctccactctcttcgttttctacatcttcaagtttgttttcaaaagaagaaaccagagaaactgctacatgcttcactacgagtgctacaagggcatggaagagagaaaactcgacaccgagacttgtgctaaggtcgttcaacgaaacaagaacttgggtcttgaagagtacaggtttctccttcgtactatggctagttccgggataggagaggaaacgtacggcccaagaaatgtgcttgaaggtagagaagactctcctactctccttgacgctcactccgaaatggacgagatcatgttcgacactctcgacaagcttttccacaagacaaaaggctcaatctctccttcagacattgatattctcgttgtcaacgtctcactcttcgctccatctccttccctaacctcacgagtcatcaacagatacaagatgagagcagacatcaaatcctacaatctctcgggactagggtgtagcgcgagcgttatatcgatagatatcgtgcaaaggatattcgaaactcgtgaaaacgtctcgcactcgtggttagcaccgagacaatgggtcctcactggtactgcggtaaagataggtcaatgatgctctcaaactgtctacttccgtgccggaaggaagctctgttctgttaaccaacgcagctaggttcaagaaccaggctttgatgaagctcgttacagtggtccgggctcatgttggctcagacgacgaggcctactcgtgctgcatacaaatggag

SEQ ID NO: 143322 - DNA, 720 bp, Arabidopsis thaliana landsberg
ggctctctcgtctgtcctttgctctttaattgaatgttattaagacttagaaggaacaattgatatggagttgaggatttcaggttgtctctgttgggtctgaggttgggaaagtggaacctggcaagaaggtatgtttcatcttttaactaaaaacacgatgaagtaactgtataatctccttcttcattcatttgttcatgctcttgtatcttttgcaggttttgttctctgatatgagcgcctatgaggtttgtatttgatgattatgatggaacattgagaccatacttgatgactttgatcatacttgtgaaactgagacatctcttttgatttcttcaggttgattttggaacagaagatgctaagcattgcttttgcaaagaaagcgacttgttagctatcgtccagtgaaaagtagcatcgaagttgtgcattcaatgatatcatctaccaaagagtttctggttttcttgtaatttcagtgacagcagcatatgttctgttgtttgagtttcatgaaagagctcaaagtggagattgatcggaaaccgaaattgttaaagtcaacaatgttctctcaaacagaaatcgttttatttgcaaatttctcataagccttatgttcatagcttagctggtgaacaagaccgatcccattcaattttttcaaggatttgatctttacttgatttcttaaaaacgaattattttacc

SEQ ID NO: 143323 - DNA, 1383 bp, Arabidopsis thaliana landsberg
tagtaaattgaatgagataagatcagcccggagctttttagatgagtctccggaagaaagcttgccatcttggaatgcaatgatctcaggttacacccaaaacgggttgacagagaacgcgatatctctcttcagagaaatgcagaagtctgaattcagtccaaaccctgtcacaataacttgtattctatcagcttgtgcgcagttaggagctttaagtttggggaaatgggttcatgatttagtaaggagcacagattttgagtctagcatatatgtgtctactgctttgattggtatgtatgcaaagtgtggaagcattgcagaagcacgccgattgtttgacttgatgacaaagaagaatgaagttacatggaacacgatgatttctggttatggacttcatggacaaggacaagaagctctgaatattttctatgagatgttgaattccggtattacaccaacaccagtcactttcctctgcgttctttacgcttgtagtcatgctggcttggtcaaagaaggtgatgaaattttcaattccatgatccaccggtatggttttgaaccatcagtcaagcattacgcctgtatggttgatattcttggccgagcaggacacttacagagagcattgcagtttatagaggcaatgtcgattgagcctggttcttctgtgtgggaaacattgctaggagcttgtaggattcacaaagacacaaaccttgcccgaacagtctatgagaagctctttgagctagatccagacaatgtaggataccatgttttgctgtcgaatattcactcagctgatagaaactatccacaggctgctacggttagacaaactgcaaagaagaggaaactagccaaagctcctggatataccttaatagaaataggtgaaacgcctcatgtctttacctcaggtgatcagtcacatccacaggtaaaggaaatctatgagaagctggagaagcttgaagggaagatgagggaagctgggtaccaacccgagactgagttggccctgcatgatgtggaggaggaagaaagggagctgatggtgaaggttcacagcgagaggctagccattgcctttggactcatagctactgagccaggaactgaaatccggatcataaagaatcttcgagtctgtttagactgtcacaccgtaaccaaactcatctcaaagatcacagagagagtgattgttgtaagagatgccaaccgcttccatcacttcaaagacggtgtctgttcatgtggagattattggtagtgactcgtttttggcctcaacacaagtcatagtgtactcatcctgtaacattacctcactcataattgatttcttttttgacaataactcttgat

SEQ ID NO: 143324 - DNA, 2937 bp, Arabidopsis thaliana landsberg
ggcctgaggaatgacgtgaacagagtgatgctgtattttctgggatgctacggaggtgtgactggcctccgtgtggccaaagacattgctgagaacaaccccggaagccgtgttctgctcacaacctctgaaaccaccattctcggatttcggccaccaaacaaagcgcgtccgtacgacctagttggagctgctctgtttggagatggtgcagctgctgtgatcatcggagctgacccgagagagtgtgaagctcctttcatggagctgcactatgcggttcagcagttcttgccggggacacagaacgtgatcgaggggaggttgactgaggaaggcataaacttcaagcttggacgagacctcccgcagaagatagaggagaacatagaagagttctgcaagaagctgatgggaaaggctggcgatgagtcgatggagttcaatgacatgttctgggctgttcatccaggaggacctgcgattctgaaccgtctggagacaaaactgaagctggagaaagagaagctggagagcagcagaagggcgttggtggattacgggaacgtgagcagcaacacgatactgtatgtgatggagtatatgagagatgagctgaagaagaaaggtgacgcagcacaagagtggggacttggcttagctttcggacctggaatcaccttcgaaggccttctcatccgcagcctcacctcttcctaattgttataatttacatttgggttataaacatattgtaagcatgaaatgagagtattatttgttaaacaacatctatatagaatagatgcatgtgactaggaatgttggaaaaagtcaaaagttgcaccacgtgtcgttaaagcaagtgcttagctacttggaaccacatgaacaagaagacaccaaacccgttacttccactaaaaacaagggctttcttctttttaattcacaccaaaacactttgaacacacacatgcatggagccatgaactcaccatgcattgatttcgtaatgttcagtcgtggacaacacgatgaggacaacatgtcacgtcgtcctccgtggaagagggagagatcgatgtccactcagcatcatcatcttaacttgtctccaaacgaagacgaagagcttgccaactgtcttgtcttgttgtccaattcaggggatgcgcatggtggtgatcagcataaacaacatggacatggtaagggcaaaaccgtcaaaaagcaaaaaaccgcccaggttttccaatgcaaagcttgcaagaaggtgttcacgtcgcatcaggcattgggtggacacagggcaagccacaagaaagtgaagggttgttttgcctctcaagataaagaagaggaagaggaagaggaatacaaagaagacgacgacgacaacgacgaggacgaagatgaggaggaggatgaggaagacaaatcaacggctcatatcgcaagaaagagatccaacgctcacgaatgcaccatctgccatcgcgtcttctcttcgggacaggccttaggaggccacaagcgatgccattggctaacaccttccaattatcttcgtatgacgtcgctccacgatcatcatcattccgtcggcagaccgcagccgttagatcaaccatctctcgatctcaacttagcttgccaagaatattccgtcgatccaacggccatgagcgtagggatgatcgagagagatggtggtggcaataatcacaacgctacttcatcttcgtggttaaaactcgcaagtggtgattggtcttgacgactgactaatttaattaagttgctaattatattcttttaactttcattcgtttatattctttacatatatacaattaagtgcatgagtttatatatagagtttatggatttatatgaattacacttggcgtcttctgcagatttagagagccataaggagttctagtccaatatatacaaagatataagtaagaaattaagtttcacaactagttaatatacaagatagataattgtatcattttttattattatatacgttgagaataaagtaagataaccaagggctccttgctcatataagcgcaaatgttttaatttcatgtttgtaatcttacagagtgatataatttacttgttaagccatcaagaaggagatataattttgaagttttccagaaaagaaattgtaaattcgaaattaagaaatcacaaagaagaaaaatatcaaataaataaacgaatatcacgtatcaaataactctcgtgatatgcccatatatattttaatcatgttaataatcaaaaggctcttactacactgaaaacacatgaacatgagtcaacgcctcaacggaattgataattttggtggttcttaattaagcaccgattgcaaggaaagggtcatttctctcaatacgattacaagaaaagagtcatttttatctcgcatttattttattactgagtggttgccattacaagttgtgaacttttgactttaggaggcgaccaaccatcagctgaaaactaggattagcggggggaatttgattaatgtcaactgatatcctccaatttctctttgagaaaagctcaagcaaagtatatgactctttgggccactcaaaagatctttaatcaattaacttgaggacatgtactttaacaacaattgacacatatagacacgtacaagagttgcacgctattgatacaaggaaattttggtctagtatgaggtaataacgtctcaacgagataaggttaaaattatttagacatgcttgggaaaatatttttgttagtagaaatttgtagagtaatgaaatttagattcttatattgaaatttcatccaaataaatgacaagaggtgagtcaacaccaaaagggcgtgtgagtatgagagtcaaagatagcactaactata

SEQ ID NO: 143325 - DNA, 788 bp, Arabidopsis thaliana landsberg
ggttcattatttattatagtttccgtacgaaataaacttcctaaaaaaacctagtttccttgtgcttcttcttcatggatcatcaacaaagctccgattcacctatgcatgaacccacaatttctacttcttcttcatggagtttcggcaatctaatcaaaaccctatcgacaaaatccgaatctgtaatcggatcctaccgtcgcgatttggtcgaattcggatccgaattgaagaaagaaacctcaataatccgacgagtagcttcaagattacctgattctctcgaaattggcgcctccgtcgcttcggaatctctcgaatcggtaggtcaagttatcgacgatatcggcgccaccgtgtggaaatcaacggctaagattatttctcgtggtaaggaatctttaaaaccgaatcgtgaccgtacaaatcaggttttgtcgttgaaaccttatagtcgttttgagatgatgttacttgcgttacaatctgataaaggcacgtttgttagagaacctgatgatttaagtgattttgagaattggagtttagggtttaagttagaggagaaaaggaatgagattgttgagttgattaatgggaacaaaggtgttaaagagatctatgaggagattgttcctgttgaagttgatgctgagactttttggagaaggtattattataaagtttataagcttgagcaagtagaagaagctagggttaagcttgtgaagagagctatttctggtgaagaagatgaggatttaagctgggatcttgatgatgag

SEQ ID NO: 143326 - DNA, 578 bp, Arabidopsis thaliana landsberg
  unsure (1)..(578): unsure at all n locations
ccagctggatgagctcatgtcaactggatcagctggtgctaagaaactagaagcaaaaggtggtaacgtgggaaatccatgggacgatggtcctcatgaaggtgtgaggaaagtgtatataggtcagggtgattctggtgtatcatacgtcaagtttgtctacgacaaggactctaaggaggtccccggaaatgatcatgggaaaagaacactacttgcacctgaagaggtcaaatatgtatacacatagaagaaccagcatataacctcatttctaaattattgtttcatattagatttttttttttttttttttttttttgcagttccttcttgaatatccaaacgaatatataacatcggtggagcttaactatgacaaaatatttggaactgaaggtgaaatcataacgatgcttaggttcacaacgaacaagcgaacctctccaccttttggacttgaaggtgccaaaagcgtcctactcaaagaagacggccacaagatnnnnnnnnnnnnnnnnnnnnnnnnnnnnnnnnnaattcaccaagttggagtccatgtcaagcctatttccaag

SEQ ID NO: 143327 - DNA, 894 bp, Arabidopsis thaliana landsberg; identical to SEQ ID NO: 31927

SEQ ID NO: 143328 - DNA, 845 bp, Arabidopsis thaliana landsberg
agtctcctgcacgactgatgtctctggaaaactctccaagtgagtattccatttcacttaccacttggaatcgctcagtttgtttcttattcagcaaatatatttatgtatttctttgctggatcacaggattggatagacgaaatgacgggattcattaagtcaatcgatgacaagcatctcctcacagtaggtctggaaggcttctatggtcctaatagcccgaaagggctcacagttaatccagaacagtgggcatcccagctcggaacagactttgttcaaaactctaactcctcaaacatagattttgcatccgttcatatctaccctgatcactggtaagtgagctggatcagagaatcaagatataattgcattgagctcttcaagtgcaggtttctcacttgttttattctgctacaaatgtatatatgggcaggtttcataatcagacatttgaagagaagctaaagtttgtggtgaaatggatgcaatctcacatagaagatggattgaaagaactaaaaaagccagttctcttcacagagtttggcctatcaaaccagaacaaggactacgaaccatcgcagcgagataagttctacagaatcatcttcgatgtggtttacaaatcagccaaaagaaagaaggcaggtgcaggcacattggtgtggcagctattcatggaaggaatggaaacattcaacgatgactttgggattgttccacatgaacaagattccatttacaaattgatgatagaacaatcttgcagattgggtaaagtcacaggacgtcttaaggaacaaaagttgaaagaactttgttctcacagacattga

SEQ ID NO: 143329 - DNA, 831 bp, Arabidopsis thaliana landsberg
aaattttactgtgggggaagactagtgtttggtccagatgcatcgtcacttcttttgaccacatgtatgataggagggccagctatcgctttctccatcaggatggcttatttgataagccatcgtcaccctttctttcattctcttactttgattggtgcaattcttctcacattcatggtataactataaagctttgctatttacttactttcataagccaagtcataccttaagccaaattcatgcatcttcttacgtcttactttttatctaggctttcacttttctcttcttgacatcatcgagagaccccgggattatcccaaggaacaaacaagtgtctgaggcagagattcctgatgttaccacccaatcgacagaatgggtgactagcaaattaggaagtgtgaaactacctcgaacaaaagatgtaatggtgaatggcttcactgtcaaagtgaagttttgcgatacctgtcagctatatcgtcctcctcgtgcctttcactgctcaatctgcaataactgtgtccaaaggtttgatcatcactgtccttgggttggtcagtgcatcgccttggtaagtcttactattaattctcacttcctagacaaagaactgagtaagatctatgagttgatatgttatctacgggcttttgttttgcagcgtaactatccattcttcgtctgtttcttatcatgttcaacactcctctgcatctacgttttcgtcttctcatgggtcagcatgcttaaagtccatggggaattctatgttgttctcgctgatgactaatattaggtgttcttgggctctactggttt

SEQ ID NO: 143330 - DNA, 805 bp, Arabidopsis thaliana landsberg
ggtgtcaaagaagctcacagtgccctatgtgttggcaatcaattagtctcaaagaccccacaaggttaatctcgtctccttgtaatatgatttttttttttttttgctaacatttccacgaggtatcctcgatagagttttcaattatgtgtatttcaatgtgtccagtcaggagttgcttgaggctgtggaacaggagaggaatttccgcttcaatccaactagaaatgccaccatatttcgtcatccaactcttggtgattttgaattacaacatgtatgtggcccttttactatcgttttgagttgataacatctcttttcttgtgaattatctaattagagctctatctttttactttaatgcagcttccagtgggggtggataatgctgagattgaagaacgaatcattcagcacttggctgctgctgctgctatgggacgagcaagacatggggtaagaagggaaggccacagaagcaggtcgtcaagtcaaggacatcaacagttcatggtgttctcttcgcaacctaatgcttcttctcctccacctcatcctcccatgccttcttctccatctcagagagatgagagtgacacagtgtcaaaccttcctcacaatgctttaggggagggttctcatcagtcaaacacgcagccaccaacttcttctcatccccgccaggtttctccctcagcatctgattcaaacagcaggtctttaccagaactctcgccttttatcgtctcatattactgagtaattacatgcagccaatctgacgcttcctttaatttaccaa

SEQ ID NO: 143331 - DNA, 1478 bp, Arabidopsis thaliana landsberg
ttcatgctcttcccaactctttccataaaatcttatcaataatcacttcctctctctctctctctctgatacaacactcaagaagcgagacacagaggagagagttagtcttcttctctgtttttgtctctttggctatatatattcaaaacattgtgtgaacagaacacaaatcaacacaacacacacaactttgtgttctttaagttttgtttcagagatcaatggccgggactggattgtttgctgagattcttgatggagaagtatacaaatactacgctgatggtgagtggaaaacttcttcctcaggtaagagtgttgccatcatgaacccggccacgaggaagacacagtacaaggttcaaggtatatctcattaagtttcattctttcttgatttcagatattggcaaaaatttggagatatatactagaaatattgatgaattttggtagattgattacttgaacaagttttgataacaaccaaagaatctccgaagataaacagagaagataaaacagagaatttacaagataagacaatgttctgtttttctgtttaacgcagcatgcacgcaagaagaagtgaacgcggtgatggaactggcgaaatcagctcagaaatcgtgggcgaaaactcctctttggaaaagagctgagcttcttcacaaggctgcagcaatccttaaggacaacaaagctcccatggctgagtctcttgttaaagaaatcgctaaacccgccaaagattctgttactgaggtctcaccatatccctctctatgcatcaacttcatacgaagctctttttgttttgtgtttttcaagatctttaatgtttgatattggtgaaaggttgtgaggtctggagatttgatctcttattgtgctgaagaaggtgttaggatcttaggtgaagggaagtttcttctctccgatagcttccccggtaatgaccgtactaagtactgcctcacttccaaggtataatctcttagattcatatgtatgcgtcaatagttgaagttgttaacaaatgttttgatcaaattatgtgtttgttttctgatctgaagattccactcggtgtggttttggctattcctccattcaattatccagttaatctcgctgtatcgaagatcgctcctgctttgatcgccggaaactcccttgtcctcaaaccgccaactcaagtaactaagaagcttttaacactcttttaaaatgaatgttttgaaaatgctttttaacggtcagtttctttagggagctgtttcttgccttcacatggtacattgctttcacttagccggtttcccaaaaggtcttatcagctgcatcaccggaaaaggatctgagatcggcgatttcctcactatgcaccctgctgttaactgcattaggtatatatatatatacacacattcaacaaaacaggttatgttcattttaactgctaatatttctga

SEQ ID NO: 143332 - DNA, 1129 bp, Arabidopsis thaliana landsberg
aaagcagtgatttttcgataactgatggaatgagagatgtgagcggatttggtatagcttctcgacctcagttggacaagggtttgtcggaaaacaatatagggttcacggaaagagttttctctgccgccggagctgcggttttgtccgccgttactctaaatcctcttgacgttgtcaaggtaggagctttctattgttgtcttgactcatctgggaaattatatcttcttaccggcgaagatctaatgtttctgttgtgattttgtttatcagactcgattgcaagctcaagccgccggaatgtcgtactctcacccactcagtaactccattggacgcatggcattttttggcccaaacatggtattgtctctgaaatttttgttttgtatgagtgttgttttaaaggtgaatactttctacattttcactactcagttatgtaatcaatacggtttcggttcagatgtttgcagacttgagatgttctccttcatgtgcacgcgctggtgttgaaggtactgtttctatttgcccaccggattgtttccagtacaaaggaacatttgatgtcttcaccaagatcatacgacaggtgagcatctcttttcatcttgttgaatgtctcgcagtgttaagaagatgatgataagtagttgtttgagaggttttgttttttgtatgtggcatgctttttagctagaagcttactatttctctatatcctaacgcaagaactgatgcaggagggtctgggacgcctttggagagggactaatgctggtcttgccctagctgtgcccatggtatgctcttttgcttacatttacgggattcttttgtttggatagactatggattagtaaactctcaagttttgcacaggttgggatatatctcccattctatgatatgttcggcaaccggttggaagaattatctcgggagaaagctcctgctatgacattttgtgtgcctactgtggcagggtctttagcgcggtccttagcatgtacagtctgctatcctattgatcttgcaagaactcgtatgcaggtattggcttgtacttcttctgcgtgtggcattcttgtactttagatgagtgttatgcttttcaacgaga

SEQ ID NO: 143333 - DNA, 646 bp, Arabidopsis thaliana landsberg; identical to SEQ ID NO: 8750

SEQ ID NO: 143334 - DNA, 2197 bp, Arabidopsis thaliana landsberg
ctgctgatgatatttgacatattgtagtagatttatcctttcatatcgagcgtcccaattttgatgttgttagcttcctgtgggtgtttctttctgtgatatgcaaggcatttgctgatctattagaagagggagatgtgaagattcctgggtggttttcattcaactcaaaggatggcgtaaacgtggttagcggggattccatcaaggagtgtatctccatagctgaaaattgtgagaaagtagtggcggttggaatcaactgtacccctccaagattcatagaggggctagttttggagatagaaaaggtgcggcttggatccacactcattaggtatttgtatttgtagacaccctaaaaggtatatgaataacttgtaggtgacaagcaagcccatactagtgtacccaaacagcggagaaagctatgatgctgatcggaaggagtgggtggtaagtcatcgtatatacagtatttgttttgagaggaaggagcacagttgtctgagttgctcaaaaactgttgcaggaaaacacaggagttggggatgaagactttgtatcatacgtagagaaatggatggatgcaggagtgtctctcctgggaggttgctgccgcacaacaccaaccaccatcagagccatccacaagagactcgtcaaccgcagatctctttagcattcaacttcactctcttctatgaatctctagaaccttggcaatagatttgtaccaaaaacatgaatgtttgttttccctttgccaattacaaatctaattccaaggataggcgtgactgcatttaagcttggatgttaatttgaaagttttcatcttgcatgagaagaaatcttggatgttttacatcaacctcgcctggatacaaggctgttgatttatatgtgcttgagagatctctgctcttaatgcattctatatgcggaaatgtggtaagtgtgatgcaaatcataacttcactacttttgctgggtctgttgttgttgttgttgttgttgttgtctcactgcgtattttgttgtcaattgtagatggatcgtatactgacggcgtataggaagtcctcaaagcaatggtcagccacgtttaacaagctcgcacaaggttctatcacactcctcttccacctcctcttttaaaaccaactcttcttcaaacctttagaaagtcttcttttggtatatgcagtgagacagcgagggagaaagcggactatgattggatgaggcgatgagccaagttctccagtggtactgtccttaaaactttgaccacaaagccacccaaaatctgtcctgtattattattcgatagcgatccaatttgtcgatcagtattaaggtatcaatgctgagatgtgtgatcgattttttcaaccagaaaacgattatagaacatatgtcaagcagggcattctcatataagtagttaagaaagcaacattattgattacggttagaaagttactatatttatcgattatgtcaacgaacatatgacaaataaagaatgttacaacaccattattacaaaacgtttaactaccttttatttgagcatataacggcttcgttctctaaccattaacttttcatatataacaagaaaaaatagataaaacctaaaagtaatttcaaaaagagttaaatggaaaacaagttggttcttggagccttgtgtatataccttgtgttacaaggcacctgcggcgaggagaacaaccctctgattaaccattacgttgattacgaaacgattcatcctagcgaatactacagctccgatttcgaactcaaagacggaaccaatgtgatcttcgaagccatcaatgaattgaaagggatcaagaaaccaaaagcaggctttatgtgcaactatggcaaaaaacaatggacaaggtctcttccgggagacattttctacgccaagttcttcttttacagcattaatccaaacgtaaaggtcgttcaacattgccatttccggtcaaatttgggttatgttgatgcctatatcaagataaccccagcgctcggacgaacatgtcccggttacagatgcgttttagcgattagacgtgaaggtctcttgatgaaagacactaacgaactctttccttggacaccttggcctcgccgccacattcaacctaagttgcctaaggttacgaattga

SEQ ID NO: 143335 - DNA, 739 bp, Arabidopsis thaliana landsberg; identical to SEQ ID NO: 72604

SEQ ID NO: 143336 - DNA, 1181 bp, Arabidopsis thaliana landsberg
caagaaatagaaagttgacaaaaacaagaaatataaatcttctaaagcttgctttatataaactcataaaatcctcctttttgggcattgacaagttcatctgtctctcttgtcgtagtgaaagagaaaaagaaacaagtttttttctgttgggtaattttctactcgtcattggtttgatcgacattgaactagaaccaggtttgtctccgttcaagcattgcttatagtttcttcccaattagatctgtatgcaatcaaattaaattgctaatgtgtttgctatgatcacagagttactcagggtttcactatcgagtttttttagatctttaatcacgataattagtttgctaattatagaatctaccacaaaatttggtttctttttttctccagaatggctactgctacgtctcaccaatcagtcgtttcatttgcttctctccggtcttctccttcttccacaatctctcaatgtggatttaagatcgattcttcactgagctttacatcgaaaaagacaaacttttgcaagattaaagcaattacatcatcagtttcttatgacaacactctcttgtctccttccaagaccatccctgacaattctcaaaagaaatcaagtaagtgctctgttttttttaattcctcaaatctcactttggttaatgattatttatctaaatacaagtttgtgtgttttgatggtttagatgaagcagctttgatattgattaggcatggagaatctttatggaacgagaagaatctttttactggttgtgttgatgtgccattgactgagaaaggtgttgaagaagctattgaagcagggaagaggattagtaacattcctgttgatgttatctttacatcttctttgattcgtgctcagatgactgcaatgcttgctatgattcaacaccgtcgtaagaaggtaccgatcatcttgcacgatgaaagcgaacaggcgaagacttggagtcaagtttttagtgatgagactaaaaaccaatccattcctgtcatacctgcttggcagctcaatgaaagaatgtataaatatatctggctttcactgtctctcaacatattgagctttgaactgataataaactttatctgctttaaaacgtttttgggatctaggtatggagaattgcaaggtcttaacaagc

SEQ ID NO: 143337 - DNA, 919 bp, Arabidopsis thaliana landsberg; identical to SEQ ID NO: 59018

SEQ ID NO: 143338 - DNA, 672 bp, Arabidopsis thaliana landsberg
gtactttcaactagaatcaacatttactgtttaaaagacagatatcaccatttactgtttaaaaaatgccttagtttaacgtggggatgttttggatactcagtttggccgtagacgatgtgccaataagagaatacaaaaacaacgaagccaagaacatagcttacccaacatcacaacctatgggagtatactcaacattatgggaagcagatgactgggcaacacgtggtggattagagaaaattgattggagcaaagctccattttatgcttattacaaagatttcgacatcgaaggttgtcctgttcctggaccaaccttttgtccatcgaaccctcataattggtgggaaggttatgcctatcagtctcttaacgccgttgaagctcgacgttaccggtgggttagagtaaactatatggtttatgattattgtactgaccggtctaggtttcctgtcccaccacccgagtgtcgtgcttgaaaataattgcatacgtacgttgcaatgatcatgtttcgtcttgtacgagattttatatataaattgtgggaaaatgtggattgtattgtcctcttatgcaattgtgcagacgtacgtgagtgtgtatagatataattgtgatttgtggttatttgaaatttttaccccataaatgaattctgtg

SEQ ID NO: 143339 - DNA, 1782 bp, Arabidopsis thaliana landsberg; identical to SEQ ID NO: 29696

SEQ ID NO: 143340 - DNA, 1536 bp, Arabidopsis thaliana landsberg
agttgtgggaaagattcggtttgcgtcgttacccagaagaaagttcctgtgagtgaatctctcttttcattgtctctcgttttttttagggtttgcaaaaaagttgcgtcttttattgaaccattgtatggatttaggtttctagtagattgaggattgttggtgtatcttacccattagggtttttgtttttgggttgggacaggacaagcttttggatcagtctagtgttacacatctgttccctatcaccaagtacattggattggtagctactggcattacaggttcgtttcatgacccttttatctcctcttaagctgtagaatttattgctatggatggtaatttgaacatgtgaatttcgttttcagctgatgcaaggtctttggttcaacaagcaaggaatcaagcagctgaatttcggttcacttatggatatgagatgcctgttgacattcttgctaaatggtatcgttgctaatcgacttggtgtctcttttttcagatggttctttaacttcttagtggaggctggcttatagttattgatctatctagctcttctgtgataaatggtgttgctgataaataactattttacttacaggatagcggacaagtcacaggtctacactcaacatgcttacatgagaccccttggagttggcaagtttgctatctttttcttttcttaagaccaatctagacattagtgcctacttgtgtttgatgcgtattatatcaccttcacgttttgatgaatattattggctgacaaaaggaattttcttgttgtctctctttatgaagtcgctatggtaatgggtgttgatgaagagaatggtcccttactttacaaatgtgacccagctggacatttttacggtcacaaggtattatctatcactcgtagcttatactttaactaaacttgtcttctaatacttactgttttgattgcttttgctggcctgcatcaagatttattgataacatatctgaataatatcgtcttacaagcatattgacatacactacacactatttactgcttgtcactaacatagaagaaaatgcctcagtctataagtcattgtgataagcataaacgaaaaaagtataatatgactataggagtgagttagtcataattgcggagagttttggtcatttgggttgtttgtggtaagcctttcagactttgggataggtttgggtactctataagatagcataactctcactttagttctttgtatccggttgctcctgggttcattagtttacttgttttcatttgtagatttacagagaagaataaaggaaactttttcaatcctgtctttctcatttcgctgatcttaacactttttaggaatcttatgtataaaggtttttaagcatcgtgctcatttctacttttagtaactgattgatcctaggttgaaacaaaacacgtgttgtgtatctattcaatgacatgactacatacaggttacacatgagtcttctggactatatgaccaagatctg

SEQ ID NO: 143341 - DNA, 2685 bp, Arabidopsis thaliana landsberg
aaagattggtatatgtatttactatttattagctgtcttttatattaggaatttcataagaattgttaaatgtgatctcgatttgctgctttgcaggaagagaggacaagcttagtgcggataacagaaaagtggtggacaattatcaagtagaactttctgaacaaatttcaaatctgttcaatagggttgcttcttgtctctcccagcaaaatgtacaccttcagggtgttaacaaactgtcccaatctcgtttagaggcacacaacaaggtatcatactgttttgttcttttggttttacagcaatcaatgagttatgtgttgtctgtagcataaaattatgctggaagctgttagtgttctaacagttgtctaactttgtaacactatttgcaaatatgtttgtctaggcgatcctagaaatgaaaaagaaggttaaagcttcaagggatttatatagttctcacttggaggcagtgcagaatgtagttcggttacacaaggccaacgcgaatgcttgtcttgaggaagtttcagcattgacgacttcaagtgcatgttccattgatgaagtacgccttgttaactttcttccttttcttttagtgacttatagtgtgtgttttaaagtagttgtctccttgatttcagtttcttgcttcaggagatgaaacaacatcgtcgttatttgatgaacttcagagtgctctctcgtcccatcagggagaaatggctctctttgcgagggaactgagacaagtcagtgcatgagatataacattttgtagctatttgatatattggccttggagatttacaagagttgataactattgctttctcttttattcctactatgcagaggttccacacaacgatggagcaaactcaggagatgtctgaatacacaagtacgttctttcagaagcttatggaagagtctaaaaatgctgagactcgtgctgcagaggcaaatgatagtcaaataaacagcattattgattttcagaagacttacgaggtgatgatactacatctcttcaagtttcacactaaacatctttgcttgatcccatctataactgatgtgtgttgtgcaggctcagtcaaaatctgatacagataaacttattgcagatttaactaacctagtctcaagtcacattcgtcgccaacacgaattggttcgttgcttcctccttcatttgtttctttctctctcccgttttgtgtcacataaactgtatgttttgctcggcaggttgattcaagactccataactttaaagatgccgtctcttccaacaaaactttcttggacgaacatgtctctgctgttaataatctgacgaaagacgcaaaaagaaagtgggagacattttccatgcaagctgagaatgaagccagagaaggtgctgatttctcggctgcaaaacattgtcgaatggagttactgcttcagcaatcgtaagttccttactatgttttgcaattcctttgagatacaaatcttcagttatgcattttaacctctctttatctttttatgcgttagtgtgggtcatgcggaatcagctttcaaacactgcaagataactcatgaatctctaaaggagatgaccagtaagcaagtcacagatgtctcttcacttgttaggtaagtggtttaagttttgttctgaattcatttcatctacatgtattcgcttcttaacgctggctatatttaattttatggttctcttcatgttatgctaccatacattaacttcaagtttggtttaggtctgcttgtgatagtaacgagcagcacgatgccgaagtagattctgcaaggactgctgctgaaaaagatgtaacaaagaacagcgatgatataatccagcaaattgaacgtgagctttctttcttgcacatgactgtttcttagataaaagagtttcttggcatgatcattaatctcccaatcataaaccgatatccttgtaatctttcaggcatgtcagaggatgaaaaagcgtctgtatcaaaaatcctggaaaatgtcaggtcgcatgaaaaaactcttgaaagtttccaacaggatcagtgttgccaagccagacgcatagaggataaagctcaagatactgttcaacagccattcatgaagtatgagcccacaggtgctactccaccgaagaatgaaccagagatcccaaccaaagccgccattgaatcactacgagccatgccaattgagacattagttgaagagttccgtgaaaacaactcttatgaatcctttgcgaccaaggaaacaaaaccgcatcagctaacacggtcgcctctctcacaagtcaactaaggaaccacctctgttccattatatgatattttgtttttaaaaccctcaaaatcagtgtctgtgtctgtatcatcactatgaatctatgtatacttttgtgaaagtgtgggatcaatcaatgaagagtcagatgcttctgacacatttgaaatattcatcatcgtaatctatgatttcttattcgagtagttgaaattctcttacagtaatcgaagttctcaaagacggtttgttctactattacataatgcgaatcttggaccctttttggttatgatggtttgtgatatgtgcatgcatataccacttgatcactttctatatatgactcaacca

SEQ ID NO: 143342 - DNA, 2301 bp, Arabidopsis thaliana landsberg
gaactaaccatttaaaactaatacaagtttaggatcttcaagctaattatatcatttactaaagtggtgaatcattcgaaattttcctaagaatgggttatttataaaagttctgatgggtttaggtcacccaacaagatttagaggacacatacaacgtgccattcaaatcatgtgtttacgaaggaaaagtagcgagtgtaatgtgttcgtacaaccaagtcaatggaaagcccacatgtgctgatgaaaatctcttaaagaacactattcgtggtcaatggcgtctcaatgggtaagttattaaaaatcaacataatcaatggttcatatcgattttacataaagactaataatatcatcaatgcatacgtatgtaggtacattgtctcagattgtgactctgttgatgttttcttcaaccaacaacattacactagcactccggaagaagccgccgccgcatccattaaagccggtgagttgttttcctccaccgttgatgttaaatctaatgcatatggaccgttgcatcaattttgatacgaaaaacatcgtgtcgtttttcaggtttggacttggactgcgggccgtttttggcgattttcacggaaggtgcagtgaagaaaggattgttaacggagaatgacatcaatttagcacttgctaatacattaacagtccaaatgagacttggtatgtttgatggtaaccttgggccgtacgctaatcttgggccaagagatgtttgtactccggcccataaacatttagctcttgaagcagcccatcaagggattgttcttctcaaaaactctgctcgctctcttccactctcccccagacgccaccgcaccgtcgccgtgattggtccaaactccgacgtcactgagactatgatcggcaactatgcagggaaagcatgcgcctatacgtcgccgttgcaagggatttcaagatacgcgaggacacttcaccaagctggctgtgccggcgtggcttgcaaagggaaccaaggatttggtgcagcggaggcagcggcgcgtgaagccgacgcgacggttcttgtgatgggattagatcagtcgatagaggcagagacacgagatcgaaccgggcttctcttaccgggttatcaacaagacctagtgacccgtgtagctcaagcttctagaggtccagtcattttggtccttatgagtggtggaccaatcgatgtaaccttcgctaagaatgatcctcgtgttgctgccatcatttgggctgggtatccgggtcaagcgggtggagctgccatcgccaatatcatctttggtgctgctaatcccggtacgttgttggttttcatttagatcaaagtaaaaattaaatttatttaatttagcttttagtaacattcaacattatatatcttatgataggaggaaaactaccaatgacatggtatccacaagattacgtggccaaagtgccaatgacggtaatggccatgagagcatccggtaattatccaggaaggacatacagattctacaaaggtccagtagtatttccatttgggttcggtttaagttacactaccttcactcatagtttggccaaaagcccattggcccaactatcagtttcactctccaatctcaactctgccaatgccattctcaactcttcatcacactccatcaaagtgtctcacaccaactgcaattcatttccgaaaatgccccttcacgtcgaagtatcaaacacaggtgaattcgatggaacacacacggtgtttgtatttgctgagccgccgataaacggaataaaaggattgggtgtgaacaaacaattgatagcgttcgagaaggttcatgtcatggcaggggcaaaacagaccgttcaagttgatgttgatgcttgcaagcatcttggtgtagtggatgagtatggaaagaggagaatcccaatgggtgagcataagctgcacattggtgaccttaaacatactattttggtccaaccgcaactttgacggacgcatataaaaaccaacaaataaggaaagcattttaacaaagtggagtgtttcctcttatttatataatatagagagataggtttattttcttatgaaattattactcaagaaagtatgaatttgtaaagaagcaccaaagggttgcttcttggttgtgtcttttttcctttaatttttttttggaccaaaggtattgtaacttgtggctcccaacataagaaatacaaggagcccttgtaaaatgctgaaactaaagataatggataattgattatact

SEQ ID NO: 143343 - DNA, 980 bp, Arabidopsis thaliana landsberg
tgttttgaatttttctacgagctagaacatgattacgccgatttttacaaaagttgtgtacaaaagagagcgtggcatatcggtccgctatcggtttacaacaggggatttgaggagaaggctgagagaggaaagaaatcgaacattgatgaggctgaatgcctcaaatggcttgactccaagaaaccaaattcagtcatttatgtttcctttgggagcgtggctttcttaaagaatgaacagttattcgagatcgctgcagggttagaagcttccggtacaagtttcatttgggttgttaggaaaaccaaaggtattgaaattgacgtttgaagcctatattatataactgtaatttgggtagctttgattttaatctgacacaagatttggtgtgaacagatgatagagaagaatggttaccagaagggttcgaagagagggtgaaagggaaaggtatgataataagaggatgggcaccacaggtgctgatacttgaccaccaagcaaccggtgggttcgtgacccattgcggctggaactcgcttcttgaaggagtggctgcagggctaccaatggtgacatggcctgtaggagcggagcaattctacaatgagaaattggttacgcaagtgctcagaacaggagtgagcgtgggagcgagcaagcatatgaaaagtatgatgggagatttcattagcagagagaaagtggataaagcggtgagggaggttttggctggggaagcagcagaggagagtcggagacgggcaaataagctagcggcgatggctaaagctgccgtggaagaaggagggtcttccttcaacgatctaaacagcttcatggaagagtttagttcataatcttcatatatatagattctatttagaaatcccatagcagaagtaagatgaaagctaatgtaaaatataagagatatgagttaaattcaaatggcagcaacctctaccatagac

SEQ ID NO: 143344 - DNA, 2527 bp, Arabidopsis thaliana landsberg
atgatcgacatccctccttacccgccgcttgatccttccaactacgatctcattgtcgtcggcaccggagtctctgagtccgtcttagccgccgctgcttcctcctccggtagttctattctccacctcgaccctaaccccttctacggctctcacttcgcctctctttcccttcccgatctcacttctttccttcactcaaactccgtttctcctcctccgtcgccgtcatctcctcctctccctccgtcaaacaaccatgattttatctccgtggatctcgttaaccgatccttgtattcctccgtggagatttcgagcttcgaatcggagatcctcgaagaacactctagaagattcaacgttgacttggctggtcctagggttgtcttctgtgccgatgaatcaattaatctcatgctgaaatcaggagctaacaactacgttgagttcaagagcatcgatgccagcttcgttggggattcgaccggtgagctacgaaatgtgccggattcgagagctgctatattcaaggacaagagcttgactctgttggagaagaatcagctcatgaaattcttcaagcttgttcaaagtcacttggcttcttctccgaacgatgattcaacagcagtcaagatatcggagcaagatatggagtgtccatatgtgcacttcttgtcaaagatgcgtttaccacccaaaatcaaatcgtataacctcattctctgttaatggcagctctttggacatttgcctctgcataatgcttcttagaattttgtctctgaaatgttgataggtaaggcgttgtttcctcttattctgtgtaggatcatcttgtatgccattgcgatgctagattatgatcaagacaatacggaaacttgtagacatttactcaagaccaaagaggggatagatcgattggctctatacatcacatctatgggcaggtcattcatcattttctcattcctggctcttacacatttgtgatcatctttcttattggtttacattatcattggttatattgagtataatttagcttttgattctctaccttaggtttcctaacgcacttggggcgttgatatacccaatttatggacaaggagaacttccacaagccttttgtcgtcgggctgctgtcaaaggatgtatctatgtacgtttggaacaattttctgcattgtgtactgtgttgctgttgtggtatttgttacttatttagtctttcattgttttcacaggttctccggatgcctattactgctctgcttttagacaaggcaagttagctgacagttgtagcataagataagtttagttgaccgaaaggattcttacttgattattttaaactctttttgcaggaaactgggggttacaaaggggttagattagcttctggtcaagagatattcagccaaaagttgattctggatccatgtgttactgttggattagagtctctgtcgtcattgacagatcagcaaaatgaaactctcagtgttcttgtcccaaagtcgatgatcaataaggagaaaattgcaagaggagtatgcgtcattagaggttctgtgaaagctaatgtatcaaacgctcttgtcgtttatccacctaaatgtaagctaatttttgaagacccactagttagttgtttcacttacatgtatatcgtcttttgcgtttttaaggttctaacattaatagttttttcctcttagctttgtttccagaacagctaactgcaattcgggttctgcagcttggtagtggtttagcggtttgtcctgctgacatgtaagttgtggtttagcctaagatgatcttttcccattttagttctgtttctttccatttgcttagctttaactgttctctaagccatatatatttgctgctgcaggcatgttttatatctttcaactttgtgcgacaatgatgaccaagggataaaggcgctattatcagccatgagtaatctcatcagtttgcctgttcccgagaatcgtcaaagcgattccgttgttgagaatgatacttctgagacaaaacctattctactctggagagcactgtacgtgcaagagctagtcaaggtggaaaatgtgattgggaatttaccttttcatttcgacgttggtaatgtcattttcactaaataaaagtttgatttggatcagggtgaatttggaggtacgatcagttccatgcctagtccagatggaaacttgaactacaatgagatagtggaatcagccgtgaaggttagtagaagctccttacagcagttatctcattaagttatggttttgataatgttatcatattggatttggtagctatatgaaaagctcatggggagtgaagaattatttaaagaagagacctcaccggcggagaacacaacggaggaggaaaacgatggtggtgttgaaatagaagattgattgatgaatgaaaccattggttttaaagacttagaatacccatttatttatttgattgtaacatatag

SEQ ID NO: 143345 - DNA, 1000 bp, Arabidopsis thaliana landsberg
aagtcgaagcccttgttagggcttctatacatcaccggcgatattggtttacgcgtcggagagatggttggtgagtgttattgatgacacgagatttcaattctcggcggtgtaacgtgaagtcttaacaatttcattgtccaatggtggaatttacagagagagaggaccgagtttctttggaactcagcgaagaaattatacagagcatggaacctggcgccgttttcagagactatgtaatttttccttcccttctcgaagctttcttcttttgctcctgttattataatggggttttaaaggatggagcttttcttttcagaattgcaggatcagctcaattgactttcacaaaacttcgacttgtatggtgacagctagcgacgatgactcaattcgtctctatgatgttgccagcgccacgtgagttccaaaccccaaactctgtcttgagtattgctctataagacattccaactatattttcagtgttttctgttttcttgtttcagatgtctgaagacaattaatagtaaaaagtatggtgttgatcttgtttgcttcacttctcatcctactactgtcatctactcttccagaaacggatgggacggtgagcccaaattcatgtgcacattgcttttcctcattatctgatttgctttaactaacttttatatctggttggttagactctctgagacttctctctttgcacgataataagtacttgcgctacttcaaaggacatcatgacaggtttgtttcttttctgattcttgtttgatcagcttatgttttccttcacaaaccggatgaacttaaccaatttatgctgtacacagagttgtttcgcttagcttgtgttctggtggggaatgcttcatctccggttcccttgatcgtactgttttgctttgggatcaaagggtcgagaaatgccaggtagattacctttctctaccctaggtgcttatggaggtctgacatctaataa

SEQ ID NO: 143346 - DNA, 2379 bp, Arabidopsis thaliana landsberg
caacaacactcttcacttaatcgctccggcggtggcgaacggcaacgtgacggtgacgttgtcggaaaattagagtttgtttatctttgcttattgttgttggagaagaaggtatggtgaggaaacacggttggcaacttcccgctcacactcttcaggtaaaatcgaatgtaacctttctctatagccaaagcttcaatttttcatgaatctgctcaatctaaagtcaccaatggctgtgatttcaattgggttctgtgtatttttcttctcaggtgattgcaattacggtgttttgcttgttggtggtcgctttctatgctttcttcgctccttttgttggaggtcgtatttgggaatacgttttgatcggtgtttactctcccgtggtatgtttaatgcttctcaagctagtagtgtttatgatcagaatcaattttgcaaattcataacgagttttggattccacagctgtgtagtttatggcattgatcttatctgataggttcctttatgtatcgtgtgtgtttttgcaggctattcttgtgtttgttttgtatgttcggtgtactgcaatcaatcctgcggatccgagaatcatgtcgatatttgatacaggcgtgaatggagatggcatggttcgtggcttatcaaggaattatgatgaaactggtagtcagttgcaggcttctccttcggttgtcagtaggagttctaccgtggctggaaactctagtgtgaaaggttctgtagaagatgctcaaagagtggaatctgtaagtagaagatcttgctataatcctctggcagttttctgttatgtgtttgttgtgcaagactgccggaaaaaggaagggccggcggaagaacaaggaaacagcgaagaggctctgttttgcacattgtgcaattgtgaggtactaagcttcagaattctacatcaagtctccatggttatatttgtcatgtgtatggtctttaatatgaaaagtaaatgatgtatgagcagttaataataactaaaatttcttggtctttatcttctagaatctgctttaagaagtctttagggaaagcaatttggttcagattttagatgtgtactcaattatgtatgtttcacaggtacgcaagttcagcaagcattgtcgaagttgtgataaatgtgttgattgttttgatcaccattgcaaggtaagctttctgatgtttcaaatgtttgactggattttcatgggtttagttgatgacatagttctaatcattgctacagtggcttaacaattgtgtcggtcgtaaaaactatgtgacttttgtctctctgatgagtgccagtcttctctgggtatgtatttcacctcgtatgtgctatttcttgtacttattttctcactgaaccactaacaggttatgctttctccctcctcagctcattattgaagcagcagttggaattgcagttatagtgcgtgtatttgttaataagcagaccatggaaactgaaattgtcaatagacttggaaatagtttctctcgtgcacctttggcggcagttgttgtaagtattcttggtgttatgccattagtttgagtttagctcctgtcatcaaggttcctaatgccatacctacaaattgcgtagggtctttgcactgctgttgccattttggcatgttttccactgggtgaacttctctttttccacatgcttctcattaaaaaggtcagtgggaaagaaactagttctgatattagttactctactcataacacggataattttcttactgtaagatatcatggtaagacttttaaaagatagaagtgacaatgctcatcatagtagtgaggttgaacttcggattatttttgtttaactacctattatctatcaattgtgaacttttcttaacactggcagggaattacaacatatgagtatgttgtggcaatgagagccatgagcgaggcgccagatggagcatctgttgacgaggaaattcagaatgtgctctattctcccactgggtctgctacaaccggctttagtggtggaagctctctcggtttaccatacaggggggtctggtgcactccacctagagtgtttgataatcaggtatttttaccttttccgaagcatccaaccattcttgtatcgcatgcctaactcttgtgaaacactgaaactcactagtgttttggttgcaacagataggttatatacctcatatacatcatttgaaagtctagttatccataggatcaatctctaaatataaacttgaaagacaagggtttccacgaaatgcggttaatttttggcatacatgtattgcttaatctgagattatgctcaggtatcaacatgccattttt

SEQ ID NO: 143347 - DNA, 2427 bp, Arabidopsis thaliana landsberg
tggttgaatccgagtcaatgtcattaaaactgattgatcgaagaatggtctttgtctctgcacaatcaatacaaatatgcctcagatcaaaatgccttcaaataaacgttcatagaagttgtcacaaatactaacccattttcacttgaaaccagattcaagcagttccttattatgtcctgaaaatgtcaaatatccaaattccatcattgagacattacatcgaatcaccaaaaacatagaaagggtgaagaagaagaagcagaacctggaagtcaaacaaaacccatgagacgaaatgaaacagagaagagattcttttaatggaagaaaacaacagagccaaaaaggaaatgaggaggctttgaatgggtctaggattagatgggaacgtgagagagaacgataatggcggccatttctgatataagagattctcatgaaatctcaatctctcaatgatgcaaatctgttccattggctgggagaaaaatagagtcctctgttccacgatcgctctgttatttttgttggctcctcctcagtttatcctaattttggcgtcaatgtttcgcttttaaaactaggtccctataaaaattcaaacttcctatgttaacccagaaaataaaacattatcaatttgacccaaacaaaaatcataagaaaatcttcaatttttaataatttccctaaagtaccattaaaaaaaatcacagaagctaattatgggatttctactgttttctaattcataacaatatatactgtaaatagtttaccaatcaaagacactaaaaacaattcatgtcttcaatagaaaacattcaaaagttggggactttttatgaaaattctgtataaacgcaagcagaaccaaagccctagccctctctaattcgctgtgtccgctaagtcctctcttttccgaaggatctgactttatcccggaattctgacgccgaagcttaaatggaaaaagaagatgagctccagaagttaaacggtcaagtttcagctccacgagacggagatgtagaagatgacgatccactagtgttgagttctcaagctttggcggcgcttcgggaatttctagcagaccagaacaagactgttgcgagcacgccaccggcgtcttccgtcgccggaggagaagaatccgataaagtggagctggttacggaggattggagactcagccagttctggtacgaacctgaaactgcagagactgtagcagatgaagtggtcactctctctcaaagaattccaggctgcagagtcgcttgcattgcttgccctactctctacgtttatctcaaggtactattaatcagttttgttcagtacccttaatttgtatcgaatccgttttgctaaaaatcgatacttttgttgtcgttgatgctaaatttctgtgcgacgggttttgatttgtgctgagtcagaaaagagatcctagtcttcaggtgcaattgctggagtacgatatgagattcgagagatatggaaaagagttcactttctatgattacaacgaaccagaagatctgccgcttcagctgaaacattgcttccatataatcgttgcagatcctccctacttggtaaagtttcttcaagttcttaacttttccgatgctgttctttcatgggaattttggaaatcttttagctgccccttgatagataggtttagagactgatgtgtaatctgctctgaacttctgacattcaagaagcttctgctagataggcattgcttataaattaatcttcttttaaaagattatagaaagtccaaaagcagacaagatgaaagaaaaaaagtgtaagctttacaatggagtatcagttggttatggtcatggcttagtgtcacttcttaaagatggatactttgtggctctctgctgcgttttgattatcatttgaaatatttcccgggtaggagtatttgtgacttgtgaggatatcattaatctgtgatgtttttgtgtgctatattgcttgctatcttcaaagcataaatgtctttgagtaccttctagttagcgtgttaatgatcttgattcgtttatgcttggcagagtagggaatgcctggaaagagttagtcaaacaattttgttcctcgcaagcccagtagattcattgttgcttcttctcacaggtacaatgggtacttttgttttctcaagtcaaatttatatgatcttatgatttattaactaggagatatctcacgtcttgcaggagaggtgcaaagagaacatgcagctgagctattgggtgttcgcccttgtgtgtttaagcctcatcactctagcaaactcggaaacgagttccgactgtttataagttatgatccaggtaccagattaggaggcttggaagaagacagctagttgtgacttgcttgtaa

SEQ ID NO: 143348 - DNA, 2863 bp, Arabidopsis thaliana landsberg
gagtgtaatttgatcaactgaatgctcacctgaaataaaatatacttgccaagtaaatgcgtgacgtctttcataattgacatataactactaaatgcagggaatatagccagtatatactatgagcaaggtcaactagatttagcaattcgacactacaagcaggctctctcccgggatccacgatttttggaggcttacaataacttggttagcatcaacaacacacattttgtgggttttgtgtctgaactataattctcagtatctaacatatgatattttttgcatttggaacttgaagggtaatgcattgaaggatattgggcgagttgatgaagcagttcggtgttataatgtatgtgtgttttccatctgagacttactagtgaatttgcgtattactcacaaacctgtggttatactgcagcaatgtcttgctttacaaccaaatcatccacaagccatggctaatcttggaaacatttatatggagtggtatgtgatcctttctttctttttgctagatagaaaagactaaatgaccatcaaatccatttcacaacttgaaacaggaatatgatgggtcctgcttcctcattattcaaggctactctggctgtaactacagggctatctgctccgttcaataaccttgctataatttacaagcaacaggtagctacgtgctccattatcaatttttaatcatttttgtagtcttgctcatgtttgacaaatttagcttgttttcttctcctttactacagggaaattactcggatgctatatcctgctataatgaggttcttcgtattgacccattggcagctgacgctctggttaatagagggaatacttacaaagagatcgggagggtaactgaagcaattcaggattacatgcatgctataaacttccggcctacaatggctgaagctcacgcaaacctggcctcagcttacaaggataggtaaccattgtctttatctttcatttattaggtataccagacacatgttcaaataccgcttagctaagaacagagccaaaacatctttaccttgaacaaaaaaatctgactcgagaagaattttgtgtatttcatggttcttgaatagcttatggtgtcatatatcttaaaattacttataattttcctacttcactagaagcctttatatctctacgtacagttcttaaggtggtttcgtgttaggctcttgttttctgggatttagaacatttaagatgtggcagtataacaatgagttcatgaccaccttttaactgaggagttagtatgtttgaccagaaaaatatttgttctactattaatgtatttgttgcaccttcttgcataagcagtgggcatgtagaagctgccattacgagctataagcaggccttgcttctacgaccagacttcccagaagcaacgtgcaaccttctacacaccttacaggtatttatttttcctggtttgatgtcacacgtctgttatgatagcttctttcttctctacttgttaattctcccttcgtctccattttttctttcctgctgctgaaccagtgtgtatgctgttgggaggaccgtagcaaaatgttcgctgaagttgaaagcattattaggaggcaaataaatgtaagtatttacgccacacaaaatttgtggtacttatatactattacagattaaggtgatagcatatcctattgatcctatcttcagatgtcggtccttccaagtgtccagcccttccatgcaatagcatatcctattgaccctattcttgcccttgaaatcaggtttgaggctgattttttaatactcaatactcatgaaaatacatgtttatattatctttatgtatatgcctatttcttataaatcccctattttttcagtcgtaaatacgctgcacactgctccataatcgcttctcgttttggactacctccttttacccatccagctgggctccctgtaaaacgtgagggaggatttaagagattaaggattggatatgtgagcagtgattttggtaaccatccgttgtcacacctcatgggatcagtgtttgggatgcacaacagagaaaacgttgaggtttgtatcctgcacttggatacttgttgatccatttcttaggtctgctctgattttatatcgagagtttgagttcttcagcccagtgttttctagtgaggctataaaattcgtacatgctgggtttagttcttatgatggtaggaatgtatggaaccgtacgggtcctgtgtgtggaatatagaactttagtaattgatggtatatcattctgtatctgcctatcctgtttttggcttttcagcaaagtaaatcacattttttcccaggttttctgctatgcactgagtgcaaatgataatactgagtggagacagcgaatccagtcagaagccgagcatttcctggacgtttctgctatgtcatctgatgctatcgccaaaattataaaccaagacaaaatccagatcctcatcaatctaaacggttataccaaggcatgcatgctctgaacatttcagaaactttttactctggagctgtacccattcctatggaaatgtttttgctaacattgtttggtttaacctatgcagggggctagaaatgaaatatttgccatgcagcctgctccgatccaggtttcatatatgggcttcccgggtaccactggagcaacctatattgactatctagtgactgatgaggtttgcaattgaattatagttttctagatatcttcagaaatttttttttttccaaccttattttttctctatgtcatgacttggtactctcttttacttttcag

SEQ ID NO: 143349 - DNA, 618 bp, Arabidopsis thaliana landsberg
ttcttcctccggagaacgtttccggtgtctcagcgtcgccttctcctgcggcgaagaatccatgttgcttgttttgtagcagctctcccacgagcactcttttgggtaatttgtctcatctttctcgatctccgtctctgtctccacctatgtctccggctaataaagccgctgctttttcacggttgaggaaccgcgccgcttctgccgtttccgccgctgcagccgctggttcaatgaactataaagacgttttgagcgagcttgtgaattctttggattccatgagcttagcggaacgcatgcaggcgagttcctcgtcgcccgttacaactccggtttccgctgcggctgccgcgtttgcgtcgtcctgcggtctgagcaatcagcgtctccatctccagcaacaacaaccaagtagccctttgcaatttgctctttcgccttccactccaagttacctaactaactcacctcaggcgaacttcttcagtgatgatttcactcctcgccggagacagatgacgatttacggcgatgacggccgttaggagaatactaacattgaggatggttctgtggtgacctgatctaggatgggcaatgactcttgacttg

SEQ ID NO: 143350 - DNA, 1074 bp, Arabidopsis thaliana landsberg
tattgtttcattacttggctggattgttattgtcatcactaagcctccttcacaccttcgtggtcttattcttggttgttgtgctgctggtaacaaaccttaacatgaatgtttctgatttcagaatctgtttaacttgtgttttgcttatgactgtggtaatgaatgaaacaaaacagggaatttggggaatatgccactgattataatcccagctgtttgtaaagaaaaaggaggtccctttggagatcctgagagttgccagaaatatggaatgggttatgttgctctctccatggctgtaagttcttcttcttcttcttctttgtcttcttcttcttcaaggttttgtaatcagtatgtctcatgacagtacttggtaacgtatcagatgggatctatttacatatggacttatgtatacaatcttatgcgtgtgctatcgaactctcccgttgaaacccctccctctgttgaatccaactacgacagctacaaagttccccttatttcttccaaggaagaagaaaacaaccaaaaggtttcatcacatatgcacatgatcagtaactattcatttatcaaagttggtagtgactgtgtgtatatgacaggctgggaggtgggaaaaagtcaagcggagattggtttcactgtcacaaaaagtcaaccttaagacaatttttgctccatcaactattgctgcggtttgtgtttcaatggctctgttttatacatttgagacgtcactcacactagtgtaatctttctaattaccctttttgttcttctgtttccagatgattgcacttgtgatcgggctcattactcctttaaggaagctaataatcggcacggaagctcctctccgggtgcttcaagactcagtaactctagtggggtaactgcagctaaaattagaccattatcttagcattagctcaacaatgaatcatctcttggaaaaacgtaactcactcattcgaaagcttcttatgtgtcttgtttctttggctgaagagatggggcagttcctgcaatgaccatgattataggaggaaacctacttaaagg

SEQ ID NO: 143351 - DNA, 971 bp, Arabidopsis thaliana landsberg
ggttttgaaaattgatgattgtgtaggtattggtcaagatcaaacagtgatgctcaatctgaggcaagagtcacgaaagccaatatctttggaaactctgtttgaggtcgtagctgatgatttgcagaggttgaacgacaatcttttatcggttagtacctcgcctccatttcttttctggtctcttgatagagggttatgtttcttatgtaaattctcttcttttatagattgttggtgcagaaaatccggttttgatatctgctgctgagcaaatcttcagcgctggtggcaagaggatgagaccgggtttggtattccttgtatcacgagccactgcggaattagcaggcttaaagtaatctatatataactgtcattacatctttgaccgcgaaactgctcataatctttagaaataaaaatgatggtttatagctgatcttggtgcagggaacttacagtagaacatcggcgtttaggtgagatcattgagatcattcacaccgcaagtttgatacacgatgatgtgttagactaaagtgatatgcgaagaggtaagacaaaagttccattcttttgatcggagtatgcattttctctgcaaagtgactaagctttgtctctgtgtttgttaggaagggaaacggttcacgagctattctgaacaagagtagctgtattagctggggatttcatgtttgctcaagcatcatggtacttatcaaatctcgaaaaccttgaagtcattaagctcataagtcaggtaatattcctttctgagattagatgaagctactcaatacaaagaacatttggtctgaatcttgatttatctttttgcaggtgatcaaagattttgcaagcggtgagataaagcaagcatcgagtttattcgattgtgatgtcaagcttgatgactacatgctaaagagttactacaagacagcttcattagtagctgcaagcac

SEQ ID NO: 143352 - DNA, 1580 bp, Arabidopsis thaliana landsberg
ttctaaaatgatggcagaatagaacgtggctcttcatcttcaaagactgcaccttttagagataaatccttcagcaattagaaaatggcgacgaagaactcaaagcaaaacatgtccgtgttgttaactaagctcggagatcgagatactttcacaatggcggctcgtgagcttgatttaatggctagacagattgatccttcttcctcctccgggaatctccagtcgtttatttccgttatactctccgtcgacaccggagataaaccggcggttcgtaagcattgtattcacttgctcgccgttttatcagtttctcttcctctcaattctctatctcctttcctctctaagatcctcactcgcatcacgagacgtctccgtgatcccgactcttcgattcgatcaacttgcgtcgcggctctgtcggcgatctcttcacgcacgacgaagcctccgttttactcggcgtttatgaaaccgttagcagatacacttttcactgagcaggaggttaatgcgcagattggagcggcgctttgtctcgcggcggcgattgattcagcgtctgatccggatccggttcggttagggcagacacttttgcctagactagagaagcttcgtgaagtgtaacgcgtttaaggcgaaatcggcgggagttgttgtgatcggaagtgtgattggtgctggtggtttgtctggaaccagtgtgagctccggtggattgaaaggacttgtggattgcttattgagcttcttggttagtgaagattgggcggcgaggaaagcagctgctgaagctttggggaggttagctacaatggagagaaatgagctaggtgagttcaaggctaagtgcttgaagatctttgaaagcaggaaatatgataaggtttggtttaaattgatcaccttgaattttttattggaatgtaaggtttggcttaaagatgatcatagatttgaactttgatatggtttaggtgaaagctgtgagagaggtgatgaatcagatgatggaggcttggaaacaggttccagatttatcagaagaggtttctccacccagatctaatgcttcttctaaaggtatcttccttcaccatttgatctttagccaaatcaggaagctttttcttgtttggtacaatgttagtggttgcttacttgtcctgttttttttttattctaggtgatgcaagtgatggacgatatccttcagggtctagagttggttcaacacctgctaaatcaagaactcatctggttaacagatcgactccaccggggagttcactagccaccacggctaggaagcaggctaatagaaaaagcattgatcagaagaaaaccagtctaacagcatcacttacaaaaccaaacgtgaggagaagattggaatggaaagctggaggagctagtattcccactggtgtgtctcttgaagacgaacaacattgtgatcatgacgagaatgcgaaggaaacgagtcattctagtcacaatacggtgcagaagttaggaggtgtttccagctctcttaatggcaatatcccacaatccggtgctacaatggt

SEQ ID NO: 143353 - DNA, 742 bp, Arabidopsis thaliana landsberg
atctatctatatatagattctctatcttacaatctgttagtgtctcgtagctctaattaggtttttactaatgggagtgtcaaagaagaaatcaggtgagattagaggagatttaatcccagggttaccagaggaattagcaattgagtgtttggctagagttccttttcagtttcattcttccatcaaatctgtttgccgatcatggaaatgcgttatctccagtcgttcttttatcaaggaacggataggttttggtaaagctgaatctcttctctgccttgttcaacctctgacttcaccaccgtctccggcgatgattgaaggtggtgagatgagtcagaagaagaaagaggaagaagaaggcgagtctcagatgacgcagcagctgctacaaccgcgtattactggaacgccactttacggtttaagcgtttataacgcaacgctggacacgtggcaccgagtcgcgattcctgaacggattcctttgttctgcgaatgcgttgcgattcaggacgcggggaaagtgttgttaatcggcggttgggatccggagacgttgcagcctgtgcgagatgtttttgttctggatttctttgccggagaaggaagcggaagaaggttcagaagaggcaggccgatgtcggcggcgagatcgtttttcgcctgtgcttctgttggttcgacgaaggtttacgtcgccggaggacatgatgatcagaagaacgctctccgatcg

SEQ ID NO: 143354 - DNA, 928 bp, Arabidopsis thaliana landsberg
  unsure (1)..(928): unsure at all n locations
cggataagtcaaaagaacagaggaccccgagacccaagaataagatcccaaaatgctcacgacacctccacgaactttagtctctgtccctttcttcttcttcttcctcctcttcctttctctacctctctcatctttctttcaatcgaactctgtatacaactctttcctcaagtgtttctccgacaagacgaaatctccacaatcccaaatcactgacaatgtcttctctcagacaaaccctgctttctcctccgttcttcgtgcttacatccgcaatgcgaggttcaacacttcctctactcttaaacccaccatcataatcactcctcgctccgagagccacgtcagcgccgccgtcacttgctcaaaaaccctaaatttcctcctcaaaatccgaagcggcggccatgactacgatggtctctcttacatttccgacaaaccatttttcatcctcgacatgtcgaatatccgtgacgtctctgtagatatcgcatcggattcggcatggatctccgccggagcgactctcggagaggtttattatcggatttgggagaaaagcagagtccatggattccccgccggagtttgtccgacggttggtgttggtgggcatttaagcggcggtggttacggtaacatggtgaggaagtttggattatctgtggattacgttgaggatgccaagatcgtcgatgtaaacggtcgggttttagatcggaaagcaatgggtgaggatcttttctgggcgattaccggtggaggaggaggtagctacggcgtcgttttgggatannnnnnnnnnnnnnnnnnnnnnnnnnnngtcgttacggtgtttagagtggagcagtatatggattcaggagctgtggatatggtcacaaatggcaatcggttggtccgaaactgatcggggtacgag

SEQ ID NO: 143355 - DNA, 588 bp, Arabidopsis thaliana landsberg; identical to SEQ ID NO: 57120

SEQ ID NO: 143356 - DNA, 2693 bp, Arabidopsis thaliana landsberg
  unsure (1)..(2693): unsure at all n locations
atgatgatgatgatgatgatgatggtaaacactaatcagtctgtggagagtccaccaaaatgttgtcgcataataatatcatccatcatcagatggccggagctcaactatagccgcttgtgataaaaggagtgatgggagctgacacacaaatcacgtctgcgttctactcaccgaattnnnnnnnnnnnnnnnnnnnnnnnnnnnnnnnntaaaataagacatttaccgtaccgacattgaccatagataaaatgaataacctaaaccgtgtgaaccaattaaatgatagagatccgcgaccgcgttggaaattaatcaccaatacggcggcgttttcctgaggtagaagaagattcgtttcgttacctggggattagttacaagtcttttcacaagagccaagagttgtgcgattgaacatcaaggaggagactaggaagatcgatttgattaatctcgatggttagttttattgtcctccttgtattcaattaatttccttctatttgtcaatcgcttgatttatcttctgctccttgaggtggtagcaaattggggataaaaccatgtttgtttgttgtaatgaatcttcgaagccctatttttttttttcattatggttttcgatactaggatttggttctagggtttgttttttcagagttattcgtgattgtctcaatcgatttttcatatggttcgttggtactttgaaaattttctgtattcgttttgacaatttgataattgcaaggttttagcttgttatcgaaaattttctctatgattcggctaatctaatcaattgcttgccttgtgtatttgattattgaggatcctatctggtaattgtgttcattgattttagtttcatcattgttttaactcttttcgatttgtcccttttgttttgcagtcgactctatcagctgccagggcagataacttttactatcctccagaatggactccggatcaaggttccttgaacaagtttcaaggacagcatcctctcagagagagggcaaagaaaattggcgagggaattttggtcataaggtaaattatatactatattattagctcattctagttgtaacatcgtgagggagatgctacttttggttggattcacactagttgttgttcattagattgctactgtgatccatgaatagagtgatgaggctaaaccttaagtattacatgaaagaacctatttgatgatcaaatgtaattaaagtgtgctcgatgttaaagtctactcctggtgtacattttgttgatcgatcagaagctttgtttttgttactctcagtttggtttaaatttcatacgtgcttttgttttgttcaggttcgagatgccctataatatatggtgtggtggctgtagttctatgatcgccaagggtgttcgatttaatgcagaaaagaagcaagttggcaactattattctacaaaggtactattgagagtctctcctttctctatcatcacttaaaatatgtatgacttcttcaatttctgtttctgcattctttctcctctttcctatggaactgtggctgaggatttatatcttatcatggtcagatatggagctttgcaatgaaatcaccatgctgtaaacatgagatagtcattcagacagatcctcagaactgcgagtatgtaatcactagtggtgcccagaagaaggttgaggaatatgaagcagaagatgcagaaaccatggagctcactgctgagcaaggttggtttcttttaccttcttctacgattttattctctatagatctctcaatagctgtttgtatttcaactcttgttatttcttcaatcttgacatgctttgggataataacttttgcagagaagggaaagcttgcagaccccttttatcgtctagagcaccaggaagtagatttacagaagaagaaagcagctgaaccgcttttggtccgtcttcagcgagtctcagatgcaagacatgctgatgattactccctaaacaaagctctacgtgcacaacttagggttcgttccaagtttgcaattttttgctctgtttgcaatccgatttttcgaatcctcctttctcactttgttctcatttaccagggacacagaaaacgtgtagcagaggaagagactgcttcaaggaagctaggcttggggataagactgcttccaaagagtgaagaagatattaaagctgcctcaaacgtgaaattcaagagcaagtttgataagaatcgaaaggacaaacgagcactgatccatgcatcttccatttttcccgagtcgtcttactcatcgagcaagaaaagaatggagctggaagcaaaaagaaggaaaataagcgcagcatccgcatcaagcctattgagaggaggattcaaagcttcatctttatctacaaacccatcagcaagcaagcccaaggtttcatcagtttctgtaaggaaactctagttgtagcaaatgtacttgaatcgtttgagaagatgttgtttatcagtgaagatgtttttttttatcagtgaagatgtttgtagcaattggtcttgttctttgtcagtttgtcttataataatagtcgccagtcacatacaacgaatcaagtggtgtacattcttttttcttttttttcgccgaggtgtacattcatttcttgtagtgttttt

SEQ ID NO: 143357 - DNA, 645 bp, Arabidopsis thaliana landsberg
cattcaacattttatatttcacaaaaaaaaaagaagtttttatttttgatcagtgttcaacttatctagtaacactagtatatgtaaagtgagatcaatgtccaaattttcatttattaagaaatttcatggatgttaaatcatggatgttatataacatcgatcgatcaatgtctcacctaatttcaaaggttttctggagtctatgtggagagacgtggacatgaacaggcatcaagtggatccatcaagtgaactaaacctagtgattgtgtcccacggactgacatctcgagtgtttctaacaaaatggttcaagtggacggtggcagagttcgagcggttgaataactttgggaactgcgagttcagagtgatggagttgggtgcgagcggagagtacactttcgcgatacaccacagtgaagaagagatgttagattggggcatgtctaaagatatgattgatgatcaaaaggatcgtgttgatgggtgtcgtgtaacaacatcaaacgattcttgttcattgcatctcaatgagtattttgatttgttagatgtcactgatgatgaagaatgaccactaaatttatatcgctatactttgttttgcgtattgaaagtttataatatttatttcatttg

SEQ ID NO: 143358 - DNA, 1000 bp, Arabidopsis thaliana landsberg; identical to SEQ ID NO: 13584
  unsure (1)..(1000): unsure at all n locations

SEQ ID NO: 143359 - DNA, 868 bp, Arabidopsis thaliana landsberg
gatctgacggagccgcgcatgacccgacggcggagatggatttaagatgcgatgaaacgattctcctccacataatggtctcgattcttcggggaaaattaggaaaattagcatcaagagaagaaatcgcagataaatcttgaaaatgagattacttacaggaaaattagatccggttgcagagagtgataaagagtgtgacagagagaaagagagatttgttggagaggcctatttgcgtcgattaggaatctacccctgaattagtatcggcctgcaatagccatttttttacagactttcaaaatcttaatatgatggaagttgtagttatctgaaaggtttagaataactagagtggagggtaccaacagcgatactgatatccacgtagtctctgtaaatgatatcatctccatcgataactgcatttactacaggtgttccattatactgattgtgttctatatatccacaatattatgtccacaatataatgtccaataaatccaaaaaaaaaatgtaaaattgatgagtgtttcatacttgtgtattgttgagtgtccaatatgatcaatcaattagttaaccggttatcttgcttaggtttgtagcggtatctaaaaaaaacgtctccagtcagtgcataaagagacggttgagatcttcacacaaagaaaggagttacttgacgattacagacggttgtaatgcagtcattatttcgatgtcgacaaaggtacaatgaaaaaatatccttaaaagtcgtaacacgtttacgatactcaattacgctattaggtaattaacgtgaatgctctgttttgttttggttagggattgatggatgagttttgtatggtaattt

SEQ ID NO: 143360 - DNA, 581 bp, Arabidopsis thaliana landsberg
gtgaagttgctcttccactaaagttgaaatcagaaaaaccatcaatggcttcttcatcatctctctttctcctccctctccttcttcttgtctcccaagcttcaggtattatattcttccttttactctatttttaacctcaaatcttctaaatttaaattcatagattaatcacatcaaacgaaagtaatgacatggcttttagcctttaaggttaagtggttaactttacttttgtttgtgatgataagcttcaacggttatattttacaacaagtgcacgtacactgtctggcctgggatccaacctagctccggtcagtcattactcgccggcggcggatttaaactgtcgccgaacagagcttacactctccaacttccaccgctctggtccggtcgcttctggggccgccacggttgctcctttgacagatctggccgtggtcgctgcgccaccggagactgtggtggttctttcctctgtaacggagctggcggtgtacctccggctactcttgccgaggatcaccctcggtcatgacatggacttttatgacatcagcctcgttgatgggtat

SEQ ID NO: 143361 - DNA, 398 bp, Arabidopsis thaliana landsberg
ccacatttatcattacagtctgatttgagctaagttctctcatcataaactctccttggagaatcatggctatttcaaaagctcttatcgcttctcttctcatatctcttcttgttctccaactcgtccaggctgatgtcgtacgtctttttcatcacaaactaattatactcaatataatacttatgttttcaaaaacatatttctcacatgttacaacaatattcttgcaggaaaactcacagaagaaaaatggttacgcaaagaagatcggtaattatatgatttttattaaacctaacgttaaatttagagtgagattaataatctgtgtttttctttcttgtatatatagattgtgggagtgcgtgtgtagacggtgcaggcttccgaggagg

SEQ ID NO: 143362 - DNA, 406 bp, Arabidopsis thaliana landsberg
aggctaatctacgccggaaaacagctagctgatgacaaaacggcaaaggactacaacatagagggaggctctgttcttcatctggttcttgcccttaggggtggctttggtcttctctgagaagtaactcttgaagatatctttttctctttgtatggcttgttggagttcatgggaaaaaagtgattgcaatttggatatgatactttgaatattatgctgtttcactgggtttggatcattttaccaataatctgttaaactatcgaatcattttgttttgtttaacatcgaatcgtactttaacatatttatttgggatttagctatttatgatgaatatctttcattcaagaaagcggctagacatgtgaaaataggatcgagctatgtgtaagatcggacc

SEQ ID NO: 143363 - DNA, 364 bp, Arabidopsis thaliana landsberg
ttctatttgtggacaggtagtagaaagaagaatacatgagcatgagagaattctgagaatgaattcaagagactatggccactccagtcctaaaccaaagctcgtgagacctcctttcaagcttattcccaactgatcatgcatatcaccgatcgactatatatagatgccagactttctgagatgtataatatatgtaaacctaaatactaacactgcaataagtttgaatgataatcatatatataagtttcaagatatgttttctagtaaattaatgattagatagtgctctttgctatcatgcagaatgtaaatttggtgaatagtcatcattagatgaatattacaatttatctgatag

SEQ ID NO: 143364 - DNA, 2047 bp, Arabidopsis thaliana landsberg
gctattagaatggttcttaagattgtgtatgatgatcgattcgttacgttttggtatggtggacgtgttggtatgggtaggcatacagcgattcgttacctgaaaaactcggttgagaatccacggtggtggtttcgtgtttcgtttgctcaagaaatgtttgaagaacgtaatgtggatatactgtgtggctttgttggagagaagatcagcgatgttatgttgattgagatgatcaaaaagctgtttgagtttgggattctgaagattgagcttggtggatgtaatagtgaaaggggttttccacaagagttgtggcttgtgttcgattttgatcaatgtttactttgatggacttgacaaagagattcaagatttgaggctaaagatcaaagttaagaatcctcgtgttgaaacaggaaatgaggaatcaacaggtaatgttttctttaagccagtgaatatttatgcagttaggtatttggatgagatacttgtgataacatcaggctcgaaaatgctgacgatggatttgaagaagcggattgttgacattttggaacagagactagagttgagagtagatagattgaacacatcgattcatagtgcagtgtcagagaagattaactttttagggatgtatcttcaggctgttccaccttcggttttgcgcccgcctaagtctgagaaggcggtcagagcaatgaagaagtatcagaggcagaaagacgttaggaagttggagttaagaaatgctagggagaggaatcgtaagacactggggcttaaaatatttagacatgtcttgaagaaaatcaagcagagcaatgggtttaaatttgaaggtgagatagagaatgaggttagggatattttccagagctggggagaggaagttatgcaagactttatgggttctctcgaagagcgatggaaatggcactggctgctcactagaggagattttctctctttgagacatattagagagaaattaccacaagacctgattgatgcttatgatgaatttcaggagcaggtggacaaacatttggctccgacccaggctaaaaaggtacttgaggatgaggagaggagagtagaagaagaagaggaacagagatatgctgaaaggacagttgaggatttgactaagttatgcatgaaggtgtcagctccggaggaacttgtcagaaaggctattaagttagttgggttcacaaacagcatgggacgaccacggcctatcattcaccttgtgactctcgaggattctgatatcatcaaatggtatgcaggggtagggcgtaaatggcttgatttcttctgctgttgccacaattataagatggtaaaaatcattgttagttatcatatgaggttctcatgtattttgacactagcagagaagcatggatccactaaacgtgaagctattagacactacacgaaagatctcagagtatcagatcttgacgggagggaagaggcccattttccatcggaaagagaggttaagatgatgggagacaagaacctttcagaccctaaacctgtggatggcacactatcgttgcttttgatcaggcttgcatctgatgagcttttgcatcactgtgctgctagtttttgtgaacgagcagatacaattatgcaccgtgtacatctactgcaaaaccgtttacatatcaacccactagacgaagagaaatgggttcctggcatgggcaccatccactcagctttgaatcggaaatgtctccctttgtgctccactcacatcagtgatgtatacttgggtaaaataacccttcaggatgttgatagtagttcattcatcgatctcaggtgatgtctgttactctcttctacaattggttataacatctgcacgagagtaagaagtaaaaatggccattgctgagatcaggcgaaaatgcgtgccaacagggtgtaccacatacacattttgtcttgatttcatcatgataggaaaatgaatgaatacttcataagcaactgtctggctgcgcaatggcatagt

SEQ ID NO: 143365 - DNA, 2134 bp, Arabidopsis thaliana landsberg; identical to SEQ ID NO: 64066

SEQ ID NO: 143366 - DNA, 447 bp, Arabidopsis thaliana landsberg
aacattttacacaacatcattcaccaaaatgggaaatagcttgggaaccaagaaaacagcgacaatcatgaacatcaatggcgagagtttcaaactgaaaacgcctgtggaagctggtacagtggttaaagattttccaggccacgttctcttggaatccgaagcagtgaagcgtttaggaatcagagcaaagcccttggagcctcaccaaaacttggaatccaaaaggatttacttcatggttgaacttccaaggtattatattcctcaattttctacttagttttaggtatcaaagttagaatctttttgagtaaatcatttaaaacccatgtgacagaacatggaaagagagaactccaagaagggttcggtcgggaatccagatgagtgcgaaggagagattagagaatctgaagctgtctcgtagatcatcatctgatctct

SEQ ID NO: 143367 - DNA, 999 bp, Arabidopsis thaliana landsberg
ccctgttcgaaatgatatttagacaatcaaacaattaatcatgttaattttactctatgcgaatgatttacaggaacgtgttgaaggcgagcatagaggttcccgggagcggtgaagtggagtttcactgcactcatctggatcacttggacgagaagtggagaatgaagcaagtcgatgccattatccaatccaccaacgtaccgcacatactcgctggtgctctcaattctctcgacgaatccgattattctcctgagagatggaccgacatcgtcaaggtacattatccaaacaaattaatgcacatatatatatatatacaagttatcaatcgacagctagcttttctatatgtaattattaacgtacgctgctatatagtattacgaagagatgggtaagccaataccaaaagcacaagtgatgagattcttaaagagcaaagaatacactgacgctaaggactttgctggagaatgcgaatctgtggttgttgtcgccaaaggccaaagtgagcaccgtcaaacaaccgcatgcttgctagctgtttcctccctcaatagagttttgattgatagagttttaattttacaggtgtgcaggggacatgcaagtacgggacacgcgtggactacatacttgcttcctccgattcaccgtaccggttcgtgccagggtcgtattccgtgttgtcttccaaaggaacctcggaccatcacatagtcaaagtcgatgttgtaaaagctacatcgatcaacgtcaacgagcaggagcagcgaccgataagatcacataagctgcagagaattacagcgactacgtataataataactcgtctctcacaaaggcctcgtggaggacacactactataaagcatgaacaatcaacatatatattacaaaatgttacaggttttttttcgactgttggttgattaacacaatttgagatctgtgtatagttaataatcgtgctagtctctgtgttgaacgtg

SEQ ID NO: 143368 - DNA, 1171 bp, Arabidopsis thaliana landsberg
  unsure (1)..(1171): unsure at all n locations
ttaaaaaaatgttgcaagcaagttgttgcgactctcatgncaagactcatcctacttccttggatggcaagaatacgagaagaatcctttccacgagtcgtttaacactagtgggattgttcaaatgggtcttgctgaaaaccaggtttgtatcaatgaatctactaactattttaactcatagagaacaaaactagtatgtacacaatttccaaacttttgtttatcggttgttgtttccgttctttttgcagctttcttttgacctaatagagaaatggcttgaagagcatccagaagtcttgggtttgaagaaaaatgatgagtcggtgtttagacaattagctctgttccaagattaccatggcttgccagctttcaaggatgtaagtaacatattgggagtgtttaaacaaagtttcagtttagtttaactttaaccgaaacaaataatcgatagggttttgatatttcgaattcaaaagatcgaaaattcgcgtgtggttatttttatttatttattattattattctttttggattcggtttttcggatatattaaaagagagtaaacattataggagtagagtcaaactatgatactaaatattctatggttttacacaacaggccatggcgaagttcatggggaaaatcagagagaacaaagtgaaattcgatacgaacaagatggttcttacagctggatcaacctcggctaacgagactctaatgttctgtcttgctaatccaggagatgcctttcttatccctgcaccttattatccagggtacgtgtatttttttacactaacgtttttgaatatgttagtgttatttacaagagagactaaatttgttttttgttttttgtcatcatgaaggtttgatagagatctcaaatggaggacaggagtagagattgttcctatccattgcgtaagctcaaatgggtacaagataaccgaggatgcattagaagatgcctactaacgagctctcaaacataacctaaatgttaaaggagttctcataaccaacccttcaaacccacttggaacctctaccacccgtgaagagcttgatcttcttctgaccttcacatcaaccaagaaaatccatatggttagcgatgagatctactcgggaaccgcctttgactcttctgag

SEQ ID NO: 143369 - DNA, 1288 bp, Arabidopsis thaliana landsberg; identical to SEQ ID NO: 49

SEQ ID NO: 143370 - DNA, 910 bp, Arabidopsis thaliana landsberg
gaattaatggattagagttactattgatatatgcaattagatagcaaagacggctcattcatttctgttggttaattgatcggaaatggtacatgtatagttagagagttgagtatgaagatttaataatgcagtttgggaagaaattattctgtgtggttggctggtaaggaaaaagttgaggtattatgtggcagaggtttcccttgattgtgtgtgccacttataatatgcatcaattgctttgattatgattatgatggagaatttggaggctgctatattcttcacatatagtcttttgtttattgttgttcgtaagccttttctttttatatgattcttatcttcgtgcttccgtcttatcaacaggttatacctttctcaaagggaagtgcacacgaacaacctcctcctgatttggcatcatatttgttcaagaaccgaattgtatatttgggaatgtctctcgtaccttcagttactgagttgatacttgcggagtttctttaccttcagtatgaagacgaggaaaagcctatttacctttacataaactcgactgggacaaccaaggtaggcttccattatgtagtccatcatattaagaacgcatactgaatagtaaaattgaaactgtggtttgtttcaaatgaatgactaaaagcttagaaatcattacctatcgttcaaactgtttttaagagaatttatcttctcccttttcagaatggtgaaaagttgggctatgatactgaggcttttgcaatctatgatgtcatggggtaattgatcttcatctctttcctcaacttacttcttcccgtaatagcatcgataacaagacttggatacttaaactgctttccccaatattcaaaattgcacttggagacagttttcaaatata

SEQ ID NO: 143371 - DNA, 1807 bp, Arabidopsis thaliana landsberg
gattgggggggggcggtgagatgaactttctcatttttcataacctgttacattttgattctgaactaaagaaagtgatgtgattctgatctcatctgcattactgttctgaattggaaaaacagagccaaagtgttatatgatcagcctcctgagtttttgcgtcccgctttgcttgaagaaaggcatgaggttagcattgtgtgattcacaagaaaattgattagtttaatcaatcacttctctctgggtagagtgcggtatctaagaagtaatgtaaaatttggttacttgtttagttgttttgccgagtgaggaaggatctttgccatccaattggtgtctatgatttcattagtagaggtatctctcttcaaataaaaaaatccatgttttgattttcttttgggcttctccattcattctgatgccaaatctttcaattcaaatttagagttggaaaaccaagagcttaatgaaaccctttttactaccaaatttaatgctgacatctcgctgaagcaaaacagaccagctcttgttgtgagcagtacaagctggtgaggacacatcatcattctttgttcactttcactcttgtggcatcatccttccgtgccattgaatactagaacatgaatctttcaggacccctgatgaaaactttggtatcctactggaagctgcagtgatgtatgatcggcgtgtggctgcaagatcaaaaggaagtgaaacagctgaaatttcagaagagcaacattatcccaatttgttgttcatcattacaggtaaagatggtttcgttcttgtttagaacatgataatattttgctgtttctttttctgatcataagctatccatactgtctatgaaggtaaaggacctgaaaaggagatgtacgaggagaaaatcaaacgattgaaccttagacatgtggcattccgtacaatgtggctcgcagctgaagattacccattgcttttaggttctgcagatcttggtgtctgcttacacacttcctcgtcgggtttagaccttcccatgaaggtaagcacattgtttttatagctcatatgtgtaataaggttgagaagacttaaaacttgatttccattgtgtcaacttgctaccgatgtttggcgttttaggttgttgatatgtttggatgtggcctcccagtttgctcggtttcctactcatggtaatttaatcattgcctttcaatactttcacgaacaaagactataacgtataaacctttactgttgtgaagcattcaagaactcgttaaagatgggaagaacggacttttgttttcatcttcatcagaattagcagatcaattattggtaagtaacccgtctttcttttaaagacagtatttcaccaagtctacagcagacagcagtaacgttcttctgttttgtcattgtgaacagattctcttcaagggttttccagggaactgtgatgcactaatgtcgcttaaagcgggtgcaatggagactggttcttcgggtcgatgggctacagagtgggaagattgtgcaaaacctttaatcactcaggcaaaatccgtcggccctctctgtatctcgcgcacatacttttttattgggctatttctcataagatgtctttatgtctggtctatgcaggtcgtgtctcaaattgcagattcatgaaagagaagactcaaaatcgatgggcttgagagtttctcacacaactgcttttgtagatccaaatttttatacaaaatcatataaattacaagattgtctcgaaaatattgacagaatctga

SEQ ID NO: 143372 - DNA, 1956 bp, Arabidopsis thaliana landsberg
cttccctcaagtaaccacaacatctcctttctctttttcttgaaatccataatccaaccaaaagaagaaaaaaaagacaataatcttgatagcaaatgaatcaagaaggtgcttcacatagcccatcctccacttccaccgaaccagtccgggcacgttggtcacctaaaccggagcaaatcttgatactcgaatccatcttcaacagtggtactgttaacccaccaaaagatgaaacggtgaggataagaaagatgcttgagaaattcggtgctgtgggagacgcaaacgtcttctactggtttcaaaaccgacggtcaagatctcgccggagacaccggcagcttttagcagccaccaccgcagccgccacctccataggagctgaagaccaccagcacatgacggccatgagcatgcatcaatatccttgcagcaacaacgagattgatttggggtttggaagttgtagcaacttatcagctaattacttccttaatggatcgtcgtcatctcaaatcccttcctttttcctcggcctctcttcttcaagtggtgggtgtgagaacaacaatggtatggagaatctcttcaaaatgtatggccatgaatctgatcataatcatcagcagcagcatcatagctcaaatgctgcatcagttttaaacccatctgatcaaaactccaactcccaatacgaacaaggtgaatcattcattcatctgcatggctcatattttttcttaacaccgtaatacacattgagtttttagatcttaaaccgggatactttccaactaaatcaacatttttcaaaccatttaaactataaatatttggatgagtaatttttatataaataaaattttgaaagtgaaaaagaaagagccaaccattttttctatgagggtttaaaaccaaatttttatgttaggctaactttgtatgttgaaagctaattctcaaatctctatttttgttcttgtatctattgttcttttctttttttccagaagggtttatgacggtgtttataaacggagttcctatggaagtaacaaaaggagcaatagacatgaaaacaatgttcggtgatgattcggtgttacttcattcctctggtcttcctcttcccactgatgagtttggtttcttgatgcattctttacaacatggacaaacttatttcctggtaactaataatatataattcactttttattgttaatttatacacgataacaaaatgctcatggttaatattttcattaatgatttccacacctattttctgtttaaaactttttttttgttcatccgaaaacgattttctcatgattaaattcattaattttaccattgtttgacccaacaaaccatagttatgtttgtaaataaaataccataagagattatgtgtatttcctattaaattagtatgttaaagtgtgtagaaaatggtcttaagcctaataaatagtcaagtcctaatgtctgcagaaattaacctcaagaacccatctcactctctggaactataacataaaaatatttctgcagaaaatataataaaatataaatcaatttgatgtttgtcggtttatgcatgtaataaatgaatatcgtttttgtagaaagtaatatctgtaactgaagttttgtgatttaactaagctttacggattgatgcagctcatatatatggatgtatatatgtgacctttttgagttggtccaagtttttataaataggtagtatatattattaataaagaatatagccaagaacacaagaaccaataaatccactttttgagtaattttgtaaaatattgagttcattggccgaagagaccttgggaatttatattctctcttggtcaaatgaatagacggtgtctttgctcaaaagaaaagaaaaaaaaaaatagacggtgtcgacatttttctagaaat

SEQ ID NO: 143373 - DNA, 1670 bp, Arabidopsis thaliana landsberg
ctctcatccatggcggatttcttctatcttcattaaatatttccctctttattaaaatctcatgaatttcaacggttttctcgacgacggtgctggagcctcaaagctactctctgatgctccgtacaacaaccacttctctttctccgccgtagacaccatgctcggaagcgccgccattgctccttctcagtctcttcctttctcttcttcaggcctctctctcggactcgtaagctcattatctcctcttttaatcttcgatttcttcttcttctactacttatgataatctctgtaaatttggcagcaaacaaatggagaaatgagtagaaacggagagattatggagtcaaacgtaagtcgtaagagtagtagaggagaagatgtagaaagcagatctgaaagtgataacgctgaagctgtctccggtgacgatttagatacctccgatagacctttaaagaagaagaaacgttaccatcgtcacactcctaaacaaattcaagacctcgaatcgtaaactcactatacacaaaatctccatttacacttctacgaatcgttttgatttttgattttgatgaatcctccatttttagggtttttaaagagtgtgcacatccagacgagaagcaacgtcttgatcttagccgtcgacttaacttagatcctcgtcaagtcaagttctggttccagaatcgtcgtactcagatgaaggtttttagcttcgaatcgctaatctttgttttctggtttctttgttttgatttttgatttgtttttacagactcaaatcgaacgacatgagaatgctttgttgaggcaagagaacgataagcttcgagctgagaatatgtctgtacgcgaagctatgagaaaccctatgtgtggtaattgcggcggacctgccgttatcggtgagatctcaatggaagagcaacatctgagaattgaaaactctcgtctcaaagatgagttagaccgagtctgtgccttaaccggtaagtttcttggccggtctaatggttcacatcatataccggactcagcacttgttctcggcgttggtgttggttctggtggatgtaatgttggtggtggtttcactctctcttctccgctgttgcctcaagcttctcctagatttgagatttctaatggaaccggttctggtttggtggctacggttaaccgtcaacaaccggttagtgttagtgattttgatcagagatcgaggtatttggatttagctcttgcggctatggatgagcttgtgaagatggctcagacacgtgagccgctctgggttcgaagctcggattctggttttgaagtgctgaaccaggaagagtacgacacaagtttctctcggtgtgttggaccaaaacaagatgggtttgtctcagaagcttctaaagaagctggaactgttatcatcaatagcttagcgctcgttgaaaccttaatggactcggtgagtagttactaaaacacttaattttattaatgagcttaatccagcaaaagttctagaaagtactaatcttttgatacaatgttttttataggaacggtgggcggaaatgtttcctagtatggtctcaagaacttcaaccacagagattatctctagtggcatgggagggcgaaatggtgcacttcacctt

SEQ ID NO: 143374 - DNA, 818 bp, Arabidopsis thaliana landsberg; identical to SEQ ID NO: 47389

SEQ ID NO: 143375 - DNA, 2143 bp, Arabidopsis thaliana landsberg
  unsure (1)..(2143): unsure at all n locations
agccattttaaatatgtttgtttaagcaatataagaactcaagtaatcaaatacattcttcaatttacggtcttagaacatgtccaacggtagtttttaaaaggctctaaagcctaaaacccttggaactaaagcctaaattttaaatcaatattgaataattttccaaggaatgttccttattttagagtttttgagctgctaagacgtcgtgacatgaaccttcttcttcttcaaccaattcaatatagtgtttgaggaccattttgtttgatcctatggcgtatattctgttctgttttgtttggttttacggttttttgtggtttttagctcatatgattttgttctaaactcttgaattctccaataatgaaagcgatttatgtagatatgagtgtgttctgtctaattatctgagtaatgatgttgtcttaaagagtttgtgtttgatgctttccttagttgtgtttggtttttgtaacaagtaatgaaatgagtttgtttttgatgcttttattagatgagtttggtctaattattttaatgcttttattagaatccaaaatatttataatttatcattttaaaaatatgatttatttttcttaaagaaatccatgcatgactctaccattaaataataaataatataagaattcaacacagactctaaactttgaattgttcaaatttataattaaagaaaaaaaatagagtcagtttatcattgaaaattgtcttaggggtataaattagtttaagcaactaaaccttgtagtttaattgttccaaaactataagctaactaattttgatatcaagtaaagaaattcccacttcatagcagaaattttcaagcattttacacatacttcgtaaccaccaatatcgtcaagacacgtgtacaacctgcgtagactttctccagcaacaatcgttgacttgtcttatctacgactacgactcaatcaaaaccttacacttcctcctccgtcactatcaatggcggatcatctcttactctctctttctcaatctctctctctcaatctcatactgatcccaaacactatccatggattaccaaatctcactaatcctagccaccagcataagctccatcttcctcttgcttatcgtcttcaccgtcgttatgatcgtatgtcgccgtcgtcctccaatccaaaaccatcctcgccggaatcgtaacttccccgaccccgatcccgatctaaacacggaaacagtaaccgaaagcttcgatccatcaatctgtgaaatatccatggcggaactcactatagcaactaaaaacttctcatcggatcttatcgtcggcgacggaagtttcggtctcgtttatcgagctcagctctcaaacggcgtcgtagtcgccgttaaaaagctcgatcacgacgctttacaaggattccgagaattcgcagccgaaatggacactctaggtcgtctcaatcacccaaacatagttaggatcctcggttattgcatctcgggatcagatcggattcttatctacgagttcttagagaaaagtagtcttgactattggttacacgagactgacgaagagaacagtccattgacttggtcaacgcgcgtgaatatcacgcgcgatgtggccaagggtttagcttatctgcatggactaccgaaaccgattatacatagagatatcaaatcgagtaatgtgctgttggattcggatttcgtggcgcatattgcggattttggattggcccgtaggatcgatgcgtcgaggtnnnnnnnnnnnnnnnnngtggcggggacgatggggtacatgccaccggagtattgggaagggaataccgcggcgacggttaaagctgatgtttatagttttggtgtattgatgttggaattggcgacgcggagacggccgaatttaacggttgttgtggatgagaaggaagttgggttggctcaatgggctgtgatcatggtggagcaaaatcggtgttatgaaatgttggattttggaggtgtttgtggtagtgagaagggagtggaagagtattttaggattgcttgtctttgtattaaagagtcgactagagaaaggcctactatggttcaagtggtggagttgttggaggagtta

SEQ ID NO: 143376 - DNA, 1076 bp, Arabidopsis thaliana landsberg
tactcgttaagcagcttgaaagcagcagctgagacttatgggaagccagagtggggcagtactggcccaaccgatgctggtcactacaataactggccagaagacacccagttcttcaaaaaagacgctgtggttgaactcagagtatggagatttcttcctctcatggtactcccagatgctgttggatcacggcgagcggatcctatcctcagccaaatcaatattcgaaaacatgggtgtcaaaatatcggtcaaaatcgctggaatccactggcactacgggacccgctctcacgcgcctgagctcacagcagggtactacaatacaaggttcagagacgggtacctcccgatcgcccaaatgttagccagacacaatgccatattcaacttcacatgtatcgagatgagggatcacgaacagcctcaagacgcactttgtgcaccagagaagctagttaaccaagttgctctagccactctagccgcagaagttcctctagctggtgaaaacgcattgcctaggtacgacgactatgcacacgagcagattctcaaggctccgcgctgaaccttgatcaaaacaatgagggagaacctcgagagatgtgtgcatttacttacctaaggatgaatccggagttgtttcaggcggataactggggaaaattcgtagcgtttgtgaagaaaatgggtgaagggagagactcacatagatgtcgggaagaagttgagcgtgaggctgagcattttgtgcacgttactcagccgctggttcaagaagctgcagtggctctcactcactagagagatagattgtggcatggttctatggtttatgtttgtatgcgattataatgaaatggttatatgacaatgccaaaaaagatgtttaggcttgttggagcttgtgtatgtattgttagtaaaactgaaatgtatgccacagctctggtttttttccggtcaggttgtggcatgctactacttttaatatatgctacttttaatatatgctaaaagatgtacatgttctttaatgaagccaaaataaatagcatttatttaataca

SEQ ID NO: 143377 - DNA, 1182 bp, Arabidopsis thaliana landsberg
ccaggtcatcatggatcacaccaaactggatccaactcaacttatggtactactaacactgggggtgtggaccacgagaaaaaaagtgtgaccgaaaaagttatggagaaactaccaggtcatcatgggtcacatcaaactgggactaacacggcttatggtactaacactaatgtcgttcaccatgagaaaaaaggtatagcagaaaagattaaagagcaactgccaggtcatcatggaactcacaaaactggaaccaccacaagttatggtaatactggcgttgttcaccatgaaaataaaagtacgatggataagattaaagagaagcttcccggtggtcatcactagattgattaacaacttgtttaagcatattttaagtatttgtgtggtgtaataatatgatgatgtggctttctttcattgagtcgctaaataatatatgtaagtgatggatctttgaattaatataaaatatctacttctggtttcgtttatttatctttctatcgcttcaactattccatgttattaaaatacttgtgagtttgacacatacaaccacgtataattcacatgtaattatttggtaattcaattctttacaagtttatatgttcttttgcatacaagttatcacggaaacgaccgcagttgtttggcaatgtatattactcaggttttcaattcaggcccatacggcccaaataagttgtttttacggatatcgagttaaaagaggtgtgtcgattataacggacatgtgtcacactaaccacaaaaccaacgtcttacgtaatcgccacgtgtgtcacttcaacgcgatttgataataatcataatactatatgtgattatgatccctatccaaagttgcggttctataaaaataccattcaagagcgtatacatctttatccatcagtgtcttaattttgtctatagctaaaaaaaggttcaattgtaaaaggaatatggagtcttaccaaaaccagtccggagcgcagcagactcaccaacagcttgaccaatttggaaatccatttccagccaccaccggagcctatggaactgccggtggagctccagccgtggctgaaggtggtggtttaagtggcatgcttcaccgttctgggagtagctctagctctagctcggtatgcttctgttttacgcaat

SEQ ID NO: 143378 - DNA, 2477 bp, Arabidopsis thaliana landsberg
acctaaccaccttcattttcttattgcattggtttggagctattgacccacctggtggatttctggttgaagggggggccggccttttggaatatattaatggctaggaccaatgaaaaccattccgaggttgctgcatcttacatagaggtaggtctcttttcttttttaccctgaccactagggatactagtgattatataactgcggaaagctgcgatagtctctttagttagtgatatggagttagttagcaccttcattgtgtacagttgaatggtgttctcttttcctttctgttttaagagaagaatttggagttgaatatgtaaaatcagaaatgttttgtccaattagtatgttatggatgattgactaagctggagtatttctattttgttttggttaagttaataagatcagaaatttcgtgtgtttcttacagacacagatgatcaaagcacgagaacagcaattgcagcaatctcaacacccacaagtttcacagcagcagcagcaacaacaacaacagcagattcaaatgcaacaactcttgttgcaacgtgcacagcaacagcagcagcagcaacaacaacaacatcatcatcatcagcaacagcaacagcaacagcagcagcaacagcaacagcagcagcagcagcaacaacaacatcaaaaccaaccaccttctcaacagcagcagcagcaatcaacgcctcaacaccaacagcagcctacaccacagcagcagcctcagagaagagacgggtcccaccttgcaaatggatcagcaaatggactcgttggtaataacagtgaaccagttatgaggcaaaatcctgggtctgggagttccttagctagtaaagcatatgaggagcgtgtaaaaatgcctactcagagggagtccttagatgaggctgctatgaaggttagttttggctaggcgtgtgtttaaattttatttcttctttttgtcacaccttagtttcatcaaatggtataattcaaattttcattggtggcagcgatttggggacaatgttggacaactgttggacccaagtcatgcatcaatattgaaatctgctgcagcctctggacagcctgcagggtgctgttcttatacttctatcttcattgtttccacttatatcctatgctacctcgcctagtataaaatgattttgtcgcatcgaaaaatcattcaatatctctctcttgttctaaatgccattttctggtgaatcacaggcaagtgttacacagtacaagtggtggtatgtctccacaggttcaaactcgaaatcagcaacttcctgggtctgcagtggtatgttatattgaataaattttgtgtctacccccttgtagttttttactgttagttggtagttaatacacactggcttatttgggtttaggatattaaaagtgagatcaatcccgtgctcactcccagaactgctgttccagaaggatcgttgattggaattcctggtaggtttgctgttctgagtgtatcatttcagttggttaagcgtgtcaaatgtagtataagtacttcagctcacaagaatttgcttaggattaatgactggtttcctgtttcaggttcaaatcaaggcagcaacaaccttacacttaaagggtggccactcactgtaagctttatccatgcattttactatagctcgtctcactctcttatctcaaaagaagtttctattgactgctgctttctttcctgattcagggatttgatcagcttcgttctggtcttcttcagcagcaaaaaccatttatgcagtctcagtcttttcaccaactcaacatgctaactcctcagcatcagcaacagctcatgctggctcaacagaatctaaattcacagtccgtcagtgaagagaacagaagactgaaaatgctattgaacaaccggagcatgagcctaggaaaggatggccttgggagttctgtaggggatgtgttaccaaatgtcggatcgtcattacaacctggtggctctcttttgcctcgtggagacaccgatatgctacttaaggttggccttgtcttctttttttacaaatcttaagtggctggctttcatgtctttcaaaattttgcaactctgaataaactcttaagggtattgtttggtaaatttggaagaagatataataatctctgctctttttcaatggctgtgacgtttgccctaaatttttaataattgattatgctttgtagttaaagatggctctgttacagcagcagcagcaacatcaacagcagggtggtgggaatccaccacagccacagccgcagccacaaccacttaatcagcttgcccttacaaatccgcaaccacagagttcaaatcacagtattcatcaacaagagaaattgggaggtggtggtagtattacgatggatggtagcatttcaaattctttaagaggaaacgagcaggt

SEQ ID NO: 143379 - DNA, 3328 bp, Arabidopsis thaliana landsberg
tatcataactgactcagtatgttcaccataacatttttatgtatttgttctgttgctatccaggtgaggctgaatcaatattagctagagcacaagcaacagccaagggactggccatggtatctcaatccctcaaggaagctggtggagaggaggtgatttcctgaattatgagatcaatgaattaactattacttaggcgttaatactgttttatcaaatttggatgtgttagtgctacttaacccttcacatgtgaatgcaatgaatgattccctctagatgctgcataaagatttgagttgtttattggaattgcaaatgttgactctttaagtttatttgtttttgctatccaaaagagaacctcatatgcttaatggtggtgtgatatgcaggctgcgagtttgagagttgcggagcaatacattcaagcttttggcaaaattgctaaggaggtaaacacatcatttacttgatcccatttacttttctaatctcgtccttccttgggatttatcttatagagttgtatttttttgttcttgttagggtacaacaatgctgcttccgagtaatgtcgacaatcctgctagcatgatcgctcaagctttaggaatgtacaaagggttgtcaacaaaggtcccaacaatggtttcagggaaacttctggagtagaatcctctactaacgtggttgttgccaaacttgaatagaagctataatgtagctgaacctagggaacaactattcttttgatttgtccaggcttttagccattttcagtttgtttatttcttcatatgagaaacagttatcttaccatataaccattttgcaaactagaaaacagatctaatctcaaatttctgacagagtttttgcaccatatttggtcttctaagtgttggctcttgttatctttatatcaatatccaaattttgttatgtttgcttttgctattttgttgctattgtcttgaatcgaattggcacagaaagagtatctggctaaaaccaaaaacgcaagagcggttgagaataaggtttggttgttctcctgatgaataggtcgttgacagagaagagccttaaagaacctaaggtgacatgaaatttttagcccttttcctgaaatagctttgtgttgtgttgtgttggtacgaaccactatatatatctcttttgtgtcttcacctacatttgctcagcctctaataaggagaaaaaagaaacaaacagttttggcttcttgaaaggaatcagaatcttttagctccacagttcttcccattgtgtaaatttgttttcgtttcaaaccgatttctttctattaaacaccatgggaggctgtgcgagcaaacctaaggaatctgatatccctgaaaccgaaaagactgttgtcgagtccaagaacgtcgaaactgaaaccgtatctcaggtttgtagaacaagttcattagagaatgatcggtttttatccattttgtctatgttttaggtgaaagatgtgtgattgttttgttgatttacaggagaaggcagatgaagttgtcacagaaaagaaggaagagtctgctggagatgtagcagagacaccgaaggaagctgaggcagccaaaccggccgaggccgaggccgaggcagctaagcctgccgaggctgaggtagccaagcctgccgaggctgaggtagccaagcctgccgaggctgaggtagccaagcctgccgaggctgaggcagctccagaggtggtgaagaccgaagaagctgtcgtcgaaactgttaaggagactgagccaccaaaacaagaggaggctgttgtagcagccaatgacaccaaaaccaacgaagagcctcttgtaaccctttaattctttcacattttcatttctcaaaaccccaaaattgttgtgcatcaaatctgtaatatgtatatgtttcgcaccactgttgtattgctattgttaccatacgtacgttaatgaaacaatagacttgttgtgatttgtgttacctcctaaaaacatctttttctcagttccaagttatggtaaagttattaattcttaactttccccttttgtgaagataataaggttataaactatgatgaaatagggaaattttggtttcattgaaattggatttgatacaattcttctctgaaaccaaaagggggaggtcaaaaatgcagactttatcaatagctttctgcaacagtgccctagtgataagaagaagaaactctatcggaaacagaaacagagtaaagttgagtttaatctcgtcttcttctccgactcttgtttgccattcaaagtctaaatctcaaaccgatagcttgagggtgttggaatgggacaagctctgcgatgttgtcgcttcttttgctcgtacttctttaggccgagaagctacaaaggtttgatttttctattgggttttctcctttagccgttgattctctgttttatattgacacagagattgttggttttcagaaaaagctttggtctcttgaccagagtttcagtgaaagtttgaaacttttagatgaaactgatgccgccattaaaatgcttgaacatggttccttctgtcttgacctctccagtattcatatctccctcgtaagtttcatcatcttcaatctctgaagtgataatctttgcatgaaaattgtatagtttttgatgtaatactgatttgtgtgaaggttgaatcgggaattcgtcatgctaagaggaggctttctttacgagcagaccaagcacttgaacttgcttctcttcttaggttcttcgaaaatttgcagcttgatttgaaagctgccattaagcaagatggagattggtacaaacggtttatgcctttatctgaattggtatttgcagttttctctccaaatttttgatactttttttaacttggacattgtggtggcctcatattcactttgtgtttgcagataatgcaccctgtgattaatagatcatttgtcaagttggttgaacaagttatagatcctgatggtacaatcaaagattccgcggtttgttctttttctcactttgactacattgtcatcaagatgtatgatccttatgttgaactcatctttattgtttcagagtagtgccctgagacaatcacgtgaacgagtgcagacacttgaaagaaaggtcaagttagtttttctttgtaactgtgaattgaagatatcttttgaagtagtattgtctgaaaactacctgttgtctcctttcagctgcagcaactgctggatgctatcataaggagccaaaaggatgacgaatctgtcatg

SEQ ID NO: 143380 - DNA, 1332 bp, Arabidopsis thaliana landsberg
cggcttggaaggattattgtttgggtatgacattggggctacctccggtgctacgctctcacttcaggttattttaaagtatctattttcatctagttacattttagctttcagaattttaacattatgtactgtctcatatggtcttgaacagtcacctgcgcttagcggaactacatggtttaacttctcacctgttcagctaggacttgtggtatgttatttggagatcgatattttctgtagttaagccatagagttagcagaaaatgatagtttttactgcattttgttgtgtaggttagcggatccttgtatggagcccttcttggctcaatttctgtctatggcgttgctgatttccttggtaagtcttgtttttttgggttgacttctcgttcttcttaactgaatgcaagtatctcattctggttttcttcacatctttatgaaggaagaaggcgggaacttattatagctgctgttctctatctcctcgggtctctgatcactggctgtgcccctgatcttaatattctcttagttggaaggcttctctatggctttggtattggtttggtgagctccggaaacctgaatcgttatggtaatttctttgttacttttgttgttgattgttagttaatgttttatgtaaattggttttgcttgataggcaatgcatggggctcccctctatattgctgagacatgcccatctcaaatccgtggaactttgatatctctgaaagaactcttcatcgtattgggaattttggtaagtgtctgatgtcaatctcttcccagtatgatttctgcgtaaatattgatttccttcttgtgcagttgggtttttctgttggaagcttccagattgatgtagttggagggtggcgttacatgtatggatttggtacgcctgttgctttgctgatgggactaggcatgtggagtctccctgcatctcctcgctggttgctgcttagagctgtccaaggtaaaggacaattacaagaatacaaagagaaggccatgcttgccctcagcaaattacgtggcagacctccaggtgataaaatctcagagaagttggtagatgatgcctatttatctgtgaaaacggcctatgaagatgagaaatctgggggaaacttcctggaagtattccaagggcctaatttgaaagctttgacaattggtggaggtttagtcctcttccaacaggtgattcttcttcgctgtttccatttggatgaatgtgtgagcatttttgaaataatttacactctgcttcgttgtgacagataactggacagcctagtgttctttatt

SEQ ID NO: 143381 - DNA, 539 bp, Arabidopsis thaliana landsberg
agatgtttaataaatggcaagctcaaaaatggtgggtggagaatttcgagaaggtcatggagttatacaacgtgcagttcaatcagcagagcgtaccgcttcaaactcctcctgtatctgaagatggggtaatgcaatttcactattgaacacacaaatctattaattgacaaccaaagcgttatgggttatatctctctttcggttattcaatggtgtgccagggctcacaaatacagtccgtgaaggacagtcctgtaactccaccgctggaaagagagcgacctcaccgcaatattccaggctcttctggttttgcttcaaccccaaagctctctagcatcagcggaaccaagactgaaacatcatctatcgatggttctgctagaagtagctcggtagatcgaaccgaggaggtctcagtgagtaacgcaagtgacatggaaagtgaatgggtagaacaagatgagcctggtatctatattactatcagagctttaccagatggaaatcgcgagcttaggcgagttcgattcagg

SEQ ID NO: 143382 - DNA, 1199 bp, Arabidopsis thaliana landsberg
atggcccaattggttccggcaacatggagtggactgtgaatttcctgcctgtaaaactgtaaagacagagagaagagcactccccagtctcagtggtgcggtgaggagagcttcgttgtcttccccattgcaattaggggttttcaaaacgggtaatcgaattcggaggagctcgtttttgaaacggaggatgagatcctttccacttccttctacctgctgacaatgggcaactgcggttctagagacgaggctgccgtcttcactcctcaagctcaaggtttctctttctctctatctctgtctctcgccgtttcttttttcctgatctctctcctctttggttcacctcgcagcccaacagctccagaagaagcactcccgatccgtctcagatctgagcgatccatccactcctcgcttccgagacgactctcgcactcctatttcgtatgcccaagtcatcccctttactttgtttgagcttgagaccatcaccaagagcttccgcccagattatatactcggagaaggtggtttcggtaccgtctacaagggttacattgatgacaatctccgcgtcggcctcaagtctctccctgttgccgtcaaggtccttaacaaggagggactccagggtcaccgtgaatggcttacagaggtcaacttcctcggccaactccgtcatcccaacctcgtcaagcttattggttactgctgcgaggacgatcaccgattacttgtttatgagttcatgctgcgaggcagtcttgagaatcacctatttcgaagtaatccccgcacccttctccattttttgaagtctctgttcattcctacatatacaagcttattctgccttttagtcttgtcatactcgtctcttatttaaccaagtcaccatgggctctctcttcagaaaccacagctccgctatcttggtctagaaggatgatgattgctcttggagctgcgaaaggccttgctttcctccacaatgctgaaagaccggttatttatagggatttcaagacttccaatatactgcttgactccgtaagcagttattcttttctttctgctttgccaaagttgctccaagatattgggcatacctttccacaactaatatatccttgaataggctgatgaaccttcaggactacaccgccaagctttcagatcttgggttagctaaa

SEQ ID NO: 143383 - DNA, 680 bp, Arabidopsis thaliana landsberg
accaaaccctaaacctaaaccccctttttttcccgccattgtatcaatccatgaatcaatcagtttcttccaatttcactcaccgatcactcctcgaatcacgatttcctatattctccaccggattcggcaaatccgtcaatctcaaacctccccgtgtctcatctggtcctgaatccaacgattcaggtcacgaaaccttaaccgataagcttatccatctcctcagagctgttccagattgggcagacgagataaaagagcgtgggatgcagcagaaacgctctctctacacacacgagaaatgggttgaacatagaagctctcttcgccatgtgcgtcatctactctcgagcttttcttcacgagttatactctccctgattccacctgttttcttcttcacaagcgtcgcggttgtgatcgctagctacaactccgccgtggctttggattggcttcctggtatttttccaattcttcgatcctcgtcgttgccgtatcagctcacagctccggctttggctcttcttctggtctttcgtacggaggcttcgtattctaggtatgaagaaggaaggaaagcttgggttgggattattgctggaactaatgatttagctaggcaagttatttgttccgttgatagctccggtgatgaattgatcatcaaagatgtg

SEQ ID NO: 143384 - DNA, 631 bp, Arabidopsis thaliana landsberg
  unsure (1)..(631): unsure at all n locations
gactaaaccggttttgatggttcaggagcattcgaaacagcacagcgagaagaagattaggatacttctcatgctcaaccggaaatccaatcgatgattgttggcgttgtgaccggagatggcaatcccggcgaaaacatctagccaattgcgcaatcgggttcggtcgcaatgcannnnnnnnnnnnnnnnnnnnnnnnnnnntagtgagtgacccaaacgacgataacccggttaaccctaaaccgggaacattacgtcacgcagtaattcaagaagaaccattatggatcgtctttaaacgtgacatggtcataacattaaaagaagaactaatcatgaacagtttcaaaacaatcgatggtcgtggcgtcaacgttcacatagctaatggtgcatgcatcacgattcagttcgtgactaacattatcatccatgggatacatattcatgattgtagaccaactggtaacgctatggttagaagctctccttcgcattatggttggagaactatggctgatggagatgggatttcgattttcgggtcgagtcatatttggattgatcataattcgctttcgaattgtgctgatgggcttattgatgctgttatggcttctaatgctat

SEQ ID NO: 143385 - DNA, 774 bp, Arabidopsis thaliana landsberg; identical to SEQ ID NO: 51616

SEQ ID NO: 143386 - DNA, 1238 bp, Arabidopsis thaliana landsberg
  unsure (1)..(1238): unsure at all n locations
caagcttagatatggtgggtanaatatacgaagtaaaataaatggtcccaagtatatgaatgaatacatgtatttacagatatctctctcccctatctccttatgatttgtcattttcctcacccataatcctataaaataatcaagaacctccgagggagagagacatacacacagacagagtaagacatatataacatatatagagagagaagacctaaacaaagagacatatggtgtctttaggttactgcttgaaggagaagaagacatgcgtgagatgggtagagatatacttcgatgactgtctctgtaacttaaacgacgacgtttcattcgcacttggaatcgctagcctcctctgttggggagtcgcagagattcctcaggtcatcactaacttccgtacaaagtcaagtaacggtgtctctctctccttcctcctcgcttgggtcgccgggtccgtacaccatctcaagttcttctttgttatcataatctctctctttccctaacgttattttatatgaattttatcaatcggtgcagtgatatcttcaatctcgtcggttgtcttcttgaaccagctactgtaagatacacaaaacatctatagtacataattattttcatgtcttattattgttttctcattgtttatcttattttgaattgtgtagttgccgactcagttctacacagccttggtaacatcaccgtcttctcgccgcataaataaacatatgtcgctacaaagcttacgtgtcgcttctattaaaattagcgtcaattgttcggatttatttattttattcgaccgctttattttattctatttacaaatcagccccgtaactatttttttttcctctctctatagctttacacagtgagcactgtagtattggtgatccagactatttactacgattacatctacaaactttgtagacatagacgtaccaagatttgtcaaaaggtaataattataagagttgattacatttttaggtgttgattatcataatgagggtttttttttttgttaaggatgaggaagatgaagagaagagaccattgaaaccaccaaagacgatgggatctgctatttccatcccaggaggatcttacaaagattcttctcggagagagttctattacacgtacggattattaaacataaatcatattttatttactctaatttgtctacaaataagttaaagtttgtacgaaag

SEQ ID NO: 143387 - DNA, 1366 bp, Arabidopsis thaliana landsberg
ctccaaagaaaccataaaccaaatctaatcctctctctctcggtctcctccattacctaaacaaaccctttccaacacatacatatcgagagagagagagagagaccgaagtttccgagtctcgtaaccagatcggatccgaaagttccatactttaaaaagatgcagacaccaaacaacagcggttcaacagattcagtgttaccaccaacatcagccggaacaacaccaccaccaccgttgcagcaatcaacaccaccaccgcagcagcaacaacaacaacagtggcaacaacaacaacaatggatggctgcgatgcaccaataccctgcagctgctatggctatgatgcaacaacaacagatgatgatgtatcctcaccctcaatacgctccttacaatcaagctgcttatcaacagcatcctcagtttcaatacgctgcttatcaacagcagcagcagcaacatcaccagagtcagcagcagccacgcggtggatctggtggtgatgatgtcaagactctttgggttggtgatcttcttcattggatggatgagacttatctccatacctgtttctctcacaccaatgaggtatctctttcttcttaattttttcttattgttgtattgattcttgatttgatgatatttgtaattcagatctttacttgttgttgttgtttcaattatgatgtttttagtgagtggaatcttttgttttttgtgttctgacatggaaagtgattgatgtatcactagtgtatagatccgtgacttttttttggttattggaaaagattcgttactgtgaattcaatgtaaatttggcaagttttgaactttttgatttggtttgagatctaaattgtgtagaagccaaaatgtttgacatttagggtaatggagaactatgttgacctgaaaaaggacatacttttaaagttcatttcataaggcaagtaaagtacattgccacgtttagagaacctttctggttataggaacaaaaagaactccaaacattgtcacaagatctgttctgttttatcataaatttgtgtttttattttcccttttagcttattctttcttgttttgttgttttgtgatgtgtaggtttcttctgtgaaagttatacgcaacaagcaaacttgtcaatctgaaggatatgggtttgttgagtttctttcacgttcagcagctgaggaagctcttcagagctttaacggtgtaacaatgccgaacgcggaacagcctttccgtttaaactgggcatctttcagtactggtgagaaaagagcatcagagaatggtccaaacctatccatatttgttggagatttggctccaaatgtgagtgatg

SEQ ID NO: 143388 - DNA, 612 bp, Arabidopsis thaliana landsberg
gtgcatccctgaactccaacactttgcaccaggagtccccattgtgcttgttggtaccaaaatgggtaagatagctataagagtggagccaacatatttccttgtgtaatgcttgagaatcacatatatgtaatgtttcttacaatgttccgttatctagatcttcgtgaagatagacattacttgtctgatcatcctggactgtccccggtaactacatcacaggtgtgctttttcaacctgtagaaaccgaaaagattgttgtgacattctctagactctctcttctctaggttttatatgatttaatcattcatgtgttacagggagaggaactccgcaagcatatcggagcgacttattacattgaatgtagctcaaaaactcaacaggtacacttgttcatgtgtgtttggaaacttaggagtcattagtgttaggtgactctttacttgcaaactatatgcttttctttggttcatggcttttgcagaatgtgaaagccgtatttgatgctgctattaaagtagtaattaaaccagcagtgaaacaaaaggagaagaagaagaagcagaagcctcgcaacggatgcctctcgtaactggaaataat

SEQ ID NO: 143389 - DNA, 2665 bp, Arabidopsis thaliana landsberg; identical to SEQ ID NO: 17304

SEQ ID NO: 143390 - DNA, 1650 bp, Arabidopsis thaliana landsberg
  unsure (1)..(1650): unsure at all n locations
attttttgacaatgtttttccgacttttctggaataggaattggcaagagttcaataattttcagtttcaatttaattgcccatcaggtgcgtttctggtgatactcttagggttctcccttatttttcattttactaaatgatactttagagagtccagagccttcattcgtttgcttcacagnntcgtgataatagttctctctcattgtggtattagtattcatagcacttgataatagttctctcttattgtggtattagtagccatagcacttgattaggtttaggctttatcagtgtaacactcgtttcttagatctagtgtaaaagatatgtctttgttaacaggaagagagagatgcaatcttggcaaagattgaagtttcacaagcacatttagagttattaaataagacaaatgtgcttattgatgccttccccatacggaatgatggggaatttggtacaattaacaattttcgccctggccgactccctgccataaaagtaagtaaaaaaaaattccttgtatgtttataatctcgttctgctcatatttttgtctaaacaacatgaaacatatttaggttgagtgggatgagatcaatgctgcttggggccaagcctgtcttctcctccatacgatgtgtaactatttccggccaaagtttcagtatccttataactatctcacagtccttttccttattttaccctttttgtttgattctgttgactgtatatgaagtttatccttgaccagtaaccccttttaagatgtcaagttaaaatacagccgatggggagttatcctagaattgtagacagcaacaacgaaacttatgagctgtaagtaaattgcatattcttgtcctggtttgttattggggttgaactgaaaacagatgtcctgtgctgagttttgtctttgtttttcttgaccctttttaactaaaagctgttgataatcttcggcaggtttggtcctgttaacttgttttggagcactcggtacgataaagccatgacactgtatttgatgtgtcttaaagactttgctgattttgcaaattcaaaggaccaagagaacaatattccaccagataattgcctcaaccttccatacaagcaagtccccattcttttagaccaaaatctttgtcgtcgcttatctttttttgttaatgggtgcaatggaaaaacttacaagtttctcatataaaatcttttttgcaggatcgaaaaggacatatttatttggtattcaataacacagagcttcaacaagcaagagagttggaccaaagcactaaagtatactctctgcaacctcaaatgggctctctactggttcgttggaaacactaatttccaacctctctctgcgacggtctctctgccttctaatatatcagcggctggttccttgtacgccaagcgaggtcctgactctagtaagccttcatgtaaaaaaacttagaaactcgtgatagactgaatcaacgactttgtgaatagtttataagcatttatgtcatagcatcatcgaataataagaaacattgatgcttttaagtttttttccctttttttgtacagtctgatttgtgtgattataggcctttttatttcgttagtactttcaag

SEQ ID NO: 143391 - DNA, 639 bp, Arabidopsis thaliana landsberg
atggaacaaattcacggcggcgattcgaattccggcggcggaggaggaggaagtagccggaacgatgagatttctgtgacgagagcgtcgcgtttcgatgcattgccggaagattgtatctcgaaggtgatttcacatacgagtcctcgggacgcttgtgttgtggcttcggtttcgaaatcggtgaaattttctttgcaatcggatttggtttgggagatgtttcttccgtcggagtactcgtctcttgttcttcaatcagcgaatcatttatcgaaaaaggagatctttttatctctcgctgataactctgtgttggttgaaaatggcaaaaaggtaacgaatttgaatctgatctcgagaatgtgaaactagggttttgtttataatcgtataattatctgattttgcgtgttgatttttgtgaaaaaatcagagcttttgggtggagaaagctagtgggaagaagtgttatatgttatcagcgatggaattgacgatcatttggggagattctcctgcttattggaaatggattacagttcctgaatctaagtaaagatctcatcacccctgcccttagtactctgtttctgattttgaaaattagagtttgtttacttaatcttgtccatatgt

SEQ ID NO: 143392 - DNA, 1344 bp, Arabidopsis thaliana landsberg
tgaaaggcccaaaaactcagatttttaaaggcccaaatctattgcatgtcgaccacgtggaccaccgtacagagaaactcgtatccaacaaagctgttgccttcgagacggaaacgtttcctaaaacggatcgattacgaaaattcacgcagccacgtgatgtcattagaaagcttaccatccaacggtttccatcaatccacgtgtaagactaagaaccctccacgtaaatcgaatatttttatgactccttcctttaatgttagctttgaacacactaatcaaacgaataaattctttatacatacacaatcacattatgtgtggcctatgatttagtcagatttatgacaaactgataaagtacaagaaatgataaccaaatagaattcaattcatatatactcttttcggataaacagtacagtgatcaaaattattagaattagtggccaaataaaactaagaacgttatgtatattaaatgacaactcgagagaagacgaatacttttctatataaagatgtaaaattccaaatatgaaatgccattgaattatatatttctataattagtgtactcgaattaaatatataatttcttaacgtaataataagatacaacaagttgcaccaaatcccactctctcactctagaaaccaaatgtcgttgataataatagaacactttctttctctctctaaaaagcaaaagtagtctagtcactgatttcttctaatcctccggtggagtgagagatgatatctccgacgttgtttcctctcctctgcgctttatttttatgtcttccagtggctgttatcttcacagtccagcgagaactcacctgcgttatctcgccggagtttggtttccgctctctttccgtcttctctctttactctcgaaatgtccccgactcttcttcttcttctccggcggttcggattcgacagccgattcccaaagaagacgaccctcttcttcgactatcttctcgggttaacccgaatctacctcccggttcgacccggaaaatagcttttatgtacttaacgacgtcgcctcttccgttcgcgcctctttgggagatgttcttcgacggaatctccaagaatctttacaatgtctacgttcacgcggatgcgacccaagaatgcgatccgccgttcacaggagtgttcttgaaccgggtcattcactgtaagccctcgctgagacgcgctcccactctaagtgcggcggcgcgtagactactagcacacccgcttccccacgatccattgaattacatgtaaaaggttaaaacaccttcatgagtaccaattagctccttcgacttc

SEQ ID NO: 143393 - DNA, 1184 bp, Arabidopsis thaliana landsberg
tctagagtcttcttgtgagaatgagacaagattaggttacggtttagcataggattccaaattcattttcaatcccaaaagtcagatcatttcttcaaatttcttagctcgctgtttctctttttttttttaaatgcaagacacagaatttcatttaaatattattttctttttagataaataatatatggttttgtgtgatgataattgcagatacgattattcaggatatgggcaatcttctggtaaggtaagtcgattatttcaaatcacgcttgttttcttcttcttttttattcttttcttttgggactaattagcacgtccattttatatacattcgtgtatcatatataaaccacaaaatgcaaaaagaaaaatactatcagctccatattgtaattaagaagatcacattcattgttgagtgtatgatttgtgtgtgatttggatcgtaattttgaaagccaagcgagcaagatacgtacgcagacatagaagcagcttacaattggctaagacagacctacggtacaaaagatgaacgtatcattttgtatggacaatccgttggaagtggaccgtcgcttgagcttgcttctcgtcttccacgtctccgagcacttgttctccatagtcctttcttgtctggtctacgtgttatgtaccctgtcaagcactccttcccgttcgacatttacaaggttcggttgttcttatatatcttccttgattttactaaataccccaaactaagcataatcacattgtttaggcaaaactaatcagagttttcttattgcagaatattgacaaaattcatctcgtggagtgtcctgttcttgtaattcatgtaagtatatttcattgcaatatagatatactcattcttattatatttatacgatattatagtaacaacttggtataattctctttgcgtgcattgcagggaacagatgacgatgtggtgaatatttcacatggaaaacatttatggggactatgcaaagaaaaatacgaacccttatggcttaaaggaagaggccattctgatattgagatgtctcctgagtacttacctcacttaagaaagttcatttcagccattgaaaagcttccagttccaaaatttcgacgccaatcattggctaatgaccacaagaacgacaaatcaacgaaga

SEQ ID NO: 143394 - DNA, 569 bp, Arabidopsis thaliana landsberg
ggaagtgttaatcgcagtgggattaaaagacgcgagcggaaagctgttcaaatacgacccagcgaccaaagccgtgactgagttaatggaaggtctaagtggtgctgctggttgtgcagtgagctcagatggttcattcgtgctagttagcgagttcataaagagtaacatcaagaaatattggattaaagggcccaaagctggaactattgaagacttctcaagtcttgtctcgaaccccgacaacatcaggagggtaggttctaccggaaatttctgggtcgcctctgtcgtgaacaaggttgttatgcctaccgaccctagggcggtcaaactagacgctaatggaaaagtgctccagaccattttcctcaagaatgagtttgggaatactttgcttagtgaagtcaacgagttcaacggccatctttacatcggaactcttactggacctttcgccggagtcatgaaactttaaattggtatcaactatatggttctttggtgattaccatttttgatatcattttgaaggggatcctctagagtcgacctgcatggcatgcaag

SEQ ID NO: 143395 - DNA, 930 bp, Arabidopsis thaliana landsberg
attactccttcaaccatatcattcacatctcctcagtttcgataaaacaaacaaagccctaatatttttacttgctatatcgctgtctctctcccttctcctctataaacatacatataaattaagtacacaccaaaatgtggacgatgggttacaacgaaggaggcgcagattccttcaacggaggaagaaagcttcgtcctctcatcccacgtctcacttcttgccccaccgccgccgtaaacaccaactccgaccaccgctttaatatgggtatctctttctttctctctcgtcaatttttggtgaaactttccagtctctctttctcttgtttctaatgctcattttcttgctttggttatgattttctcagcagtggtgacgatgtcggcggagcagaacaagagggagctgatgatgctaaactcagaacctcaacatccaccggtaatggtgagctcacggtggaatccgaccccagatcagttaagggttcttgaagagctttaccgccaaggaactagaactccttctgccgaccacatccaacaaatcaccgcacagctacgacggtacgggaagatagaaggcaaaaacgttttctattggttccaaaaccacaaagcccgagaacgccagaaacgacggcgacaaatggaaactggccacgaagaaacggtcctttcaacaacaagtcttgtctcaaaccacggattcgacaagaaagatcctccaggtaagggaccataacagaacttggggattagcactcaggcagtcaatctctttgtggactagaaagtcttagcgggtagacttcctctcacaatgacgcgttttgtgattcctgtctgtttctttctaggtttcatggtcgcaccgtccaaattctggatatgttcggtcggatgcgacacgcaaccagag

SEQ ID NO: 143396 - DNA, 469 bp, Arabidopsis thaliana landsberg
catcaaagattgcgtcgaggagatgatcgaaaccgttgaccgtttgaccaaatctgttcaataactgaagttgtgtgggagtgccaaagatcaagaccagtttgcgtaccacacgagtaatgctcagacttggactagtgcggctttgactgacgagaacacttgctccgatgggttctcgggccgggttatggatgggaggatcaagaactcggttcgggctagaatcatgaacgtggtacatgaaaccagcaacgctttgtccttgattaatgcctttgctaaaacttactaatttaaaactatattttgtcctgtaaaatatatatatatatatatagataaatgtaatgtcttgctaagagtttgatgtgatatatttttttcgattttggtagtttctttttgttttgtaacgtggtttataatagtataatgtgcattttgagctataaagttgtttttaaga

SEQ ID NO: 143397 - DNA, 543 bp, Arabidopsis thaliana landsberg; identical to SEQ ID NO: 4606

SEQ ID NO: 143398 - DNA, 1800 bp, Arabidopsis thaliana landsberg
acagtccagtgataatagaatgctcagactttaactccaatggcaaacacagtctgattgggtaatcaacagcttagagctcagtccatcttatttttggagtgactttagctgttagctgacataattactcgtttattttgggtggtcaggaaagttcagaaatcgctttcagacttagaaaaacttcatttggcgggccaaggaatcaatttttctttgcctactggtgctggacaaaacaaggtataaaccaatacgaaaaggtctcctaacattttcatgcctttttcaataagctatctaataccatttatggtcattttaggtgttaaagagccaactttttgtggacaagtttaccgagactgtccaccacacattcctagagtacttggcatctggatttgagttaaactttatggtagcaatcgatttcacaggtatgtattgcaccactgtggaaaatcctaaaaactttgattgggtatgtaatgttgttgttacgtatacatcatgcaaaaaggatataatctaaacatctctacatttcttttgtccttcagcttcaaatggaaatccccgcctccctgattctttgcactacattgatccttctggacgattaaatgcctaccagagagtgaggactcagtgttattccattttcttgtaactagcatcgactgtgactaacaaaccttcatgatctcttcttttaactcaggcaataatggatgttggagaagtgttgcagttttatgactcagacaaacgtttccctgcctggggattcggagctcgtccaatcgacgctccagtttcacattgctttaatctaaatggaagcagttcatactctgaggtaaacaaactcgactcgctggtctttaagactaaattttgatgtttttggattgacacatcaaaagtatcttttttttctctctctctctctcaggtggatgggattcaaggaatcatgacttcatacaccagtgcccttttcaacgtctctcttgcagggcctaccctttttggtccagtgatcaacgctgctgcaatgatcgccagcgcgtcgctagctcaaggttcacggaaatattacgtcttactgatcataacagtgagtatatatataaaaagaaaagccaagatcacataaaataacaaatcaaacattgtttacataaatcataaactcttgtttcaggatggtgttataactgatcttcaagaaacaaaagacgcattagtcagtgcatcggatttgcccttatcaatcctcattgtaggagttggaggagctgattttaaagagatggaggtaacaaataaaaaataagacatttaagatttacaactacatatgatcttgtgtaaactgtactttttttttgttttggtgggggtttttagatactagacgcagataaaggagaaagattggagagttcgagcgggcgattggcttcacgagacattgttcagtttgtggcactacgagatgtccaatgtgagttttatttgattcttagagtaaaactttagggaaacgcatgagaacgctagttcttggtttggtgagttttaatgtgttgtgtgtgggttttgtagatggagagatctcagtggtacaagcgcttctagcagaattgccttcgcagtttttgacgtatatgagaatccgtaatatgaaaccgattcctccatgaatgatctcgtctcgtgtgtaaatgaagtgtgtacatattatacattacataaaccgctgcggcggttaaaaatcgctgtcgtttt

SEQ ID NO: 143399 - DNA, 956 bp, Arabidopsis thaliana landsberg
gtctcctccattttcaccactaaaaccagactaaaaaccttcctttattcgtgcccttctgggccaacaaatgttcacaagcggtaacgtcaccgctcgggtcttcgaacgtcagattcgaactcctcctcccggcgcttccgtcagtccccaaatctctctctctgtctcaatctctcaatctcaatctctcttttgcttatctctttaccttcaatgataggtaaatcgtgcaagacacttctacgaaaacctagtcccaagctacacactctacgatgtcgaatctcccgatcactgtttccgcaaattcacagaagacggactcttcctcattagtttcagccgtaaccaccaagagctcatagtctatcgtccttcttggctcacttactccacaaccgatgattccacaaccaccctacctcctctacctcgccgtgcttcgaaattcgacagctttttcactcaactctactcagtcaatctcgcttcttctaacgaactcatctgcaaagacttcttcctctatcaccaaactcgtcgtttcggtcttttcgctacttcaacagctcagatccatgattcatcatctccttctaatgacgctgttcctggtgttccttccattgataagattactttcgtacttcttcgattagatgatggtgtggttcttgataagagggtttttcttcatgatttcgttaatctggctcataatatgggtgtgtttctttatgatgatcttttagcgattttgtcgttgcgttatcagaggattcatcttcttcagattagagattctggtcatcttgttgatgctcgtgctattggttacttttgtcgtgaagatgatgagcttttcctcaattctagctctcaggtaagcaaagtttttacagtatcttactctggagtagataaagttttgagctttgtgaggtttttgattg

SEQ ID NO: 143400 - DNA, 780 bp, Arabidopsis thaliana landsberg
tgttggaatgtgtgaagatgacttctacgggaacctatgtatttatgaagttgacatggcacttgagagggatggagaactctttggtaccgcctttaacccctctgaagagctattcgggcatggtggaatcgatagccttttccataagcaccaaacagctccagaggtttttatccattaccctttcttcttagatttatcaaattggatgcatctctgtgtgattctaataatgctctcttgtttttgctcaatccagggagggaattcggtgcagccagcaggcagtaatgattcgttcatgagttcgaaaactgagccaataatttgcttcgcatcgaagccagcacattcgaacatatccttctctggagtcactggagaaagtagtgctggagatttccaagaatgtggtgcatcatcttccatacagctctcgggggagccaccatggtatcctccaacattacaggataacaatgcctgctcacattcagtaacccgtaataacgcagttatgcgttacaaggagaagaagaaggctcgcaagtaagtagtagtctgaaactgcaaatacatgagcatcattgaagtgagtgcaggattttcctaatgtgactctggcttcttttttctggaaacaggtttgataagagagtgaggtatgcttcccgcaaagcaagagctgatgtgagacggcgtgtaaaggggcgatttgtcaaagctggtgaagcttatgattacgaccctctcaccccaaccagaagttattgagga

SEQ ID NO: 143401 - DNA, 694 bp, Arabidopsis thaliana landsberg
acgcatgggtggatcatctctttcaccgcatctggccaccgtctagagtcaatcacaaattttggcctaagaatcctccagaatacatgtacgagaaccaagtccactcattctcaactggttttacgttcgaattatttataaaactaattaacattaatcacccaaaaatactttagggtcattaattaatcgttttacgatggattttaacagtgaagtgaatgaagagtacgcaagtcacataaagaagctatcggagaaaatcatggaatggttatcagaaggactaggtttaaggcatgaggcgttgaaggaaggtctaggcggcgaaacgattgagtatctaatgaaaatcaattactatccgccgtgtccagatccggagttagtcgtgggagctcctgatcacactgatgtcaatggaatcacactcctagtcgctaatgaagctttagggcttcaagcattcaaagataaccaatggatcgacgcggagtataccacttccgggatcatcgtcatcatcggcgatcaattcttggtaagaaatttatgaactcaagagaccatgttgaaatcttttaatgtttcaatcatggtagggtattgtgtataataatactttaaatttaaatgaaaataataatcagccttttcatttgtcatatagattagtctgaaatagggcacg

SEQ ID NO: 143402 - DNA, 527 bp, Arabidopsis thaliana landsberg
aaagcaaaatagtatatataaatagttgacggaaatgttgacggcaatgttggtggatgtgaacggtaagaacacggcaccatgatacaagtacttgaaagcagagaaaggaggtttgctcattgatgctatcaaatggaacttcaccaaattcttgggtttttcctgatggcaaggtcttacagagatattctcccagaacctctcctcttcaattcgaggtacgtataccatcctggttttcacctaaaccggaatccatccatacacaaccatcttattacggtttgttttcggtttatgcagaaggacattcaaactgcgttgggacaggcctcttcttaatcaccagaagaagaagtttcaagaactttcgtttggtccaaattatgatcttagaatcatcaacattgcaaacttattttctttgaattctatcattcttgttttaaataattgatgtattcgatgtcttttcatgggatgatatatcatatattatcatgtgactctcgttcaaacaaacc

SEQ ID NO: 143403 - DNA, 707 bp, Arabidopsis thaliana landsberg
ttgtttcgatatcgtcggatccgggtcgggtcgagtttttgacccggttgttattcgattcgtcgattgaaacacgcgttaacgccgccgcgttgatcgagattgtttcgacgggaaccaaatcggcggacctgaaaggttcgatttcgaattcagaatctgtattcgaaggagttctcgatcttctgagaaatccgatttcgtcacgacgagctctcaaaatcggaatcaaaactctgttcgcgctctgttcagtgaaatcgacgcgacacatcgcgatcacagccggtgcgccggagattctaatagacagactcgcggcggatttcgatagatgcgatacggagcgagccttagcgacggtggagctactctgccgaacgccggaaggatgcgcggcgttcggtgagcacgctttaacggtgccgttgttagttaaaacgatattgagagtttcggatcgcgcgacggagtatgcggcgggggcgttgttagcgctttgtacggcggaggaaaggtggagggaggaagcggcgggggcgggagtggtggtacagttgttgttgatggtgcagagtgagtgtacggagagagcgaagaagaaagcacagaagttattgaagcttctgagagattcgtggcctgactacaattccttcgctaactccgatgactttggttgcagcagccaagtggtccctttttga

SEQ ID NO: 143404 - DNA, 1275 bp, Arabidopsis thaliana landsberg
atggaggaagtagtagtagtagttgcagagccaccaccgaagattactcccgttttggaatacgaagaagagcttgaagatgatgacgacgatctctcgctttcgtcagattccgatatcgctgaagctcttgattggctagacggtaaagacgatgacgagctaattggtggtggcttttctcttcatgctcgtcgtcctaatgctcacggtggacatggttcacgccctaactctagtgctcttcagcctatttcaaataaggcccagaagcttactagtcacgttcgtgcttctcctttggaggtaccgtttcttatcgaatttttgtttagaatttgaaaaaagcttctgaatttcttataaagatatgatctttacatttgaaatagcttctgaataattgctcatagtctctgctcaaatgaacattgagtttatagggtttaggttcaggtaggttttgtgtagctggaaatgtgattttgagttaattggtgatgcagggatgggaaggaagagttaaagttgggatgtcgaattctgtgacaactgcgattcgtggaagtcttagagatacagaaattgggagaagtaggaatactgataaagcggaccgggcaactgttgaacaggtaagctctaactgtcacacaaagattcgggtctgatgtaagcattatgttgatgttgtttttttctttgttccaggctcttgatccaaggacgcgtatggtattgtttagaatgcttaataggggtgtgtttaacgatgttaatggctgtatttcgacaggcaaagaagtatgatacatttcactactctcatatttgagattatctgtttttattcttttttgttgaaagcactctctttaattattgtctttcaggctaatgtttatcatgccacaaaatctgacggttcggaacttgcaataaaagtgtacaagacatctgttctggttttcaagtgagctattagtattacatgaatagaggttgttaatgattttgttttagaccctatttttataactgtgatgatttcagggatcgagatcgatatgtacaaggagattaccgttttagatatggctactgtcgtcacaatcctcgaaagatggtgaagacatgggctgaaaaagaacagagaaatctcaagaggtaatacctacaattttcatatggaatcttgttaatgtattgtagggttgatttatcttgttattttcaaaacagaagccggagaagtagtcacttttggtcacatat

SEQ ID NO: 143405 - DNA, 4594 bp, Arabidopsis thaliana landsberg
atgctcttccacaagatgtgcctcttcgcctcgcagatgggagccggactgttcggtaacacaaacctcgtacgaaaggctttcaagcgatctatggaccccccgctattgagcgccttgatcagctcgtcattggccctcgcctggggtaaataaatgaaccggtcgcttgctttctcgaggagtgacatcttctctttggcagttttaagccttgtggtgaagactgccgaagtttcctacctcgcagtctgcgtcacccgagccacctcactgtctcggactcctcttgcctcagcaagcatgcgtttgtagtggtcaatctcggagtttaacggttgttcattacacggttgttttgagctagtttgacagagttatctttattaacaatggctttttccttggccttctctttcgcaagcttcgcctcggcagccttggaaattgcctcttcccgagcgcgttcggcggcgactaatctctcctgggcctcggccagcttattgatgcccccatggtgccttaaaaggcggaatcataggattgcaccatcctattcatcgagttaaagacctgacaaaatagcgaaaacaaaagaatcgtacatataatttggctcgagagtaatgaaagttgaacataccctaaggaagtgtgacgccgtataagcgtatagctcaaactccagcaaagtatctggaggaggaagaagacggcttgcacaagcgccgatgagatttgccgaagcggctttatctgtaaaaatcggctcatccatcttccgactcgcctcttgatccgcctgcttcttcttcttctttttgttctttgccttgggttcggagatcctctaacgtttccttgaagccttggagcggtcacgagtcggcaacacaaagaagaagtgggccacaaagaaggagatcttcgggaatagtagcatcatcaagggccacaaagaagaagcagttagtgtacgactcattcttcctcgtgaatccccagataatcttcctgtctttcgcaggagaggtataatatctgtttaccgttgacttctggattcgacggatctccaagcagttcctaagatgcgtgagcatgagatcggtttctgtctcgtaacttcacaccaaaatctcaatgagatgcatcagggcacgcatagtaagctaggtgagtgtgatttgatacgatgtcacgtactctaaaatcaacctcaggatcgggaaccagaggaaacagaaatagaagaacccctcgtataaggttaagaagccctcgggaggattgtcggctcttttgcttggagttggaagacaaagagtgacgcctaaacggacatggtagctgcgctgatcgatgtgaacgagacattagatttgtccttattagatgttcacaggtgtaacagtgtcttgtcttgcctcttcatcttgtacttggactccatgtgctgagaaaagcctttgtcaacctcaaaaatttgtttagtgtcttgtgcttagtagacaacaacattggtcttttcctctaaatgttatcttatctcatttattatgtgaatatgatttatgcagggactatgtaatctaactctttttgtacttgagagaagaagctgaagtacatttgttcatcatttggttttatagtattaataactgccaaactccagagctttaagatgtatgactctcaagttttgaaatctaagtaaggcttaccatttcttcctctcttttcaacttctggattttgattcagcaactccttactagttgactgaattttgatcagatacaacccatttctcagacgttcgcattctggaaagaaatttcagggcacagttaccatgtcagaggtgtgaagatacattgtatttattttcatttcagaaactaactgttgaagtcctagaaaaaacattaagagcttgcttgcttaatttgtacagggcagagaaacttgcgaagaatctacgagtggtgaatcttttccatatagatttcaacttgaagaggatgtgagtttctgaactcaataagactagtaatgataacgtggaatgtgtatactgtatagttctgaaagaagtttttatgttacaggtaaaaagattgcaactgcaactccaacaagaaatagatttgcatacatttctagagagtgtcatggagaaagatccttgggagctatcttattcttctagtgttccacatcctgtatgttacctcaactcattcaattgtgataacactttaaaacttgccttttgttttcactgatgattctgaaaattgtgcaggctcaggaacttctctccaatatagtgacgctagagactgcagtcactaagctcgagcaagaaatgatgtcactgaatttccaacttagccaagagagaaacgagaggagactcgcggaataccagttgacacattcggcttctccactagtatgtaactccttaattcatcactgatttttgttttgtaatctgtgtcagttctccactagtatgtaactccttaattcatcactgatttttgttttgtaatctgtgtcagtttataactatgtcttagttatgcagaattcttcttcttccctaagatatttgaatcagtcagatgctgaattacatcaatcagcagaagacagtccatctcaagaccaaatagtccattaccaagaatcttcatctgaatcatctccagcagagtcaactgttgaggtattaactgatattcttctttattttgtaccctgaggccttaggatggtttgtttaaacgaagagatacagtttacatgaaagaagaaatgtatctgacatttttgtataccaaaccagcaaacactggacccaagtaatgactttcttgaaaagaggctaatgagaaagacaaatgcgaggaagctacctcgaggaatgccacctaagtacctgtgggatcaacctaatctattatctgaagaaatggtgagatgtatgaagaatatcttcatgtctcttgctgatccaacagcaacttcaaaagcttcctcaaacgaaagccaccgctctccagtatcacctcgcgggcatctatcaagctcagcataatggtggccttcaacagaacggtcaatgatctcctcatgggtgcaaagcccacaaatagatatccaaaataacgccaatgttttggccacaggagatgtctttgatccttatagagttcgtgggaagttaagctgggcggagattgggaactacagtttggcatccgaggtttcttggatgtctgtagggaagaaacagctggagtatgcttccggggcattgaagaagttcaggtaatagagtttccttttttgtgtgtttcaatccgattgaacagtaagactcagtttacataaccatggttgattctgtgaacaggacactggttgagcaattggctagagtaaatcctattcatttaagctgcaacgagaagcttgctttctggattaacctttataacgcgttgataatgcatgtaagttcctttttcccctatacttatcaagaactattctgaatgaaacgaaagcttatgagagttatggttgtttatgtgaacaaaggcttatttggcttatggcgtcccaaaaagcgacctgaagcttttctcgttgatgcaaaaggttatatcacttgacagaaggttgtgttttgttcttctcatttctttgttgccttatttgattccttttgtactggatccacaggcagcctatacagttggagggcactcatatactgcggcgacaatggaatatgtgatactgaagatgaaaccgcctatgcacaggccacaaattgtatgagctttgaacccagcttcttctgtgaggctcttcttttctcctctttcagagtcagttaaacaatttgctctgtttgctgatgcaggctttgcttcttgccatccacaagatgaaagtatcagaagaacagcgcagggcaagcattgatacacatgaacctcttctcggctttgctctaagctgtggaatgtactcttcacctgcggtaacttaactcagtaacaatctgcgtttccaaaagtcataaacagtcattttcttaacacgaagaggtcttgcaggtcaggatctactctgcgaaaggagtgaaggaagagatgctacaagcacaaagggacttcatacaagcatcggtagggctgagcagcaaagggaagctcttactacccaaaatgctccattgttatgccaagagtttggtggaggattcgaacttgggggtctggatatcaaggtaccttcctccacatcaagctgcttttgtggagcaatgcatctctcagagaagacaaagccttctcgcttcacggaactgcggaatactccccttcgattctcgtttcagatacctgtttctccccgacgacaacacctcgttgtaataacagttcaaagactctcttctgttgtaaaaaaagctttaaccgacctcataagaacgaacagtgagaggaggctgtttcatgatcatggttactactattattccaacatagcttttggcttatag

SEQ ID NO: 143406 - DNA, 1522 bp, Arabidopsis thaliana landsberg
agttggaccggtgagtttggttctcaactggtatactgtgatgaaacattttcctgttatctcagtgttcattattgtagattaatgtatatggttatttgtatctttgattatgaaactcggaacatgacattcagttctgttactatcttcagagaacatgtatgactctgtatcctgaactgttttgcttgtaattaatctcccagggaagctatggataagattcaagcacgaggtcatagccgcgttcctgtctactccgataatccaaaaaatgttattggacttctcttggtaggagtcgttgacccttttccgatggtctgatttgcatgtttctctggtagcttatgcaaactctaatcaggaaattcttctgttttctaggtgaagagtctccttacagttcgccctgaaacagggactcttgtcagcgcagttggtatacgccgaattccaaggtcttgtcattattattatgcttgctatattttcatattatttccttaagcatctctgtgaaaaatgaagttcctgttgtgattaatgatttaacagggttccggctaatatgcctctgtatgatattctgaatgagtttcaaaaagggagcagtcacatggctgcagttgtgaaggttaaggggaaaagcaaaggtcatccttcaactttgcatgaagaaaatagcggtgaaagcaacgtctcaagtaacaactccgagttgactgcacctcttttactaaagcgagaaggaaaccacgacagtgtcattgtccgcatcgacaaggctaatggacaatcgttcatcagcgaggccggcagacaggggttttcacaaacttcagaggctatcaaggatggtagggtaattggtatcttcactttagaagatgtctttgaagaacttttgcaagaagagattgtggatgaaactgatgaatatgttgacgtacataaaaggttcggctaaatactctctatggcatcacatatcatatcgtcatatcatcactgagaatttccgcgtttgcaggattcgagtagcagcagcagcggctgcttcatcaatagcgagagctccttcaagccggaagttgcttgcgcaaaagggaactgtgagttaacactcttttgtttctttgttgtttatgcaagagagaaagttagaattgttgaaacttgtatttgcagggaggacaaaataagcaagggcagacgaataaagttcctggtcaggaacaagataaaatgcttggaactattaccgagccgattcgaagaaacaactgatgttgtgttcttgcttaaggaggcaaaaactctgttgcggtataaagaaagaaaacaaagaataaattataagatccaggttcttctgtatactttgatccatcacataaattatatatatatatatatatatataaaaagtcagcagaagcaatggttcaacccgatttttgaagatgctttgtttccttgtattatacaaaatacctacaatttgtaatttactccg

SEQ ID NO: 143407 - DNA, 1028 bp, Arabidopsis thaliana landsberg
atggatcctaacgaaagccaccatcaccaccaacaacaacagctccatcacctccaccaacagcaacagcaacagcagcagcagcaacgactcacttctccttacttccaccaccaactacagcaccatcaccaccttccaaccaccgtagcaaccaccgcttctaccggaaacgccgttccatcttccaacaatgggcttttccctccgcagcctcagccacagcaccagcctaatgatgggtcatcttctctcgcggtgtaccctcattcagttccgtcctcggctgtgacggcgccgatggagccggtaaagaggaagaggggtcgaccaagaaagtatgtgacgccggaacaagccctagcggctaagaaattggcgtcttctgcgagtagttcgtctgctaaacagaggcgagagcttgctgctgttaccggtggtacggtatcgactaattccgggtcatccaagaaatctcagcttggttctgtcggtgggtttaatcttttcttcttttgaatcttatcgttggtcaatttgatatctaaagtttccaactttaaggtcaatgattaatctcccaattcttaaattttgattctttagctgttaattcgttggtgtgatttgagacgtaagtgccttgaattagcattatgtataatttacagcagtagatttacatcttgagtttcttaattacactgaagattgtgtagttagattcttgtttgtatagtttatcaatttgtttcttttttagatcccattgagtatctttcaagtgatcctttagttatattctggaatttgtgttatactctgagctttactacaagttttttgttggtgcagggaaaactggacaatgttttactccgcatattgttaatatagctcctggcgaggtatgtcatgttcttgtacactcaagatccttacttgtaatagagatttgttggtgtaggcacaatatctatcattctttcaattctaagtcattctatttctctttttgtttcggtgat

SEQ ID NO: 143408 - DNA, 2017 bp, Arabidopsis thaliana landsberg
  unsure (1)..(2017): unsure at all n locations
gtctttcgtctgaaccgaaaatcaaaccgagttggaagcttctagcaaagataatgagccgtactagtcacaactcacaagtcacactttcgaatttcaaagttcaattgaagatccgaatatccactgccgtagtttgtacgatactttcactcatttcatgttgtcatgtgtcgtacaacagtttccagtttcccattattatttaatgtttatttattaatatttggactttaattacggcaggttatactatatggtatgatagaatattttcttcattccactggattttgctaattatatatatttattccaaatcacaattttgatttagcgtcattacaaaaactaaaaagtaatgaccaaaataaaagatatgtaatttctgatattcggttctaactattctattctcttcctgattccattaccaaacactgagagacaaataagctactggccgctaattggctatcgctctctttacatcttcgaacataagcaatagttgaaaaatataactttactaaaaaaatacatatttttcgttaaaaaaaaccttgtggtcgtctatatactattctaataagtaaagaaaaaaaaaaaaaagtaacggaagcatgaactttcatgcctggaagaaactactggccaaaaccatccactaaatacaactaatgaagtaatcatcctagttgagcatattgtaatcatcacattcaagaaaaatatcccatggagaacaattttgcattatataaaaagttaattccttgtcgacttttatataacacaaacaagaaggagcacatcgtaaattcatcaccgcttccacaccttcaccgtacgtgtctctttcgtactttctctctatttgtcattctaattataaagtacaaaaaaatcaatagtttaattattaaattaatattaaaaataaatactttctactaaaagtctaaaatattataacatcgaagttgcgaaaaataaaataaaataaannnnnnnnnnnnnnnnnnnnaccgtacgcagagtgctcaacgaacccaaacacactctaaaaatatcttctttctccttcttcttcattcttctcaatatctcctaatgggttttggtacatcttcttcttcatcttcttcctcagctctgaaatggctaggtttcgttactgccgtttgggtccaatccatctccggcaacaattacaccttctcaaattactccggcgcactcaaatccttaatgaacctcactcagttagaactcaacagtctctccgtcgctaaagacgtcggaaaagcattcggaatcctcgccggacttgcttccgaccgtctttcaactccggtgatcctcctcatcggttctttcgaaggtcttcttggttatggtgtacaatggcttgtcgttagccgcacgattcaacctataccttattggcaggtacttaatcaaaccctaatttctaaattgaaaaccctaatttgcctcaattttgacggtcactgtttcttgtgtgtagatgtgtgtgtttctctgtatgggaggaaacagtacgacgtggatgaacacggcggttctggttacttgtataagaaacttccggcgaaatcgtggtcctgtttcagggattcttaaaggatacgttggtttaagtactgcgattttcacggatctatgtaatgctctgttttcctctgacccagcttcgtttcttgtcctcctctccgtcgtgccttttgccgtttgtctcacggcggttttcttcctccgtgaaatccctccgtctactaccttcgccgaggataacgaagagtctaaatactttgctgtgtttaacatcgttgcggttgttgttgctgtgtaccttcagtcttacgacatcatcggaatcaaaacaggagctttctcaatcgcattcgcttccatacttctcatgctcttagcctctcctgtcgctgtacctttccacgcttttatccgtagcaaagttcatgatgagcaagac

SEQ ID NO: 143409 - DNA, 2397 bp, Arabidopsis thaliana landsberg
  unsure (1)..(2397): unsure at all n locations
agaaacgttatggagaggccaagagcccctccatctcctttgaatgatgcggagtcattaagtgaacgtagatctcttgagattttcaacccttcgagtggaaaagagacacatggatcaacttcttcttcttcaaagcctcctcttgatggcaacaacaaaggtagtagtagtaagtggatggagtttcaagattccgctaagattacagaaagaaccgctgaatggggattgtcagctgttaagccggattcgggagacgatggcattagtttcaagctgtccagtgaagtggaacgaagcaagaacatgtctaggaggtcatccgaagaatctacatcttctgaatcaggggccttccctagagtatcccaggagctcaaaactgctctatccacgttgcagcagacttttgttgtctctgacgctacacagcctcactgtcccatagtctatgccagcagtggattctttaccatgactggttattcttccaaggaaattgttggaagaaactggtactgctcatctcgtatcttgcttctagtttcattcccagttattagttagaataatattgcttttgaaacccatgccaacttactctgaaatgctcttaatctttgtgggtaaaacgccagcccggtttctgcaagggccagacaccgacaagaatgaggttgccaaaatcagagattgtgttaagaatggaaaaagttactgtggaaggctgttaaactacaaaaaggacggaactcccttctggaatcttctcacagtcactcctatcaaggacgaccagggcaataccatcaagttcattgggtacgtcccttaattcctccctgtttttccctaattaatcgactgtcccttgatcaatcattttcacatttccatctgcaggatgcaggttgaagttagcaaatacacagaaggggtaaatgataaagcattgaggcctaatggactctccaaatccttgattcgatatgatggtatctgtttttttgcatctcttcgttaattcaacaagttttttttagccaaaaacaatgatataatttagcaaagagtgctgatccacaatctttaacatgtaatggttttgatgatgatatcagctcgccagaaggagaaagctttggattccatcacagaggttgtgcaaactataagacatcgtaagtctcaagttcaggaatccgtgagcaatgacactatggtaaagcctgatagttctactacacctacacctggtagacaaacaagacagtcagatgaggcttcaaagtctttcaggacacctggacgtgtttctactccaacggggtgagtcttcgtaaccactaaccaccagattacagtagtcttcctgaacataaaataaggcatatatattgcccaaaaagtgtgatggcagtgccaaagtttgcagaaacaacttgctattatcattgccaaatagtggtaaaatatatactacacaatctcaatctagttgttgtgttagtcaatatttaactcatagataatttccattcgaatacgaagatgcagttgcaatctcctactattgttctgtttcttatttctcgtgtacttttgtaactttgtgctgggccttagaatgtatcctctgacatggattgggtagtgaattctgaagctgtgtatatatatgtatacatatacactcaaggatttctgatctagcttcgtgtaatgtgcaggtcaaagctcaaaagctcgaataacaggcatgaagatcttttacgtatggaacccgaagaattgatgttgagcacagaagtaatagggcagagggacagttgggacctatcggatagagaaagggatatacgccaagggattgatctagctaccactcttgagcgcatagagaagaatttcgtcatcagtgatcctcgtctccctgataatcccattgtatgttttttctgtctaaaattgagatgaacgtttttttctcgaaccttaatgtatcaattgtagagtatatttcatatattgattgttcttactcaagtgttctactatgtttgtaagcatataatcttgaattgataatggaaatcgttttatttgcagatctttgcatcagacagctttcttgaattgannnnnnnnnnnnnnnnnnnnnnnnnnnnnnnnnnnnnnnnnnnnnnnnnnnnnnnnnnnnttgtatcttctactcatgagatttatcatgccttttaagttatgcagtcttctccggctgcgtctttgttgtttcgtgatatggatatgtgcaaagtggttggcttcaggtttctccagggcccagagacagatcaagcgactgtccagaagataagagacgcaattagagatcagagggagattcctgtgcag

SEQ ID NO: 143410 - DNA, 1639 bp, Arabidopsis thaliana landsberg
ccgtccataccttcggttgctgaaaaggtgatagagttgagcactcatattgattcagatgtaaaactaaaggcctttttcatcattgaggagattaggcaagaagaacttcactttaaaaaaactctggaaagaggagaaaagttacttgaccaaaagcttaacgatgcattgtcaattgctgataaaactaaggatacgccttatctggatggaaaagatgcgtttcttctttatgacacatttggctttcctgtggagataactgcagaagttgctgaagaacgtggagtcagtatagatatgaatggttttgaagtggaaatggagaatcaaagacgtcaatctcaagctgctcacaatgttgtaaaactgacagttgaagacgatgctgacatgacgaaaaatattgcagacactgagttccttggatatgacagtctctctgctcgtgctgttgtgaaaagtcttttggtgaatgggaagcctgtgataagggtttctgaaggcagtgaagtagaggttctgctggacagaactccgttctatgctgaatcaggaggtcaaattgcagatcatggttttctttatgttagcagtgatgggaaccaagagaaagctgttgttgaggtaagtgatgtgcagaagtctcttaaaatttttgttcataagggcactgtaaaaagtggagctctagaagttggcaaggaggtggaagcagcagtagatgcagacttgaggcaacgagcgaaggtacgtttgaatgtccttttgcatcccaatatttcaactgcttcttcccttatcaaattcttgatcctttttgtcaactgtccaggttcaccatacggccactcatttgctccaatcggcacttaaaaaagtagtaggacaagaaacatcacaggctggttcattagtagcttttgaccgcctcagattcgatttcaattttaatcggtccctgcatgataatgagcttgaggaaatcgaatgcctgatcaataggtggattggggatgctacacgtcttgaaacaaaagtccttcctcttgctgatgcaaaacgtgctggagccatcgcaatgtttggggaaaaatatgatgaaaacgaggtaagagatatgtcactattaatttaaagattgtataaagtgttacagtttggtttcgcttgactaagaggacccttacattaatcgcaggttcgtgtagtagaagttcctggtgtctccatggaactttgtggtggcactcatgttggcaatactgcagaaatacgagccttcaagattatctcagaacagggcattgcatctggaatccggcgtatagaagcggttgcaggtgaagcattcattgaatacataaactcacgggattctcaaatgacacgtctatgctcgactctcaaggtattctgcttttcctttccatgtttgaaggcatagtgctacttacccttttgcggtgaccaattggcaattgttgtttggtttttaatctgaaggtgaaagcagaggatgttacaaacagagtggagaatcttctagaggaactacgtgctgctagaaaagaagcctccgacttgcgttcaaaagcagctgtctataaagcataagtcacccgaacaaagcatt

SEQ ID NO: 143411 - DNA, 753 bp, Arabidopsis thaliana landsberg
agcaaattaagtttcttttttggcgaggagtacgttgaccctaacgaggagctaaaacatccgacgtggtttaaagtccctgaatgggatgtggacagcttcgaaggtctcgagtacaattcctctgaatataaaaatgaattctctaatgacgaagatgaaaatcaatggcgccgctttaagcgccagctcatcgagaataaggtaaccgtattgaatttgaacttaatttgttagctggataaagagtaaatcttgactagtgcgtgtgcctgaatttaggggttttatgtggagcgagagctttggccatggtacaactactcggattacaaagtagtccctaatttggatttgcctgccagttttgggcaaacctaccgagtactttgcagagatggctagcctgtgtctcaaaaagtacaacgaagagaaaagaatcgaaaatgtcggtatattattttttggctaattatcactcaactctttacaagtgtatttatctaataaatctggttcgttttctgattgtttcaagggtttcgatgtggagtttgtggaagtggtgcgaggtatattttcagcaggatcaaggtcaaagtcgttcatcacattcatggctagggagaaacctgatggacctcctgttgagtatcaagctaaggtttggtgtacggttgttcgaaaccagaactatcccatcctctgtagacgggctctcacaacaaagcctccaagccaaaactagtaaag

SEQ ID NO: 143412 - DNA, 4647 bp, Arabidopsis thaliana landsberg
atggaaggtaagatccaagctcttctctcgacgattctagttgtgactttgtgtgccactactttagtgaagcccgggctagctcaactccctaccagtgctgggttttctctacccggctcccaagttgatctcgcaaaatgttggtcatcgctcctcaacattcacggttgcaatatcgaaatctttaaatctgttttaaccggtaagtttgaaaacgttggatccacgtgctgcaaggcttttacagaagtggatgcaaagtgttggccaaaaatgtttccgttgaatccattattccctcctcttctcaaggatggttgctctcgcatcatctcaggtgcaccagcacacaagacaccgcaattccctgtcatccctggttctccgatcgatctcacaaaatgtttgtcatcacttgtcaacgttgagggttgtgtaactgaaatctacaaatcagttttcacaggaaagtttggtaatgttggatatatgtgctgcaaggcgttttcagctgtggatgtaaaatgttggccaaaaatgtttccgctaaatccgttcttccctcctcttctcaagaaggaatgttctcctatcaacgcagccactcctacacacaaatgaaagtaactataaaaccattagtcaaaatgctttaaactaggcctactatagccttttagttccaatatttcaatcagtcacgtgtttggtttgcttgttctagttttttatcgtctaaagtaataatttagttacaagtttctggtataagcttacaactatcatctttttgaaaccatttattcttaaaaagctaatagtttgagtaactcaaatcaaaactgaaagagaatttgaatatatgataaataaataaacgctatccttctcataggcctttcgtcgagttcaaataagaaatagaagtgacaagagcaaataaaaagaaaattaaaaaagaaaaaggacctgtcagaccgccgtgcgaccaccccggcaaggacgagccgagccgagtaacgatcctctacagaaccggatgcgtccgaagacgatcgtagccgtcaatcacgctctagccgcacggtcatggttcatcaaccagggttaagggcctgtctcttgagaaatcaagaaaacagaggtacgagcctatagaacagatcctgttcaagtaaggtcgtgaccaatgttgctctctcaatcttatatatacagcaacattgtttttcaaattagcgatgtgggacaaattaaatatcaaattagaaaagtatgcatgggtagtggggaaggcccacttaattatataatctatataaaaaaagcccatcatataatttaggaagtatagcaattgatgtgtgataaaataggttctcagtcttgtttctgagtataattatgtgcgggtaacaaagctatcttaacagccttatacgcagaaccagaagatgtgaaaacataacctgttggaacaagcaaagcagtatcattcatgtcccaataattgttcttttagtgatttgaaacttttcttcctttcttggattacctttgatgaaacctagaacaattacagattcgacgtctctcagtgactacatggccactcgttagtaattaaatgcatatacgtacgatacacataaatttggctctatgtgcaatttgcaaatttttatgtcataaataaagcgttagaataatcatgcatgctctaaacatatagggatgatgttacttacctagaaaatgaaaataacttgcaagtagcaaacacaacacaaaaagaaatgttacaaaacttggccaacttgttccatgacgtacgacgttttaaggttttgaacaataaaacgtgtttttccaaaacgatatgaagagacaaaaggttggtaccagttacgaaatatattctaaaaattacttagccaaattagttaggcttttttgtcttgacatcttttggcttaacataataagatctaattgagagtttaatttgagactaggttttgcttacaatttggtagttttaccaggatcttcagatactaataaaatgtttcgtagtggctcagaatatttggcaaaagagcatgagaaacgttaagaacataagacaattaattaagtctaacccggtgacagcttgttggagtaaacgtaatattaaaattcaaaagtggtgtttataattctatcattaaaagcgacaaaagtttatcactttagtagttttctaaccaaatatcataatcacataagtgtgttatgtatacatttcatgggtctcgactctcgaccaatagaaatctttcgttatcgtacctatcaaaaagtgaatattattcattactttttttataaaaacataactatcgagtatggacctttttatatgtatgttcttacaagttgttagatcacacctatccgcaaacaataggtcattatattttaactatgtataaacattggggtcatatgtcctcttattcatttagcttttgccccttatcggatatagttttagttgagaatcaaaatttgtttccctgattctctcaatatatatgagctagtttggtaaacttatgagagttttgtcttattatccatgtttaaatgttgatgtgaagattcgttaatagagttttttttttttttctgaaatttgacactgtaagtacaatgaaatttgttctaaggattaagatcaagagatattcctcagctataatatagaagaatgaatggaaatgtaatattcttctataatttatattcatctttatctctttatctttggaaaacaaaagaaatctctatctctttattcattcaattcatacttaccacttaccagtttagatatgagtcataagagaaggacatgatcaaaataaaagattagactgaagaaattgtatttaattttcgtttttttttttgtaaaaagagaaataaaagtatagtaaatcagtagtggagtaatctatgatttcattgatgaataagagattacattaatcttgaatatacaaaataaaaataaaaattaaatcattttactgaaaattatttgaatactcaattctaaaatataaagattttttctagcctatcatagtttaacaaataaatcacaaaagttttcttagtcagcatattaattaaattcctaaacattatagtaaaaacaaaaaatctacctgtaataaacacaaaaaaacaaaaaggtaaaaaaaatctatctgtacacaaccctagaccaagtagttttgtgtttatgtactttaacaccgtacccatctctcttctcctttataaccacttcttcctctgtcttctctctccatcttctccttcacattctctgcaaaaaaaataaaaaaaattcttcttttatggcattaacccttttgtctcacgaattatctgacctctgtatcggtaagccacctttacggtgtctctccgtcgccacagccaccgtagctgacgccatcgccgctctcaaatcctctgacgaaccgttcctcaccgtatggagctgtaatcacgatgagaaaacagatgataatgataagtgtgagtgtttgggtaagatctgtatggctgatgtaatctgttacctatccaaattcgacaacaatgttttgtctctttcctctgctttcgacgcatctgtctctgttcttcttcccaaatctcgtgccctcgtcgtccatgttcaatcttcttgcaggtatgttacaaatccagacattggttctgtttcttaatgctctgtttttttgttctgtttcctaaagtcctgtttttgcagtttgattgaagctattgatctgataatcaaaggagcacagaatctgattgttccgattcatacgaaatcaatcacaaagagaagacaacaacaaaaacttctgaaccgaaacgtcgtcgtttcactcaccaacgcaacttcaacaacccacaaaaacagccgagaattctgctggatcacacaagaagacattattcgattccttctcgattccattagcgttttctctccattaccgtcgctttctatctccgatcttggagttatcaatagtacacacactatcctcgccgttgattactactcctcagctgcttccgccgtctctgccatctctcgtgccatcttggacaatgtctctgtcgcggtggttggtaaaggatgtgatcaagaagatccatgtatggttttgataggcgagatttcaccgatgacactcgcttgctgcgatgaaactgccgtagcagcggttgctacactctctgccggagatttaatgtcctatatcgacggtagtggtccgccggagagtctagttggagtagttaggaatcgtttggaagataaagggatggttggattaatctcactcattgattctttgtcgttgtcgtcggggtcttcctcggatgaagaatctccggcggggaagacgagaatgacttcttcgtatgggaggtcggtgagtagcgcggcgaggatggctaggaaatcggtggcgatagtgtgtaatcggaagagttctttaatggcggtgatgatacaagcaaatgctcatagagtgagttatgtgtgggtgattgatgaag

SEQ ID NO: 143413 - DNA, 1817 bp, Arabidopsis thaliana landsberg
gtgtgtgtccttttgcagaggaaaaggtggggaggttgtttaggagtgttctcttgtttcaagtcacaaaaaggtggaaaaagaattgtacctgcttctcgcattcctgaaggtggcaatgtctcagcttcacaacctaatggagctcatcaagctggtgtcttaaataatcaagctgcaggagggattaatctatcactattggctccaccttcctctcctgcttccttcaccaattcagctcttccttcaactactcagtctccaaactgctacttatctctggctgcaaattcaccgggaggtccttcgtcgagtatgtatgccactggaccatatgctcatgaaacccaattagtctcaccgcctgttttctctactttcaccaccgagccatcgactgctcctttcactcctcctccagagcttgcacgtctgactgccccttcttcacctgatgtaccttatgctcgtttcttgacttcctccatggatctcaagaactctggtaaaggtcattacaatgatcttcaagctacttattctctttatcccggaagtccagccagtgctcttagatcaccaatctctcgggcttcgggagatgggttattgtcgcctcaaaatggtaaatgctcaaggagtgattctggcaacacattcgggtatgacacaaatggagtctcaacacctttgcaggagtcaaacttcttctgtcctgaaacttttgccaagttttacctggatcacgacccttcagttcctcaaaacggtggaagattaagcgtgtcgaaggattcagatgtgtatcctacaaatggatatggaaacgggaaccagaataggcagaacagaagtcccaagcaagacatggaggagttagaagcttacagggcgtcctttggttttagtgcagatgaaatcatcacaactagtcagtatgtagagatcactgatgtgatggatgggtcttttaacacatcagcttactctccaagcgatggacataagcttctcagaagagaagcaaatttgctgagtcaaacaagccccaaatcagaagccgatcttgattcacaagttgtagacttccaatcaccaaagtcatcaaatagctacaaaggtgagaattgtcacattatatctcattcagcttgcatagataataacattgtttctttgtgtgtgtgctaattgtatcaaattgtatggctcagatcacaaacaaagaaaccggatccatgcggatgaagaggctttattgtcgagagtggggtctgtaaaaggaagcagaagctatcatatttcaagctctgatgcagaggtcgagtacagaagaggaagaagcttaagggaaagcagagagaacagacacaggaaagcctgatcaagaacaacaacaacaagaagaagaaagcctgatctgttcttaaagtcttctaaggtctaaaaagttgatcttgtgatgctaactcttgagataagaagtctagtttttaagtatatatagatatatataaatataattacagatggttttttagtagaatgatgttatatataagaagagagcaagggtgagaaagtgaatgcttgttttttagtttgacatggcttttttgtaagaccccatcttttatctaattgcaccaatctgtttgagcttctttagtctctttttaatgcatttgttaacaacaacttaagatgttagattggagaacttgtgaatgttgttaattcttgatttttctatatcaacacaaaagttttacattatgttttatgtattattagttgtgtctacattgacatgt

SEQ ID NO: 143414 - DNA, 706 bp, Arabidopsis thaliana landsberg
caaattttcaacaaggataagagccggaagctcatcgccggtgaacggaactagggtttcattcatccccaaattgataacaagaaaatggctcatgcttgcgtctctacatcggcttcttctctcagattcacagctggattcgtctccgctagtcccaatggctcctctttcgattctcccaagctttctcttcctttcgagcctctccgttcaaggtttttttgccattttccacttttcttcactctcgaaactatggattctttagattaacttagggattgtgtttgcaggaagacgaataagttagttagcgatagaaagaattggaagaattcaactccgaaagctgtatattccggcaatctctggacaccggagattccgtctcctcaaggagtttggtccattaggtgaaacttgagcttttaaccatgttcttgaactgtgtgattttgaactctttttgatggtcaagtctggataaatttgttactttgcagagatgatttacaagtcccttcttcgccgtattttcctgcttatgctcaaggacaaggaccacctcctatggtgcaagaacgtttccagagtatcattagtcagctcttccaatatgtaaacttatgaaatctactctttctttaagattgattatcatagtttctagcttagtgttaatgaatggtttcgtttgtttata

SEQ ID NO: 143415 - DNA, 640 bp, Arabidopsis thaliana landsberg
ctcttctgttttttttggtttgttcttagaggaaatctttatcttggaatctttaatctatctagaattaaaagtttatgctcgtaggattgtctacttttaaaagtcaacatattcgatacagatattttgtatatttatataaagtcgaagaccctgaaacttatcttcacggcataataagaccaagaagaaaaagaaaacattaatttcaaccaaagcaaaacagagagaaaaaaatagagagagtgaatcaatttcggtggagaaagagaagaatggagcagccgtacgtgtacgcatacccgcaaggtagtggccctcgggagctccgactccacaagccggaggagtggtagtggatccaaggtactgcgctcgcttacgctatagatatggcgatcgtacggaagatgatgtcggtgacggacggtaattttgtgataacgaacgtcaacggaaacctgctgttcaaggtaaaggaaccgtgtgtttggtctccacgacaagagggtcttgatggatggttctggaacaccggtagtcactttgagagaaaaggtctccataatatagtattagttatagaaatcagagcctgcacaggcacaacatgtatacaagtagtagaatagccccc

SEQ ID NO: 143416 - DNA, 776 bp, Arabidopsis thaliana landsberg
atttataagaatttgtttgctcttgcttcgttgttagtgtgatttatgtgagtgaggtttgtaaaaagtttgtgtgtatttcctctgtttttgtttccacattttaaatggttggccgacatataaatcaagtttattgaaaagaagaagtaaaaaagattctctagttagtgctacaatgagtcataaccttttattattccggaagaattattcttgaagggaaagaaaaaaacgcgctttaatctctatatataacaataacactttgggttttagactttagatacgaatcaaaaacatttgagataaaaatcagaaaagtaaagagacgaaaatggcggatcaacaagcaggaacaatcgtcggaggagttcgcgatattgatgcaaatgctaatgatcttcaagtcgagagtctcgctcgtttcgctgtcgatgagcataacaagaacgaggtaccattctcccatcttttcctgccttcattatcctaaaatctgtttggttgatgatcgaagtttatctcttagcaaatcgctgatttttctcgttcgatctatcgaaatataggtcattctcatcaggaattgttattttttgtttgagaatttagggattgtgtcatttgcttctgtactagtgttgatttgaagattttgtttccagaatgtttataagaacaattactacctgagaaacatatatcctcttgtgttgtttaaataaagattataataagcgatgagtttttttctttcttgtttaagcaatgat

SEQ ID NO: 143417 - DNA, 1819 bp, Arabidopsis thaliana landsberg
gaagcactagctctctggtgagattccttcagagcttggagatatcgagaatcttgatatcgcgttaaacttgagtagcaatagactcactgggaagattccttcaaagattgcgtctctcaacaagctctcgattcttgatctctctcacaacatgcttgaaggagatcttgctccactcgctaatattgagaatctagtctctcttaacgtatcttacaatagcttctctggttatcttccagacaacaagcttttcagacaattatctcctcaagatcttgaaggaaacaagaaactctgttcttcgactcaagattcttgctttctcacctacagaaagggtaatggacttggagatgatggtgatgcttctcgtacaaggaagctaaggttaacactcgcacttttgatcaccttgacggttgtgttgatgattcttggcgcgcgtgcggttatccgagcgaggaggaatattgataatgaaagagattcagagcttggagaaacatataaatggcagttcacaccgtttcagaagctgaatttctcggtagatcaaatcattagatgtttagttgaaccaaatgtgattggtaaaggatgttcaggcgtagtttaccgcgctgatgtggacaacggagaggttatagccgtgaagaagctttggccagcgatggttaacggtggtcatgatgagaagaccaaaaacgttagagattcgttttcagctgaagttaagacactagggacgatcagacacaagaacatagttcggtttctcggatgttgttggaaccgaaacacaaggcttttgatgtatgattacatgcctaatgggagcttagggagtttgcttcacgagagacgaggatcttcgcttgattgggatcttagatacagaatcttgcttggtgcagctcaaggtttagcttatttacatcatgattgcctcccacccattgttcaccgcgatatcaaagccaacaacatcttgatcggtttagatttcgagccttacattgcagatttcggtttagccaagcttgtcgatgaaggtgacattggtcggtgttctaataccgttgctggatcttatggttacattgctccaggtatgttcctacatttatctttcttagtatcataagcaaccaaagtggtttagttaatgctaatgcaacatttggtataaaaaaagttcacaatcatgaaaagtgtagttagatgttttcttacgttttggtttctattttgcgttgaaacttagaagtctgtgtcgtgtgcagagtatggatatagcatgaagattacagagaagagtgatgtttatagctatggtgtggtagttcttgaagtgttgactgggaaacaacctatagaccctacggtaccagaagggcttcacttagtggattgggtgaggcaaaatagaggtagcctcgaagttcttgactcgacattgagatcaagaaccgaagctgaagcggatgagatgatgcaagtgttgggcactgctttgctgtgtgtgaactcgtctccggatgagagacctaccatgaaagacgttgcggctatgctcaaagagattaagcaagagcgtgaggagtacgcgaaagttgacttgcttctcaagaaatctcctccgccaacaacaacaatgcaagaggaatgtcggaagaatgagatgatgatgattccggcggctgcagcttcgtcttctaaagagatgagacgagaagaaagattattgaagagtaacaacacgagtttctctgcttcgtctctgctttactcttcttcttcttcaatcgagtga

SEQ ID NO: 143418 - DNA, 2409 bp, Arabidopsis thaliana landsberg; identical to SEQ ID NO: 19326

SEQ ID NO: 143419 - DNA, 904 bp, Arabidopsis thaliana landsberg
gaaaaaccctctcactctcaggctcaagcgccggcgttcactctctaaccaaactcgatttcgtttctgggttgtgagattgagaaatgccgagatcatctttgcggctactagctaagcctctcttggagagcaggcgagggttttgcacgagctctgataagatcgtagcttcggtgcttttcgagagattgcgcgttgtgatacccaaaccggatcctgccgtttacgctttccaggagttcaagtaagctctctcatcgctttgcttgtgttctgttttttctttggttgaggaatggtgagattttgagagaaaatggggggaaaagtatagttgtgtgattcaaagactgcttttttatgttgcggaatgaataagatttgagtcattgagcaccgaaattttgattttactctctggttcattttgattttgatcacgttttggtcttgattttgttgctctatggcagattcaattggcaacagcagtttcgtcgtagatatcccgatgagttcttagacattgctaagaacaggtaaaagtttctgtttttctcaatcttcttttgatatcatcatgtgtccaagcatataatctgctcgaaggtttcttctgcattcaactttgtgtcatccttgttagttattatgacaatagcaaagaatgttagattgggagtttttccgagtagctccgtgagttattgttgctcaattcttcagcagaattaccttgcctgaagtgaactatattagaagtgttacatgctcatagatatatagtgaaggttctgtataggtcagtttcatttttctccaagtgcggtgaagcttctatgaaaatttcatttcgtctttggataaatagtctcctccgtcaagatcgccggagctccca

SEQ ID NO: 143420 - DNA, 591 bp, Arabidopsis thaliana landsberg
cttataaaaccccacaccttccttgtttccctcttcctacaccgcactctcttcttcttcttcttcctctctgttttttctctctctttgtttggaaccaccatggataatgtcaaacttgttaagaatggtgttttgagattgccacctggattcagattccatcctactgatgaagaacttgtggttcaataccttaagaggaaagtttgttcttctcctttgccagcttcaatcatccctgagtttgatgtttgcagagctgatccttgggatttacctggtaaagctttctgattcttgctatatttagtaagttttcaatttagagtctctgtgacctttaaggctcataagattctcttatgtttttttaggcaatttggagaaagagaggtacttctttagcacaagggaagctaaatacccaaatgggaaccggtctaaccgggcaactgggtctggttattggaaagctaccggtattgataaacgggttgtgacctctagaggaaatcaaatcgttggtttgaagaaaactcttgtcttctacaaaggcaaaccacctcatggctcaagaaccgattggat

SEQ ID NO: 143421 - DNA, 4018 bp, Arabidopsis thaliana landsberg
cgtctccaacttattggttgacaaaaaatatacagtcaaggtttgaatctaaattagaaattgttgtgtccaatgtcttgattttgatattttagcatacatcattcctcttgtgagacaagcttatatataaattatgatttttaattctaaattggtttggagacattacaaaaaggcgttaatctgctgaaacttaaaaaatacagcagcctcaagctgtcgtcttaaaaacaatcagaacattattattctaactcctcaatttgtcttgaaatttcaggtttgtgattttggtctctcgcgattgaaggccagcacgtttctttcctcgaagtcagcagctggaaccgtaagttcagtttgtttgaaactaaaacacgctgaacaacgtaactttcttctaggtcctatttccaatggaagctaaataattactggctttgatatatcagcccgagtggatggcaccagaagtcctgcgagatgagccgtctaatgaaaagtcagatgtgtacagcttcggggtcatcttgtgggagcttgctacattgcaacaaccatggggtaacttaaatccggctcaggtactttccactctaaacatctcaaataataatgatattattttgcatttggaagtccctcactctacatttcatagcatgctatatatgatcatacaaaaaaatgttccataggttgtagctgcggttggtttcaagtgtaaacggctggagatcccgcgtaatctgaatcctcaggttgcagccataatcgagggttgttggaccaagtacgttaagattttctatctcttttttgaattcttcttgaatagacttcatgtttatgtatgtgtttcattaccagtgagccatggaagcgtccatcatttgcaactataatggacttgctaagaccattgataaaatcagcagtttctccgcccaaccgctcggatttgtaaaatacccccggtccattcaaaagttgttataatcatgatatgcacatatactctcagcattcttttgctgcccaggagggagacactagttaagatatagctttaaaggtacattcctcatgagctatcaatcatatcctacagaatcccatggtttttatacatgtattatttttgcgatctttgtctgctgttttgttccctttttaatgttgcagattgttaaaatgtacatgactattgtcacagggaggaaaaaaaaatgtagtaatggaaacaatgtgagggatataatctatctatctagtcccaaagggtaagcaatattttgttgttatgtctttgtagcaatgcactgaaagctatgtttaattacattgctgtacatttataccgctaaattagttactaagcgaaggtaaaaaagagcagctggtaaatgctgtcaagggttttgcaaactcaatatgattcattggatttacatttgttcactgtgcgattagtctggactataaaccaacagaaatgaaataagactgtaactttcggagactctaatacagatgaatataatcccaaatcgttaaaaacgcattgggactgaaaatatctagatacatagtcaactatttttgccttcgcgtctaagcaagttcccacacttgaaaacgactttacctgtcttccgaattaatcgtttgatggatcggtaaccaataggattgcgtaaatcaaaattatacaatattaaattctgaaaaaggaaacacgaaaagcgaatcagtgatttgtgagggcccagttccaaattagaaagctgacctggcaaacgcgctaaatcactccctctcctttcaaaaatctcaagatgacgtgggacccaccatcgtcaccactttctctccttcaccaaatcacagagagagagagctaagtgaagctgcaagaaaacaactttcaatttcaatgtcggttgtacaattatttgtcactaaagtttccaaatttcttctaaactgatgaatcaatggaacatgatgacgaaaaagataaatccacggtggcgggaactgacccacccatttccaccgcctctctattccccagatttttttcaattatctgactacagtttgtcggttacttccttccctaaacctttataaaccattaaacctctcatccttcttctcttaaaccccctaattatcacacacaccccaatttctcaatctctctctcactaaaacccgtaaattttctactatatcaaatgagcccaaaaaaagatgctgtttctaaaccaactccaatttcagtacccgtttcgagacgatccgatatacccgggtctctctacgtcgacactgacatgggtttctctgggtcaccacttcccatgccactagacatcttacaagggaatccaattccaccttttttatccaagacttttgatttggttgatgacccgactcttgacccggtcatctcttggggactgaccggagctagcttcgtagtttgggatcctctagagtttgccagaatcatacttccaaggaatttcaaacacaacaatttctccagcttcgtcagacagcttaacacttatgtaatcatctctcttgctctgtttctgttttctagatagactcattcttcttcttcttcttctttctttcagttttgttttgtttttatgtttctgtaatctttttgatgaccgaaaccattttgtatagattcttgaaactcgtcttttgataacttgtaaaaaattacctgtaattttcttttctttttgggatttgtttaatctctctatcatgtaacactgagttttgtatctatgaaattttggcctcgattggatcttataataacttctcatctgaaataagcttgtaatcttgtatacttatggtttcgtttgaatggagaattttggtttatgaagttttgttattttctcacaatgttaacttcagtctggtttaagacatcattactcacatgttcttcacacttcagaggtagaatctttctaatatcttgagatatttggtcttgtcttgatgtaaatgtgtttacttactttatcttgagcttgtttgagttgtttttttggggttggaatgtttccagggatttcgaaagattgatactgacaagtgggaattcgctaacgaggctttccttagaggcaagaagcatcttctgaagaacattcatcgtcgtcgatcaccacaatccaaccaaacttgctgcagtagcactagccaaagccaagggtcacctactgaggttggaggagagattgagaagctgaggaaagagcggcgtgcattgatggaggaaatggttgagcttcagcagcaaagcagaggcacagctcgacatgtggacactgtaaaccagaggctgaaagctgcagagcaacgtcagaagcaattgctctctttcttggctaagttgtttcagaaccggggtttcttggaacgcctgaagaacttcaaaggaaaagaaaaaggaggagctcttggattggaaaaggcgagaaagaagttcatcaagcaccaccagcagcctcaagattctccaacaggaggggaggtggtgaagtatgaagctgatgattgggagagattgctaatgtatgacgaagagactgagaacaccaagggtttaggagggatgacttcaagcgatccaaaaggcaagaacttgatgtatccatcagaagaagagatgagcaaaccagattacttgatgtccttcccatctcctgaaggacttattaaacaagaagagacgacatggagcatgggtttcgatactacaataccgagtttcagcaacaccgatgcatggggaaacacaatggactataatgatgtctcagagtttggttttgctgcagaaacaacaagtgatggtttgcctgatgtctgctgggaacaatttgctgcaggaatcacagagactggattcaactggccaactggtgatgatgatgataatacgccaatgaatgatccttag

SEQ ID NO: 143422 - DNA, 2460 bp, Arabidopsis thaliana landsberg
attatgagtcctatattgtttactttcctgataagacatatatgtgctctgttcatttcagtgtaggatggttgtttggttattttgcatgtggaaaaaaatttacacttgtaatctatgactagtgaatagtgatgcggtcattatctactcttttcatgtgtgtgttgctgttccaatgcagagtttcttttttctgattcatgggacaattttgtgtgtagctagtgacattgcttgcttgcgtttttcttttttttttttccagggaaactttccaactgctagtgtttatgctggaagtaattgtatagagttaaaaggaccagagattatcatggatttgacagagttactgagatttttgaccctctgtatgctcttctccaaaaagccatttgcagtgtttctggagagtgctggttatacccacgaagatgtccttcttcagaagcctaaagcaggggtaggtcatgttaatgtgattttcttcgtgctataacttgtgattagcttgtttatagtgactagatactttgttagactagaaatccaattttgaagcattatatattcttactttttggatagcttctcttaggaacatatgttttgggaggctaaaaagagtttgtctcacatagatatttgaatgacagtagatattccccataatgattgatcctcagtgctgttcttgtattaaagattggacgtaacttgttaaaaagagttttatcagttgaattgtaaatttgataaaatggttatcatagtggtgatacgagactatggttagattgattaggatacggttaggacgcttaattagagctcagtggttgaatattttatacttttgagctctgttttgttgttttcgtttatatccggaaccataaacaattgaatttgggaaccctgcagattatgcagcctgcattcacgattatacgagataccaattcaaaatgtatcctgctattgatccgtggcactcatagcattaaagatacattaacagcagcaactggtgcagttgtcccattccatcattcagttttgcatgatggtggactaagcaacttagttttaggttatgcacattgtggaatggttgctgcagctcgatggattgctaaacttagtgttccttgcctcctcaaggcccttgatgagaatcctagtttcaaggttcaggtaaacgcgcaaatcttaattcatttagagatccgtattggagagattattgatactttttacatgatacacattttgtcttgagaattgcactgttgaaataggaagtcctttatctactgtatcgaatctaaggagcatctttgtttcagattgtaggtcattctcttggaggtgggacagcttcacttttaacgtatattcttcgggagcaaaaagagtttgcctcggctacctgtttcacttttgcaccaggtacacccaatttaatgattaatggtggtatttttttgtcttcagttatctgctcctctcccttaattgtgatgctcaactctttatatgtcaattagttctctgggtcaaaaattgttaatatgcactgaatttcaaattgaacaactcgcagctgcttgtatgacttgggatttagcagaatcaggcaagcacttcattactactattatcaatggatctgatctagtcccaacattctctgcttcttcagtcgatgaccttcgttctgaggtatatgacctgctttgcttatatgtgaagctacattcacaggatttatctctgccaccattagaagaaattttcctgattctgtagtggtacaatatattgctaaccttggtatatcaaatagtggatacaagcctgcaattttaacttggtacttctgtagagagaaaatgtatagagatatgatctttcccctgctaaatgattcagtctttccagacaacttagatatattcactctttggcaaagttgacaaaagtttctcccacaagtgttcaatggaaaagggaaactatggtcttaactcttactgtgggttgttcccatcctggttctccagtttatatccacttttgcaaaccatggttcaaattttcttgtaagtattatacgtacacccatttttgacacagataagatccttgtttggtctatttactggcaggtaacctcgtcctcatggtcaaatgacctacgtgatcaggttgaacacaccagggtccttagtgttgtttatcggtctgcaactgctataggatctcgtttgccttctatagccagcgcgaaagcaaaagtggctggtgctggggcgattctgcggcctgtctcaagcggcacacaggtagcatatgtggttcacaatgcaaatactgtaatatcatgagaaaaaaggttgcggcttttttagtgaatggatgtggaaaaattaaatgtatagattcatggacagg

SEQ ID NO: 143423 - DNA, 1642 bp, Arabidopsis thaliana landsberg
atttaaaaaatttttttctaaggtcaaaaataggcccaaaagggggaggggaaaaatggaaaaatgttgggatctcactgggtcgagcccaaagatccaaattcgagtgaagacgtcaaagcagcaagacgatccctcgagtaccaactcggctggtgattttttcttccttcttttaactatttttcctttgggatcgatcttagtatgtatccatgattaattaaaataatgtttaaattgatcatacataagatgtgacatgcttgctttctgaactacaaatgggcaggtttcttcgccctctcacatatggacagtatccagcggaaatgttagaagatgtaaacatccgactgcgtgaatttacaccagaagagtctgagaaactaagaaaatctttggatttcgtcggattaaattactatggagcattcttctctacccctctcgccaaagtcaattcatcgcagcttaattatgagaccgacttacgtgtaaactggacaggtactataaccttgaccgttttcaagaaatttctttcaaaatgaaacaatatcattttaacattaatttctatgaaaagtaatggttgctttacttctttttggttctttgcagatagtcaaaacaattcaccacatctcaaggtactctttaacaatcctcctaaaacacttgacatatattttaatactctttaaaaaaatgttaagctgcaaaattagaaagcgcagattttattttaaaaaaatttctatatctattaacaaacaaaaatcgtcaactttgtcaactaaattcaaatgagtatcctttttttcctactaattcaagttattactaataacctaagtcttcctgatttgcagacaacttcaatgggtatagtgatatatccagcgggtttgaagaatatcttgaaacatatcaaagacgaatacatggacccagagatttacattatggagaatggtaatgaatgaagtatatcatatacatatgtgtgtgaatgagtaattagtatgatgattagaatgtttttggtaagttatactaatttatataaattgtagggatggacgagatcgactatgggaccaaaaacataacggaagctactaacgattacgggaggaaagagttcatcaagagtcacatcttaatcatgggtaaatccatcaggtataatatacttaactatatatttctactaaaaatacttatatatagcaaataacatacaaatatcttaggccattatcatctaacatttctaagcgactttgtcagaatgataagtcgtatcatgtagttatgtaatggatggtttgcactttgcaggatggtcaaagtgaggctgaagggttactacatatggtcgttaatggacaacttcgagtgggataaaggttataaagtcaggttcgggctctattacgtcgattataatgacaacatgaaacgttatataaggtcatgtggaaaacggctaagtgagtttcttgattccaaagagactctccataaatgctatctcgagggccatcgagagaaaggatatgcacccaagttggtcgacgcagagtatctggaacctgagaactcgcagctaagttacaggagcgattctatgtga

SEQ ID NO: 143424 - DNA, 852 bp, Arabidopsis thaliana landsberg
ctctgtgttgcattttgaattgcagatatgcaaaccgagataggctaagccccgagcatgagagaacaattattgagatgctacttccttatcatcctgaatgtgagaagaagatcggatgtggtatagactatattatggtatgtatcatgctttcgagatttggaaacaacattagcctatgtggacattatggtcatcctttcacaaatcaggcataggttttacattttcattttcgaatgtttgtctgcattctcaatcttttcttggctttgtttcaacttccacattcttcatagtggaaacaggtcacagattcttacatgttttctttgtgttagtatgatcaacatatataattgattttcatgttttacatgtcaaagatagagatgatatgttgattgtttcgggtttgtggttgcaggtagggcatcacccggattttgagagctctcgatgtatgtttatagttcgaaaagatggagaagtagtcgacttttcgtattggaaatgcataaaaggtcttataaaaaagaagtatcctctgtatgcagacagtttcatcctcagacattttcgcaaacgtaggcagaacagatgaatgaagccttatgtagattctcaaactcaaatgctcgtagactcggatccactacaaggttttggagtgagaactcagacacagaagatccagtcactgtttttctttgagttggaaatacgaatggaactttctagaaaatatggtttccgcaggagatatgaggaattagaaccatcacaagtctttaatatgttcattatcttgaaatctttagcgtttatatgatgatatctgttacattg

SEQ ID NO: 143425 - DNA, 1590 bp, Arabidopsis thaliana landsberg; identical to SEQ ID NO: 6519
  unsure (1)..(1590): unsure at all n locations

SEQ ID NO: 143426 - DNA, 1855 bp, Arabidopsis thaliana landsberg
gtctttctaattatattgatatcatttttgtggtgtttgtggccagtttcctcggtacttgagctttgttaaaggtgttgtggactcgcatgatctcccacttaatgtatcacgtgagattcttcaagaaagtcgcatagtaagcgctcatatccaattcgtatgcaaagcctttatgatatatgttttgttttaagtgcaatgctatgttaagcttacgattttgtattgtgtctccaaggtgcggatcatgaagaaacgtctagtgaggaaggcttttgatatgattttgggtatatccttgagtgaaaacagagaagtatgtttcataactcttgttcccctaagcttacagtttaaccttttttaattccctttagaaatcactgctacgttctggtgatgattttcctgacgaatgagaatggcattgttaacctatacaggactatgagaagttttgggataattttggcaaacacttgaaattagggtgcatcgaagaccgtgaaaaccacaagcgtatagctccactgcttcgatttttctcctcccagagtgagaatgacatgatcagcttggatgagtatgttgagaacatgaaacctgaacagaaagccatatacttcattgcttctgacagcattacaagtgctaagaatgcacctttcctcgaaaagatgctggagaaaggacttgaagtatgtgttgttcttctgaatggggcctcgttttgttcttccttgcaaatattcctattaactcagaggtgattgacatgtatttctttgtattgtgaacgtaggtactatatttggtagagcctattgatgaagttgccgtacagagtttaaaagcttataaggagaaggattttgtagatatcagcaaggaagacttggatctaggcaagtgcctgatgtaattccttgatttagcatgtcaggtaatcacttatgtataataacaaattctggctttgatctttgtattgacaggagacaagaacgaggagaaagaggcagcagtgaaaaaagagtttggacagacttgtgactggataaagaaacgattgggtgacaaggttgccagtgttcaaatttccaaccgtcttagttcttccccctgtgttcttgtatctggtaaatttggttggtcagccaatatggagaggtaagatctgacctttttcttaagcaaggatttccgttctccttttttgctcctggtgaactaacacagaatatgttatctggacaggctaatgaaggcacaatcaactggtgacacaataagcctcgactacatgaaagggagaagagtgtttgagatcaatcccgaccactcaattatcaagaacataaatgtgaagtcaccattcatcataacttgtacctggctattataattaaatctaggagccgctttttgagcttggcttgtttttttcttgcaccctgcaggctgcttacaatagtaacccaaatgacgaagatgcaatgagagccatagatcttatgtatgacgcagcactagtttctagtgggttcacggtgagtcctattctacattaacattcttaactttttgttgtctctagaattgaaataaagtaaatactggtaaaacttaattgttgtttctcaaaactacagcccgataatccagcagagctgggtgggaagatatatgagatgatggatgtagctctttccgggaaatggtcaagccctgaggtgcagccgcagcaacagcagatggcacattctcacgatgcaaagacgtttgaagctgaagtggttgaaccagtcgaagtggatgggaagaaaggaacacagccttatgtttatgtccc

SEQ ID NO: 143427 - DNA, 1650 bp, Arabidopsis thaliana landsberg
tgcgctgattgaagttcttaccatgtttctgcagactagcaaaactgcgttattctctgccacccagacctctaaggtatttttctgttggctgttgtatggtcattattagtatcttctgtttcttatgatgcattgtctaatcttacaggttaaagatcttgctcgggtgtcattgacatcacctgttcatgtggatgtcgatgatggcagacgcaaggtatgaattaaatactctgataatggatattaagggagcatggagagttttcttatcaagtttccaaaactgttaggtgacaaatgaaggattggagcaaggctattgtgttgttccgagcaaacaaagacttatccttctaatttcctttttgaaaaagaacctaaataaaaagattatggtatttttctcgacttgcaagtcggtacaattccatacggaaatcatgaaaataagcgacgtggatgtctctgatattcatggaggcatggatcagaacagaagaactaaaacctttttcgacttcatgaaagcaaagaaaggtatcttgttatgtactgatgttgctgctcgtggtctcgatattccttccgtggtacgtctccacatctatgttcttgcattggttttgtacgcatttacttaccaatggttttatggaaatcatatttctggcgatttttattatctgtaggactggattatacagtatgatccaccagacaagccaacggtaagacaaacacttcctcatatttggttttgcatatccctttgcctctgtatgtagaatcttaaattgttctttggtgctgttatttcaggaatatatccgtagggttggtcgaccagcccgtggagaaggagcaaaggggaaaggcattacttgtcttgattcctgaaaaacttcagtttattcgcctcctgaaggtaagaatggttattgaatctttattgtgggttaaccaccttgagttttagtttgtaatttaaccctcaggctgcgaaagtacctgttaaagagcttgagttcaatgagaagaggcttagtaatgttcaatctgcgctggtaagacttctgattcagtaatgttgtgggtttaataactttccatttgtaataacaacgtttctttttctgtctcacaggagaaatgtgttgccaaggactacaatctgaacaagttagccatagatgcgtacagggcttatctctcagcatacgattcgcactctttgaaagtcatctttaatgttctccgacttgacctcctggtaaaagaaacttaaaaaacaaatattcttccaaagatttttgttttcataatagctaatatctcgtgttttgacgttgagtatcgcaggctgttgctgaatcgttctgcttctcttcgccgcctaaagtgaatctgaacatagaaagtggagctgggaaggtgaggaaggcgagaaagcagcaaggtcgcaatggcttcagtccttacagtccctatggcaagtccacacctacaaaggaggcataaagtgtcatttgtttacaaaattactattttgctccgtagttttgactaattaccaccaccaagttttgtttaaagagtaaacagtgcatttgatttaaatgaaatgttccttggctactattaata

SEQ ID NO: 143428 - DNA, 1055 bp, Arabidopsis thaliana landsberg
  unsure (1)..(1055): unsure at all n locations
gaggcaccaatacataagaataatctaatccgtaacagaagaatctgagtgttttgtagctaagctaacgcatttggtcaagctaaatgaacgaagatgcaatgagaaaatagaaaaatagtaaagtttttaccttgcgcttagctctaacactgacggagccgctctgagagaggcccacaagcggaggaatcgcgccttccctcacaagcaacccacggtttctaacgctatcagaacaaagctgcaacagcgtcaagatcgcaaattctttccctttcacagatccatcctcgatggcctcaacaagcgctgcgatccctccttcctcgacaatagcctctttgccatcatctatcgctgcaaggctactcagaaccaccatagctttctccgccataccagtcccttcctcagccacaaggtccaccaacggcttcaccgctccagcagtgaccgctctctccttgttttgctgaagcgtacacagcttgtagagcgtcgtcaacgcatccttctttcccctgcaagatccgttcaacagaagagaaaccagcggcggaatagcaccgcaagctccgattgagcctttgttctcctccaatagcgccatactaagcaaagcacatgcagcgttctgctttgaagtctccgtccccgttttgagtacccacactagtgatttaatcgctcctcctgcggcgattacagctttgttctggtcgtgtaacgagaggtttaacagagctgtaactgcgtgctcttgcgtccatggatcgttacaacgaagaagtggaatcaaagcttgaatagctccagattccccaatcaacacacgattatccgctcgattcttcgccaatagccgtagcttcgccgcagcagatcgctttatcgccaccnnnnnnnnnnnnnnnnnnnnnatgcatagtttcacagttggctgcagatcttccggcgaaatacactcgataatctctgtagagaagttttctctctgtagaaaccctagacaaggctctctctctaactgtggatcatgctccgcttagtaa

SEQ ID NO: 143429 - DNA, 2491 bp, Arabidopsis thaliana landsberg
accctcactccgccggcttctccaaacccaaatttaaccttgaaagaagcgatttccgccagcataagcagaggataactagtctccggcggcggcggtggttcctccgccataaaccacggtggcggaaccttagccgtccctgcattcgcgaatccgttctggatcgaaatcaaaactctcaccagacgctcaatcctcaactcccgacgacaaccggagctactcggaatgcgattagccaccgtaatcgtcaccggattcatcttagccaccgtattctggcgattggataattcaccaaaaggagttcaagagcggttagggttcttcgcattcgcaatgtcaacaatgttctacacttgcgccgatgctcttcccgtgttcctccaggaacgttacatcttcatgagagaaacagcttacaacgcttaccggagatcctcctacgttctctctcacgccattgttaccttcccttcgctcatcttcctctctgtagctttcgcagtgacgacgttttgggctgttgggcttgaaggaggtccaatgggctttttattctactgcttaatcatcttagcctctttctggtccggaagctccttcgtgactttcttatccggcgtcgttccacatgtgatgttaggctacacgatcgttgttgctattttagcttacttcttgcttttcagtggcttcttcatcaacagagatcgaatccctcagtattggatttggtttcattatctttctctggttaagtatccatacgaggcggttcttcagaacgagttctcggatcctacagaatgttttgtgagaggtgttcagcttttcgacaactcgcctttgggagaattgacgtatgggatgaagctgaggctattggattctgtgagccggtcgataggtatgaggatatcgagctctacgtgtttaacgacgggtgctgatgttctgaagcagcaaggagtgacacagcttagtaaatggaactgcttgcttatcacggtaggtttcggattcctatttaggattttgttttacttgtgtttgttgctagggagcaagaacaagaggaggtgaaagtgaaactactgatgatacctaaaaccaaaaacatatattgtaattctttttcattacttgtaattcgttgattgattgtgtatttgaattgtattctttttaacatttgtattacttttgccatcaataaaaaaatattattctataggaaattggaaatacaaaaagcatctatgaatcgcttttactcagaaaattaatgcaacatttcaaatagaggcattgagatgaacttttatcacttatgccacttttttgaaaaaactgatctggactgccatcagttaatctgaatgccaccgaaaatgtgatataccagttgtacccttaatgagttgattaaaaaaatgaaaaagaaattcaaaagctaaataaagaatcgagatcctccgttctctctcctcttcgtcgtcgtgttcttcttctttggtcgacgttcatcttcttcgtcggccaccatcgattccggccgccgccgacttgaaatccggcgtaaaagccaacgaattaggtcagtttcttctcatatttcctttgacattggtgcattgtgattttagattgggattttgaattctatataattcccagattcaatttgatagtttgatgattggtttgcaaagtaaagagtaatcgattagaggttgccgaaacgttatttgaggtgatgagcaaaggaatgtaggttgaatgtgagttgaatttgaattccgagatttggggggtttgtgtttgcaaagtttagattaaccaattagtttaacgaataggtatgtattaacattgtaaatcaattgaaaggtaacgaattaggttcagtagaatcgagtgcgaagagagattgatttcaacgtatgagtacatgtggtataactattaaaatgtttgattggagttgaactggttgtattttcaggagtgatgaagaagaagatccacactaaggtacattttgattttggaggatactattctgaagtgaatgagtggattggtaaaaattcactatatgctatatcgtttaagacgagtagtttggagaagattacatattcgatgttagtagacaagatcatgaagaaggttgcggttgatgaagcttctgtgaagttgaaactgagttacaatctgtctaaagttcggagagagacgtatattgtaaatgatgaggatgtcttcatatttttaacagaatctggtgaagagagtcggattcctgttttgcatgtggaggaattaaatggtataggagttgagaggagagtggaaatttctgtaccggagcgtcgaagttcagttggtgtaaatgtaagagaggatgatgttttaaatgaagtatgtgagatggtgcatgatggatatgagaatgatgtgaatgattgtgagaatgtagtag

SEQ ID NO: 143430 - DNA, 916 bp, Arabidopsis thaliana landsberg
gatgctctggaaccgcatatgagccgggaaaccttggattatcactggggcaaacatcacaaaacttatgtagagaacctgaacaagcaaatcttaggcacggatctagatgcattatccttggaagaagttgtgcttctttcatacaacaaaggcaatatgcttcctgctttcaacaacgctgcacaggtaaatgccatattgctttccaccagtttttcttaagaaaaataaagttttcatgtaaaaggtagactgaaaaccccataagtacactgtattcgtgtaagtggcaatgtcagtgttaaagaccttcaggttatgtagaaatattgccatagataggtagagacattaaaacgtaacaagaaatcacttagttacttgcattgacatgatacatgtagtttcttgtgaactgtggattggacaagaaataacatccagggtaagtgggcaaaccacctgacgattcatatctttaatcagattaggaccatggtcatagtggcaagttttcgtaatgtgagatgggttgattgaatgtaaattaaagatgtatgaggggcttgcaggcttgaaaccacgagttcttctgggagtctatccaacctggaggtggaggaaagccaactggagagctcctcagattaatagaaagagattttgggtctttcgaagagtttttggaaaggttcaagtcggctgcagcttcgaattttggttcgggttggacatggcttgcatgtgagtgattttatctttgttcccttttcaaatatgcaaaaccccaaattacttacatacttaagcttctggatcattgatgcagataaggcgactagacttgacgttgcaaatgccgttaatcctctcccaaaggaggaagacaagaaacttgttatagtaagacgcc

SEQ ID NO: 143431 - DNA, 1082 bp, Arabidopsis thaliana landsberg
atgactgaaatctacagaacaatttcaaccggacgtggagacgacgtttctccgactaaatgccgtgaacgtcgtcgtcggagaattgagatgcggagacaagcggcggttttcggcgaacctagttcgtctaggaatcgtgatcggacggacatggaagtttactcaagttttgacgttccattgaggaaacaagctcggaggtcagagatcggtggtcttccggcggatatcggggtttttttggcacctccggcggcatcttcttgccaaaaatcggaagcgccggtgtggaagggagaagaaacggaggatgagccgttgtacggtatagtttcggttatgggaagatctcgtaagatggaggattcggttactgttaaaccgaatttgtgcaaaccggaagttaaccggcaaagaccggttcatttctttgcggtatacgatggccacggcggttctcaggtaagaaaattaaccaggggtggtttggtcatttaatataaagaggctgatgtgatgcgtggacaggtgtcaacattgtgcagcacgactatgcacacgtttgtcaaggaggagctagagcaaaacctcgaagaggaggaagaaggaagcgaaaacgatgtcgtggagaggaaatggcggggcgtgatgaaacggagtttcaagaggatggatgagatggcaacgagtacatgcgtgtgtgggactagtgtgccgttgtgtaactgtgatccgagggaggctgcgatttcgggttcaacggcggtcactgcggttttgacgcacgatcatattattgtagccaatactggtgactcacgtgcggtgttgtgtcgaaatggaatggctattcctctgagtaacgatcacaaggtggtgttcttgtaaaggtttgagaatattggagtttctattttgaagttgttgagttttttgcagccggatagaccagacgagcgtgcgaggattgaagcagctggtggtcgagttttagtagtggatggagctagagttgaaggaattctagccacgtccagagccataggtatacctttctcaattctcatattgtagtaaag

SEQ ID NO: 143432 - DNA, 1683 bp, Arabidopsis thaliana landsberg
tccatttgggtcgtatccttcatgctcggtttggtgtgtttactgaacctgacgtctttgtggagacgaagctgttgagcatgtatgctacatgtgggtgtattgctgatgcacgtaaggtgtttgattcaatgcgtgagagaaatctgtttacatggtctgctatgattggtgctcactcgaggaagaatcggtggagagaggtggcgaagctctttcgtttgatgatgaaagatggtgttttgcctgatgatttcttgtttcctaagatattacagggatgtgctaattgtggagatgttgaggctgggaagttgattcattcggtggttataaaactcgggatgagttcgtgtcttcgtgttagtaactcgattttagctgtgtatgcgaaatgtggtgaattggatttcgctaccaagttttttagacgtatgagggagagagatgtgattgcttggaactcagtactgttagcttactgccaaaatggtaaacatgaagaagctgtagaattggttaaagagatggaaaaggaaggaatttctcctgggttagttacttggaacatactgattgggggttataaccagctagggaaatgtgatgctgcaatggatttgatgcagaagatggagacttttggtataactgctgatgtgtttacgtggacagctatgatttcgggtttgattcataatgggatgagatatcaggcattagatatgtttaggaagatgtttttagcgggtgtagtgccaaatgcagtcactattatgagtgctgtgtctgcttgttcatgtttgaaagttataaaccagggctcagaagttcattctattgctgtgaagatgggatttatcgatgatgtgcttgtgggcaattctctggttgatatgtattcaaagtgtggaaaactggaagatgcaaggaaagtttttgattcggtaaagaataaggatgtatatacttggaactcaatgataacagggtattgccaagcaggctattgtgggaaggcttatgagttgtttacgaggatgcaagatgcaaatttaagaccaaatattatcacatggaacacaatgatctcaggatatattaagaatggagacgagggtgaggctatggacttatttcagaggatggataagaatggaatagttcagcggaatactgcaacatggaatctaattattgcaggttacatacaaaacggaaaaaaagacgaggccttggaactttttcgaaaaatgcagttttctcgcttcatgccaaattcagttaccattctaagtctcttaccagcgtgtgctaatcttcttggggcaaaaatggtaagagagatacacggttgcgtattgcggagaaatcttgatgctattcatgccgttaaaaacgctttaacagatacttatgctaagtcaggggatatagaatactcaagaaccatcttcctgggtatggaaacgaaagacatcataacttggaactcgctgattggaggttatgttttacatggtagctatggtccagctcttgctctttttaatcaaatgaagacacaggggattacgccgaacaggggaacgctttcgagaattattcttgcgcacggtctaatgggaaatgtagacgaaggaaagaaagttttctacagcattgcgaatgatgccgtcttaa

SEQ ID NO: 143433 - DNA, 640 bp, Arabidopsis thaliana landsberg
catcgtcttattctttgagtcaacccgacatatctagaggcactggaagtatagttatagatgatgatcatctgatcaaattagctgtcacagaaagtgaggcttcgaaaaggaaagcacgctttgaggcatctaagcgcgaagaagctgaaaaaactgcagttgatgcactcaaaaaggtatgtaagttccttttaacatgtttttttagcttagaagtatcaaacttttctaactcgtgatctataacaaaaacaattgtaggctaaacaatggaaaaatgtgtattttgaggagttgaagcagaggaaagaaacagagaaggcactgaggaaaagaaatgacgaacttgaaaagatgagatcagaatccgagacccaaataaccgaatcttatactgtgattagaaagcttcaagaaaagaacaacttatcaatggaaacgtttagaggaatcagagaagaacaagaagagttgaagataaagcttagagaagtatcaaagctgaagggtaagcgcgaggaagaggaagcttctacctctaaccaccgtgaaccgccacaatactttatttgtcccattacacacgtgaggaaacgttacaagatcaatgaaaactaaatgatcaaaatgttataat

SEQ ID NO: 143434 - DNA, 660 bp, Arabidopsis thaliana landsberg; identical to SEQ ID NO: 21605

SEQ ID NO: 143435 - DNA, 1104 bp, Arabidopsis thaliana landsberg
agaaactgatccatccaaaatactatcttgtcttcactcttcaaaattcctgtcattactctctcgaaccctttctcttttcgaatctccacttttttttctatcttctgcttcttcttcttctctcttcaatgattccactctcacaaaatctccatgactacaaaacgcatagacagagatctcccatcttccgacgatccttcctccgctaaacgccgtatcgaattccccgaagaaacactcgaaaacgacggtgctgccgcaatcaaactccttagcttactcctccaatgcgccgaatacgtagctactgatcatctccgtgaagcttcaacacttttatccgaaatctccgagatatgttctccgttcggttcctcgccggagcgagtcgtcgcttacttcgctcaagcgctacaaacgcgcgtgatcagctcttacctctccggcgcgtgttctcccctctccgagaaaccactcactgttgttcagtctcagaaaatcttctccgccttgcagacttataactccgttagtcctctgatcaaattctcacatttcacggcgaatcaagccatttttcaggcgcttgacggagaagattccgttcatatcatcgatctcgatgttatgcaaggtcttcaatggccggctctatttcacatcctcgcttcacgtcctcgaaaactccgatcaattcgaatcaccggatttggttcctcctccgatctactcgcttcaactggccggagactcgccgatttcgcatcatcgttaaacctctctttcgaatttcatccaattgaaggcataatcggaaacctaatcgatccgagccaactcgcaacgagacaaggagaagctgtggtggttcattggatgcagcaccggttatatgatgttacagggaacaatctcgagacgttggagattctacggaggctgaaaccgaatctgatcacggtggtggagcaagaattgagctacgacgatggaggaagctttttaggaagattcgtggaggctttgcattattatagcgcgttgtttgacgcgctaggagatggattgggtgaagagagtggtgagagattcacggtg

SEQ ID NO: 143436 - DNA, 563 bp, Arabidopsis thaliana landsberg
acgagacacgaaagcgagagccaaatcctaaaatcgcagctcttctcgtcatcgatatgcagaatcacttctactctatggctgaaccaatcctccaaaacgctctcaccaccatcgacatctgccgacgcgcttcaatccccgtattcttcacgcgccacaaccacaaatccccaaccgaccacggcgtgctcggagagtggtggaacggcgatctaatcctcgacggaaccactgattccgaaatcatcccggaaatcaatcgccaggtcaccggaccagacgagatcgtggagaagagcacgtacagtgcgtttaacaacacgcgccttcaggagaagctggacaagatcggagtgaaggaggtgatcgttatcggagtgatgacgaacctgtgctgtgagacgacggcacgtgaggctttctttaaggggtttagggtttttttctcgacggacgcgactgcgacggttaatgaagagcttcacgaggctacgctaatgaatctcgcttatggctttgcttatctcgtcgattgcgatagactccggcgaggtctactc

SEQ ID NO: 143437 - DNA, 569 bp, Arabidopsis thaliana landsberg
aatcgcttatagtgtgtttcaaggattctatggtagacctgtgaaattgaactctgcagtgaaatcgagcttcgcttcgtttttacctcttctcgctactttgacctcatcgaatcttatagttttagggggttttctgattccagggattttagctttcgtgttggttaagcttattgagaccattcccggtgtagaattcgattacgcctcttcgtatttccaaggtttcgtaaccctagtaacgattatctcgattgcgattgcagttaagctctatgtgaattggattcttgcttgggttgttgttgttgttgaatcagcttggggtataacaccgttgaagagaagtaaacgcttggttaaaggaatgaaatgtgcttctttgtcgattatcttcttcttcgcttcaacggaatcgattctcgtttggattagtaccttagccgcctatgctcagctcaacgataacgagaatggtgggaagtcgtggacagatgctttctttgtggtacagattgtgatcacgtctgcgtttctaacgctgttgacgttgtatatactgcggc

SEQ ID NO: 143438 - DNA, 1264 bp, Arabidopsis thaliana landsberg
tcttccttggctcaggcattggcacgacttagtgctgtctatggtgggacgtatatgttgaacaaacctgattgcaaggtgcgtctttgacttccttatctttgtggcttttttgtttcggacgattctgcaactttctctgtcgttaactatatggatgctagaactgataacctaatattgcttttataacaggtagagtttgacgaggagggtaaggtttctggtgttacatttgagggagagactgccaaatgcaagaaagttgtctgcgatccttcttacctaaccaacaaggtaatggctgtgaccggatatcctacagtaacattagctttgttgcatgcatatatctctcatctctgttttatggtctgttgttatgaatgtgagccttttaggcaattttaacaatgtgagcctgtatgttaacattattttaaaatgttttataatccaattcaaacaggtcaggaagattggcagggttgctcgggcgattgccattatgagccaccctattccaaacaccaatgattctcagtcggtgcaagtcattctaccccaaaaacaattgggccgcaaatcagacatgtgagttctcttattcatcctttggtttcacttatgtaaatgtgtttgaataatgtgttagctaatctttgtctgaattattctcttgagcttgctgagataccttccttgctacacactcttctcaactatattatttcttgattacaacacatacactctataaaacttggcagtgtgtaacattgagtcgattgatatatttgtttctcggctcatgattacatctttattgtaactgacaggtatgtcttctgttgttcatattcacacaacgttgctcccaagggaaagttcatagcatttgtgtcaacagacgctgaaactgataaccctcaaaccgagctccagcctggaatcgaccttcttggtcctgttgatgagctgttcttcgacatctatgatagatatgagcctgtcaacgaacccactttggacaactgcttcatatcaacggttagtttctctaccccttttttagtgagcatcttaaagttggctggtttctaataaccttttttgttcatgtcctgaacagagttatgatgctacaacacactttgacacaactgttgttgatgtgttgaacatgtataaattgatccccggaaaggtaatgttctagaatcacaaatatatcggtttttattaattgacggcgacatattct

SEQ ID NO: 143439 - DNA, 2504 bp, Arabidopsis thaliana landsberg
ctcattgaacaaaaataataaattctcagtgatccttcgagagattgattataaaatccggtcggcgacgagacttactttcgccgcaaaatttgttctccggtaccggatatttacgtatctgttctcaaattttaccattcccaccactaaaaccctagattaaaagcttcaattaccggaaaaagtctctacttaagagatttatctgtttgttgtcttaaatcacaggaagagaatggattttcttaaggcaacgattatagttgccctaatttgcaatttcgcctcactggcgtcttctgttcctttcatagttctgcatggtaatttgcaatctgatttttttcccttttctccttttttgcccttttgagtcagcaacaatcatgttcttatttgtaaaagtatcaatcttggaattttactgaagattagtttagctttagaaagtgtccttcttggaattcccaaatctctggaaaaagtaaagagaagattgtgtcttactttctcaggaattggggataaatgcagtaatgcaggagtgacacaattcacagagcttttaagcgattggtctggttctcaaggatattgcttgtatgtctattatctcctctttatacaactagcatattcaaatatggcttaaatttggtattaatccattattgtgtaaatttcagggagattgggaatggctcatgggactcatggactatgcctctccttgatcaggtactgatgtcacatgttggaagaatgaaaattgtatgagtttataccggaaaaagaaactgactgttggtctcatttttgtgtgtttttgcagacatcagttgtttgtgagaaggtcagacttaaactactatcatcaagtgtttaccaaatttggcttttaaaagttcattatcgttagatatatgtttaataccacaggtgaaaagtatgccagagcttagtgacggttacagcattgtggggctttctcagggtaacatgattggtcgagctctcattgagttttgcgatggagcaccacctgtaagttcccacaaacgtccatatgcctatgtgtatgtatgtttttatgcttttattctagcttgttcaatcttatctattcctctgatgtttatggcggttaataggttaagagttttgtttcggtagcgggtcctcatgctggcactgcatcgattccgttctgtggtgtaagtaactaactccctccaaaaaagttggtttcttctatattgacaagggaatttttttaaatatattttctcgattttgcaggctacctggatttgcatcatgttggacagtatgatcaaagcagagatctatagcgactatatgcaggtactatgttcatgagtattttaccacttctgcgcaattttctgttacggggatcaaacttagtacatctgtttgagtttcaggaacatttggctcctagcggttttctcaaaatcccaactgtaagtatttttggttaaaggttcaaaagtttcgacttttcattcttgttgtaacttaatgttttttcataggacatagcgggttacatggaaggctgtaggtttctcccaaagctaaacaacgaacttccagtcaaaaactcgacttataaggagaggttctcgagtttggagaatcttgtgcttattatggtcagtcatcgaaccaacttctctgcgtaacttataagtttctttttgatggtaacgttttatttttgatcgaatatcagtttgagcatgacacaatattgatacctaaagaaacctcatggtttggatattatcctgatgggtctttcaagaccattcttccgccgcaagaggtaactttaacccttcaatcattgtttctaaatggctcaatattgcagatacattgagttgtagtaaatgtttggatttttttcctattgtagaccaagctatatactgaagactggattggtttgagaaccttagatgaagctggaaaagtgaagttcgttaacgtctctggaaatcatcttcagatatctcatacagacatgaagaagcatatagtgccatacctctgtgataaatcatcgtcgtcatcatccacaacaatggcagtttccggatcatcttcctcacaccagtggcttccaagtgtagggaacattattatggatcttattggtccagaagtggatcagcttcagcttgtgctacgtcatgtgtaaatctgatgtcctgtgttgttgtttgttctcttactaaacacgatcgtctcgtgatatgtttgtaacttgaagataaaacaagaaaactgttccaaaatccctctcaaaaaagttcttatagtcattgataaaatgtcaaatatatgtcacaagaaatggacagagccttataaagggatgatgaagaacaccattgatccttaaggtctgttattacagaaaatctcagaacgagacaaagaaacataagtccacatatatatattcaaca

SEQ ID NO: 143440 - DNA, 3998 bp, Arabidopsis thaliana landsberg
  unsure (1)..(3998): unsure at all n locations
aggagtcagaatatcatcagccgcctctttcacttcaaccctccttaaacctcatctctttcctactccgccgctctctccgtggtctggcccgttactccatttctctcgacccctccaggtaattccttttcagatcctctactagaccctttacttattttagtgaattggtctttctccatttccatctatcccttacgtatctgtgactttttccccccttttggattgtattcctcatcttcctctgtttccgtcaaatgaatgatctttctgaaattcaatcacttttgtatcgtttctgaatctttcctctaataggtgaaaatggctgggaagtcgaacaaatcgaaggccaagagagcggctcagagcactaccaccaattccactactgatgttaaatccgatgctcctgctcctcctgttgctgctactgttcctgctactgctccggttactgctgctgctgctccggttgctactgctgctgctccggttactgctcccgataatggcaccctcactgctgttgactctgcggtgcctgaagccaatgaagttgctcctacgattcctaaggctgacgaaagtgagtcacaagttgaaaataacgatgcccaacccaagcaaggttagctctaatgcttttattagtaaatcacccaattttttagtatatctcaatttgaagtgtcagtgtggttttctcgtaagctaagtagattcatccacaccctcttgtgtattgcttttaagtgtctaatttttctgctttcacaggtgaactccgtctttatcctgtgtctgtcaaaacacaaagtgggggtaaaatggagcttcaagtgagttttttttttttttttttttttttttgctttctcgcttatatactattggctagtcttagaaaatcaaatagtgttttagtttcgtcagggatttaatacctgtagatatttcttgtaaagcattaccttttcctactggtttctcttatatatattggtgtaaattactaaatctgtccaatgtttgtgttttcagttgaaccctggagactctgtgatggatataaggcagttcctccttgatgctccagagacgtgctacttcacttgttatgagttgttactccgcaataaagatggagagactcatcatttggaagactacaatgagatctctgaagtannnnnnnnnnnnnnnnntggttgctccttggaaatggttgcaggtagctaagtctgtcttttcttcatttttttgggttgagactaaaaacagaaagttgacttgttatgtttcttcccacagcattgtatgatgatagatctatcagagcgcatgttcaccgtgccagagatcttttgtctctttcaacacttcactcttctctatcaacaacacttgccttgcagtatgacgcagcactgaacaaagttcagaaccctggaggtttcaaatttgaatcattctcttaatattgttttgctttgctaatattttcatgcactgcgaaggatttatttatggcctctatattgaaacagataaaccaaagtctgacgttccagagctggaatgtttgggttttatggaagatgtgcctggctctctcaagaagttaataaattctacatcagaagagatcagatctgtggaaaacattgtgttctcatcgttcaaccctcctccaagccacagaaggtattgagcaacttattttagcatttgtaaaggcataaatttaccatttatgttgtttcttatgaatatatttgttgcaggcttgtaggagatctaatatatttagatgttgtgaccttggaaggtaacaagtactgcataacaggcacaaccaaaacattttatgttaattccagctcagggaatattctcgatccaagaccaagtaaatctggatttgaagcagctacgctgattggactattacaaaagcttagctctaagtttaaaaaaggtgggaaacagcttatacaccattcttcttaagtctattctttactctttttatgacgtgataatcattcaatctgttgattagcttctatttttccttttatttgaagctttccgtgaagtcatggaaaagaaagcctctgctcatccgtttgaaaatgttcaatcgcttttgccaccacactcatggctaagaactttttcagttcccggtgagtttaattttagtagcgtttggattgtcatccatcttgcacagacgtacttgtttattatagtatacttgcgttctgcacagtagtatggtttagtaccttaactctctcctttcgtggctatctcaactgttctttcagaggtctttactctgtgttattcagttttatgcactgataatggttctgagatattcatatggcagccatagaagtagtgtggttgaaggagtccttgtttttaattgcagaatatgcaatatatccttgaagtccctctctagtgcattctctttgtgactgccttttaatggccaagtcatatcttgcacaatctcgaataatattttattttattttttattatttatttatttatttatttattcttttatctcgaataatattcattttgatgtttttagtcttaacaaaattttgtaaattaattctcttaatagaatgtggtccatttcgttgcgtgtttattgactatgtactaattttctggttttatatattgaacgtgtgctttgtagctacacttgaattagtttttctattaaatctaagcacggaatgttgtatctggactcagatcacaagcgtgatgcagcgagagcagaagaagcacttaccatttcctatggtagtgagttaattggcatgcagagagattggaacgaagagttgcaatcttgcagagagttccctcacacttctcctcaagagaggtacaagcgatacctaactacaatgatttctcggtagcatgaaattttgagattctgttccatttcagatttgtttccttaattgaaaatttccttcgttgcaggatattacgagacagggcactttacaaagtgtcttctgattttgtcgatgcagcacttaacggagctattggagtaatcagccggtgtataccacccataaacccaactgatccagagtgtttgcacatgtcagtgtgaattgtttggcccttatttttgattctccgtgccaattcgtttattttattgatctagctaattgtgttcatgaaattttggcagtttagtaactccctttgtgttttataacgtggacaaatgacagaggatctagatgttcacatatttgtgtttatgcattgagtttttcaattctgaacacttgctattcttccactgttgtaggtatgtgcacaacaacatctttttcagttttgctgttgatgccgacattgaacagctctccaagaaacgtccatctaatcaaatgacggagaaggtgtcctcatctgaaaaggtttcatgcacagaaggaacctgcgataatgaagagcataacaactgtaatgaggcgccacttgttgagaatgagcaggctacgtatgcctctgcaaacaatgatttgaaaggcacaaaattatatcaagaagctgatgtcccagggctatataatctggcaatggccattattgattacagaggccatagggttgttgctcaggtttgttcaaatactggaacttccaagtccttattcttgagattgtctgtgtcttgcttgtgttcattttaatagtatctttgcaatgtgttttagagtgttctaccgggaatcctttaaggggataaatcagatgcgcttttgtacggtttaatcgacaatggcaagaaaatatgctggaatgaagattttcatgcttaggtaaatgaatatagtctctttgctgctggatacccgtaggcattaatgtgaaaattctaagagtaatctatttgtacaatattaatattaatattt

SEQ ID NO: 143441 - DNA, 1036 bp, Arabidopsis thaliana landsberg
gttctcctccaagtgagaaaagaaaatgcagatttcttgtgaataatagcttaaacaaagcagaggctattaacttgagaaacaagcaaaaagtttcttctgatcctgagttaagtcttgtccaattatcctcatgcggtagaagagaagcaattattggttttggtttctctattggcttgcttgataatgtttctgcattagccgaaacaacttcttgtgaattctctgtgtctccttctggtcttgctttctgtgataaagttgttggttatggtcctgaagctgttaaagggcaactaatcaaggtgatttttaagtatatctcaaattacaatgactttttgcaatttctttatgaatgtttgatgattcttgaatgttcattgcaggcacattatgtagggaagttggagaatgggaaagtctttgatagtagctataatcgagggaagcctcttacttttcgaattggtgttggtgaggtaattaaggataaacattacttatgccaaaacctcacatttgtttaaacttttaacattatgtgagaaaacatactatacaggtgataaaaggttgggatcaaggaatccttggctctgatggaattcctcctatgcttactggtatgtatatgctcaattttttttaaaaaaaaattaacatagcataaacagaggaaacatgaaactttaattgcatgtaactagatagtggtcatcactatgcttagaccataagaccttagaaacactgaaagaatcttttgtatgtaactagatagtggtcatcagtttcctaatttctataactttttaccataatacttagatattcatgttacaggtatatagtttaagtctacatagtgtttaaaagaatttgaactcaatagaaacattgtcatgtttacatcatataattctgttggtctaatgagttttgatttggtttctttcttcaggtgggaaacgaacattgaagattcctccagaactcgcctatggtgatcgaggcgcaggttgcaaaggag

SEQ ID NO: 143442 - DNA, 2714 bp, Arabidopsis thaliana landsberg
ctgccccaggccagaagtggtatcctcgactggttttggttgaattctagtgcagacgctcgctgagccaacgacggttactagatgggttgttgggaacttcgctgctcgctgtgatacaaatacacgtattcgtgacttgagtaaatgtggacgggagagaggaattgtaagccttctttaggttcattggttactatacaagcgaatcatatgcacaactccgtttaattcgtcccttttgtttttcccttttatcccagaatgtagagcctccattcaaggatgtcatcaacgagaatcctcagtttaggaatgcaccagctactgtgagagtagagaatatgtttgagcagataaaatccaaactcccaaagccgcctttgttccttctttgcatactcgctgaaaggaaaaactctgatgtttatggtacatcacatcacactttacattcttgaatatggcctgttttcccccttgaatgtaaatgtttaacttttcatgtgtctgaaattttttaggcccttggaaaaaaaagaatcttgttgatcttggaattgtgactcagtgcattgctcccaccagactgaacgatcagtatctcaccaatgttctcctgaagataaatgccaaggtagctggaggttgtaaattcattcaattcgaatttcaagactgattgtaaagactttacaagcttacaagcttacagctgaaatgatttataattcgtatatgtagcttggtggattgaattcgttgttagctatggagcgctcaccagcaatgccaaaagtaacgcaagttcctaccatcattgttgggatggatgtatcccatggttcccctggccagtctgatataccatcaattgctgctgtaatactgattttgttttgttaatttttcgtgtgatctcatttagtgttgtgtgttcattcttggcaacaactctggtaacttggtgtttgttggaaatcgtaggttgtgagctcaagacaatggccactcatctcaaaatataaggcatgtgtacgcacacaatcacgcaaaatggaaatgattgataatctcttcaaacccgtcaatggcaaagacgaaggaatgttcaggtaaaattcataggcagcgtttttgtcatcttaattctattttagggccttgtgaatggtacaatattcttttatacttgtacaaaaaggtatgtcagcatcagtgtaattagagatttcctactgtttacagggaactcttgttagacttttactacagttcagagaaaaggaaaccagagcacatcattattttcaggtatacttaaatctattaaggtatcatgtaaaataatatactccaatttgttaactcactgttactaatatacatgtagggatggtgtaagcgagtctcagttcaatcaagttcttaatattgaattggatcagatgatgcaggtatggattatagttctagagcttcagagcttttagtgacacaaagacgttttatttagtatatcttggatatctttgggcctgcctgatctctttttttgttactttattaggcatgcaagtttcttgatgatacgtggcatccgaagtttacagtgatagttgccctgatctctttttttgttactttattaggcatgcaagtttcttgatgatacgtggcatccgaagtttacagtgatagttgcccagaagaaccatcacacaaagttcttccagtctcgaggccctgataatgttcctccaggtaaaatccatttgacaaatgcatgattttctgttggtcattattttgtgtttaaaatgacctgaaacctggcttttgcctgcaggaacaatcattgacagccagatctgtcacccacgcaactttgatttctatctctgcgcccatgctggcatgattgtaagttatagctcctgcagaaatactttgaccacttagttactatataaatccaacttaacagttttctatattgattttggatgtgttagggaactacaaggccaacacattaccatgttctgtatgacgagattgggtttgccacagacgacctccaagaacttgtgcattctctgtcctatgtgtaagaattatatcacttttaactcttaatctgataggtatctttgtggaattacaatgtctactaaacttttgacaataatcttcaaattgtttgctttgattcttgtagctaccagaggagcaccactgcgatctcagtcggttagtctcacatcttttatgcgttgctgctgatagctacaacattatgtgcaatatctcaattctcaagtttctttatgtttgtttgcagttgcacctgtatgttacgctcatttggcagctgcacagatgggaactgtgatgaagtatgaagagttgtctgagacttcttcgagccatggagggatcaccacacctggaacagtccctgtgccacctatgccgcagctgcacaataatgtttcaacctccatgttcttctgttgatggaacatggtccagtccacacgatagctgagtttatatgcttttgatggagaaccaacgaacttttgtttactcttctctgggtttggttcctcttttgtttttcgtcgaccctttaacattgaggagatactctttatattctgtcggtttttgtgggttggttgatactttattatgcttaatcagatttg

SEQ ID NO: 143443 - DNA, 700 bp, Arabidopsis thaliana landsberg
catatgtctttgcatcacaaattttcaacgacacatttgattgtaagactatatatccttttgcaaacaggacacttattgtctatcctaaaggaaacattaaggaaggagctccacttaattacgtttcaatgtacgtccaaatagacaattcaacactccttaactctccaaaagaagtttacgcagaagtcaaattcttcatttataaccggaaagaggacaagtacttaacatatcaaggtatatacatccggacgccctatttatatcttatttataaactatattgtattaatcaaatttccaacgtttaaatttaaaacaattgagacgctgatagtttgcataatttcagatgccaaaattttcatttaaaacacacaatctcaaatgcatgtcttggtacacagagacggatgcaaaacgcttttttctgttcaaaccatattggggatatggtaatgttagagcctacgccgacgtggctaatcccaatgctggttggcttttcgacggtgaaaatgttttattcggtgtggacgtatttgtcactgaagtttttaacaaatgggaagtgttctccttcactaagagtttgcatgaccgcctttacaaatggacgttacccaatttctcgtcactagagaaacagtactatgtctctgacaagttcgtgatcggtgggagaagctggtga

SEQ ID NO: 143444 - DNA, 1844 bp, Arabidopsis thaliana landsberg
  unsure (1)..(1844): unsure at all n locations
gcgttaagctacagataactccaagatacgggtctttgtttgttttgaagatcagattcattttacgataattccgttactctttattgtgtatatatatatctctttcccggaaatttcggttcttgttgtacaaaaactccaaaaaaacgcataaaaaatattctgtaaatggttgaaattctctgggaatttcaacgggtcttgtggtatcatgtcacagaagagagagtttgaagaagggaaaggtcgaattgagggcggctcatccgaagacaagcgtagaagattcaaaaggtataaattttgtttcagcttctagggtttacgatgttgttgtagcttgaatcagtcttcgatagttcgattcattcaattgggtttatgtattagctaataaggatgaattcgagtctaaaagttgtgatctatatgttggaacaagtataaatagtgaagtgatcgtttcgttaggataaaattgagcttctatgattaggttttgacacgattttctatagcttgcggagttctttagatgatcactgtcttgtcgtggaattaataaaaaggtttagttttgtttataatcaaagagtgatacttcttgggaagataaaattctattgacacacaaaagtactcatactagatagtatgacaccacgtagtcaccatggttggattccttaataagaagctttatttgtttttcccagtcacttactgttgacaaatcaacaatgtttatgaagttcagattttctaaattgatttttagtgttaatgagaattcctacatatgactttggatcaaaatttagtgtggttcaggaggtaatgagattacaaaccgtcaaacattttctcgaacctgttctcgagcccttaattcgtaaagtggtacgtatctcgttgatataatatagtacccttctctcctagtattgtgtgtttattttagcagtaatttatgagtatcccttggaacaggtcaaagaagaagttgaattagctcttggaaagcatctagcaggcatcaagtggtaaaactatttttcaagatcaacattttatttttcaggctgttctgtaataaataatttcttcccatgttcatctttgttcaggatttgtgagaaagagactcatcctttggaatcaaggaatctacagttaaagttcttgaacaatctatcgcttcccgtgtttacttcagctcggatagaaggagatgaaggccaagctataagagttggattaatagacccttcaactggccaaattttctcttctggtcctgcatcatccgccaaactcgaagtttttgtcgttgagggtgattttaacagtgttagtgattggactgatgaggatatcaggaataacattgtaagagagagagaaggaaagaaacctctactcaatgggaatgtatttgcggttcttaatgatggcattggtgttatggatgaaatctcatttacagataactctagctggactaggagcaggaagttcagactcggggtacgaatagtggatcagtttgattatgtcaaaattagagaggcaataacagagtcnnnnnnnnnnnnnnnnnnnnnaggagagtgtaagtattgcttgttagtttattctctcacattgagtatcattgaaccaatttactttcctgttctcatattttctgtaaattaaaagaagttgtttctttcttatgactctttctctcttatttgtagtgtacaaaccccatcatcccccctctcttttcgatgaagtataaagattggaaaaaatagggaaagatggagcatttcacagacgactgaatctgtcca

SEQ ID NO: 143445 - DNA, 454 bp, Arabidopsis thaliana landsberg; identical to SEQ ID NO: 12970

SEQ ID NO: 143446 - DNA, 1456 bp, Arabidopsis thaliana landsberg
aataaaattccatttcgaaaacccgtgagcctctctacattcttggactacttccttgtataaatctcaccaaaaaaccttctctttcttcaaccgaaaccagaaaacaaagaaaccaaagtctctttagtttcttcaaccaccacaacactcttcgtttagacaacaaaaaatgataatgagaagaagtctaagtctgagaagcatcacgatgatgatattaatggctgttttggtctggtcagtgactctagagacctgcattgccagaagaggaagacattggagacatagccaccgaagctcttctgacttgtctgattccttgtcaaacaagaaaccgaagagccatgggaacagtcaccaccacagttctcacaacaacaaccatcaccacaagtctaaacctaaaccgaaaccaaagctgaaaacgccgccaaaagctcacgacaataactctccggtggtttcagggccaccaaaagtccaaccaccgcctcttccgcctcaaaagggatctcaagttttcaatgtgatggattttggagcaaagggtgatggcaaatgtgatgacactaaggtacaataaaaaaagctcattaatttcgttatccgtacagttttcaatcctagtgattaattagaacactttcgtatttcgttttcatgagaattttacaaaagacaaataacagttgagacatcattgacaacatcacgagacagaacaagaaaaaacagagctcagaaaaagatatctgtttctgtaaagtcacgtaactttttaatgtattatatatcaaatgttaaaatgcgccaaaaaacaaaagacaaacgaatataaagtgacaacagaaataacagattacaaatgggaccacaattcacaagccttgataacaattactacagagtttctctgtagactaatggtgattagtggttttaacttttaagattagttaatgaaataattaacagagtttcataacggttgcaggcgtttgaagcggcttgggtagcagcttgcaaaatcgaagcatcagtgatgcttgtaccgcctgaatacacttaccttgttggaccgatctcattctctggtccttattgtcaagctaacattgtgttccaggtgagaattgatctcttttatatagaagtgtatcactttggtgaaaatattctaagctttgttgtgaattatgcagcttgatggtacgattatagctccaacggattcaaagacatggggaaaagggttaatgtggtggattgattttacaaagctgaaaggaattaaagtacaagggaaaggtgttattgatggaagaggctctggttggtggcagcaaaattctcctttcattgatagagataccccactcatcgtccctttgaacaattgtgcaagaagaaaccctcctaaacggaaagttaatcgtaatcttcttccctg

SEQ ID NO: 143447 - DNA, 1306 bp, Arabidopsis thaliana landsberg
  unsure (1)..(1306): unsure at all n locations
gttctctccatattctcctctttagaaagagatagagagagtcttgtttttttcctgtcttgagtgatatttttttcagagccctgagttgttgtctccattaatggcgtcagagaaatctacctccaagggccaagcatggtgaagatcagctaacacttatcttaacaataataatattttaaaatgttgcctaaagaaattttctcatttcccttttttttttcgttttggtatcgtgatgcaggttttgtacgactgggttacctagtgacattgaaatcgaagttgatgacatgacattccatctccataaggtgcgttcacaaaagcctgaagatttgtcttcttctttggcactctctgttttttctttgattactcacaagatttgtgttgttgtctgtggcttttccagtttccactcatgccaaagagcaggaaacttcacaggttgattacagaccaagagactagatcttcctcttccatggggctgataactgtaatagacccaaaagtagaagagactgacaagaaaggtaaaggccatgaaatcgaggacgataaagaagaagaagaagtggaagagcaggagatcgaagaaaatggttatcctcacatcaaactcgaggattttcccggtagttcagagagctttgagatggtgcgcaagttctgctacggcgtcaagatggacctctctgcttccaccgttgttccacttcgttgcgccgccgaacacctcgaaatgacggaagagtattcaccagataacctaatttccaagactgagaggtttctctctcattccgtctacaagagcttgcgtgaatccattaaagctctcaaagcttgtgagtcagtctctcctttagccggatcgcttggtataacggaacagtgcatcgactctatagtctccagagcttcctcagctgatccttcactcttcggttggccagtaaacgatggcggcggaagaggaaacatctccgccaccgatctgcaacttatacccggcggcgcggcgaaatctcgaaagaaaccgagtagagattcgaacatggagctgtggtttgaagatctgacgcaactgagtcnnnnnnnnnnnnnnnnnnnnatcctatcaatgagatcaggagatctgagctccgatatcatagagagctgtttgatttgttacgctaagaagcacattcccgggattctacgttctaaccggaaaccgccatcgtcatcttcaaccgcagtttcagagaatgaacagagagaactactggaaacaataacctctaatcttcca

SEQ ID NO: 143448 - DNA, 711 bp, Arabidopsis thaliana landsberg
gagttagacaaagggaacaatgtttgtgcggtatgcaaagatgaaatgttagtggaggagaaagtaaggaggcttccttgtagtcatttctatcatggagagtgtatcataccttggttggggataaggaatacttgcccggtttgtcggtatgagctgcctactgatgatcttgagtatgaaagacataagagctcagaaaggggcgatactggtttggcaaggaacgtgttgccgggtagatatagttaattgaatatttgaagtgatctattcttcaagttaatagacatggtttcagaggcaagatccttgaaccactttgtttatggtaagcacttatcgtgaatgtgataatgtttaagttgtatatattccttttgttttgtgaaataaatcatgttaaactttgaacccttatcttgaagtgtttgtgaagttaatccatctttcatagttgttctcgttgaagatcaatcatggatttataactaagcttcttacttcattagttattgacaactcttaagctagttttgcatgatctggatagatctctcaaggtaacctttttgtaatgacttttattttacagaccctgaggtgctactttgttctctcagtgaaacttgtgcttgcattgttgcagaaattccagagtttcttacagattcgacggagtttgttgaactgtttaatttgatgttttga

SEQ ID NO: 143449 - DNA, 977 bp, Arabidopsis thaliana landsberg
atagaaatcaagatgggaagccaaggcatgagttcaccgagtcccttggtggtgaagaaatcgcaagtggttatagtgaaaccctcaaaggcaacacctgatgtctctctttctctctcgacactcgacaacgatccttacctcgaaaccctcgccaaaaccatctatgtctacgctccaccatccccaaacgaccacgtccacgatccagcttccctttttcagcaagctctctctgacgcccttgtctattactaccctctcgctggaaaacttcaccggggatcccacgaccatagactagagttaaggtgcagtcccgcggaaggagtcccctttgttagggcaaccgcagactgcactctctcttccctcaactatttgaaggacatggacactgacttacaccaactcgtaccttgtgatgtagctgtgccctctggcggttacaaccctctggctttgcagatcactttgtttgcatgcggagggctcactcttgctacggccctctctcattccttgtgtgatggttttggagcgtctcagtttttcaaaaccttaactgagctcgccgcgggaaaaacacaacctagcatcatccccgtctgggacagacatcgtctcacttctaacaactttaacttaaacggtatatgttaactagtattatctaaatatattttcttttagatttagacgcattactaatcatcttgatagtttcagatcagttgacaaaaaatagattggtccatatcttttacatattgttgttttaaatttatttttatttatgatgtgatgttactaattaacattgtatatatgtaagtaggtgaattttatatactgtagttttaaatttattttatttatgatgtgatgttactaattaattaacattgtatataattgtgtaagtaggccaagtggaggggggacaagctcccaggtagttgatttggagaggcttg

SEQ ID NO: 143450 - DNA, 585 bp, Arabidopsis thaliana landsberg
tatataaatagaggatgaagggtaatgcaagaaggatcaaacaatgtatgataaatttgaggttaaatcatagaataacagtattaaagaaagaaaaaagtggcaaatagtaaaagatgggcgtgataataagggtgatacacgtatacataaggattaggagttcccctcaaagaaagaaatctaaggaagctaaggctttgcccaatgggatgttatcagcagggatgaaacccaatacggtcacgtatagccatttgattcacgggttttgtaatgaagatgatttcgaggaagcgaagaagttgtttaagattatggtgaacagaggatgtaagcctgatagtgagtgttacttcactcttatatattacttatgcaaaggaggagactttgagacggctttgagtctttgtaaagagagtatggagaagaattgggttccgagttttagtatcatgaagtcgcttgttaacggactagctaaggattcgaaagtcgaagaagcaaaggagcttattgggcaagtgaaagagaagttctctagaaacgttgagttgtggaacgaagtcgaagccgcattcc

SEQ ID NO: 143451 - DNA, 1101 bp, Arabidopsis thaliana landsberg
  unsure (1)..(1101): unsure at all n locations
cccaattatgtcttattactcctctttcttcttccttttcctcttctcctttctcacgagtttcagagtttctgctcaagatcccacttacgtataccacacctgtcaaaatacggcaaattacacaagtaacagcacttacaacaacaatctcaagacccttttggcttctctttcttcccgcaacgcttcctactccaccggattccaaaacgccaccgtcggccaagctccagacagagtcaccggacttttcaactgccgtggagatgtctcaacggaagtttgccgtagatgcgtctcctttgccgtcaacgacaccttaactcggtgtcctaaccagaaagaagccacactttattacgatgagtgtgtacttagatactctaaccagaatattctctcgacactaataaccaccggtggagttatcttggttaacacccggaatgtgacatctaaccaactagacctgttaagtgatttggttttgcctactctgaaccaagccgccaccgtagccttgaacagtccaaaaaattcggtacgagaaaaaacaattttactgcgttgcagagtttctatggactggttcagtgcacacctgatctcacgagacaagactgttcgcgttgtctccaactggtcatcaatcaaatacctactgacagaattggtgcaagaattattaatccgagctgtacttcaagatannnnnnnnnnnnnnnnnnnnnnnaatccgccgttccaccaccaccaccaccaccgtcaatttctactcctccagtttcagctcctccgcgatctggtcagagctctgtttttttcctctgtttttttttttgccctgatttcttgaaattggcaaaaccaatatagagagttttcttctatctgatttttaagcaaataatctttgaaatgcaggaaaagatgggaattcaaaggtgttagtgatagccattgttgtgcctattatagtggctgttctgctttttatagctggttattgtttccttacaagaagggcaaggaagagttattacacaccatctgcatttgctggtaaagatttcaagtgataaacgatctttaatgtca

SEQ ID NO: 143452 - DNA, 762 bp, Arabidopsis thaliana landsberg
gtttcaggaagagaaggtaactgctgaatctgacagtgaggaagatgactcatcagacgacgaagaagatgactcctcagaagaggaaaccccaaagaaggtaacatgacagtctcttttatgtgcttgttgatgggaaacctatatttgttctatctgatcttcctttgggagcaatttctctgcttctgtggtcaaactcgaatctgattctaagttttcgtggttaataaaagcctgaagaacccaagaagaggtctgcagaacccaactcctccaagaaccctgcgtccaacaagaaggctaagtttgtaactcctcagaaaacaggtgattaaatcctttttaccaatctccccattgaatacttattttaacgatagaaaggaagattgatttgtttaattaaaaaacattcggacaaagcagattcgaagaaaccgcatgtccatgttgcaactcctcatccctcaaaacaggcgggtaagaattctggtggaggcagcactggagagacatcgaagcagcagcagacaccgaagtctgcaggagcgtttgggtgcaagtcgtgcaccagaacctttacttcggaaatgggattgcagtctcacacaaaggccaaacacagtgcagctgcttgagaagaagaagcagcatgatgactactctctataatatctactctagaacttttgatgtcttttggtacttaaatctggaacttgcgagtgagccagttttagtctggtcatttatattcag

SEQ ID NO: 143453 - DNA, 469 bp, Arabidopsis thaliana landsberg
ctctccttacaaaccagatcgatcgactcggaatccaccatacagttctgggaccaccaccgtcttcatcatcggaaactacacaaaaaccgtcgctcctcctcctccatggttttggaccttccgctgtatggcaatggagccatcaggtaaagccactctctcacttctttcgtctctacgtccccgacctagtcttcttcggcggctcctcttcctccggtgagaaccgatcggagatgtttcaagcgttgtgcatggggaagcttatggagaagctcgaggtcgagagattcagtgtcgttgggacgagctacggcgggtttgtggcgtataatatggcgaaaatgtttccggagaaagtggagaaggtggtgcttgcgagctccggtgttaatttgcggaggagtgacaacgaggcgtttatcgcgagggctaagtgccaccgtatcaaggaggtgatgcttcc

SEQ ID NO: 143454 - DNA, 896 bp, Arabidopsis thaliana landsberg
accggctcgcattgaagacccagcgtcggcttgttagccctaagcatccaaggattcgagattttatgcatcggtgaagtttctttcatctttacgcttttctttttgtggattttgcgatttggttgtttctgatttaggtttgactggaaatacgtttctttgtatatgaattggcctcttcaattgatgaaactgctttgttattgatgtatcgttctgattgtttattgtgtttaggttgatttcgattttctactgtccagttagttttgttctgactcccgtatcgctataaaaatgtgatttaagcaatgcaatgcaatgcaagtggttggatttaagtaaaatcaagaggtaggctagtcctatttccacggttttgattcgttgaacttacttatgtgatttcgtaattctatacattgctcttgaaccattcgatgtgagattcaagagtagagtgacacgaagctatgatgcatttattcatagagggagagatagaacatctggtgtttcctggattgaagtcttatattgtgcccgtttgggatttgtaagtgtagttgtcgctaggaaatatatttgttgatgctaaggtcatacagtcgtatagataatgctactgttaaacgagtcttgagttgtgtatttgagatttccattaccgactgagacgattggtgtgttaactttctctctctttccttccttttatgcaggaggacttatcaaatctttgatatggcacttagggtccacaagaacatacaacagagagacatggatattggtcggaatcttggaaactggattctcccggggcttgaccggatgaagccataggctcaagttctactaccaaagaatacagacccaagcatagacaaggc

SEQ ID NO: 143455 - DNA, 1152 bp, Arabidopsis thaliana landsberg
ccttggggattcctacaagttccatgctgctggcagagaagatattgatgtgagaaattacccttttcggacgttatattcatattcgataagtttatgcttataatataaaagagctgtattcaggtacgaatgttgggttcaggtagacctttcttgatcgaggttcagaattctcgccagttaccgtctgaacaatcattgaaggaagttgaagaaaagataaacaagtcagagaaaaaactagtaaggcatcattaattgaacacaaatgttgtatcaattgattatgtgtgccttgttgcaatcttacaagcagtattttggctacaggtcggagtaaaagaccttaaatgtatcggaagtcagtgttgggcaatgatgcgcgagggagaagcggagaagcaggtcagcattgttaaatcctattggaatattgaaccaacaaagacttacgttagaaatgtaataaaaattgattgaaccaaccagtgcaatgctttttttatgtactgcagaagcagtatgttgcacttgtatggatttctcgtccacttgaagagaaagacttcaactcaatttcttgcctgaaagaattggtgagtcgtttctttcttttatgattttttaagaatagggacaatccattgtctgtcctgaaacttggttttaattttaatgcaaagtaacgttcttgttctatactatttcactgcagaaaatcttgcagaagacaccagtaagagtgcttcaccgacgaagtccactggaccgtgaaaagattatacattggttagtgataatctatcgtgagtttcacattttacttaccttgaagctttcttctgtttagtaagagtcagtgtttgtggttccaatattcaggatgaaagttgaaaagataaaaggacactctcactactttctattgcatctgtgcacccaggttgctacaacttctaactcacctcattatcattcttgaaagatgggcaagttttaaattttcaataatgcaggctggaacatacatcaaagagtttgttcatggagatcttggtcgtaccactcccaggtataataaaaggagctcccttcaatattgtagacaaaaatatacaggatctgtgcaatagcatattaacaaaagag

SEQ ID NO: 143456 - DNA, 1833 bp, Arabidopsis thaliana landsberg
gttttcaatatctacaatgatcgatatacaaatttaagtttatggcaaaaaaaagaaaaaaggaaagggacctgtcagaccgccgtgcgaccaccccggcaaggtagaaaccgagccgagtaacgatcctctacagcactggatgcgtccgaggacgatcgtagccgtcaatcacgctctagccgcacggtcatggttcatcaaccagggttaagggctcattatagattctagttccaaaattcaagaatgatctctaaatcagtcatgaaagacattcacatggatgttggtttgttctaggttttcaatatctacaatgatcgatatacaaatttaagtttatggcaaaaaaaagaaaaaaggaaagggacctgtcagaccgccgtgcgaccacctcggcaaggtagaaaccgagccgcgtaacgatcctctacagcaccggatgcgtccgaggacgatcgtagccgtcaatcacgctctagccgcacggtcatggttcatcaaccagggtaaagggcctgtctcttgagaaatcaaggaaacagaggtacgagcctatagaacagatcctgttcaagtaaggtcgtgaccaatggtgctttgtagccatatataaagcagttatttcttcactcgcttaccgatgtgggacgcaaaattcgtaagaaaaaagaaatcataagcttatgggcctaattgtatacaaaacccatatatgttcaagcccaatagttagagattatggttttgttaggaaaaagagttttaaattcagacgtcatttcttcttcctctttgatcagtatgccacgtcatcatcattcctccacgttattaaatatatgtatcgatcatcgtctctctctttaacaagctcctctctctgatgtgaagaagccatggaagagaagaaggagcttgaagggttgaagtatcaatcaggttttggtaaccacttctcatcggaagcaatcgccggagctttaccgttagatcagaacagtcctcttctttgtccttacggtctttacgccgaacagatctccggtacttctttcacttctcctcgcaagctcaatcaaagaaggtacatcatcatttcaattgtaagttttggataatttcgttgaattgattgatcttcatcttgttttttttttcagttggttgtaccgggttaaaccatcggttacacatgaaccgttcaagcctcgtgtaccagctcataagaagcttgtgagtgagtttgatgcatcaaatagtcgtacgaatccgactcagcttcggtggagacctgaggatattcctgattcggagattgatttcgttgatgggttatttaccatttgtggagctggaagctcgtttcttcgccatggcttcgctattcacatgtaaaaaactcttctttttattttggtatctttggtgtagatcagtgatacataaagtaatgatcttttgtattcattttgttttgaaggtatgtggctaacacaggaatgaaagactccgcattttgcaacgctgatggtgacttcttgttagttcctcaaacaggaagtaagttagtagtcccaatgccttaccttaccacatctttgggaaataaagtcagtcatgtattgagaatggattcaagatagtcttggatcagttctgatagtttgagtgggtgttttagggctatggattgaaactgagtgtggaaggcttttggtaactcctggtgagattgctgttataccacaaggaatccgtttctccatagatttaccggatgggaagtctcgtggttatgttgctgaaatctatgggctcatttgagct

SEQ ID NO: 143457 - DNA, 1030 bp, Arabidopsis thaliana landsberg
gtaaggctttgttggaaaaaaaggaatggtatttccttagcccaagagatcggaaatatccgaacgggtcaagacccaatagagtagccgggtcgggttattggaaagcaacgggtactgacaaaattatcacggcggatggtcgtcgtgtcgggattaaaaaagctctggtcttttacgccggaaaagctcccaaaggcactaaaaccaactggattatgcacgagtatcgcttaatagaacattctcgtagccatggaagctccaaggtaaataaagactgaaactttcccagatccaaattcgttaaaattgaaatcaaaatctgataaagtttgcttctttgttacagttggatgattgggtgttgtgtcgaatttacaagaaaacatctggatctcagagacaagctgttactccggttcaagcttgtcgtgaagagcatagcacgaatgggtcgtcatcgtcttcttcatcacagcttgacgacgttcttgattcgttcccggagataaaagaccagtcttttaatcttcctcggatgaattcgctcaggacgattcttaacgggaactttgattgggctagcttggcaggtcttaatccaattccagagctagctccgaccaatggattaccgagttacggtggttacgatgcgtttcgagcggcggaaggtgaggcggagagtgggcatgtgaatcggcagcagaactcgagcgggttgactcagagtttcgggtacagctcgagtgggtttggtgtttcgggtcaaacattcgagtttaggcaatgagagagatgtgaagttactgatgggtgaaaaaagtaaaaaaaaaacttggagatagtagagtggcaattgatgtaaataatagggatttatatgggcttttaccgattcggtgaggcttaggattccacaaaggaaaaaggctcgactggagactagtttgatccaacttgacggcccgcaaatgtataatgtttctcaatggagaaaaaaataaatggttaccaatatttttac

SEQ ID NO: 143458 - DNA, 1400 bp, Arabidopsis thaliana landsberg; identical to SEQ ID NO: 64777

SEQ ID NO: 143459 - DNA, 3727 bp, Arabidopsis thaliana landsberg
agttagcatcctacctgactgcaagaccgaggttttcaacacagcaaaggtaacaataactggtttggacaatgacataacagaaacacaacttagcaaaaggctgatttgacattttgcaacaggtaacttcgaagtcctccaaggttgaaatgctacctgaagatttgaaatcttcatcaggtcttaaatgggaagtgttctcggagaaaccgggtatttggggcgcagcagattttgtgaaaaatgaacttgttgaccacatcaacaccacaaaggacacaactgactatctttggtacacaacaaggtcagtacctgaatactgttattgttagattaattgaattcgtcaagaaagaatctgaagcaaatgtactcaatctgctgcagcataacagtcagtgataatgaagcgttcttgaagaaaggaagctccccggttctgtttattgaatcaaaagggcatactcttcatgttttcatcaacaaagagtacttaggtaccttcaacactctctacaattcttttgttatttcttgcactcaattttctaattgattgcgcgtaaatgtgacaactggtttctaggaactgcgacagggaatgggactcatgtgcctttcaaactcaagaaaccagttgctctcaaagcgggcgaaaacaatattgatttgcttagcatgactgttggtctagcggtaattctataaacaaaaatccaaatatcattgcagttttgctacatcatccgcactcatacattcggttacttttttttctgccacagaatgcaggatccttttacgaatgggttggagctggacttacaagcgtctcaatcaaaggtttcaacaagggcacgttgaatttgacaaacagcaaatggtcctacaaggtaatatagttctcgtgcctagaaacctctcatgtgctcctgagtgattctgtttctaacaacattcccatgaaatcttgcagctaggcgtggaaggagagcatctagaactgttcaagccaggtaactccggggctgtgaaatggacggtgactacgaaacctcccaagaaacagcctttgacttggtataaggtaacgtagtagtaactcttggacaagaagcaagattgtagatgataaagttgtgtctctaaaaaaatctgatcttttggtaggttgtgatagagccaccttctgggagtgagccagttgggcttgatatgatcagtatggggaaaggaatggcatggttaaacggggaagagataggaagatattggccaaggattgctagaaagaacagcccgaacgacgagtgcgtaaaagaatgcgattacagaggcaaattcatgccggataaatgcctaactggatgtggagagccatctcagagatggtaaaactagtagaaagccattaatcagagttcctttgttcaaatttggttattgtctttttgttttttggatgattaggtatcatgttccaagatcatggtttaagtcttccgggaatgagctggtgatcttcgaggagaaaggcggcaatcccatgaagataaagttgtccaaaaggaaagtatcggtggtgtaagcaagtagaacaagttaaagatgatgatgcaaaacgtgagattgcaatcaagaaagacgagattttgtttgtgttgtatttgtttgttacaacaagtcggaactcgaaaaacgatgaaacaaaatccccaattttattaacttaacacagtttttcatcatcacaagctgtaactgggccaccgaccactgatatttgttacagtttatgggcttttgattcaactgtttttatataagacaaaggaatgcgagagatttatggcttggctaattatggaagaggaggaggttgacggcataccggtaaatgaattcgggaggcttgaaattgtaagaacatcaacggcaaagcaaaaaaagaaaaagtgaagggcttgtttgcgtaagagaaaatcccagcaagcctatgtatgtaaaatccgatttttattttgatctcttattagttttttataattgaatttgattttgattttccaggattttgattatgggtttgactttactggcatagttacgcctcctgtgagcactgattatgatgtcaccctttatgctaagcttggactttactgctacaattttcaaaaggtaaccctgaactgaataatatatattgtctctttattcatcatgtattataatcaatctcctaaccttgattcctctcttcatacattattgcttgcttgtcaggggacaaacttaaagtttgtgcgctgggaaaagtataatacgtctacgggcactgcttacattgataactacatcactttggaggcaatggatccgtcctgcaactctgtcttctcttttcagactgtgttcagtgctgctggatgttataaccaagatacttatcatgtacaagactggagggtcttggcctgcagacccacatgtacgtatgcttttcttctttaccactgtcttttctttcgagatcaatcaccagagaggactaactgtttatagagatcaggtggcaagtctgtgaatgaatattttgaccggcatgaggcaatggatcccttctacacaggtaaaatgcccaaatggttgtctgatgacgccttggcctttgacaacaaaaagtattacgtggtaagatgtccagaactggagtttaatcttcttttttagtttgagaagcagttagaggtgaatgcatttttgtcacaggtgcaagaatcagacttgcatgagaatgactggctgcttgtattcatggaaatggtattcttacaagaaaatcctgtaagtccttgaatttcttcttcttcttcttcttcttcttcttcttcttcatgtttcttttctcttacgcttgcttgccaatgtgactttaggaattgcacccttggagatcaacaaggtagttgtagaaactaaagaagattacatgactgaggcgcgtgagaagctccacgcagtgaatgctatattctacattagttacaagtgcacaggtttccctgctgatcacaaacctatcacatggagaagtgatttcgttggtgattacagagctgcataaggaataccatggatgggataccaggacacatgagtcttgaaattgctgctaaacaccagatgacaaagtgagggtaatgaagtcgagaataagaagaagaagaataatagacatacgcctcctgtatgcatctcgtctgttgcaatgctatttacttgaaacttttattatgttatatgactatgcacgatgttttgcttggcttgtctttatgtctacaactctaggcagtaaaacgagttgggatctatatgaattttcacctccgttaagtgctggctatctgtttgcaatgcatagtagtaataatttgtataataaccaaataacacaagatgtaccaaaccatgaaggttattgatatgatcagaatgtggaaaggcatggttaaatgacactttcctctccgcaagcttaaggttcttcttcagatgatgattttacttcctttattgcaccaagaatcaacctttggcgatcacagagcagacataccatagctccagagccaagagaaagcagacaaatcacatcatcgacaagatttcatccgaacttgatctccgttcattatcttctcaatcatctcctccg

SEQ ID NO: 143460 - DNA, 1205 bp, Arabidopsis thaliana landsberg
gtgttcatagaggcactatagagacgcatcaacaggtcagacaaatgcacatgattgcatcactggacatacatttctctcttctgtacacacttcttcgcgaacacattatggataacgtagactataaggtatgaaattcttaccagcatcagttgcaaagcgcggtgactaatgtttttcccttactgaattaactctggttcctgaaggtcattgtcttctgtacaacggccatggttacaaaattagtggctgatctacttggtgagctaaacttaaacgtgagagagatccactctagaaaaccgcagagttacaggacaagggtttctaacgagttccgaaaatccaagggtttgattctcgtaacatctgatgtatctgctcgaggagtcgattaccctgacgtgacccttgttctacaggtaaaatcaatcatacaatagtgtaaaactcttaactcaacctcaacttaaaccggaaaattttatttgggggtttatagaaactgtatacatctatttacctctacaggttggattgccaaaagacagagaacaatatatacacagacttggtagaaccgggcgaaaaggaaaggaaggagaaggcatattgttgttggcaccatgggaggaatactttctatcatctcttaaagatttacccatcactaagtctcctctgccatcaatagacccagaaactgtaaaaaaggttaaccctttttcatatttcactgatctttgcttcaaggagatagaagttggaatctaaaatgcactaccagtgccaagtctttttagttagaaattgaaaaaacttcattagcttgatgtgtgtgagaaactgaattttttgaaatgtgaacaaataggtgcaaaaggcgctttgccatgtcgagatgaggaacaaagaggcggcgtatcaggcttggttgggttactacaactcacagaagatgattggaagagacaaagacaggcttgtggagttggcaaacgagtttagtcgtagtatgggacttgacaatcctccagctataccaaaacttatccttggtaagatgggtctcaaaaatgttcctggtcttagagccaagtaaatattccttcgttttttttttttggctttgtaagaaactccaattttttttgttattcctttaattttaaggtttcttgcagcaattcatcatctaa

SEQ ID NO: 143461 - DNA, 820 bp, Arabidopsis thaliana landsberg
cacaccattcatatccacttgtttttatccttctcaatcattctctcttctctctccctctctgttctcaaactccattttagtagcaagcttagatctcctccttccacagtcactttctcttctttctctgcttttgtttcttcaatcgatttgcttcagatttccccagattatatagaattcgatgtcaagacacagaattcacatgggttttgtctaaaaatcataaaaatcatatctttttacggatttgaagatgaatcagaattcctctgttgcggaggcgacgcttcagcttaattccggtgaaaaaccatcgccgggatcgattccgtttatctcctctggtcaacacggaaacataagcacttcagcgacgagttcgacaagcacaagctcaggtagtgctcttgccgtagttaaatccgccgtgaaaaagccaactaaagatcggcacactaaagtcgatggtcgtggacggcgaattcgtatgccggcgatgtgcgccgctagagtttttcagttaacaagagagttaggtcataaatctgatggagaaaccatcgagtggcttctccaacaagctgagccagctatcatcgcttctactggtactggaacgatcccggcgaatttctcaacacttaacgcttctttacgcagtggtggtggctccaccttgttttctcaggcgtcgaaatcttcttcttcgccactctcgtttcatagcgctaaaatgtatcattatgaagaccaatagcggtaccaacggatcatcggtagatccatctaggaagttaatgaattcaggggcaaa

SEQ ID NO: 143462 - DNA, 515 bp, Arabidopsis thaliana landsberg; identical to SEQ ID NO: 6563

SEQ ID NO: 143463 - DNA, 1118 bp, Arabidopsis thaliana landsberg
cgagtaagcagacgattggatggactgattgggctaaagctgcgattgtaccaggacttgtgtctttgattgttgttccgtttcttttgtatctcatctatcctcctacggtgaagagcagtcctgatgctcctaagctggctcaggaaaagcttgacaagatgggacctatgtctaagaacgaattgattatggctgccactttattcctcacggtaagtgtgcttctgcttcatcggctctgttcttacttatggtgagagcttgatttgaaaggtgcttcagtattgaacattgagagattttagctattgtagctccttagattaagctagggctttgcttctgtttaatgcatttgctttgagtgaaaatgtttgtggttttggtgttttattacagagaaggttttccttttctaaaaaagtgttctccttgacacaggttggtctctggatctttggagctaagttgggtgtagatgctgtgactgcagccattcttggattatcagtccttcttgtgacaggtgttgtgacatggaaagagtgcttagctgagtcggtcgcatgggacacactcacctggttcgctgctctcattgcgatggctggttatcttaacaaatatggtctcattgagtggttcagccagaccgtagtcaaggtttgttaaatgatttgatgaatgcttaataagcctaatgacttagcatgctaatgaaatgttttgacattgtttgggttttgattgcagtttgtgggaggattgggtttgtcatggcagctatcttttggaatcctcgtcctcttgtatttctacactcactacttctttgctagtggagctgcccacattggtgctatgttcactgcctttttatcggtttcaaccgctctaggcactccaccttactttgcagccttgagatacatgcgttcctttccaacctgatgggaggattgacccattatggtatcgggtctgcgcctatcttctacggagctaactacgtgccgctggctaaatggtggggctatggattcctgatttcaatagtcaacattctcatctggcttggtgtaggtggtgcctggtggaagttcattggcttgtgg

SEQ ID NO: 143464 - DNA, 1376 bp, Arabidopsis thaliana landsberg
accctgattccaaggtttctaaattttccattgatcttgttttttaaataatggaaagctttcatcgccggactttttcttatgataaacttccgaacgaacccattaggctctccgttctcaaactagatggctcttcctttggtaaatgcttcatcatagtatcttttttttttcgttttggtcactacttattaatcatcctttttttaactttaatttaaaattttatctactatgtgaagatgtttacgtattgacctcggccaccgttggggatctcaaggttgctatagaaactgccttcagccatgtccccaagaagggaccctccaagatctcatggtacatttttcaacttttattacatttttatctcttattatgtttactgaaaatttgacccaagagtttttaatggtgtgttaggtcacacgtatgggggcatttttgtttgtgtttcggaggtcagaagttaattaccgatacggattgcatcggaaattatgggatgaaggacggtgatgaggttttatagccaaacttttaatctcatttcatgaatgatatacaatattgggtaaataaacaagactttgttacatacatgtttcaggttaggttcaaaaaccatgtatccggcaatgcggaattgagcaagggatattctaggaaatccaaacgaaagaatttgtaagtctcattctttcctttaatggaaacacattgatgtatcattccaaataaacgatttttaaacgagtgcagagagagggtattgccaaaggatggagatgaagtattgaataggattgaagagattgatgactcttgggatgatcttgagagaagaggtttagtgatgtacaaagatgatgacatggaaacttcttcaaatgaaagcaacaggtcttgtctatccactgtacatggttgctgctttgctttcggtttaaaagagcttcttgggtttggtaatgacagagcttattactctttgagagatacttggagagacgattgactttggtccaatttttgttattcgtaagattttgtaatcacacaacaaaatgatccaattatgtaaggatcaagttctattacaaagggtagtaattatgttcagtgaaagctttataatagagagtacaaagttacaatgattcataagtacaagatagtgccttaaacaaaaaagtgggaaaaaacagagcttttggcagatacataacacacaaaaaaacaactccgaagagttgtaatggcggattaagaagttacaccgccattgccaaaagctctacagtggaagaagataaaaggctctatcacgaacctaaaccaaagaacataggacttctacaagaacttta

SEQ ID NO: 143465 - DNA, 581 bp, Arabidopsis thaliana landsberg
cattaattcattatcatcaaataatacagcagcaagcaacacagtaaaacccaattccctaatcccaaaattcgatctctcgtctgatggctggttacagagccgatgaagagtacgattacctcttcaagctcgtgttgatcggcgactctggtgtcggcaaatcgaatctgctctctcggttcaccaagaacgagttcaatctcgaatccaagtctactattggtgttgagttcgctaccaaaaccactaaagtcgaaggcaaagtcgtcaaagctcagatttgggatactgctggtcaagagaggtcagattacgtttcctctcttgctttttttttcctgcttactttattgaaaatccttaggataaggttttaaaaaaccatcctttttggctcgatttcgttgttgagttcttgttggattcgctgtttatgaattcatggtgtttgatttatgtatctgaatctgtagcctgatttggatattacaagttcaaagtgtcccgttcatttttccttgttggtttactagttaagactatttaaggcagaactagagttttctggttttcggaac

SEQ ID NO: 143466 - DNA, 2138 bp, Arabidopsis thaliana landsberg; identical to SEQ ID NO: 35299

SEQ ID NO: 143467 - DNA, 2860 bp, Arabidopsis thaliana landsberg
atgcaatatcctgactttggtgctagcaagtttcataactccttgaacgagcacatcatgcctgattctgacaaggtacagagacgtgaatacctgtgtatatctcctgttttactcaaaccaactattttggtgtggcacatgaatttgaacggaatcgggactcagggccaattttttcatattttccaacaggataaatacctgattctgcacaatagtttcttggttgcgtgatattgttctttccattatcgtgttcttcttattttagccgttttctgacattttttcaatgattccagagcttgggcaatgtaagtggagaagaaatcaagatggttacggaaggtttgacaagtttgagtaaatttggagagaaaggtcctcaagaaagaatgcacgaacctgtagaaattgttgaaaggtaagctgatttggatccaaagttgaatgtgagtcttttgaatgtttgtgacttgtgattcatggttgtatgtttcctttttgctacgacagaggaaaacggcctgcaaatgaagccggtaatgatgtgggtacaaagaaggcccgtacagagtcatcaggttgtgcacatgggatttgagggaatcactttcatggcctgttttagtaaaacagagtatttcttttgtctattagccaggtacaagttttagctggctttttaaggctccttaacatgtcacgggacgaaaaagagagaaacaaaacaacactaccaagacattgatatgcaaatgggcctcataagtagacccattaagaatataatgcataatgaagcccaaattacgccgtttctccgttccctttgtcttctgagcgaccctgcaaggctctcacttctttttttcttcttcttctcaactcacccaccgagtttcttctcaattctcgcgggacatttcgcgggcgagggaaaaaggtaaaatttttggcggatagagagatcgaaaaagcttaacatttagtgtctgggttgttttcttatctcgtagaaatttagaaaattcaatactcagcttagcaatacccaaatctaacctcgttatagctaagattactttatcgagttttttcttctcttgtgctcatcgaaaaccatatcaagggtcgatctgtgttttttgtctgatgttcttgtttaagatctctgtcaagcacgtaagtagcttaggaactagacgaagcaatcgcagaaatatttaccaagctcccatttttcttttgtgggtttttctcttgtgtttgctcatattgattctgatctgatatacgtgtgttttgcttctttgtttgattatataggaatctacaagtatttaaacctttgctgatttagaaacgcatgagtgcatcatcttcgaggatagcagtataaacatagctagttgattgtagagaatgtataaagcagtaagtaagcgggtaactagaagtagtggatctggtttgaagcagacaaatgtagataatggaggagagattagtccaactgttgacagagtatctgaacaaggcaaagcatcagaggcagggggtcacataccaaatgatgccaacggaaatggacatttgcatcatgagattatggatcatggaaaggggaatgaagaacataaaccaacccctcaaaccgtgaagaaggattctaataccaataccaaattttcagggtctcatcgtgagcttgtcatcggtcttccttgccgtggacaatttgaaatccacaaccggtccagggcatctacgagttcgaagaggttaggaggaggtggagaaaggaatgtgttgtttgcaagtcacaagagagctcatagatctaaggaagatgctgaaccatctttggttgttgctaattccacacctgtaggtcgaccaaagaaaaagaattagactatgaacaaaggacaagttagagaagatgatgagtacacaagaatcaaaaagaaacttctatactttctaaaccggattaactatgagcaaagtcttattgacgcctattcgttagaaggctggaaaggttcaaggtttgtctcttgatgacatttgcttttccttttaattatgcattatttgagagttataggtatcatctgtgagatatatttctgatctcactcagtcttgttgattatgtgttctttgtagcctggaaaagataaggccagagaaagagcttgaacgagccacaaaggaaattttgcggcgcaacttaaaattagagatctttttcagcaccttgacacactctgtgctgaaggaagccttccagagtctttatttgatactgatggagagatttctagcgaggatgtaagagaatattgttctgaactcaacctttgttcccttgtttatcctgatagaaccagtttgtgtctctagaagtattgataatacgagcagttgtttaatcgcagatcttctgtgcaaaatgtggttcaaaggacttgtctgttgataatgatatcatactatgcgatgggttttgcgatcgaggctttcaccaatactgtcttgaaccacctctgcggaaagaagatagtaatattctctgcctacgtacttggtagtgttttaagcagttcttgctggtatctacagctgtcttttttgttggttttaatttttgtagttcctccggatgatgagggttggctatgccccggatgtgattgcaaagatgacagcttggacttgcttaatgattctttagggacaaaattttcggtcagcgacagttgggaggtatatacctatatatgttgaggtttttattgttaaagaaaagaaaacacttaaaaacacacctgccttgaacttttgtgta

SEQ ID NO: 143468 - DNA, 755 bp, Arabidopsis thaliana landsberg
acgaaactaatactttttttgttcttatttggttggcttaggagcgagtacgaagtatgacgccaaagatataggaagtcttgggagcaaggcttcgtctgtgtctgtaagaccaagccctcgaactgagggtgagatcttacagtctccaaatctcaagagttttagctttgctgagcttaaatcagcaaccaggaattttagaccagacagtgtgcttggtgaaggtggattcggttgtgttttcaaaggatggattgatgagaagtctctcactgcctcaagaccaggcactggtttggttattgccgtcaaaaagcttaaccaagatggttggcaaggtcaccaggagtggctggtaataatgctataagttaaaatatgccaattttggttcttgtttgtttttcattaatcttcagttttgatgattttgcaggctgaagtgaattaccttggtcagttttctcaccgtcaccttgtgaagctgattggttattgcctagaggatgagcaccgtcttcttgtttacgagttcatgcctcggggtagcttggagaatcatcttttcaggagtatgtcgtccttactcttaagtctaatcccaggctgaggtcaaacttaaagctttgttatgacgtttgtgaatattcaggtttgtttttcttgggttacaggaggtttgtacttccaaccgttatcttggaaacttcggttgaaagttgctcttggtgctgcaaagggacttgcttttc

SEQ ID NO: 143469 - DNA, 518 bp, Arabidopsis thaliana landsberg
acttccttggacctggtttagatcttttgcttcagcatttggctgagaatgatcctaataggcaagggactccacctgctcgtaaagaagctgttgaagctttaccaacggttaagataatggaacctttgcagtgttctgtttgtttggatgattttgagaaaggtacggaagctaaagagatgccttgtaagcataagtttcatgttcggtgtattgttccctggcttgagcttcatagttcttgtcctgtgtgtcgttttgagcttccttctagtgctgatgatgatgatgagactaagactgattccgagagagtgctgagaacaagaaatgttcgggaaacgagtaacggaaacgttgatgagaatgtgggaaatgcggatagaggaagagaggatgaggtgaggagtggaaatgggagacggttttcgtttccatggccgtttagtggattgttctcgtcttcttcttcttcgtcttcttcaacctctggatctcaatctggtgagaacaat

SEQ ID NO: 143470 - DNA, 1415 bp, Arabidopsis thaliana landsberg
cactgtgaaggattatcagcagcaggctagcgactcatctacccattgttaccgacggtgtaggtgagagaatattagatcctgactcatctcttacatgcttttgtattaaccaataacttggatcctctcatgggcactttccacagactgttaactgtatgttttccaatgccgtaattcagatgacagtgaagcttctgagatactgctggtgaagaagaaaagagatgaagtgtttctgaaggaccgtataccccttgaatttgcgattgctggttatgtgggtcttgcagctatctcaactgccacaatcccaataatatttccaccactgaaatggtactttgtcctgtgttcttatttcattgcacccgctctcgccttctgcaactcttatggaacggggctcacagactggagcctagcatcaacctatggaaagatcggtcttttcataatcgcttctgttgtaggaagtgatggtggtgtcattgcgggtttagctgcctgtggtgttatgatgtcaatcgtctccaccgcagctgatctcatgcaagacttcaaaacaggttacctcactttatcatctgcaaagtccatgtttgtaagccagctcgtgggaaccgcaatgggctgtgtaatcgctccactcacattctggctgttctggactgcctttgacattggagatcccaatggtccgtacaaagcaccttacgcagtgattttccgtgaaatggcgattctcggaattgagggctttgctgaattgcctaagcactgtttggctctttgttacgggtttttcatagcagctttgattgtgaatctcttaagagatattacaccgcctaagatctctccattcatcccgatcccaatggcaatggcttgcccattctacattggagcttacttcgccattgacatgtttgttgggactgtgatattgttcgtatgggaacggatcaacaggaaagatgcagaggactttgcaggtgcagtagcatcaggactgatctgtggtgatgggatctggactataccatccgcaatcctttcaatcttaaggatcaaccctcccatttgtatgtactttggaccgtcctcagcaagatagagatgccactgtggtcataatcgcaaccgcaactgtgagtcatacaaaaggaaacttatccgagagtcttgtggccgtcagaatcgaaacagttgtcttcatatgttgtgtagatatgtttagtatctcagctcgcaagaacaaaatgttgttgcaaatctcttcaaatgttttagtcaatgttgttgtatgtccccgggatgttgtctccttgaatgctttcattcacaagctcaaagagttttacgaacatttgccttgttcaatcatcataaggagtgaatgcagatga

SEQ ID NO: 143471 - DNA, 3626 bp, Arabidopsis thaliana landsberg
  unsure (1)..(3626): unsure at all n locations
gtgaggattcgaaggcctggaaggtaaagtattcaagaggttattctctagtccttttagttgcactgaagaagaaatgaagggtgactggttattttgtgcatgtagtgtttttttataggttttcattacagagttcaaaagaggtgttggttttcttgcagaannnnnnnnnnnnnnnnnnnnnnnnnnnnnnnnnnnnnnnnnnnnttacaagcactttctggaaaactttccgattctgtaaaggtttgactaacagagtaaaaacataagcctgttgaactaatataaaataatatattggagatcattaaggttgtcttcactttacaggttggaggagaagtatgttacaatggttgctcactctcagagtttattccggagaaaacgtcgagttatataagtcaaaacgatctgcatattcctgagctgagtgtaagagagacacttgacttctctgcgtgttgtcagggcatcgaaagccgtatgggtgaggatcagatttctgaaagtttgaactgaaggatacttttgtgttttgaactcagttcacattaacaagcaatggtttattaaacagaaattatgaaagagatcagtagaatggaaaaactccaagaaatcattccagatcctgctgtagatgcttacatgaaggtaagtaatgaaatattaaatttgttctttaaacactgttaaaacgtaggcaatctcagttttccctctacctttgctatcacaggcaacatctgttgaaggtttgaaaaacaatttgcaaactgactatatcctaaaggtttggacataatttgctttcagggttctgttttcctctttatgctgcatttgacataattttatgaatccatttccagatcctgggactcgatatctgtgcagatacaagagttggagatgccacgagacctggaatatctggtggcgagaagaggaggttgacaacaggtactttcactttcttacagctcctcatagttttctgatcagagtttttaaatatctatgttgactactgtaggggaactcgttgtgggtccagctaccaccctctttatggatgaaatatccaatggtttagacagctcaactacgttccaaatagtgtcatgtctccaacagttggcacatatagctgaagccaccatactgatttcacttcttcagcctgcaccagaaacgtttgagctttttgacgatgtgattcttatgggggaaggaaagataatttaccatgctccacgcgctgatatctgcagattctttgaagagtttggatttaagtgtccagagagaaaaggcgttgctgactttctccaagaggtatggctgtaaatttgatcattttccctatctatttgtaatcatcacatgcttctgctacagattatgtcgaaaaaggaccaagaacaatattggtgccacagagacaagccctacagttatatatctgttgattccttcattaataagtttaaagaatcaaatcttgggttgctgctaaaggaagaactgtcaaagccgtttaataaatcccagactcgcaaggatagtctatgttttagaaaatactcactcagtaaatgggagatgcttaaagcttgctcaaggagagaaattcttttgatgaaacggaattctttcatttacttgttcaaatctggactggtacgttctgttacactggcaaggtttccttatcatgtaccaatgtatgctaacctttttctttatgcagttagtgttcaatgcgttagtcacaatgaccgtttttctacaagctggagctacgagggatgctcgtcatgggaattatcttatgggttctatgttcactgctctgtttagacttcttgccgatgggcttccagaactcactttgactatctccagattgggagtgttctgcaaacagaaagatttatacttctatcctgcttgggcatatgcaattccttcgattatcttaaggatacctctttcggttcttgattcatttatttggacagtactgacatattatgtcattggttacagtcccgaagtcggaaggtaaacaacttttacagataacttcaactatgaattcaaatttaatagagctaattacttaatggtaagtgttactttccttcaggttcttccggcacttcattatcttacttacattccacctttcatgtatatcaatgtttcgcgctatagcgtcaatctgtcgcacatttgttgcttgctcaattactggagctatttcggtattgcttctcgcattgtttggaggctttgtgattccaaaatgtaagtttgctgtaactatgtttttatcaagttatgcttctacaaatttgaaatattatttacatctatatgcaatattattatcatacatccaccatgcatgttagcaagttttagtgttgattaaaaccatgcacttgtgaggatatttaggcatgtagtatataggatttgtttacagactatttatgacaatgctcattttcagcatccatgcctacttggctgggttggggattctggctttctcccttgtcatatgctgagattggtttaaccgcaaatgaatttttctctccacggtggagaaaggtaataattcttcagatgactttcacacaagtctcggaactctagtttgctcatctgcttttaattttgctatagttaacctctggcaacattacagccggggaacaagtgttagatgtccgtggattgaattttggtaggcactcttactggacagcttttggtgctttagttgggtttgtcttgttcttcaatgccctctacacgttggccctgacatatcggaatagtaagttcactattgaaatgactttatgaagtgctatccacctaaattattgacaagattatctttttaagttaagattcacaaagatcccgtgctattgtctcgcatgggaagaactctcagtgctcagaagaagattttaaaccctgtcctgaaatcacatcgcgagctaaaacaggtatctctcttcatcatccttttatttttgagcaggtgtggtgagtggtgaccgtatcccttctaaaaatatatcttttcacaggaaaagttatcttgccttttaagccactcactgtcacatttcaaaacgtccagtattatattgagactcctcaggtaaacattgtttaagatcagtatgaatatttcgagataataaattctcaaacagaacgcaggtttatatgcgactcactttcctcttaggggaagacacggcaacttctctctgatattacaggcgcgttgaagcccggtgttctcacatctctgatgggtggcagtggagcagggaaaacgactcttgttgatgtcctttctggaaggaaaacccgcggtatcatcaaaggagagatcagagtaggcgggtatcctaaggttcaagacacatttgcacgagtatcaagttactgtgaacagtttgatattcattcccctaagataactgtggaagagaccatgaaatactcggcttgggttggactcccctataacatcgatgcacagaccaaaaacgtaagtattgccactcaaagaatttact

SEQ ID NO: 143472 - DNA, 1909 bp, Arabidopsis thaliana landsberg
atggcaatgtcttgcaaggatggtaagttgggatgtttggataatgggaagtatgtgaggtacacacctgaccaagttgaagcacttgagaggctttatcatgactgtcctaaaccgagttctattcgccgtcagcagttgatcagagagtgtcctattctctccaacattgagcctaaacagatcaaagtgtggtttcagaaccgaaggtaataacaatgttcattgcttgggaattgtggtgaatggaagtttctgtggtgttctttttatctacttgatctaatctttgttttgtgtttctgttatgaactttagatgtagagagaaacaaaggaaagaggcttcacggcttcaagctgtgaatcggaagttgacggcaatgaacaaactcttgatggaggagaatgatagattgcagaagcaagtgtcacagctggtccatgaaaacagctacttccgtcaacatactcccaatgtgaggattctactcttgcaatatcttcagttttcttaccttattgatctctaaaatgtttcttaagaacaataatttcattttaatggtatgtgtatcaatttgtctcttttttttcagccttcacttccagctaaagacacaagctgtgaatcggtggtgacgagtggtcagcaccaattggcatctcaaaatcctcagagagatgctagtcctgcagggttggttctttaattggaatatggttactctgttagttagaaactacacttttgtcatatttttctgagattcattgatacatgttatgttttcagacttttgtccattgcagaagaaactttagcagagtttctttcaaaggcaactggaaccgctgttgagtggattcagatgcctggaatgaaggtattttattcctctagttttgtttttgttaattggatatagttattctgctttttcctcaatggttgtttttgtattttccgtaacagcctggtccggattccattggaatcatcgctatttctcatggttgcactggtgtggcagcacgcgcctgtggcctagtgggtcttgagcctacaagggtacgtgtatagaatcattttcatcgctgatttatacaatcttatactactctacatgtgtctacatatgtaacaacattcatctcttttctctattttacaggttgcagagatcgtcaaggatcgtccttcgtggttccgcgaatgtcgagctgttgatgttatgaacgtgttgccaactgccaatggtggaaccgttgagctgctttatatgcaggttagttttaaaccataagtgctacacagttagaattatttttctaaagttgaaaatagtaaccatcatcctcttcgtaattgcagctctatgcaccaactacattgcgccccaccacgcgatttgtggttgttacgtttcacctctgttttagaagatggcagccttgtggtatgtagcttttattgtctgtcagtgttcttattcatgttgctcctcttttcacaaggtttaataagtataataggtgtgcgatagatctcttaagagcactcaaatcggtcttagtatgccactggttcagaattttgtgagagcagaaatgctttccagtgggtacttgatacggccttgtgatggtggtggctcattcatacacatagtggatcatatggattttgaggtgacgagcctcactgtgcaccaattcggtcttggaaatgttaaccaaactgtttgcatatttgttcacttaaataggcttgtagcgtgcctgaggtcttacgcccgctctatgagtcaccaaaagtacttgcacagaagacaacaatggcggtatgttaattaaactcatttattccctaaagcttgcattctgatattgaaactactgttctcaaa

SEQ ID NO: 143473 - DNA, 1170 bp, Arabidopsis thaliana landsberg
agttgttgattcattgtttcaggtatgttgaagtgataaagagactgattggattgtgcttatatgtcagaaacggaacaggggatctttgagcaggttttgaaaggtgaccttgattttatatcagaaccatggcctagtgtatcagaaagtgccaaggatttggtccgtcggatgctaatcagagaccctaagaagcgaatgactactcatgaagttctctgttagtgttcttgtttccaaataagttatatctttttgataagagtaagtactataaagatttgtaaaatgttgaatttatattttaggtcatccatgggccagagtagatggtgttgctcttgataaacctcttgattctgctgtcctaagtcgtttgcaacaattttcagccatgaacaagctcaagaaaatagctatcaaggtaaacattttgaattggtttctatcatctataccaaattatgtgcaagatagagagttatacgtgatgtatttgattcaggtaatagcagaaagcttgtcagaggaagaaatagcaggattgaaggaaatgttcaagatgatagatacagataatagtggacacatcactctcgaagaactcaagaaaggtttggacagagttggtgctgaccttaaagattcagaaatactaggattaatgcaagcagtaagtccatttttatactgaaatcaccttttgtttactatatgatgtgagatgtgtgagataataatttggaaaaatatgaacatttgatcaggcggatatagataacagtgggacaatagactatggagagtttatagcagcaatggtgcatttgaacaaaatagagaaagaagaccatttgttcacagcattctcttactttgaccaagatggaagtggttatataaccagagacgagctccaacaagcttgcaagcaatttggcttagcggatgttcatttagacgacattttacgcgaagtcgataaagacaacgtaacaactcattaatatgcaattgatattgctttacctatagttacttgcaagaacattgttctttataatgatgttatatgattgtttttgtcaggatggaagaatagactacagcgagtttgtggatatgatgcaagacactggttttggcaaaatgggtttaaaggtgagt

SEQ ID NO: 143474 - DNA, 1607 bp, Arabidopsis thaliana landsberg
tccagctcttgactatgttgacatccctcacactcagatacgaaaggcaaatacctatacaaccttatatattgattgcttgaggtatttctagattacctcgaccatatatctctctgttttgtactataagccaagaattccgaagtcttgttaattgtataaatttgacaggtcacagcctcacgtttggcattctcaaagcaaactattcctcactactacttgaccgtggatacatgtgttgacaaaatgatggggtaagtattaagttttagatcatatattttgattaggtaagtggatgctaaacatagctatttttatatgcagtcttaggagtcaactcaattcatttcaagaggcttccggtgggaaaaggatatctgtaaatgatcttgctattaaggtgcatcttacttcttttcttgcaagtctaattaaatctcattttgttctccattatgaaaccttttctttttcgaaattgcaggctgctgcactggctcttcgaaaagttcctcagtgcaatagttcatggacagatgaatacatccgccagtaagtacatattctgtttcagaggttcatgaaaactttgcaaatcatctagtttcttggttcttattttcctccttttatgtacagatttaaaaatgtgaacatcaatgtcgctgtacaaacagaaaatgggctctacgttcctgtggtcaaggttagggagctcttgatacagttattaaccttcctctgcagaaacttgagatttctgaaaaactcagttcatctaattgcttgatttcaggacgcggacaagaaaggactgtctacaattggagaagaggttcgattcttggctcaaaaagcaaaagaaaacagcttgaagccggaagattatgaggttggtttagaattcggtcaatctcactagcataatactgctgtgaaagcaaatcagctcaaactgtttcttctgacagggaggaacattcacagtctccaacctggggggaccttttggcatcaaacagttctgtgccgtcatcaatccacctcaagcagccattctagcaatcggatctggtaagtccttagcatactcatccactttatccgttgaagtttcttccgcgtaacttattatagtgttggtgtctgaatctcaaaacagctgaaaagagagttgttcccggtactggtccagaccaatacaacgttgcttcatacatgtctgtaacactaagctgtgaccaccgcgtaatagatggtacagaatccgcctctcattcctattgtcattattaatcatcacctcatcgaaaacgtctaataagtcatcttcctgtgcaggtgcaattggagccgagtggctgaaagcattcaagggctacatcgagaccccagaatctatgttgctctaaaattcagacgcacacacacatcaaaagctaaactcataagagtcttctgacctcaaatttctttcccacaacatattctaccagatttgatcagcagtaggcaatggcctttaaagttgagtgttttgctattctctaaatcattgagttgacagatttttgtctcaaaataaaatcaggaatcca

SEQ ID NO: 143475 - DNA, 743 bp, Arabidopsis thaliana landsberg; identical to SEQ ID NO: 18405

SEQ ID NO: 143476 - DNA, 1112 bp, Arabidopsis thaliana landsberg
cacaaaaaacagagacaaaagaatggcgcgaaaatccctaattttcccggtgattttgctcgccgttcttctcttctctccgccgatttactccgccggtcacgattaccgcgacgctctccgtaaaagcattctcttcttcgaaggtcaacgttccggtaaactccctccagatcaacgcttaaaatggcgccgtgactcagcattacgcgacggttcctccgccggcgtaagtctactctactaacatacatttcaaacttctccttcttctaatctctaacttttccgacgatatttcaaaaatctcaggttgacttatccggtggttactacgacgccggagacaacatcaagttcggttttccgatggcgttcacaacaacgatgctttcatggagtataatcgatttcggtaaaaccatgggacctgagcttagaaacgccgtgaaagctgttaaatggggaacagattacctccttaaagcaacggcgattcccggagtagtcttcgtccaagtcggagacgcttactccgatcataactgttgggaaaggcctgaagatatggacactctccgtactgtttacaaaatcgatagagctcatcctggttctgacgtcgctggtgaaaccgcagccgctttagccgccgcttcaatcgtttttagaaaacgcgatcctgcttattccagacttctacttgaccgtgccactagggtacgttactctgttttcacactttaaccattagcattaactgtggtaattaattttaattattacaaacattttaatattctctttgtttttctttaatagtcaaatttaatagtcaaaaagattttaatttttaatcaattattctttgcttgtgagataagagattcgtgtccatatgcatttataataattgttttatttcagtacttttttgggtgatggttggttcatttctatgattcgtttttaataatttgacttttttgagtatatttattcttacgtatatgtactcctgaatccctatttttactgacgtagagaagaaatataaaattcacggatctgaaataaaaatgttgtaccgttgctcgcaggtatttgggttt

SEQ ID NO: 143477 - DNA, 1407 bp, Arabidopsis thaliana landsberg; identical to SEQ ID NO: 12098
  unsure (1)..(1407): unsure at all n locations

SEQ ID NO: 143478 - DNA, 3344 bp, Arabidopsis thaliana landsberg
ctattagtcccttttccgtctctcctgttgtgatgatcatgtaatagagatatatacatgtctgtcttgttctttaaactgaatgattactattgtgcaggcttgcaaagttcagagtagcatgtggtccaaaattggccgactcaaacgctcttttatgcctaagcttaaaggaaacagtaattatgggtcaggagctacaccagggctcatgtcttgtattgctggaaggctcttgtgtgatacagatctgtgttctcgtgacttgttgaaggaggtatgatacccttgcaggtcttgtaagcagtaagttgaagctcagtccctcatgtataagcatctgtttcttgcaggtcagttattctttaacggacctctcaaagacacagctgaaccgggacaggaaagagatagcgcctaatgatattcccaaaatgtttcagtcatccaaaacacttgtggaacttgtaagttcttcgatgagcccggtcatgtctgttttatgcatgagttggtactaccacattagggacgataggttatgaatccttgcatgcgaaacaatttagtgcaaactattgaagaataaataatccagtcatacatagaagtaaagggattgcagataacagcagtcacttaaggttgatgagtgatgactgcatcttaattgctcgcttgttataaccctttgattttcttttctttcagattgaatgtggtgagacggatgcatggttatccatggagctcatgtttcatctaagtgttcttcctctcactctccagcttactaacataagtggcaatctttgggggaaaacacttcaagtaatgactctccctctccctcccatccgggaaaatatgtgttactgtgctgactcatgcatttttttgttcatgaccagggagccagggcacagagaatcgaatactacttactacatacattccactcgaaaaagttcattctccctgacaaaatttcacaacgtatgaaggaaataaagtcatcaaaaagaagaatggattatgctccagaagaccgcaatgtagatgaattggatgctgacctgactttggagaatgatccgtctaagggcagcaaaacaaaaaaaggtccagcctacgctggtggactggtcttggagccaaagagaggcttatatgacaaatatgtcttgcttctggatttcaatagtctttacccttctattatacaggttagcagattgtttctatttctcaagcctttggtggatgtttccgcctgcttggtagataacagtcatgatattttcaggaatacaatatctgttttacgactataccacgatcagaagatggagttcctcgtttaccttcgagtcagacacctggaattcttccaaaggtatagtcatcattacacgagtttgcattttactgtgactattttcaattccgtatatattttctatatgttataggttatccaacgtcaaatctataaattaccccaacccaatcagaaattaattgaaagaaaaattcaacaaccaaaatattttgcctcattttcttttcctaacctctcaagggatatgcgagaaatcctcagaacaatgcgacctagctggtcagtattgtattggtgactgctgctttctgtagtttaagtaaacctaattctgacataatcgtctaaattattgctatatacatttttttttcctcgactttaagtttctctccttgatctggtatgcccatgaatcccactatatgtctttgttttagttgatggaacatttggtcagtataaggaaaagcgtcaaattaaagatgaagaaggaaacaggtctcaagtactgggagcttgacattcgacagcaggcattgaagctcacagccaataggtttgcattttatggttttacttgtgcggcaataattgccaatcaccgcaatttgatgtttatgtttttttattcattctaaacacagtatgtatggctgtctggggttttctaattcaagattctatgctaagcctttagcagagctcataacactacaggtaagtgatgctttctgtgttttctagtgacatgttttttctttttttctctatttttgcgtgatcaggctgattggcttaacattgcagggaagggatatcctgcaaagaaccgtggatcttgtccagaaccatttaaatctagaggtaactcttatacttggagtctcaggaaatgcatttcagtagagaaattagtgaactgtgtaaacaactctgttctatcaagtctagaattaaaatcttgcttttacgtaggtaatatacggtgacacagattcaatcatgattcacagcggactagatgatattgaagaggtgaaagccattaaatcaaaagtcatccaagaggtaggttggatactagatttatctctatatagctttccttggggaaagtgcttctctaagaagattataaaaaatttatacaagaaaaatcagacatttgattttgggccttcccctttcaatttttaggtcaataagaagtatagatgtctaaaaattgactgtgatggcatatacaagagaatgcttcttcttcgaaaaaagaagtatgctgctgtcaagttgcagtttaaggatgggaagccttgcgaggtaattgtttttttgtaaacatttttgcataccctttcttgcagaaaattatgggtactagatgcattctcaatgcaggacattgaaagaaaaggtgtggatatggttcgtcgagattggagcttactctcgaaggaaataggagatttatgcctgagtaaaatcttgtatggagggtatgttttgaaacatcaactaaagaacattgtttttactctctcatgcaagcacaacaagtctcttcttctgtgcagatcctgtgaggatgttgttgaagcaattcataacgaactaatgaaggtaatctttgttatgatttattaatctttgctaattagtttgatcgtctttatcatccaacacatgttgctttgtccatgtaacagataaaagaggaaatgagaatgggcaagttgctcttgagaagtatgtcatcaccaagacattgactaaaccgcctgcagcttatccagattccaaaagccaaccacacgttcaagtgagtatgagagctattattctcgttatttctcccttattatatgctttctatatattcacttaacttaactctctgattgtgtggctaaatttttcttctcaggttgcactcagaatgaggcaacgtggttataaagaaggtttcaatgttaaggatactgtaccgtatataatctgc

SEQ ID NO: 143479 - DNA, 622 bp, Arabidopsis thaliana landsberg
gagacagactctggactctgaagaagcaaatggctgggatcaccagcaccgttggattcaacgccattctcgccggagccaccaaaacggtgtcgcatcctgttaaatctaagctctttggtcttcgactctgtgtacccgaattctcaattgtttctctttccccttatcatcatcgccgttgtcccgccatcacttgccgttacggaggcggtggtggcggaggctctagatttcccggcgataggagaggtaggcagaaagaatccgaggatgatgattcgcttgatatctcagctattaggtaattgtggaaactattaattgatagaaattgaaatttctgtagctgaagttatgattgattttgatgtatctcaaattgagtaggtcagccactgttaggcttattgatgatcagcagaacatggtaaaatgaagtgccttttaaatgtttaaactttttgatttcagcaaaaattgaaaattttccagtttctttgttgtttagattggtttagtttccaaagaagaagctgttcgaagagctgaagatgctgagcttgatctggtttgtgtttctttggataatttacaacttgggggatcctctagagtcgac

SEQ ID NO: 143480 - DNA, 3378 bp, Arabidopsis thaliana landsberg
agtactttgctcgttttgtttagttctcgtgcaaaattggtgtttttagtattgtactcgacctgtttagtagtttgcttgaccgagtgcttcactttgtgcttggtttactttctggttcttgcatttgacagttcctggtctttagtttcatttctgcttaatttagttactttcttgcatgatcacttaggttctctgatcatatcctgattgataacaattccaccgaaaatagcttgtatgaatcgctattggtttaatactactaacaacactttaaatgctacaaaaacataagatgcatttaaggaattgacatacaaaacccttgtaccagaaaatataagataacaaatattattaaatgagcaaattctttgttgttatttcaaataaattattaaacatcaacgtcatccttaacccacctactactcatgataataggtttttagtcaattaatcctaaagcactatcatgtcgttgtagaattttagggtgtcaatccaaatgggtgtgatgcaaacagatgagatgtgatcagaagtcactaagtcaagccaagcaataacagttttagggtttctaacagtcctaagtgaacatgcagaaaacagaaacaataacagaattactaaaatcactcgaccacaacaggctgatgccagaagtaggatgtggtcgagtaacaggcaggatatgaaacagatatactcgactgcacagtctgttgccagacactgggtgtggccgagtatactggtcgagtaacagacaggaaatgagacaactgtactcgactgcacagtctgttttcagacactgggtgtggtcgagtaagttgatcgagtaattgcagaaacaaagatacaggcaatgagagcgattaagcgatgacgataaaacagagaaatcagattgacgagaaattcctaaggatggggtaatcgaataaagtggtatcctagcctatccgaatggttaacaagcgcaatcaagctatccctaaacaacaggttcaacaacagatcaattcactcccgtgatagaaatcctcaagcaataagaacagactgataaagtcaataaacgctctaaactgccaatcctttgggatagagacgaatatctcatgaactagtggatcaagcattccatcgaacaccttatgggtgcgggaatgcttgcgatcgaattctagttgatcagaaagaaataagcagtaaacacaactagtcttgaagggattcaatcaattctaaaacttaaccattctacaaactaaggattccacaactactctatcccatccctaagaattctaagtcactactcagacaacatgctcaaagacataaacgcagataaatgataatattgcataagtaaagagataaagagtagaaaaaaaggatgacagatgaaatcaaatgcggaatctgaataacttggaaaaatctcgaattacaggttgcagaagcaaaagcggcgcagtagagtaaaacagaaaataaaactgaagcaaaaactcaatgtcgactagatgtcaggacagaaccctaagacatctatttatacaaaacgaaataaaatgatagtagacgggccaataacctaatcgcttggcccatagagtgataatgggccgagatgggcttcgtgatccgatggaggtccaggctgcttccaaacacttcgtcttctcctcttctcttccttgtgctcagcttgtctggttgagtgcggatttgagtagaccatgaagatgtgatcgagtgtctggtcgagtgatggtgttggtggtgagtgatgatactcgactagggggttgagtaacttgtagagtgaatggcccagtgtggtcaggtggtgtggcaaagtgatactcgaccagggggtcgagtagcgtcatcgagtggcctaagcttagtatacttgaccagggggttgagtagatgggtagaatggctccaaaatcactcgaccagggggtcgagtatggtgctggatgtactcggccagggggtcgagtatgtcctctggttctggctcgcttcttccaatttgctcgcaaacagctccaaatcacttgaaaacaactcagaaatgcaatatgtttgcaaagctatcctaatcatgcaaagtatgtaagaatgataagaaatgatataaaacagtgatgaatgatatgaaactagactcaaaatgatgatgaatgaacactgaaaacatgcaaattatagacatatcactaacccaaggaagagctgcaatgccatcttgatcagagaaggagatgatgtgtggaaggaattggacactgaagacaagttggagctcgcagttgcagagatggtgtcaaccaataccctcctgtgtcgatcgacaccatatgggacgcttttctcagagacgactcaatacgacggtgtcgatcgatacccctctagtgtcgattgacactggatccggactgcaccttgtgaggtgcaagtacctatgctgcccgagccggttttcactcctcctgtcccctatccaaggaggcgtcgttctgagcaagagattcatgctgctaagtgcacagccataatggagaagatcctcaatactcttcctaaggatgcttcagagacatcttccgcctcactcaacaggtatgtcaagcgacttgttgataatggaattagtttaaatgaagctaagctgcttaccagagacatcagtgcaatcatgctgcctaaggccaagaaggagaaggcacagagagtagacatagctgagtacatccgtaccattactcatggtcagaccactgagaagcttccagttccaggtagctttgttcttgattgctctatctccacaagcagattccgctgctctttgtgtgatatgggatcaagcattaacctcatgtccaagtctgttgctgagagactaggcatgactcactacaggcctactcgcatcactcttttcttcgctgatcgttccaagcgaatccctgaaggaatccatgaagatgttcatgttaaggttggtaactccataatccctgttgatttcgtagtcctggactatgagaagtaacccaaggatcctcttatccttggaagagcattcctagctacaattggtgctaggtttgatgtgaagagaggaagaatctctctcaaggtttgtgattcgaagatggagtttggcatggatggttcagagcttactaagcctatcagttgcattgcttccagtacagacagaactccccagactgatcagactcccaccacagagccacacacaacgctccaacccgttcagctcgccaataagatttgtagaggaacgtgtcgatcgacaccactacccct

SEQ ID NO: 143481 - DNA, 587 bp, Arabidopsis thaliana landsberg
ttttacgagtacttgtgcattggtgtgttctaaattctgtgtccatcttcgtcaaaacagtagacttttttgctttactacgttttcacagcgctaaaaagtatcatatctgttctaacaccaatgcccattgctgtgttagaggtcactgctagaaattgatacgcaaattttcaaatttgatgtcttcaatgtctatctttgtcaaatcaatagacttctttggtttactacgttttttcagagcgataaagagtctcatttgtgtgaaatgccttcaagtagatatcatcttgtatatacaggaaaggagaagtaattgtatagaaaacttgatcgtctttagatggtatcttcataagatttgccacaatagagttttgttttaaggggtcttgtggagtttcattgtgtttggtttaatttgatttatttttgtgttatcagatggcgccaaagcaaaagattaggatcaagcttagatcatactgggtgcctcttattgaggactcatgcaagcagatacttgatgctgcgagaaacaccaatgcaaagacgatgggtcctgttccattgacaaccaagaa

SEQ ID NO: 143482 - DNA, 1137 bp, Arabidopsis thaliana landsberg
ctttcgcatgtccactagagtatttgctcgctcaaaactttcagctaccttttaatttgattttccaacaaatgaagcatagcttaaaaatcaaccatccagatagcttatccatattgcttagactgatcttcatctgaacactctgtgctcaaatttagaaagactgctactattttgaagaattcgttctaatcgcttattagttctacagtataatcagataatctgacttcatcagtttggcatgttttctgttttttaaatgggagggcgtgatatttgcaggaatcagatctccagaagactgtttatcccgcgaggttaaatgcgatggatatgctacctagctcttcgttgacaggtcttggtgaagtaccatccacaacagacttgttcatgcgaggacgccttgctaagctggagctaagcgatggaaatcgcgtctacgcaaaactggtggtaagttttcgttctccgtttgctagatttgagtggaacgactcctgaatctcatcaattttaggatgtctaacaatctttgtgcaggtaggcgctgatgggtctaagtcgcgagtaagggagttggctgggttcaaaacgactggatggaactactcacagaacgctataatttgtactgttgagcatacagccgaaaactacacagcatggcaacggtttttacccaatggcccaatcgcacttcttcccattggtgacaagtttagcaacatagtatggaccatggacccaaaagaggcatcagatcgaaaattgatgaacgaggatgacttcatcaaagctgtaaatgatgctctggattctggatatggtcctaatccagagactacaagttcacgggatagtctctcttggcttacaggagatgcgaccatatctgccaaagagaggtttgaaactcctcccaaggttgtgaagctttcttcagagagaatgatgttccctttgtctttaaggcacgcaaaagactatgtgtcaaaacgtgtggctcttgttggtgactcagctcatacagttcacccgttggctggtcaaggagtaaatctaggatttgcagatgcgtgtgctctctccaaagctatagcagagggcattgctcttgggctgtatata

SEQ ID NO: 143483 - DNA, 2222 bp, Arabidopsis thaliana landsberg; identical to SEQ ID NO: 61012
  unsure (1)..(2222): unsure at all n locations

SEQ ID NO: 143484 - DNA, 1990 bp, Arabidopsis thaliana landsberg
  unsure (1)..(1990): unsure at all n locations
gacccatgttntgcggtatctatctcagtctatagcgggatttgtcattggttntntgtcggtatggcaactaacgctgctcacgttaggagtggttccactgatagctattgcaggaggagggtatgctatagtcatgtctacaatctcagagaagagtgagactgcttatgctgatgcaggaaaagtcgcagaagaggtttgtttatacactatgactgagattttctcataaactactttctgcatttacgtgtgaagaaagtctcacaaaagaaatcacataacaaaacatattttagttttcaagaaaatacttttgcaaaatgtgaaagcaaacacaattcttttaatttgatcctgaaaaacacaattctatggatcttcaggttatgtcacaggtgagaacagtgtatgcttttgtaggagaagagaaagctgtaaaatcttactcaaattctctcaagaaagctctgaaactcggtaaaaggagcggtcttgctaaaggtttaggagttggattaacatatagcctcttgttctgtgcttgggctttgcttttgtggtatgcaagtcttnnnnnnnnnnnnnnnnnnnnnnnnnnnnnaaaagccttcacaaccatcctcaatgtaattttcaagtggattgtaagtcttataaatccgagaaattttgctagatatatcatcaaactgaatgattcaattgcatttgcagcgccttaggtcaagccgtgcctagcttatccgcaatttctaaaggcagatttgctgctgttaatattttcaaaatgataggaaacaacaatcttgaaagctctgagagattagaaaacggaacaacattgcaaaacgtagttggcaagattgagttttgtggagtttcgttcgcatatccttcgagaccaaacatggtttttgagaatcttagtttcacgatacattcaggcaagacttttgcatttgtcggtccaagtggttcggggaaaagcacaatcatatcaatggtgcaacgtttctatgaacctaaatcaggggagattctcttggatggaaatgacatcaagaacctgaagctgaaatggttgagagaacagatgggattagtgagtcaagaaccagcattattcgccacaacaatagcttctaatattcttctcggtaaagagaaagccaatatggatcagatcatagaagctgctaaagcagccaacgcagattctttcattaaatcattacctaatggttacaatactcaggtacattatccaaaaaatttatactcatatcttctcatatttccacttgattattattgataaaatcattccactaggttggagaaggaggaactcaactttcaggagggcagaaacagaggattgctattgctcgggcggttctaagaaatccaaagatattacttttagatgaagcaacaagcgctcttgatgccgaatcagagaagattgttcagcaagcacttgacaatgtcatggaaaaaagaacaacaatcgtcattgcacatagattatccaccattcgaaatgttgacaagattgttgtcttgagagatggtcaagttagggaaaccggaagtcactcagaactgatatcaagaggaggagattatgccactcttgtaaattgtcaagacacagaacctcaagaaaacttgagatcagtcatgtatgaatcttgtaggtctcaagctggatcatatagttcaagaagagtttttagctcaagaaggacttcaagcttcagggaagaccaagagaagactgaaaaagattcaaaaggcgaagatttaataagctcgtcctcaatgatatgggaactaataaagttgaatgctccagaatggctttatgcattacttggctcaattggtgccgttcttgccggatcccaaccggcattgttctccatggggcttgcaaacgtgttaaccacgttttttcaccttttcctagtctgatcaagcg

SEQ ID NO: 143485 - DNA, 2095 bp, Arabidopsis thaliana landsberg
ccgatcaaagaaaagaaagtctctttctttagagtcgctgctctaaacaaaccagagattcctatgcttatactcggatctatagccgcggtcttaaacggagttattcttccgatattcgggattctaatctcaagcgtgatcaaagcatttttcaaaccacctgagcagttaaaatccgatacaaggttttgggcaatcatcttcatgcttcttggtgtagcttcaatggtggtcttcccagcacaaacgatctttttttccatagccggatgtaaactagtgcagcggataagatcaatgtgttttgagaaagttgttcgtatggaagttggatggtttgatgagactgagaactcaagtggtgctattggagctaggctctctgctgatgcagctacggtccgtggtctagttggagacgcattggctcaaacggttcagaatcttgcgtctgtaaccgcgggtttggtcatcgcgtttgtggcgagttggcagttagctttcattgttctcgcgatgcttccgctaatcgggcttaatggttatatatacatgaagttcatggttggcttcagtgcagatgcaaaggtacgactaaactctctttgattttctatacaagttacatatctctattttttgtctgatgaaacggaaaattgttggcagagaatgtatgaggaagcgagccaagtagcgaatgatgcggtggggagcataagaacggttgcttcattctgtgcagaggagaaagtgatgaaaatgtataagaagaaatgtgaaggtcctatgagaacaggaatacgtcaaggcatagttagtggtatcggtttcggtgtttctttcttcgtcctcttctcttcttacgccgccagtttctacgcgggtgcaaggcttgtcgatgacgggaaaacaacctttgattctgttttcagggtaaaggcaacaaaaacatttcagaaactcatgattcctgttttttgtccccttctaaagagtgttttgtgttgtttcgaaacaggttttctttgctttgacaatggcggctgtagctatttctcagtcaagttcattgtctcctgattccagcaaagctagcaatgcggctgcatcgatcttcgcggttatagacagagaatcgaagattgatccaagtgatgagtctgggagagttcttgataatgttaaaggagatatcgaacttcgtcatattagtttcaaatatccttcaagaccagatgttcagatcttccaagatctctgtctgtctattcgcgctggcaaggttaggatttcaaaactttcattctttgagcaaaaaaggcagaaccttttgagtaaacctctgttctctgtttcacattccagacagttgctttggttggagaaagcggtagcgggaaatcaacggtgattgcattgttgcagaggttttacgatccagattcaggtgagatcactcttgacggtgtagagatcaagagcctaagactaaaatggctaagacaacaaacgggacttgtgagccaagaaccaatcttgttcaacgagacaattagagccaacattgcttatggcaaaggaggagacgcgagtgaatccgaaatcgtatcttcagctgaattatcaaacgcccatggattcatcagtggtctgcaacaggtaaaaactcaacctttagggttcttactctgattcccaaatcaatgggttatcgggtcgggtcaaattaaccggagattacttgcctgatttagggttatgatacgatggtgggagaaagaggaattcaattatcaggcggacaaaagcaacgagtagctatagccagagccatcgtcaaagatccaaaggtgttgctgctcgacgaagccacgagtgctcttgacgctgagtctgagcgtgtggttcaggacgcgctagaccgtgttatggtaaaccggactacgattgtggtagctcaccggttatcgacgattaagaatgctgacgtaattgccgtcgttaagaacggcgtcatcgttgagaaaggaaagcacgacacgttgatcaatatcaaagacggagtttatgcttcgttagttcagcttca

SEQ ID NO: 143486 - DNA, 1883 bp, Arabidopsis thaliana landsberg
  unsure (1)..(1883): unsure at all n locations
ctgcgttttcgtggagcatcttcttcaacaatggctgcttctccgatctgatcatatcctgatttgaattttgctatctctcatgcctcgaactcgttttgtcgacgtagcatcctagtgactgaggaagaagaagaagatgagcttctttatcctctccgtcgtcgttttcgtttctctcgctttcttctctcttccgcattccgttgattcatctgtttccgcttcacaggatcctctcagactcatattaggtttctcctctctttgttttgttgcacgctgatgcgattttcgcgtttgatttatgctgtttcgtttataaacgtgaatcgcggttctatgtttttcatcccaaacgacgctttttttgaagtttctgggatttgtagcatagtcttggttccagaattaccaatatctaaatgcttcttctgttaacgatctgctaaattccagattagtttgcttcctggtagtattaagcaagcttatagaattgttatgaagtttgaattctgattatgtaattttggttttgctacaaaatcaggttcaccgaattttggaacatggaaaggtggaatctcattagcnnnnnnnnnnnnnnnnnnnnnngttgtctctgattacctcctcttagcagctcatagaaccaagagacctgacattcttagagcttttaagccttaccatggtggctggaacatcaccaataatcactattgggctgtaagtccctctcctcttctttgtcatctccgattttattagttacaggatctgttagtaatgaacatctatttgcagtctgttggatttacaggtgctcctggtttcatactagctgttatctggctcttgtcttttggctctcttcttgttgtttatcattgcttcaaatggagaatatgtgataaagctaaaggatcatcattcgatacacgaagaatctgtttcattttgttgattgtgtttacatgtgttgcagcgtaatattcctcaactcttctacattgttttttggttctctgtcatttgaaatttgttgttcctgagattgcactggtttttttttttcagggtgggatgcattcttttatctgttggacaagataagtttcataccgaagctatgcatactcttaagtatgttgtaaaccagtcagactacactgtggagatcctccagaatgtgactcaatatctgtcccttgcgaaaacgattaacgtgacacagattgtcattccgtctgatgtaatgggtgaaattgacaagttaaatgtcaatcttaacactgcagctgtaacactgggagagacaacaacagataacgctgctaaaattaagagagttttctatgctgtgtaagttgccctgtactgttagctgagtggtaccaatttatgattaacagggaagacagtgttgatataactctgtatatgtacattttcaggcgatcagctttgatcacggtcgctactgtgatgctcatcctttcttttgtaggtctatgtaagtccagttgatgtgtatatgcttctttggtatctcctttttattagctgtgacatccacttgacttcaactttttatctgttatttgcgttattacagtgctttctgtcctccgccaccaacatgttgttcatatgtgagccttttaatccccaacttcttcattttcgttaatttatagtggtttaaaataaattgaaagctgactgatggggatgtatataatgatagattcgtcgtgagtgggtggatacttgtggctgtgacatttgttctttgtggagtctttctgatcctaaacaagtaagattttgctgttctgaatgtttgttttctcttgccttattaagtaaacacgcaa

SEQ ID NO: 143487 - DNA, 1281 bp, Arabidopsis thaliana landsberg
ccaaaccaatccttctttaatttacttattcttagtataacgttcacaccttttcttacacatttacaactatatatggagtcgtcacgaagcttcgagcacgtgctttccatgcaaggtggcgaggatgacgcgagctacgtcaaaaactgttacggtccagcggcagctttagccttgagcaaaccaatgctgacgacagccatcaactccataaagctcaccgaaggttgctcctctcacctgaaaatagccgatttaggttgcgcaatcggagacaacacgttttccacggtggaaacggtggttgaggtgttagggaagaagctagccgtgattgacggtggaaccgagccggagatggagttcgaggtcttcttctctgacttgtcttccaacgatttcaacacgttgtttcggtcgttggatgagaaagtgaacggttcgagccgaaagtacttcgcggctggcgttcccggctcgttctataagcgtctgtttccgaaaggagagctccatgtcgttgtgactatgtctgctttacaatggctctctcaggtataaatgtatcatccattaattaattcaatatcttttgaatgaagtttactttataaacttgaaggtgatgaacatttgactatataatttaatttgtatcggccaaaaaatgatttgaagattactagactagtaaaactaaacaaaaagttaaattatcgtttcttctaatgttaatgaacaatatgtcaaaaaatttataaagttcaattatgatattcttcaaaaacatttttgttccatgaccgaaccaacttaatttatataactgattattgttttaatgtatatatatcttatgggtacagaaatgtttcaatttacgttttttgttttttaaatgtttcatttctttgtattggatatgataggtacctgaaaaagtgatggagaaaggatcgaagtcatggaacaagggaggggtgtggattgaaggagcagaaaaagaagtcgtggaggcatacgcggagcaagcagacaaggacttagtcgagttcttgaaatgtcgcaaagaggagattgtggtagcaggagtgttgtttatgctgatgggtggtcgaccttctggctccgtgaaccaaatcggtgatcctgattcgagtctcaaacaccctttcacaactttgatggatcaagcttggcaagatatagaagatgaggtataatctcttgtaattacgtcatgatgttacatttatttatggaattacaaaacgtccc

SEQ ID NO: 143488 - DNA, 921 bp, Arabidopsis thaliana landsberg
ctctgtggtggctgatcaatgtaatgtttttgctagggagatttccatgctgctttgaattttgcagcagttatggaagctcctgttttatttatttgccggaacaatggatgggccatcagtactcccacctcagatcagttccgaagtaactccttttctttttctttggatgtacataccctttacttggttttctttaagacttttggatttgccaatgcttttgcaaacacaatggccaacaggtgatggtgtagtggtcaaaggccgtgcttatggaattcgaagtatacgtgtggatggaaatgatgcacttgccatgtacagtgcggtacatactgctcgcgaaatggcaattagagaacagaggccaatcttgattgaggttaatatgatgtgttgatattagatgcaacatcaaaacacaaaataagttcaaatcctctcttttttttttgtttgcttggtaggccttaacataccgtgtaggacaccattcaacatcagatgattcctctaggtaccgctctgcaggtgagatagagtggtggaacaaagcaagaaacccactgtctaggtttaggacatggattgaaagtaatggctggtggagtgataaaacggaatcggatctgagaagcagactcaaaaaagaggtagccaaaaaaccttgatcatgagcattgtataagaatcattttggttttataaatgctaatttatcctatccttttgggtccttgtatacagatgttagaagcgctccgggttgcagagaagactgagaaaccgaatctgcagaacatgttctcagatgtctacgatgttcctccatctaacctcagggaacaagaacttctggtgaggcagacgatcaatagtcacccacaagattacccatcagatgtgcctctttag

SEQ ID NO: 143489 - DNA, 3951 bp, Arabidopsis thaliana landsberg
  unsure (1)..(3951): unsure at all n locations
gttgttgctcaaacgattaagtcttgtttggataacctgcctggttatccaagaactcaaattggatttattacttatgacagcacgttacatttttacaacatgaaggtaagagaattgtaaactcacaggaacttttgttttgaaattctttagcctccataattttttttttgtggactttggcaatgcagtcatctttgagccagccgcagatgatggttgtatcggatctagatgatatctttgtcccattgccagacgatctgcttgtaaatctatctgaatctagaactgtggtggacgcctttttggacagtctacctttgatgtttcaagataatttcaatgtggaatcagcttttggcccagccctcagagcggcgtttatggttatggttagttaccatcctgacatatcaaaataatatcatataattcatttgatgttgagtgtcctatttagatcctcatctgaaatgtggatcagtttgttgactctgtttctctccctatttcagaaccaacttgggggcaagttactaattttccagaactcattaccttctcttggtgctgggaggttaaagttgcggggagatgatcctcgtgtctatggaactgacaaagaatatgcattaagggtagctgaagatcccttctataaacaaatggctgctgattgtaccaagttccagataggaattaatgtttatgcattcagtgataagtacactgatattgcctcattaggtatgtgaacgttgaggttatcagttgatgttttttatttcagctgtttggagtcatgggtgatagttaagtttatcagcctgtaattacaattctttggtttcttgaagggactctggcaaaatacactggaggacaggtgtactattatccaggtttccaatcatctgttcatggagataagttaagacacgagcttgctagagaccttacaagggaaactgcgtgggaggcggttatgcgaataagatgtggaaaaggtttaatagtttatgataatatattcgtttttgctacctgctatgtcaatatttgctaatgcattggtgtgctacttgtgatcttatatatttttgcatgcaggaattcgtttctcgtcctaccatgggaacttcatgctaaggtctactgacctgcttgctcttcctgctgttgactgtgacaaagcgtatgcaatgcagctatctcttgaggagactttgctaacatcccagactgtgtatttccaagtggctttgctgtatccttgaatagttgatattttaaacatacttgagtttaaacatacaacgcatcatttagcttttagtaatccttaacagaactaagatataccgcctcttgtggagagagacgtataagggtacacacatctgttgcaccagtggttacagatcttggggagatgtatagacaagcagacactggttccattgtgtctttatatgctagattaggtaagctatattcaaatttttttcatatgctacttttgatactatttaatgacaatttaaattctgcagcaattgagaaatctttgtccgcaaaattggatgatgcacggaatgcaatacagcaaaagattgttaaagccctcaaagaatatcgtaatcttcacgcggtgcagcatcgcttggggtccagattagtatacccagagtctctgaagttcttgccattgtacggattggcaattactaagtccactcctcttctaggtggacctgctgatacttctcttgatgagcgctgtgctgcaggcttcaccatgatggctctgcctgtcaaaaagctattgaagcttttgtatcccaatttattccgtgttgacgaatggctcttaaaggtttgtgtatttttatctcaatgtccattatcaaacatcagtgttcaagaaatagtaaataatttgtgaattcacatgcttgcagccatcagcagcccacgatgactttaaagacgtattaaggagattgccgctggctgcagagagtttggattctagaggcctttacatatatgatgatggttttcgattagttttgtggtttggccggatgctttcacctgacattgctaaaaatcttcttggggttgactttgcagcagacctctcaagggtatgtatttttatccacatatatccttacatatgaatatatgaacaggcggtacattcgatgatgtatatgcatcattagtgtttttcaagaatttgaaacatgataatatgtgtgaaacccttgtctttcttcgtgttgggtctcttaggttacctttcaagagcaagagaatgggatgtcaaagaagctaatgaggttggtaaagaaactgagggagagtgatccttcatatcaccccatgtgttccctagtgagacaaagagaccccccccgagaaggcttccttctcctcagaaatctcattgaggaccagatgggcggttcgagtggttatgtcgattggattctacaacnnnnnnnnnnnnnnnnnnaaaactaagatagctcacaatggtaaggaaaaaaccatcataatacttccaataacatgcttaaagtaccacatcatgttcgacgcatcttatgaagcggttttactttcagacaactcgggtgctaggatgccacctctttgtaaccattgaagaactcttgagctcaaaaatctnnnnnnnnnnnnnnnnnnnnnnnnncttcttccttgggccataatgtgttgttttggataaagaagtgctactttttgatttttcttcatttgtttttctatatagaccttttttctcaagattaggcttttatttgcctaaccagaatggttatctccgtaagattagtcgttttttaaatcttttgttgccttttttttttgtcctcattcgattttttgttgatgtgcgtctgttctagatttattttgggagttgcagttcatgaatctgtcctaattagggttattaacaagaagatgctactgttaaaattttaaaatatttttatgaataaataatgttgtgaaaaccttagatttggatgaaacgcatcgttggtatacatcggtaaagttcatacataaacaatacggtgattgatcgctgtaagaccaactgttcctgcaatcacaaatagataaattaggatttcaatttttaactgctgtaattctgattcaaagattctggtcggttgaaccgggacggggaaaatagacgtggcaatgtcttattggatggtactttctagaaggttacagaataaaagcggtcgtcggtataggggtcaaagtagcttaaacgacgtcgtagaggaatcttcgaatctcccaatagcttgcctttataacaaacctctctgaaccattgctatccaagaaatctttcagatttgcgcatatcgacaattttccgagcggccagtttacgtattttgtttgtacgtgatcaaatctccctcgctttctcgctatcaattttatcaattatgtgttcccgattgtttctagatttggattttctatttgcggatactagttcttttttgttcggaatcgattatggatttggtcttaagatttgcggaaattcttttgtaggtctgatatagtttgttcggaatcattcttgttgctcaggtcttagatcattgcgattgtaaattttgattttgattttttttttcttcaggtagttaacgtgtttcaaggactttgacaatggctgaggtatgattctctttttttcatttctggttcgtagttaattgcgttgcctcgttgttagtttgattgaaattggtgatatatgtgatatggcaggaagcgcataaggtaacattgaatgtctatgatttaagccaaggcttggcacgccagctctcacaatcactcctgggaaaggttattgaaggtgtatgg

SEQ ID NO: 143490 - DNA, 1749 bp, Arabidopsis thaliana landsberg
caaagctgaaaaatcaaaataatatgatgtttcacaggcattgttagaagaaaggcttgtacatttgaaacaagagaatgaagctcacgtacataatgaggttggtgaagaaataacataaataatgaggctgtatccctaactttactattttgctgcattatctgcaagctaaaggtcaaaataacatgatgtattacaggcactgttagaaggaaagctcttgcatttgagaacagagaatgaagatcacatacagaatgaggttagcgaagaaatatcataaagcctatccctaactttactattttgctgcattatctgcaagctgaaggtcaaaattacatgatgtattacaggcactgttagaagaaaagctcttgcatttgagaacagagaatgaagctcacatacaaaatgaggttagtgaagaaatagcataaagccatacccctaactttactattttgctggattatctgcaagctgaaggtcaaaattacatggtttttcacaggcactgttggaagaaaggctcttacatttgagaactgaaaatgaagctcacaaacaaaacgaagttagtgaagaaaattgcataaagccgtgtccatagctttcttatttttttaggatcatctgcaagttggaggtcaaaataacattgtattttatgcaggaaaagttggaggaaagacttgtgcagtataaaaacaagaacgacatgcttcttcgtgaaatggtgagagatcttcaacactgggatcatttttttagtactacagtttctcctttgtgtgatcatatgaaagttccttttatctgttcaacttggtttgtttcttaattatctccccagtatgtagattaggacctactaccggtatttagcattctagactaggacttggtcttagctaacgtgaaagaatgtcatgttgtcaggacatttcagatcgctatagatgttacattacatttcattatgcctgaagatgctgtgtagttctgacatttatagaaatttgacagtctagcacagaagcccagatgagacaattgctagatgaaagatctaccttcactcagaaagaggtatgtcttcattcattggagataagggttccatcttcttctgttataatgcattctccttgtaaaaattgcatgatttcaatcaggcgagtctagaaaagaaagttcaacaacttcaacacgatgaagaatccttggtggctgaggaggtaactctatcttacactataaaaatcttggtactcattttaagttgagtctcttaagagttagaataagatgggcatgttttactcatcatacacatttaatcctgcagaagtcatccagagaaatgatatctagccttaacaatgaaattgcaaggctgcgagcacaggtatgtgtctcattaaacttaactgattttctcatttccaaggaaattgcatctgaacacgtcactgtagcctcctaagtgaatgtttagtgatttactcgtgtaaaacaggaagctactacgcataatactgcatagatttagtctgatatgaagattaaaacaaagttttggcaggttacggagttggaaaaatctaagagtaatcttctagagcagaatcagagtcttaaggaaactatattcaatcttcaagtccagcatgaaaaccatgatagtaacgcaaaggttagactttgatacttcaaattgcaagaaactagaaatgcatgaac

SEQ ID NO: 143491 - DNA, 886 bp, Arabidopsis thaliana landsberg; identical to SEQ ID NO: 26918

SEQ ID NO: 143492 - DNA, 1778 bp, Arabidopsis thaliana landsberg
tttattttttttccctcttctcttctcttctctctctctcgttcattgtaccttcctccattttttctccatctttcctctctaatctttttatcttctttttcttcttccctccttttaacgattccgtggagtctggaatatgatcttgtggaaatctctcagttgtttctcgttcgtcttcgggttgttgttgtacagtgctagtttcgtttgtgctggagacatagttcaccacgacgattcgcttccgcagagacctggttgcaacaacaatttcgttctggtttgatttttgatctatttcactttgatctgtcgttcttactctttctcttatctccttgtccctcttgtctatctcttggtgactttcaggaatttggaatttagtttaggctttggattgtaatactagggtttagtggaatgagtctgttgattgctttctcactgtcctcctccttctatatctgttgttgccagcagattgagaaattgggtttttacagactctagaggaacttttggattccagatttgatgtcattcagaatagagggagagtaggtatagccatgagttacctaactaaaccctcgttttagtcgcatggactttcaatttgttgcaagcttcttgttagctataataaggagtcatttggtgtgagtgaagaaattgggatatagatctggtttgcgtttaggaccctgccatgtcatcttccaacatatataactacaacatataatttcatggacaggtgaaagtcccaactcgagtcaatgggtcggagtacacggagtatgttggtgttggtgctaggtttggcccaaccttggaatctaaggagaaacatgctaccctcatcaaacttgctattgctgaccctcctgattgttgcagcactcccaaaaataaggtaaagtttcctttttggcttgtctctcttgtactcatctttccttcttgtgtaattccagtttcattatcttttggtagcttacaggagaggtcattcttgttcatcgtggtaaatgcagttttaccaccaaaactaaggttgctgaagcagctggtgcctctgccatccttatcataaacaacagtacaggtaattcactaaaggcttttttctgtatatattcctcctcttgtactagttccaagtgattatttatttcccaattctagttaaatccctcttgagttttgcaaggttgaatgttgctttgcagatcttttcaagatggtctgcgagaagggtgaaaacgttttagatattactattcctgttgttatgctacctgttgatgctggtagaagtctggagaacatagtcaaaagtaacgctataggtaattcttcgtataaatcaaactgtacttccgcatagattgctcttcttgtattttagcatatcttatcatagtttggcatctctgtgctctctctttttctttgagttggtgttgactatatttgttcagttactctgcagctctactcgccgaaacgtccagcagttgatgtggctgaggtctttctttggcttatggctgtcggtaccattttatgtgcttcttattggtctgcgtggaccgtcagggaagaagctattgagcaagacaagctgctaaaggtgattgctggctcaaaatttcgtacaattttatattctggacatccaccatgttcgaaccttttgacagccaaggaaaagtgccctcattcgtttgttatctatcttaaactgcaggacggatcagatgaac

SEQ ID NO: 143493 - DNA, 1953 bp, Arabidopsis thaliana landsberg
cgacaaaacaattttgagtctctctattctctattctctctcctctccgcctctctttctctctctctctatctccgtcgtcgcaagagtgcatcatctttaacgccggcaccttcccgctgctctcttctaccaattctctcttagatcttctcatgcgtcttcttcttatatcttaatccttcgtcgtacaagctcgccggattgagttttcgtcttccatggctattcctctcgggaagctcaccatcctcatcggtgcaggtcagtactcttgtgggggttttctgttttagtgattaattgatcggtgctcgtactcctctctcgggttctcatttgtttcgtagatggggaattgcatttagaggatgagaaattagggtttttgataaacccttttataatgatcactgttgcttcactgtctttcaatcatcgaatcttcttcagctcaaatttcaagtcttttgatatttttttagtgtgcttcacttttggttttcatctgtttcttcgaccaatcagaaattgaacaaaggaacagtttttactctcttgtatgtgttaggggagattattcagcgttattggagactagtttatgtttaatttcgttgtgaatgcaccaaagatgatgaatttaccctttaatgtcttactgtttcgattaattttagtacatatgcttaatgttcaattcacttgcttttacgttaggtcttgttgggtcagtacttgctaaagaagggagtttaccagatgtctcgagttttgtctccggtgctcttaaggtattctaagttctatgttgtgcaaaagcttgtatttatgatgtttttttataaatggagtaatggtttatttctcttgatagatggtatttaggcagctgaagcaagaagaacctgccaaatcagccagcaagccccgcaatgatacactaatggcccaggttttgattgatattaagctacttatttatgtggataggttattaaatttagctggataagatacatttgtggaggacttggacttagatttacttgtcttatctctattttttcttgtaggttaacagtcttaggcatgaattgagcttgctttcttcaaacagacctatcactattgttaccacagcaggatcaggtcctctagagatttaatgttggaagttttgtattcctttctgctccattttaacaatttccttacaattttccaggtggtaaaaagtatggttacatcattataattggggtgataggctacggatatgtatggtggaaggtaataatatttcaccatgcttgagcttcttacttactcgattagagtgctattggctagtctagattttgtattttggaaaacaatttaactgttttccttgccaattaatttgacctggcttgtttgtttgtaagttagacctggtttatttgtttgtagttattttccctttttaaaaaaccttactgggaactggtttattctgcaacattctcagggctggaaacttccggatcttatgtttgcaacaaggcgcagcttatcagatgcatgtaatagtgttggcagccagatcgatggtttttacacatcactctcggcaagttcttacttcccatattagttatgatagttccttttgtgagcctaattcatccaaatgataaagtacctgtatttaatttagttgcagaacatcagtattttgtctcattttgttgctgttaacatttcatgacagggtaccaaaaaagagttaagttcaaaaattgacgggatgggtcgtagtttggatgctaatacagaaattattcaagatacaggacgagaggtatgttagatgaatgtgcacaaacacttgtgtttcactgcgttgtcaagggctttctgataattctaaatgttatcttgataatttatttaattgaataggtgatg

SEQ ID NO: 143494 - DNA, 753 bp, Arabidopsis thaliana landsberg
  unsure (1)..(753): unsure at all n locations
catgggaatcagtntggctttcatggctgctatgaaagggtacaggattataatgacgatgccttcgtacactagctggagaggagagtgacgatgagatcctttggtgctgagcttgttctcactgatccagccaaaggaatgggtggaactgttaagaaagcttatgacctccttgatagtactcctgatgctttcatgtgtcaacagtttgctaatcctgcaaacactcaggtacacttatgagttagagaaagagatctttttttattattattgtgcattctcatttgatttagagatgatgcttggaatgcagattcattttgatacaactggtcctgagatttgggaagatacacttggaaatgttgatatatttgtgatgggaattggcagtggaggcacagtctctggtgttggccgataccttaaatctaaaaaccccaatgtcaaggtgagtgatctctaagttctgaagaaatcttgtgaatatcaaaaaagtagattgcgtttgatcatgaatgtcttccaaatgatagatatatggagtggagcctgctgaaagcaacatactcagcggtggcaaaccaggtgagaattttgaatacttaaagactttgttagtatatcctcattgcggttgctgatggtagagttttgaactttgagttaggtccacatgctataaagggcaatggtgttggattcaaaccagaaatcttggatatggatgttatggagagtgttcat

SEQ ID NO: 143495 - DNA, 2012 bp, Arabidopsis thaliana landsberg
attttatccattatgatctccggtctagtcaagtcgaaaagctctaaatcaagtttcatctttttctcagggattaaagtcagagtatactgtcaagtgggcaaagccgaccaagggaaatttgcattgcatgttggtgccaagacattggatctgttcaaagagtaggtccttcgttgacatttgaaactttatgtgcatgcatatttctgagcttctttaatggatgtatcatctcattgcataagtccaatcattcttgtaggtactttgctgtgccatatccccttcccaaaatggatatgattgcaataccagattttgctgccggagctatggagaattatggtttagttacataccgtgaaacagctcttctctatgatgaacaacattcagctgcttctaacaaacagagggtactgtaaacatgtccatttattctctagaggaaattgtcttgtgctctcttgtgcaattatctaaagcagttaaatttctgctgctaggttgccactgtagttgctcatgaactggcccaccagtggtttggcaatcttgttactatggagtggtggactcatctatggctgaatgagggttttgctacttgggtacattgcaaacttaggtcttagtattaacaatgattttgagttttgttgtgaatatattgttactctttatctgtttcaggtcagctacttggctactgatagtttgttccctgaatggaaaatctggacccagtttttagatgaatctactgagggtctaaggctagatgggcttgaggagtctcacccgatagaggtaaccaaaatgctgtcaatatgtcttcacagaataatgtcggttttccttaatttcactatcgatcccagagataccctattgcctatttgtcataagtccataaatttccccaggtggaggttaatcatgctgctgaaattgatgaaatatttgatgcaataagctacagaaagggtgcatctgtcatccgcatgctacaaagctatcttggtgctgaggtttttcaggttcgctctcatgcccatttcttcagttacaaaagaattgcagcgtttatattatgcatgtaaatatggtggcttctagttccagtttcactaatgtctccaaaacatcttaccctacttgtttggcttttggtgagcagaagtctcttgctgcatacattaaaaatcacgcttattcaaacgcgaagacagaagatttatgggctgctttggaagcgggatccggagaacctgtgaacaagcttatgagttcttggacaaagcaaaaaggatatcctgtcgtctcagccaaaataaaagatggaaaattggaactcgagcaggtacttagacttatttccctttctggatgttctgtttataccactttgggatattgtgcatgattaagtaacgaaattcatttgaaattttcagtctcgattcttgtcaagtggttctcctggggaaggacaatggattgtaccagtgaccttgtgttgtggttcatatgaaaagcgcaaaaacttcttattagaatccaaatctggagcgtatgatttaaaggaattattgggctgctccattgccgatggtagcgacaaaattaatgggacatgttcttggataaaaatcaatgttgatcaggctggattctatagggtgaaatatgatgacagccttgcggctggactcagaaatgcaacagagagccaaagcttgacttctatcgatagatatggtaattcaaccttgcagaattttgttttctggttgacagaatgaaatttctttggagatagatatcctactttgtatttcacaggtattttggatgattcgtttgcacttactatggctcgtcagcaatcactggcctcattgctcactttgtgtagtgcttacaagaaggaacttgactatactgtgctgtcaaatcttattgctgtaaggatctcccctttctgtctttaaattcgctgtaccata

SEQ ID NO: 143496 - DNA, 277 bp, Arabidopsis thaliana landsberg
ccgtcttcatcatcaaaatcaatggaggaagaagaagcgagacaagtggtgatcgacaatgatctgaagaagaagatcaaggaaacggtgaagaagatcctgaaacggtcgagcttacttgagattacagagattaaggcccgagaagaagcttcatctgagttgaatctcgatctttcgcgagatccgtacaagatcatcgtcagagaagccgttgatagtttcatcgagaaggcgattatgacaatcgatactgagatgggaaagcttcatactc

SEQ ID NO: 143497 - DNA, 1914 bp, Arabidopsis thaliana landsberg
gagaaaattacttctcgtcgatgccagtttggcgcagacttcgaagtttatggccgtggttgatactttgtcgacgcattcgccggatgaggagtatattggagagagacaacagccgtcgatttggacaggagatgcggagattgttgaagcgttttatggatttgcggcagagatcggacggatagagaaagagattgagaaaaggaacgctgatcctgaccgtagaaataggtgtggggctggtgttttgccttatgagttgttggttccgagttctgagcctggtgttacgtgtagaggtgtacctaatagtgtatctatataattaagaaggaaattatttataagaagtaaatgtagaaaacacataaataatttcttgtaaaccatgatatataatatataaagataattttcgtaaagttatgccaaaatcaaaatgactagaaaggttaatgtaaactatcttcttcggtattgacctaagtctagcctgaaatttgagatggcttcttgggttctgacctaacttgggtctcaaactaccttctgatcacacggataaagtataaaccttgaaattataaggtgctatgagaaaaaaaaaatgagagatagaagagtacctttattctcctgggaactcaaggtagagaccctcagccattcacttgagagtgaagacaaaggtttcttcttggattttaacctaacttggacctgaagccatcatttcattggtagaaatctaggaacttaaagttggcaagagagatccaatccaacgggtaaaacttttgtctttgtttggtagattctgatccaacgatgcagattcaccaacaagagccagcgacttaatcgagtgtggcttattagttgacgtagagagacgacaaagagacgatatagtttataccatgagtacatgtgtgatgtgtggatcagtcgctctcgtgcgaggacattctttaaacagctgtaataataagctcaattacttagattttcatatatagatttgtttgttaaaatgttaaataaactttttatagaattagatgtcgaaacacttaacatgcactttgccacgtttgaacaaaactcaaatcaataacatcgcttaaacaagatttaaccggaattaaccggaccggtagaaactgtgtttgaaatttaaaagcacactctctctatcgccacacccacaccttctctgcaaaaacaaaagatttccacttttcttaaaaatggcgtccatgaaacacgttcatcttttccgtcgttatctctcaatcgttttcactctctttcaacgcttaatttcatgttttttcgattttccgatactgatcaaaatcgcagattcgttcttatctctgtatttcttagttttctgcgatctccgacccgtaaccgtcgatctagacgacggagaaaccacagtccatttctggatctccggccaccgtagaatctctcggcagaatctcgtcatgctccatggatacggaggaaactccaaatggcaattcgttcatcaagtctccgatctctctaaaacgtttaatctcttcatccccgatttggtcttcttcggaaaatcttattcgaagaatatagatcggagcgttgagattcaggcgaggagcgtcgtcggaggattgaagaaactgggatgcgttgaaggaggaggaggaatatcgatttattcgattagttacggtggatttgtggcgtatagaatggcggagatttggccggcgatggttgagaaattggtgattgtgagtagtggagtgggatttacacagcagcagaagacggcagaatcgaaaacacacggcggagattgttcgaagatatacatgttacgaaaactccgatggatctacggttgctgattaagat

SEQ ID NO: 143498 - DNA, 492 bp, Arabidopsis thaliana landsberg; identical to SEQ ID NO: 51037

SEQ ID NO: 143499 - DNA, 3954 bp, Arabidopsis thaliana landsberg; identical to SEQ ID NO: 2311

SEQ ID NO: 143500 - DNA, 853 bp, Arabidopsis thaliana landsberg; identical to SEQ ID NO: 57663

SEQ ID NO: 143501 - DNA, 1978 bp, Arabidopsis thaliana landsberg
atcccaatcagaattcagaggttaaattgttttttctaccaaaatttttgttttttttaacttttaatccctccactaacaaaactcaagtgggacccacaaaatagcctaaggcagtttaccacgtcatcatggaatcaggaaaacgtcgacggttgtgactatcacacgtggcattatggttttctcttactgtgcaccgtgctacaccagaaaagaattcgtcgtctctgatctgcgagattattcgcctatagagaaaaaaggcgatgatgactaaagaagactgagtcgactcgcttttgacacagttgacttctgagacgtctttctcttcttcatcttcttcaatcatacgcttatctatttttggaaacttgaattcgtgattttagatgggaggaggagaagttagtaaagagatgggagcttgttcattagcgtatcgtcgtggagatcagaaattacgcaagttcgtgacggcgaggagtactaagtttcttctattttgctgcatcgctttcgtcttggtcacaatcgtttgccgatcttctcgtccttgggttaacagttcaatcgccgtcgcagatcggatctccggatcaaggtctgtacacacacacacgttctgaatcatctaccttactatatgagtctaaatttgatttggatctctaaatggtaacttttggtgaagaagactagattcttttttaggaaatgaaatttatggaaagtaaattttagataagtgcaattataactgcgattcgtttaaccttttttgtcttcattcatttcttaaattcataattaaactggagattctttggctttaccgatttggtatggtttgtgttgtttctcagctctatttataagcaaactgtgttcttaagctccttgctgttaatgaatctatgaatgcaaaagctacaatgattctgtgatttatatagacacttttgtatatcgaaaagcaaatgaattcataatctttgctatgttaagctggtgatatacggtacatgtaggtatgtgcaaaggttaggagttatggagtaaatgtaatttataattaagtagttgatcttttgcttttggtttgactgcataattttgtgctttattgtctaatttgatggatttctttatcacatcctgcaggaaaggttatacacttctgatgaacacatggaagagatatgatctcttaaagaagtctgtttcccactatgcatcatgttctaggcttgactctatccacattgtatggagtgaacctaaccctccatcagagtctctgaaagagtatcttcataatgttctgaagaaaaagactcgagatgggcatgaggttgagctgagatttgatataaacaaagaagacagtttgaacaacagatttaaagagattaaagacttgaaaacagatgctgtcttctcaatagatgatgatatcatatttccttgtcacacggtagattttgcattcaacgtttgggaaagtgctccggatacaatggtggggtttgtgccccgtgtgcattggcctgaaaaatcggtatgtcacttttttattgttggatatcttcaagaagcttctttatcaaataacagtaccaaaatagtaaaaatgcgttctttttaagttgtttgctattagggactctttcactgatctgaaaatcgtaggtctctcccattatttaaggaattaatcatctctctctctccattccagatggtctaatagctagtattaatattgaaagaactctctgtacatggtgattgaattggttttgaaagtagacttcaattttcttgcagaaatgaataaagccaattacctacaccttacgttcggatggtgggtcatgtttcggtgggaagtgggtacaattattaccattgggtacctcttccaaaaagggcaagctcctttcttttcctaccaaaaaaaaaaatacccctt

SEQ ID NO: 143502 - DNA, 2612 bp, Arabidopsis thaliana landsberg
gtatttgataatgtttctactgtgacctctatagttttgacatttttggtgcaatatgtcaaatagaaaagatttgtttttctgaaaaatataaaaataaatttaccaatgtgttctgaaggcaattcagctataaactataaaaggataatgaacaaattggtttattcatcaataaattggtttattttggtttaaacatcggttttgttcgatggtccggttaagacggattgttaattattgtcgttgaaaattcaacaacttttttttggtgagaaaaactgaaagacacaaaatcagtcacgaaaacccccaaatccacagattaattagggttttcgatttctctgatgaaactgagaagaatctctcattagggttcttcattcttcagagggatttctcatatctctctcattgagcttgctaaagctgaaatctgagtttgaaattggaattcagattcccatcccatgttgacctcttctgctcttcttcgtctctcctctgccatcgcccagctctctctagttcgcgttccaagtttagggttccttgtcgaactgttttctctcctgctcttaccaagatttcccctttaactgcttcttcaccttctaagtccgccaagcatgtacgcttctttcttcttttctctgtttatattcaaaagtatgaaactttgaattgaaaaagagactttggtgtttgaattgtgttgaaattgaggaatcttggattcgaatagcactgtggattcagtttatttacgaaagagagtgctttttgataaggatttgcttggattactagtagttttagaaatttgtggtttcttgaggttttagtaatcttgtgacttctttattgtaagaattcaatatttgtattgatgcagtgtcaaatggttaatggaagaatcggtagtttgtctccaatgtattaaactttggggctattttctgcagaaatggaagattttgtgttttagaaatgaagattctgctcccgagaatccggagcattttgtgcctgaggaattagttaagccagatcaagattctccatgtacagataaaacagattggaaggcaacttttcaaaaggtaaagatctatggacgttactggatacttgtacagttgaagaagaactaccttctgtctctgttttagtctgacaaaccggttttgatattagggtctagactctagaggttaggactgcagcagaatcttatatttgtcaataaactgttatgtatatatccattatccactctttgtttttttttgtttactagtgaaaaataagaatttgaggtttcttttgatctggaaatgtgccatacaaattgatgaggctttctatttactaaatgtgatggcaaaaatgcaaataaggaaactctcacaaaggcttatcgatcttgtgttcaacctattattattgggtctaaaaagcactttgtttcgttggttttcaggctgcagatgcagttttgaaggccattgggactcgttggaaggtaccatggactgtcgagaccattgtgcaggtacctacatcttaatgttacttaacctcttttgtattaccgtatcatattcataacttttacacaagaacattattgaaacctatatagaaattttacgggattatctgataagagtgtattatggatattgagtctgtgtaagacgtagttttttaatgtatagacatttaaacgtgggctaatatccttgacttagtaactagggactacaagataacatcaagctaatagtattatagatgctttggttcatacaaaagaagcaaaacatacagtaatgagaaatgagttatataccaaagctttcagttatttccttggttaatcctgcgataatctgccatgcccctaacatacactttttcatgtaatgtttctgtgggtagccgctttctggttcattggttcatggatgatcccattcatggctcatatatcaggtttccacaaagaatccctaacatttagaggccaagctttgttcagtctgataaccgatgtaacagaaggcctacccgggattgctatcctccaccgttgcctctccatgttccgtccacttgcaagtgattggttccgctttacccttaaaggaaactggcaactagatgttatcataggctgtttcatgttccctttcgttaaccggctctcccaattaaacctaaacctcttgccactcccaccaacctcaagtccagtctcactctcaagtgtcgagcagtctataatggctagagaccctgtggcaatggcactgtatgcagttgtagtatcaatttgtgcaccggtttgggaagagatagtgttcagagggttcttgttaccgtctctaactaggtacatgccagtttggtgtgcgattcttgtgagttcgattgcatttgctttggcacatttcaatgtgcagaggatgttaccattggtgttccttggagtggtattgggtttgatattcgcaaggtcaaggaacttgttaccttcaatgctgttgcatagcttgtggaacggctttgtattcatggaattgatgcgatgatgactatct

SEQ ID NO: 143503 - DNA, 762 bp, Arabidopsis thaliana landsberg; identical to SEQ ID NO: 49057

SEQ ID NO: 143504 - DNA, 1773 bp, Arabidopsis thaliana landsberg
gagacaaaaaaaaatcaaggcaaaaaatgggtttctctccatcctcttcatggtttcttcatcctcagcttcatcatgttgtttccaagatgtcttactttgatgcttttttgttctatgtaaatacatctctctctttaacaagaaaataaatacatctctgatctctctatctctctaaatatatgaactatgcttttcttctcttaagaaaataagtaatcatatcgcttttataatttttttcttatcattttgttaaaattatatacagattgtgcacttagtggacaagctaggattgtggcatagatttccagtgttattaggagtggcttacttggggttacgaagacatctacatcaacgttacaatctggtacatgtcggtccgatcaacggtcagggttacgacaccgatgagttctgttatcgtacggctgacggcaagtgtaaccatccctccgataacaccatcggcagccaaggcagcttcgtctgccggaatatgcctccctctacttctcagtacggcgtaagtttttttcttgctctccttcatattcacaatcactttttcacaacatgcaaattaattttgtacttttgattaaatctataaaataaagcgaagtgatatataatatagcaaaagtaaatagtagtggaatgagacactagaaccaaattttgtgacgcatttctttttaatcactacttaccggtggttgaaaattgaaatcatgatgtaatgttcctctgctttttattttattttgtcagcttttgattgattttatgtgtttgttgatgcaataaagtttttttgtcaatacttttttttccctgaaaatttagaaaaaaaaatgttggagttttgttattattggagtggatgcacctcatgatagccaccctaattgtattagtgttggttttgcatgatacgtaattcatctacgaaattatgttatggattgaattacatcagtatgagtaaatgcacaactgcatgatacatatttttttttgtctgttttaggatcacaatgtattttatataatatatgatatgattgtgtgtattatgacagattttggatccacatccaagtgtagtggcgacaaagttgttagcgagaaaaagattcatagacaatggggaccaattcaacgtgatagcttgttcttggatccagttcatgatccatgattgggttgatcacttagaagacacccaccaggttttgatattttcaaatttaacccctttaatcttgaaaatttacatttctttccctcaactttaagattatagattaataaagatattgaaatcacctaaaccagattgagcttgaagctccagaagaagtagcaagtggatgtccattgaagtcattcaagttcctcagaacgaagaaagttcccaccgatgatcaccacaaatttggcgctgtcaacactagaaccccttggtggttagtatctcaatcatttagttactgcttatttgttgtttaattactatccgagtttgattttatataacattattttggggatagggatgggagtgtaatatatggaaatgacgagactggaatgagaagagttagggttttcaaggacggaaagctaaaaatctctggggatggcttgttggagagggactaaagaggtgttccgatctcccgtgaccataagaaaacaggctggccaaggcttccttttcttgttggcaaagcctccttcttttgtccaaaaggaaac

SEQ ID NO: 143505 - DNA, 979 bp, Arabidopsis thaliana landsberg
tttccagtaattccctgagaagtagaagtagaagcgagaaggaattcgaagaaacagatttcaacaatggcggcagttcaacagcaacaagcgatgcagaagaacactttatacgtaggaggtttagctgatgaagttaacgaatcgatccttcacgccgcgtttatacctttcggcgatatcaaagacgtgaagacgccgttggaccaagcgaatcagaagcatagatccttcggattcgttacttttcttgagagagaagacgcttctgctgctatggataatatggacggtgctgagctttatggtcgtgttctcactgttaattatgctctccctgagaaaattaagggtggtgaacagggttgggctgctcatccacgtacgtttccaattactgtttctcttctccttttgatttctgaaatttgagctattgataatgttgatttgggggtttatgaaattagggtttgcaattagtgttctttgtgatttattattgattctgcaattagtgttgttagatttgcggatttgaagttaggtcaagtttgtatttgcttctcgattgtatatatgattaagctgagaggttgtctcgttgtttaacaaatgggacttattggtgttgttggtttgtttcagtttgggcagatgcagacacatggtttgagaggcagcaacaggagaaggagattctgaagatgcaagctgagaacaaggctgccatggagactgctgaggagcttcacaggaagaaattggcggaagatcgacaaggagagatggaggaagatacagataccaaaaatgatcctatggccagagcagaggctgatgctctaagtcacggcgatgcctaatgaaagtaagcgttaccggattctcttatgccccttgtcctgtaggtagccaagtatgttttcgcctgagtgtgtaacactgtcactatcacctcatagagtttttaggttga

SEQ ID NO: 143506 - DNA, 1212 bp, Arabidopsis thaliana landsberg
attcattgtttgtttgggacgaaaatttaacatggatggtatatataactaggaatgggagacacaatggagtttgcggcagaagtttatgaagcattgggtcggaggagacaaatagagacagaaaacggtattgacaaagaacaactcaagctgttttgggaagacatgatcaagaaagacctcgattgtcgtcttcagatcttcttcgacatgtaatttcactcaatcttatatgttttcatatatacacaaatgcggttatttatttttatttttaaatgcggttatttagtttaaccattgttgttgttgttgttgttgttgtttaggtgtgacaaaaacggagatggtaagctgacggaagaggaagtgaaagaggtcatagtattgagtgcctcggcgaaccgcctcgggaatttaaaaaagaatgctgcagcttacgcgtctttgatcatggaagaactcgaccctgatcataaaggatacatagaggttcactttttctttgtaatttttatatatgatagctttctttatctagacaaatatatagagagattaatgttctgaccatttcatagtttatatccaccagatgtggcagttagaaatactactaacaggaatggtgacaaacgctgatacggagaagatgaagaaatcgcaaacgctgacacgcgcgatgatcccagagcggtacagaacgccgatgagcaagtacgtctccgtaaccgcggaactgatgcacgagaattggaaaaaattatgggtactcgctttgtgggccatcatcaacgtctatctattcatgtggaagtacgaagagttcatgagaaaccctctctacaacatcaccggacgctgcgtttgcgccgctaaaggcgctgctgaaacgctgaaactcaacatggctctgattttggtcccagtctgtagaaaaaccctaacgatacttaggtcaacgttcttgaaccgtgtggtcccattcgacgacaacataaacttccacaaggtgattgcatatatgatcgcgttccaggctttgctccacacggcacttcacatcttctgtaactaccctaggttaagctcgtgctcttacgacgtgttcttgacgtacgcgggtgctgccttggccaatacgcaaccgagttacctaggtttaatattacgtcagtgtcgatcacgggtgttttaatgattttcttc

SEQ ID NO: 143507 - DNA, 3682 bp, Arabidopsis thaliana landsberg
  unsure (1)..(3682): unsure at all n locations
tcctctcataagcaacaaaagtctatggagaatcttcaaggcaggagttttggaggcacttcttataaaggggttggaaagcgcgtcaaagggtgagcagaagtttaaagatgttttcgaagttttggatgcaaagatggcagagagtaacagaaacttatatcatcaggggagggtgaatgctaatctaacacaggcggagatggcattcatacggcagaagttcatggaggctaagcggctatcaacggatgataaacttcgtcattctaaagagtttaatgatgctcttgaggctctagactctaacaaagacctcttactgaagtttcttcagcacccagattcattnnnnnnnnnnnnnnnnnnnnntcttcaaagcacacctcacaagccacagtacagtcaagcaccatccttgaagtcgccaaacagtcagaggcatgtggatagtctgaaaactcagaaagttgatagggacttgttgaggaagagtcatcggtcgcctcatcggaatggtggtggtggtagtggttgtcctagccgttctcatactaggcatgcttcttatgacacgattgacttaccaaatgaggagctgagaaagaggagtgagttgcagccaaccaagattgttgttctgaaacctaacctcggggagccacgttatgctgctagaacttttgcatcgccaagctcttcttccgatgagttcagagcagatcgtaggcttccatgcaccaccactcatggcaggcagaaaagtaatgaagatgtccgcctgtcaagacagaattcaagagattgtggagaaatggccaaaataatgtctaggcaaaggaaggtgagctgtggcaatggtcgtgccatgagttttgagacttcaggatttagaggatatgcaggggatgaaagctcatcagggagtgactccgcaagtgaatcagagctagtgccagtaacttcaggaacaagaaccgccttcaaccgtaggaactaccatcgatctttgccttccaagtcaacaacatcatctgtgagtagggaagctaagaggagactgtcagagagatggaagctgacacacaagtttgagcacgagatagaaattagtagaagtgggacattagctgaaatgcttgccacttcagatagggaggcaaggccagcaagttttaacggactcagtttcgaagatgggattagtaaaagatttgagaacaacattcagtggcctgaattgccagaaccagttggaatcagcagtagggatggttggaaaggatcctgctcaagaagtttttcaaaatccagaaccatcatgaaccaggagagcgctggtggttacaccatagtgttgcctaaggggttgatcaatcgagatgcattagtgcagggggattcttctcatcacggagagtctttcttgtcaagcaaatctagacctggcagtaacaaatctcattcatcatacaatagttcgccagaggtcagcatcaccccaagtttaagcaagtttgtttatatgaacgacgggattccaagcaagtcagcatctccttttaaagcacgtagcagtttctcaggagatgcaaattcagacactgaagatagttcagcttctgatgatatcaagacagcaatgtcttctgaggctctagatttgtcaactgtcacctcggtaactgaccctgtaagtgagcatgagttttgaatatacaggttgttataatcacatatatcttattgtttactgatgttctaggatatctcaaggaggacaactgaggatgtgaatcattcttcggttcctgatccaccacagcctcgtgaaagctcaaaggaaggagatcaaccaagtccggtttcagttctagaagcttcgttcgacgatgatgtatcatcaggttcggaatgctttgagagtgttagcgcggatctccgaggtagtcaatcagtgcttgctagttcagtaattctttcatgcattaaaatatttttgtatcacaaaaattgattcgggtagatccacggggtaactataaatgttttgaggtgttaactgttatctctacgttccaggactcagaatgcaacttcagctcctcaaactagagtcagctacttacaaagaaggtggcatgctcgtttcgagtgatgaagacactgatcaagaggagtcatccacaataactgatgaggctatgattaccaaggagctcagagaagaagactggaagtcatcatacttagttgatctcctagccaactccagtttcagtgactcagaccacaacattgtcatggcaacaacacctgtagagccatccttgtttgaggatctcgagaagaagtactccagcgtgaaaacctcaacccggttagaaagaaagcttctttttgaccagatcagcagagaagtactacatatgttaaagcagttgtcggatccacacccttgggttaaatccacaaaggtatgcccgaaatgggatgcaaacaagatacaagagactctgcgagatttggtcacaagaaaagacgagaaaccaagcaaatatgatgtggaggagaaggagttgcagtggctgagtttagaagatgacattgaaatcataggtagagagattgaggtaatgctgacagatgaactcataacagagcttgtggtaggtgcaatcttctagaaagttaaataatctctttgttacatagtttaagggaaggaaacaaaaaaaaaacaccaggataatgcagtatgtaatgacaattttatcataaagaagcatgtgtccctgtaatgacagtttaatcataaaagtaggaaagtccacattttacgattgatctgattcaagcaaataagagctaggaagacaacacaaatacacaaaagtgagtggttcttttaggtttccggatttgcccttgggattgatggtggaggtggtgtccagaattgggcatttttgacctttgagaggcaacccaatacttccaaaggagtgatgtctccagtcacagttaccttctttgatgcaaaatctatgttgaaggatgtcacacctacttattgccaaaaaaaaaaaaaaaaaaccattagcatgaactttaactaaatccatttacaaactatttcatagataaaatctatggacttggcccagatcatatgggtatcaccaagcccaaaatatctattttactttaccttaaattatcatatataatatcttcaagatattgtaaataatattatatttttgatattttatagaaactttaacaaaagtattatatcagaaatatcatttttcaccttttttgaatatgaaagagataattgtagaaacatgatcagatcggttacacacttgcacgtatagtgncaatgcattattacccattaaggctataggtcccgtacccaacttaaaaccaaaaaatgtgtttgcactaaaacttgctcatagttagataatttgatctcttatactaacctaagtaaaatatgtattgctgtttttgataagaaaagcaagtaaaagaaaagtaaatactgtaacaatagagggtaagaacagtgagaacagaggattcaccttgcatttaggatagatgtttcttcactttgccttgacagcctctgcagtgacagtggagagacactctaagaacaact

SEQ ID NO: 143508 - DNA, 883 bp, Arabidopsis thaliana landsberg
tctctttaaccagtgtggttgtggtgtcttacgggtcaatgaaagtctaataagtgttgttgcacaaatgtgcatttcagtgtctgtgaaggaggactcgacggttgtttatcagcatcgagctgtttttcgaattcgtcctgttaaccgaggctctcaagcaattgctggtaatgtcacaatacagcatgttctgttgttttagagtgtttaagaatgtgtcaatggctaactaacataagttgttttgaatggtaggtcacacggaacctgttctatgtgtatcgctatagtcgtaatgcaaagcaattagatagtggttcaggtgatactactgtcaggctttgggatctacgcactgaaactcctattgttaacttgcaaaggtttgaaatttccctcaccattgttcttcagtttacttccctctgtagattcttactaatagttaatctataatctttttcaggccacaagaattgggttctcacagttgcgtggtctcctgatggtaagcatcttgtgagtggtagtaaatccggtgaaatctgttgttggaatccaaagaaaggagaactagaaggcagcccacttacggtaaagtctcttttacttggtattggtccagtgtccatatgctttggtttgttacttattaccgttgtcttttacctttttcttagggtcacaagaaatggattactggtatctcgtgggaaccagtccaccttagttctccatgccgtcgatttgtgacttctagtaaagatggggatgcaaggatttgggatattacactgaaaaaatctattatttgtctcagtgggcacacacttgctgtgacttgtgtcaaatggggcggagatggaattatttatacagg

SEQ ID NO: 143509 - DNA, 1454 bp, Arabidopsis thaliana landsberg
  unsure (1)..(1454): unsure at all n locations
catgtagctctcgcgttgatgcaggacaagngtcgtctttgtgtattaggtctcgaacaatctcttctctatgtggttgcctgacactagttgttcttgttatcaggaactacatctgtgcatgcagaacttgaggattgtgttgctaaatatgtcggacaacctgctgctgttgtctttggcatgggttatgcaacaaactcggctatcattcccgtcttgattggaaaggtaagtatatgctgctacatcttgtgatggacacttatgttactcccaaaacctatgtttttgtagctttatgtgctgccatctgtacagggagggttgataataagcgattctttgaaccatacttcgattgtcaacggcgctcgaggttcaggagctactatccgtgttttccaacacaacagtaagcatcattttccataattttttgctagttaattgggtgacatgtcatctttatgctcttttgttaaattcttcgcagcacctggtcatctggaaaaagtattgaaagaacaaatcgccgagggacaacccaggacgcatagaccgtggaagaaaattattgttgttgttgagggtatttacagcatggaaggggaaatttgtcatctgcccgagattgtttcaatatgcaagaagtataaggtgaggcaacataataaatcatcttttatgttcaacattgatgagagattaagaaactcaatcaactaaactatcatttttaacatcaaagttgtctagactaatttgattgtctgatgcgtaacttaacttcttcaatattcttgtttcaggcatatgtttacttggacgaagctcacagcattggagcaattggcaagacaggaagaggtgtttgtgaactccttggagttgacacttctgatgtggacataatgatgggaactttcacgaaatcttttgggtcttgtggtggctatattgcgggatcaaaggttggcaattttatacttcttttgcatttactgatcttttgtttgcattccttggtttatttaattttggtaaatcagaatttgaacctttcagaaaaacttagaactagaaaaccaaattacttaatcataagagatctttcagaattgcacaagaaagatacggccatttttttcacagatgaataaagagctgatacactaaggcgcaactgtatctacaatagacatggtgattgtttaggctagtacacttcatttcgaaatcaaccaaaggcgttatagcatattgtgtttcattttttgtaggacctcatccaatatttgaagcaccaatgcccggctcacctttacgccacatcaatttcaactccttccgcgacacaaatcatatcggcgataaaggttatccttggagaggatggttcaaacagaggtatcttgatagcttatttttgctctttcagctgtaactctttt

SEQ ID NO: 143510 - DNA, 591 bp, Arabidopsis thaliana landsberg
gtctctgagtgtcatgaaccaaagtataaatcaaagactcgagttgatatgtctagtactaaagatatgtcaactgtccaaaacgcaactccttttaacggcgttgccccatccaccaccgtgcgagttacaatcgtccaatcctccaccgtctataacgatactcctgccactataggtaaccaatccattaattcatcctctgacctatttttatttttattttttgatatgtaaaatttatcgaaaacgttccatttcaatatgtagacaaagcggagaagtatattgtggaggcggcaagcaagggagcagagctagtgttgttcccggaggggtttatcggtggctatcctcgaggttttaggttcggtttagcggttggcgttcataacgaagaagggcgtgatgagtttcggaagtaccatgcttctgctattcatgttcctggtattactatttacttccattatttgtattctcttttattatcatcttatcttgtattttatccataaaatgatttttgatacatttttaaccaatcaatgactttgaaccatatcctcaattattgcatacttatcctag

SEQ ID NO: 143511 - DNA, 1264 bp, Arabidopsis thaliana landsberg
agaaccatctcctatgtctattgaacgtgttgagaagatggtggtccaccaaagtttctgatgttaaacttgaatgagattgagagctcatttcgtaaagatattacatacagtgaacaacatgataagtctttgtttactagtagttgggggattgagttctggaaatgttactcatctgggaatgatattttggacacgagtggaatgtcttccactgtggaacagattgcttggattgtttctactgctgctgatgctattgctagacgggagaaagacgaggtggaggaggaggaggagttgttgggaaacagtccttttcttttgtaccttgtgccatctcagtctaaagcttctcaggttaggatcacatcggtttagtctcgtgagtgtgactgtcttttttctagagtgaaactgttttcataatgcagtcatttgtgtttttatcatgcttaggttcgatcggtttgcaaggcactgaaaggtattggaattcatactgtgagcttacaccaaggagcaccactagatcatcagatttccgggtacattaaggcagttcattgtctatctttttccttatgcaatcttttctgttttacatagtttttatgctgttgctacataaaggataatctcttttttgtcccctccaattctgacaaattgcctttcgaactgtagattaaaaagcgttgagcctgaatttatagttgctacacctgagagacttttggagattgttaccttgaagggtgttgatatatccaacgtttcattgctggtatgctaaaatctttctcctgtttgttttatgtttcattatactgcagtccaatcatgtccaaatcgtattactatgaaaaccctactaaggcctcaaatttacttgtttcacttaagattttatgtcgacttctgtagtggggaaggttggcaggtcctttttgtttcaaagatatttgttagtttttgttccttttcaagctttcaataatatactatcaaccatctatatctgctgcctgatatggattgggtttagtttcctattctgaatgtttgcccagtttttttgtttgaagtttgtcccagtattgattgctttgagtgtctaaaggatcttagtagtggtctaggaaggcttccaaacttcattctgaattctctactttagttgaatcatgatcactatagctacgtatctacttagtccacctttccacaataagaaaagctcactttcatattagttttc

SEQ ID NO: 143512 - DNA, 5834 bp, Arabidopsis thaliana landsberg
caggatctcgatacattcacactccacacgagatctattcttttttcaatctaggattacgcagagaagccaggagatcatcaagacgaaacgaatcattttaccttgttgatgatatataagactgtgaagcagatcaatagaatcaaatgaagaacagagataaacaacgagatttaaagcgatagagatctcagagtaaccagaattacctaagaaaatcgatggcaatgcgaaattgagggagcgagattcttcgcccttcgttgtcggagctgagcgaagaagaagaaatgagagaattctctttgtggggaagaggcgagttttgacacgagccttttattggctccagaaatagggtcacactagaaagaatcaagtgtaacgcactattctatacactcggggactgtaggaccgttagatcatcgagattgaaattgtgagccgttgattgtaattactaaaatgaataatataattatggaagtatacgactgcgttatcggccgtagatcatgccacctatttggcgccggaaatgtggaatgttattggccattgacgggtttttgtagtcaactgtctacacggtaacgtttcaaatatttcttagtttatatttttttttggtcaaagtgctttaatctttaatatttgttttgaccaacagtatatttacaaataaaaatggtgttttggaaaaaaaaaaaaaaaagaacaaaaacacaatatcagtccaccagtgttacgttcctcgcctcctcctccgtcggctagttgtacaaaattttagtggatcgctataatggtcatcttcagggtgtcatatgttttgagtcagaatttcgaatgtcgaagtgattcagtaatggttgggaaggcttgtgatgctgcctcatcccagtccaaatgtatttgccttgactcttgaagagctctaaatcccacgtcttctatctagctctaaagtatgctatgtcactttggttgtgcttcaccttctttgttttcagctcatgtttgttcatcttcacataaaggcatgttgaaaatggaaaggtgcaagatcagtcaatatgttcatcttcacataaaggcatgtttaaggcaaggtgattgtatctctccttatctctttattttggtaatggaggtgttatccagaatgttggacagtggactgttggagggcaagttttctgctcatcctttgtgtatcactcctcgcctaactcatctagctttctcagatgatttattggttttctcagatggttctcagcactctctccttggtattagtggtatactgcaaactttccattccttttccggtttggacatgaacccttcaaagtctgagctgttttttggaggttatggggattctgaagctgctgttattgctgacttgattgggattcgaataggtgtttttccctctcggtatcttggcttgccgctgaacccgactaagctttctcttgccacacttcaaccttttattcaaaagattaccaagcagcttaactcctggacaaccaagtttctctcttatgctgggaaaatccggttaatagtatctgttgtttatgggaaagtgaacttctggagtcaagtctttgttctaccaaagggtttttataagaaaattgacaatctctgctctgcttttttgtggaaaaatactacttcgtctgcaagaggtgcaagagttgcttggaaggacatttgtaagacaaaagaggagggtgggttaggtattcgatctcttgaggaatttgctactgttttcaggttgaaacaggtttggcacctctttactagaaggggctcattgtgggttatgtggttggaccataacatcttcggaagaaggaactattggttgatggatagcacaccacgtctatcttggaacattaggaagatgttggaagtaaaatctgtgttccagagattgattaaatgtcagatgcgagacggtatgaaagcctctttctggtttgattattggacaagccttggtccccttattgagctttttggtcagttgggcccaagagagcttcggatcagtagaaatgctagcgtttgggaagctacacatgaaggtcaatggcattttcccaatgcgagatctcaccaagctgagcagttgcagatttgcttgtcctcggttgccccgccttctcctttaagaggtgctgattggtaccaatggaagcagcccacaggtactttttctgaaacattctcttcgaaaggaacttggatgcaaattagacaaatttctcctcatgtggcttggcataaagctgtctggtttaaggaatctgtcccaaggttttcatttatccattggatggcttcccatgaaaggttgacaacgagagataggcttttacagtggggtatgaatgtacatggttcttgtgttctgtgtgattctggccttgattcccatgatcacttgttcttcaaatgtgagttttctagatcactttggatttcgctcgctggaaggagttcgccgaatcctccactctctttacccttggcttctatgtgggttcttggtgtacattcttctccgccgcactatgcaagtaagatcttaaaacttcttcttcaaaccgctgtttatatgatttggaaagagcgcaaccgcagagttttctcagcagatgctacctctctctccgctacaaaaattctcgttgatcgcacaatgcgtaaccgtctcatctccttctcgccggaggaatcagttaccactatctctctccttggattctactttggttgtattagtaccccactataggtgtggcaaagctcatatttatgtatgtatggtgttccattagtctctcttcacaagagctcggtgtgtttttggggtttcattgtactatgtaaaccttttttcatttggtataaatcttaacattaaaccaaaaaaaaaaaatgttgaaacctgttaacatagtctatttatactctataagtgcaaaacagggttttaacatgattaagtttcgtaggggaatataatagcggattgggattgtgtttcatatagcattgccattgggatgtagtgaatcttgtttggaataacgtatatcgattttttttttttttttgttatttgggagattttaagttctaatatgacaagattataacatttaatttaacattaaaccaaaaaaaaaagattgtaacattttctgaatttttgtaattcgttttactagtgtcaatttttttttcttttacttttaactctttcaaatatttagttattttaatgttttaaaaaaaaagactaatttgcatcaccactatctttgggttgaatatttattcaatatgttccactatgaatacgtgaattatgtgtgtgttttcatctacaattcatacacacactctgtcatgattgtgaaataagcagtaaaacaacaacaatactagaaaaaaccacactttgggacattagagttcgatgtgaatacaatactaggattttcttaatgttaatggcgatgcctctattcattcttcttcctctttcttttatagtcattcacctgtcctgcccgatccgcagtatccaccctagaatctcgttgatctcaacagttcttcagatctttttcatgccaccttgcggttagttgcttaagatacactcctcgagcttgttgatcaaccggaaggccgacggatgggtttactaaacaaacttatccgttatttcctactcgcaatacatagttcagcctgaacatatgcgtctaatggatcgggtaggccaagtaccaacatacaccccaaataaataaataaagtaaaaaatcgtggagattaaaaaagtaaaaaaggctaaaccaatagagttcttgattagtttgacgatattatttatcttatcggttaaaaccgaccggcgatcgagggtttggcttgccgagaaggaagaaaaaagaaaaccctaagatttatttctactcttcactccattatcgacttctcatcatttctctacccattgtacttctctgctcttgggttgtcatcaattcgtgaatttgatacacgcacaccctaaagagagatccacgctcgtttcaaggtaacctaaattcgaacactttcgcagtttcccttcgattcgaataaatcactgttctccgtggggaacaatgtacgccggcggcgatatgcacaggggttcacagatgccacaaccaccgatgatgcggcagtcgtcagcttcttccactaacatcaatcccgactaccaccacccatctggccccttcgaccgtaagtagactttgagcgtcttccttttatcggattagtgatgactgtgagatttaatgtctctctgtctgatgttgcagccaatgtagacagttttggggcgaaacgaatgagaaagcatacacagagaagagctgttgattacaccagcaccgttgttagatatattcaggtaatgtattcccattgctgctcacagtatttctttgttagaaccttttgtactgcttgattatatttctcttgttttctgtaaagttttagtcttggtctatatactcatagcctctgctttccccagttgaattcttcggtcctttttatctcaaaagccattagataggattgtctttatgtcatggaactgatatggatatgtagttcaacgaactcatactttatatggaactaaaagtagagagtgtttactccatatatgtttttgttcaggctcgaacatggcagcgagactcaagggataggaccactctgcaaccaaccccagctgcagcagttgatgttagatttctttgcttttctgggttttgcaataagattgaatggtttactgatctaacttgtatatcaatgcttcagatgcttcccacagttgcctattcggataatccttcaacaagctttgctgcaaagtttgttcacgcatctctaaacaagaaccgttgttcaatcaaccgtgtattggtatatccctctaccagctgtgtgttttgtattattctctgtttgccatgtttatctattcaagaaagcaacatctttctttctttgttttaactctattattccaacttaatgggatcattgctgattgggtttcttttatttagtggacaccttcaggaagacgtcttatcacgggctcccaaagtggggagtttactctttggaatgggcaatcttttaattttgaaatgattcttcaggttcgtttctcagattgtataactaatctgttgaaacttctgttttgattcttctatagttgctgctcctggtattgactgtttaaatttgttgtcaatatcaggcacatgatcaacctattaggtcgatggtatggagccacaatgaaaattatatggtttctggtgatgatggaggcacattaaagtaaatttgtttttccctttcagtccctaacttatgatgttgtaaacgagaagctcagaattctatgattcaaatgctgtgacaataaggatcaattgtttcttatgtatcaggtattggcagaacaatatgaacaatgtgaaagccaataaaactgctcacaaggaatcaattcgcgatttaaggtaaaaaaaagtttgatatgttgaattgcattaaatgaatctctcaaaactgaacaatgtgtatccaacagtttttgtaaaacagatttgaagttctgttcgtgttctgatgatacgactgttaaagtctgggattttaccaagtgcgtagatgaaagctcattaaccggtaat

SEQ ID NO: 143513 - DNA, 1193 bp, Arabidopsis thaliana landsberg
  unsure (1)..(1193): unsure at all n locations
atgaagtttgggaaagattttgttaggcagatgattccagaatggcaacaagcttacatggattatgctggtctcaaatctattcttcaagaaatccaaacttcacggaaaagatcagagagaccaggtatcttgaaacgcaagctatctggtagccgcaacttcagcggcctgacaaagcggtatagccgcaccgcctcgactcgggaaccagaaattcaggacattctggtgcacgcaactactggggatgatgggtttgagagatacgagacaaccatcttggaagttgcagaggcgttgagtttgtcagagcttgcgttctttaaaaccctagatcttgaattcgataaagttaaccatttttaccggtctaaagtggaggaaatggtgaaggaggcagtggttttgaacaaacaaatggatgctctcattgctttcagaatcaaagttgagcgaccttcttcttcgtggagctgctctgaaacagtttcagtggatatgaatgccttagattctaatgaccagagtaagttgtcagatattttttgttactaagtttagctgaaatgacacaaagtttaaaatcttttgtgtttatttttgaagggaatacattagctgaggagatgggaatcagagtagagggaaatggatccaacggtggagattcaacgaaagagagtgtaccacaagtgttaagtgttcttgaacgtatcagattaaacaaaactcaggaaactcctctctccacaattaaaaacgtcctcaagctctctaaccaagaagagctcaaattcactagagagaatctcaagaaaatagaagaacggcttaagaatgtcttcatcgagttttatcgcaagcttcnnnnnnnnnnnnnnnnnnnnnnnnnnnnnnnnttaagaatatatgaaaaagttaaaaaaaaaaaagattgtttgattaaatccatgctttgttcttgatttattcagcttcttgaacactttggctatttccaagatcatgaaaaagtatgataaggtaactcttgatttaatcagatatatacaatattattttctttagacttaataatatgtttttgctgaatattttctatgatcagattgcttcaagaagtgcagcaaaaccatacatggagatggttgataagtcctacctcactagctctgatgaggttactacac

SEQ ID NO: 143514 - DNA, 370 bp, Arabidopsis thaliana landsberg
aaaatgaagatccaaatactctgtttcaccactctgttcttagctatcttcacctctcaagtcaccactgcttacaaattcaaattcgattactttggtaacggcaccgatccaatatcattccatggagacgctgagtatggtcctgacactgatggcaagagccggtccggagccatcgcattgactcgagacaacattcctttctctcatggtcgagccattttcaccactccaatcactttcaagcctaatgcttcagctctttacccttttaaaacctctttcactttctccattactcctaaaacaaaccctaatcaaggtcatggccttgctttcatcgtcgtcccaagtaaccaaggggatt

SEQ ID NO: 143515 - DNA, 1211 bp, Arabidopsis thaliana landsberg
taacttactctcctgctgcagatcactgaatgttgataacctgattacactaacctgtgtgttttggttattttttctttcagctactcagaaaactgttgatgggccatcaatgaaggactggagaggaggtcggggcgctagtcaaaacatcattcctagctcaaccggcgccgcgaaggtacacaaaaactcacatggttatcgcaagcatgtaattatcctaaattgggaatcatatctgagctgtggttttttgatcaagtaggctgtaggtaaagttcttccagaactgaatgggaaacttactgggaatggccttccgtgtaccaacatcgaatgtttctgtggtggatttaacttgtcgacttgagaagggtgcctcttacgaagatgttaaggcagccattaagtatgcttcctaaaattttattgcccgaccagatatcgtcatcgaaacattatcgtttaatgtagaactcttaatacctctcatggtttaatgtaaacctctaacaggcatgcctttaaggaccttttaaaggcattctcgggtacacagatgaatatgtcgtctccaatgatttcgtcggtgattcaaggttggtctctctccttttcttcatagtcatctgaatctttttttgtggttgaccaatgtggtgattccaatttggttataacaggtccagtatctttgacgccaatgctggtattggattgagcaagtcctttgtgaaacttgtctcttggtacgacaacgaatggggttacaggtacacttttgtttctcatcttatatttctcatcctagctaacagttctaacacttacaaatcttctcccattttacttacagcaaccgagttcttgaccttatagagcacatggctttggtagctgccagccactaaatacacacaccagttcttgcagaagcttgagtctttctgctttttgcgtaacctgctctacaaagccggtttggatttgttcggttcaattaggtgccactgtgctaggtgttttgaaatatttggcttgaatctcgagcctttactctatttttgttctgttccagtatcagcaaccatggaaactagatttggtccaaaagactgaaaaactgtgcgacttacatctatgaataaggggctaagctagttgtactttacgaaaaatagcttaccagtataagcaacgtttggata

SEQ ID NO: 143516 - DNA, 2105 bp, Arabidopsis thaliana landsberg
aactttcggttgaaggttctgttgagccttctcgctgtaattttagtgcttgtgctgtcgggaacagagttgttctgtttggaggagaaggtgtgaatatgcagcctatgaatgatacctttgttttagatctgaattctgattaccctgaatggcaacatgtcaaagtgagctcccctcctccaggacgctggggccacacgctcacttgtgtaaatggctccaatctggttgtatttggtggctgtggtcagcaaggtttgctgaacgatgtgtttgtcttgaatctcgatgctaagccgcctacttggagggaaatttcgggtttggctccgcctctaccaagatcatggcacagctcatgcacccttgacggaaccaaactgatagtctctggaggctgtgcagattccggcgttcttctaagtgacacgttcctcctcgacctttcaatagagaaaccagtgtggagagagattccagctgcctggactccgccttcccggttaggccacacactatcggtttatggaggaagaaagatcttgatgtttggtggtcttgctaagagcgggcctttgaaattccgttcgagtgatgtcttcacaatggatctaagcgaagaggagccttgttggaggtgtgtgaccggtagcggaatgcctggagcaggaaacccaggaggagtagcaccaccaccaaggctagatcacgttgcagttaacctccctggaggcagaatcttgatatttggcggctcagtggcagggcttcactcagcgtctcagctttatctacttgacccaacggaggacaaaccgacttggagaatactaaacattccaggaagaccgcctcggtttgcttggggacatggcacttgtgttgtgggaggaacacgagcgatagtgctaggtggtcagaccggagaagaatggatgctaagtgagctacacgaattatcactagcgagctatctcacgtaaccaaagagagcctatgtatgaaagagaacccagccatagaagaagatgaaaaagggttctcggttaggatactggagctttaggggagagcgactcagtggtgggactttggtactgctcatattttttaagtccttcttcttctttcttcctcattaggaggacttttagtgcttatataatatatatagtgaaaatgtcatctctctctttctctctgtagtgcttgtttctgttgttctctttgaagtttgagaagtgcatttgtgttcatattctgtaaattttatttatgattacaaactttaataagatcctttctcttcttatgctattggaccactattttcatttccaatttcatacttttagttcggagacaaaatgagattattattatttttccattgagtatgatgaatataagaaaattggaaaaatagaggataaaaccccaaattttcattttaatagaaaaaattggggaagaaaatttacagtgttgaaattggttaaaccctgacactagcaccttcctcagtcgcatcaccaccatgtcagagcgcgaccgccgcgaacgagagagggataaggaccgtgaaccagaccgtgatagacgccgaggtagagacgaccgtgaccgtgaccgtgatcgagaccgggaaagagatagagagcgcgaccgtgaccgagggcttagaaacaaaaaatcccgatctcgtactccagaccaccacgctcgtgctcgccacgtgcgctctccggagaggtatcgctctcgttcccgctcgattgaccgtgaccgggaccgggaccgtcaacgacaccacaggcgcaggtctccttctccagatgctccgtcgcgaaaacggcctcgccagggttcagtagacgatgagaaagaaaggaatcgcaaaagagtagtgactgattccgttgacgagaatgcgtctactattactaagaagaaggataaacaaccaagtgatgctgctgataatggcggagcgaagatgaagaaggaatggatgtgaatgagattgagatgatgaagatgttagggatcttattggatttgattcacaaaagggaaacagttgctgtgcatgatgtagtgga

SEQ ID NO: 143517 - DNA, 2385 bp, Arabidopsis thaliana landsberg; identical to SEQ ID NO: 32925

SEQ ID NO: 143518 - DNA, 848 bp, Arabidopsis thaliana landsberg
cgagaatatatctcttcttttataagcaatggctccaaaacaggcgaacggtagaagcattgccgtgagtgaaggcggcggagggaagacgatgacgatgacgacgatgcggaaggaagtgcactttagaggtgtgaggaagcgtccatggggtagatacgcggcggagatccgtgacccgggaaagaaaacccgggtttggctcgggacattcgacacggcggaggaagcttgaagagcttacgacaccgccgctagagagtttcgtggctccaaagcaaagactaatttccctcttcccggagagtctactacggttaacgacggtggcgagaacgattcttacgtcaaccgtacgacggtgacgacggcgcgtgagatgacgcgtcagagatttccgtttgcatgtcaccgggagcgtaaagtcgtcggtggttatgcttctgctggttttttcttcgatccgtcaagagctgcttcgttaagagcagagctttctcgggtttgtccggttcggtttgatccggttaatatcgagttgagtattggtattggagaaaccgtaaaagttgaaccgagaagagaactaaacctggatcttaacctagctccaccggtggtggacgtttagatttttttcttcttttcataatttgtattttacattgccggaaaataattaatgttttctttagtagatgagaaaaagaaaaatctcctatgtttttggctaagtaagaggaattttttttcccaaatatcctaccgttccctaattatgtggatgtaattaattaaaaatcaaatatctccttttgatcttttttgttctacctttgaagtttttt

SEQ ID NO: 143519 - DNA, 1397 bp, Arabidopsis thaliana landsberg
attagctatgagattatgaaagtgaagatataaaacaaacacctaaaagtgaaaagtacaagacaccaaatccttcattttcatctcttacacaaccacactaagttaccaaaaaacagaatctgttctttttttgccttcttgcagatttcttcagagtcaaagacacataaaggttcgatttttatctcttaaaatcttcaaagttttcgtttttcttttcaatttcgttgaatttgattctgggttttgttctctgttagtaactgaatctatgtcagctttagataattctagttagggacttatggttctcaatttcgagtcttttgatgttatcttgttgttttaacggatttgaatctaaaatcttggtctccattgattcagatttataattgagttgtgagttttggaggccatggacgtaggagagagcaatgagagggtaaaagacgattctgcccttcaagcttcaccgaggagtcctctgagttctatagatcttgcaattgatggagctatgaatgcttctattgagcagttgtatcataacgtttgtaaaatggagagttctgatgatcagtctccgtccagggcgagttttatttcgtatggagctgaatctaggattgatttggagctgaggcatttggttggagatgtaggagaagaaggagagagcaagaaagagattatcttggagaagaaggaagaaagtaatggagaaggtagcttgagtcagaagaaacctctttcgaatggtaagaaggttgcgaaaacgagtcctaataatccgaagatgccgggttcgaggatctcttcgaggaaatcgccggatttggggaaggtttctgttgatgaggagagtcctgagcttggtgtggtgttgttgaagcaagctagagagttggtttcttcaggtgagaatctgaacaaggctcttgatttagcgttgagagcggtgaaagtgtttgagaaatgtggggaaggagagaaacaacttgggttgaatttggtgatgtctttgcatatcttggcagcgatatatgcagggttagggagatacaacgacgctgtgcctgttcttgaacgttctatcgagataccgatgattgaagatggtgaggatcacgcgttggcgaaatttgcagggtgtatgcagcttggtgacatgtatggtttgatgggtcaggttgaaaattcgattttgctatacaccgcgggtttggagatccaaagacaagttcttggagaatcggatgcacgagttggcgaaacttgtaggtacttagcagaagctcatgttcaagcaatgcagtttgaagaagcctcaaggctttgtcaaatggcattggacattcacaaagaaaatggggctgctactacggcttcta

SEQ ID NO: 143520 - DNA, 1197 bp, Arabidopsis thaliana landsberg; identical to SEQ ID NO: 14079

SEQ ID NO: 143521 - DNA, 1464 bp, Arabidopsis thaliana landsberg
tattattcatataatcgcactctcctctcgttcctcatcctcatcgccttgaagctctctcaccttcttcttcttcttcttcttcttctccggatctcgcttctccgtcaacgactccgatcaacctaccaggttcatctttctctctcccgtcccgtcagtgatctattacttcgatttggtttcttcttccaaatctcgcatttcctttttcgccttttaggtttccttgattcgttcgaatttcgtccctctatagctcaaatatggtttcttcttcttgttatggatttgatttcaactgctaatgctttctttgtcgccgcgaatttgcgttttcaccttattcgattcagaattgatctccggagattgttgtatcgtctttgattttctgattcgttcttgcaatggatccattacgtttgtgatatcaacgatgtagtagtaataatagtcgtctctgtggaaatctatgttgaagaatctccatctttgacattggagctcaaatcaccattgatattagatatagatgttaagagaagattattgtgtttacttatctcatttttttgtgaaaactgtaggataactttgtgttgagaagatgtctagtgcatccaagatgaaatcgagagacaagaaggtcatgaatgattcacagaagacacctagtaaagcgtctggatccatgggtggaagtagtgttgtggttggtggttataatccacttttggggacatttcaaaccattgagtcgctttcagcaactggctcatcatctcttcacaataatggccggttcagacacattgatgagtcggattcaactggagctgactgtgattctgtctctaataatggtagctggtcaggtgaatctgaagatcacaaagagaaagtacctagtactagtattgctgcaaaacaagaaatcattcctggagctgacaatgacaagcgagataagatgcgtctgaagaatgaaagaaagcatcagcgtcaaaaggaaaagcgagctcaggagttgcatgagcgatgctgtcagtatctcatgtcgagaaaacttgaagttcatgctcagctgattatatctatggggattcctcatgagcgggcaacttatgctcttatgttgaatgaagggaaaatagaggaatctattaattggctgcttgatgatggtggggcaaaagtagcagataagaaactagatccgacctctgggaacttaaagcttgacatatcacaagagttgggtagaatcttagagttggaaacaaaatataagtgcaccaagcaggatgtagaacgagctgtggttacagcagagggggacattgagaaagcagaagaagcattaagaagacagaagcaagaccaatctactgcgtctagaaaaccagaggatattagtgatagtacttctgttacaatagcaaagaccctttgtgctcacag

SEQ ID NO: 143522 - DNA, 1980 bp, Arabidopsis thaliana landsberg
tgtcgagatcaaagacatctcaccagccatggtaacatttttatagcgctctgaaatcctagattgagttgtactatttgttgattttcttatctgagttcttaacatgttcattttcctgcattgtgcaggacaagtatcgtcctagtgttaatgacaataagaaatgtagtgatagaaagggtgaccctttacctaacaggcttgagtttgatgcttcagatcccagcagttttgtcgcccctttggataatatagaaggaactgtctggcaatacgtccctggcatcaaagatactttgtacccacaccaacaagaagggtttgaatttatttggaagaatttagctgggacaacaaaaattaatgagttgaacagcgtaggggttaagggaagtggcggatgcattatttcgcataaggctggaactggtaagacacgtttgaccgtcgtttttcttcagtcatacttaaaacggtttccaaatagccatcctatggtcatagctcctgcaactctaatgcgtacttgggaagacgaagtcaggaaatggaacgtaaacattccattttataacatgaatagtctgcagttatcagggtatgaggatgctgaagctgtctcacgtttagagggaaataggcatcataattccatccgtatggttaagctagtttcgtggtggaagcagaaaagcattcttggaattagctaccctctgtatgagaagctcgcggcaaataagaacactgaaggaatgcaagtgtttaggaggatgttggtagaattgccggggttgctggtccttgacgagggccacaccccgagaaaccagagtagtctcatttggaaagtgcttactgaagtcagaacagaaaagcgtatctttctttcagggacactgttccagaataatttcaaggaactttctaacgtcttatgcctggcaagaccagctgataaagatacgatttcttcgaggatacatgaacttagcaaggtgtagccaagaaggagaacacggaagggtgaatgaggaaaacagaattgtggatcttaaggctatgattgctcattttgtgcatgtccatgaaggaaccatccttcaagaaagccttccaggtctaagagactgtgttgtcgtgttgaacccgccttttcaacagaagaaaattcttgacagaattgacacttctcaaaacacatttgaatttgagcacaagctttcagctgtttcagtacacccatctctgtatttgtgctgcaatccgaccaagaaggaagacttggttattgggccagcaacattaggaactctcaagaggcttagacttaaatacgaggaaggtgtgaaaacaaagttccttatcgacttcatccgcatcagtggaaccgtgaaagagaaagtgttggtgtatagccaatatattgacactctgaagctgatcatggagcagctcactgcagaatgtgactggactgaaggggaacaaattctctttatgcatggtaaagttgaacaaagagacaggcagcatatgatcgacaacttcaacaaaccagacagtggatctaaagttctactggcatcaacaaaagcatgttctgagggtatcagtcttgttggcgcttcaagagttgtgattcttgatgttgtttggaacccttctgttgaaagccaagccataagtcgagctttcagaattggtcaaaagcgtgctgtgttcatttaccatctcatggtcaaagacacatctgagtggaacaagtactgtaagcaaagtgagaaacatcgcatatccgaactggtcttctcttctaccaatgagaaggacaagccgattaacaacgaagttgtttccaaagatagaatcctcgacgagatggttcggcacgagaagctgaaacacatatttgagaagatactttatcacccaaagaaatctgacatgaataccagcttcttctgattgaaatat

SEQ ID NO: 143523 - DNA, 965 bp, Arabidopsis thaliana landsberg
tcgaggagctgcaacagattgagcaacagctttgatgttaagtgtcaaatgtattcgagcaagaagggggggggtatatatttatctggtatatctccacattataagtattggtcgaatcatcttctgaaaccactcataattataactcaatttctcatctcttttagactcaagggtttaaaggacaaaatgggccgctcaagcaaaagggaaagtaccttttatgagtgtatataaacagatattagtatgtatgcaaattgtgtaatattccaagtaagtaagcctcttgggcttgctttttacaaattggaatctaaaacttttgcaggagaaagctttatctgcagaaaacgagaagctctctgaaaaggtataatatattcttatgggtctcaagttagggttgcacattcgtttttttattcggtaaagataagaaagttggggttctttttgggggttattaggttaggagagtccttactagtttttcttggttatcttcaatcatcaaccttctttaatttatgtattgttctatatatcttctaatttgcatctattaattttgtgtaataattctatttgaatgcagtggggatctcatgaaagcgaagtttggtcaaataagaatcaagaaagtactggaagaggtgatgaagagagtagcccaagttctgaagtagagacgcaattgttcattgggttaccttgttcttcaagaaagtgatctccactcaacaaaaaaaacaaaaaaacaaactaagtaaaaacaggtttagcagtactgagagtgtataaggacaagtaacaaaactctaaagctgcttctctcttgttgtcttatttctctctcactctctctctctcagtcacttctttaatgattctgaactgcttgtgttatgtatctatgttcttacacttgcctctctagaatgtaattttgattatgtttt

SEQ ID NO: 143524 - DNA, 1069 bp, Arabidopsis thaliana landsberg
cgattttcatggaattaggatctgattcacgccattttaagcacatttggcccaaagatttcgcggtacacatcctgttttctcagagtaacttattcgctttatgttgatcttatctgcgagcttttttattcgattgcgatgcagaaagggagaggagcgatgccattgatgctacggaagctgaggtattctattaaaagtaaaaccgcaagaataaattggaattatcatttggtatcgtaactccttcactagatactggtgtatgactgtaacagctatgatcttctgatttcaaagattcaaaatgttcaaaaaagggaggaagattactatttctgatgctaaattatgcatttgcaatatgtgcaggttgctctgggaacaaccaagaagaacagacttgcttctggttcgtttatacactgttgcttagtttgtcatgttaattggtagatgagacatgaatatttatggtttattggttcttgtagcaaacgcaaatgctttaaaactcagctgtgaacttctcaagagttttgtctcaggtcaagttttgcattttagaaactacttagttttctctttaagtcatgttgtatctataagctatcttaaggattttatcggcattggcagaggctgtgcagcgcgctgctataatcgctgaagctgagggaatggaaaagattgaagctactcatttagagaggattcttccccagcttcttctggacttttaaggtatgattgaaaatagcacatgcttgtccctgcatctttctttttatccttatgaactaatgaaagtgaaatctcttttcttttgcttctctgtctaaaaatacataaacgcttagatcatggtatgtgttcttgtagtgatatgttatttgatcttttcttttgtagacatatgtgaagattataacagggattattccacacaagttattctgaagatcatactactggtttgtttattataggctaggctaatgtggtaatatatggttcatacttcatatagaacgaaatagatatatttgactttattctggatata

SEQ ID NO: 143525 - DNA, 1077 bp, Arabidopsis thaliana landsberg; identical to SEQ ID NO: 9391

SEQ ID NO: 143526 - DNA, 722 bp, Arabidopsis thaliana landsberg
atcacagaacatgtcaaagacaaacctttctggtcagacataagagatctattgaaagaagctaagatggtgataaagattccgtctttccaaatctttgtcgctcagggagtttcgggttctttcccttggtcagctctggcttttgcaccattgtggctagaactcattggtttctcccacaaaaaaactgcggttctcgtgactcttttcaccatttcttgctctcttggaggtttgtttggaggatacatgggagatactctcgccaagaagttcccaaatggcggtaggattttcctctctcaggtaagctctggctcggcaattcctttagctgcaattttgcttatcggattacctgatgatccctccacggcctttagccatggcctggttcttgtcatcatgggattatgcatctcatggaacggtgcagctacaaacgggtaagtttaatacttatatttcaatcatattcaaaatattttggcttttctttacttccggaagcatctacttgaaatggttttatacagtccaatatttgcagagattgttcctgagagagcgcgaacgagcatctacgcgttagacagatcattcgagtcgattctagcttcttttgctcctcctatagtagggatgcttgctcagaatatctatggatataaaccaatccctgaaggatccacaagctcggtcaagataaaaacagatag

SEQ ID NO: 143527 - DNA, 453 bp, Arabidopsis thaliana landsberg
attagagaaatattggaggattattgcaaggaaatggtgaaactatgcgagaacttgatgaaaatcttatccaaaaacttgggattacaagaagacagacttcaaaatgcatttggtggtaaagaggaatcaggtggatgtttaagggttaattattacccaaaatgccctcaaccggagctgactctcggtatctctccgcactctgatcccggcggtttgaccattctcttgccggacgaacaagtcgccagtcttcaggtccgtggatccgacgacgcttggatcacagtcgaaccagctcctcatgctttcatcgttaacatgggtgaccaaattcaggtgactgttttattttccatataccaattacttttttatatatataaaacttcaaaactttaaactaaacttcaaacgaaaaagtcggacacttttgttgtttgttaaact

SEQ ID NO: 143528 - DNA, 2210 bp, Arabidopsis thaliana landsberg; identical to SEQ ID NO: 32479

SEQ ID NO: 143529 - DNA, 838 bp, Arabidopsis thaliana landsberg
atctgaagaagaaaagagagtcaacaaaaaaagaaaaccaatggaagaagaagatcctacagcaagcaatgtgataacgaattcgaattcttcatctatgagaaacctatcgccggcgatgaatactccggtgtttcacttgagtcacgaatcaatcgattaatcaatgctaatcaatctcaatcaccatcaccatcatcactatcaaggtctatatactctgatagatttatccccagtagatccggatccaatttcgctcttttcgatctatctccttctcctagtaaagatggtaaggaagatggagctggctcttacgctactctgttgcgtgcggcgatgtttggtcctgagacgccggagaagagagatattactgggttttcttcttccaggaatatttttaggtttaagacggagactcatcggtctttgaattcgttttctccttttggtgttgatgatgattctcctggtgtttctcatagtggtcctgttaaagctcccaggaaagtgccgcgatcgccgtataaggtgacgatttttgattctggggttgatacattgtttagattttggtgttttgatcattgaatctggatcatgtcttgtgttttttaagtgggttgtgtgcattgtgtggaattgattgtttttttcttcgatgggtttttgtgtaatgtctgtagatttgggggttggggagcttagattcttgatctcgttgactttagatctttggtttcgataatgcatgaaacaatttgtgatctttgtgatgttttggtctctgagggtctagaatttgagtctgaggttatgtgatcttagatga

SEQ ID NO: 143530 - DNA, 3338 bp, Arabidopsis thaliana landsberg
ttttttttgtgggagttcacttcctttttctttctgtcaatagataaacggaatggagcagaagttttatttaatgaaatcacaagaacatcgaaagtaaaatctcttggtttggtaacaaaaatatgtaggaagttggtgcgaagatatataaaaaaaaatatagttcagaaatttattggctgtcatgggtggatgaggtaataacgcaaaaggtcgtggactcacgaggttggttaaaattaaaaacaactgcaacatttattttttaaaacgtttttttgtaacatgaaatctctatgaagattgggtagaatgcatttaccgcgtttcatgtgggacgacgtcttcttattatatcccttcgcaactaaatcctctcttccatattttctttcaacactttatcatgaatattgaatacacacacacactcatatgatttttcttatcgtattatttaaagtcattaagtgaacacaaatatatcgtaaagaaaacatctaattatgttagggtttctttcgaattagttcgttaaatatgtctaaactaaagtttatatggtatactaaaccgacgcatcttcttctgattgaaccgacgtatttttttaacttttaactgtcttccataacttcccattttcttctccaccactctctctctctctctcgctcgcatatatatacgtcactttttctctgatctcataacactgttccgagagtgaggagtagaataccttaataccggtttaatcaaaccggttcagtttccaaatggataatctactctgcgaagaatcttggcccgcgagtcctttaaccccggagcctttaccaaacttccgtcaccgttctcacgacaatgacgtcgtgaagatgtatccagagatagacgcagcgacgatggaggaagccattgctatggacttagagaaagaattatgttttaacaatcatggagacaagtttgttgagtttttcgtctcaaagaagttaaccgattataggttccatgcgtttcaatggctaatccaggtaccttaattattattatctctttgtttgtcctatgtgtgatatttgatagtaaaccgcaaaaatttgtagatacttataacaacctataaaatctttcaagatagcctttaaaatttgggtttacgaaaaagttttttgcatcaaaattaattatcgatattataaaaatatttggtatgtattattttttattttttaacatcatattgttttataaacgaaaagttaatttttggttttactttctcagactcggagtcggctaaatctttcatatgaaacggtattttccgcggctaattgttttgatcggttcgtctacatgacttgctgtgacgtaagtatacataagcaaacacaattacttaatgtgataaaaactttataattgcggttgaattaatgacatgttcattataaataaatgcaggaatggacgaattggatggtggaactagttccggtaacttcattatcgatcgcatcaaagttcaatgaagttaccactccattactcgaagaacttgaaatgaaaggtgtaactcatatgtttcacgttaatacagttgctcagatggaactcataattttgaaagctctcgaatggcgtgtgaacgcggttacgagttatactttttcgcaaacccttgtgtcgaagatcggtatggttggggatcatatgatcatgaatcgaattacaaatcatctgcttgatgatttattgtgagaccccttcccggacgtctcggcgtccggcaacgttgtactcaagtttgcgtctcttcccggccgaacctcttaatttttcgcgattcaacatagaattgcctttacgaggctaaattctataatcgctctcttattacacagcggaagtctttctaaccttggtttaattctaaccaattcttgtaccggtttcatcgtctttgttccttagacttagatcgatcctttactcggtcaagacatgcatatgttcgctaaccattctaagccaaacaatcgcatattcctttatcctactttcacggtcaattaccaaacgtctatcttaactaataagctagatcgttacataccttggtcaatatgcggatttgattccttagcccgtttgtcgccttactccattcgttcaacgactcgtcatcggtcgtgaattgatgaaccaatccctatcgttacttagccatacaaccaaccaaccccactggtctaagtacaacgatagagattggggatcgtacgattcccttggttcacgatggccgaatcaagctcttggcttattggtccattcgttctccaaacgtacgcccctccggctacatggtggacgattgagccctcggcttatcgaaccatccatgtttccgttccggtcgtttaacactacgaccgcccacggtttactaaccgtttacccgtccggtccatggtggtcgataaagctttcggcttaatgatccatccatgcggtccgaacgatatccttatcacacccaagggtccgtggattcatccactggatcatcgtaggctagcccatgaaatctttcttccgtcggccttaggtttgctcgcgggtccaacatccgttttgtccatcggttcccaccgtggactttcctgttggttatccgtcgagtcaccctttggtcttaccgatctctaatcggtttcaccatggctgaagagatagatacatgaaggcggccacgatgttgatcctatatggtgaatcacgttccttacccattcttggtgctttctccctttatcggtaagattgcatccatgggcgacccttgggtgtgttcggatgcacttatccttgtgcttcctcgaacacttttctcgatccatcccatccgacgatcggtctgtccgacccgttccgtcagacgatcggcctgtcccatccgacccgtccgacgatcggtctgtccgatccgtctggccgatccgatccgtctgacgatcggtctggccgatccgatccaaggatcggtctaccagatccgattcgtctctaagacgaacggtctaccctctccatcctctacactccatcgaaccgttggaccgggaggtagcatgcgcatcagttcggtcgagttatactcgccgagccgcaccccctttccgaccaacaactctaggatgtgttgggactcctttaagaatgttttatggtgttttggatgttgtgagatgatgtgagattccttgggcgtcctcccttatatagggggcgaatggatgcttcccgaaaggtcacatccgttc

SEQ ID NO: 143531 - DNA, 1347 bp, Arabidopsis thaliana landsberg
ggtttgctattatagatactatattcctttatatatacatgtccttgtatgtaatcttgcttgatttgtggcgtattatgcgctcttgtgaagcaatccacattggaaaggccactattgaagatctccctcctctatttccaaagctgaaggcacttactgcaacatttaaggaagacgaaatcaagggtatgctaggggaattgggttctgatacaagcactgatgtgagttttgaagagtttctcaaggtatatggagcttctacgtttcattggggaatcgaggattggactgagtatgaatgtgatatgtatataatgtagttttggattgatccttatgtgcagatatatctcaacttactaagtaaagcagctgagaaatctggtggtcatcataagaactcatcctcgtttctgaaagcttgtacaacgacacttcttcacactatatatcagtcggagaagggtccttttgttcagcacatcaatagatatctaggggatgacccctttttgaagcagttccttcctcttgaccctcattctaatcaattgtatgaacttgtgaaagatggtgtccttctatggtaaggtgcactagagtccatctctacacagaatgcatctgatttctgcctttcacgtgtttctctccctttatttccggcgtagtaagcttataaatgtagctgttcccgggacaattgatgaacgagcgatcaacactaagagggtacttaatccgtgggagagaaatgagaatcacacgctttgtctcaactctgctaaagctgttggatgctctgttgttaatattggcacacaagacctggccgaaggacgggtatgttttctctgcttagtattcagtgtacgtttgaaaatatttcaacacacatcaataagtgtaattatgtgcaccgttctgaccagtgagcttttatgatgttttgcagcctcacctggtgctcggattgatttcacaactcataaaggtccgcacacatccacttgtccgctctgtatatcttagttttattttttttgtgttaaccaaataatgttggaaactgcagattcaactacttgctgatctcaatttaaagaagacgcctcagcttgttgagttgcttgaggacagcgatgtaagtgagctataccaatcacattttcagccatttaattgctcttgtactataatataacaagtttctctctgttgcaggatgtcgaggagttgctgagattaccccctgagaaagtcttactgaaatggatgaacttccatcttaagaaagggggttacaagaaaaccgtctcaaacttttccgcagatttgaag

SEQ ID NO: 143532 - DNA, 5322 bp, Arabidopsis thaliana landsberg
tcagacagagaggaagaagatgaagcggacggtgatggacaacgcgattcgatcatcggtggtggtgttgggatcattggcctttggttacttgtcactggagcttggttacaagcctttccttgaaaaggctgaacaatacgaaagatctcttcagtcttctcaacaacatcaacaacaaggtcttgtgttatctctctctctctcaatcgcttgctcttaattgttctgcttctgtttcatttcagaagagatagatttatgctgtgagcgattgatggattatctatttgactttggaagttaccaatgtgtctcgaccaatatcatgatgcgttagagatttttgtgaagatgctaatctggttttaccgttttagtaattcaaaacctgtctttgttcggattcaagttaaagttttcgagaattggcactagtacaatagaaagtttcaatctttttactctacagtcctgagatcttgcttcaggttccgattggttacaatgtatgattgcagaaataaatttatggagtggattggtaggaatcatttatggagaaaaatcgcataatgctagaacataaattgtgattcacgtaaatgtgtgattagtgaaaacatgagttgcagggtgctgatacgagaagatgattggccgtttagagtttctctgaactgaaaactctttctctttcagtttgttactaaatagtgtgttttcttggatcaatgagcattgagccctttatgttcttagtcattgcataatccatgatagaactttgagtgttcgctatgtttttcttactctctatcttgtggatgaacccttatgttcttagtcgttgcggaatccatagtcttaaaagttctaacttacagaactttgagtgtttattaatgttgttcttactatctgatcttgtagatgaacaagaagaagcgaggtgggacaatagcaatgtcgaggggtgggaggagaaaaggtagtcttataatcggtttcaattcagacatatcaaagtgtgtaaggaagaagaaccttatcaaaattttcttcttaatcaaccgtaagttcaatctgttaactatcaaccatggcctgtttttatcaatcactcaaaatcatatctcagtatagtaccgattgccttaatcagtttgaagttacaaaacactagtgtttaagaaccatcctttataaacaacctaaaacaatctctggtctgtaagaaaatggcttcactgatgcaaaccttgaacaatcgtgagctccattaccagatgcaaatcacaaacaaaggccattgtgactgctctctcaatcaaagttcattggctgaagttgaactgtggctggaagcacaagaggaagcaacaacgtatctgagatccatcctctcttacactgctactagtacttggttttagagtcggaccaaatcattaaacaaatttctcttgacattatttaaacaaagcgttttaacgaccttgggagtctaatatgacaattaaaggtactaatttgatcttgaccggtacgcaaccttttctcggttctcactctctgactttcattgaatcttgtccctagacaaataacatgtgatgtgttcatgctaatctccggcatggacggctttaagtcggactctcgtccttcattaatctaattactcttctttactcattagaatattcctccatctaattactcatcagtcacatatacacatttttggactaaaacgctattttcggtgcatgaaccaaacgccttaaccgttttaatgcgcactaaaaagtaactaaaagctacgccgtctttagccccactaattttgtcacgcgccatgatcgcgcgtgtgacaagtttggatctacgggacccgccacttaaaaggaccccacgattcacactctccaagtctctccctttacgaaacaagacggtcaagaaaaaagttgagactcttctcttttagattttgaaaccgaaaatcttaagctaattacacctttggatttgtatttgttcgctaatacatatactagtttgacgaatctaatataccaagtaaagctgtctctttcagcttacttttttctactcagatattaataaagttagcaacttctgaagcttcttcttaaaacctcaaagatgtcgaagaacccatctcaggaagaagatgaagccatgccaatctctgaagtagtaataaagagattcaagcgtttaaggctcgtgttcgagccatcactaggagtcttgggttttttcttggtgggtttgtgtttagtcttcagcttcttctacctcgattacagaaccgtggctaaaactaaaagtcatgacttttcggatcaatcggagagattcctttggctcaaggagctcgatgggtttgaagttaacaacaccaaagttgggtttcttgaagagagtgggaatggttgtgatttgttcaatgggaaatgggtttgggacgaatcgtatcccttgtatcagtctaaagattgtacctttattgatgaaggattcagatgcactgagtttgggagacctgatttgttctatactaagtggagatggcaacctaaccattgtgatttgcccaggtaaatgtttcattttctctctttgtttgatgttctgggattagaaatgttatgtttaggaaatattgtatggcatgagtagagtaagttaggaggaagaactttagaaccatatgtgttacttttgaattcagttacttaaagcttactcatttttgttatggaatgtatcagatttgatgctaagttgatgttggagaagctaaggaacaagcggctagtgtttgtaggagactcaattggaagaaaccaatgggagtctcttctttgtatgctagcttctgcaatcagtaacaagaatttggtttatgaagtgaacaatagacccatcacaaagcacatgggcttctttgtgttcaggtttcatgactacaattgcactgttgaatactatagagcaccgtttttggttcttcaaagccggccacctgaaggatcaccagagaaggtaaagaccactcttaagctagagacgatggaatggactgctgataagtggagagatgcggatatattagtgtttaacacgggtcattggtggaactatgagaaaactattcgcgggttagcttctttcttccccttaacattctaaatattaatcagattggtttggttccttgactgaacttgaatttgttactgcagaggttgttactttcaagaaggagaaaaagtaagaatgagaatgaagatagagcatgcgtatagacgagctatgaagactgtaatgaaatggatacaagaagaggttgatgcaaacaagacacaggttttctttcggacatttgcccctgtgcatttcaggttggtcacacatatctccaaaacaagaatcttcgatgaatcttaaagctccttttaattgatgttttcttgtattcaggggaggagattggagaactggaggaacatgtcatatggagacactgcctgattttggagcttctctggttccagcagagacatgggatcatataaagctccttcaagatgtcttgtcttcgtctctttactactcgaacatatcagagacggttaaactgaaagtgttgaacataacagccatggctgctcaaagaaacgatggtcacccatcactgtactacctgggcttggctggtcctgcgccattccacaggcaagactgcagccattggtgtctccctggagttcctgattcgtggaatgagcttctttatgcattgtttctaaagcatgaaggctattcaagtccaagatcaaacaatagcgatacagacaactttacataacatcttttggtaaagtagatggttcttgctctctagaggctgggctcaagattttgattgagtgattaggttaattgggtggggaatatgtaattacttgttaggttaagcaacttttgttgtaaagatattagttttggatctctgttctcaagaaatattggaaatttaaaagtgttttggtatacaatgattatgtaacacttccagcactatattctgcttttgattataagacacaactccatatatgcatgatcatcgtagtctggtactttgtttggtcttcaacgtgaaaagccggcactgtgatgatgatgatgatgatggtaaggaatagaggctatgggaggacgatgatgatgaagaagaagaaaagtgccataattggcgccggcgacatgagacttcttcgactctaaaacatcttgtgtgacggttatacccttttccacgtcaactagtttggtctgcatctcatcgtgatcggtgcaaccgttgacggcgtagacgacacaacatgcgagaagcgcaacaacacaagggatggttataagaagaacataaatattttccattatgatactgtttctgtgtttttcttttggcgtctaagaaaaagtaggtctaaagaaaattagagaatgttaatacttaatagagttactaaacaaacgctagcttataattaaattcgagttttttcattaccatttttggacagtaaataagatgaaatttaattggaaatgtgtttagctaatccaaagaatcttagattggtcaaagtaatttaataatatttaaatagttttgattgcgtgattagattaatttggtagggggatacgtaaattactaattaggatgtaaagataaaatatcatcaaagatttgagtgaacacatcaagaggatgagaaggcggtgggatgatgatgataattaggacgagaggctatgggatgacgatgatgatgaagaggaagaaaagtggcataagtagaaacataagatgttgattccactacaaacaacaaagatcctcgtgttgcagcaacacaacttgttataattagttactagcttcttaattctttttctccatttgcatcctttctttggtttatttttattatttctgtgtcatatactttataaacatcgtttgcttctattaacaaagtgattttctcattaaagtaaaatgaatcatacaatagagtatatatagtatcaagctaaaggagacttaatactataactaactcaacaacatatataactatacattatatgttaatatccccccctcaagccgaatcatctgaaggattaaagaggcttgaaaccgatagtcgactaaggagagaatagaatggaccaggatgaagaggctttgtcatgatgtctggtaat

SEQ ID NO: 143533 - DNA, 1349 bp, Arabidopsis thaliana landsberg; identical to SEQ ID NO: 60568
  unsure (1)..(1349): unsure at all n locations

SEQ ID NO: 143534 - DNA, 730 bp, Arabidopsis thaliana landsberg
atgtataagaatcagcttcaagagcttgcacagagaagttgtttcaacttaccatcatatacttgcataagagaaggaccagatcatgctccaagattcaaagcttctgttaacttcaatggtgagatatttgagagtcccacttactgttctactctcagacaagctgagcatgcagctgctgaagtttcccttaatgtcctttcgtctagagtcccttcaaagtctctaactgctaagattcttgtaagttctctgtcttttctacttggttttgatcatacacaaaaaaatgcaaaagagtaacatcgtatatcttcatgtcactctttatacaaggatgagacagggatttacaagaacctgcttcaagagacagcacatagagctggtcttgatctaccaatgtacacaagtgtgagatcaggatcttgtcacttcccaggtttctcttgtactgttgaacttgctgggatgacgtttacaggagaatcagcaaagacaaagaaacaagctgagaaaaacgcagccattgcagcttggtcctctttgaagaaaagtatatataactatcttccaaattgttccatcaaccccaaaaaagcttctcacttttctaattgaaaccatttttctgtttctctactgtgcagtgtcaagcttggattcacaagatgaagagaaggaacaagaagcagtagcaagagtactctcaagatttaaacccaaa

SEQ ID NO: 143535 - DNA, 1512 bp, Arabidopsis thaliana landsberg
  unsure (1)..(1512): unsure at all n locations
nnnnnnnnnnnnnnnngcacgattagtatcgtaagaaccggaagaggtctgagttatcgttcactttcttccgggaaccatgtcgacaaattaggaatggttaaggctctagaggcgatcaacgtaccctcaacacaagcggaggcattaaccggcgccatcaccagtggcttggagtcggtggtggagaaggtgaaagccgacatcgccaaatccgaggcaactcttcttttccaaactttcgttaattattagtactactactacaggaacatgacggatcaatgtactcagttttctcacttataaaaaatgttagaagatttgttctttccaacctaattagtgtgcttctttgtatttttgtgtaggaatatcaatcaactagtgttgcagaagaggttcgaaaaatgcgagccgatattaataaggtgcgagcggatattgctacaatgcaagcagagaagaggtattaacttgactcgtttttaatttttgttttgtcccattaattaaactaagacctattcacttaaaacaggtgtgatcatgatatccacgtaaacaaagttgagatggtatagcttttctcttcctctaaccattcattttaattacactcgtgatttgaggttactccttaaatcggaaatcagaagaactaataatatatatatatatatatatatatatatatgttttgtgtatttcagggttttaatgagttgaaagctgagttcgaaacaacaaaatatgaggccgtgaagtatgctgcatatacactcgtcgctgtggcagcagttggatctagcatgttgttcgtgatgatatggtagacacgttatcggatctttggaaggaatctatagagttctgagcgacgaaaatccactgagtcaaatatatccgcaactagaccgactcgtggactttttttggttttgttattttttcattgacattggttttatgcttttgcaaagtaacttgtgcctccagtgccatcaccttagtccaaaagaaagtccacttttgaaaaattaaacattttcacttctacttccacttgttttttcttaaaaaaaaatagaatctaaaattactggtagtgacttgttttggcatcaatacacgtcgtactatactcatcctataacaacattacatcactcgtaattgataaacaagttgttctcctctcagctgcaagctgcagatgttgacgagtttcagtaacacaacaaacaccgtccacttataggcgcagttcacatgctaatccaatataccaaacttgtatagacaattttgtaagtttctacgtgactgttacattcagttcacatgttcaaagttacagaggataaactgtttgcaaatcaaatttttttaactttgtcgaatatacagaatgaggatgattgaccagtgaccaatttcagaagtttacaaataatatgatattttctaaatattggcaaaattaattcaagctttgtgttgtgcttcgct

SEQ ID NO: 143536 - DNA, 1023 bp, Arabidopsis thaliana landsberg
cagtttcttcggtttgattatcctcagcttgtcttttacatcagcaaggaagcgtgatcatctcaggtcaaaggtgatcttaatgttttcccatgcttttttttttgtcatcatgttgcatagcacaaaacatcttaaggtgcttttattgatgatgtaggtgagctactttataacggaagaagaatcgtcattaacctggagatattccgaaaatggacttagcttctaagaagaacacagctaatgtcggttccaaggagatagacccaataaaacctaagtcgcctcgttcaagcctctctccattttcacttaaactaggagacaatgttccccgaaaccctcattttgatcccaagaagatggatcctctcgtcaaacatcaaccgccaaagtctcttgaacctccccccgcgactagagggaccaatagcgagggtgacttaaagcataacacctattctagcgatggtgatagcttagcaatgcggaagaatgctcctaaaaatcttcattatgatcccaaaaagattgttcctttgaccacatctgaaacatactcgccaagtgccagaaatcatcaccaccacaggacaaagtccccagacaagaagagagcccctagacataatggggactatgcctatggtgataacttggtaggtccatcagctcaacctttcaagcctcacacgggaggggacgtgaggtgggatgccattaactcaatcgcttctaaaggtcctcaaataggtctcgacaacttcaggcttctgaaacgtctagggtatggggatataggcagcgtttatcttgcagacctgcgggggacaaatgcggtttttgcaatgaaagtgatggataaggcctccttggccagcagaaacaagttgctgagagcacaaaccgaaagagaaatcctatccctgcttgatcatcctttcttgccgactctctattcttactttgagacagataaattctactgtctggtcatggagttctgcagcggcggaaatc

SEQ ID NO: 143537 - DNA, 878 bp, Arabidopsis thaliana landsberg
gttcttggttcagagagggtttacacttgaagcaaataaagatggaaaagatggagaatcaccgagtcagagaggctactaatcccatggaagctggaggttcaggtcaaaatgaaaacggagaaatccacgagccgcctcgacttgctaccttgaatgctttcgatatcatcgccttgtctacggggtttggtctggcaggactttttggggatgtatatgacaagcgagaatctaggttcgcgtcgcaaaaacctgcttcagagatcatttctaagctagtagaggttgccaagtgcctgaagctgaagataagaaagcaaggcgcaggcttgttcaaactggaaagagtaaaggaaggaaaaaacggaattttgacgatggatgcagagatattccaagtgacgccgacgtttcacctggtggaagtgaagaaatgtaatggagatacaatggagtatcagaagttagtggaggaggatcttaggcctgctttggcagatattgtttgggtttggcaaggcgagaaggagaaagaggagcagttactgcaggatgaacaaggagagcaagaaccatcatagcaagttcagctacaagcctacaactgcaagcacatgaattgttgcaggaacatgaaaatggtaaccctcttgcgacttcagctgaaacagaagcaagcatcaagaaactctaacgaaaacagaggaaggaaaacaataacaattgcacaaaatggattctttttgcatatagactacaaaaattgtagatagttgattgatttgtaacaactacgagctttttttttaccttgcctcttgtgaagttttgaacgtatattgtttcatgagtacagtaattgaatttctttaaga

SEQ ID NO: 143538 - DNA, 543 bp, Arabidopsis thaliana landsberg
gagaagcatacaagaacaagaagctcttgcctcttgatttttgtcccaagaaaacacgagctatccgtagacgtctcaccaagcatcaggtctttacccgaattaccatttccaattatataatgttcttttgaattggatagcaaattagcaatcataataacttatggtgtttgtggtaacaggcttcgttgaagacagagcgtgagaagaagaaggagatgtatttcccagtgaggaagtacgctatcaaagtgtagtttcattctcccagctctagcttctagaaatgaatgattcagcctttgattatcggcttatgttatctcctctttttttgtccaaccttattaattttagttgtactgaagttttgttatcacacaacctctctaaaatcattagtatttcataaatattgaatttattctgggttttgttgtctctttggtaaattttgatttttcggttgtttagagttaagggacgattgaatgaaggattgtaaacgaacatggttgatttatacggagaatttctgat

SEQ ID NO: 143539 - DNA, 613 bp, Arabidopsis thaliana landsberg
aacccattgtgttagtcggttccttagaggtaatgtcatctatgtatgccgttattatttcttaatctatagcggaagagagctaaaaatggttctttgattccggacaaaacttcttggctagttttctattgggttggagtattactacctctgcaggcgtcattgcttacccttttgacacacttaggaggagaatgatgcttacatcaggacaacctgttaaataccggaacaccattcatgccttaagagagatattgaagtcggaagggttctatgcgctatatagaggagttactgcgaacatgcttcttggagtagcaggagcaggagtgcttgcgggatatgatcagcttcaccagattgcttataagcattgggttcagtagttttgaaccaaacccgaaacgatgacaatgaaagctgagctcaaaaagagaaggttagtaaacaccaagaagtctcacttgctttccaatgtattgtgttagttaacagaatctcggaatcattaaccgattgaaccagcagaagatagggaaaattgttcatagttcttgtgcagtaacattgttatatcaataatccaggaaaggcctatttgattttt

SEQ ID NO: 143540 - DNA, 1261 bp, Arabidopsis thaliana landsberg
gtagactgagaaataaagaagcccttgattttgcccattgcagtcatctctctcgaatctctctctataatccgatctgagaaatttcgccggagctaggttttgttgtttaccgatcaatcctttaatcaatggcaatggctgttttccgtcgcgaagggaggcgtctcctcccttcaatcgccgctcgcccaatcgctgctatccgatctcctctctcttctgaccagtgagatctctttctcattcatcttatccttgcgtataaacacacatttcgctgttcctctgtgatgcttttctgaatttgaaatcgtttgatttaattgagtcgttgatgttttcatttccttgaaattcgaatcgacgaaaatttatggaaattgtgttgtttgactcgggagctgctaatgagtgaggtgtttttgttcgtctatttggagttttgagactcggaaatgtcctgttaagctcgtttcgttgaatttcctattgcaagaccaatttgattttcctcgtagaagagactttgtgatatgttgtctaagctcgtcagatttaatcagcttttacctgcaaaactttgtgatatttaggatgatgaggactaaacttgtatttgatttgtagggaggaaggacttcttggagttcgatctatctcaactcaagtgggtaagtcaaagctgataattggagattggtttacctagttaggattgtgttctaagaaatctgtgatgttctaatctttatgaattgctttacatgtattctctgtgcagtcgtaaccgcatgaagagtgttaagaacatccaaaagatcacaaaggcaatgaagatggttgctgcttccaagcttagagcagttcaaggccgagctgagaactcccgtggactttggcagccatttactgcacttctaggagataatcccagtatggttggctatatagagttgtttttcttaataactttgttctagtatcactccgggcttgcatcggtattgaatattgatgacgacgaacaatctgttgctcttactatagtctgagatatccatcctcttgctatctcttgttgttattgtggatgtgtttctgatttctagcgttacttgatggaaaaaccaggcattgatgtaaagaagagtgtggtggtcactctctcttctgacaagggtctctgtggtggaatctaactccagctgtcgttaaagtgagcagggctctgtacaggggatcctctagagtcgacctg

SEQ ID NO: 143541 - DNA, 594 bp, Arabidopsis thaliana landsberg
gctttaaacaaattataggtgaaggttgtagcaaaggtgtattggggagatccaagggagaaactttgtgatgctgtcgaaaatctaaaactcgattccattgttcttggcagtcgaggtttgggttctctcaaaaggtaaattcttatgcttacttgctatatatagtctagtttcgttggttaaaaaatttcgaatttcagtaaatttaggcaatatagcttcaaataattgaaactgatttggcttttctcaaattaattttagtatcacttatttcgttattctgtggttaatcaaaaggagaattggagtgataattaataattacgttatctgtgggtttttttgttgttgttgtaggatcttgctgggtagtgtgagcaatcatgtggtgacaaatgcaacatgtcctgtcacagttgttaaggctaattaaagtgtctcttgttctttaattggacccagttaataacattagtagttacgtgtgtcactcatgcattgttttgacatttatacgtttgttgccttctacaaatttgtgtgaaactgattggtactgtttcattaataaatttcagttaaatgata

SEQ ID NO: 143542 - DNA, 1324 bp, Arabidopsis thaliana landsberg
cttttgggaccgatcttcatgcaatttcgattttccccagttttacccccacccaaacgacagccgactgtgcgggcacatccaccaagagaaccgtaagctatcaacaaccaaaaacacttcatgatcagatgatatatataaatttcaatcttaacatttattaatcttgcaaacagaggaactagaggggctaatcattggggcaaccgtcacactgaatgttatatttgctgggtaagtttcacatttccccctcaatctctgcaagttaaaattcttcaatggtaagaatctttttggcttaaccaatgggaacaatccaaactcttattttacaaagaggtatcaggagcatcgatgaatccagccagaagcataggacctgcactagtgtggggatgttacaaagggatttggatatacttgctggctccaacacttggtgccgtttctggggccttgattcataaaatgttaccgccaatacagaacgcagagcctgagttctccaagacaggatcttctcataaacgagttaccgatcttcctctgtgatgatgtagatcaatctttaaggtcaagcatcttcaaatctgttcgctgctctcattgtaactaatcattatcaacacaaaatggttgtaaagtagaacatatgtatatgttactgtgtaaagtacactgtaaatcaaattaaaagtctgtatcattccgacttatgaaaacgattcaagaacgtaacttataagtctatttggacaatgcgactttaattagcagacaggatattacaatttcggttgaagaaagatattaaagttacagtaagtgtaagtcccgttacaacaactagtcaaccactgattcatctacttcccgcctgaccgtcaagatataagttgttgttgatagaatgtgttccatctctttgttgtgttctctgacctgttcttgggatgatcagaggtctgaagaaaactaaggcgaaaagtaattccataatgaacaaactcatgctgatccagacaaacaaagttttcctccagttccatatgatccttttcaagaaaggaagtttggattcaaggaacagagatgcatcgtaaatctcaggaatacctgctgcaggacgaaactctgcacgttgttcgatcatgatcttcaagcaagcagtaggaataatgtccttttcgaccaagcctttaagcttcaagttcaaggtttggatttcagagacatagcccgtgacaagcggagcaatctttagcaaagtctggacaagacgtataggctcgctactaaattttaccatacacggccg

SEQ ID NO: 143543 - DNA, 390 bp, Arabidopsis thaliana landsberg
aattcatcaaaggagagagagatcgacaatggcaccttcgtcatcaagcggtttaaccttcaagctacatcctttggtaatcgtcaacatatcggatcactacactagggtcaaaactcagctcaatcctcctgcttcaatctgcgcaagcggccatggctcaaacaacggcgaagcaatgttccagcaaaaccctagggtttacggatgtgtgatcggtgtccagagaggtcgtactgttgagatattcaacagtttcgagcttttatatgatccttctactcaaacccttgatagatctttcctcgagaagaagcaagagctctgtaagtaaagctcactctttttattctcagactattgatgcaatcgtaaattaaagtttgaact

SEQ ID NO: 143544 - DNA, 663 bp, Arabidopsis thaliana landsberg
  unsure (1)..(663): unsure at all n locations
tctgtatgggaaagaataagnctgttgcatatagtagtcgcttggtggtggtttagtaagggccagagtgatctactgtatgtatagtataccgatctttgttagttcttgacttcttgttatgtgcatattttttatgtcctttaaagctgagtctgtaactatgtgtgtgtgtgagtgtgtgtgtcttagttagtttagcatgtcggcgatagatttctattgctctgtcgacaaaatcaaaggagtggatggtaacaatcgcgtggttgtgacgcttgatggaaagtatctttcgcattccgaacaggttagtctttcattttatgatgcttgttaatataatcagaatgtttgaatgatttgggatcattttgttgcagaggacggagaatatggtctcaaggctaaatctcaagggaggtacaagcgaatgataagaaagcctttacgtatccatgaaggccttattgtaagtggtaacattgtaatacatatgtgtttgtttatctgtaatatatgcaacttcagcatctagattaaaagctgtttcaggttgaataacagtgaataaacaaaacttataaaacctttatatgtttatctttaacatcgtaatcgagttccgattcatgcttaatatcgattgaataaagtttcaag

SEQ ID NO: 143545 - DNA, 567 bp, Arabidopsis thaliana landsberg
attccgatacattgcatgttctttttacagaggctggacaagaaaagaaagaagatgtcaatggagagggagagaagaaggagaatgcagcaggtggggagtcaaaggcatcaaaaaagaagaaaaagaaggataagcagaaggaggtaaaagaatctcaagagcaacaagcaaacaacaatgccgatgctgtagatgaagctgctgggtctgaaccaactgaggaagaatctccaattgacgtcaaggaaaggataaagaagcttgcatccatgaagaagaagaagtcaggcaaagaggtggatgctgcagctaaagctgctgcggaggaggcagctgcaagacgtaagaagctggccgcggcaaagaagaaggagaagaatcactataaccaacagcctgtgcggtaaaatcctgaatcaccaccattttgatcttgatggaaatgcaaatatgaacatgtatttcgccgtatattgttcatatgagtctctgtcctaataaatcttttgaagggtctggttcttagagttaaagacattgaatcctttttctagtcttattaca

SEQ ID NO: 143546 - DNA, 869 bp, Arabidopsis thaliana landsberg
gaatgtctagattgcccctgtaaacatgagtggacatatgatgctatgtgccatgatttactgacatgaaggaaacaaatatgtacatgtggtaagttcaagtcttttccgttttagttattgtgatttgtggtggcttctcttcctggatactccatgtgatgttcatttagtttttagattccaagcaaatcaggcggacaaccagagaagaaagatgtgctcttagaggaacatgatcctatttggctagagcttcgacatgcacatatagcagatgtgagtctgatgcctaggtatttatttctctttggtaacggaaaaaaaaaagttaaacttcttgacttgtgtttttcatcaggctagtgaaagattgcatgacaagatgaccaatttcttatcgaaaaacaaagctgctcagcttcagggtaagaggtgggtattactttttatttctgtagtaaatataacttgagagcatatattacccttctcctgaactggtggaaccagattttactgttggattagttcctcttgtcattcagtcattcagattgataatactcttacattactctacgttgatctatgtggtatactttatttggttagagaagtaggtcttctctccttttgatcaattttgtttgactcttttttcttagagatggagctgagctttctacaagagatttgcagaagatggttcaagcattgccacagtacagtgaacaaattgacaagctctctctccacgtagaggtagttccatacttgtacaattctctccttttcttttcttgttgcgtccacctccacttcaacttttggtagtgctactcacaattactctattaatatgcatc

SEQ ID NO: 143547 - DNA, 1044 bp, Arabidopsis thaliana landsberg
tagaggtgaagaagaagcagttggataggagggataacgtgaggaatatcgcaatcgttgcacatgttgatcatggcaaaactactttggttgattctatgcttaggcaagctaaggtaacaccttaaacgcatataatggcattgggcaacttgagaaagtttttcttaacccatgccttactttgcaggttttccgagataaccaagtcatgcaagagaggatcatggactcaaatgaccttgagcgtgaaagaggaatcactattcttagcaaaaatacctccatcacttacaaaaacactaaagtaaatattatagatactcctggccattctgactttgggggtgaagtggagcgtgtcttgaacatggttgatggagtgcttcttgtggtaatatgttgctttctctcaatgttttagaattaactgtttagtcctgtatttctcattttaatttttctctcctcaatttcttaggtggactctgttgagggaccaatgccccagacaaggtttgttttaaagaaggctcttgagtttggacatgcagtggtcgtggtcgtaaacaagattgacaggccttctgctcgtcctgaatttgttgtcaattccacttttgaactatttattgaactaaatgcaacagatgaacaggtattgttcatttgggtttgtctatcctttctttggtatttcgccgcgtgacttatataccttgagtatatttatatgacactaacctcaatgatatttctgggtggcttgtagtgtgatttccaagcgatatatgctagtgggatcaaaggaaaggcggggctttctccggatgaccttgcagaagacctgggacccctgttcgaagctataatcagatgcgtacctgggccaaatattgaaaaagatggtgcacttcagatgcttgtgagttattctgattttttactgtttcatgttttatgagattgttaccaactagtgccaaaaagctaacttgcatttagatttcctagccaaaaatctacacaacaaaaacttgtgtc

SEQ ID NO: 143548 - DNA, 1716 bp, Arabidopsis thaliana landsberg
ctgccaagcagggtgaaccgggttacaagaatgtgagtcccatgccgttggtgataggtccgggtggcttctttgaagttgatgggttcacagaatacctgaacaaagcagaaaactctctcaatgctactactcgacatatctacgatctcggtccaggtaacccgaatactcaactatctttcgtttcagatcctgcaggttcatcatttcccttacctgaatggaaagaaaacaatattttgattgattaggagtcgatgaacatctgatagaaaagattctaaacccttcatatctggaccaagaggcaaaaagttttcgcagtctcaagaacataatcaaaaactcctcaacaaaggctgtggcatgggttggtgagtccggtggtgcctacaacagtgggcggaatcttgtctctaatgctttcgtgtatagtttctggtaagagtagatatcatgacagcaaaaactaaggttatcataagtaatacattaaaagcatttctaatgagattaaactgtgtgatggtaggtacctggaccagcttggtatggcatcgctttatgatacaaaaacatactgtagacagtctctgatcggaggaaactatgggctgctaaatactactaacttcacaccaaatccagactattacaggtaacatcagatgaatctattatgtcaccaggagaaatggttaaaaagacaagcaataaaaggagtatataaccctaactacaagtcatgctacttgttaacatgcagtgctctgatctggcgacaacttatgggaagaaaggcattgttcacaaccttttccggaaccaaaaagatacgttcgtacacccattgtgcaagacaatcggtaagtcgagtttccatacaagtaactcaaatagcattatactcagatgaattccgatctaacttttaaagtttcatcatgcagaaagggataacagttttactgatgaaccttgacaatactacaacggttgtagcgaaagtagagttaaataacagtttcagtctgagacatacaaagcacatgaagtcttataaaagagcaagttcccaactttttgggggtcctaatggagtaatccaaagagaagagtaccatttgacagcaaaggatggaaacctacacagtcagactatgctactcaacggaaatgctcttcaggttaattcgatgggtgatttacctcctatagagccgatacatataaattcaacagagccaataacaatagctccatattccattgtgtgtgcgcatatgctgaaggttgttgtacctgcatgtgcttaaggtagctgcatatggtactcaagacagttccttcattcggtaatttgattagagaaaaataaagaagcgtacctttctttcataaacctataagcattgaaagctgtgagttcaaagtatttgaaccaaataaaataagtgaaacaatttccaaactcaaaatcttgtctgcactttatttctgtttaacattcaaaactggttgggactgtgaagcccgtatcgaggacaaaagacacaacaaacccacaaaagggtcaaataaagctacaaagaaagaaagaaacttacatcaaagcctttcaaagaccaaacgatttccaccatattgagtattgagtagaacagtataattagtagtcaaggagcatgactgagagaatattaactttagcta

SEQ ID NO: 143549 - DNA, 1537 bp, Arabidopsis thaliana landsberg
atgttaatgatggtgattacctttggccactgggcatttataattgagattcttgaatttggttggactctgtataatcttcatagaaaaaaaaaagatcgttatagtctttttcaaaaaaaatctatatacgggccgggttttatgatttatctaagtttcgatttttttcatgtcaagtcaagttttatttcaatattaaaatattaattgaactatcaaaatctatttttttttccttctccacatcaaaatgtgttaagttatgacatccaagcaacataattaaagcggttcgctttgatataaattaaatttttgtgaactttatttattgttttttagataaagtttttatagatgttatgtaggactttgttttgttttgtttcaagtcgtttcactccaatacaatagttttgaatatgaattatgaacactttgacaatattttgtcacattaaatttacaactacaaatagaatttatgtaattaaaaattagaaactattaagaactcatatcatatattagatcattttgtctgttctttgaacaccttttatgattcacaatttatataataagataaatatatatatatatatataatatttgtctattctgtgttatatatagaattttgtttcttaatttaggaaatgaatctcgagattaatatagaattcccaacggtaataatacaacgtaaactccgtgtaggtccaaactttaaaaaaaaaaaaaaaactgcttccgaatcaagctttgcttcggattccgaacctaaaataaacacatgaccgttacaccgatcctaatttaaatacaacatcatcactctcctctctctcccaaaaatctcgcaaactctaatctctctctttcttcttcaatggcgacgaaactcatactcaagaaaacgacaaaatccatcagccgtcaccaacgtaactacctccgccgtcaccggaaatctcagatcggatgctcaccgtctccggccacaaccaccgtaatcgccaccatcaacaaatcgatctacagatgtcatcgaacttttctctgtttgttttctcgtcacgcaacaaaaggattcaaaatcctcaaacctcgcgaagattttcagaattctccgtattcattgtttcacgaaagatctggtaaatcattcgacgagacgaagaagacgatcgtgttagatctagacgaaactcttgttcattcatcaatggagaaaccagaagtaccgtacgatttcgtcgtgaatcccaaaatcgacggtcagatcttaacgtttttcgtgatcaaacggccaggagtcgacgagtttttgaagaagatcggagaaaagtaccagatcgttgttttcacggcgggattgagagagtacgcgtcgttagtgctcgataaattggatccagagcggcgcgtgatatcgcgtagcttttacagagacgcgtgtagcgaaattgatgggaggttggtgaaagatttaaggtttgtgatgagagatttgaagcgcgtggtgattgtt

SEQ ID NO: 143550 - DNA, 1730 bp, Arabidopsis thaliana landsberg
  unsure (1)..(1730): unsure at all n locations
attgctaagaaaagttgctggaaacattgagactaaccttaggatagtaggagcctccgcaattgaagacaaattgcagcgtggtgtccctgaagcaatagaatctttgaggattgcagggataaaagtctgggtcttgactggtgacaagcaagaaactgccatatccattggcttctcatcgaggcttctgacaagaaacatgaggcaaattgtaataaatagcaactcgttggattcatgtcggaggagcttagaagaagcaaatgccagtattgcaagtaatgacgaaagtgataatgtggccttgattattgacggtaccagcctcatatatgtactcgacaatgatcttgaagatgtggtaagtgaaatgttgattaaaatatcttgcgtactctgcttatgactttctatgatggtgatgtaattgctcatttttgcaatgtagctgttccaggtggcatgtaagtgctctgcgatactctgctgccgggttgctcctttccagaaagctggaatcgttgcacttgtaaagaaccggacttctgacatgactcttgccattggtgatggtaatgaccccactcttctttccaaaaagtagtctgcctgatcctgtctaaacagacccagttctttggttttttattttcatcttctcatatgctttgtgttttgacaggtgccaatgatgtctcaatgattcaaatggctgatgttggggtagggataagcggacaagaaggtcgccaagctgtgatggcatctgatttcgcaatgggacagttcagatttttagttccgttattgctcgtccatggacactggaattaccaannnnnnnnnnnnnnnnnnnnnnnnnntttctatagaaatgcagtttttgttctaattttattttggtgagttaccatcttactatgttttgtactattccgtcttaaaacaatgaccgcagactaacactcaccaatttcacgcaggtacgttttgtttacttgctacaccttgacaactgccatcacagaatggagcagtgttttgtactcagtcatatacacagcaatccctacaataattatcggtattcttgacaaagaccttggaaggcagactcttcttgatcatcctcagctctacggtgttggccagagggcagagggatattccactacgctcttctggtatacaatgattgacacaatctggcaaagtgcagccatcttcttcattcctatgtttgcttattggggcagtacaattgacacgtcgagcctaggagacctatggacgatagctgcagttgtggtggttaatcttcacttggccatggatgtgatcagatggaactggatcacacacgccgccatatggggatccattgttgcagcttgtatatgtgtcattgtgattgatgttatacccacactccctggttactggtaagagttcattctctctacatatcattctgtcagaagcaaattaaaaatatatcttctggatactgaaagtgtcatcgctttttcttaaacagggcaattttccaagtgggcaagacatggatgttctggttctgcttgctagcaatagttgtgacatcattgctttctagattcgccatcaagtttctagtggagtattacagacctttcgatgttcggatagctagggaagctgaaaagcttggaactttcagagaatcccaacccgtgggagttgaaatg

SEQ ID NO: 143551 - DNA, 2898 bp, Arabidopsis thaliana landsberg
  unsure (1)..(2898): unsure at all n locations
tgagttcaaattcaatcaaacatgaacgagaagagagaaaatcgaaatacctcgagagcttgtaaccactgctttttggcgatgagatcggacaaagtttcagtgacggtgttaacccatccgttagctttgcttctcctgtcaagtttcttcttcacattctttatcggagttcttctctgattaaccggctccgtgattccggggaattcgccgtctttccaaagcctcttcttcgtaacacttcccggagaagatttcgaagcagccaaaacgcatctaacgatgcccacatctctgtgacgaaacctacgcttaccttcggggattctggatgaacatagcgaagaagaaaacgagagagacattgacgccatcgtcttcttccttcacacctcactgtcactctgtttacggataattcccgtcgatactcatttcggttggatatggtaaaataccggtttatataaccgaaccggaaacacatttgatccgttcaaatcccttaaaaaccggatcgtatttttaaatatgatcacataattgatcatttaaaaataatacgaggctatttttttggtgttcaaaaagataaaaataataatatgaagctcgcatctctgtaagtatatatatatataaaactaaaaggaaaatcacgaattatagtatcaaaaatagatttaataataaaaataaggattggtgactggtgcacaaaaggtggtaacaaacaaacacaatcttgactaaattctatagaaatatcccaaagaaaaaaaaaacaaatccagaaaaatattgtatattgattttgatgatgccgatgttgatgtgcagatattactcttttatctattgcttccgttggagtttagttttgtggcaacagtctattgtatgactatctggggatttgggagtttatccggccggcaagcatacattcattggtgttgtttgcaacgtttacaacattgttatcatctatcttttattcaccatagtaagctctctctctctctctggctctcacttattgatgaatatatagataagtaaactattaaactggttttgataagtttttaatgcgtgaaacaattaggacaaaatgccgccggagactaagaccttcaagtacatgccgttttggctatcgttagttcgtttcatcaacgctggaatttggactgcttattctttgatctacataattgatatctacgtccttgtaagtccttttttgtttttgttttgcttgaagactttatgtattaaatttttgttttttgtttttaaatttttgttttgatctacataattgatatccttttttgtttttgtaagaagggcgagctaaagagtttgaagagcttaaaggcgagctgaatagcttgaagacgagttggagagcttgaagacgagctgagggacttggtgaagagaacgagttgataagcttgacgaagaggagcgagctaacgagcttcttgagaagggctcgctgacgagctacttgagacggacgagctgacgagctatttgagacggacgatcttcgtgagacgggcgagcagacgagctactctgtgtctgcgtgtcaggcggaattcccccctttgacatgacatgctattccgtatttatagcactacgcgtgtagggcattcatcgagggatttgacgaaactacccttcgccttaatactcctccttggtttggaacttattttgggcttttgacttgggtttgggcattggccaagtaggcccaatccgacccctaacagttgccccccaatcctgattcatcgttgatgacgtggatcaggatttcaggtgcacgaaactcaatcgaaggaagtgaaaagtcgcgcatggggaagacgcaatgtttggtttgtctttcatgattctcaaggttcgaggatcgaaacgtcgcgtggctatcaaagtataggctgctattacggcaatgtgctgtctcggtgatagtcaagcgagacgacaaggaaggttaaaagggtcgcctcggctgttgcgtgaccgtcgcatttctgaagagcctcctggatcaaagtggtcgtctggtgttcgagttgggatgttcgagtcattcgaaagtggttctttgagggggagagggaagagacgagggtcgttaatcatgatgaacaacgagctagcgttccgaactcgtccgatgcgttttgcgtgccaatgatcattattggagttatcgtttcgtttgaaggaggcgttacttttgctttgaactctggtgtttgtgttgagctcgctgtttgagaggcaagattgctcaagcgttggccgatctagacgaaatcttgagccgaggttgagaagatgagtggaaaggataacttagttgaacgtgcttattcagggagaaaagagcttcgggagcgtcggttggagtatgtcgactttgttcgaaggtcggcggttgataagatggcggagctcatcgagaagcgattggatcgtattaaagctcatattgacgatacgaaggtggcggagccaaagtttttgaattctatcgtgtatggaaacatcaagactctcgaggcgttgattgaaggtggcgaggtgaagatgaagtcgaacgagatgatgtcaagattggtagcggatacagaggaattggaggccgaggtgaaagcttttggtatcaccgatcttatggnnnnnnnnnnnnnnnnnnnnnnnntatttgccgagctgagtcctgataatcgtaattccgttccaccgccgactgaaggggaagatctcgcggatggacgaggtgagtgcgaaggccaagctggtgaaagaatcgttggtcaaactgaagttcgagacgagatcgcggatgctagagactga

SEQ ID NO: 143552 - DNA, 605 bp, Arabidopsis thaliana landsberg; identical to SEQ ID NO: 13047

SEQ ID NO: 143553 - DNA, 727 bp, Arabidopsis thaliana landsberg; identical to SEQ ID NO: 47845

SEQ ID NO: 143554 - DNA, 745 bp, Arabidopsis thaliana landsberg
agaacaaatgctatatctctgtaacttcaaacacaagaaaaccaaaacactaaagatgagaacacttgaagcttttgctctgtccctgtttcttgtcttcttagtaaaatgggtcaattctgactctagttcttctcctagtaaagatcaatttctgagttgcatgtcgacacattctgattccagcttcataaaccctaaaagcttcatccacaaaccagattcaagagtctacaccgatttctcgcagtctttaatatcacaaaactacagatttctgaccttgaatttcacaagccagaagccgattctgatcgttacaccaagaactgatactgaaatccagagatcattactctgtagcaggaaacttggtgtgcaagtaagaactaaaagcggtggtcatgactatgaaggcctttcttatctctcattacactcgcctttcatcatactcgatctcgttaatgttcgatcgatcgagatcaacctggcagatgaaacagcttgggttggagccggtgccactatcggtgagctttactataaaattgccaaatcaagtaagatccatggcttccctgcaggaacatgccctagtgttggagttggaggtcattttagcggaggagggtttggtgcaatgatgaggaaacatggtttagctgcagataacgttgtggacgcgcgttttgtagacgcaaatgggaggatctacaacagtaggagagaaatgggagaagat

SEQ ID NO: 143555 - DNA, 1129 bp, Arabidopsis thaliana landsberg; identical to SEQ ID NO: 19248

SEQ ID NO: 143556 - DNA, 1122 bp, Arabidopsis thaliana landsberg
tctacagtgctcgtcaatttaacacgtctttacgcatcatgcaatgaagtggaacttgcacgccatgtgttcgatgaaattcctcatccaaggatcaatcctattgcttgggatttgatgatcagagcctatgcttcgaatgatttcgcggaaaaagctttggatttgtactacaagatgctgaattctggtgttagacccacgaaatatacgtacccgtttgttttgaaagcatgtgctggtcttcgagcaattgacgatggtaagctgatacatagtcatgtgaattgtagcgactttgcaactgatatgtatgtatgtactgctctggttgatttctatgctaagtgtggggaacttgagatggctataaaggtgttcgacgaaatgcctaagagagatattgttgcttggaatgctataatttttgggttttctttacattgctgtttaactgatgtcattggattgtttttggatatgcgtagaatcgatggtctgagtcctaatctatccaccatcgtggggatgtttcctgcactaggaagggctggtgcattgagggaagggaaagctgttcatgggtattgcacaagaatgggttttagcaatgatttagttgttaagactgggatcttggatgtatatgccaagagcaagtgcattatctatgcgagaagagttttcgatttagactttaagaagaatgaggtaacctggagtgctatgattggaggctacgtagaaaacgaaatgataaaggaagctggagaagtgttttttcagatgttggttaatgataatgtggcaatggtgacgccagttgccattgggcttattctgatgggttgtgcaaggtttggagatctaagtggagggcgatgcgtacattgttacgcggttaaagcaggcttcatcttagacttaactgttcaaaacaccataatttcattttatgctaagtatggaagcttatgtgatgcttttaggcagtttagtgagattggcttgaaagatgttatttcatataattctctcatcactgggtgtgtagtgaactgtcgcccagaagagagtttttgtctatttcatgagatgagatcatcggaattcgtcggatct

SEQ ID NO: 143557 - DNA, 657 bp, Arabidopsis thaliana landsberg
tattgttctctctctcttcatgcccgaacgcatcgggtctcaaaaaccattgatacagacatcgatccttgtcaactagtactgatctataaatcttataaaaatctgtagagatatggccgccgcagccgtttcctctaaccctcgcaccgttgaagagatcttcaaagattattccgctcgtcgtgccgctcttcttcgtgctctcactaaaggtctaaatcctctctctctctctctttctctaaatttcccagatttcttcgtaatgcctttggattcgtcctttaacttgttcgtttttgtgattttttccagatgttgatgatttttactctcaatgcgatccgggtatgaaagatttcgatttttagatacccttttatgtggtttattgagatttgatttcaatttttgggtgtttgtggttatagaaaaggagaatttgtgtttgtacggacaccctaatgagtcatgggaagtgaatctaccagcagaggaagtgcctccggagctacctgagcctgctcttggtatcaatttcgctagagatggtatgcagaggaaagattggctttctcttgttgctgttcacagtgattgttggttgctctctgtttctttctactttggagctcgtcttaatcgcaatgagag

SEQ ID NO: 143558 - DNA, 863 bp, Arabidopsis thaliana landsberg
cacaaatcaaggagaaaacttccacaaattgtctctctttctttcctacacaccaatttgttttgtgattctttcgattgcattcttctttttcgaattcccgatcactggattttcccgtttaaccggaaaatccagtggattagattttacccagtgttatctttttggattggattcgatgactgttacggaggacgaaaaaccggttcttgagctgctggtgagagttgaagacgacgatgagaaagggccttatgtgaaattgagtgaggttttagagaaaggtcaagaatcagagcaggagaaggaagaagaaaagactgattcgtcgcggttttggttttgggtcaagctttctcttttattcgcctttcttgctgcattggctgttgtgggttacatttggatcggtccattgatcatggataaggtttgattttaacttccatcatcagattcagttttagctttatttgctcttgcatgtgtctcaaaaagtttaattctttgtctgattgaattctttaactcatgattattcactcttgtggaagattctaagtagtcttgaggaatgaggctgatctagttgcgtatagtctgcatgcttgtagtctgactagatttgatgttgatgcttaatgtatctattagtattcatgtatgatcaaagagttcttgcatttgagcttgttgtatgtgtaatgtcttttacaatcttcactaacaaggggaattatctacttgcctggttctgcaggagcttataccgcttatacaatggaagatacgaacttttacacatcctgtgtgtggtcttcttgtttttgcatcagtggcgatatttccaactatacttc

SEQ ID NO: 143559 - DNA, 543 bp, Arabidopsis thaliana landsberg; identical to SEQ ID NO: 22185

SEQ ID NO: 143560 - DNA, 1073 bp, Arabidopsis thaliana landsberg
gctctctctcttctacattgtttcttgaggtcaatctattaaaaatgggattatattcactaatcacaggaagaagaggaccaagtggatttggttcagcttcaacagctgaagaggttactcaagggattgatgcaactaatctcactgcaattatcacaggttcacatatgcatatgcatacatttacaaaaaatttacatcgctacgtttttgaacatgttttaattatttattgctaacaaaacttggtatgtgatttattattattgtaataaggagggacaggaggaatagggatggagacagcgagagtgctgtcgaagagaggtgctcatgtggtgatcggtgcccgaaacatgggagctgcagaaaacgccaaaacagagattctcagacaaaacgcaaacgcacgtgtcacacttcttcaattagatctctcttccatcaaatccatcaaagcctttgttcgtgaatttcatgccctccatcttcctctcaatctcctcatgtacacattctctctttctctcattcagtttaaagcgtttgcaccgccttttttagcgtttggattattgattcttatgacaattacaggctttgaatggtttccacattaacaacgttaattaacactgttttggttaccattcctctgttattgtgtagtactactatttacgttagttaggtaataaacaacgacacccaataattatttatgcagctttttcttttttgatgtttaatgctgtgacaatgacattattttttcgctctaaacatttgacttctttcttcttgttttgacaacatcaatgttactttacattttccaatgtggtatcatttattactaccaaatctctacacacgtatcactagatttgtagatgtgtgtagcaagaaaaataaatgttatctgtttttattttatttttttgggtgaaaaaaaaaagtgcatacttttaattaataattataacaattgtacacaaaatggattttgcagaaacaatgcaggagtaatgttctgtccataccaactctctgaagatggaatcgaagtg

SEQ ID NO: 143561 - DNA, 608 bp, Arabidopsis thaliana landsberg; identical to SEQ ID NO: 11906

SEQ ID NO: 143562 - DNA, 1158 bp, Arabidopsis thaliana landsberg; identical to SEQ ID NO: 29526

SEQ ID NO: 143563 - DNA, 816 bp, Arabidopsis thaliana landsberg
gagcctcgtatcgccttactgcacaatgagtcttgaagctgctcctgtgaaatatatgtccctagaatatgcacttacttgtaacgatctcactaacgaatgggttctagaattggtattgttgccttgtgctggtgaagaaataagatttgtggtaattatactttgaacaaagtgcttaagatgtatgaattagtaagtctgcattgccttcacgatttgccgaattttggatagttctaacttgtaacaatactcccacatcttaatgatggtctctcatgaatcgatcattaacaaactcctccctgtcaattcagttgcatcttctctttgtaggttctactatccagacatatacctagatttcacttttgttttctttcattgaactaagatttttgtcatttatacatgtctctatactttgtgttgagtaactctaaaaactctctgttttgtgttttgcagtcgggatatgaacgtttatgctgcttgcgctgcatacagccaagagaccacaactatggaacaacatgtgtatgccgtgttcccaaacacttgcgtgaagagaaagtggtcgaatgcgttcactgcggctgtcaaggatgcgcgagtggcgattaaattcaacatagctttattcgcaatctctgactgtttgttacaatcttgtcacttgttaaatctggattatgtattattccataaaggctttaaaaccctgactaaaaatccccttgctcttacttatcaactctgggtggtattgcaaataaaaagaacgttccggtttggtatataattgaaagtaga

SEQ ID NO: 143564 - DNA, 546 bp, Arabidopsis thaliana landsberg
atcatcgccactgatgaatgttttggttggtacatgtttaaacaaaaggtgcactgagttatctcctaagagagtgcgtcctgctctgcaaaacacccttaaagagcttcaattagagtaccttgatctctacttggtaagttgtgaatcaagttttagtctttcttgttactcttcttcctctcttcacaattcaattttgtgcagattcactggcctttccggctaagagaaggagccagtaagccaccaaaggcaggggacgttcttgactttgacatggaaggagtttggagagaaatggagaatctttccaaggacagtctcgtcaggaatatcggtgtctgtaactttacagttactaagctcaataagctgctaggatttgctgaactgatccctgccgtttgccaggtataggttcttcatatcatatgtgaaagttcatcaaaaatcttttgtagtgagtttgttatcttggccctcagatggaaatgcatcctcgttggagaaacgataggatgctcgaattctgcaaaaagaaag

SEQ ID NO: 143565 - DNA, 580 bp, Arabidopsis thaliana landsberg; identical to SEQ ID NO: 3037
  unsure (1)..(580): unsure at all n locations

SEQ ID NO: 143566 - DNA, 1755 bp, Arabidopsis thaliana landsberg
gatcagagaaaacatgcaatgaatgtagccattgccacggctgcagcagctgaggcagcggttgcagccgccaaggcagctgctgaggttgtccggatggcggaaaacgccttcacatcacaacattttgtcaagaagctcgctcccaatgtggctgctatcaagattcagagtgcattcagggcttctctggccaggaaagcgttgcgggcgcttaaggcacttgtaaggcttcaagcaattgtgcgtggccgagctgttaggcgaaatgtttctgctttattgaagtcttcacactccaacaaagcttcaacatcaagcatcatccagagacaaacagagagaaagcattggtccaataccaaatctgagatcaaagaggagcttcaggtatcgaaccattcgctgtgtaactcaaaggtgaagtgcaatggttgggacagtagtgctctcacgaacgaagatataaaagccatatggttgaggaagcaagaaggtgtgatcaagcgcgatcgtatgttgaaatactcccggtctcaacgggtaaagtctctctcaagatcttaatatatctggttagttttggtttgaggtctcaaggagttgtttttgcaggagagaagaagtcctcatatgcttgtggagtcactgtacgctaaggatatggggatgagaagctgtcggctggaacattggggtgaatccaagtctgcaaaatccatcaactcatttctcgttccaagtgaaatgcttgtccctacaaaagtaaagcttagaactttgcagagacaagactctggtgatggacaagagtctccattttctttcccaaggagatctttcagccgtttggagcagagtatattggaagacgagagctggtttaaaagatccaatggtttccagccttacatgagtgtgacagagtctgcaagggaaaagatgagatcactgagcacaccaaggcaacgtgtagggatcatggattctttgtttgataactacaagaaggatggggataaagtctctctctggactacttttgtctgcgaaaatagtaagatcaacaacgctaagaagtcgtctctgaccacatatcaacataattgttgaatcttgaacattcatgtcactttatttctttggttttcccagtcgttttgttatttggatctcatatctcatgtgcttgatagatatggttatgaagaggtcaattttttggtgtttgatgtcttgcttctgttcatttctgttcaagatcctcctaaatatactttggttctgatcttcttagcctctgttcttgaaagctgcaattcaaagtatatagaagagtaaaacataagccacttagtctaggaataaaagtagaaaagagacaaaacatatatacatccaccaagtctaatcaaacttgtgaatgaactagtatctcttgaacaagtattagaggtggaaataaaagaacaagtagcaaatcgaaactagtatgggaacattcaataacaggatcaaataatacaaaggaggcagagcacaacgttaattagataaaaaaaaattttcacataagtggatgaaaaaagaattgctctcatagcttaccaaagagagatatggttttcaccgtttgtcttttcagttattttcagaccaaaatatcataaatgggagcaaccaaaccacacagcacttgatttcggtttagtttctgtggttcagttttgaaaaaaaaaaaaaaaaaaaaactga

SEQ ID NO: 143567 - DNA, 4717 bp, Arabidopsis thaliana landsberg
atgggagggtaaaataaaaggtcagaaaaaacccgagctagtcctttgaatgttattctgaacaaccacattcttttttggatttattttcattcggttaaaccaactgcaccataatgatttacagaatgttttctcgagggaatcattcacgaacacacgggcggaaacagaggatgtaattgctggttggagaccaaaggttatgggttaagagattttgatgttgacctcaagcttccttgtcttctactaaatgtaaaaaacataataatcaaatcttcttcaactgttaccaatgatatataccttgaatccttgattgcttatatgatgaaaactatattgtgtcatagtggggaagcttgcatataagttttaatgtaccgaccaatcactactaaaattttgaaccatctgcaaattatttaccgtaagctacagagcaattagacgaccattgaaagaacaataattacggaattacccttcccgtcatccattccttccctcctccgccttaaacccctaccattttgtgtcactagcagcttatctttattttcctgggaatttcaaattcttttctcgccccagattttctcgggaatctctgtcgggcgttttcttcagaatctgccatgattctcaaaacggctttttctctacccacacctactactactctattatctcccagctctcctcaccagctcaacactctgttcttcactcgccgacgccgtcgattaatttccccatcccgcttgaactcaattttctcgcaacgtagattctctttctctggtacgttcctcgctatttcttttctccagtgtcgaattctgtttccaatcgattttgttggaacttctcttctgttacagtaaaaatttattcgaattcctcttttgtattcagctgctgcgtcaggaaataatgtatttacttctcccgagacatccaagacctttgatttttcttcggaggagaagatatacaaatggtaaatattctactcgtgagttaatggaattattatgagttaagatatatcacaatgcaaataaaaagtgtctcattcttcccaatgtaacctatgggaacatggatttcttgtgataatgctgatgatcatttggatttgggcatttttaggtgggagtcgcaaggctacttcaaaccaaattttgaccaaggaggcagtccttttgtgataccgatgccacctcctaatgttactggttctctgcacatgggccatgcaatgtttgtcactcttgaggttgtggaatccatattgagaataattcacagtcatttgggtattctaatttatgttcctattttcgtttaacctttttagtttgttcgtctagctttagctcgtatatactaggcgctttccacacttcttaagttggcttgaaatattgtttagtaattccatgttttctttgtgctgtaactgtgttatactatagttctgctattctcatcgcttttttgttttttacaggatattatggttcgatacaataggatgaatgggagaccaacactttggcttcccgggactgatcatgctggtattgccactcaggttcatttcctcgttcaaatttcaagcttttttgcatggtatttctactagtgtttgcgtgtttgttttgtgctcactatgattcttacatcttcttcttcacaatccattgctcttgttcctataccaatctaccacatttactttgtcaaaaagttcttttcttgtagagtataatttgtatagataatatttgcattgtttggtgaatgtttctgaaatattctactgaagctgcaatatttctttcagttggtcgtggaaaagatgctagcgtcagaaggcattaagagagtggacttaggtagagatgagtttaccaaaagagtctgggaatggaaggaaaagtatgctgtctaatcactgcaatgaataaattcaaaatatctatttcaaaagtatctgtatgatactctggcggtgtttccattcttcgaacgagtcataagttattgatcttctggaaaactatgaagtattttaagcaggagatgattcctgtacatttcttataattgagtaatctgatgttcctgaaccattccaaaggccaatgctttcattaaaagataaaatccactgtacttgtatctgatgtgttaagggtaaggctggaattatagtttgtgtggtttttctcaggtatggcggaaccatcacaaatcagattaaaagactgggtgcttcttgtgattggagtagagagcgctttactcttgacgagcaattgagtcgtaaggcatctttcatagtttccatatcttctagatggtgattcttaaagcagaccataggtggtgctcaaagttgactttatatgattttgagtggtattttggaattcaaaaacttcggcaagtaaaatattattcagttgttaggtggttcaaaaagtttctcgttgctcttaatttcaaattgtatgtactttcaccttgaatttattccttgattctcttttaccttgaatttgtaggagctgtggtcgaagcttttgtgaagcttcatgacaaggggttgatatatcaaggtaagctattatgaatttatgtattttggtttctgttgtcgtagctgtaagtagagctgtgctgtactcatacgactattggtgattttggcataatgtttttccaggatcttacatggtcaactggtccccaaatttacagactgctgtttcagacttggtgtgtgatgtatttttatctaacactctgttgtttgattactttttttttctttctaaaagtgactgccttgttcttaccaggaagtagaatattcggaggaacctgggtttctataccatattaaataccgtgtagctggaaggtactgtccaactaccagtactaccttcgcctttccttatactttgtattttatggacccttatatgtagcaaaattatgtgaaaagataattttttctcacatcaatttgattatgctctgctattagagagttcaaagaagcattatagtgtttgaaaaacgtatcttatggaggctttagattatgtcgtatgatcattaaaacttgtgaaacacagcgttgggtctgtaagagttgcttcggcagtagttaaccttaaattttgctagcaaattattcttggaagatcagtgactacttttgttctgtttatggaaatggctaatctgatctttcctcgtacagtcctgattttcttactatagcaacgactcgtccagagacattgtttggtgacgtggcccttgccgtgcatcctgaggtaggtggtgatatttttttggtttcgttgataataggacatcgggaatgacagatggcattatcaaagtctgtttgacgtgtttataatttttgaatacacacagagctcagttaacaaacttagaagcaagtttttttttttgataaaaacttagaagcaaatttaatattagggaggaaaagtatataatgtgtaacacattttattttcttcttccttttgtggttttcatttatatttctattatgtaaaatttaaatgaaattgaaaatgtagtccaggtagtttgtcaggttgctggtccaatttaatgtaagcagatgtggtgctacaaagtagatgctgattaatttggaccccatgtgaatgtagatcgtcttctagtcgtttcctgaaataggtgctctcttctgggtatcgattgaggattaatgttgtcaaatgtatttggcatcgggcagtatgatcgtaactcaaaatatgttggtcagacagcacttgttcctatgacatatggttgtcatgtaccaattattgctgataaggtgaactccgatctagtgcctatgcactctataggatgtctcttaggatcaaatatctttttcaagtccaacaaggaatccgctgcagttgtttttctttgccatttttcgtgctttaagtatcagtattttgctgggaaacttctaagttctagttactcagaaccaagaacctgagtcacctcatagtatttcctctgctgctcttcaggcatttctcatcagtttttttgtgtaccatggcagtatgttgataaggattttgggactggtgttctgaagataagtcctgggcatgatcacaacgattaccttcttgcaagaaagctaggtctccccattctgaatgtgatgaacaaggatgcaacacttaatgacgtcgctggcttgttttggtaacattttgtttaaaacttatattttagctgaatggaataccctttggttacatcttaacgtccatggcgccttaacatacatcgtattttcagtggccttgacaggtttgaggtgagggagaaactatgggcagatcttgaggagacaggtttagctgttaagaaggagcctcacactttacgagttccaagatctcagcgtggtggagaagtatctttctactgacccagcattaatttttcagttcgtttgaagttcataattttctcatgcatggtttaactggtgttaggttattgagccacttgtaagcaaacaatggtttgtccacatggatcctttagctgagaaggctcttcttgctgttgaaaacaaagaacttactatcatacctgagagttttcgaag

SEQ ID NO: 143568 - DNA, 834 bp, Arabidopsis thaliana landsberg
gttttgtcggacaaaggctatgacggtgcagcagcagatgtctggtcttgtggtgtcattctctttgtgcttatggctggttacttgccttttgatgagccgaatctcatgacattatacaaacgtgtacgtgtaaattatctctccctctgcttcttgatcttctgcagtacttttctagtctcatctttggcgtttaatatatactttagatatgcaaggctgagtttagctgcccaccatggttctcgcaaggtgccaagagagtcatcaagcgtattctcgaacccaaccctattaccgaaagggcctgggacattttgaaatagttggggaattgtgaacatgacatgctgccaaccatagattgtgcaagagcttaagtatgtacttatttctgaaatgcagagaataagtattgcagagttgctcgaagatgaatggttcaagaaagggtacaagccgccatcatttgaccaagatgacgaggacataaccatagatgatgttgatgctgcttttagtaactccaaggtaaacaccgccatttccaaattctccatctggttgtgtatatcatagttcggtttaagtaaaccaatgtattgttaccaactaatatcactctttttgtgctgctactctaggaatgtcttgtaactgagaagaaggagaaacctgtatccatgaacgctttcgaacttatctctagctcaagcgagttcagtcttgaaaacttgttcgagaagcaagcggtaagaacttttttctacttacagtttgtcttgattttctaaaatcatgcataggttttatctaactaaatctgatttg

SEQ ID NO: 143569 - DNA, 1073 bp, Arabidopsis thaliana landsberg
atttaaaagatcaacaaaaggtaatccattatttagttataaatatgtgtgtgttcttcttgaatcttaaatgcaaagtcaacacatatgtgatgatgtttgtacttctcaaacgataggtaaaagcaaaaggcacattgatgcaaatgattggagctgactggataagttcagataagcgggaagatgatcttggtgaacgaataggtggtctagttcaggaatacgcagcgaaaggaagtcccgagtttttcttcattgtaaacatacaggtgaaaatttgagagcttttaaatctaaagaagcaatggttttataatagttaagagacactaataagtagcaaatgtattgagtcaggtccctggttcggctatgtacagtctagcattgtactatatgctgaaaacaccattggaggagcatcctttgttagagagttttgtgaatggtgacaatgcttatcgaaactcgcgctttaaactcatccctcatatctccaaaggttcatggattgtgaaacaaagtgttggaaagaaggcttgcttggttggtcaggcacttgaagtttgttacacccgcggcaagaactacttagaggtaaaatattaatcaaagttgatcttgtttgtgatatgataacaacatcataatgtttttgagctttgtttatttcttagcttgacattgatgttgggtcttcaactgttgcaagaggtgtaaccaatcttgttcttgggtatctcaacaatttggttatagaaatggcatttttgatacaggtaagcaaaaaaaaaaacagaacaatgttttcgtattgtaagatttattattcagtttaaggatcacataatgatcattttcaatgttgttacaaaaatcaggcaaatacagtagaggaactaccagaactgctactaggaacttgtcggctcaattatcttgatgtttcaaaatctgtgaaagaaaggtgagacatccttaacaccaaacactattgcaggagcaaaggatataatcgatttttgtttctttgtaaaaagctgtgttttaaactgtgattcttgttatgt

SEQ ID NO: 143570 - DNA, 653 bp, Arabidopsis thaliana landsberg
atgatgccggagaagacgattatttcgtcggagagttcaaattcgtctccgctaaacccttcttcttcgcggactatctgccatgtatgtaataagcagttctcgcagtacacttgtcctcgctgcaacttccggtactgttcccttccttgttacaaatctcacagtgtccaatgtactgaatcattcatgagagataatgtaaacgatgaattgaagcaagttcgatctgatgatcaaacgaaaaggaagatgctcgaaattttgaaaaggtttcacgaagaagaagaggaagatgatgggggaattgatagcatcacggatgatgaaggtttgagcttaccggaggagattattcagaagataatgaacggagatgaagtgagtcttgatgatttgagcttagaagagagaaaaggattccaaagagccttagcttctggagaattaagcaaaatgatccaaccatgggatccttggtggttacttgcttcagctcgaacgatcaatcttggactcggaggtacacaactcgttcaatgcgttgaagacgaagaagagaccacagttgtgagtgaaatcccacgagggcctgatacacctttgataacactaagcaagcttagctccacgaatccatctcctctctacca

SEQ ID NO: 143571 - DNA, 4125 bp, Arabidopsis thaliana landsberg
atggtgatcgtgctccgcatcttgttgattaatggaatagaagctctgtacattaaagctccaatgcattcaactacaagcacagccaatccagcagatagaacatcccagtctcctgtttgtcctatgaatgtagagaaagcagttgcagagtagaatcccaccaagagaaagaacagtttcttggggagatctttctttatctcctgaattttcaccagaagcttacttctgagaacttgtatggctttgattagccgtagacctctggagctattattacttgaagaaccagatgctggatcgaatctgtccccaccaaccgagcttttgatagttgtccatgacatcctcctgaaaaattgcaaaagacccacttaaacttggacactcgacaatggattcaacataagaccttctttaagacagtagcacatctcacaacaatcgagaagtctaagcaaacttggaggtctaaggatttcacttactccatattaagtccgataaagcacaaaaaaaacatgatttatatatcattgctttgtatatatatgtaagcatggattttactggttagtatggtctctgcctttatagacaatatacagagatctgcaagagatatttcaggttttgccaaaatcctcaaccattgaatttccagcagatcattatataaaaagccacaccaggaactctaactttcaagccacacattgatgcttgaaaatgttagaaacttgcctttgatgtctgaccaacagaggctgtgcaggatgaaggaaatgacagagggaacaaatggcaagagacaaagcacctttgtctctgaaactccttttaggctatagcttactttcacaatgacgtgatgtcaccgtgacggcaaatcccatgaaacagcttgaataaatgttggactttcgacccacatgcactctactttctagaccaaaaagtacacaacaaatcaattgcacaatccactgtagcatcaaatagcaactttcttgacagaagaaccaatgtgaaacaagttatcggaattcacactaatgaactctgataactaatgattaactcatacacggggcaagatccagacatatgaaacttgactcagcagataccacgattaggcattcccacgatataccttgtagacgacaactcaagaaagctctaattttccccagattactaagttcctccaagcccattagtcaaagaatcaagccaaaaatcgatccttacaactgtctacagatgaaggaatcaaaattcgaaaccaattacgactgaaaacagtagtaaagaagccagagaaatgaaaagggatcagcttggtgaaggacaaagtatgaaatgaggaaagatgaagcataaacctgaaacggcggcgtttagcttgatacggcctctcgaagcttgggctgcaaatgcaaacaaagcctgtaatgtaataatgttagagagttgagaataaaacccatttatgtggtgctgaaggcattttgctgcagactaagaagatgctaccttgtctgggtagaaaatggatgagattgtcaacgaggaatctaaaaccaacttggaacttgataaacgtcgttgacgcaagtaaaacaattgtgagaggaataagcggtggagctgaaacgatagctaaagagagagttgacaccgtagtgatcggtgccggagtcgtaggtttagcggtggcgcgtgagctcagtctccgcggcagagaagttctgatcctcgacgccgcatcatcgttcggcaccgtgacgagttcccgcaacagtgaagtcgtccacgccggaatctattatccaccaaactctctaaaggtacaatctttctcttgaggatcgaatcagatgtgtgttttggtaagttcaatagtgagttttgtttggattttgagcaggccaagttttgtgtaagagggagggaattgctgtataaatactgctctgaatatgaaatccctcataagaagattggtaagcttatcgttgctactggatcctctgagataccgaaactagatctattgatgcatcttggaactcagaatagagtctcgggtctaaggatgttggaaggttttgaagctatgagaatggagccacagcttcgttgtgttaaagctttgctatctcctgaatctggcattcttgatacacattccttcatgctatctttagtggtatatataataaacttttccccagctctctatatagggtcttcattgtactgtctttaggaaaagagttttgatttcatggtttacagggataacaacaacttgagactacagggagaagcacagaacaaccacgcaactttctcgtacaacacggtggttttaaacggtcgtgttgaagaaaagaagatgcatttgtatgttgctgataccagattttctgaatctcggtgtgaggcagaagcacagcttgagcttatccctaatcttgttgttaactctgcgggattaggtgctcaagctctagcaaagagactacatggcttagatcatcgatttgttccttcgtctcactatgctcgtggatgctactttacactatcgggcataaaggctccaccttttaataaacttgtgtatcctatacctgaggaaggaggtctcggtgtccatgtcactgtagatttgaacggacttgttaagtttggacctgatgtagaatggattgaatgcacagatgatacatcaagcttcctcaacaagtaaatactgcatctgttcttaaattatcctttctatttagtccattttgaagttactcaagatcttcatgctgtttgtattcaggtttgattatcgtgtaaacccacaacgatcagagaaattctacccagagatcagaaagtactatccggatctcaaagatggatcattggaaccgggttattcaggcatccgtcctaagctttccgggccaaaacagtctcctgcagattttgtcatacaggtaagcttttgtttatcaaaatgcatcagactacactcacagcattaggtcctgtggaatcttcggttttgttatgaaaccatttgttatcctcaagagtcttgtgtgttcctgatgcagggagaggagactcatggagttcctggtcttgttaatctctttggcatcgaatcacctggtttaacttcaagcttggctattgcagaacatatagcaaacaaattcttgagatgaatttgagttaaaagtttacatttaagaacaaaagtggcctacaagaagaaggctttgcagagttaaacaattttcctttcagtgtgatccatttagactttgtctataactctttacactttgcaatcaaatgctataagaataataaacacaagttccttctgttcaatctttttttttcaatcggactcatgaaaaccattactgctgctagtctgctactacaataactcgagaatattttaaagttaacagaattgctccaagtcaagaaagtctacggaatgtacaaagaaacaaagctgttttcctctcttttttataagtgaaccgacacagaagagaaaaaaagaaaaagactaaaagagtttagagatcagaaaggagccgagcttgtccgtcggagctgacgattgggatcaggcggtggtacacttgggaggattttttccacctcctgcaaagtaatgtaaggattagctttggccacacataaacgcagacaaaattgaagaacagaaagtccatgaagactagaaaccagcaagaccaacttgttccgggtaaaggaaaactatgtcttctaagacgtttggtctaaacctattcctcctgtctcttgttcgtggttatattttctatcatatattgtctactatgcgtgtgccctattctatacttcactacatcttctatcatctatcattccctttaatatgaatccagaactaatcaacgatcagctcttacaagtttctagtaatcacaaatttaatcaatgcatgtgttgtaaaaagggagaaaaacctacaatgcattaccttttgcttcctgagtctttcgttttcttcttctaaccgtgaaactttgatctctagctcatgag

SEQ ID NO: 143572 - DNA, 769 bp, Arabidopsis thaliana landsberg
atcaggatagatgatatgcccaagtagttcaattttctacctagatgtagttttgttgattaatagttcaaagtacgaaatgtttattagtgtgttagggttttagttgttttaatgggaattaacttagcttctcaagccttatacaatgcgtgttgaggttataaatgttcccaatatcaaacatttccattctctaaactttgtcagctggtcaaatttctcatctttccagatgattttcttgaatggtacatttttgcaaatggttttgaaaatgtgttgaagcttgtatttttgattgctgaaacatcttgtttgttggatagtttgtcatctatggtctgatctgatgtctcaatgagattattctaatgtaaatttcgcatcttttggtaggtgctatgctcgtcttcacccaagagctgtcaactgcaggaagaagaagtgtggtcacagcaaccaggtttgtttttgttacttgtttctttttggtgtttatcagctgaaatgatatctgaacaaactttttttatttgcagttgaggcctaagaagaagatcaagtagagagactcttatcaagaatcccatctcttgcttgcttctttttgttgtcttccctttgatagggtttgtttttcttgtttcagtgactttctatgttaaacgataatgtcagtaaaaggatttggttttctattattctgaatcgattacggaagattcttgcttaattccaatctatacaagtatcgtgaaataatgac

SEQ ID NO: 143573 - DNA, 1078 bp, Arabidopsis thaliana landsberg
cagtccttgtggcccggccgacaaaaaaaaaaaaaactcactttagaatacacagacacattttccttcagtctttcattttttccgccaatcctccaatacaaaccatggcaggtggtccgaatacggacatttgcttgtctaaataaaactataaagtacagataaaaaataaaaaagtaattgtattacgtcattacgtgatctagtgtgtgtcctaattgcatcatcaatgataacatcatacgcaatcactcgtcgtcttggcatttctcataaaacaaaaattcgagacctcctctccacttcgaaattgcattttttttttctcaacagagaaaatttggctcttatgcacctgtcgtgtgaatcctgatctcgctttagattgtggaagcctgcgacacatttcccatttttaattcggcttattcttcttcttcctttagcttttggggatatttcaccatcctcgttgaaatcagtgtgatcttcttcgtatacaatgaggaaaatgagatcgaaatggttaggtttaagatctgtaaccatcttcttaatcaatttctctctagcttttgctttcgtttccgctgagagaagaggaaaatctctgaggttaagtacagacgaaacgcgggaaaatgaatcaagtttcttccttaaagctatcaattttctatgggaatctgatcaaataggttatcgtcatgtttggcctgtaagtatcattctccttctaagtttcattcatctattgtgtcagaattatatgtttatgtttttttttttgtcaatcaaaagagcgaatgttgtttacatacgtgatatgacgccgaattatgtgtattttgttatttgtataaacaggaatttgagtttaattggcaaattgtattgggaacacttgttggtttctttggagctgcgtttggtagtgtaggaggtgttggtggtggtgggattttcgtacctatgcttagtttgatcattgggtttgatcctaaatcagctacagctatttcaaaatgtaagattatattattttctcttggtgtttttttgtctgattaataat

SEQ ID NO: 143574 - DNA, 637 bp, Arabidopsis thaliana landsberg
  unsure (1)..(637): unsure at all n locations
gaaaaacctttccaaaaatggcaaagaaccgtaacttagtcttcttcttaggggtattagcgtcttttacactctccagtttcccggtaactgtttccggcgagccccctatcttattcactttcggcgactcttcctacgatgtgggcaacacgaagttcttctcgtcagagctcgatccagccaccacgtggccttacggcgattccatcgatgatccctccggtcgttggtctgacggccacattgtcccagatttcgtcggtaaaaactaaaagtcttacactttcttttagggttcttgtaattgattccaatttcattgctattaggtcgattgattggtcatcgtgaaccgattcctccggtacttgatccaaaagctgatctttctcgtggagcaagctttgccattgctggagcagttgttcttggatctcaatctactactgcatccgtaagcactgttcccgccattgttgataaaaaaggcttcgtaagagttttatatatctatgtgttttattttgttggatttgcagatgaattttggacaacagatatcgaagtttttagagttgcgtaagcaatggtttttccaagacccccaacaacacatatncttggttaacatagg

SEQ ID NO: 143575 - DNA, 1421 bp, Arabidopsis thaliana landsberg
  unsure (1)..(1421): unsure at all n locations
aggggaatgaattatttgcacgaacataaacctgaagcaataatccattgcgacctagaacctccgtatgtattcctcttgactgtatccgtataatttatttcattacacaatttttctattgtactatgtttcatatatccaaaaggttctcatttgttcgagtaagagaacagaaacatactgcgggatgattcgggacatctgaaagttgcagactttggagtcagcaagctgctggtagttaagaagacagttaaaaaagacagacctgttgttnnnnnnnnnnnnnnnnnntgtaagtttctttaatctgacgatcttaaaaattcctctgtgaagttgtgtatgttcttgtcttgagctagcttagagctgttagctttaatgttttattgtctaaagctaaactacaaccaatctaatggttattttggaagggtctatgctgatgttactctcttttttcgttctggctaagcagggcgatatatggctccagaggtttataggaatgaagagtatgatacaaaagtagatgtattctctttcgctttaatcttacaagaggtaaagtaatcgagagagctattaagtttttctattcatagagtaaaaatcctccggcttaaacaatttataaacagaatgttgttttgtgggttaacagaatgttgttttgtgggttaacaaaacctaacagatgatagaaggttgtgaaccatttcatgagatagaagaccgcgaagttcctaaagcatatattgaagatgaacgtccaccattcaatgctccaacaaaatcatatcctttcgggttacaagagtaagtttgtcgaaaagtgtcctgtttttgaaaccaacattcgttcatggctcctctctgaaagtcttaaaatctctatctatttgccaggctaatccaggattgttgggacaaagaagcatcaaaaagaccaacatttagagtaatcatctctactttggagttgataagtgatcgaattgcacgcaaaaggagctggaaggttgttattcattcgctatctctcccttacatacacacacacacgcgcgctctctttagtattttaagtatctgagactgtttgatggtaattactacacaggtgatgctaggaagatgccttccaagattcagattgtttacaaagcgagattatgtgaatcccggtggtagtaaccgctcatcaggctcattcaacagatgagtgactgcaaagagctttgggtttgattttctttaattgccttaaaaggatgaaaaaatgtcaaatactgtataggtcttttgtatttatatatgacatcatgactgttgttcttaaccagaatgaacacgggggtgtgtattattttttacgcagtggtcgaaataaaataatgagatctctgagctaa

SEQ ID NO: 143576 - DNA, 938 bp, Arabidopsis thaliana landsberg
ctgtcaaaaagaagcacagacaaccgaattctgattgcagaggcaggagccatccctgttttggtcaagcttttgacctcagatggtgacactgaaacgcaggaaaatgctgtcacttgcattcttaacctctccatatacgaacacaacaaagaactgatcatgcttgcaggagcagtcacatctatagtgctagtcctccgagctggaagcatggaagctagagaaaacgctgcagctactctctttagtctttcgttagctgatgagaacaagatcattataggcgcatcaggtgcgataatggccttagtggatctgcttcaatatggaagcgtcagagggaagaaagacgcagctacggctctgttcaacttgtgtatttaccagggaaacaaaggcagagcagttagagccggtatagtaaagccattggtgaaaatgctgacagactcctcgagcgagaggatggctgatgaagccttgaccatactctcggttctagctagtaaccaagtcgcgaaaactgcgattttgagagccaacgcaataccacctttgatagattgtctccagaaggatcaaccgcgaaaccgagagaacgcagctgcgatactactgtgtctttgcaagagagatactgaaaaactgatctccattggtagacttggagctgttgttccattgatggaactatcaagagacggtacagagagagctaaacgaaaagctaattctttactagagcttctccgtaaatcatcccgaaaattaggttcactctaaatagcccttaacatgaattaatttagttttgctggctattgatctgtttattatgtcctgtatcttattgagtttttggaagactaatttaatttccatttgaggagaaggtggagtcaaaaaagttaacgagaatcgaactctttgactca

SEQ ID NO: 143577 - DNA, 707 bp, Arabidopsis thaliana landsberg; identical to SEQ ID NO: 33912

SEQ ID NO: 143578 - DNA, 735 bp, Arabidopsis thaliana landsberg; identical to SEQ ID NO: 33677

SEQ ID NO: 143579 - DNA, 1435 bp, Arabidopsis thaliana landsberg
cagactactgaatatcaaaggtctcagatatcacacttggagaaaagtcttaagcaggccatctcgaatcaggaggataacagattgagcaatgacagccaaatccgaaaattaaaggacacagttgatgacctaaatcaaaaacttacaaattgtttgagaacaatcgagtccaagaatgttgaacttttaaatcttcaaactgctctaggccagtattacgctgaaatcgaagctaaggttggaattaggaaattcaaaatctttccttttctattcttactctcaatttatcaatgcgttcgtattcattttgtaggagcattttgaacgagagcttgcgatggctaaagacgagttgatgaagctttctgctcgtttgaaagtaggaatataactatcttttccctttataaactacaacctgccataacgatatctgtctgatgctattttgcggttgctgaaggattctgatgagcagttagagtcatcaaataaagaaaaggaagatgtcacatccaaattattgcatgcggaaaaagttgcagcggaacggaaaaacagagtaaccaaggttgaagaagacaatgcaaaagtacgacgtgttcttgagcagagcatgacaaggctcaatagaatgtcaatggagtctgattatcttgttgataggtacaccaattaacacttggacatatatagtttcgattctcctgtctgaattaggtgttctgatgcaatgatgaaccaacatgtgtctttgcaggcgaatcgttattaaattgctggttacatacttccagaagaatcataacaaagaggtaatagacattgatattattctgaaatccagtttgtgacatacacatatgagaaatgtctctgatatacttcggttgtttcatgctttcgcctaggttttggacctcatggttcggatgctaggattttcagaggaagataaagagcggattggagcggcaaaacaaggaggaggtaaaggagttgttagaggcgtattgggctttccgggccgctttgtcggaggaattttgggtgggaaatctgcagagttacatgctaatgcagcttctgataaccaggtaaaagtcctccataacataataaagtacactgatacacaggcaagttttgttttttttgtcgaaatacacaggcaagtttcacactaagagagatattattgtgtgtttttttgaaatttgtattacagtcttttgcggatctatgggtcgatttcttactcaaagacgcggaagagcgagaaataagagaagcacaagaaccagcagcgagtagagccaagcaagatttggagagtacgagtcaagaggcgcctttgcatgattcagagttctctactgtgcctctcagatcatctgagagtaatcaacgactctcgagataacttcct

SEQ ID NO: 143580 - DNA, 626 bp, Arabidopsis thaliana landsberg
ttgacacatattttgctctgagtaaaacttgggaatagagagagactctgagtgagagagagattctgagtgagagacggagatggaggcagacgaaagcggcatctctctgccgtcgggacccgacggacgtaagcggcgagtcagttacttctacgagccgacgatcggagactactactacggtcaaggccacccgatgaagcctcaccggatccgtatggctcatagcctaatcattcactatcacctccaccgtcgcttagaaatcagtcgccctagcctcgctgacgcctccgatatcggccgattccattcgccggagtatgttgacttcctcgcttccgtttcgccggaatctatgggcgatccttccgctgcacgaaacctaaggcgattcaatgtcggtgaggattgtcctgtcttcgacggactttttgatttttgccgtgcttccgccggaagttctattggtgctgccgtcaaattaaacagacaggacgctgatatcgctatcaattggggcggtgggcttcaccatgctaagaaaagcgaggcttctgggttttgctatgtaaacgacatcgtgctagggattctggagttgctcaagatgtctaaggtaa

SEQ ID NO: 143581 - DNA, 993 bp, Arabidopsis thaliana landsberg
gtttctacgtttagcaactcattatttttaggcgccatcaagaatgggaaagactcctggtaaatggatcaagactttgcttctcgggaagaagtcgcctaagtcgaattcggataaccgaagccagaaactggtaagagtttgggattcctaactcatccttaaaatgaatgaggattattctaactgtaatgttgttcacatgtacaaagaaatctgctaagaaagaagagctggtggaatcggtgacagaagatttgtcaaacttaacagttgatcctccggtggtttcatcacaaccagttccagcttctactgctcaaaatgtggtttctccaatcaatggtgatgagtccaaggataatctcgagtcaaggaatgacttgggagaagtcgagcttgaacaagctgcaattaaggttcaagctaccttcagagctcatcaggtacttattctttgccataacaaagacaaatctacgtgaatagagttggtagtgttaatgatgtttttttattcatctactgaaggcacgtagagcatttcgaactcttaaaggtatcatcaggctgcaggcagttatccgtggtcacttggtgagaagacaagccattgctacatattcatgtatatggggaattgtgaagtttcaggctcttgttcgtggccagaaagctagatcttcagatattgcgattcagtttcagaaaaaacatatggtagagactctttatcacgccttcattacatagttggctgattttgtaggcttgttataatcaagctgcaattttctttcttctattaggaagcaagtgattcagaagttttgcaatcgagcacgtgtagttggatggataatcccacaaagttcgtctttgttgataaggtatctttaacttatgtttcatggttcttggtggaataataattttcataacttctgctcagtaaacccggatttaccaatcttgcaacacaacattggcttt

SEQ ID NO: 143582 - DNA, 2580 bp, Arabidopsis thaliana landsberg
taatactttaatttgatgacccaatgaaattttatttcaagtctactcaacgtttttttttatttggtttggcctatcgttaggtataagcatcgactgtggatcatccggatctacggtggactccaacaatgtaacatgggtcggagataaaggcttcgtcaccaacggcgagcccatgaagattccggacgttgtcaaaaagccaatcaacactctccggtacttcccaactggtcaaaccaactgctacaccaacattccggtgacaaaaggccagaaaaccctcgtgaggacgaagttttactatgagaactacgacgcgaagttctcgccgccatcttttgatgtgatttatgacgggaaacaccgtgattctattgtaattactgagtcgttgctaaatgatgaagaaacgttctatttctcggaggtgatatatgttccggagaataagaatatcagcgtctgtctcttacgtacgtctccgtccgacaacccatttatatcgtccattgaagtttatagtttggacactggcatgtacgacgatcttggtcctaacgaaggtctcattctccacgacagaattgcatacggtgccaaagagcttataaggtatactgatacacaaagcttttactagaatttttttatcagtatatgcatctaataatcatagtattaaaagttttatatgatgtcttttcgttgactttaattttctttaaacctttaaatctgcaatccattgctaatatttcattaggcatatagtttttaccctacgtctagacaaaatttattaattcatatataaaagtttgtataacgtcaatttgcatttttagaattgtatcaattagaaaggacaactttctttcaatgtgatattattgcgtaattaatatattttcatattgttggtttcttgatatatatttagctacccgttagacccctacggtagggtatggttagcgttaggatcccaagactccacactgaccgatctaacgacctcagccccatcaatagacatcaccggggcgtcgaacaagccaccagagattgttatgtcaaaggcattatcaggagtcggcttagtactctcagaccagactctacccctaaccggagtaccagtatacttggttctttacttctcagagcctcaaagtctaggtcgaacccagagacgatcgttcaacgttttcttggacaacactcaagtgggttcgcgtcccatcgtaccggttttttgggaaagcaactcaattcattttgagagatgtagtggccacatcggcgtcccagatagtctttcagtcaacggatgactccgttttgccacccctcatcaacggattggagctgtactcgataagtaataccagtccagacagtggaggcggcggtggagaccaaggcggcggtagtacggatgattcggaaggttagttaatttattattggaccaatacataaaaactataaatagttaattcaagtaattaaataacgataatttgtcaagttataaataaataaccaaactcgaacatgaaaaattgatgttgagtttagtggacaataattaggaaggaatgatctcaatgcaaagaaagaaaaaatcaacttgattaaatctaaagtatgaaatgctttggatgatactaattattttcattttataatgtaatgaatgaaggttctggaggagcgaaacaagcaaaaaatttgggaaaaggtttttactcaaatctctatatacatttctctttattgttattaagttatttaactttggtgttttttaaaatttttttaatgatttttagttatcacaaattgaaaattagcacaccaaatagaattttcgggaaataaaaaatggtacactatgtacctaaagtctaaagatatcggatatacctctaacctacatggataacatagatatttagtaccctttaacaacactaggtttttatatacaatattaaatatatatatattttctgttaatttattttagtaaatggtatctattattttctagcagagattatactgattttttttttttttttttttttttaagttcatatacataaaaattaaacagtgaggatatgaaatttaatcatttgattggatcattctttgccactttatctcagcacatttaataaattactaaatttagatatatctcaattaattttcaaattttagataaggtttagaaaagtttttcttttgtgcatgtcgtgacgcctttatatgacgactttaggtggggcaaaaagcagtggagggaagaagaataacaaattaccactcattcttggcgttacgttcgcctccgcctttgcagttctcgcgtcagcgtttgcagctatttggaaaaagcgtcaaaatgctaagtcacagtcgaacagtactgtaccaaatacgtccacaggtatggttaagttaattgaaatataaagtactatatgttaattattcgaatataaatgacaagtacgtaatattttgaatttatttttcaagagcatggagcaggcacaggga

SEQ ID NO: 143583 - DNA, 3967 bp, Arabidopsis thaliana landsberg
tcttctttaatcgggctcgtctagtttcatcttcaatgatggttccgtcaccggtttcaaatccgaaggcttgatcttatccctcactaatcccatctctaatctccaatccctaatttcgtcaaaaggagatcatgatgttgagaattccggaacaattgaagacggtcgattggagactccgcagaaacgccgtaagtgcgttgagggagagagtagtggtaagcgaaagacttcgaaatcgaagagacgagttttatccgggagcaaggagaagactgtacagggaaggaagagggtaaagagtataggtatggtgaatggaagtataagtgtagtgcagcagcttcatgctttggttgctaataaatgcttgaagattatatgtcgtgtggtgaaggttgataaaggtgagaatggagaagaaagagctgtggtgttagttgatgtttacctgcctattgaattgtggtccggatggcaatttcctaaatctcaagctactgctgctgcattgtttaagcacttgaggtaattcttttggactcttgagtaatctctctatcgctagaatagttttctaaattgtagttgcttggtttagagagattaaatggacatgttcaatttcatggtatgggaatgcatctgttgttatcatgaatgtaaacttcttctgttgagctatgtcagttaggttcactgtaaaatgaatagatacttctctcgcaattttaatgtattccacttttttgcagctgtgactggggactgagagtctcaatccttgacggaaaaagtatttgggaagaggccaatggaagaataaaggccatctgggatctatctgactgtcatgtgtttgactgcaaattactctgtaatgccccaaattctccaaaaagacggttatttaaactacatgaaatttttaagagcttgcccagtccaggaaatcatgatgtgtcttattcttctagagtattgccgtctactgactcttgtgcatctggtgtatgggatctctcagatgacgttttgattagcatactgatgaaacttgacacgaaggatctttttagcattgcagcagtctgccgtctcttcagatcattgacctctctaattgtgccatgtatgaatctaaaactctttcctcatcagcaggcagcagttggttggatgctggagcgtgagaggaaagctgaagtttcctcgcatcccctttacttgagttttgatactgaggatgggtttagtttctacgtaaatgctgtgactggtgatataatcactgaggcagctcccatggtcaaggatttccgtgggggaatgttctgcgatgaaccaggtctcggaaagacaataacagcattatcccttatcctaaagacgcagggaacaatggctgatccgcctgagggacttcctatcgtttggtgtacccacaaaagtgacaaaaaatgtgcctattatgagtacacgagtgaccagttcacttctaacagcatgtctgctgtaaagaggtttcaaagtccaagtagctgtcgaaaccaggtttcttttgaagcctttcgtccgctgctggagtcaaaatcgttgccatttaagcaagcgaggctgatggatccagatgatcaaacattggagtctaagaattcaaactttgaaaacgaatttgaaactcacatccctgcgtccctggatttaaaagctcaatgtagaaagagcttgggtaatgtcagaaaaaatctcttgcctgcatataatggcgcatctgagctctctgaagtgatggaagctaaaagaatcagtaattggaagaaatgtggtatgataacaggttgcaagagaaagggtcttactgattcggatgtggaaagcaatatttggatgcagtgtgaatcttgctcaaagtggcggagaataatagatgaaggtgtatctgttactggttctgcatggttttgtagcaacaataatgaccctgcatatcaaagttgtaatgatcctgaagaattatgggataaatctcaacctataaaatacttgcaagggttttatactaagggagcctctggggaagaaagtgataatatctctttcttcacgagtgtccttcgggaacacaagtcttcagtaagctcaaccgtaaagaaagccttaatttggcttgctaaactccctcttgagaagctctcacagatggaaacagttggcttacctggtccagtgttgggtttaaaattagatgcccttgggttccagagaatatttcgagcatttggtcttaagagtagagttgaaaagggtgtcaccaaatggttttacccgaagtttcttgagaacttagtatttgatgtacctgccctcaaagttgctctctgtcagccgctggatacatttagactgtatttgtcaaaagcaactctaatcgtcgtccccacaaatttagttaatcattggttaacacaaatccaaaaacatgtttgctctgatcagcttcgtattctcgtttgggctgaccatatagagctttctccacacagcttggcttgggattatgatgttgtgatcacaacttttagtcgcttaagtgcggaatggaatccccggaagaaaagcccattgatccaagtgcattggcttagggtcatgctagatgaaggacacactcttggttctagtgtcagtttgactaataaatttcagatggctgtttctctgacagcttgtaatcgttggctattgacaggaacaccaacccctaacacaccaaatagccagctttcacatatccaacctcttttaaagtttcttcacgaggaagtctatggagaaaatccaaagttttgggaagctggcatccttagaccatttgaagcagaaatagaggagggtcgtttgcgtttacttcagctgcttcagagatgcatgataagctctagaaagaaagatctgcagatgattcctccgtgtatcaagaaggtgacataccttaatttccttccagggcatgcaagaagctacaatgaactagtggagacagttaggcgtaatatcttattagctgattggaatgatccgtctcatgtagaaagtctgcttaactctaaacagtggaaatttcggagcattaccattagtaatgtcagactatcttgctgtgtggctgggcatataaaaatgaccgacgctggtcatgacattaaagagacaatggatgctttacttgaaaatgatctggatctttcgacggaggagtattcttttattcaagatagccttattggtggctgtaactgtaaaaggtatatcttaaatccaatgttttcattagtttggggcatttgccacaagtatctaatttcgcttttgcttctcatcttataaatagatgtggggaatggtgccgacttcctgttatcactccatgtagacacctgctgtgccttgattgtgttgctcttgatagcgaaaggtgtactatttctggttgtggatatttatatgagatgcaaactcctgaaactttggcgcgaccagaaaatccaaatccaaagtggcctgtgccaaaggatcttattgagttacagccttcatataagcaggtagatatgcgtataaaccatcttataagttaacgacttggttcctggaatggtatactcaaatgcattacttcattattcaggacgattggaatcctgactggcaatctacgtccagcagtaaagtcagttatctcgtagacaggctgaggaagttacatgagggtaataaaaaaagcattttgtctttcaacaagactgacaatgacaacctggaagacaatcccccaggtacctcggaagcctttttggggaaagaattacatggacaggattgtggatctcagatggtatttgttgataaagtattgattttctctcaatttctggagcatattcacgtgattgaacaacag

SEQ ID NO: 143584 - DNA, 586 bp, Arabidopsis thaliana landsberg; identical to SEQ ID NO: 16739

SEQ ID NO: 143585 - DNA, 1383 bp, Arabidopsis thaliana landsberg
atcccaagaagcttctgggctgctagtagttataatatctcttggttgtgcagataatggatcttgtggacgagttatttgtgtttatattcactagtttgaatgagaggtgcaaaaaagaactgcaagctgttggaaagcaatacccatttgaacctttgaaggtaaccatatgcagtgtgaacaaggagtattggaaactgagttttatcttaattggattctgataatcggcacttaattgcagtttctaccaaaaacattgaggttaacgtttgaagaaggggttcaaatgcttaaggtatggcttgtatatttggcgttttagctgtggttttcgaaagtactatcaataatttttgtaatcttgatgtgttgacaggaagctggtgtggaggttgatcctcttggcgatctaaacactgaatctgagagaaaactaggccagcttgtattggaaaagtaatccaccacttctttctacctgatcgatattcttttcattttcaaattgatttagttctgcatctcattgttacaaagttgttctaacactattgcgttgttgattttcgatgataaaaacaggtacaacactgagttctatattctgcatcggtatcctaaggcagttaggcctttctacacaatgacttgtgccgataatcctctttacagcaactcttttgatgtcttcatcagaggtacatctttgagtgattcttttttaccttgtgtgttcacaccaattatgctactgcacatttgatactaagtttacgtgttctgtcctaggtgaggagatcatatcaggagctcaacgtgtccatatcccagaagtcttggagcaacgtgcaggagaatgtggcattgatgtcaagacaatatccacatacattgattcattcaggtaaattactaactggactagctcggttccttttacttgcttatctgagttgttctctaagcagagcattgctacatatatgttgacaggtacggtgcgcctctacacggtggatttggagtggggctggagcgagtggtcatgcttttctgtgcactgaacaacattcggaaaacatccctcttccctcgtgaccctcaaaggctttcaccctaatatcttttcaactgaaagctattgagtgaataattgtccaactccacaaatttttctcatgaagcttttagagttttttacttcttgttgtctaactctcctccttttgtataagtgaatcttggtttttgttttgtgatgtttatgtttcattcacactaatttgagtcttttaattgcttatgaaacaattcggctagaaattttaaggacaaaatattaatttgaaaacataatgttgatatgttctaaatata

SEQ ID NO: 143586 - DNA, 2112 bp, Arabidopsis thaliana landsberg
atggaactggagggctcgagtagtggccggaggcagctgccgtcaaagttggagatgagccgtggagcgtatttggcgtgggaagacttgacggtggtaatacccaatttcagtgatggtccaaccagaaggttgctccaaaggctaaacggttatgcagaaccgggtcggatcatggctataatgggtccttccggatccggaaagtccactcttcttgactctcttgcaggttcgttcttgcagttatatgatttaactgctgcagcctgcatgcataacacatatctactgtaaaaatagtttgatgtaactactatatttgtttgataatattatttgtaactatgttttagatcatctttaacctgctagttaaagtataacttataaagccctttgttttgtttttttctagttgttacgatcatccttatgatatatatactggaaagtttgattattgaatagtatctataattctatatgtattgttacttcgggtgcattgcatgcaaggaatggcagaaaagtactgcagaaaatttcctcataaatgcaaaattgatttctggagctgccttttctgatatttgtcttcatttccacatcccaatacaaacagaaagcaattttatactactgttttttttttcacatcatagataaaatttgtaatccattaataaaataaagtttcccgaattatccacaggtagactcgcaagaaacgtggtcatgaccggtaatcttctactgaacggcaagaaagctagattagactacggtctcgtagtaagtttcctcgttaatatttctacccacaatttcacaacatgcagctaatttgttagttcaatatataatagtaacgtccttgtggcttgtcacttgtggtggcgaaacattatcaattttcatttatggcaacaaattttagacagctccgtcctaagtacatagtggtgcaaaggtcaaagatctatacattattttcttataaatgtgtgataatattggcacattaaaaatatatttatagcccatgtatgtataacaataaaacattacattcaaaataacaaaaacctaaagtttttatgactaggtatttacattgattgctcttgaagtgtatgcattttgtgactatatatataggcatatgtgacacaagaggacgtattgttggggacactaacagtgagggagacaataacatactcagctcacttgagacttccaagtgatatgtctaaagaggaagtgagtgacatcgtggaaggcacaatcatggagcttggtcttcaagactgttcagacagagtcattggaaactggcacgccagaggagttagtggcggtgagaggaaacgtgtcagcattgctttggagatcctcactcgtcctcaaatcctttttctcgacgaacccactagtggtttggacagtgcttctgcgtttttcgttattcaggcgcttaggaacattgcacgcgatggcagaaccgtaatctcctcggttcatcagcccagcagcgaggtttttgcgctgttcgatgatcttttcttgctttcgagtggtgagtctgtctactttggtgaagccaagtctgctgttgaggtaaagccctacactctttgttttcttgcagtacaaaaaacacacaatttcttttgtttattttcttgccttgatagtgaagaaaactctgttttgcttttgtttgtttgaatgaagttctttgcagaatcgggtttcccgtgcccgaagaagaggaatccttccgatcattttctgcgatgtataaactcggactttgatacagtcacagctacactcaaaggatctcagagaattcaggtgtggtagtaaccattatcaatatcaagaacattgcacaaattaaagtcttttggatacatagtcaagtttttattgcaatttttctaaggttaatacttactctactacaggaaacaccagctacatcagatcctctaatgaatctagcaacatctgtgatcaaagcaaggcttgttgagaattacaagcgttcaaagtatgcgaaatccgcaaaatctaggattcgagaactatctaacatcgtaa

SEQ ID NO: 143587 - DNA, 3081 bp, Arabidopsis thaliana landsberg
  unsure (1)..(3081): unsure at all n locations
tcattttggaaaaaacaagctttcaggcaatatcccaaaagaacttttcagctcaaacatgagtttaatacatgtgtaagcttcatattacattatatagctgagagatttcataagttgtgagtaagtaactaacaaagtgactgcattgttcgttgttttatcgatagcctcttcgatggaaaccaattcacgggcgaaattccagagaccctcagtctcgttaaaacgttgacggtgttgtaagtagtaatatatatagttcaaattttttatttatcctaacgtctataattcttatgtgttttttcttggttctagacgccttgataggaacaaactcattggagatattccttcatatcttaacaatctcacaaatcttaacgaactgtaagtgagcaactaaagatttgttcttttgtttgttgaaaataaatgaaaatgaggtacaagaatttgtagttgaatacatttcaggtacttggccaacaacagatttactggtactcttccaaatttaaccagcttgaccagtctctacacattgtaagttttttacatttatcatcactaccaatctcaaaccttcattctttaccaatctaatgccatgatgtgattgtaaatgtaacagggatgtgagcaataacactttggatttctcacccattccatcatggatctcttcattaccctccctatcaacattgtatgaacatctctgtctctgtcttgttctccatttatctcccatgtgtatactttctaagaacaaagggttttcttcttcgcagaaggatgcaagggatccaacttaatggtccaataccaatctcatttttcagccctcctcagttgcagactgtgtgagtaaaaaaaaaaaaaaaatgaagctggaaatgaactcaagaattatgaactttgtactaaattgggattcttttttttttggactttgcagtatcttaaagcgaaatagtatagtggaaagcttagactttggtacagacgttagcagccagttggagtttgtggatttacaatacaatgaaataactgattataaaccatcagctaataaagtcctccaagtaatgtatgtatccttgtcactaatcaaacatgacttctatttgtctcaatcaactgcttaagtgtttatatatctacagattggcaaataatccagtgtgtctagaggcgggaaacgggccgagttactgttcagcaatccaacacaatacctcattttctacactcccaacaaactgttctccatgcgaaccgggcatggaagcgagtcccacgtgccgctgtgcgtatccattcatgggaacactctacttccggtctccttctttctcagggttgttcaactccaccaacttctcaattctacagaaggcaatcgcggatttctttaagaagttcaattatcctgtagactccgttggtgttcggaacataagagagaatccaactgatcatcagcttctaatagatctattggtctttccattgggaagagagagttttaatcagacaggaatgtcacttgttggnnnnnnnnnnnnnnnnnnnnnnnntaagcctcctccgatatttggcccttatattttcaaagctgatttgtacaaacagttctctggtatgatgaacccttgtcacacacacaatcaaactagaactaaaggttgttattgataactcatttgctctgcctttctttttgtcacagatgtagaagtttcatcaaagtcatcaaacaaaagcattctcattggagcagtagttggtgttgttgttcttctactattgttaacaatagctgggatttacgctcttaggcagaagaagagagctgaaagagcaactggtcaaaataatccttttggtaagacaacaatatttactactcccttgactaaaatagcatgaacaaattttctttggcatgttgcagctaaatgggatacaagtaagagtagtattgatgctccgcagctaatgggagcaaaagcgtttacttttgaggagctgaagaaatgcactgacaacttttcagaggcaaatgatgttggcggtggaggttacggcaaggtttgtgtcttaacaaatgccttcaaatgaatgtaacaactaatggccttagttgaaattcatgatcccaaattttgatggttaaataggtttatagagggattcttcctaatgggcaactcatagcaatcaaaagggctcaacaaggatctttgcaaggagggttggagttcaaaactgagattgagcttctctcaagggtccatcataagaatgttgtcagactcttgggcttctgctttgaccggaatgaacaaatgctcgtatacgagtacatttcaaatgggtcacttaaagacagtctgtccggtaagatcaaacttctatcttcctcatgaggatttcagatagttcttggatgctgaatatgttagtaatgcagggaagagtgggattcgattggattggacaagaagacttaaaatagcacttggttcaggcaagggcttggcttatcttcatgaacttgctgatcctccaattatacatagagacatcaaatcaaataacatattacttgatgaaaatctaaccgcaaaggttgccgacttcggtctctccaaacttgtgggagaccctgagaaaactcatgtcacaacacaagtcaaaggaaccatggtgagtagaaaatttatcctcctttctctttttttctcaaatacattttaaacttacaatatctttgtaatcagggctacttggatccagagtactacatgacgaatcaattaacggagaagagcgatgtgtatgggtttggtgtggttttactcgagctattaaccggtagaagtccgatagagagaggcaaatatgtggtgagagaggtgaagacaaagatgaataaatctcggagtttgtatgacctgcaggagttgttggacacaacgatcatagcaagcagtgggaatctaaaagggttcgagaagtatgtagacttggctttgagatgtgtggaggaggaaggagttaataggc

SEQ ID NO: 143588 - DNA, 789 bp, Arabidopsis thaliana landsberg
ttttttcgatttgttatttgaagggaaggttctttcaaggatgagaagaagagaatcgttgagatggagagtgaagatgcttatagaatggcgttgaagactatggttaaatgggtgaagaagaatatggatccattgaagacgagggttttctttgctaccatgtctcctactcattacaagtcagtaacttcttgaactttactgtgatttaactatctataaacacttcaaattcaaaaccaggaaccaaaaagagaggagatatatggcttagaacaatgtagtccggatttggtattgaatgaaatgagtaatggagtttagattgatccggtttatctttaatagtttaagtaaatgtggcttataacatgatccgcaattagaaaccacactaagatttagcatacaaaggtttcatatttgtctacctccatgatcaggggcgaggattggggaggcgaacaaggaaaaaattgttacaatcaaacgacaccgatccaagacatgaaccattggccatcagactgcagcaaaaccttaatgaaagtgataggagaggaattagaccaaagagcagagtttccggtgacggtacttaacattacacaactctctggctatcggaaagacgcgcacacgtcaatctacaagaagcaatggagcccattgacgaaggagcagctagcaaatccggctagctactcagactgtatacattggtgcttgcctggtcttcaagatacttggaacgagcttttctttgccaagttattttatccatga

SEQ ID NO: 143589 - DNA, 822 bp, Arabidopsis thaliana landsberg
tttgtttatttgtgagaaatgaagtttatgaaacttggatccaaacctgattcgtttcagtctgatgaagattgcgtaaggtaaaaatgtctttcaagattttggttcatatggtttgcttcggaatcttactttctctggctgtttttagatatgtagcaacggagttagcgactgatgtagttgtaattgttggagacgtgaaatttcatcttcataaggtaagagtcatgaactcattgtaaccaaccattttggtcatagctactgatctagtgatgtttttgggtttaaaacagtttcctcttctttccaaaagcgctcgtcttcagaagttgatagccacaaccacgaccgatgagcaatcagatgatgatgaaatccgcattcccgatatcccgggagggccaccagcgtttgagatatgcgcgaaattctgttacggaatggctgtgactctcaacgcatacaatgttgtagctgtgcgttgcgctgctgagtatctcgagatgtatgaatcgattgaaagcgggaatcttgtttacaagatggaggttttcttgaactctagtgttttgagaagctggaaagactccattatagttcttcagacgacgagatcattttatccgtggtctgaagatgtgaaactcgatgtacggtgtttggagtcaatcgctttgaaagctgctatggatcctgcaagagttgattggtcttatacttataaccgaagaaagcttcttccccccgagatgaacaacatttgcgtaccgagagattggtgggtcgaggatctcgctgagctcagcattgatttat

SEQ ID NO: 143590 - DNA, 869 bp, Arabidopsis thaliana landsberg
cttcctcaacatgacatcaagaacattcacaagacattccagtctcattcatgtttttctcctgctttctctcgttttctcaggttattttctttttcattctgaaattttaaaaccaaattcttaacacttaagttatgctttacgttgccgccttaaaacctcaacgtgtaagattttaacatagtgaaataacggatcgataataagtctagaattcaatttttcaatgtttgtttaatggaatattaaagatttttggcattgttttctaaaagttcgattctttgtttggaaatatagggaatatactacaaacagtaacgtctcttggcatcaattacggacaagttgggaacaatttgccttcaccggataaagtcattaacctcttgagatctttaaggatcacaaaaacaagaatctacgacactaaccctcaaatccttagtgcctttgcaaattcaaacatcgagatcatcgtcaccatcgaaaatcaggttttaccattactacaagatcctcaacaagctacccaatgggtagattctcacattaaaccctatgttccggccactaggattaccggaattatggtcggaaacgagcttttcaccgacgacgactctagtttaatagggtaagtactaatcgttgaatattagtctaatttgttacatgatcacagaattagttttttttcattaactgatttcacattttcttgactaccacttggtcaaatgtaacgaactccttcgaaaaaaatattatatttattaaactccactttgatttcaataagaaatgagtgtaatagtttttgtccaataattgctaattttgactatattctctcctccttttgg

SEQ ID NO: 143591 - DNA, 1473 bp, Arabidopsis thaliana landsberg
atgttgcaggatatggttgcgttctcttgttgtgtatttgatggtggagaccaagaaaaacaagacatgattgccgctagagaacgaggatggaaagggaagttcacaaaaccgggccgtgtgatacgaccaggagctaacaggctcaatgggaaatgccctttaactcctttagaggtaagcataaatactttagaacctggacattactctacttatccacgattgtggtctatattaagtattagtgttacgagaatattgttgtagattatttatccatggacactgctgtggaataatcagagtagttgtgcaaacccttgagcatgtgagtagattaacttgctgatattggttcaattttcgttcttgtaaacctatcaggtcggtttgatgcttagaggaatgggcttcaacaaaagtacatatatattccttgccgctggcccgatatatagcgcaaatagaactatggccccactactcgagatgttccctaatctacagacaaaggagatgcttgcttctgaggaagacctggctccttttaaggtttctacgattttccactgtttgttcatccaggatgagtcctttctgacttgtaaacttatgtgtctgtgtttagaacttctcctcgagaatggctgcaatagattacacggtgtgtctccacagtgaggtatttgtgacaacacaaggtggaaacttccctcatttcctcatggggcatcggaggtatttgtttggaggacattcaaagacgattcggccagacaagcgaaagttagccgtactctttgacaatcccaagttggggtaagaactctaacctcttccacctacaaacatgcttttttggttaataatatctgtttgatccctcaatggttgtttctgatattacggcagatggaaaagttttaaacggcaaatgctaagcatgaggtcccatagtgactccaaggggtttgagctgaaacgatcaagtgactccatttacatattcccttgtcctgattgtatgtgccggaagaacaaaacaacagcatcagccacctgacacattcttttactggattcttcttgtgcattcttttatttacatgtgttgctaattctttcaattctttggccacatccgcatccaaacagagcgagagcgagacagagaggacttcccaagcattcttcttgggggagattttttaacacattgaagctgatgtatctaacacgagaaactgagattagttcccacgtttgtttctgggcggagaggatagcatttggatgttcatttgtgttttgcagtttgaaaagttttttgagttttgtatagttggtggtctagtgttgggtttgcccataaataaatgtagatcataggggagaagagagctgccaaaaaaatttgtacattgattggttcctttttggtttaatcttgtttacatttcattttaaata

SEQ ID NO: 143592 - DNA, 995 bp, Arabidopsis thaliana landsberg
attatagaattaatgaacctctccctgaaaatatctcatccttcaccaatcaaaaccttctcatgtcttcttctctcctcgacctttgaggtggaaaattaaatatattcccttagctttttttctcctttagttttcttcttattcttgagttttttttcttttgatcctctctaatttccttgttgattcatcgactagatctaattcttctcacaaaagactgagtgtgttctttctttcaaatctttcaaaaactagggtttttactgtcttgaaatcatatttattcttctaaatttagcaaaaagaacacgatttactttccatttcagtcgtcttgtcactctctctctcttctttaaagtctccctttttagcaaaaattctctctctcacaaaatttatttcctctggcttcttcttcctcctcctccatctcttctctttactctctctttaatcatctctcattcttgaatcttgatccatcaaaatcaatcccgttctcgaaagatccattaaaatcaaaacctaagctctctctcttgcttctagggtttttttgttcgttgtgatggcgagagaaaagattcagatcaggaagatcgacaacgcaacggcgagacaagtgacgttttcgaaacgaagaagagggcttttcaagaaagctgaagaactctccgttctctgcgacgccgatgtcgctctcatcatcttctcttccaccggaaaactcttcgagttctgtagctccaggtctttctttctctctctaacttccctctctatagatttctcataactcatcgaaggaatcttgtctagatccagacaaaaaactttaaagagtttttagatgtatatctgatacataggagtttactgtatcaatctttataggaccactaactatttatataattaaaatagttgttagaaacattaatcatgaccataaatgacatatataaagtgtatagtaaaactctgta

SEQ ID NO: 143593 - DNA, 617 bp, Arabidopsis thaliana landsberg
  unsure (1)..(617): unsure at all n locations
atggaagctgctaatgagcctgttaatggcggatccgtacagatccgaacagagaacaacgaaagacgaaagcttcctaatttcttacaaagcgtcaacatgaaatacgtcaagctaggttatcattacctcattactcatctcttcaagctctgtttggttccattaatggcggttttagtcacagagatctctcgattaacaacagacgatctttaccagatttggcttcatctccaatacaatctcgttgctttcatctttctctctnnnnnnnnnnnnnnnnnnnnnnnnnnttacatcatgagtcgtcccagatctgtttatctcgttgattactcttgttatcttcctccggagagtcttcaggttaagtatcagaagtttatggatcattctaagttgattgaagatttcaatgagtcatctttagagtttcagaggaagattcttgaacgttctggtttaggagaagagacttatctccctgaagctttacattgtatccctccgaggcctacgatgatggcggctcgtcaggcctctgagcaggtaatgtttggtgctcaagataagcttttcgagaataccaagattaaccctagggatattggtgt

SEQ ID NO: 143594 - DNA, 1169 bp, Arabidopsis thaliana landsberg; identical to SEQ ID NO: 33081
  unsure (1)..(1169): unsure at all n locations

SEQ ID NO: 143595 - DNA, 946 bp, Arabidopsis thaliana landsberg
gtggccaacgccgtttgctattttcctgtggctctgatatgctattgggcctttggtcaagacgtggacgacaatgtgctgatgaatctacagagaccagcttggctcattgctgctgctaatctcatggttgttgtccatgtcattggtagctaccaagtgtttgctatgcctgtctttgatcttttggagaggatgatggttaacaaatttggttttaagcatggagttgttctgaggtttttcactcgaactatttatgtcggtaagactttaatttactgatgttcctcatgcatgagatagtaaatatttgtctaattaagtaaaagctaattataaattgagtatttgcgattggaaattttcagcatttacattgttcattggagtgagtttccccttctttggagaccttctaggcttctttggaggatttggttttgcacctacttctttcttcgtaagtccatttttaagatagactacattaatgttcaaagttatgaatataagtaatttgataatctttgtatgcatatatgattgatcatgatgcttcatgcagctcccaagtataatgtggcttatcatcaagaaaccaaggagattcagcgtcacctggttcgtcaattgggtaaacatctatatctttcgatacttatgtatattcttgcgacgatgaacaatatctagacagttgatctatatatatctttgggcagatctccattatcgtaggagtgttcataatgttagcgtcaacaattggagggttgaggaacatcattgcagattcttctacttatagtttctacgcttaatattgaatagatcttgtacactaaagcatgaatcattggatcatctaaattaaaaagtgtaggaataaatcatctaaattaactgatggtcggatcgagttagagagtgatgtataatgcta

SEQ ID NO: 143596 - DNA, 625 bp, Arabidopsis thaliana landsberg; identical to SEQ ID NO: 177

SEQ ID NO: 143597 - DNA, 515 bp, Arabidopsis thaliana landsberg
acgacccgagttttattggcttaacttaaaccaagactctctggtgatagaagctctggcgaaatacatgacggacttagtggactccgggggctatcgctaacccgaccaggccgatacaatccaaaccccatgaaaaagaactccattggtatcaacattgcatgtggttgctcttctgtcaccattgatccacaagcttgcacctgcaattctaaaaacatcaaagcatgttccacgaatctaaaagcctgaatctttagtctcggagagaagttaagagctaccagagctgtttttacattaaaccgcatacctcaaccaaggcgctgtactttctgtccaatgctgtcaccatgtgaagagtttcagagtggaaaggagattggtcgccaacaaagatgagtgtacggcatttcaaactcttcaatccatcagttaagtcatgtctcctgttaactgcttctagaaaccgcataagactactaccgtgtctttcacctagcagctgtata

SEQ ID NO: 143598 - DNA, 572 bp, Arabidopsis thaliana landsberg; identical to SEQ ID NO: 66788

SEQ ID NO: 143599 - DNA, 517 bp, Arabidopsis thaliana landsberg
ctttccagaacgtctccttgaggatacaaacaatttcgagttatatggtttaccataatttcgtaatctttttacccaatgtaataatgctattcgttcttgcagaactacccaaccgaggaggaactttgctgtgtatacgttcccacgaaccacctttacattggagatatactacttgtcaacagtaatgacgttatcaggccaaacctctcggtccgggaaggaattggtgagatttcagaatctaattgtctatactagatacatttatcgtttgttatatagcattcaaattattttgtggaaagatactgaacactgtatactcattcttcatctgcagagattgttgtttccgggggaatgtcaatgccgcagattctatcgactcttgataaacctttggcctcgattggaaatgaatcttaaagtgactattcaaaaacctttggccgatcgataggaaaaaatcaaaaatcagaagagacgtttcacaaaatctgagcgaatagag

SEQ ID NO: 143600 - DNA, 1143 bp, Arabidopsis thaliana landsberg
ttttttttccacaaggccaaaattttttccatttaataaaatcaaaaaagaattaaaaaactttaattagttttttccagaaagaaaagaaaacaatgagaggtaaatttctaagtttactgttgctcattactttgccctgcattgaagtttccgccaaaaagcattccacaaggcctagattaagaagaaatgatttcccacaagatttcgtttttggatctgctacttctgcttatcaggtttagttcttattcttttgtccattggttcttttttgtatgtatgttaacatttttcgattttgcagtgtgaaggagctgcacatgaagatggtagaggtccaagtatctgggactccttctctgaaaaattcccaggtttttttcctaattagaaaccccaaaagctttagatctctataaagatttaagcctcaaaatgttggagtttggttcatatatgtgaatctggttttgtcttgtgttcataacaaaaatgggttgatgatgatgaaccttcttgatacttctttctttttcttggtattaaatttaaagataaatatttttgtcattttcattttcagaaaagataatggatggtagtaatgggtccattgcagatgattcttacaatctttacaaggtcttgtttgctttcttcacccaaaaaagaaataaagtcaattatacatcaagcattacattttgcttcatgatttttttttggaaaatcaggaagatgtgaatttgctgcatcaaattggcttcgatgcttaccgattttcgatctcatggtcacggattttgcctcgtaagatatcgatattatcggattagatctttgtaacttgtaagagttgttatatattcttgatgtaactcttctcaattgtttattaggtgggactctaaagggaggaatcaaccaggctggaattgaatattataacaacttgattaatcaacttatatctaaaggtaatgtttctctgtttctcagtctatttgattttaatgcacatagaggaaatcttggtgatgtttaggatattgccaaaacccttgtaaatttttttaatgtttttcttgtaatgttgtaaatgtgtcaggagtgaagccatttgtcacactctttcac

SEQ ID NO: 143601 - DNA, 1508 bp, Arabidopsis thaliana landsberg
gagctacaaaaatggatttgtctggcacgatttatcggaggacgatttcatcttccctgttcaaggtcaagaatatgttctcaaaggctctgaggttcttgattcttgtcttatctcaaacccaagaagcctcctcgaaacgtcgtcgtttagagacccaagatctttaaatccagataaaaactccggcgatgatatcccggcggtgataaatcgacggaggaaccagtcttggagctctatcgatctcagcgagtacaaagtgtacaaagcaaccgagtcaagcgccgagtcaactcaaagactcgctgcggacgcttctactcagactgacgatagacgacggaggagaagaccggcgaaagaggaaatagaagaggtgaaaagtccggcgagttatgagaatcagagtacagagctgagcagagacgagatatctcctccaccgtcggattcaagtcccgagacattagagaatctgatcaaagccgatggacggctgatattgcgtcctagcgaaagcagcaccgatcatcggacggtcgagagtttatccagcggaagaatgagagcttcggctgtgttaatgcagctgatatcgtgtggtacgatgtcgtttaaagaatgtgggcctgttttgttgaaagatcaagggctggcgttgaacgggcgtagcgggtgtacgataacgagaggagcagaggataatggtgaggagagggtagataaggaattaaagagttttggaagggtacaattggaagataaggagtattttagcggcagtttgattgagaccaagaaggagcttgttcctgctttgaaaagatcttcttcttacaatgctgacaggtagaaaaataaaacatcaagcagttcgatttctctttagatgaacggcacgtagttctattttaacttttatgaatttacccgtacattgccaattattggttatggtgtgttgaactgttgattgaaagagctgaaaatggtaaagtttgtagaagtacattttggggtgtctttcaaacgtcttctcaatttttaaaagttctaatagttttttttaatgaaatgaaaggttataataattgatatttgataaattttattaggtgttcaagaatgggaccaacgacggagaaggatgaggaagaagcggttcgagctaagtgcattccgagaaaaccaaagccggtggctaaaaggaacaatggtgggcagcagtaacaaaagcggcacgatgagtctaacaagcttattttgggtttaagtagaagagaaaagtagaatagggaatgatgagtttgtaaagcattgtgaattgtgtaggtaaactataacaattcctttgcatgctaaaaaaattaagagttaacatgatgggtgaatatataatatataatgttgtagtctgagcctaggtgtcttttgaggttaatttcaatctggttttcttttataaccccaatattactttatcgtagtgattgggaacctaaatt

SEQ ID NO: 143602 - DNA, 1585 bp, Arabidopsis thaliana landsberg; identical to SEQ ID NO: 10526

SEQ ID NO: 143603 - DNA, 986 bp, Arabidopsis thaliana landsberg
gtcatggatcatcttgtgcagcatgcaagtttctaaggagcaaatgcatgcgagtgtgcgtcttctcgccttacttcagctagatacaagcctcttcccatttcgcagcggttcacaaagtctccggcgcaagtaatgtctctcaacatttgcttcatttgcctcaacatcaaagaaacatcgctgctatcaccatctcctacgaggctctctctcgcatgcgtgatcctgtttatggctgcgttgctcacatcttcgctcttcatcaacaggtctcttaaagttttgaacgatattcttttattcttgttgagattttagaccatttcaagcagtctgatcacgttgcttggtgggtttatttttttaggttgtgactttgcaagaagagattgagtttctcgggtcacagatgaagaatttttcatactctaatcaaaacggatcacaacttaacaacataccggagtttgtgaatcagatgactatggccacgaccaatttcgtcgacgagagtgttttgaacaatgccgacggaagaaactgctatgatgggttcttcacgaactcagaggaaatgctcgtgaatcatcaatggctccagaacatggattattattactaagcacaacaaaattcgacgcgaactaaaaacgatggatctatatataatagttgtggagcatggttttgttgttatgataaatctgatttatgttttgtatatcagtcttgttatttacattcgcgttatttatcatatgcaatttggtaaggattaagcatatcttaaccctccaattaaagttggatttctaaaacaatgtctttagtttttcatttgaggggtctctgtaaaattgattgtgtaccattcggttaaattctaattaatgtaatattatactatataaaatgctattataaattaataaagagaattaaattggtatatagtataactatgaactgtctttccgtcataa

SEQ ID NO: 143604 - DNA, 4404 bp, Arabidopsis thaliana landsberg
  unsure (1)..(4404): unsure at all n locations
ctatctatcccctcttttcccaaagaacatcagcatgttttggcaagatgaggtacactgttgtttgttctagataatcttatgaccactattaagcgctacttgaagattgccttttttagctactaatacacgtgaccctaattagttttcacatttggtaagctctagattccaaaaatgaaggcgtatgtctatgacacagaagatctgaagctggatccaacttaccaggaaacttgggatgacatgataatcaatgtgagcttattcaacttctgtgaaagaaaaagaaaacatctttctgagctgaagtttctttaccatattatcaaagtttgatctatatattacttctaatcattgttcttttgtacagtttctagcagaatcattggatgtcacccaggatgctgactgggttatatctcttggaaattcttttgcaaaacaatatattctttacgctccggatgatgaccatgcagcacttctacaccggtaaaattcttggtttttcattttttttctggtctctgatgaagttgacatacctctacgttttgttggtgactattttgcgttagttgttgagaaaatatagttggtttggattgttgattccttctaacatcaaatcagcaagtgggtcgcatattgtcagaattttaaaatgtattccttgattgacataactttctggatttttgtatctggtgattttctgattcttttatcatattatcaaagtttataaaaagagagacattccgatacctgcattgatagtatacataaaattgttttgtgtacttcactatgtggctgaacaagcttgttttacttgtggtttttattgttatttttcagattctgagagatggctgataagttttaaactctctgaaaactgtatttatttaattaannnnnnnnnnnnnnnnnnnnnnnnnnnnnngtgctttgatttcaggtgtatcggaatacttctccagaaagttaatgatagagcatatgttcgtgacaagattgactggatgtacgaacaggctgacatttctatacctgcaaatagactgggtttggcgaaggccatggggctggtattttgagtgtacttgccttttttctctcttagatgttgattttcagcctatgttaatatgctaacttattgcgtaggtcgcggcttctcacttggacactgtactggaaaagctgaaaatcatcgtggataatgttgggcagagtattttccaaaggtttatcttgcttgacttattgaaatcatcaccacatatactttctaatgttaaaaatctagctatgcctgcatatctgtcactcattgtcgaacctattagtttatttctctcttttagatcataatttatatttcagtagtggaaggctgtatctaaaaggttcttaaattctagcttatcccaactcttcttatgtgtgtattaagttggacatttaaagctacagtggcacatgcagaaaatgttatatcaaaaggtttcctaatattagaaaatagcttcttcttagtcatctagttgcttccaggcattctagaattggtcacttttacaacaggtttacaaaatttatgacatattactgacttaatgttcttgtttttattgtaggatcttatctctcttctctgagagctataaaacagaagacagtgatgatatacacgctgctttggctttgatgtatggatatgctgcaaaatatgcaccctcatcagttattgaagccagaatagatgcacttgtcgtatgattctaaaccttcaaatgaatcgcatttctaattagattataatcttccatcctgcttctttttctataatctgttataaacttatgcgtcagattgactttaagtcttgctaagaaaactcatcttatgaaattaaattatcatgaagagtcggaaattcgagtagtttttttgtgaccagacagtgatttatgtttgaactgttgagaccttgtttttgttatctccgcaccacgtttattttcaaattccattttcataatcatatttcgtttgcatgtattacagggcaccaatatgctttcacggcttcttcatgtgcggcaacaaacagcaaaacaagctgttataactgctattgatttattaggttagtatggcgttgaaatgtagatgatggaatcattcattcaatgactgatcggtttctttcctctctttgatttttttctatcaagttacactgcctacatggtatggatataattttagggaaagaggatataggaccctgatcttttgtatctttgtgtgaaggtcgtgctgtcataaatgctgcagaaactggtgctacattcccattgaaaagaagagatcagatgcttgattatatattgactttgatgggccgagatgaaaatgaaggttttgcagaatctagtctcgaagttctacacactcaggtagtacactttatgtcaagaatctgtaccatgtgacatttctttcgaagaggcagataccatttctctttctaataaatttgtacaggcactcgctctgaatgcatgcacaacacttgtctctgtggaaccaaagctgaccattgaaactcgaaatcgtgtcatgaaggtgattattttctcgtttgaaccgagtataaaaagaaaagaatgagattagtgctgtttgttttgtttatacattttctcttgcatttacttgttttcgtggacaggctacactgggattctttgctttgcctaatgatccatcagatgtcattagtccccttatagacaatcttgtgactctcttgtgtgccatccttcttacaaggtatttatttacttgacaagttttaaattcgccaagctgttatgtgactgcagattctctgaatcttaggaaaagtttcttgatctgtttattattcccattggtgaaatactttctgtaaaactgaagtcttcagtggaatttcttaaataaattatccatgttctaggtttattctttcagtttttacttatttatttaaagtactttattagagacttaatttctagtttcgtctcttataagcttatttgatctgtttcattatcttgcataacttacatgttacttaatgttagattagattcagtgattatggtagtggatttggagtctcaaatattgagtcctactacaagtgtatgtacaaatttgtataagtatttttatgccgcttattcaatgatatatgtgcatgaactagtggagaggatggaagaagtcgagcggagcagcttttgcatctgcttaaacagcttgatcaatatgtttcgtcacccattgattatcaaagaaaaagaggttgtgtggcagttcatgagatgcttctaaagtttcgtaagctttgtgttggtggctattgtgctcttggttgttctggggattgcccacatagaaagtatgctgaccgcagtatgcaggggaatttttcaaatctaccatgtaggaagatatccttcaacaatttgtttgatctttataacgtatattatctaccagctaattaattaatttcctttgtttgaccaacagcggtatttttatttcctgatcgcgaggtattatgtttgggagatagggtcataacctatctcccacgctgtgctgacacaaattctgaagtacggaaaatttcggcacaggtatttgattagtacttatcctgatcaactgtgtcacaagacgatgggtcagcatttaaactgagtgaaacattgatagtttctaatggtttctcctactattatttttgttagattcttgaccagttcttcagcatttccctttcccttccaaaagctgtacttacaagcgggttggattctgaagactcctataaagccctgtcttcccttgaggatgtcattgccatattgaaaagtgtaagcactttgtggttaggctcagagttatgtccatttcttttgtttgcttcatgttcagggtgtcagatttatttgaattggctttcaggatgcctctattgatccatctgaagtttttaacagaatagtctcttccatttgttctctcttaacggagcatgaggtttgttttactccttcttttgtgtaaattttggttcctttggatggttgtggtcccatcatgttgtgctatgtcatgtagcttgtagcagccttgcatagttgcactgcagctatctgtgacaaaatcaggcaatctgctgagggagccattcaagcggttactgagtttgtttcaagaagagggagtcagcttagtgacaatgatatatcaaggtacatcaaagcttgttgtcatagacgggctatagtccttttttattgttatctgacaaccttg

SEQ ID NO: 143605 - DNA, 1195 bp, Arabidopsis thaliana landsberg; identical to SEQ ID NO: 36026
  unsure (1)..(1195): unsure at all n locations

SEQ ID NO: 143606 - DNA, 1891 bp, Arabidopsis thaliana landsberg; identical to SEQ ID NO: 29871

SEQ ID NO: 143607 - DNA, 939 bp, Arabidopsis thaliana landsberg
aaaaaaaaaattgaaacctgtctcttcagtttcatcactagcctcgtgctccaccattagacagagacattttagaactccgaaaatgtcaataaaatggatgatgattatgagaaaaacttacacgtttaataggcccgaagttgctatctagcagttgtagccatggcgcgctttgacaatgcagtttgaaggagagaagaaaaactgtatccgaagttgcagacgtaaccctcaagcaagaagatgaacaacaagaacgtagatcttattcgacgccgtttagggaagagagagacacctttggcccgatccaagttccttccgataagttcggaatcagatctttacgatatatatcgttctgatctcgagggaaaatattctcacatttttatttgttgttctgtgtcagattatggggagcacagacgcagagatcgcttcagaacttcgagattggtggtgaccgcgagcgaatgcccgaaccaatcgtccgagcttttggtgtcttgaagaaatgtgctgccaaggtttttgcagtaaagtctcttatgtaaattatcctttttttttttttttaggttcgtgattttacgatgatgttttaggttaacatggagtatggtcttgatccaatgattggggaagccataatggaagctgcacaagaagtagcagaaggaaagctcaatgatcatttccctcttgttgtatggcaaactggtagtgggacgcagagtaatatgaatgctaatgaggtaccttatatgcatggagatacattttgtacaatcctacacaagtgctaccagtggtggatcccaaacatatttcaatcggaggaacaatatttcatcgtcctaatacatatcttggttatctgaaaaacgactgcatctattattagaaacatagaaaaaaaggtttcataacttc

SEQ ID NO: 143608 - DNA, 354 bp, Arabidopsis thaliana landsberg
cagggaagtccttgctgccaagtaaagacctagaatggttctttttcagtcctcgagaccggaaatatccaaacggatcaagaacaaaccgggcgaccaaagcaggttactggaaagccaccgggaaagatcgtaaagtgacttcacattcacggatggttggaacaaagaaaacattagtttattaccgaggaagagcgcctcatggctctcgtaccgattgggtcatgcacgagtaccgtcttgaagaacaagaatgtgcctctaaatccggtatacaggatagctaactaataaaaaggttatcaaaagattaagattcttaacttgaagataaaccaatgtataaacatt

SEQ ID NO: 143609 - DNA, 623 bp, Arabidopsis thaliana landsberg; identical to SEQ ID NO: 64235

SEQ ID NO: 143610 - DNA, 823 bp, Arabidopsis thaliana landsberg
agttaacgagtgatattcagacaagacagtaccggtgtcctgaggttgttcttggctcaaaatactcaacctcagcggatatgtggtcatttgcttgcatttgttttgagcttgccaccggagatgttctattcgatcctcacagtggtgaaaactttgagcgagatgaggtatatatctcttatgtgatttctcatactttgtgaaaaaataaaatcgtttcatgtcgtttgtactcaattgtaacactaatggactttggtttcaggatcacttggcattgatgatggagcttctcgggatgatgccacgaaaggtaaatccaaaaacacagtgttctcttatttatcaatatcaagaatagagctttttaaagggattttgttaaatgtagattgcattaggtggacgccattcgcgggatttcttcaaccgacagggtgaactacggcacatcaggcggttacggttttggccacttagcaaggtcttaacagataaatatgacttcagcgaggaagacgcaattgctatgcaagatttcatcactcccattcttcaatttgtacctgagaagagaccgacggctgctcagtgcctaacgcacccatggttgaatccggtccttaaatcactgaaaccgtcatcgagtccacaaaatcccaaagaagaagaagaggaagcgtcggatgaggataaagataaggaaaaggttgagagggaagccatggaggcaggtgttggaaatatcgccattgatggctcggaaagaaagacctcagcaagagaaggtcgtcaatcagctcgtgatcttcgtacttaa

SEQ ID NO: 143611 - DNA, 594 bp, Arabidopsis thaliana landsberg; identical to SEQ ID NO: 43172

SEQ ID NO: 143612 - DNA, 1042 bp, Arabidopsis thaliana landsberg
aatggctgcccgaaagtgagtccccaaagcccccctttatctccaaaccgccgtgtcctccgtcgtcaacggcggcaaactttactcagagcttcttctttctctctccggagaaatcttcgttacttgcttctccttcctatgatttacgcttctgggcttctcatgtgtgttggtcctttctctggtcttgtcggatgggtttatgttcccggttctgtttatcggagccccgagatttaccggaaacttaaagatgacattttctccgacaattcaaccgcccttgaggttcgttgccttctcttcttcctcagttttgtagtaaagtttctattgttatgtcaattgtttaagcttcttgatgtttggtttcagttgtcttctgtctggaaattcaaaagaagaccaaagatgccaaaaccttgtcctaattcaacagtttcatcacattttggtctgaacagaggtaagattgtgtctgatactgaactatttgaattctatggcttcccagtttcttggattgttcatatgattttaggtattaatgtgtttgatgaaatattttcagaatcatctgctcttgctcctagtagtggttacttaatcgtggaagcaaatggcggtcttaatcagcagcgttctgcggtatcatcatcttgttcccttattgatttctttgcttaaagcaatataagtcaaaacatatcctaaagtttttttgtattgcttcagatttgcaatgctgtggctgtagccgggcttcttaacgcagttttagtcataccgcggtttgagtttcacgctatttggaaggattcaaggtaagaagccattaaaattttcattaccttttcaagtcttgttaagatattggactaagaaaatgcatatttgtggcagcaactttggtgatatctatgacgaagatcacttcatatcaagccttgaaggttatgtgaaaatagtgagagatgttcctgatgagataatgactcgttttagttacaatgtttcaagtattcctactagtcgtgtt

SEQ ID NO: 143613 - DNA, 623 bp, Arabidopsis thaliana landsberg
cttgttccaatactcaggatccgtcttcattgaagtcaccaatatcctcttcactttagttaatcgagtatgctcaatctttccgcaatgaccatagttcttatcccctatgctataccaagttttcgtcccactatcccgtacatcctcggcaccatccatgaaataagtgaccggacgctcacaggggtcaggtttcaagggccgagtgttaaacacgaaaggtccatcgctggaagaccgccaagttttgaaggtctgcaacggcgtagtcagctccgtagcagtcaagaagtaagtgtatatctgaatggtgtatccccaagagatggatatagaccattgacgtttgcgatcatgacaattaatctgttggagtattcgattcgggtctaaggtataaggtttcattagggtctgtaacgactcgatcgggtttttgttagggaacattgggtctaagtaaacaaggtgatgcaacgatacaagcggtgccaatggatgcgccgctagaaacccgtatggatctcctcttatgtcaagctgcaatataattattccatcacagaacacaaaacaaagaatgaatgtgagtccaaacacgactgtactaccatgttata

SEQ ID NO: 143614 - DNA, 1052 bp, Arabidopsis thaliana landsberg
ttggcaagatctcgagagcatttataaagaaattaaagcaacacatacacacatcaatttcgtaatcgttgcagagtaagaccgatcatcgatggctgatgtaatggaacagaatcttcttcaaaccgctgtgcttaaccggacgtccttccatttccaacctcagagaaattggctcaacggttctatttctttctttttcctcctatttatattcatatatatatatatatatcatgttggttgtgaacaaaaaagaaaagatcatgttggcaaagatctcttatattattagttcataaaaccaaaacaaaaaaatggttaatttctgtttattgcaatttatctattgaatcaggttattaatttctactatatgatactgaaaactaacgattgtcttaattttatgtcacttctggtcctctgatgcattttggaaatctcaagatccaaacggtaattaaatactctacaaattgctaacttgtgacacaaggaactccaaagttgttttatataatgaaatacgtatatttataatgttgtttcagcgccaatgtattacaaaggattctaccatttgttctaccagaataaccctttggctcccgaattcagtaggacaagaatcatatggggacactctgtttcacaagacatggtcaattggatccagctcgaaccagcccttgtcccttctgagtcctttgacatcaacagctgctggtcaggatccgccacgatcctccctgatggcagacctgtaattttgtacactggactcgacgtcaacaacaaacagcaagtcacagttgttgccgaaccaaaggacgtttctgaccctttgcttcgtgagtgggttaagccaaagtacaatcctgtgatggttccgccaagtaatgtcccttttaattgtttccgtgatcccacggaggcgtggaaagggcaagatgggaaatggagagtgctcataggagctaaggagaaagatactgagaaaggaatggcgattttgtaccgaagcgatgattttgtccagtggacaaaga

SEQ ID NO: 143615 - DNA, 936 bp, Arabidopsis thaliana landsberg
atgaagcccacgaccaatggtgggctcttggcttctcaatcatcttcctccttctcgtttccgagattccgcggccaacttccgattatcttctcagccaataataatcagaagaagaagaatcttccaaatccaaacgtcgtcactctttgtctccactctcattccaatgtctcctcctctcaaatcgccgtcactcgccgcgcaattctcgtcgcaccaccgctcctcgccgccgccgcttcgttgtttctctctatttcctcagctgcctctgctgagacttctgcggaatcagtagctcttcctcctgttgctactgctcctcctcctccgcctgtggagaaggaagaggcgataacttctagaatctatgacgcgtctgtgcttggtgagccgatggctgttgggaaagataagaagagagtgtgggagaagctattgaatgcgaggattgtctatctcggagaagcagaacaagtgcctacaagagacgacaaggttctcgagctcgaaatcgtgaggaatttgaggaagcgatgtattgagagcgatcgtcagttatctttagcattggaagcatttcctcttgatttgcaggaacagttaaaccaatacatggacaagaggtttgcttctactcgcttctctgcatattcgttaattgcaatgtgtttttgattccaattgttcttggattggttgcaggatggatggagaggtattgaagtcgtatgtatcacattggccagtccaacgttggcaagagtatgagcctctcttaagttactgccgcgataacggagttaaactcattgcttgtggcactccgctcaaggtagagtcttatactactatattgtcatgaaatcttgagccttttgatcctgcagcttgatctgaaacctttctgattgaagattatgcattttttta

SEQ ID NO: 143616 - DNA, 1181 bp, Arabidopsis thaliana landsberg
caccttcttgacaactgcaagtgagtggttagcaagcaaaaccacggaggtatgttttgacatcttttcttagagttctatgaagttcttttcggaaaataacaattgtcagtcgtcactagtttccaaatctagtaaaaaatttatagtattcctaacaaactcttctatgtttgcagaaacctgttctcttactcggtcttggagtgagtgccatgcttctgtcatgcttcatctgtggtactgtctttctgtccttattcaaagaggtttaccatgagcccaaggatagggtctgcagtttgagtaatttgttgaatttagaagaggtgttcatttttgctcttcttttgatacttgttataagcatgggatctagttcaatggtggaagaagagcattatatatggcatttcatggtatcaacattccatcttctgttactcttcaagacagcgaagtcattcaaaatttccaaggggatgaacattctcagagactttaaattcggttctatcttctcgcttcttatttctggtagactactgagaggttggcatcaagggggcgtgaactggacttaccttcctgatatttctaagtggctagtgcaaggtggcagtggttatgtgaaatggattcagctaatctcaataatcctagttattggtctaggactatatactctctttcgaacaggatcgaatagaaaaggtgttcgcatcctagcatttggtttctcaacttgtgggttcctagtcttgctgcatgtagggagatatcaggatgaactgtcaaccggttttggagccactgtcacagtaaaagttatttattatcttctatctatatcttccattggagcttctttggttttgccatggtctgcgctaaacaaagacaagtcctttctagctgaagtaggtgattgcttgtatttgattggctctgcgtacatactttgctggtgtcttctacagcaacttctccaacaaccaatcaactcgggccccatacttttgctgctcctccaaatcttagcaattttatgtctttcttctagtgattttcaagttaatgaatgggtcgaggttagtttttctttttgttctttgtatgtgatttataccgcaaaaagctcaagatttaaggtttggtgtttctcttcttgttgtagatta

SEQ ID NO: 143617 - DNA, 330 bp, Arabidopsis thaliana landsberg
  unsure (1)..(330): unsure at all n locations
atatcaagtgcttattactctcagatgagatggtcattaaaagagtatgctgccataagcaagtcatacaattttctgcttaaaagtgacaacataagcccagcattaacaagtgtcatcagctggaggatacatcaacaatgtgaaattgacaaatgcggttttatatcacaaagagattcaattccagaaacaatacgacaaagcggtgtgcanagatggtttcagtatgtacgatcagtgaagaacttgttgagtccaggcatgatttcaggtttcttgttgcgaacaaacttnctcaggacattttccttatacttctctccctct

SEQ ID NO: 143618 - DNA, 588 bp, Arabidopsis thaliana landsberg
ggcattggcctattctggcaattgtgttgagtttgccaacagctggtgtcaatttctgagaattgaatctccctttgaggtgcgaattgaattataatcaaatagctttgggtcgttaccaatgtcagtaattgacgattacactattcgaacaatttggaattcacctcaaacaaaaaatggggtaaaccctttaatttgattaaaaaaagaattccaagttgttgaattatatttatataaagaatttaattaaaaacttgtattgtatttatataataataataatattaagtattaaggcacattcttttaatataatatattcgtaattactttcttgaaattgataggttgaaaatacactttagaaaaaaaaaaagagaaaacagcctaatactaataattgtatctacatcaattcatatccattagattctaatttcactctatttagaaacatataaaaaacaaatttcctggttaaattaataaggtcatgaaaaggatttcgattttttcttattttaataatataatggatttgcctggaccaatacatgattttcttttagtttttctgggatc

SEQ ID NO: 143619 - DNA, 819 bp, Arabidopsis thaliana landsberg
gctcttctgtaaacttaatgcagaaagcacgtgtggttgcgatggacttgagagggcacggtaaatcggtttcggagaacgaattggagttatcgcttgaggtatgacatccctgttctttttgagagtctggatttgcttatggaattatacattagctggtctttgagaattgagactgatgtagtaagatgaaaatgcagacaatgagcaatgatgttttggctgtcattaaggaattgtatggagactctcctccagctattgtgctagttggtcacaggttttttctctttctctattttattttgtcatatcggtatgctgttttcgatctctatcttaacgtgtaaatggctggtcaatagtgagtacatcaatatttttccagtgcgcctgcgaatatattttcacacctgtaacatttgtaagaaagtttaagattttagttgtttatgatctacctgtacaacaatttgtctactgacactatggttatgttttagattcttaagtatggaacatttataggcttcgttcggtatagggttgtagtgatagacacatgcataaatttgtaggataaaagtagtgtgatccagtgttctgtgttcatgaattggtttcatgttattaacacatagcatgggaggttcggtcgctgtgcaagttgctgcaaacaaaacattgcctagcttggctgggcttgtcgttgtggatgttgttgaggtttgctttcttatagaaaagtctcacttggactgcactctcgtgagatgaaatgaccaaagtactttcattacagggtactgcaatttc

SEQ ID NO: 143620 - DNA, 872 bp, Arabidopsis thaliana landsberg
taaaataatggttccaagagagttctccgtgagcacgtccgagaatctctgggagtgcggaatgaagacttactctttggcattattaatagtatgccatcatttttttaagtctttctttttctctgttttctgacgagcatcatcatcttttaaggagtaagagttcacgcgtcaccaatgaatttactttaagtttgttactatttccaggtgtatcgcgtggaaaaggccaggatctgttcctccgagccttccacgaaagtcttgaaagaatcaaagagaagaaacttcaggtaccaacaatgcatgcagtagtagtaggaagcgacatgagcaagcagacaaagttcgagacagagctacgcaactttgtccgagaaaagaaacttgagaactttgtccacttcgtcaacaaaactctaaccgtagcaccatatatagcagccatagacgttcttgtccaaaactcccaagccagaggagaatgctttgggagaataacaatcgaagccatggcctttaagctacctgtacttggtactgcagccggaggaacaatggagattgtagtgaatggaacgactggtctgttacatagtgcagggaaagaaggagtgatacctctcgccaagaacatagtgaagttggcgacgcaagttgagttacggctgagaatgggaaaaaatgggtatgagagagtaaaagagatgtttttggaacatcatatgtcacatcgaatagcttcggtactcaaagaagtcttgcaacacgcaaaggctcgtgctttacgatgagatcactagaatgttgtaaaatgtttcttgatctctcttacttattctgttcatagaaaattacaaatactaccc

SEQ ID NO: 143621 - DNA, 1799 bp, Arabidopsis thaliana landsberg
  unsure (1)..(1799): unsure at all n locations
gcacactttttttcatgggattgcgttatgacttataatgcgagttttagtagatgatagttaagcttggtgtgttttttgtttgtagcaagaagatgaagcaaaggctaagagagcacttgctactctctgtgcgctacacaagaaaaagatctggcttggtgataaaaatgaaagagttgcaattgcgatttgtgaagcctgctttcattcttcacctaggtatatccttattttcttctaactatggagtatgttgatatgatatgattttttgttggtcaaattactaacttcttttttcatatgttcaggattatgatttccgctcttcggtttcttcttgattatgagaacatagacgatgatgacgatagtgatgctgaaagcgatgatgacgaggagtcaaagaaaatagatcaggttgtgattaatcgacaggctgtttacaaggtaaaacaacatttcattcacatatatgaatacttttgtcattgagtacgaagaagacacttactacttgttgatgaaagtttccgcctttatacttatctatatcattttcatcatttcaaactagtatgaaattaggtgatgtttatatgatatcatggaacattaatctatagggaaactgttttgagttagttttgtataatatttttccctgtttgatgttaggcaaacaacaaaggtacatcctctagcaagaagaaaaagcaagcaaaacttcagcgtgcagtgaaaagtattaaaagaaagcagcgttcgtcgtctgagaacaccacttcaacattttcacctcttaatcatttaaatgatgcgcaggtttacttcttagctttgtgtagtgcagtcacaatggtatggaagtggctatgattgaatgtttgtttctgttacagaaattcgcagagaaattgttttcccgtcttcagaccatcaagggcagtggtgaacgtgttgaggtaaactatccgtttagattaaccatctattctaatagaaacatatgagctaactaactgttgattaggtttcccactatatgatctcagttgattattttttcccctgttgaatacatttgcagactaggttgatgatgattaaagttattgctcgcacaattggtcttcacaagttgcatttactaagtttctatccttttcttcanaactatgctttggtatgatctgcttaccctctttattattcttctgctaactgaaatttgatcgaaatcagttattaaatgcacccgcatgtaaaggacattgcacaaatacttgcagcaccagttcaatcttgccacgatggggtatagaaacatttcgccgtttaaacttgattttttttttctcattcttcaatccttctaattatattgtattgagcaggttccttctgatgttgtggagccactgttcaagcaaattgtgaatcagtttgtacacgacaagtcacgtcctgaggtgcgatttcgagttttttcacatcaagggacataactagaaagctcattctatcatttaatattttcctttccaattcatttttttaaacaggctattgctgtcggactcaatgtggtgcgagaaatgtgcctgagggttcacgacgtaactagttcttgactcgctgtgttttggtctaataaaaatgtagtttatccagtatcaaatctgttttctctgaatagtgttttttctcctgttaatcagttgaagacagaagagttactgcaagatcttgctctgtataaaaagtcccataaaaaaccatctcagcagcatccc

SEQ ID NO: 143622 - DNA, 592 bp, Arabidopsis thaliana landsberg; identical to SEQ ID NO: 2656
  unsure (1)..(592): unsure at all n locations

SEQ ID NO: 143623 - DNA, 1726 bp, Arabidopsis thaliana landsberg; identical to SEQ ID NO: 24658

SEQ ID NO: 143624 - DNA, 840 bp, Arabidopsis thaliana landsberg
  unsure (1)..(840): unsure at all n locations
ggactggagcctggtcagtctgtggatttaggaactatacacgctggtgatttcatggtgagtttgtctanaactaaaattgttgctgataccagaacctagctagagtgtgctaattatgttatgaaacagttgattatgctggctgcattgactacgtggtttcataactctgtatttgatgaaattgcagagaaggttctgctccaaccttgcaatgtctaaccatgcggtgaaagctgctcaggaagctgtgcaaaaatctgaggaatttgatataaggtacatttcaattatttccctcagttcgggacggagataaacacagcagaatcttaaagatgtttattttgggaaattgcaggaggagtcctatatcaatagcagcagtagtcatctatatcataacccagctgtctgatgacaagaagactcttcgaggtatgttccattcacattttgtgaactgaaaacagcctaacatcactgaaactgtaattgaaattttgaacctgcagatatatcagtggcaactggagtcgcggaaggaactataagaaactcttacaaagatctttaccctcacctttccaagatcataccagcttggtacgctaaagaagaagatctcaagaaccttcaaagcccttgagtgtcttcctcttctaatctcttactcgcaaccataccttcaagtttcgattgggattatgggttataaagttgttttgtccagaagtgcgactggaggcacgcttgaacaagagttttacagtagatttgtatcactttttcttcataaggtaccatacattgttgaattaatgagatggtatttct

SEQ ID NO: 143625 - DNA, 714 bp, Arabidopsis thaliana landsberg
atcataaaatcatattaaacttatagtatgaagaaaataatatggttactaacttcatgcaatatatatatatatataaatgataaattgcagacaagtgctttggtggaagaattaaaccgagttagtgctgagaacaagaagctctcggagatgctaactttgatgtgtgacaactacaacgtcttgaggaagcaacttatggaatatgttaacaagagcaacataaccgagagggatcaaatcagccctcccaagaaacgcaaatctccggcgagagaggacgcattcagctgcgcggttattggcggagtgtcggagagtagctcaacggatcaagatgagtatttgtgtaagaagcagagagaagagactgtcgtgaaggagaaagtctcaagggtctattacaagaccgaagcttctgacactaccctcgtaagcattcatgaaaatgatcaaacttggtatctatctatctttagaaactttattttatatggtttactgattgtagaagttgtttcttataggttgtgaaagatgggtatcaatggaggaaatatggacagaaagtgactagagacaatccatctccaagagcttacttcaaatgtgcttgtgctccaagctgttctgtcaaaaagaaggtaattgataaagaaaaaaaactgactctcgcttaaaatatgaattggcataatacgaatttgatgg

SEQ ID NO: 143626 - DNA, 890 bp, Arabidopsis thaliana landsberg
ctcttgtttcacttccgccctccatctttcttcgtgattgagagaatcttcaacgaaagaaagcaacttttttttgggtgaaattcacagaacaaccaaggtttttcttcttcttcttcttctccagttcctacaggtttactcttactcatcttcatctttgtctcgttcttgctcttcaatttctggtctttttgttgttcttgtcttctcgccaaatatactaagatctaagttttatatcattgtaattatcaccaacgaactgttaagaccaaatttgattactcgaaatggttttgggtttagggtatgaagaactgatcaaaagattcaattttttatgaagtcaactttcatctgcaaattgagcaatctcagatttcgattgtgtttcagaatcatgcctgacaagaatatcgtagaggacgttatcggtgatttggtggataacttcacggagactgttcagaagaacaaacatggttcctccttcttcgaacaagaagattccgtcagttctcgtttcaaccgtttgtttgatcgccagaagccaattcatcatgtcttaggcggtggcaaatgtaagaattcgtttacaggaacataaatgtgagattggtttttcttgtaattgagtattgagagattccttcagctgctgatgtgttgttatggaggaacaagaagatctctgcaagtgttttgatgggagctaccgcaatttgggtgctttttgaatggatcaatttccatttcctgtctctcgtttgctatgccctcttgcttggtatgattgcacaattcgtttggtctaacgcctctggattcttaaaccggtaacttgttggagtgttgctgtcattattattggtaccttgtgattgcaa

SEQ ID NO: 143627 - DNA, 1475 bp, Arabidopsis thaliana landsberg
atgagttacttgaactgaagctttgatgtcttcagagtctacacccaactgcagagtaccatgctgcagcgcgtgcagtgggtggatgcgcaatctatgtcaggtaaagctctcctctcatccttaacttgattcttgttctgactaggtaatgttttaatctgagggtttaactggagatatgtttttttttttcaaattatatgagcagtgataagccaggcaaccacaactttgatctattgaggaagctggttcttcctgatggttcagttcttcgggctaagcttccgggtaggcctacccgtgactgcttattcgctgatccagctagagatggaatcaggtttgcctgctttctaactaactcttctcttctttattttccactcctaagactaagcctaagcctaactaacacctgcggaaactgaattcttttcagcttgctcaagatctggaacatgaataagtttactggtattgttggtgtattcaattgtcaaggtgctggttggtgcaaggaaacgaagaagaaccagatccatgatacttctcctggcacactcacgggttcaatccgtgcggatgatgctgatctaatctctcaagtggctggtgaagattggagtggagattcaatagtctatgcatacagatcaggtataaaaatcaatcaatctactttcctcaaataagaaaaaaacttgaaacttcagatcaatactaaaagcatgagcttggttttgatttacaggtgaggtggtaagactacctaaaggtgcttcaattcctctcaccctcaaagtccttgaatatgaactcttccacatctctcctttgaaggtacgttttgtcttgttgtatattaccatgacttggattgataacaacttggagtcataatgtgaatgacgaaatttggctatacaggaaatcactgaaaacatttcgttcgcaccaataggacttgtagacatgttcaactcaagtggagcaatcgagtcgattgatatcaatcacgtgaccgacaagaatcctgaattcttcgatggagagatctcctcggcttctcccgcgctcagcgataaccgttctccaacagctctggtatctgtcagtgtcagaggctgtggtcgttttggagcttactcttctcagcgtcctctaaaatgcgccgttgaaagcacagagactgatttcacgtacgacgccgaggttgggcttgtgactttgaatctgccggtgacgagggaggaaatgttcagatggcatgttgagattctggtctagaccaccaataagttattttttttcaccaattttgtcattcatcattttgtagtataaaggcatcaataaattaggaaattaatggtcattcttcgctttgtaataatgtaatctcgtcaagttggggaagcaccgtccccttgtagttttgttctaataatatagtaccttaaaacaaataa

SEQ ID NO: 143628 - DNA, 1688 bp, Arabidopsis thaliana landsberg
caagatagccattggattgctaattcagcgtgacagcggttcctgctttattaggcgtgttggcggttatacgagctaaacaaatgattcgagatgataacgattcagagactggagaaaatctatggacatggcaattcacaccttttcagaaactcaacttcacagtcgaacatgtactcaagtgtttggtagaaggtaatgttatagggaaaggttgctccgggatagtgtacaaagctgaaatgcctaacagagaagtcatcgcggtgaaaaagctctggccagtgacagtacctaatctgaatgagaaaactaagtcatcaggagttcgagactcattctcagctgaagtaaaaacacttggatcgatcagacacaagaacattgtacgcttcttgggatgttgttggaacaagaacactagacttcttatgtatgattatatgtcaaatgggagtttgggaagtttgcttcacgaaaggagcggtgtatgtagcttaggatgggaagtgaggtacaagattatacttggtgcagctcagggtttggcttacttgcaccatgactgtgttcctcccattgttcatagagacatcaaggcaaataatattctgattggccctgattttgaaccttacattggagatttcggactcgctaagcttgttgatgatggcgactttgctcgttcttccaacaccattgctggttcctatggttacatagctccaggtacttaccaaatttctgttttgctgctaattagttaacttgatacatcataagttactagtagtcttagcctagtaatggtagaaattcaggtttatagtttggttttggtttttggcattttgaaaagaatagtattttggttcagttgattttcgatttggtttaaaattttagaaaaaaaatggtagaagaaataatttttgattaatattatatcatctactgtatacgatttaaaaaaaaaattgatttggtttggtctcgatattttgcttgtagcttggttcaatatttttactatatatatgattcatgactttcatactaatcaatatttgttcggtttcgttttgattagtctgaaagtgaatcatatagttaaaatattgaccaatctatcatatacttacacgctacaagattttcgatgtaattttggtgtaagcattttggtttttatatgttcatccttagtaactaacaacaaatatcaattgggaagcataacgttatatattcccataaggctataacactataattatgcagaatacggatactcaatgaagataacagagaaaagcgacgtgtacagctatggagtcgtagtgctcgaggtactaacgggtaagcaaccaatcgatccaacgataccagatggactccacatagtggactgggtcaagaaaatcagagacatacaagtaatcgaccaaggactacaagcaagaccagagtcagaggttgaagagatgatgcaaacgctaggagtcgcgcttttatgcattaatccaatacccgaagacaggcctacaatgaaagatgtggctgctatgcttagtgagatatgtcaagagagagaggaatcgatgaaagttgatggtagctcgggaagttgtagcaatggaagagaacgtggcaaagactgattcgacttcatcggttatgca

SEQ ID NO: 143629 - DNA, 450 bp, Arabidopsis thaliana landsberg
atgcagaaattaaacaagtgtatctatatcgtatatatggactgcttacagatggtgttcaagttatttccaaactggaaacgtgaggcagaagttaaaaagctcggtaagattaattaatatataggtttataacaaacaaacaaaaattaagataattttgatttcagtgaaatttgttctatgattcaaagttgcaggttacaaggttcatggcgatcctttctccaccaacacaaggcgtgtcctcgctgttctccatgagaaaagactctcttacgagcctattaccgtcaaactgcaaaccggtgaacacaaaaccgaacctttcctctctctcaacgtaaggaatgatatcgcaaaatcgaatgattagtaatttcaggatgagatattacacacctaattatagattgactttgtgccgaatcatctacatatacaaaaatt

SEQ ID NO: 143630 - DNA, 1862 bp, Arabidopsis thaliana landsberg
atggccgatgttaatcttcctccgtctgattccgtcgataaccgtctccctgagaaatcaacctcttcctcaccacctcctccaccgccttcttcttctctgccgcagcaggaacaggaacaagaccagcagcagcttccgctacgccgtgagagagattcacgagagcgtcgtgacgagagagacatcgaacgtcctccgcctaatcgccgtgaacgtgaccgttcgcctctcccaccgcctcgtagggattacaagagacgtcctagcttgagtcctccgccaccgtatagagataggcgacactctcctcctcagcgtcgctcgcctcctcaaaagcgttatcggagggatgataatggctatgatggtcgccgtggtagtcctcgtggtggctatggaccacccgatagaaggtaatcttcatttcttatgcttacacttcaattggaattacatcagagttaatttgttaccgattgaattataattcaaagtcatatgggaactgtgtttgcattgttgcttagctgataactgttgattatcctcttgtatcgatggttgttatattccatcgttttcgagatttcctaatctgtactcaatttttactttgcatgttagatttgggtatgaccatggtggaggatatgaccgtgaaatgggtgggaggcctggttatggtgatgaaaggcctcatggtcgctttatgggtcgctatcagggtgagacatctctgtctaagatgtttttacagttgagagaatcagtattaccactttttcgtatgatttctgtcttgtgagacatgtttaagatacctatcattgggcgttcttattatttgtggacttctgttcatttgactagcttcgtatatttctctctgtatgctgtggattggaaacaagcgatttacattagaagataagatgtcaatatctaccttttattgtgtgttacttatggcagactgggagggaggacgtggaggttatggtgatgctttcacagtggaaatcctcaaaggttaaggttccttcttcttttgttttttaaaattttctttgtatttcatgggtttgttgtctttttcctatggcgtgtttattcttggtagcgtatttttaatcaagtaagtgtaaactaagagttgcgaactgtctaatggtgctcaatgaatggaggatacatcccttgtagaatgttctttcttcgatgagacatatatgtttttttccttatagctccggaaagttagagtgaatgtttgagagacaccattatagtggcacacaactgatgctgtctgtatcctcccttgctgttgcatttaacgatactacctttgtaattcctttacccagggatggattgatgtcatacaaacaatttatccaggagttggaagatgatatattgccatctgaagctgaacgcaggtatgatcatttctgctacttagtcttgttacttaagcaatttaataataaagctgcgggtgtaatgcttttttcctgatgcagatatcaagaatacaagtcagagtatatcacaacacaaaaacgtgccttttttaacacccacaaagaggaagactggtgatttcactatcttttttcatcttttatattcttctgggatattctgcaagctagcctaataacatgtgtatctatgttgcgcatctaccaggttgaaaaataagtatcatccaacaaacttactatctgtcatagaaaggtgagttcaagagtcatttgaagcaatttgattcggtgttagtgcctgaatagtgtaatattaatactatacatccttgactttattatctaaattctttttgcattaaaacaaac

SEQ ID NO: 143631 - DNA, 1126 bp, Arabidopsis thaliana landsberg
gttttcttcttccaattttggatctctcttccttttgatctgattcgttacttgctctatgttgcttcaattttgaattcttttgatttttgattgtgtgggggagatggggcaatgttacgggaaggttaatcagagtaagctaaatggggaagaagaagctaacacgactacttatgttgtttccggcgacgggaatcagattcagcctctaactccggttaattacggtcgagctaagaacactccagctaggtcatcgaatccgagtccttggcctagtcctttccctcacggatcagcgagtcctcttccttctggtgtttctccttctccggccagaacttccactccgaggaggtttttccgacggcctttcccgccgccttctccagccaaacacattaaggcttctttgatcaaacgtcttggagtgaagcctaaggaaggtccgatccctgaggagagaggaactgagccggagcagtcgcttgataagagctttggttatggcaagaattttggtgctaagtacgaattggggaaagaagtgggtcgagggcattttggtcatacttgttctggccgtggtaagaagggagatattaaggatcatcctattgctgtcaagatcatctccaaggctaaggttttaaattctcaatcttttgaacatctagtttttgattttgggattgcttgcattggtgttgaattttagcttatattgtgatttgtttgttgctgatgctgctacaagaatctgtggagggttttgaaatgtggaacgagtaatgcttacattttctcgtagttgaggtagtgaaagtaagattcttgggtttggataatggctgtgggacagtgaattgtctttttcttccagctgagtctcttgagacaaacaatgttgtctcttttgataggtaaattttttgtttggcagtgagttgagtagacaaaaatgtgaactttttgttgatttgtcagcattaggacaaggatagtcatcaaagaatgagtttcatgtactaatgtttatgagcttttcttctgcacacatttgtttgttcgaagcttgtaatcacagttaggttacgttttgattacttagcttgtgattttg

SEQ ID NO: 143632 - DNA, 419 bp, Arabidopsis thaliana landsberg
agagagacactgaaatatagagagaagaaaaagaagaggtttagagagagaaaaatggcgtcaaagctctgcgattcgtgcaaatcagcgacggcggcgttatactgccgaccagacgcagcgtttctatgcttaagctgcgattcaaaagtccacgcggcgaacaaactcgcgtcacgacacgcgcgcgtgtggatgtgtgaagtgtgcgagcaagcaccggcacacgtcacgtgcaaagcagacgcggccgcgttatgcgtcacgtgcgaccgtgatatccactcggctaatccgttagctcgccgtcacgaacgcgttcccgttactccgttttacgattccgtctaaagtgacggttccgttaaacacaccgccgttaatttccttgacgactgttacttctccgatatagatgg

SEQ ID NO: 143633 - DNA, 987 bp, Arabidopsis thaliana landsberg; identical to SEQ ID NO: 5922

SEQ ID NO: 143634 - DNA, 1772 bp, Arabidopsis thaliana landsberg
aaaacaaaacaaaacccaaacatcttactaaatcaatcaattatcgagaatcttccttcctttattcctttaaaaaaacaaaaacctttcttcacctcctttccttgattcatcctctaggttaatgggtgttttctcgaatcttcgaggacccagagccggagctacccacgatgaatttccggcgaccaatggctctccttcgtcttcttcttctccatcttcatcaatcaagcgaaaattatcgaatttattaccactctgcgttgctctggtagttatcgctgagatcgggtttctgggtcggctcgataaagtcgctttggttgatacgttgactgatttcttcacccagtctccgtcactctcgcagtctccaccggcgagatccgatcggaagaagatcggattatttactgataggagctgcgaggagtggttgatgagagaagattcagttacttactctagagattttactaaagatccaatttttatctctggtggggaaaaggtaaaacattttgtgttctgtggaagatggttatgatcattcctttttggttttgattagtcaatagaataaagattgggcgagttgtagtagagtgattgattagtcaatagaataatgatttcatttgtgttcacaattggtaggactttcaatggtgttctgtggattgtacatttggagatagttcagggaaaacaccagatgctgcgtttggattaggtcagaaacctggaactcttagtataatacgttccatggaatcagcacagtattaccaagaaaatgatcttgctcaagcacgacggtgggtaagcacagtctcaacaagacgttatacttttgcaggacatgtaaaattatgtgattagtatctgactttttatcttctgttgtttcatcaggaaaggttatgatattgtgatgacaactagtctgtcatcagatgttcctgttgggtatttttcatgggcggaatatgatattatggctccagtgcaaccaaaaacagagaaagctcttgctgctgcttttatttccaattgcgccgctcggaatttccgcctgcaagctcttgaagccttaatgaagacgaatgttaagattgattcttatggtggttgtcaccggaatcgggatgggagtggtatgtattaatattatgcattgctagcgaaatgttctatgtcctaaccatatcaagtcattgaaccaataatttacgaaaattcgttacagtggagaaggttgaagctcttaagcactacaaattcagtctagcttttgagaacaccaacgaggaggattatgtcacagagaagttcttccaatctctagtcgctggtatagatatatctcatcctctctctctgatgatcttgcaaattttagtatttgcttcattagaagaattagcatttgttatattctctgccacctcttagctactgttagtcatcttgcatgatctgagcttattatcatgtcaattgatgaagggtgatatgcggatttagatacatagattatcatatatgtgagcattgaacctaccttgttttctacttctgattagcactaaatgatcaaatcttcttttaggatctgtccctgtggttgttggagctccaaatatagaagaatttgcaccttctcctgactcattccttcacattaagcagatggatgatgtcaaggcagttgcaaagaaaatgaagtatcttgcggataaccctgacgcctataatcagacgctaag

SEQ ID NO: 143635 - DNA, 1194 bp, Arabidopsis thaliana landsberg
atggcatcacgggggaggtttatcgcgttgaatacggggctaaccgaccggcgcccaggatacggctaccaggccccgaacgtgatcgaccgggcctcaggattccgtgcggagtgtcgggtggtgatcgaccgggtccaagtatttgatttttttttggaaccggtgtctcctcagacatttcaatgtatgttggtgccaagagggaaatagggctataaagctatataggggtgggtgttttcagatgtttaaaatgtctctaaaaatacacaaaactaatattaaagacactctttattttattatcattatttttattagttttatatttaaaatcatccttcaaaaattaaccaatgtgaatgctataacgaattatatattaaactcgattgtgcttgtcccagagaacaacttatttgattatctattcttaaaaagtaatgacgtcagctttcaatatttcacgttttttcaaagagaaaacatattatatttaggtaataaacaaagcctgatcattgatcaatgcatgggatctttttttgtattataaaaggctactctgtgtcatttgcatctctccactttgagcaacaatggcatcaatgatcactgttgactttgaaaactgcttcatcttcctcctcttatgtcttttctcacgcctctcttacgatcttttcttcaggaaaacaaaagactcacgagctggctgtgctcttcctccgagccctccttcattaccaatcattggtcatcttcaccttatactctttgtcccaatccaccagtctttcaagaacatctcatctaaatatggacctctcctccacctccgcttctttaacttccccatagtcctcgtctcctcggcctcaacggcctacgagatcttcaaggcccaagacgtgaatgtctcctctcgccctccccctcctatcgaggagtctctcattttaggatcttccagcttcatcaacactccgtatggagattactcgaagttcatgaagaagttcatggtccaaaagctgcttggaccacaagcactccaacggtcccgaaatatccgtgcagatgagctggaacggttctacaaaaccctgcttgataaggcgatgaagaagcagactgttgagattcgtaatgaagcaatgaagctcactaacaacaccatttgcaagatga

SEQ ID NO: 143636 - DNA, 670 bp, Arabidopsis thaliana landsberg
  unsure (1)..(670): unsure at all n locations
atacgggaaagtgttcaaaacgaacataatagggacaccaatcataatatcaaccgatgcagaggtgaataaagtggtgctccaaaaccatgggaacacatttgtccctgcataccctaaatcaattacggaactacttggagaaaactctattctcagcatcaatggacctcatcaaaaaaggcttcacacgctcattggcgcgttcctcagatctcctcacctcaaagaccggatcactcgagacattgaggcctcggttgttctcactttggcgtcttgggctcaacttccattggttcatgttcaggatgagatcaaaaaggtattgtcttagaaaatatattagtagcaaactcacacgtacgtactaggtcacatgctataacacattttttaattggtagaatgtttgttgttgttgttgtagatgacgtttgagatattagtaaaagtgttgatgagcacatctcctggtgaagatatgaacattctcaaacttgagttcgaagaattcatcaaaggtttgatttgtatcccaatcaaattccctggcactagactctacaaatccttaaaggtaaaatatttccttataatacatgagcatatcaatatctgatttcattttgttagtgtgtaaatactanggtttaatacttcaatcatg

SEQ ID NO: 143637 - DNA, 2393 bp, Arabidopsis thaliana landsberg; identical to SEQ ID NO: 37139

SEQ ID NO: 143638 - DNA, 1458 bp, Arabidopsis thaliana landsberg; identical to SEQ ID NO: 35900
  unsure (1)..(1458): unsure at all n locations

SEQ ID NO: 143639 - DNA, 567 bp, Arabidopsis thaliana landsberg; identical to SEQ ID NO: 61983

SEQ ID NO: 143640 - DNA, 859 bp, Arabidopsis thaliana landsberg; identical to SEQ ID NO: 24854

SEQ ID NO: 143641 - DNA, 3667 bp, Arabidopsis thaliana landsberg
agaaagaagagtatatgtgtactatctttagtttagatattaccttttgttttgacaatatcatttattgaataatgcattcaacagggaaaactcaatgatggaagagaggtagcagtgaagctattgtcggtgggatcccgacaagggaagggacaatttgttgcagaaattgtagcaatttctgcagtccaacatcgcaacttagtaaaactttatgggtgctgctatgaaggagagcatcgtttgcttgtatatgaataccttcctaacggaagtcttgatcaggctctatttggtacgcacagaagcatgtttatcgatccatgcttctgccaggctaaaatcactcattatgtacatgtcattggtttgaatgttgcaggggaaaagactttgcatcttgattggtcaacccgttatgagatatgcctgggagtagccagaggtctagtctatctccatgaggaggcaaggcttcgcatagtacacagggatgtgaaggccagcaacattttgcttgactctaaattagtaccaaaagtttctgattttgggcttgcaaaactgtacgatgacaagaaaacccacataagtacccgggttgcagggacaatgtaagtaactcccaaccctgacctctggtttgcaacacaactatggatttataacacatgttggtgattttactgtatcaatgcagtgggtatcttgcgccagagtatgccatgcgtggacatctaacagagaaaacggatgtatatgcctttggtgttgtggctcttgagctagtgagtggaaggccaaactctgatgagaacttggaggatgaaaaaagatatcttcttgaatgggtatatatctaacttttcctacaaacacatcctttttaattccaaatttggtgaataatttggtctttgcaggcatggagcctacaccaagagccacgtgatatggaagtagtagatccggatctgacagaatttgacaaggaagaactgaaacgtgtaataggagtagcgttcttgtgcacacaaacagatcatgcaatacgaccaactatgtcccgagtggtaggtatgttgaccggtcatgtgcagataacggaagccaatgccaagccagggtacgtctctgagagaacatttgagaatgcaatgagcttcatgagtggttcaacgagctcgagctggatattgcctgaaactccaaaagattcttccaagtcccaagttgaagaacatggacgacgacattgaaacttgaaaacttgtggtttttctattttttgttcttacataaaaaaaaagaagtcaatatagaaatcgttgttggtaaataacacatatacatattcgtttgaccaaaattggatttgactgtttctcctgaaagttgtgtttggtcccatttttaacattaaaatcccttaaaaccatcattggcatttagtatcaaagtccaaaggtggtgatgcttcttgcactcgtaggcagcagccgccattgttgaaatctcccgttgacaacgcagcggaatctcggtttaagcgcgtccacttcacggcttgtggatgcatcgcgtgagacgcactgctccgcgtagttggttagaccattaattaaattcaaattaagccaaatgaaaagtatctcttcaaagtccaacataaacaccatttttgaaccaaattaaaaccttctccgtctagttttggcggctatcatcttcttctccgtttaattttagtttccgacgatgctcaggctatggcggtatctgtgtctactcctcactgtctggttcttgtgtaatttcggtccggtttacgtggttcgagctcaaaaccgaacaggagccaccacacatcccgacgaaggtctgtcttcttcttctttgaacaacttgacaagttcaaattcaatcgatcggattgaagactgtgtagctaggtcttaagctactcttctgatcctaattgataaaaccgatgtttacatttataatatttttttattttatcctaagaagtttaccggtttagtttcaattgacattttttgtttagttaatcgtattttgttaagagctaataataattgactgttgtaaataaaaacagcgctagctttgaactcaattttcgcggcttggaggattcgggcgccgagggaatggaacatcagcggcgaactttgctccggcgccgctatcgacgccagtgttctcgactcaaaccctgcctacaatcctctcatcaaatgcgactgcagtttcgaaaactccacaatctgccgcattaccaacatgtagggcctctttcccccttttttctgcaccccatttgttcgacgtattctcccactgggaattgacttttgtgggggaaacgaatggttttcaatttcatgtctcaaattcttctcctcatttttggatgttgttgatgttttcacagcaaggtttatgcgatggaagttgtaggatctatacctcaacaactctggaccttggaatacctgacaaatctgtatggttttactatcacttgatgattatacaatttcagctacaaaaggagcacacattttcacaatttaaaatcacttctttcaggaacttgggtcaaaatgttctcactggctcacttcctcctgcacttggaaatttgactcgaatgcgatggatgtatgtctctgacaccttctttttttcttattgtttgtggtgaatgtctacacctttcattgataatgcacccttataggaacatttcttgtttctcactctcaattgtttatcacgtaggacttttgggatcaatgcgttgtctggccctattcctaaagaaatcggtttgcttacagatttaagattactgtaagcttaggctgcttcttcattgttttaatataattgtctcttcacaatgtttctgaaagatcttgacggttccttatacatatgtatatctttttgcagtggtattagttcaaataacttttccggttctataccagatgagattgggagatgtacaaaactacaacagatgtgagtctatctgttaaatcggcaagcgttttatgtattgatttcctggttataatttagataggaaatcttaacctcagaaatcatctagtgtttaccgaccacaacattcttgtgtaattacctttttaaagaatttcttccatcttttgaaggtacatagatagttctggactcagcgggagaatacctttatcatttgctaacctcgtgcagctggaacaagcgtaagatatactgaattcgagtataagctttattgttgggtttgtaccatctatttattactttacgttttaatctcaatgttgtaccagttggatcgcggatctggaagttacaggtcagataccagactttataggagattggaccaaacttactaccttgtaagaagattttcatttttacgggacttatattggatttgttacattcatcttgttttaatatagtctgtattaattttcctcttagtagaacactcttctttatgttttaatttgggattcaacgattggtacatgttttactgcaggagaattattggaactggtctgagtggtccgataccttcgtcattttccaacttgacttcgttgacagaatt

SEQ ID NO: 143642 - DNA, 576 bp, Arabidopsis thaliana landsberg
tgaatcctcttccctcctccttcttctctctctctcgtttctcaactaccgtctctctgcttcttctgttcccaaaaccggaaactttacttcgttgaattttcccttgtttctgaaatggaagacacaacatttaccaaagtgttcgttggaggattagcttgggaaacacacaaagtctctctcaggaattactttgaacagtttggggacattgttgaagctgtcgttatcactgataaatctagtggtagatctaaaggctatggctttgtaagtttcttcttcttcttgtttctttttactttggagatttgttatagcttcaagctcacgggttctgttttttttttgtaaaggttactttttgtgatccggaagcagctcagaaagcttgtgtagatccagctcctgttattgatggaagaagagctaattgtaatcttgctgcttttggtgttcagagatccaaaccttcttctcctattcatggtacttttaggtttctgtcttttgatactttacttttgaaaaccctacatcaagaaaatatgtaaatccatggatcttgctgga

SEQ ID NO: 143643 - DNA, 1548 bp, Arabidopsis thaliana landsberg
  unsure (1)..(1548): unsure at all n locations
tcgtattgggatctgatgttgtgactctttttgtttatcagtttttctactttgattcagtggagtcactcccctctgaacctgtggactcgagtgactttgcaccaagaaacagccggtatgatgcccaaatatctgtatttggggccaagttccagaagaaacttgaagatgctaaagttttcacagtagggtctggtgctcttggctgtgagttcttgaaaaatttggctctgatgggggtttcttgtggaagccaagggaagctgacagtgacagatgatgatatcattgagaagagtaacctcagtcgtcaatttctgttccgtgactggaacattggacaggctaaatccacagttgctgcttcggctgctgctgttataaatcctcgcttcaacattgaggccctgcaaaaccgtgttggcgcggagactgagaatgtatttgacgatgccttctgggagaacttaactgttgtcgtcaatgcactggataatgttaatgcgaggctctatgttgattcgaggtgcttgtatttccagaagcctctccttgagtctggaactcttggtacaaagtgcaacacacagtcggttatcccacatctaactgaaaattacggtgcctcaagggacccaccagagaaacaggcccccatgtgtacagtgcattccttcccgcataacattgatcactgtttaacttgggctcgctctgagtttgagggtctgctggagaagactcccgctgaagtgaatgcatatctttctagcccagttgagtacactaactcaatgatgagtgctggtgatgctcaggcgagggacacattggagaggattgttgagtgccttgaaaaggagaagtgtgagaccttccaagactgcttaacctgggcacgactgaggtaatatcactctcttaatagttagttagatagtctagtcgtaatatggaatgaaatatagtccggtgtcttactcatgtcctgctacagtctcctattttatgcttttgtcatgtgcttcatcccaggattgcttaattattcgttgaaaacatcattacgaaactaaaaaataaaataaaaaactaggaacagtgttagaaggtaacttcatttcacaacaggtagctacaaccaatatgtagaagtgggaataaatcgtttccttcctctgtggagtctgtgatttttgcaataatttatgtgtttgttatgttatgtgactaggtttgaggattactttgtgaaccgtgtcaagcaattgatatacacatttcctgaagatgctgcgactagtaccggagctccattctggtctgctccaaaaagattccctcgtccactccagtactcgtcgtccgacccaagtctccttaactttatcacagcgactgctattttacgagcagagacattngggatcccgatacctgagtggactaagaacccaaaggaagcagcagaagctgttgacagagtgatagtcccagactctgagccaaggcaagatgcaaagattgtgactgatgagaaagcta

SEQ ID NO: 143644 - DNA, 767 bp, Arabidopsis thaliana landsberg
gatattgtggatgtacgctaatttttggatcactggaacattatttatagttggaggcaagtgtccattttcttttccagaacgatttatgatgtcatagttatatcttattgctctttttgtctctttcccattgtagttaaagctaatgaagttttcatctagtgttaatgtctattgttgtttgaatcaggttatttgttctctttgaatcacgcacgggtggtggttcttatggcgacaatgtatgcaatgtactgtgtcaaagtcagacttggatggcctggagttattctctcgatgaatcttgcattcttgtccaacgatttatttatttgtcttcttcaatggtgtgatactgttagtgaaaaaacacaagtggaggagccaacgaaacctgaaactgtaatagacgaagagtttccaggagagtttgagtattcttctgttcctgctgaagaagcagagaaaaaggttcatgaagataagtcgtccactaagccagcatcatcgtcaactgttgtcagtaacatgaaggagatttctactgttaaggtagtcaaaatagaaacagattcagcggatgagatgaaacgaattcttgatagtttgaatcactatgaagcattggggctccctctgtttaaaaagattgatgccgcattgcttaagaaagactatagaaagaaggtctgttttcttggcttggaaactatgtctctggtgaaataagttggttctaaatttatgtgctgggttacccttgt

SEQ ID NO: 143645 - DNA, 1759 bp, Arabidopsis thaliana landsberg
  unsure (1)..(1759): unsure at all n locations
catttcgactctatttgtgtagttgaacttgtgtgtaagtctctgcttaagccctntgttgtgttgttgaccccttgtttgtgctatatgaatntgcaggggacttaggaacataatgaaaattcacatcaaaaaggttaactgctctcagtgggaagagatcgcagtcccgaaaaagtaaaaaacagttttcgatatatgatttatgtattacaatctttgatatcaatgcttaaaacctgatgctatggatttctcttgtagtgtgagatcaattgtcgcattgaatcttcacagctatggaagtggaagccatccttggggcaatctaaaaccggactatctagagaaggtattgtttctgttccatttcatcatatatgaactcagttctctgatgttaacccgaatgttttctttggtttttctcagagaggctttgtggaagcacattgtgatgatggtttgatagagattttcggttttaagcaaggatggcacgcgtcatttgtcatggctgagctcatctctgccaagcacatagctcaggtaacttcaaaagacactggtcaatgtataatctttttagccatgtgtttgactgtttcattttggtgatcatttcaggctgctgcggtaagatttgagctaagaggaggtgactggagagacgcattcttgcaaatggatggtgagccatggaagcaaccaatgagcactgagtactcaacatttgtggagatcaagaaggttccttatcaatctctgatgataaataatgaatgattgagattcaaagctggattctttgtacaaagctaattgttttgtatttggatttgattcagttagtcatagatatagcctaagctttttagtcttcttttcttttaaatctgagattgtgaccatttttctctttttaatttctgcttattgttggttttgtacatttctgtgttgtgaggaatgaagtttgtttattcataagaatgtgggaagataatatttggtcaaatttcaatctctcttcaatctttgtaattctagcattgagcacatagatgtgattctttgtcatatttttatttattttaccactagttcgactgagaaccaatttatcatcgacaccaatttctaagtaagaatatttttaataattatcattattagtcgtatatttttaccagaataataaaaaattaaaaacctaagttaataaaccacacaaaaaagtttttctctcttcgctctctcgtagtttgtaaagatagaaactgaaatttcttttgtttttgttaaccggatagttttccggtgagtcgccgtcccgtttaattcgggctttcgtccgacatcttctagctacgttagtggagatggttggctttttgtatggcatcgttggctaacttagcgacgttggccagcttccgtacggcagcgttgggcttacactaacagcgttggtcatctttgtttttgttttgttacttcaaaggtttgatgatgaagctttatggcatgcagaatcgtcagatctgaagagggtttctctttacaagatctattctccttctgttttgtttagcttcactattgggttatgcttttggctctggtagtttttcggcgatgtgtgcgtttccagcaattaccctcgtttggatctaccatatttaagacagtttcaattttattttcgcctaagattgggttaaagcttctatcctatgcaaatttgatatgcctttag

SEQ ID NO: 143646 - DNA, 368 bp, Arabidopsis thaliana landsberg
  unsure (1)..(368): unsure at all n locations
cccaccnaccgaatccgacaggacatttgatctctgccatgagacagatcttgagaaaaagcttagattcaccaagaatgcttagatctatgcctaatagtccatctaaagacgaccaagatcatcatcatgattgtgtttctaatgttttgtctaggtctgatagctgtttcgctagtttgacttgaaaaaagctcatcgttgaaaaaattgttttaaaccgtcggtttagggacccacttggatcaaatccggttttctgatttgaaaatttcgtcggtaaaccaaaaattggtttctgtatgtgtttttgccggatttgttgttgtacctttggaaaattttgggctaaaagaattatttggtgc

SEQ ID NO: 143647 - DNA, 1163 bp, Arabidopsis thaliana landsberg
cgaagctggaaggagattctttacgtagtagataggccacaggtggtttcaatcttccccaacaaccagacgaaatcgaacttaaatctgtaacaatcgaagacactctcactctttaattgatcaatggcgtctcttcaaatcagtggctcggttaaattcgagccgttcgttggatttaaccggatccgccatttccgtccgatcgccagtctcggatttcctcgttttcgacggagattcagtatcggacggtcattgttgcttcgtcgttcttcttccttctccggtgactctcgtgagtctgatgaagagagatttatcacagacgcagagagagatggttctggctccgttcttggctttcagctcactcctcctggtaaatgtcgttaaactcgtgactgagttcttcatagtgtttcttccaatttcctcaacgaacagtgatttattctctgatttgtgcataatctagggattttgtgatggtttatcgaatgtgatttcaatttgtaaaaagtgaatgattctcttgaattttgcttgtggtcctcagattcaaagctattacgtttttcaaatttcagaatctttcatattcaaaaaattctgatataaagtagcacgattttgctcagaatctcgaagatgaactcgatttttccttgtacaggtgatcaggaaacagttagcactagcacaggagaaattacacatcatgaagagaagaaagaggctattgatcaaattgtaatggctgactttggcgtacctggaaatagagctgttgaagaaggagctgcagaggttgggattccgagtggaaaagctgaagttgtcaataaccttgttttcgttacatccgaggcggctccttactcgaaaacaggaggattaggagatgtttgtggttctttgccgatagctttggctggtcgtgggcatcgtgttatggtcatttctcctcggtacttaaatggaactgctgcagacaagaactatgcccgggctaaggatttggggatacttgtaacagtaaattgctttggtggttctcaagacgtttccctctatcatgagtatagagatggcgttgattgggtaaccacttatctcttttagcttaaattattgtggagttttgacaaacgccattgctt

SEQ ID NO: 143648 - DNA, 739 bp, Arabidopsis thaliana landsberg
taagcttgagcttgatgtgcagttagttaatgatattattatgggttttgctaagtctggtgatccttctaaggctatgcagcttcttggtatggctcaagcgacgggtttgagtgcgaaaaccgctacttttgtattgattatctctgcgttggcggattcagggaggactttggaggctgaagctttgtttgaggagttgagacagagtgggattaagcctagaacgagagcttacaatgcgttgcttaaagggtatgtgaagacgggtcctttgaaagacgcagagtcaatggtttctgagatggagaagcgaggtgtttcgcctgatgaacatacgtatagtctgcttatcgatgcgtatgttaatgcaggtagatgggaaagtgcgagaattgtgttgaaagagatggaagctggtgatgtacagcctaattcttttgttttcagtagactcttagctggttttcgcgatagaggtgaatggcagaagacatttcaagttcttaaagagatgaagagtatcggtgttaagcccgatagacagttttataacgtggtgatcgatacctttgggaagtttaattgtcttgatcatgccatgacgactttcgatagaatgttaagcgaaggtattgaaccagatagggtgacttggaatacgcttattgattgtcattgtaagcatggtcggcatatcgtagcggaagagatgttcgaggcgatggaaaggcgaggg

SEQ ID NO: 143649 - DNA, 737 bp, Arabidopsis thaliana landsberg
atggatgtgaagaaagatgagaacagtatcttagaaaacatgaaacaagagattaatcatagtctaaaagaagaagcacaagaagaagaagagattctaaagaagagaatctcaagccaccctttgtatgggcttcttcttcactcacatctcaattgtttaaaggtacccctcttaatgcttccctctctctcttttttattaaagtgatgtatgagtataaatgtttatctcttatgtatttggacccaaccacgaccaggtgtgttccggcgactttgactcaccggagatcatgaacacggctgatgatcttgccctatccaaactctctctccaccctgactcttcctccgaagctacctcttcagaacttgatcaattcatggttcttttttttttttctccctgccaaaacatatttacacaacaaaaaacaacttttcacgttcttttattttttcctttgcaaattaatttgactttcaagtattctaagtttattttgccaagaaaaaaacagtagcacttatacttgtaaattgattcacataataggaagcgtattgctcgactctacgggagctcaaggaagcaatggagaagcctcttaccgaaacgcatcgttttgtggatgcggtgtacactcagctaaacgacatcgttatgtcatcacccccttaaaaaagggtaacatgaacaactgttcggtgctactatgtcaatgcattgtgcct

SEQ ID NO: 143650 - DNA, 556 bp, Arabidopsis thaliana landsberg; identical to SEQ ID NO: 2290

SEQ ID NO: 143651 - DNA, 888 bp, Arabidopsis thaliana landsberg
ggggaaaattaggctatggcgatgttaggtgcacagcaagttccagcagcagcttgtactccagatatggtatgatccagattctttttgtgttgttttcttatgaaagtttccgtttcttagaagtacattgttgtttattcgtgtgtttataggttgggaatgcttttgtgcctcagtattatcacatattgcatcaatcacctgagcatgttcacagattttaccaagagattagcaagttaggtcgtcctgaagagaatggtttaatgagcatcacttctaccttgcaagtgagtgtactatatttacctcttctttgcatccttgaagttttcctacctataatacaagtatgtatatatattttgagcaggctattgacaagaagataatggcgcttggttacggtgtaatcagtgcagagatagctactgtggacacacaagaatctcatggaggtggttatattgtactggtgactgggtatttgacgggaaaagacagtgtcaggaggacgtttagtcagaccttcttccttgctccacaggagactggatactttgtcttgaatgatatgtttcgattcattgatgaaggcactgtcgtacatggaaatcagattccagtgaacaacgtccaagctcctgtcaacacttaccagggtgagttgatgaacctagcttttgtatttgcctccttcaaatcaatagattatttgttgctttctttttaatgggactttggtttttataagcgttgtaaatattcttttgccttagacacagctgctgcgaaggaaattccagatgactttgttcaggagatatatgtccaagagaatcatgctgttaagcataccgaggtgtgtccaagagcataatgagc

SEQ ID NO: 143652 - DNA, 1733 bp, Arabidopsis thaliana landsberg
atggaaaatgacatgtttacaataatgttaagtaatattgtagacaactcacctaccactgattgtgttattacggtgtggtagaagacggataaatacatttattactcttcaccaaacccttctcactctatctataaatctgtccaaatctatttgtctcttcaccccaaaatcaacctacaaaagttaaaagttacaccttactaaacacaaacaacttcataatggctttccacttccggcgactttgcttcttctcagctcttcttgccgtggttctccaactccttcatggcgtctctggccaactagttgtggttgaggaacctatttctgctcctccgcctccgctggtcgacctaaacaccggtgatggcattgtgccggcgctgtttgtcttcggtgactctctaatagacaatgggaataacaataacattccttcctttgccaaagccaattattttccttatggcattgatttcaatggcggtccgaccggtcgattctgcaatggcttaacgatggtcgatgggattggtaagttttcactctatgcattataataagttttccttcctcctaaaactggaacgaggctgatataagtattatatatgatgcatgcatgcattgatcgtatagctcaactattggggctgccactgattccggcctactcggaagctaccggagatcaagtacttcgtggtgtcaactatgcttccgcagccgcggggattcttcctgacaccggaggaaactttgtaagtagcttttatgcaaaaaagtaaatcaattcgtaagttgcatgttatatccttaacaagaaaaggttgcatatatgttacatacttacatagttacatatacactctctttttactatttgttgtaagaaatgtaagttatccgaagagcattgatatactttttttttttttaagcatagatatacttgtatctactaatcagccgaccaatattttagtttgtattaaataattctaaatggattctaataaatgtactataaataacttacataattctgaagtgtatctattttctgttatgagcttgtgaataaacaagagtaaacatcaaaaaattaattaatattttaaaatcttaatgaaatcgttactaatttgattttaaaaaaattagtgatcataaagaaaaattgtgacaaatcttttttattcaaaatcaatcaaaatactttcaattttttcgttttttcttgagaaagaaaatatattttcaatggtggtcacatcacatgagctatgttcaagagcaacattgtggtttcatattgtaccaagaaaaatggttgtgggtgctcctgctaaatgcgataattaataatgtaacgtggagtttatgttctggtggtcaggtgggacgcatacctttcgaccagcagattcataacttcgagacaacactagatcaggtggcgagcaagtccggtggtgcagtggccattgcggattcggtgactcgaagcttgttcttcatcggaatgggaagcaacgactatctcaacaattacttgatgcccaatttccctacccgtaaccaatacaactcccaacagttcggtgatctcttggttcaacattacaccgatcagctcaccgtaatacaacgaaaacaaaagaatgatctctaattttaattgatagtacctaatcgagtaaagaagcgaaaaatataaatca

SEQ ID NO: 143653 - DNA, 1471 bp, Arabidopsis thaliana landsberg
tactgttctttcttcttctccatttgacatttctcaaaacattattttcctacagagaatcaagaacccgaactacatttgaaaatggaagaacccatggatagataatccaggcatgtttctacctatttaatgtgtatgttcattttgagctggatttcttcttgttataaatactaagcttgagcttctcggttttgcacagaatttgaagatgatccagatctttacgttctgaagtctatcaaatatgcaggcattgaagtatggcaggtaagttctagagctttcttgaattccatcaaatattaacttttataatcactacatcatcaccagatatggatgaatatttatataatattcactgccaattagttcttttaacatatatatgctgcttgtacatataggtcatccaaatttttagggttgaaaacaaaaccaaaagaaacagaaaagatctgataaaaagtcttcattttagacgagggatcaaacttatctagtgcatctgaatgaaaaaaaaatgatcttaacactgcaggtgaaggctggctcaatctttgacaatatattgatctgcgatgacccggcatatgcaagaagcatcgtggatgactattttgcccaacacagggaggtagatttccaagtctttgtatatctttttgcttctttttggataaaatcaaagaagttttttgatcttgcaagtgtgtagtaattgcaaatggattttctgcatgctattatatacgaaaatgtcttattagtgaatttgatatgctatatacttggccatatgcaccagtctgagaaggagttatttgcggaagcagagaaagaaagaaaagctagagaagatgaggtttgtagttcacaaaaaagttcttgttctcttttcaagtcttctctgtatatcctagttaacgagcatggccatacaaattaacgtttacaggaagctcggatagcacgggaagaaggtgaacgcacgcggaaagaaagggaccaccggtatggagacaggaggaggcgttacaaacgggtaagtacttatttgagtccaaatgaattatacccttctcaacctctgttttatctggaaacctagtgagtcaatattgttggaaatggtttggcttggtttgatttgtttagcagccgaaaacaagtgattatatgggagattaccaagtaaggggtaccttttatctgatccacatttaaaagaatgggttatgcattttagtactgaatcatcttaactgttctaaaaatgtaagtttgttatgattctgaatttcgtgtaggacgagctatgaggcgcagagtgtgggcatttgcaaagcattggggaaattatctatattttgctttgaatgtgtactgtttgtaatttcataatttgtaaccttttgtattcatattcttataatgtattttggcatgaaaacttgacttgtta

SEQ ID NO: 143654 - DNA, 559 bp, Arabidopsis thaliana landsberg
gcatttatgatggacaagatgttgcaggtaataataataaactaaatccaaaatcttgatcttgacttatgtttttgttagagattgtgactgtgtttggttgttgtttgagtaatttgcagtgaaggtgcttgattgggaagatgatgggaatgaaacaacggccaagaccgctacaaatcgagctttgttccgtcaagaggtcactgtttggcacaaactcaaccatccaaatgtcacaaaggttagttggttaataagttagttagttaattcactgaattgagtattgaaatattgaaatgaaacagtttgttggagcgtcgatgggaacaacgaatcttaatatacgatcagctgattcgaaaggctcgttgcctcaacaagcatgttgtgtggttgtggaatatcttcctggtggaacattgaaacaacacttgattcgtcataagagcaagaaactcgcttttaaagccgtcccaaactcgctcttgatctcgccagagggtaattgattagtcttttgacactgctaatctttttcagatttgtgcaaaca

SEQ ID NO: 143655 - DNA, 566 bp, Arabidopsis thaliana landsberg
tgttttatgttctccattaaataaaaggacccactaattctttacctctatgctcagctctcgttgactcaaagattaactcctgtcacacggtagaatgtatatatatgctaatcttgatgtgtatatctctatgcagtggtgatccaacggtgtatgagagatattggcaggaaaatggagaggtgacaacaatggtgatacctggatggcaatctcttagctatttttcagatgaaaacaacctctgttggtttcttgagccagagcttgccaaagagattgtgagggtgcataaggttgttgggaatgctgtaacgcaagaccgcttcattgttgttggcactggctcaacacaattgtatcaggctgctctctatgctctctccccacatgatgactccggtcccattaatgtcgtgtcagccgcaccctattatagtgtgagtcatatttatagccatctcaaaactatctgtatgtcttgttagaaacgccattttgctggatactagtttttttttatagttattttagcacatatatgtgtcaatctaacatgtatg

SEQ ID NO: 143656 - DNA, 835 bp, Arabidopsis thaliana landsberg
tagaaatagaaggcgaagagataatttccaaaaacaagaaaaacctctaagctcaaaagatgttgttgagaacgatggcggcgacttccccgcggccaccaccgtcaacatccctaacatctcagcagccaccatcacccccctcacagcttcccctccgtacaatgccgggatcgtacggctggccgttggttggaccattatcggaccgtttagattacttctggttccaaggacccgataagtttttccggacaagagctgagaagtataagagcactgtgttccgtacaaatattcctccgacgtttcctttcttcggcaacgttaaccctaacatcgtcgccgttcttgacgtcaagtcttttagccatctttttgacatggatctagttgataaaagagatgttctcatcggagacttccggcctagccttgggttctacggcggcgttcgtgttggagtttatctcgacactactgagccaaagcacgccaaggttcgtacatacgttgctttgctactattacgtacgagtatataattaattaatacggtaacaacaaagtaaccaaatctttggtttgactggtatctagaataaattttaatcaaaggtccgacactttctagaccaaaaaaacaatacgtatatagattgtaccataaataattaaaccatagtaagagatgtactttaagagaatttttttgaagttttcaaaattaatcgaaccaaacctaactagttagttattatgagtgtggctttttagtgactggatttgatgtccagtgattttactataaattgatcttaaattggtttggaaa

SEQ ID NO: 143657 - DNA, 4822 bp, Arabidopsis thaliana landsberg
ttggttttactactgattatgattatgctggttaattggtgttgctttagggatttcacgttacacttgctcccatggacaatgatgttttccagattcgccggtccatgcgagacgctatgtaagccttcaatttttcacattcactcgttcctcttgcactctttttcttttctctgttagttgctgctgtactacggattgagttaatgtgtctgggaaagtgggaatgatctaacttattactgctttttggctctgtgatcatgtatttctgctttgtttcttaagaaacaatatcatctattagtgtttctactactgaaatgttacttatttggattccagtcttgtcacattggtgttcatagttgttttcctctctgcgtgtatatctccgaaccacactagagggtttcttgatgggttgttacctcatttgaggaaacgtttcaaattaactgatcatccaatctttccagcttcgtccagttagagaagcgaaacccacttccgaatgatgatgcatcaaaggggaagcatttagatgctgctaaacgcttagaggaaggactttttaaaatggctatgacaaaggtacatcaattatatttacttgattagttataagcatttaggatttgatttactgagaatttctaagttctaactaaacaagactggttgatgccttctgacatgttgtcactgaatccagcttgtttgctatatgtcctcccttataaatattttcgtttctgacacttttaacttcaaaactcacaggaggaatacttgaacccgtcaactcttgaatctcgcttgacaagcttaataaaaggcaggcaattgaataagtacaagcaccaacatgctgattcttctacgcttggaacaaccataacacctactccaggagtctctgctgaacccacaatggtacattacatacatcgaattattcacgagctttaattaagaggcgtataattcgaaatgtaatattataaacattctgaactttgtgatgttccaaatttttttggtttggagcaggataatgagaacagagatcagtgcgagacagagattgctgagaatctgaagtcagtgagccttgagccatgaagattatcagaaagttctttttacgacttgtttggaaacgttttcattgcttatgttacaaggaaaagatgataacatatacaatactaacgcttctgccttctccattgctactgtattgctaattgtaagatctaaagtaggaatggtaaaaccggttatgatttgtttccggttagacttggaacatgtatgaatttgaatggtttattattagttactcttggtaatcggtacagaaaaaatggtagttgcgaaagtaaacagagcaaaaactacaagggtgtgaagatttaaattactggaacatttgatcggacggataggagcgcatgtatctccgacacttctccttggctgttggattgtcgaccttggttcccccaattaactttgacagaggttccttgatgattcgtattcagacataagtaacataaggtaagtgttatttaatgtgtcttttgttacttacaaaatcaaaaccaaaaatccctaaatagccaaaaaaaaataaatcaaaatccccaaatcgaagaattcagacttctctgatttcgaaataatttgtcgatatttcaatttcctcgtcgtctaggttttggaggaatctcgttctgggatttatctacgtacttgtgtttgatcctattttttatcctggcttgtgtgagttcacacgtgcgacatcggctgttcagcgactttattgctccgttctacttcgttttcaagattcgatcatcgtaatctttagtaacgtttttggggaagattttttttgctgggttttgctctttgcggctgaagtttgtttctttgtgagtcaatttcaaggttattgctcctcctgttgtctgtttcgtaattgtttacaattttgttggttttgctattgggttttagttgctttgatcatagtctatgattctagttcgactgaattgcaatcatgtcacttcaattgaaagtgtggaatattattttgcaggacacttgacggtgctaggtgtattgagctgctactctgagatcacttgtaagaataataaagagcaggagatgaactttcgatcttttggcttctcggggacagaagagttatgcagtgcctgttagtgttagttgcaagacgaattaggagacgacgacgaagatttaagagataacatgaatgttcaggctcacatgtctggtcaacggtctgggcaggttccaaaccaagggacagtgccgcagaataatggaaactctcaaatgcagaatttagttggtagtaatggtgctgctactgctgttactggtgctggtgctgctactggttctggtactggtgtaaggccttcacgtaacatcgttggtgccatggatcatgatattatgaaacttcgacagtacatgcaaactcttgtgtaagccttcaatttcagctatagcactgcttgcttgttagttgcctctgtgttatggattgagttaatgttgtttcaatgtgggcggggaatggaccaacgtattactcctttggctgcattacggcatatctgcttcatttcttaagaacttagtgtttctgctttctgagatgtcttgatggttactgcataggggactatttctaactgcccttcttgttctttcattctttccaggtttaacatgttacagcaacggcaaccatctccagctgatgctgcatcaaaggcaaagtatatggatgttgctagacgtttagaagaagggctgtttaagatggctgtcacaaaggtataaatatttttgtgtgtctaaaggaaaaatacttgattggtacttagcatagatttttttttacatgttggctgtgtactacaggaggattacatgaaccggtcaacccttgaatctcgtattacaagcctaataaaagggggacagataaataactacaatcagcgacatgctaattcttcttcagttggaacgatgatacctactccaggattatcacagactgcgggtaatcctaatttgatggttacatcctctgttgatgctactatagttggcaacaccaacatcacaagcactgctttgaacactggaaaccctctaattgctggtggcatgcatggaggttctttcgttaaagtgatcatagatacttttcctggaaatttttatctcttgtttctctgacaccttaaaatcttctttttgcaggtaatatgtctaatggatatcagcactcgtcgagaaacttttctcttggttctggagggagcatgacatccatgggtgctcaaagaagtacagcccaaatgattcctacacctggcttcgttaacagtgttactaacaacaacagtggtggattttctgctgagcccacaattgttcctcagtctcagcaacaacaacaaaggcaacatactggtggtcaaaacagtcacatgttgtccaaccatatggctgctggcgttagacccgacatgcaatcaaagccgtcgggtgcggccaacagctctgtaaatggtgatgttggagcgaacgaaaaaattgtagactcaggttcatcttacaccaatgcgtccaaaaaattacagcagggtaacttctctcttctttccttccgtccggatgatctcatttcaggtcagcatattgaaagcacgtttcatatttcaggggaaggttatagcacaacaaatcctgaccccttcgatggagctataacatcggctgggacagggacaaaggctcataatatcaatacagcaagtttccagcctgtgtccagagttaactcttctctggtgagcaatcagtcaattttactttgcatgcaacaatgtagaccaattaaacacttgtcactttgagtatttagactttcaatcttctttcctcattatctgcagtcacatcaacaacaatttcagcaaccgcctaatcgatttcagcaacaaccaaatcagattcaacagcagcagcagcaatttctcaatcagaggaaattgaagcagcagactctgcagcaacatagattaataagcaatgatggcttggggaaaactcaagtggattcagacatggttacaaaggtgaaatgtgaacctgtaatggagaacaagagttatgctccacagggggagcatgtgaacgattccagctttctcagctccagtaactaatatcataacttctggagaattaactgccaagcaaaacgctcagcattgtcccattactaaagtcagagtgatatatgtacatcactcccccaaaatagccagcagattcagcaaatgatgcacccgcagaatataggttctgattctagtaacagttttagcaatcttgctgttggagtaaaatcagaatccagtccacagggtcaatggccttccaagtctcaggaaaatactctaatgtctaatgctatttcaagtggaaagcacattcaggaggatttccgtcaaagaattaccggaatggatgaagctcaacctaataatttgactgaagggtctgttattggtcaaaatcatacttctactatatcggaatcccataatctgcaaaattctattggtaacacatgtagatatggaaacgtaagtcacgatcccaagatcaaaaatcaacaaagatggctactgtttctacgtcatgcacggagttgcaaaccgccaggagggagatgccgagatca

SEQ ID NO: 143658 - DNA, 682 bp, Arabidopsis thaliana landsberg
ctctctcttagccatgtttgggtcaagaggtctctgttgcagcagaatctggaatcgttctctgtttctcaaacgttcttcaaacttccgagctagtttctctacgaaacgtgttgggacccataatggaacattccactgcgacgaagctttagcttgcttcatccttcgtcgttccaatagattctccgatgctcaaatcgtccgaaccagagatcatcaggtaccctttgttcaatttaccctgtatttgagtttctctgtgtgcaaagttcccttctttgggttcaattttggattttttttcgaaattctcgagaaatggttaatttagtttgatttttatgtaaaattcttgaatttttgtgtgtgtagctatgaatttgtgcagtaatttgttttgagtgtgcgattttgcatcaactctgtattagttagtaattttgtgatgtggttatataaggttttggagaagcttgatgcggcacttgatgttggaggtgtgtatgatcctcagagtgaacgttatgaccatcaccagaaaggatttagtgaagtgtttggccttgggtttaatactaaactcagtagtgctgggctagtaaataaggtaaaggatgatactttcttgtgattgagagaaaatttgagaattggatgatattttttgtcatgtagcatt

SEQ ID NO: 143659 - DNA, 593 bp, Arabidopsis thaliana landsberg
aaataaagatagctagagaagcagaaaaggcacggcgaacggagaaagatgcggagcacaccgttggggacgacggcggtttcaccagcttcaatcaaacacaactcttatgggtatggccgcttcgtttcctcttcaggagtctctaatttctctatccatcgtcggagacgccactcgtcgttttctatctctcaagctccttcacaaatcaactcaggtttgatgatgagctatgatttagatcgagttccaattcttaagccatccccagatgaattcagttagatgctctctagtgtaattgaccatgcctgattgaaagattcaattttaactcatttttcaacgaaacaattgattgcgcatgtttgcttcatgaagctttaaattttcaggcttttgcatgatttcagcaaatcagttgttttattaaacctgaggacctcttgtcactgagtcttttaggaatagtttagagttttcaccgggtttgagattctggttacagaagaaaagtgtgaacatagttgttgcttctatcaatgggtgataaatttgttctttgatgaatatatctgttatctctgtat

SEQ ID NO: 143660 - DNA, 4076 bp, Arabidopsis thaliana landsberg
ctttttttttcagatgaaacccaaaaagagttgcttgaagggcggtaacattttaagaccagtaaaaggaaacccaattctgttcttcaccaggctcttaaatgcatctttggatgggaaaaacactcatttgaggtgccctgtggtgaaaggagaactgttagtggcaacaaaactgatctatgcgaagaaacaagcaagaattgaggagagtggggaatgcagtgatgaagacgaaaactgtggacgatgggctaagcttggggagtgcaagaaaaaccctgtctatatgattggctctcctgattactacggtacctgcagaaagagttgtaacgcttgttgattcttcaatcttatcgcaaataattgaacattttcatactcaagtacttgagctgtttttggtctataagatagaataaatagtgaatagttaagggtcgtggtggtaattaattcctcttggccataggagaaaagaatatactcacttagatcttctttgatataactagaagtctttgtctatgttgttatctatgtttctctcgaatcataaatttgcatcttgctgtttcttacgcagcatagtccctttctcttgctagttccaacatttttaaaattgcaatttcctataaataccagatattttaaaaacatatcaaccagtgtacttgttggctaaccaaaaaaaacaaacaaatgttttatcacaagttagagcactattgatgaaaagttggactagtttaacatgttatggtcccatcgaagagattatgatctaagcccaaaatttcatagtttttaaaaaatggtaatcaaaagttaagtagttaagtatacaggaaaaaatttaaattgtaatattttttcctataaaaaatggatatttatctggagaaaataaatactccatttggttccatcaattttgaaaaaaaatcagaagaaagaaaaaattagaaattgtatcactctcctatcatcggaccaacaagatctagacaattgttcatgaatcataatttttgtatgtctatcccaataactttcttcaaacataacagtctattctaatatcttacatgttaagaaataataaaataaaggattgataaagaaaaaaaaaggttttttctttcttagttatttttaaaacaaaaatacaaatttactgatcaaatatttgctggatttttgtgatttgagcctcaagggttgttttttgtttgcccgtactaggcctttataatttttcttccagagctcttttgcctcctcctcctctctccgaaattttctctcatttttctttcatctccttttttgcgtcccatcactttctctgattttctcggcgactttcttccgtcccaagctcctctgaatccccagaaggatcgctctcgattcttctcttcctcctattctccgcccgatctgttactgtttttttttttactggtacgtgatcggactaaccattctcttctcataaacacacactaaatcgatttgaattcattccttcgtctatacatcactggtatttgattagatttcagaccgcgaatactatgatttcaattccgatttttctctgttaggtggcttagtcatggaggaaattaggcatctgtctgtgttagtgattttgacgctatttgaatcgaatactgttgatttatatagttgcttaggggaagaatcggttcagtatataggtgctttgtttataggaatttgtgttttgtgaatgtatgttgcagtcgaattcaatggagcttgtgaaacaagatgggaatgattctctcgatatgcttatcagacgtgcggttggaaaggatccgtttctttccttccctagacctgaaaatactcctgtccagctttttcaacttctccataccttagaacgtccaggtaatgtctcattgtctctcatcttttttggatttgacattttcactgaccaaatactttggaatttggtggattgagtactctgtggatatatcgttttggtctcgaggggtttatcatattagcttattgagttttttttagatccaagtgatgcttgaattacatgtggcctagggtatggtacatggactttatttgatgttctatttcgttcccaggctggccattgctgacccctttgaagatacaaatgcagaagtgtgaaaagtgcagtagggagttttgctctcctgtgaactttagaagacataaccgcatgcatcgccgtcaaagaaagccggaaaaggtttgcttagtctgagcttaactatactttcttccttttatgtctttactggttgctttactcttttctttgaagtcatctgaagtttgtgtttaaatgttaccaggattttggcaaagagagggatgcgctgggagccttttggaataaggtagttttccctctagtagtcttctcacagttattgccaattcgattagtttttccatcaggtactgatctctgttgttatttcagctctctgcaactgatgcaaaggagattctctcagtaaagagcatgatgcttgaggtactatgattcccattgatgctttcccttttacctttatcttaacttaaaacgcatggtgatcctcacatacgagtgtggcataacatgttcttcaggcccaattctaatttcattgttgtttgtcacatcttgtctaagggtttgactttttatgaatgctttatcgctcttttttcttcattagtgaaaggtgtgatacataataagcattgtcataaatgtttcctagaatgccatatgacttcatcagggttatgggattcgtttccaaataaatactttttcattaaacaaaagtaagagtataccataccagattcgtatacatacactcacaggcttgttgagtatgcatatctgatccatgatgtacctttcttaccttcttttctctcgcattatgcatcatggacctgtgtcctgattaaaatgatttgtagactaactcgagatgctttgtttggattcttgtaagatattcctggggcatcagtggagtcaggattaatgtcacttatcgaaaaaccaggctatactgctctgccacaatattatctaagagctggttctggccttttggtatgaattgcatctctctcttgacagattctttttccctgtctagataaactatcctcaatgttcaacctcatggctgatatatgttcctctttctccaggatcttctccaggctagaccacctagacttccaatttcttcgcaggaactttttagttttcttgatgatgcaagcgaaaaaactttcctgtctagcgaggctgcaccaatgcaaaagtacatttttgacggggaaataggaaaaactgtactggaggcaaaaaatgttgttgcttgcgcaagcttccttctggtacagcgattgttttttttttccttcaaagtttcaccattcctctctagttggtaaagcgaagtgtctaatacgagaactttacttttcatgtatccattacacgcgatttatctttatattcttaatgtgaagattaaagcatggcttgctgacaaagatgctgaagctctgaggtgccaaaatttactggttgaagaggaagaagctgctcgaagaaggtaagtgcttattaattgcaatgccagtaatataacgttgctgaatccactaagtgttgagtctaattcactggtattatgttcggagcagaaaagctgagctcttggagaggaagaagaggaagaagctaaggcagaaagagcagagagagaaggaccagaaaaaagatgctaaggaagacgagagcaccacatcagaggaacaacaatatccagctgagccatcaagccctttatctgtagcttctgattctgaggcacagacaccagattccttaccaattgatgattcttcatccctcgaggaacctcaagttttggaaactaataatggaagaaacagtgaaacgcaagtgccaatggttgatggcttagacaatggccaaaacatggaaaggcgaagtggcc

SEQ ID NO: 143661 - DNA, 815 bp, Arabidopsis thaliana landsberg; identical to SEQ ID NO: 10642

SEQ ID NO: 143662 - DNA, 1286 bp, Arabidopsis thaliana landsberg
ttctttctgggtgatgattattgggcatagtagtatactgtatagttttaacttttcacctttaggagttaccctagtgttggttggttcacatttctctaggaaccacaggcaagctctttgtttttgtccgagaaattatgataaaggtttcttatgcattgggtttataactttaaattaacttatgcattggagtaggattattttattgatcagaagcatctaaatatctccgagttctgtgcccttggatcgtgcattaatttttatcattacacgttcatagaagtttttctctttgattatcattaattatgtgttaaagctcacattagacctaaaaaaaagattgtgataaatctaacgcaaaatgatttaagcaaatttgcaggtaacatggatcgagcacacggagtatgacgaaaaccacatccaccgtttataccgcccattactcaggtgcggtctagcgtttggtgcgcatcgatggatggctgcattacaacgtcaatgcgaatgcctcacgattctcatgtcctccactgtttccacttccactaatccatcccgtaagctccctcaaacgctgcgtttctgatttattttgtagaaatatatatttgtttgttgttgttgacgtgattcatatcttatcctaccagaataaataagatttaataaatagtatgaactgttgactgagtcacaaagaaaaagatgatagctgttgattctgtaattatcaaactatatagtttaattaatctttttttggttatattaatgggcacagctataaactgcaatgggagaaaaagcatgctaaagctagcgaagaggatgactgataatttctgtggaggggtttgtgcttcgtcgttacagaaatggagcaaactcaacgttggcaacgtcgacgaagacgttaggataatgactaggaagagtgtaaacaatcctggcgagccgcctgggataattctaaatgcggcgacgtcagtttggatgccggtatctccgaggcggttgtttgacttccttggaaacgaacggcttagatcggaatgggatatcttatccaacggtggaccaatgaaagagatggcccatatagctaaaggccatgaccgttccaactccgtctccctcctccgtgccagcgtaagcattcatatttattacactttctatttgcatgcgtaagtagctaagctaatctccaaattttagtttaggttttggtgaatttagtattttataaacattagatggttttggaaaac

SEQ ID NO: 143663 - DNA, 1261 bp, Arabidopsis thaliana landsberg; identical to SEQ ID NO: 28528

SEQ ID NO: 143664 - DNA, 1114 bp, Arabidopsis thaliana landsberg
gagttcctcaaagaagaaggtaagaatttcatcttaatgatccacattgttgttattaccttgttcattgaaaagaacccaaaggtgttatgtagagtgaatccaactgttgttgagtctctctttgtgtgagataactgatttcttccatcatctaacagggaaatgctttacgttacgtgacgccattaaaagtctcctccctgagtttatgggagacagagcgcaaaggagtggtgaagaaagaagcatagatgatacagaagaagcagatgggtcgagggagatgggtgaaatcaaattggtaaggatacaagggatagaaatgaagctagagataccgttttcgtgggtggtaaataacttgatgaacccagaattctatctccatatctctgtccttgtgaaagctcctcaaaggtgaagtgtaaggttctctgcagttacaatccatctgtgaattgaatcaaattgctttctcgttccatcttacaaatccgaaagaatcaatgatttgttgtatacagctacttcttctatttctgatagaagcaagaacacagaatacagaaaagaaagtagaaatattttgattgactcgttagctcttttacatttgttacttgacggtttcctctctgagcaaatttgattgaaatcaatttatggtcgatataataatcactactttcttctattcacaagtaaatcagctcaagttcatagagagatccaaaatgttgttcaacaaaagcactgtatcatcaaatcgacaaagacaaatgtttaatttctccattaacaatgcgaggaaaaatcagtcaaattgatttagtttctccagaaagctgcttgttgtaatcttcgagctcatcgtaataaacatcccaaacgcatcggacgcaaccgctaccgcaacaatcgccaggctctggtttctctggcggtggaggaaccgaaactcccacctccttcttatcttctgtctccttcttgtttgtctcctccttggaagcttctacaagattcttgctctcggtcgtcgccatggtcaccggagatttgagctgttgttctggagatacggaagtgattgaataatggagaaagatcg

SEQ ID NO: 143665 - DNA, 1140 bp, Arabidopsis thaliana landsberg
caaccagttcagcgatcgcttactattcctcttccattcccgtatatgttttgatgcttgtgttagctaatgcttttattgtcttttaggtcatacataggtttcagataaatattaaaagcctataaaaaatgtcaccttcttcttctgttattatctcaaattttttgtttatatacttttgaagtattttttttttgtcgttacttttgaagtatattctaataaatgaattatatatttttcaacgttataattcaactaaaccgagatcaaatcgaaaaccggttggtacacatacgaatcgcgatcggtacaaatatgtatcgagtaacagatgaaaaccgtacacgtgtctgtatttgccacaagaatcaacggtggagaacattttacgaaaagaagtcgaggagataataaataaaataatttaaatacgaggattcgaaagaactctgttttatcttcagagacgtttatcagagaggcatgaatggcttctcttcctttcaacactatcccgaataaagttccattttcagtatcatcaaaaccttcttctaaacaccacgatgaacaagctcattctccttcttccacatcttactttcatcgcgtttcgtctctttgtaagaacggtgagatcaaagaagctctgagtttagttacacagatggatttcagaaacttacgcattggtcctgagatatacggtgaaatcctccaaggatgcgtttacgagagagatttaagtacagggaagcaaattcatgctcggattttaaagaacggtgatttctacgcgaggaatgagtacatcgagactaaattggtgatattctacgccaagtgcgatgctttggagattgctgaagttcttttctcgaaattgagggttcgtaatgttttctcttgggcagctattattggtgtgaaatgtaggattgggttatgtgaaggagctttaatgggttttgttgagatgcttgaaaatgagatttttcctgataattttgtggttccgaatgtttgtaaagcgtgtggtgcgttgaaatggagtagatttgggagaggggttcatgggtatgtggtaaaatctggtcttgaggattgtgtgtttgtggctagtagtttagctga

SEQ ID NO: 143666 - DNA, 552 bp, Arabidopsis thaliana landsberg
aggagtttgagtgagtctgagcatgagacagaggcaaggagtaacagaacaaaggacagcagaggaagaaagagacatgaagatgattctgatgagtctgaggatgaagatgacagacgtgtgaagagaaagagtagaaaggagaagaggagaaggagaagccgtcgtaatcattctgatgattctgattcagagtcttctgaagatgatagaagacagaagcggaggaacaaagtcgcagcttcttctgactcagaagcaaatgtttcaggcgatgatgtttcacgcgttggacgtggttcttctaagcggtctgagaagaagagcaggaaacgtcatcacaggaaagagcgagagtaggaaatcgatctatatgagccattttcactctccatttctctcttatcaatgttatgtacaataatgaaacatgtctttgtatgttggatttgatttgtgttgaaacatgtctttgtattttcactctccatactctggtttggtctgtttgtttcaagcttgtgttataacactattgagatacttggtgtt

SEQ ID NO: 143667 - DNA, 482 bp, Arabidopsis thaliana landsberg
aattatatttaatcatctcattttcttactatttttggtttataagtcgtagcaaacatgcatcaccactatctcagattttccaaaggaacttttttttttaattataaattttgtctttctacattattatttttataaaatctctaatggaaaagatgcagaaatacaaatgttgaaaatagaacttagctaaacaaaaggaattataaggaaaaaacaaaagataatttagctaagcaaagtatcatgatgatgagcgttgacaaatgaatcattcgtcttcttcaaaagcagtgacggggaaagtacgtgatagtcccgtaggattagcaaaagtgatttgagtcggattttgatcattaacaaagatctcagagatcgtaacccaaatcaaaatctctttgctcttgattcccgtgagctgactcatccgacgattctcaaggatcgcagtaacctccgaatcgtacgatacgttt

SEQ ID NO: 143668 - DNA, 882 bp, Arabidopsis thaliana landsberg
tataggttgaggttctatgttccataaggcatcctcacatggttcttctccttggtgcatgtcctgaatatggatgtttggtttacgagttcatggaaaatgggagcttagaggatagactctttcgtactggaaactctccaccgctttcgtggaggaaacgttttgaaatagcggcggagattgctaccgcactctcattccttcatcaagctaagccagagcctttagttcaccgcgacctcaaaccagccaatatactcttagacaaaaactacgtgagcaagatcagcgacgttggtttagcgcggttagtccccgcatcgatagctgatagcgtcacgcaattccacatgacatccgcggcaggaacgttttgttacatagaccctgaataccaacaaacaggaatgttaaccacaaaatcagacgtatactcattggggatattgctacttcagattataaccggaaggcctcccatggggctggctcaccaagtttcgagggcaattagtaaaggaactttcaaggaaatgcttgaccccgttgtccctgattggcctgtacaagaggctcaatcttttgctactctagcgttgaaatgtgcggagctaagaaaaagagatagaccagatcttgggaaggaagtagtcccacatcttattagattaaaaaactttgggaatgatgttgatttgattcgtggtgatgagagaactaacgaatggatatgacaaaaagaagaagaaacatatggttttgaaatatacacacaatgtaaacaagtaattaaacttcatatacaattcatacaatggctcatgttggaattcgaatcgagtctctcttctcataaagtttgatatttttttacaattc

SEQ ID NO: 143669 - DNA, 438 bp, Arabidopsis thaliana landsberg; identical to SEQ ID NO: 75371

SEQ ID NO: 143670 - DNA, 771 bp, Arabidopsis thaliana landsberg
ccatttacgttccctctttgatcagtatcttccacaccctggcaactccaaggtacgtcttaatcactcatcaagattaatatgtcttctaactttaaattaatgcatgtttatatttgaatcaaccagatccttctacctcgtgatattttgggtcttgttcgagaatgtaatggctatgcatcgaaccaaaggtacgtgcattggcctacttgaaggaggaagagtaaacgaatgggttgtgaccgaaaaactaggagatgctttgaagagtaagctactctctcgggtagtccaaagaaaatcttgttatcaaaggttaggaaaaaaaaagacgtatatatatttttccctttttgttagattaatcaagaagttgtaaatatataatgtttccgttgatgttatgatgttttgtaacgaatacacattgttataacaaaataaaagtgtgctattttgttgcagagtgaattccaaggaagtgatggtgggggtatacatattaggatgtgcactctatggcctgatctatgggcacacatggttacatttctatctttttcttcaggccacagcctttttcgtctccggttttggttttgtcggaacctaagaaccttccctgcccattatttttagtcaccaaataaattctccatgttttagttcttatttacacttttatttattttgacaccattgtacggtttggaccccatatcatcatgttgtataagtataacgaataatgattttttgtttgtttga

SEQ ID NO: 143671 - DNA, 1045 bp, Arabidopsis thaliana landsberg
agaaaacttcagacaaatttgtttcgagaaaagatcgcttgcttggcttttcaggataatctgagatctatctgtagaagaagcagatacagaattcagaaacgatgaccgacgtcgatgaatccgttagacgccgtacagccgccgtttccgagtaccggaaaaagctcctccaacataaggaactcgaatcccgtgttcgaacaggttcgattcctctttcaaagattcaattgcatcaatgttgccagtgcctcatctttacttagttcgaatggctttgaatgacttgaatctagggctcctttttttctatgtggatttcgtaaattaagctgtttttgtgtgaatcgattctagggttttctctcaattgcttaaagtgttcgctttttcttagagaagaagagtgttctctcgaattagtgaaatcgattggtgaagttttgatttttcactgtgatggagtttcatatgagcatatgactcgacttgtgattagaacactgagttttgttgtgttactgtagctagggagaacttaagaggagctaaaaaggaattcaacaaaaccgaggatgatctcaagtctcttcaaagtgttgggcagattattggagaagtgcttcgacccctggataatgaaagatgtaatcatttttcctcgacctaatacccttcttttttatcttttgagatttttgctcattggacccttggttaaattttgaatgttttgtgttttagtgattgtgaaagcgagcagtggtccacgttatgtggtgggttgccgaagcaaagtggataaggaaaagctaacctcgggaactcgagttgttctcgatatgacaacactaacaattatgcgagcccttccccgagaagtaagttcgatttggacatgtgttcggttctgttatagttatactcttgtagtgtatttctcttgataataatgtggttttttatgttgatggtaggttgatcctgttgtttataacatgcttcatgcagaccctggccacattagctactccgcttgggc

SEQ ID NO: 143672 - DNA, 2357 bp, Arabidopsis thaliana landsberg
aagtgagacaacaaagtctctcaccaactatattcactatttttttttcagacaaacttagacaccattccaatggatgagcaggtccaagaacctctttctgatcaggtgtttatcaacttccgagaagatgagctgcgcgaaatctttgtcaaccatctagagctgcaattaagaaacgcagggatcaacgtcttcatagacactaaagagcagaaagggagaagactacaatatctcttcacaaggatcaagaagtcaaaaatcgcgcttgctatcttctccaagaggtactgtgagtcaaagtggtgtttggatgagcttgtgacgatgaatgaacagatgaaggaaaagaaactcgtggtgattccaatcttctataacgtaagatcggacgatgtaaaaagagcagccaatcccgatgaagaaggcattcttgatgaagagttttcccttcttttaagccactgaaaccaaaccatgcaagggagccttaaaaggtccaaggttgggagcgtgccctgagatctgtgacaaaaagaatagggttttcccggtcaaactcaaagtacaagtaatacttcaaaatacatgtattcttgattatgtttggatctatgcccgactgatctttgattagtagatctctttggtaaggagttttccgcaaatccaccaaggcaccaacccacttgaccgagcgatatatgccgaaacttgaccgctcgagttttcttgatgattcttgtattattgatatatccaaaaaaaagtaaaaacctacttgcatcatcttcttctttctctaactcatgttataatttttttttttgcagacacgataccgattttgttttggatattgttaaggaggttaagaatcagctaaacataccaactgacaacagttggtcagctataggagttgctttcttggctataaccatcaacttgatctttagtttcttcattgcccctaagtatctccctgatcagaagtttttccagactcctgaatggttcataggtactctggcagttgttcttgcgtcgtggttttggtacaaaaataaccagaacaaagcaccacctccttcataagtggcttttgtgcaactttatgctgtttgtttgtgtgttgtttaaatggggtgttaaagatcatttggttgctttgtacatttgtgtgtctctttgttaataattgtgttgtaattgtcagttactattttaaagaacaaacttgtgctttgtattactctgtttctgttctctgagtaggctctatgactagaaattctcattgccctaaaagtcttttgcttctccattggttagctaataatgtaaatggttgatttcatcacttgtgtggtggtctttgagtattagcaaattccaccataaaatgtacctctctttgcttgaataactaatgatatttaacactcccaaagtcaaaacccactatgaaactcgcattcttgatcaaacccttgacccggaattagagagtgatgtggtttctcttgttgttcctatataaaaagaaaaggcttagaaaggcgtactgagtcatgtatttgggaaaaaaagaagaacaaagaatggttctagttataatttataaggactaaatgatcacatttctttacctttccagtctttgattcatcattaataatgatcacattttgttgcttagcatgagcttgctaggcatttaaccttactagacaccatggatgatcccggtttggtttgagcataaacaagaacatcgagggtcacttccatctctcttgatcatgcgcttctcccgattaatcatcagtttgattagcggtatcttcttagtaacttgtctccagatctcgttcacacttccatttagatgtgtatagtcaaaatatcgcctaacctacacaaaccaagtccataaacttcacaaattggttttcataaaatccaaagaaactttcagaagacaaatgaagaaactcttcttacctctttcataaccttttggtacttcaaaatctttcctggtttcactttcctcagcttcttaaccacaaaccctggtttcaaagcggcatctctcctcaagaatatagagaacttcctgtaatctatgacatcttcaaaaggtagctcaatcccatcgcttacaatcaccgggacacataaactagcaatggcatcaaataatctgcaagcagaagaagtatcaccagctagatgtagacaaaacttagacgtatgcattccttgtttaaccgcacgcatattctctcttgactgtgttccgcgtatgatcacaacatcctcttctttctcaagcagcttgaaaagca

SEQ ID NO: 143673 - DNA, 929 bp, Arabidopsis thaliana landsberg
ttatcttttgttggaaaatgaaattctaaaaccctaaaaaatccaaccagaagggtagaagctctctcgccgacaattaccggctacaaggtttctctgctcgtcaacgttgtaagttatttcctcattgtaatcaaatttgtgcatgaattaggtcaaattagtagcttttgtagtaattcttcccgaaattagagcttaattacggattgataacgagcttgcgaatcttatcgttgtttgtttcatgcagctctgaattagtggtattgaaagatgagcttatctcagaatgctccgaaaagtaagggtattaaaagagaggagctcaagaaacagtacgaagatgttgaagatgaggaagagattgggtccgatgatgatctcactaggggaaagagaagaaagacagagaaggagaagcagaagctagaagaatcggaactggttgaaatgaaaaagcttgagaatttgatattcgggtcactctactctcctgttacgtttggtaaggaagaagaagaagatggttcggctttgtttcatgtagaccgttctgctgtgaggcagattcctgactacgaggatgatggtgatgatgatgaagagctttctgatgaagagaatggtcaagttgtggcaattagaaagggagaagctgcctgggaggatgaagaagagaaacagataaacgttgatatagctagtgtcaaccgtctaaggaagctaaggaaagaggagaatgagggtttgatctctgggtctgagtacattgcaaggctgagggctcatcatgctaagctaaacccggggactgattgggctcggccagattctcaaatagtccatggagcctcttcagatgatgatgatactcaggaaggaggagttgatgatatccttcgaacgaatgaagatcttgtggtaag

SEQ ID NO: 143674 - DNA, 1309 bp, Arabidopsis thaliana landsberg
aaagtatgaatcttcattctcattcactaaaactgataagctctccagtgtttttaatcttatgatctttaatggtctaggttatcaagtccggagatcattttgttctgaaggaggatcctagcattcgtctgattccacgcgtttataaaatgagcaaaagtagaggaaatgtcgtaaatcctgatgatgttgtattagagtatggtgcagattctctacgtttgtatgagatgttcatgggaccatttaggtatatctcaatcccaaatttgttttttcgggttttctcgctttctcaatgtttatatctgccttcatttccttctactagggactcaaaaacttggaacacgagtgggattgaaggtgtgcatcgtttcttggcaagaacttggagactagtcattggtttgtctcagtctgatggttctttcaaagatggaaccttagtaactgatgacgaaccaacccttgaacaactccgaactcttcataaatgcattgcaaaggtcatctcatccccttatgatctctttgcggtttgtttacatcttacttaaaataggtatgtaaaatctgcaggtgacagaggaaatcgagagtacacgattcaacacgggaatttcagggatgatggagtttgttaatgcggcatataaggttagtcttagactcttatatcggtcagctttgtgttttcactttacaagtactgatcttttctccggtttcttcttttactttgacagtggaataatcaacctagaggaatcattgagccttttgttcttttgctctcaccttacgcgcctcacatggctgaagagctttggtcgcggttaggccatccaaattctctggcctatgaaagcttccctaaggtagagatagtgaactgaacatataaacacaacacaggaaggtgttttgcggtactgattgttgtggtatttgtgcaggcaaacccggattacttaaagaacacaactattgttcttccagttcagataaacggcaagacaagaggcaccatagaggttgaagaaggatgctctgaagatgatgcttttgttctagcttcacaggacgacaaactcaggaaatatctagatggacaatcaatcaagaagcgaatctatgtgcctgggaagatcctcaacgttatcctagaccggactaatgtcaaggtcactacaaagtaggatttagaaagaagaaacaactacaaaacctgtcaaatgaacaaaattttatctctattgagagtttccattatatagaaaaagattcttttagaagcaaaaga

SEQ ID NO: 143675 - DNA, 1580 bp, Arabidopsis thaliana landsberg; identical to SEQ ID NO: 8924

SEQ ID NO: 143676 - DNA, 629 bp, Arabidopsis thaliana landsberg
catgaaatgcacattttgttgttttgtttttgcagataaggaaattcaaggaagcgttggagaagcatgggagggagcaatgtagcattggagaaacaaaggggcttgaggagaaagaacttgtcgccatggctgcaaataaagacttgtcattcgattataaacccacatcgtgtggaaatatccaagagcaaaaaaagaaagaaatatttctcccgaaatctccaacttttaataaacaaaaagaagtagaacattctctactactagttagtcctgctcctgcatgaatggtctagcattgctgttaccatttgcttgtgtgattcaatatagagtagtcatatgcatatgtgtataatgttaattgtaaatgcaggttcatttggggggtataattgtgttaaagtttcttgtttaattatgtaaggtgagatagactcgtatttttattttaatctcattatcgaaaataaaataatgtatgttgtcatgttgtttgaaagaaaagagtagtgtaacactaacacatggccaaactatacgtgtcgaagttacatgaaattgtgagatgtgataattttcaaacaaagttttaataagaagtcacaatccgatagtttcgatga

SEQ ID NO: 143677 - DNA, 587 bp, Arabidopsis thaliana landsberg
  unsure (1)..(587): unsure at all n locations
gttgactcagagtcgaagttcttatgaagacgaggtnagaggagttaaagagtttcggagttggtttccttggctcattccttgtttcgttgttgctaacgttgccgtcttcgtgatcaccatgtatgtcaacaattgtcctaagaaatctggagattgttttgctgatttcttgggtcgtttctcgtttcagaacaccagagaaaatcctcttctgggtccttcctctctcacgtaagtaagagttttactttgtttcaaataaaggtctgatctttactgagtcaagtgaagcagaaaaatccgaactttgttaggatttcaatgaaaaaactgaaatttctttagtagctgattggtttaatgatggttaacgatgtagaaggagtagagtaaagagatagtgtgtgtttttctccacttccttgaactgtcttgatgtatagatttagagattgattttggttacattttacttgcaacaggttacaaacaatggctggattagatgttaaaaaagtggttaaagaagataaaggatggcgtctactttcttgcaattggttacatggaggagttgttgattt

SEQ ID NO: 143678 - DNA, 651 bp, Arabidopsis thaliana landsberg; identical to SEQ ID NO: 12771

SEQ ID NO: 143679 - DNA, 697 bp, Arabidopsis thaliana landsberg
atgctctcggaccgctacattccaaatagtctgacgtaagcaatgacaaaactcacctacattacagtctgccacgtgtccctctccatctacttcaaatgaatcctccactatacagatttaaccatttttctatttttgtttgagattcctttccaccaacacaaagcccctgtctatccgccatgtgtccacgacctttcttatatatatagtcatctttcttctttgctcgagagaagtttcaactttcaaacatatctttacagttctttcttgctaaacaacaataaaggggaaaataggttaattatgatgaaatctggggctgatttgcaatttccaccaggatttagatttcatcctacggatgaggagctagtcctcatgtatctctgtcgtaaatgcgcgtcgcagccgatccctgctccgattatcaccgaactcgatttgtaccgatatgatccttgggaccttcccggtacgtttctttcttttcccctttaaatcacactatacactaacagtaacaggattctataaaatcggtctaagaattaataaaccggtttacaatttacagacatggctttgtacggtgaaaaggagtggtattttttctcaccaagagatcgaaagtatccaaacggttcaagacccaaccgtgcagctggtactggatattggaaagctaccc

SEQ ID NO: 143680 - DNA, 803 bp, Arabidopsis thaliana landsberg
cagtttctcatctaacgcaagctattatctggttatcggttcaggaagactggttggaggttttgggctgtggggtgaccgagcaagtaattctgaaacaaagtggattagaaaataatgttgcttgggccttcggacttggacttgagagacttgctatggttttgtttgacatacctgatatacgatttttctggtcatccgatgaacgattcacgtcccaggtgattacttgggtgacaacttcaaattttaggttatgagactaatcgtctaaaaatatgaattattttctcacattaatgtatttgatgttacatgcagtttggaaaaggagaacttggagtgaaattcaagccatattcaaaggtaaaacacttaatgtccatgtctcgtagactaatgaactctagttgaagacttatctgtattgtatgtttaacgatggcaaacaaaattttgttctgcagtatcctccttgttacaaggacatcagtttctggataagtgatttgttcacagagaataatttttgtgaagttgttagaggaattgctggggatcttgttgaagaggtatcttatatcttgattgtttgggagagaatattagcttttacaggaatcaaatttacttttcagctatcctttaattgtatcatcatattcttcagtgttcctttgtttatagcctttattgcattcacaggtgaagttaattgaccaattcaccaataagaagaaagggctgacgagtcattgttacagaatcgtgttccgttccatggagcggtctcttcggac

SEQ ID NO: 143681 - DNA, 1053 bp, Arabidopsis thaliana landsberg
aagagttggaagccacttcagacacttgctctgtcaatgcagattcagttaatggataatcttattgaaaacggactagacattgatgatgttgacaaggtttgcttttaaacataccaaatctggtttctattgtttatcatgtcactgactgaatctacaaaaacaggacaaccaaaccgctcttcacaaagcaatcattggtaaaaaagaagcggtgattagtcatcttttgaggaaaggagctaatccgcatcttcaagatcgggtgagaacttatctggttccatttacgtagaacccatttggaaaaggttcatactttattaaccagattgttcaaacatacaggacggtgcagctccgattcattatgcagttcaagttggagccttgcagactgtaaaactactattcaagtacaatgtagacgtcaatgttgcagataatgttagtacttagtagcaactagaagcttatctcaagccattaaaaattttctgattttgattcgatgaaactttctttgttttacaggaaggatggactccgttacatatagctgtacaaagccgaaatcgagacattacaaagatattgttgaccaatggtgctgataaaacaagacgaacaaaggtgttaatggcgaaaatatgtgtagagaaaaactgagagtatatgaatagttagtttgtttttgttcgataacagatcaatttggttttggtttcttgctgtcttttcaggatgggaaattagctttggacttggctctgtgctttggaagagatttcaagtcatatgatctggtcaagctattgaagattatgcccaccggagatatatagaaagagctggtgagattttgaatgatcaggttgagattactaaactgcatttgccattgcttggtttgattgtaatctacaccggtataagtggttaaggtagaagaaatccgattgagtttgtaattactgcttttatatattcgtggatgaacttgttattcgggtgtgtgtatcataatgtgcataacaaagatacacttag

SEQ ID NO: 143682 - DNA, 1146 bp, Arabidopsis thaliana landsberg
atgtgttctcttttagttgtttgattgagcatttttatcatcaggataagaatttttcttgcgtttgttatttgggttcttaatgtttcttgtatatgcttcaggggtgtacaatatgcttactacttgctctcggctggttattggctgaatatgtcaggtagtgtctttaccttaataatgtcttattttgattttacaatctgagttttgtcttctgaaatgtgtttgtgttccatttctatctctaaggaatcgtgaggttaagagaattaaaaacagcataaaagcgggcaatagcttggcgtttctttatcaagatatcaatgaacttgagcactctaggcaggttaaacttcccagagtttcagttgtcatgcctctaaaaggttttggagaacacaatttacacaactggagaagtcaggtcagtccctcatgttgcagtatcattgtctcctttctaggcagagttttttttttaatttgcatcatagttaagctttttgccagagaagtttgttgcttccaacttaaattttaagattgatccatgtctatgtgtagattacttctctctatggtgggccattggaattcctttttgttgtagaaagtacggaagaccctgcatatcacgctgtttcccgtctattatctatgtatcaggtacagcagacatgtttcaacatatcattgtgttcgtgttatttgttatctatcgatggaagtatagtccatatggccttcttttgtcttgaagtatctactgactctacatttttcctaatctgtcttcaatgtacacaggatcatgttgaagctaaggtcgtggttgctggtttatcaacaacatgtagccagaaaattcataatcagttggtatgtatgattttttttttctcccaatattttttttatctctcctttgtgactgttcttaaatcaactgtaatcacaaccatgaaaagctaacttatcttccaacatacatttttcatttttgttgttcattcattggctttcgctgaattttcctgtttctggcttctttttcttgaagattggagttgaaaaaatgcacaaagataccaaatatgtgttatttttggatgatgatgttagactgcatcctggaacgatcgg

SEQ ID NO: 143683 - DNA, 2170 bp, Arabidopsis thaliana landsberg
  unsure (1)..(2170): unsure at all n locations
tgccattggcttcttctcctcttctctccctagaaactgtatgttgtattctaataattacttccgcagatctgcggtgggggagttcgagataaacatgtcagacatgccacttgggaagctcagcaaacataatatacagaagggtaactcctacttctctagtttacttttttatatgataaaaataataaaatgttaattctacattacattctattatgtgatttcttgatagctcttctaaaggttctgaggcattgacggagatacagaggctattgactgaaagcgacccccagcctactatgaaagaaagcttgcttggagatgctagtaacagattttttaccatgatcccttttattcatcctcatattattcgagatgaagatgactttaagtcaaaggtacttgccatagaacatgaaccatggtgttgttttttaattcctagcctctttttctgtgttacaaagaggtattgtatctgtgtgtcacaggtgaaaatgctcgaggctctgcaggatatcgaaatagcttcaagaatagttggctttgatgttgatagcaccgaatctcttgatgataagtataagaagctgcattgcgatatctcaccacttcctcatgatagcgaagattatcgattaatcgagaagtatcttaacacaactcatgccccaacgcatacagtgagttcaagctctgtttatcccttttcatgttttgtttatcataattttctaattccatttctggtcactggatttgtcaggagtggagtcttgagctagaggaagtttttgctcttgaaagagaaggagagtttgataaatatgctccccacagagaanaacttttgcaatagatgctcctatggcatggtaagccaactgcaaccagccacatttacatgctttgggaaacagatacaagaaatttcattgtttggttgattctatatatttggctggttgatcatcaaaacccttggtttaaccaaaataaatctgctttcaggttctcgattaacgaattttgttggaatattgaaccaaggactgagaattgcacctccagaagctcctgctactggttacatggtcagtactctatctgtgtcttatttgtggggatcttatcaattgagagttcttcactatctagttaacttgttagagaatctgaactttttttaaaccccatgtttcagtttggaaaagggatatactttgctgaccttgtcagtaaaagtgctcagtactgctacacttgtaagaaaaatccggtgggtctaatgcttctgagtgaagttgcattgggagaaatacatgagctaacaaaagctaaggtgagcccatattacagtttttcaggttatgctactaaccatttggttcttatcttgaaaactatatgaacaacttaagatattacttaccttcatatatgactttctcttatgtcctcaattctttagtatatggataaacctccgagagggaaacactcgaccaaagggctcggcaagaaagtgcctcaagattccgagtttgccaagtggagaggtgatgtgactgttccctgtggaaaacctgtttcatcaaaggtcaaggcttctgagcttatgtacaatgagtatatcgtctacgatacagcccaggtaacttgtgtttccaaaataatcttccttgttccttacaacaatgggatattgcgcacacactaaagtcctcttttgttcttatcgggtacttgggaatgagaactgaattccctagaaagctcatgctttagaatacggctttagctattagttttgcaacatattctgtgtttgattcttttatggtgtgtacatgtctgacaaagattgctttgtctctgaacaggtgaagttgcagttcttgttgaaagtaaggtttaagcacaagagatgagcctgaaccaaacaagaagacgtcacttctgttaactaaatgtttttttgggaaatcgaatccaacacgaagacttaacttttgtaactaaatgtcttttgataaatcgaatccaacatgtagtcacagatttaactctctggcgttgtagatgtttctggttttaaaacagcgtacactacattttgttatgctttttctcagtaatgacacttcttaagacttga

SEQ ID NO: 143684 - DNA, 1614 bp, Arabidopsis thaliana landsberg
ctagttctacggattgcagatatgctcccggtcttcaccaaggacagaaaaagatgtctaagagtgatccttcatcagccatcttcatggaagatgaagaggtaaagtagcttgttcggctctaagcttaaaaacagagagggtttgatagttatttaatcgtgttattttgacttccaggctgaagttaatgtgaagattaagaaagcttattgccctccggatatagtggaaggtaacccatgccttgaatacgtcaagcacataattttaccctggttcagtgaattcacagttgagcgagatgaaaagtacggtggtaacaggtgagtttttctagtttttatggaccttctgtgttttcgttctgttcctgggtttaatctctaactaatggctgccatgaaatatttctttggtcagattttctcagtatacatgtctctttgtcggtttatctagcaatgcgaagtactaacttttggaatggcatttttcaggaccttcaaaagctttgaagacatcaccactgactatgaaagcggccagttgcacccaaaggatttgaaggacgctctgtcaaaagcgttgaataagatactgcaagtaagtatttccttctgttgcaacaatacagttataatattacctcctagaggagattaggtcattaattttaggttttggatagttttaatctgtttttacccatattgcagcctgttcgtgatcatttcaaaaccaacagccgcgccaagaatctgctcaaacaggtcaaggtaataaaaatctctttccactcatgtttcaggtaccatcagttacttatagatctactgcttggacattcatacgcaacctctaatttttctctcctttttggtttatcatgtgttattgtagggttacaaagtcaccaggtaaataaattacggagcaagaagcatactcagatggcaatattttagcaacttctctcattaatgaaactttttataaccaaaacctaatgtattcatgtacttattggtctgtcagagtcatgccaacagcttcatctacaaaggaggaggatctttccatcaacacatcagcatcttcttcggctgccggattacagtaagtaatcttctagtggtttcttgactttcttctgtatctcctattcaatttctttcatgttccgttgcttagtgtccgagaagataaatgacttaggagtattcaatgtttgttttctcatttaatttggtttctttgtgactcgtatctgaaacttggagatagattttcttgctttagttgcttaatagtgtcctcctgtgattttagatagattaatcaggaaaacaaggcacagactctagttcaagttctactatgttttatcaatatgtttgtgcgttttcctatcgtgttatgcacttgtggtttagctgattaggacgttattacttcaggatgagcgaggaggccgagatgaaatacaagattgtgaggagtattggtgaggaatgcatacaaccgccatgagctgaagaatcttctagccaagaagcctgctcctatctgctacgatggttttgaaccatcaggaaggatgcgcatcgccca

SEQ ID NO: 143685 - DNA, 698 bp, Arabidopsis thaliana landsberg
ttatcaggtgaaagcaacaagtacttgtcagaaagctgttactggcaagcacagacttcttcctatgattcactggtaagtaaatcagatcaaaagtaggcaaccttgaagaatctgagtttggaaccaacaactactggcaatggtcttattagaattgcatgcatatcaggaattcagctcaggtagccctgatggattggctctggaagatttgaatccatgcctaactccttataccaagaagaagcccaaggtagttgcttcttagccttgagagacaaagctcatgttattggttcattagctcacaagataagatgtgaaattaagctttgatatgtcctgcaggagtatgagagggttgactcagcagaagagagtttatcagggagaagcactataacaacaacaggcggtaaagtcaaatcgagttcaagaagtgtaaagatgtcaaggagctcagagggaaaggcagggcagagatcaatgtagatcaaaggatggtatagaggtgggagaaatgttttaaggtgaaaacagataatgcctcatataaggtaatcttgttccattttttccacttgatgtattatgtcacttgctgtcaacgtaaagagagtagtatgattttggtagaacgatctggagctttgatccaggattgagttgaataagagaagagtgttgttatatgt

SEQ ID NO: 143686 - DNA, 3220 bp, Arabidopsis thaliana landsberg; identical to SEQ ID NO: 69974

SEQ ID NO: 143687 - DNA, 530 bp, Arabidopsis thaliana landsberg
atttgtgcagtcgaatatgaggatcttggtgaccggaggagctggattcattggttcacatctcgttgataaattgatgcaaaacgaaaagaatgaagtaatcgttgcggataattacttcacaggatcaaaagacaatctcaagaaatggattggtcatccaagatttgagctaattcgtcatggtatagtatcttcttaattaatcaaacttacttaatactcattaaccaaaacaatgcattaatactcattcttgtgattttttcagatgtgactgaacctcttttcgtcgaggttgatcaaatctaccatttagcatgtcccgcttctccaattttctacaaatacaaccccgttaaggtttgttaaacttcgttactcaaaactcgcaaaatgctagctgatatatttttatgacttatgatcatatatcctcttcatctttctaatggcagacgataaaaacaaatgtgattggcacacttaacatgttaggactagcttagcgaggtggagccaggatttta

SEQ ID NO: 143688 - DNA, 598 bp, Arabidopsis thaliana landsberg; identical to SEQ ID NO: 13520

SEQ ID NO: 143689 - DNA, 878 bp, Arabidopsis thaliana landsberg
  unsure (1)..(878): unsure at all n locations
cagttatgtactaaatttgtggaaactgagatgggtgtgtccaggacatntgagggtaattattctcagtatgtgatctcaaaggctgagtggatcgaaactcagaatgcagcgtgggaaaagcaacagaaagatatcgactcaactaaggacttgatcgccaggcttggtgctggtgccaattctggtcgtgcttccactgcagaaaaggtttgcaaacaaaaagaatatgctaatttgctgaactattgtggtgattgctagggcgtgacattaatggaaaaaaatttctactgtttcctaagccaatattctggcttgctcttttatctgtgaaccgtctggagacgttgaagcttatgtttcctcttgtattgtttgtaacagaaactagagaagcttcaagaacaggagctaatagagaagccatttcagcggaagcagatgaagattaggtttccagagcgtgggacaagtggaagatcggtagtcaatgttaaaaacattgattttggtttcgaggataaggtgagttactagagtataactcatgacaatagtataaatccttaatcgctcacgtttgaccctgtgaaaaatgtgtattgttgaaaaagcagatgctatttaagaaggctaatctatcaatagaaagaggggagaaaatcgccatccttgggccaaacggttgtgggaaaagtacgttattgaagctaattctgggtttagagaagcctgtgaaaggtgaagttattcttggagagcacaatgtactgccaaactactttgaacagaatcagggtcagtttttacttactcaatcaattcaagagctcaacaattggagacaggtttgctcactctattgacatgagttg

SEQ ID NO: 143690 - DNA, 779 bp, Arabidopsis thaliana landsberg; identical to SEQ ID NO: 30521

SEQ ID NO: 143691 - DNA, 593 bp, Arabidopsis thaliana landsberg
ggtttcacttgtacctcattagcacaaaccaggttagttttgttctgctcagggtgtgcgttgtgtaaattgtgtcctatctgatacccaacatttcaatttttcagacgacctatgagaatttccggtacagatcagacaatagaatcaacgtttataaccgtgggtgttcaaacaatttttttgagacattttgctcaaaagttaaaccctcaaggaatgacttcagagcgttcatcaaagaagaacctccaaggaatattacattggctaccacatgggaacgaccagaagaagcagatgaagaaaacagggaggaacggcgccagaaggtggaagacgatctagacatcgatgaagatgttatgaaactgcagcagcgtttaaatgacgaagagggcagcgatacagcgcatcacaagatcgatattgaccaaatgagaatcgggtctaatgagagagcgccaacaattcgatcagaagccaggcatggaaactggggagcaagaagcaatgcacaggaggaggacgtaattgctggttcttcagtaagagaaagtagaagctatgcagctgcagaggagggacggtga

SEQ ID NO: 143692 - DNA, 1681 bp, Arabidopsis thaliana landsberg
  unsure (1)..(1681): unsure at all n locations
ccgaactctagtcctagccaatgcagccacattgatctacgggaagcttcggtacacagtaaaccgaatatcatacatcaacccaacaacaccattgaaactcgctgattggtacaacatctnnnnnnnnnnnnnnnnnnnnnnnntcattagcactccaacaaccggaccggctcatattggtacatcggttatcgacgttgaacttcatgagttcgtcgaaatcgttttccaaaacgacgaaagatcaattcaatcttggcacatggacggtactagcgcctatgctgtcgggtaagcaaacacattgccctctgttatctaaaccggttccggttattcataacttaaaccgtacgtaattgattaccttttacagatacgggtcagggacatggaacgtgaccatgaggaaacgttacaacttggttgatgctgttccaagacacacttttcaggtaataatcttatttagaaacaatatgattgaatctaaatatctaataagtaatcaacgatgattgtgtgtatgaaggtgtatccgttatcgtggacaaccatattggtgtcgttggataacaaaggaatgtggaatctaaggtcacaaatatggtcgaggaggtatttaggacaagagctctatgttcgtgtttggaacgatgagaagtctctctacactgaagctgagcctcctcttaacgttctttattgcggcaaagccaaacgtcccctttagatttatcattgggatcttttctactgaattaggtcacaattacgtggagtggaacaaaaaatacaaacgtagtccaaacggaaagctaattgatttttcaataaagagacaaaataaaaatgaaggaaaaaactttcttttgtcttatgatttgattctgtttttctttttttgctctcttaaattcagattgtgttcatgtatctagagcagaattggaaaccaaaatttggatactagaattgtcagtttgacataaaattttatgtaaatgaattgaaaccaatcctaagcagtcatcacttatcaatatgctttttcaaataattttgcaaaatgtcatagatttttatgtgtgtaattcaaaccatagaaatttatttgaaaatataatattaaaagctttatctttatctcaagttattttcccaatctcatcaatcaaatcacccacttcagtggacaataatctttaatatttcattaatcattgatatctttctcattttcacatttgagaaaaacgttttgtcggtaaaagaaaatgtatcattgaaaattctaaaaatagatataatggagagagagatccacctcaagattatcgccacaaaacagagtagttgactgatatcgattgtgagatttcaaagcgataacgtggagaccccctcaccattataataaatcatcatatcgtcactttagccacatcacataccaaaaaaaggcaaaacactcacgaaagaagaaacggagaggatgaagcattatgtgctagttcacggaggctgccacggtgcgtggtgttggtacaaggtgaagccgatgcttgaacattccggccaccgtgtcacggtttttgatcttacggcgcatggtgtgaacatgagcagagtagaagatattcagactttggaggatttcgctaagccgttgcttgag

SEQ ID NO: 143693 - DNA, 779 bp, Arabidopsis thaliana landsberg
tgttttttgcactcagaaaagaaacttgtactaaaacctaggagaggaggagctggcaccaccgcctaactcgccattgacacaacaccaaaaactcttctttactttttgttattctacacacatcgataaagattaagtaatagaattccataaataattagatgcactaacttttcaacatcaattcaacggtttaaattcgtgaaaaagcgtttttattttattttaaaggttacaactttgtagtttttaccctaaatctctctctgattactgatactctgtctcaatctcttctttcttctaatcctttatttcttgtaagctacttctcctgaatttcgtatttgatccgtttaatccaagtttcgattttatataacaaccacatagatcctgaggttttgtgataagaaacagagagagagagaaacagagtaatggcgaacagagatgtggagagagtagggaagaaaaacagaggagctaataccaattatttctacgatgagtcttctggtgaaactcattgaacttcatggctgattccggcgattgtagtggcgaatctcgctgtctttatcgctgttatgttcgttaatgattgtcctaagaaaatcaccggacctaacaaagagtgtgttgctagattcctcggaagattctcgtttcaaccacttaaagagaaccctctctttggtccttcttcttcaacgtaagtattactttaaagttggagattcatgtttcatcttctgggtatctccaaagtctca

SEQ ID NO: 143694 - DNA, 1492 bp, Arabidopsis thaliana landsberg
  unsure (1)..(1492): unsure at all n locations
ttctgtagtctcgagattcgctttttctcctgcttacttctttttatcatcttctctttgtcggtttgatttggaaaaactttctgcaaaaaaaagagagattcttaaactttttatctcaagatcctttcaaaaaatctgaaaagagaagatttttaataaaaaagaatggttgaaactggtcaccatcatcaacatccaccggcaccggctgcagccggtcatccgccggttccatccatggcgatggcgcgtaacatgggaaccacttggcctccggcggagcaacttcatcatcttcaatattgcatccactctaacccttcttggcgttagtctctctctttctgcttatactactttctttatttttgtttcagatgtaaaaaaaaaaattataatcttttcagtcaaaagttgtattagttcagttctgtctctctctctctttatctgctttatgttgtgtcttaatttgtttaccaaaagattagtttagatctcagtatctgattcgattctttatatttttcctctgtgttgactatattttagcttgtgttggggactaattagctttaaatctaatgataaatgttgtataattgttcttgagacacactaattgattaagattaaaataaactgtttcgttattacttgtttatgtagttggtgaatccaaaatgctataagaattgaatccttagcagttaaaagtgtggggttgggtttatgctaacactggtcatggaaaatgaaatgcaattagtgttttaccattacaagaaatgccatttttaagggattttgtaacaaaaggattgtattattgtttccttttaagaattgatgtgtctcatttccattaacaatgaatcattttacagatgagacggttgtactggctttccagcattacatcgttatgctcgggactactgttttgattgccaacacactagtgtcaccaatgggtggagatcctgtatgtgatgtttttggtttttggatccggttgtctaatatttatgttattatatgattctgaaatcgaccgtttggtattttgaacgataatagggtgataaagcgcgggttatccagactatattgtttatgtcgggcataaacacgttgctacaaacgcttatcgggacaaggcttcccacggttatgggagtatcgttcgcgtatgttcttcccgtattgtctataatcagagattacaacaatggtcaattcgattccgagaaacaggttaaagctcgttttatacttgcgcggtacggatgctataatttcttttttttttttacttgacaaatgccattttccttgtagagattccgacatactatgagaacggtacaaggatcattaatcatttcttcattcgtcaacatcataatcggatatggtcaggcatggnggaacttaataaggtaatataaaagatcaattttaacattactagtttagaagctgatgg

SEQ ID NO: 143695 - DNA, 1527 bp, Arabidopsis thaliana landsberg
gggcttggcacaaggctcctattggtgatgagattggtgagcatgttgaacgcaaagctatagttcgaagagtcattgatgagcgttcaggacacttgacgcttctcggtgggttttccaatgcgaaaaatgatttgaatcagtcctctgacgatgagcagccttttggaaagcgacgtcgcatatagctgagatgataaactaaagttatcgtgttaattgcatttgtttctgtggggtgtttttgtaagtctactgtttctgaatacaatgaagttaatttatcttatgaatatactgtgactgtgtgcgcaaattaatagggagctatttttaacttcgcttagaacatcaagggacttgtatgtcactaaatccttttgactttttcatgtttgctttgaagttcccttaattgaatcaatttgtctggttgttcttgacgaagatgagagtgtaacagactgtttgtttttgtttcttgtacaattgaatatcagattatatagaacacaaacactatgctacatttgatcttctttaaccttgttagatctaaatgtattaaaagtcaaatttgcttccgtaaatttatgtatatgtggaaatcttaagtcaaattctcaagttaatgtatcattgtactgagaatgtctcctttgtaatctcataacactagacgagtttaagtttgctgttttgtttctcctacatgaaaagaatatacaatccatcttctttatgactatatatatatatatgtctttacttaactcctccaaagtaaaacagagacacaaactgcttctatcatgaaaagcaggggaacaaatttatcttgcttcctcgctagaaatctctccatcagaatcaaataaagagactcgatcaggaaggcttccttcagcacagagtgtgtccaggtgctgaaaaaaatctctaattttaaccttcaaaattctgtggctcgttcaagctctttctattttctaggctacaataaaaagtccataatcaacaatactgactgaaatcagaaacaaaaactcacaaatgatacatagtcgctcgaataacacttgaatgaataaggggaaaagaaaagaaaaaaacaaatgtcaccgagggacaaaccttgtacctttccagccttcttacgaatatgcatcaattagttttttctcctagttaattaatccggtttagaaagtttctttttgattcttgtgtactcattacccttctctaacttctccaggtgcggaactagcagcaaccaaagatgatgtagcagcttctttatatatctgagccctcttgtgacttgaaaatagcatccttttctccaagcctctttgaactcgtggctgcatccaagaccggtggctttcaaattctccacggcaatgaagaccaatgacaagttcatttggcatgtcactccctccctgcatgtgatgttttgccttgttcagatacgttgtaaatagttggattaacctcttctccacattctccatttatctg

SEQ ID NO: 143696 - DNA, 771 bp, Arabidopsis thaliana landsberg
tcaatgattaacccagaagatgtgcattctggtgatttcttggcggtgtcgaagattcgaggtagatggggtggttttgagacgttagagaaatgggtgactggggcttttgctggtcatactgctgtttgtttgaaggatgatttggggaatctttgggttggtgaatcaggacatgagaacgaaaaggtagacctaaacattttgaagttagtggatagaaagagagatattttactatctttttccccatagggtgaagaaatcattgttgtgatcccttgggatgaatggtgggagctgactttgaaggataattcaaatcctcaagtagctttgcttcctctacatcctgatatccgggcaaagttcaacaatactgctgcgtgggaatatgcacggagtatgttgggcaaaccgtatggatatcacaacatgatattcagctggatcgacactctaggcgataactacccacctccccttgatgctcacttggtactttttaatccctgatattcttaaagatctatcatcattaagatcatcatggtaatcaacaagccacattgaactttcaggttatttctgtcatgtctatgtggactcgtgtacaacctgcatatgctgctaatatgtggatcgaggcacttaatatacaactcggtactgaggtacaatatccatgttaaatattgatcttcaaattagttacggctaggcataacttaataagttttccgtctgtacaggatgctggaatttgtatgg

SEQ ID NO: 143697 - DNA, 1188 bp, Arabidopsis thaliana landsberg
gagccaccttcattcacttcacaaaccgctcggcgacaaagacgaagaagccgaggaagcaccgatacgacgattgagacttagttttgctcagattcatttaaccaccggcgccaagtgacgacgacgacggagggagcagattcgaattgtgtgaagacaggtaaactttggaatttttccttctcaatctcagatttcgatgaacgagtcttatctcttcctctctctccgatttcgttcttatttctcttcattgaattgataatgtcgattggttaatgccgtttatcttctgtagcagcaatggagtctactgagtcatatgcggcaggttcaccggaagagctggcgaagagatcccctgaaccgcatgattcttccgaagctggtattttcgatccgatctggtcttttgtttttttgtctccgtcgttgcattttccttcgactctgaatcaattgtttcggtatttcgtcacattcgtgaattggatctcgtttaagtactctatgatatgtcaacggacatgtgtgattaatgtctttttttgctgatgaaaacttgtgagaatatttcctgtgtgatagattcattttccaaggatggttcaattacgctgtttcaattcaacgattagctcaatactgatgcggtttagtgaaccatgctatctatttgactatctaatgtgttttgctcttttcagattctgctgagaagccaacacacattcgctttcttgtatccaatgcggcagctggttccgtcattgggaaaggtggctcgaccatcactgaatttcaggcaaagtccggggcaaggattcagctttcacggaatcaagagtttttcccggggacgactgacagaattattatgatatcgggatcaatcaaagaagttgtcaatggactggaacttatccttgaaaaattgcacagtgaggtaatcttttttgacaaatttgtatttcatgtcacagttgcgtttatttagtttatatagtatgtcacaatgaaatcaattttaacttttctatttgtttactagcttcatgctgaagatggtaatgaggttgagcctaggagaagaattagacttgtggttcctaacagttcttgtggaggtataattggaaaaggaggggccaccatcaagtaagtttccgttctatatctgttacc

SEQ ID NO: 143698 - DNA, 745 bp, Arabidopsis thaliana landsberg
agcttatgtagagtttcgtacctctagttctgatatacagtcaaagatttgggaatatagtcatcgtcggtggacatgtgtatgggatcgagatcttgaccgtttactgaaagatcggagtaatgggtcggatctagatccggatccgaattcgtctattgttctgaaagctttgtcacaatctttgaggaagacggaagtagcttatttggagaatgcagatatgatgctcgacgaaaatcctgaactagctttaatgggttcttgtgttttggtaatgttgatgaaaggtgaagatgtttatttgatgaatgttggtgatagtagagctgttcttgggcaaaaagctgagagtgattattggattgggaagattaaacaagatttggaacgtatcaatgaagaaactatgaatgattttgatggttgtggtgatggtgaaggagctagtttggttccgactttatcagcttttcagcttactgttgatcatagcactaatgtagaagaggtaaggaactatgcggataaaacgaggttatttatcgatgaattggtgatgtttttgctgatgaattcttgtttcttgtgcaggaagttaatagaattcgaaaggagcatcctgatgatgcgagcgcggtttcgaatgaacgggttaaaggttcgttgaaggtcactagagcttttggtgcgggtttccttaagcaggtacggtacttaacattcttagtgagagtagatttga

SEQ ID NO: 143699 - DNA, 172 bp, Arabidopsis thaliana landsberg
atgatccacagaagctcagcaactcttgaaatagcagaagctaacttgagaaaagctgaaggtaagagacagacaattgaggctaatctagctctcagacgagctcggacacgagtcgaggctctcaatacgatttgattttgtaactagctgacgtgtaaaaaaaaagaat

SEQ ID NO: 143700 - DNA, 1222 bp, Arabidopsis thaliana landsberg
tgtgaaaagatttgtaatcttgtttattgtttcaggtcatccatggataaaggactcaaacgacgcaaaggttccaatggatattctggttttcaaacttatgagagcttatttacgatcatcatctctccgtaaagctgcattaagagtgagtggatcagtttttcagtatttctacttaaaaggtcactttgttttcacttaccgttcgccatttgcttgcaggctttatcgaaaacacttacggttgatgaactgttttatctgagagagcagtttgctttgttagaacctagtaagaacggaaccataagtctagaaaacatcaaatcagtaagttttctatcttccgtcctgtttcagtttatcttctggtatgttttggttaacatcatgacactggctcgaactctctttgttaggctctgatgaaaatggcaacagatgcaatgaaggactcacgtattccagagttcttaggacaagtaagagccttgattctttctattcaatgtttaaaccatacagtttgacttggtgattgaaaatcttattggaccatctttgtagctgagtgctcttcaatatagaagaatggactttgaggaattctgtgcagcggcattgagtgttcaccagctagaagctcttgatcgatgggaacaacacgctcgttgtgcttatgagcttttcgaaaaggaagggaaccgaccaatcatgatcgatgaactcgcttcggtctgtctcttttgcctctttatacaagtctgtttaaagtctttggaaatgctcaaattaactcattggttaaacttacctcaggaacttggtcttggcccttctgtaccggttcacgcagtgcttcacgattggcttagacataccgatgggaagcttagctttctcggatttgtgaaattgctacatggtgtgtctagccgcacgatcaaagctcattagaagggttttgaaactttgaatgatatgtatgaaatttgtctgagctctaaggtctcattctcctaggagttataatatgtggcttttgacttttgttatgaaagctgagaagcaaagattataaaaaaaaatgagtgtagcaaaaaaagagagaagtgtgtgttagttttgtagagaatgatatgatattttccccaaatttggtaacttatgacgattgatgatatttctgacatttttagattttgctttttttgacacc

SEQ ID NO: 143701 - DNA, 958 bp, Arabidopsis thaliana landsberg
tgctacatatgttggtgttggaatgatttgtccatatctttcattgtgtctcttctcatcggagcaattctctcatggggtgttatgtggcctctcattggtgcccaaaaaggcaaatggtatgctgctgatctctcatcaaccagtctccatggtcttcaaggctacagggtactgtgtctctcactctcttttccttcatttcattcaataagagtttacaatcttaagttgtgtttgatgccctcaggtgtttatagccatagctatgatcctcggtgatggtctctacaacttcatcaaagtcttaggccgcactgtcttcggtctatacaagcaattcaagaacaaagatgttcttcctatcaacgaccatacatcaacagcccctgtaaccatttcctacgacgacaaaagaagaacagagcttttcctcaaagacagaatcccatcatggtttgctgtaaccggttacgtagtattggctatagtctcaatcatcacagttccacatatcttccatcagctaaaatggtaccacattttgatcatgtacataatcgcccctgtcttagccttttgcaacgcctacggttgcggactcactgactggtccttagtccgacaatatttgccaatgactaagccgaagcaaagatagaaccaattgccaaatcactgacacctttaacaggtctcttaaatccttattatactcaagctttcctctaaagttctaatctcaagcttttatattaagttcttatttcttaatcatattctaacatttttttttctttaatcttattctagcattaatatatgatcgtttgattttaacgtcattactagatagagaactattcttctatatatcttcctaggattagagttagtcaaaacaaatacatatttgacaatcgtttacaaccaaaatatcagattattaatgcaaaat

SEQ ID NO: 143702 - DNA, 3209 bp, Arabidopsis thaliana landsberg
gcccacattatattcctcaatcatatctcagtgagtgttaaatcaaccaatgttctctctctatctctcagtcataaacttacaatcgattctgcatcgtgcaggcgccagaaggaatccattgcgtctgcaaacggttcccaaagttgaagattgtgacgtcagaaatcgatcagtgtctgaacgaagagttcagggttataccaggcttgggtgagtttggtgatcgctactttggtaccgacgagtagaagaagtaccaaagtgtttgtcaatggttattgtgcttgtgtgtgaatggaagtgttttactttgtctaaagaatcttcacgggctttgtttttttttagttccctctgcttggaagcttctcgcttactgattactagaattgaaaactcatttcaagattcttggcttaagcagttcatatccgacgactttttcgtcaacaacacttttaagcatcccttattcatgacaacttttaagaactttgatagatttcataaatttttaattttacacttattaaagtcttttgtttagtaacaattataccatgggctaaacaatcggtccatgaatcttattatataaagtacggttttgaaagttagtaactcacgagatcatggtacgtgtcagtgaatatataattaaaattaactatataattaaataaatttatatttgaactttataaaagtaaatatatatatattatgggaaccattgaaaagcaaacttttaattttacttgaattatatgtttttaaataaaagtattattaaaaagaaaaataacaaaatgttgtttaattttacgagacgtggttatatagtggaacgggcatgtgtcgatattaatacgaggccgtataccacaggtgacttcctagattttaacaatcaaaatacaataatacaatttttaatacaaaacaaaacaaatacaacttaaaatttatttatttatatttataacagaattgatcagtggtataccgtttctgacctctaaatgcaaaaaagaaaaacagtttatttttctaataaatcaaaactgaatgaactttatgttatcgttcctacaaacctcaaatatagtaattatacactaaataatatatatatctaaggattgcatattttaaaaatatgtataagtaagttatatatatagttaatctattaaacaaattaattttgtttttttccgaaagatagagtcccgcggtttacgaaacaacagaggttttggggaagggcatattactttttatttgaaattgcggtttactaaaacaaaccggaaaccacactaaacaacacggtattcataaaccaattattagcagcccatgtgattcgaaatgtacgtttgaattttgtgtcgaattttacgttttaacggaaaaaatatccagggggaaaaatctcattttcaattttgaatccaaacggtttaacggaataaacaagggcattttcgtagttacatattaactggcttaaccactacaaatacaaagctttttctatttctctccgcaaactattcatttcatttctctccaagattttaattttgtttttgattcatcgatcatttcatttccttcaaaattctcttccgattattcaagaacagaagcgtttgattgaatctgggtccattgcttcgatcgttgaagacaaacgcacaaatctctcaggtataaaccctattcttagcgatctagaagaatcagtgtgatgatgatcttcgtatcatctctgttaatcttgtttattgctagtttttgaaagattaaatagatatatgatcaacgttttatggttttgaataacatcagttacatgtgttttgatttgatcgttgtttctttgattatgaaaatcacaactatttgagatgatttgtctctgtttgtttcaactatcatcatgtgccacagccgatgcaattataaacgtttcgtggttcagttttgtctctctatctcataatcacttttgctaattcaaaactttgaaaactgttttgtgcgttttgagcgatcatggcgacgagggcaaacatacctgaacaagtcagaggtttgttcttaattctatgaatcgatttgagtttcagtaggttatcgttgttttgatttctttatatcgatatgatttatttctctgggttgtgtttgatatgtaacgatacgcgtgtgaaatcattgctttttgtatttcgccgatctaaaatctgggtttgaatataactcgtttgccctaactcggtctgatttgggcattgttatgattactcgtcgacgatacagatccaatttgaatatgaagtatcttgtaacggtctttctttgggatcgattttttgttaatcttgtgaatctttagaaacaaagataagatcttgatgggtttcttttgaattctgtgaaacaggtgctcctctcgttgatggtttgaagattcagaacaaaaacggtgctgtgaagaatcggcgtgccctcggtgacatcggaaatcttgtttctgttcccggagttcaaggaggaaaggctcaacctccgattaatcgacccattactcgaagtttccgtgcccagttattagcgaatgcccaactcgaaagaaagccaatcaatggagacaacaaggttccagctcttggtccaaagagacaacctcttgctgcaagaaacccagaagctcaaagggcggttcagaagaagaatctagtggttaagcaacagacgaagcctgttgaagtgatcgagacgaagaaggaggtgactaaaaaggaagtagcgatgtcacctaagaataagaaagtgacgtactcgtctgtacttagtgctcggagcaaagctgcttgtggtatagtcaacaaaccaaagattatcgatattgatgaatctgacaaagataaccatttggctgcggtggagtatgttgatgatatgtactcgttctataaagaagttgagaaggagagtcagcctaagatgtacatgcacattcagactgaaatgaatgagaagatgagagcgatcttgattgattggttactagaagttcacatcaagtttgagctcaaccttgaaactctgtacaacaccgtcaacatcattgatcgattcctctctgtgaaagctgtccctaagagagagtcacagctagtgggaatcagtct

SEQ ID NO: 143703 - DNA, 3410 bp, Arabidopsis thaliana landsberg
  unsure (1)..(3410): unsure at all n locations
tctcgagaacggaacaacactctccgtcatcaaccaaaacctcaattcttcaatcgcgccttacgatcaaatcaatttcgatccaatcctcaggtacaacagtaacattaaagacaaagatagaatccagatgggctctagggttcttgtacctttcccttgcgaatgtcaacctggtgatttcctagggcacaatttcagctacagtgttcgacaggaagatacttacgaaagagtcgcgattagtaattacgcgaatctcacgacgatggagtcgttacaggcgaggaatccttttccggcgactaacatacctctctctgcgacgcttaatgtattggtgaattgttcttgtggggatgagagtgtttcgaaagattttggtttgtttgttacgtatccgcttcgtcctgaagacagtctcagttctattnnnnnnnnnnnnnnnnnntcggcggatattctgcagagatataatcctggtgttaattttaactccgggaatggaatcgtttatgtgcctggaagaggtacaaagattgatctttgatgatttgtgacacaaattgttataaaagtagtaatgattgttgaagtttatgtacatgttcctgtgttttttgcagatccaaatggtgcatttccaccattcaaatcaaggttgtttttgttgttgttaagattgtatctttgttcattttgatatctatttactgatgtatttctacttctcttatgttttttgtagtaaacaaggttggttcttttctccatttttgagcttttgatgattatgcacgaagcaagaggagacatggaagagtatgtttttgatatttttttgtattagcagatggtgttggtgctggagttattgctggtatagttataggagtgattgtggctttgttgttgatcttgtttatcgtatattatgcttaccggaagaataagtcgaagggtgattcgttttcttcttctattccgttgtctactaaggctgatcatggtaatttcgtgatgatcatatacaagcagtttttgtctcttttgttagctgggagttgcttattatgtttatatgaaatctgcttttagcttcttctactagtctccaaagtggaggtttgggtggtgccggagtgtctcctggcattgctgccataagcgtggacaaatctgttgagttttcgttggaggaactagcaaaggctactgataatttcaatttgtcttttaagattgggcaaggtggttttggggctgtttactatgcagagctgagaggagaagtaagcagatatctttttatatctttttgtttgaagctactacacatggaacatttaaattattcggttcttgtatagaaagctgcgattaagaagatggacatggaggcatcgaaacagttcttggcggaactaaaagtcttaacgcgtgtacatcatgtcaacctggtaaaccccttttgtgttctctcaagataatatctgagatcagatgaagatcaagtcttagccaaattttaacgaatttgttttttcttgcaggttcgcctgattggatattgtgttgagggatcacttttcttggtgtatgaatatgttgagaatggtaaccttggacaacatttacatgggtcaggtacgcaatataaagacctccaaaagtgaatcatttttcgagaaagttgtaaactaaaagagtttatgtgaaactaggacgagaaccattaccgtggactaagagagtgcagattgcactagactcagctagaggtttagaatatatccacgagcacacggttccagtttatgtccatagggacattaaatctgccaatattttgatagaccagaaattccgagcaaaggtacattctcgatttctcttttgtcaatcaaaagtgaaaaatactgaaaaggttagatttttcctttgtcaccgctctgagtcgtttacgtgttacaggtagcagatttcgggttaacaaaactgacagaagttggaggttcagcaactcggggtgcaatgggtacatttggttacatggcaccagagtaaagaatttgatctcgtttacacttatatactactttagagactacactatagtgatggtgtatatatgtatgtatgcaggactgtttatggagaagtgtctgcaaaagtagatgtatatgcatttggagttgtcctttacgaattgatttctgcgaaaggtgcggttgtcaaaatgacagaagccgttggtgaatttagaggccttgttggtgtggttagtattattgtttcttcgtaacatttagtctttctgatttaaaggcatgtatgtggatcacttaacaatatgctttgtttatttattattcagttcgaagaatcattcaaggagaccgacaaagaagaagcactacgcaagattatagacccgaggctcggtgatagttacccgtttgattcggtatacaaggtaatatctcttcttgttccctattctattcatcattgatcattctaaaagagggtgtccaatccgttttttggtccgaaaaaccgattaaaagtgcgatttttaaaaaccggtattcactgaacaatgtgctattcgattagcttaaagtgtcaatcaaaccgaataccggattgcacatagctaattttaataacggggtaagccaatttggtgttttatgtgttgtggtatagatggcggaattagggaaagcatgtacacaagagaatgcgcagctacgtccgagtatgagatacattgtggttgctttatccactctcttttcgtctaccggaaattgggatgttggaaacttccaaaacgaagatttagtcagtcttatgtccggccggtggactcgttttccggtttgctgttgttatatagaaatgattgttttttggtatgctcacgtatattttgtctgtctataccaactttacatgtcacaactgacaagttgactttaatatgattttctataacgctctatatgtcaattattcaacgtgtccgatatcagcatctcacgtcaaagataataatgaaatgcattaaaaatctcataaataaattttttgaaatcgagtttgccgacaaaaaaatcaaaacataaaaatataactttttgtgatggatactctcacgaagcttagaacaagtcttccataacaccaaagaaattcgaatgattttgtcacatggattccccaatacataaaatctatattccagcttagaacactaagtatgtttcttatttcacctagctagattttctttattagaaatagagtaatcgaatattcttttaccataaaccaatatatttcattttttgtttttttcttctgtcaacaacatacagatacggctacatatatctatgatt

SEQ ID NO: 143704 - DNA, 739 bp, Arabidopsis thaliana landsberg
tgaattcgatttacactttttttgtccttttttattaataaatcactgacccgaaaataaaaatagaagcaaaacttcatgtcgtggtttctaatagcggtggcgacaatcgccgccgtcgtatcctacaagctaatccaacggctaagatacaagttcccaccaggcccaagccccaagccgatcgtcggtaacctctacgacataaaaccggtccggttcagatgttactacgagtgggctcaatcttatggaccaatcatatcggtctggatcggttcaattctaaacgtggtcgtatctagcgccgagctagcaaaagaagttctgaaagaacacgaccagaaactcgccgaccggcaccggaacagatcgacggaagcatttagccgcaacggtcaggatcttatatgggccgattatgggcctcattacgtgaaggtgagaaaagtttgcacgcttgagctcttcacaccgaaacgactcgagtctctcagacctatccgtgaagatgaagtcaccgccatggttgaatccgtcttcagagactgtaaccttcctggtacgtcttcgttgtttaggtcaaactttttcgatgaaagagaggaacattatctgccattaaagaagttttaagtttatccatataaaatacgactttgtagtaaaatgctctgattaaggaaagttcgatttatacaaaatcggaaagatttttcttttttactcaaaatcgtat

SEQ ID NO: 143705 - DNA, 1638 bp, Arabidopsis thaliana landsberg
gaaacagagagagactaatggcgcaaaaaccacgaacggtgatctgcgtcggagacatccatggatacatatcaaagctcaataacctctggcttaatctccaatctgccatcgacccatcagatttcagctcagctctcgtcatattccttggcgattactgcgatcgtggaccggagactcgaaaagtcatcgatttcttaatctctctgccggagaaacatcccgatcaaactcatgtctttctcgccgggaaccatgactttgccttctctgggttcttaggtttgttgcctcgtccttcagatggatctgatttgaaggatacgtggaaggagtactcaaaaagtgaggagacagaaggatggtatacaggtgaagggttcgaagatatgcatcttcaaggtagaagatgggctggtaaaattaaggctacgttcaattctgtgaaagggatggcttataaaggatcgatttacgatgctggatcgacttttgaatcttatggcgttccacatggatcttctggtaaatttctcaatcattgtgttttgggttcttcataggttttaatttgttattacatttggtggaaacttgtaagctggttgaagttgtttgtgaaatttggttatttaagctgcgattgaatctgtacacacttctattctctcgtacaagtcattcttgtgaatttggtggtcatgcaacgattggatctgttcacatttcaatatagagctacgtggttggctaaagtttgaatctttctcgatttggagtttacatgttctcatgagtctcatctttgtgctgatgaaatgatgacattttaatacttgtttgttatctattccgttgatagatttgatgaaggcagtacctgagagtcacaagaagttcttgaccaatatggtatgggttcatgaaaaggtacgggctcttttctcctaccgtgctaccctgtgatgtttgtaggaatagtagtttagtggttacaaaactcgaacttaagacttacggattaatctcttgcaaccccttagatggtaacatccatgctaattccaacaaaggagctatcatgagtccacttggttattctgttgcaggacgatgtttgtatagaaacagaggaagggcttaagcattgtaagttgatcgccgtacatgctggtttagagaaagggaataacgtagaagaacaactgaagcttttgagagctaaagacactagcatctcaaaaatacaacatctaagtggtaggaaaaacgtttgggacatcccacaggtaaggcatcgaaagaatcaaactttgtgttaagatcttccttagtttttgaaatctctttctctgaaacattcttcaggagctggatgataaacatactgttgttgttagcgggcaccatggaaaacttcacatcgatggtatgagattgatcatcgatgaaggcggtggattcccggataaaccagtggcagcaattgttcttccttccaagaagattatccgtgacaccgataatttgtctagttaagtttttctcatctactattgtaccaaagtcaattttgatttaaaataaatgtagtaaggtttagcactaaattgaattacttttctacaaagaaaa

SEQ ID NO: 143706 - DNA, 4050 bp, Arabidopsis thaliana landsberg
atggggatgcacacaaggaaaacgccgaacatagcaatgacggtgttccaacgccaatgtttgggcgttcagttaggcccaccagttggtctccagactttggcttggaagtagccgctggtggccggatttgatggtggccgacagtgacggtgaccggtgttggtggtgaccggaatagatggtggtcggagttagcggtgatggccggcggtggtggcaggcagtggtgtccggcggtggtgaccggtggtggccggcggtggtggccggcggtggtggtggctaatggtggtatcgagacaacaagaacaaattagtaatattacatataatacaaaaaatattatagttacatagttagaatggttagttaatgaattataattttttattagttattcttgcaaatttcccttaaataattgatataactatcattttgcccacattgtttaaaaatgatacaaagttaatattaattagagaatattacgtgattagacacttttttgaaagtttatccgtaattaggcacttaaaaatcattaggcactttgaataattaaaattacttgttcaccctcatatcgtcggttttctataaccaaacaaatcaaatccattttcactaaaccaattcagatttacggagcccacgattttgtagttgcctttgtgatttcaattttttttccagaatcgtaaaaatccaaatccaataaaaaatcctaaattacaatttctcgaaaaggggactccggcgacgggatatccatctcctccgtcactgtccaccaccagtgcttttcacactacactctcgtttgctctttcaaccgtaaaacaccaaacccaattctcttgtcatttcctctaaatctctgcaatttcttaaatcgatttggatttactttgcctgaaaaacccttaactcgtaccgtccaaactcaatttcaatttcaattgaggttacttcgagaaaagttcaagaatttcggaacaactaaggtaaagttttgtcatgttaacttcggagatcttgttcgtaattctgtgataatgtttgataacttctctgcccagtttgtttgaaattcagtacttgaggttctctattggacagaagatgaacatatggactacaacacttggacaatccgtaatggacaaccacacattttgtttgcagcgtatgtgtcgttacaaaattgaaaatcattgtccacgactatatatgactgcacaacttggtgtttgataattcaaggaaaaagccacataaaggttctatttcttaatcttacattttggaagaaatcaaatcattgatttaagaaataatatgtaagcttggatgctagagctttaggtgatcctatggccagattaggatattgatttaactttgttcttactgctactcaacattgattgtctggtattaagttgtaaaagagtaatttgacttatccatttgtgttgatataattggtcattataatgtgattagtcaatagaaaaccttagagtacataatatcaaacttttaactttgttaatttctttaggcgagtgggtgaatacatcagttagacttgcttttgcacatcatgtgatcatcgttattgatgtcatccaaagaaatctgtccattcatacgcaaacatgaaggtactgttgtttggacactccttactttaaaaccccaccttagtttgcaagtcattacttgactaatttactttaaaaacaaaatttaggttaggaacattgtgtcagatcctattttcgatacaagtgggaacatccaagtcaacaaacctacaatggggtaccaaattttattaatcgcttgctccttgatacgttggacatgattttttggatactttcttacatttttttcttattgaaggtcgtgtttcttatggtttttctgaccatcttcatttctacttcaactcaatcagaacattttggagaggcttcctgcatcccaatcattgaaagatccccaaactgaaaaaaaattctaatgagcaaatgaaggtctacatgtacactaaattatctttatgatttacagtccttgtaatattggacagtattttttggatagatatttaaataatcttcttattggaggcatcactttttgttggtgatctagtatttgatatcagttccaaacttgaccaacatactcaatcatctcccacacataatcccaaagttgggttatctccaatggaagtatttcttatcatctacaactgtctatcgatgcactctatctatcatttgtaaatatgtcttagtaatgtataataatttcacaacatcattattatatctttcagtataaaatctctctctatcaagatatggatctacacgatgttgtggataatcaggtaggcataaaattaaataactagaacatgtatatttattattactgaaaagcagtcaatttttactacaacattcttagttctattattaattgtttacagaaaacataagattgctatcaaagtcttgttagttatgttgtgaaaccaatctctgaagacctaacataacgcaagttagttatgtttgcagacaaattcatcttctcgtccgtttaattgttatatgatcggacggtcattatttctcattaacttctatttaaactgcaaatcttaacacgttcatttgatccgaattaacccattattctacacgtgttggtacacacaattacaaaccaaaaccaatgaccggttgttcttcttttcgtgattcagtttatttgagatataatggtctattttcactccaaaaacaaagaacagtgtctcaaccttggaaagtgcctgttttgtctaaaattattttcactgctcaatccactctttaaccaacctaaatttctgtagctactcaaataagaataatatcttatgtgattataaatcaaaattaaaaagttttttcttacgtaataattatgtttattacgctaatattaacatgtaataattacaatcaccagcttcatctttaaatcagattctctaatttttatgtgttgagatatagtatatatatacacatttatatctataatagtaaaacaatctctttctccttaccaatcacactgacacgtattagtccttaacaaacacaaaaaatcctaagctcatgtgtattctttaacaaacttatgtttttttatttaattttttgtatttttctttaggatttgttctaaaaaaacacttctaaaactatcaatatacatgttctaattaaaaaatatatatatttaaaagtcaccattggaaatgtccttactgtccttacagatgagtatttgagattactcttgcctgtgccctgagaattttttcctttgggactcactgagattactactaccaaatccaacaatggcgatttctttcgcaatcgatccttccatatctccttgcttctccttctcctctccatcttcttcatcaaaaaccttacctttacgaaacaacctccatttccatggcagaccttcaccaatatctccactcatttcaaaacccagtcgaaaattcccaatcttctctgctcaccaagtaagttcttcttcttcagcatatttacatgttctttgcttttaaagcttcttctaattcgaatctgttataatttgtagactaataacaatgaagaagcgaattcaaagcagcaagcagatgtaaaaaccctaattaggtcatataaacaagctcttctcaacggagacgaaacctcagttacagaaatcgaaacgatgttttgcaaaatcgagaaggagaagaataaaatggatcaaaaggttttatctttatcaatgaagatagcttcagagaaagagatgaaaattcgattacaagctgattttgataatacaaggaagaagcttgataaagataggcttagtacagagtctaatgcaaaagttcagattcttaagtctcttttacctattattgatagttttagaaagctaagttcggg

SEQ ID NO: 143707 - DNA, 1797 bp, Arabidopsis thaliana landsberg; identical to SEQ ID NO: 19963

SEQ ID NO: 143708 - DNA, 598 bp, Arabidopsis thaliana landsberg
gtgatagccatgtcagagaactgtccagagcttactgtgtttagactgtgcataatgggtcgacataggcctgaccatgtaacaggaaagcctatggacgagggatttggtgccattgttaaaaactgcaagaagctaactcgccttgcagtgtcgggattgctgacagatcaagcttttaggtatatgggtgagtatgggaaattggtccgtacgctttcagtagcttttgcaggggacagtgacatggctctgagacatgtcctagaaggttgccctagactgcagaaacttgagataagggacagtccctttggagatgttgcattacggtctggtatgcatcgttattacaacatgaggtttgtttggatgtcagcatgtagcttgtctaagggatgctgcaaggatattgcacgagcaatgccgaatctagttgtggaagtaattggatcggatgatgatgatgacaatagggattatgtcgagactttatacatgtatcggtctcttgatggtccaaggaatgatgacaccaaaattcgtcacgattttatagaacgaggagcatttccgtgttaccgttttttagacggga

SEQ ID NO: 143709 - DNA, 639 bp, Arabidopsis thaliana landsberg
aggcgtatgacacgcctacaccaagattgtagagaagctctttgaaattgatcctgataccacagtcgtgggatttgctgacatgatgaggaaaaagatctcgatgcctgctcatttgatgtatgatggtcgtgatgataatctatttgatcacttctcgtccgtggcccagaggcttggtgtctacactgccaaggactatgctgatatactgcaacatcttgtggaaaggtggaatgtggagaagttgtcagacctttctagtgaagggaacagggcccaggtaacaacattagaaccatgaaaccgtttttgacttgacatgaaacctccaacttctattaagtttgtttactttgttaaaaaatctcaccttgcattaaggaacttacagaacctatcatatctataattgcattgtaacttctcctgtgcacttggagattcatcaaattggaatcggagttctttacactctactctgacttttggctttgttttaatggcttcgaacaggactacctctgtggattacctgctagaatccgcaaacttgaagagagggctcaagggagaaccaaagaagcagcaaaaaacataccattcagctggatttttggtcgagaagtcagggcttaa

SEQ ID NO: 143710 - DNA, 1278 bp, Arabidopsis thaliana landsberg
gatcaactgttgctgtggttttgatggataagctggggagaaaagtgttgcttattgggagttttgcgggcatggtaattgttgaggcaaaaagtgctatttgaatcaaactttacgcagctaatatttaataacgctccatgtatgtagatgtaaatgtttatcatctttaacaggcagtatcgctgggtctccaagcaatagcatatacttcgcttccttcgccctttggaaccttgtttctctcggttggaggaatgctgctgtaagttttctatcacaacaacagcactggaaaagggggatgttttattttgataaactaggggtgtgattacgaatgcaggtttgtgttgtcgtttgcaactggagcgggtcctgttccaagtcttctcctgtctgagatatgccctggtcgacttcgagcaactgcgttggctgtttgtcttgccgttcactgggtatgcctttttttttttttttatattctctttgtggacttttttaggaaatcgataatgttgaaataataataagcttggagaattacacgctacaacaggttataaacttctttgtcgggctgctgtttctgagaatgctggagcaactaggttcggtgcttctaaatgcaatatttgggttcttctgtgtggtggcagtcatctttgtgcagaagaacgtggttgagactaaaggaaagagcctacaagagatagaaatcagtctgctctcttccacccagtgattgatctctttattctgagaattcgtattattcttctggctctctttttttccttggagagacacaagtaacgtgtacctaatatggaagtaggagtgagtagtaagtaggtaaacaacatgtaaggaaatggatattattcattcgagtatagccaacgtttcaactgattttgtaataaacataagaccaaacttcattcaacaatggtaggttctcaactcatgtacagaagtgcacctatctaatttttttgttgcatcacattcatgatgttcccttattgtatagtctgtctgcaaacaaacacctatcagattcttctctgctttcggctgcttgccttggctttttacacttccactattgcatctgcttattcttcaagacttggtggcatgactcaacaatttgtcacctccattcatttgccacttgaaacaccttcccgttgtatggcaaccacaggctcgttacatctaagacaccggaacgatgctgctgaagcgcagcgggtccttatgcagtag

SEQ ID NO: 143711 - DNA, 524 bp, Arabidopsis thaliana landsberg
ccatgaaagtttagagattttttgaaagaacaaacagatatcgaattcgagttttgcaaaaatggtatcggtggaggaacctttatctcattccaattccactcgctttccgttaacaaccgatttctacggttcatcatcgccgtcggcggcgaggttacaccgtcaagctggccggtcgatgagaacagtgagatctaacttctatcaaagcggagatcaatcttgctcattcgtcggctcaatcggcgataaatcagagtatgcgtcggagtttctctcggattccgtcatcgacatgagactcggcgagcttgctttgaaaaacagtaattctctcaattcaaacgcttcctcaatgaaagaggaagcgtttctcgacatttctcaggcgtttagtgatttttccgcttgtagtagtgatatctccggcgagttcagcgtcttgcttgcttgcagtcgcggacgtgatagaaatgagacggcggagatacgaagcggacgatgatcagagttagagagag

SEQ ID NO: 143712 - DNA, 546 bp, Arabidopsis thaliana landsberg
aagaagaacgatcgagagcgagagagagagtgatggcggcagaagagggtaaagatgaggcgggattggatcaggtggaagaagagttctctatttggaaaaggaacacaccttttctctacgatcttatgatctctcacccactagaatggcctctctcttactctccactgggttccttcgacgccgattccgtactcgaattatccttactttgccgtccataagcttatccttgggactcatacctccggtggtgcccaagattttctaatggtcgccgatgtcgttattccgacacccgacgctgaaccaggattaggtggaagagatcaggaacctatcgtccctaaggtaatttactcctggagatttcttcactttctgcggaatttttataagttgtgttatgtgcacaccatgtgttcgacgaaagttctagctttgagtgaggacggaatcaacaactggcatgagtgttttacaaatggactagcctttaccttattgaaaatatttcatgaattctgcttttatatgaaattc

SEQ ID NO: 143713 - DNA, 680 bp, Arabidopsis thaliana landsberg; identical to SEQ ID NO: 14112

SEQ ID NO: 143714 - DNA, 380 bp, Arabidopsis thaliana landsberg
ctatatttaatttgatagttgtgtcttcttgtgttataggttcttcttagaggacctaagaattcacgtgaagcagtgaagcatttcggacctgctcctggtgtgccacacagtcactccaagccatatgttcgggccaagggaaggaagttcgagaaggccagaggaaagaggaagagtcgtggattcaaggtttaagaaagttgttgccgccattggacttgattctggagtactgttgcttcttggttgcttttgtaatcggatttttgttagggaactctgttttttctttcctctttcagacatgctactaagtttgcttctactggattcatcgtgtggttattacacttgcagctttactatgttaaacttaa

SEQ ID NO: 143715 - DNA, 348 bp, Arabidopsis thaliana landsberg
ttcaaattttcgtgtttcaatatagcaaacattaagtgacagaacatagcaactgagacaagaacaaaagagacatactgtgagcattagaatttttataaaaccttatcaagcagatttgatattgagtttctccatacgagctctaatgtacttaagatgctcatcttcaggaggaatacatttcttgataacatcattacccaacaaattcttaacccatctatgtatctccgggaacttctccaccggaaccacctttaccccgaccctctcctccgttctcatcagccaaaacgccaacaaagtcgccacagaaaccacaaaccctaaacttttcccaccggg

SEQ ID NO: 143716 - DNA, 705 bp, Arabidopsis thaliana landsberg
cgtggttggtggaattggtatcaaacgtacatccgatcccgcttacttcgttttcgccaccgaggaaaaagatgcggctacctcagcatccagattacaacaatctgatcaattcgattccagtaccttcattcccaagcaatccccttattagatcaagcccgttaagctctgttctggacaatgttcccgtgggtttacagggagccaggcataatgctcatcagtactacgggttatcatcttcggatcttcaccattactacttgaatagaccacgtcgtcctcctccatcctctctccaactttctccttctctcggtctccgaaacatcgataccaaaaacgaaaaaggattttgctttttgacaatgggaacaacaccatgcaatgataccaaatctaaaaagtcccatattgtattgttcggcaagcttatactacccgaggaacagctatcagaaaaaggctcaacggataccgcaaacatagagaaaacgcagatttcatcaggcgggtcgaaccaaaacggcgttgcgggaaggaagttatcttcgtcagatgaaggatcaccttgctctaagaaagttcatgatgcatcaggtttggaaacagggcattgtaaagtgtttatggagtcagacgatgtaggtcgaaccttagacctatcggttcttggttcatacgaagaattgagtcggaaac

SEQ ID NO: 143717 - DNA, 1455 bp, Arabidopsis thaliana landsberg
  unsure (1)..(1455): unsure at all n locations
aaaaagattattctgtggatgctacccttatagcattttcacctttccagaaattgcgcagagagaagggtatctggggaactaggaaagtctttgttgagaagacagatatgagggccaaaagaatggcaaggaaagctggagccctggtactgaaccttgtccatacattcttctaaaagattgtatataaacagtttccttgatacaacattattctcactttatactttaaacagatgtttggcatgataaatttgacagtttccttgacacaagcttcagtgaaaacatagataatatctgattacgcttctgtttaccattgttgtatggcaggttatctttgtggttgatgcaagtggcagtatggcattgaatcgtatgcaaaacgccaaaggtgctgcactcaaactactggcagagagctatactagcagggatcaggtaaaggttactttttttgaatagttaacgtgcttgttgctagtttggatgnnnnnnnnnnnnnnnnnnnnnnnnnnnnntacaccagtaattggtttaggtttcgattattcctttccgaggggatgctgcggaagtgctcttgcccccttctagatcaatagcaatggcaaggaatcgtcttgagagacttccttgtgaggtggttctcctcttgcccatggtttaacaacggtatgtcaaatattatggtgttgttagtaagataactactagtatcgactaaattgtgggtcagcataatcgtaacagtaacaactatattcatatcaggctgtaagagtaggacttaacgcagagaagagtggtgatgtcgggcgcataatgattgttgcgataaccgatggtcgagccaacattacactgaaaagatcaactgatccggagtctattgccccagatgctcctagacccacgtccaaagaattgaaggtaaacagcttctaacggaaaacataaagcaacacaagctcttcactgatattatgtaagaaggcagatgcagtgattaaaaatgcgggtgttgtgttgtttaggatgagattctggaagttgctgggaagatatacaaggcagggatgtctcttctagtgattgataccgagaacaagtttgtttcaactggttttgcaaaggagatcgcaagagttgctcaaggttgggtctctgcaattgattttgagattttttttttgtcatttcaaagcagaaaataatcacattgtgttttgattgttcttcttcctcacaggaaaatattattacttgccaaatgcttcggatgctgtaatctcggccaccactagggatgcactatctgatctgaagaattcttgacctcattttgtctgcaataccttgattctggatcaaagtgtatattctaattgtgcaacacatcagtcactaaacatgaaattataagaaatgaaattttgttttaacata

SEQ ID NO: 143718 - DNA, 799 bp, Arabidopsis thaliana landsberg; identical to SEQ ID NO: 5831

SEQ ID NO: 143719 - DNA, 490 bp, Arabidopsis thaliana landsberg
tgtctataaggcttcgcccgctatggtcaagttactccgaccaaagatctctctaaaaaaatagttttgtactaaccgtttgtgataagttttgtttttctttgcataggacatcaacttttggggatctgtgtattgcacattttttgcttctccatacctaaagaagtttagaggaaggattgtggtgattgcttctggatgtggatacattgcttcacctagactaagcttttactgtgtaacattatattttgtatccatttccctctcctaatttactaaccatctgatctcaagcattcatttttgtaccttcatttcatgtcgatgaattcaggcgagtaaagctgctgtgatcgccttttatgaaacactaagaactgagtttggatcagatattggggttaccattgtagcaccggggatcgtaaattcggaaatgagccgaggcaagttcatgacaaaggacggtaagcttgtcgtcgat

SEQ ID NO: 143720 - DNA, 708 bp, Arabidopsis thaliana landsberg; identical to SEQ ID NO: 63835

SEQ ID NO: 143721 - DNA, 987 bp, Arabidopsis thaliana landsberg
taataatactctctcgacggcgtcgtttcgtgctggcttcacttgaattattatttttctggctggactcatattttctccggcaaggaaaaaagaaaaacatcactttcttcaagcggatgaaaaattcaaagattgagtcaccaccaccatagtaatatacgcgtatgagttcccagatgtgatctccatccaacgttgtatttctttcgttttggttatcttcttcggttccatcgaattccaacaattctcatcgaggaatttggttacgaatcttttgatctgactaaacctaggtgagttttaatttctcctggattttttacgatcacgtttctgctgattatgattactggttacagtttttggacgatcgacgttactagatttaggattttactttgagaacctgtttatactttgatggtataaatttcactattgggatatattggtctatgattgtgtcattagggagcttgatcacaaggagactgaaaccaatgctaggaggagtctcttcaggttagtagaatgagtagaaaaagaacggaaaatggcagtgaatcaggaccagccacttctcatgttcctgtggatagattcgggtttctcaagcaagaacatgccaattcgcctgagcgttttagcaagtctaaaactacatcatccactgatcatgacaggtatgtcctgagggagcgaataattttaaaagaatatgattgagagagtgagagtgtgtttttgttgttggctatctatagagaggagagaaaggtgagaaaatggaggaatatgattggggttgtagggagtgattggaagcattatgttaggagaaaacctaatgttgtcagaaggcgtatacgaaaagggatccctgattgcttacgaggtcttgtttggcagttaatctcaggaagtcgagaccttttgcttatgaatcctggtgtttatgaggtaatcttcgccgtttatatc

SEQ ID NO: 143722 - DNA, 781 bp, Arabidopsis thaliana landsberg
  unsure (1)..(781): unsure at all n locations
tcacatccgtattcatctaccagaggtaagtttgatctgtgactagtgaagaatactcacgagcattagacccgaaacctataacagtctttgcttttttttctgcagttgtttccaagcttaaacaaggttgtgtttctagatgatgacattgtgatccaaactgatctttcacctctttgggacattgacatgaatgggaaagtaaatggagcagtggaaacatgtagaggagaagacnagtttgtgatgtcaaagaagttcaagagttacctcaacttctcgaatccgacaattgccaaaaacttcgacccagaggaatgtgcatgggcttatggaatgaatgttttcgacctagcggcttggaggaggactaacataagctccacttactatcattggcttgacgaggtaaaaggaaaccactaactacccaacaatcactatcaagcagtaatcatcttaactcaaaactatttacatgtatgtgttgcagaacttaaaatcagacctgagtttgtggcagctaggaactttgcctcctgggttgattgctttccacggtcatgtccaaaccatagatccgttctggcatatgcttggtctcggataccaagagaccacgagctatgccgatgctgaaagtgccgctgttgttcatttcaatggaagagctaagccttggctggatatagcatttcctcatctacgtcctctctgggctaagtatcttgattcttctgacagatttatcaagagctgtcacattagagcatcatga

SEQ ID NO: 143723 - DNA, 606 bp, Arabidopsis thaliana landsberg
actgtcatgtgttagccaaaaagaacataacacaaaatcctcttctcttctttaataacttttagaaacacaaataaaagtttaattacttttaagcccaacaaaaatgggttatgctaaatcagccatgctgatcttcttactagcattggtcatcgcatcttgtgccacggccatggacatgtccgttgtttcctccaacgataaccaccacgtgaccgccggtcccggccgccgtcagggtattttcgacgctgaagccaccttgatgttcgagtcatgtatggtcaaacatgggaaagtgtacgactccgttgccgagaaggaacggcgtttaactatttttgaggacaacctccgttttatcactaaccggaacgctgagaatctcagttaccggcttggtttgaatcggtttgcggatttatctctccatgaatacggagaaatttgccatggggctgatccaagacctcctaggaaccacgtcttcatgactagcagcaaccgatacaagactagtgatggtgatgttcttcctaagtcctgtgactggagaaacgaaggcgcagtgactgaagtcaaagatcaaggcctttgcagtaa

SEQ ID NO: 143724 - DNA, 2313 bp, Arabidopsis thaliana landsberg
tgtagaaaattaaatggaggaaaaagctaaactttcttaatcacagatgcagattgattctccatttttctcgggagaaaagttcctcgccggagatggagcatatgatgaaagaaggaaggtctcttgcagagacgccgacttactctgttgcttcggttgttactgttttggtctttgtttgctttctcgttgaacgcgccatttacagatttggaaaggtgtgtttttgttttgtattttttcttcgtgtgtgtgcctactatatgtttgttgaaatgctcagctcaaaagaatgagtgtgaagaacgtattatgatttttttttttttttctgcacacttgccacttgggttaactcttgctctccatgattcatgagctggaaatgttttatctaataatgggtgctagaaagtgagaatttttatggacgagatgtttcttcttggagatatgtgtttatgcttgctaaatgtcagtagaagtagtgttgatgttttcactctaagagaagtcattattacaggatgtgtctttcatgttagatatatatgaggagctaatttcatgttctgttttgttttcagtggttaaagaagactagaagaaaggcactttttacttcacttgagaaaatgaaagagggtatgtcaaataaacctgtgctgatgttgtggtgctttatactttctttctttttcgtttgattttgacttgttaaactttcttggtagagttgatgttgctgggacttatatcacttctgttgtcacaaagcgcgagatggatttcagaaatctgtgttaactcttcccttttcaatagtaaattctacatttgctctgaagaggactatggaatccataagaaagttcttctggaacacacctcttctacaaaccagagctccttacctcatcatggaatacatgaagcctctcatcaatgtggtcatgtaaatatttactttttctatcgacttaagagcctattttccttttgacttttaattatattactgaactggatgttggatccaatgccagggccgtgaaccatttgtgtcgtatgagggactcgagcaactcctaagattcttatttgtcctgggtatcactcatgttctatacagtggcattgccattggtttagccatgagcaaggtacacatcctagctcctaaatctacatatgagtgttaaatttgtattcttaagtatttctatgttgctccgaaaggaagagatgtattatacttgcaatcaactttatcctcatgtctagaggatgtagagaacctcatgatcaaataattagtggtcctaagtatatgtcaaatagaaattatcttcaatctgaaaattgagggaaaaccttcgatattatcatttatgtgcatagagtgttagtaagattaagcagacgaacatatcaataccatctgaaacagtgttgtctttttatcacgtaacacagatttacagttggagaaaatgggaagcccaagcgatcataatggctgaatcagatatccacggtaaatgacaagacttttctgtctctccttcaaattaaggcttgtatgtttttgatgggtctcatcttgagggcacatgaggaactgtgttatcttaggattaagaacagcatgaaactaggattctgttaagtatttaggttgttcattcatgaactcacttaagctgtggagaggcttttatgcagatttgcaaatttcgcttcatcttgactagcagatcaaatccagtataatcacttataaatactgatataggaaaaattcctttctgtcctagtataatcacttatacaggattgaaatgaactgtgtggaaaagagatgtatctctgtaattttagctttatcacgaacagctgattcattgttaaagatacttaatgcctaggatgctttagtttccagtcatatataccctagtcttcttgactttgttcaacagcaaagaagaccaaggtgatgaagcgtcagtctacatttgttttccatcatgcctctcatccttggagtaacaatcgttttctcatttggatggtaactccccatgcttttaccttaagctgtaattttttaaaaatttcatatctctagttaagaacactgttatatttttctccagaagctatttttacggcatttgtccagcaataaaatatatgtttgcattgcagctttgtttcctgcggcaatttagaggctccatacgaaagtctgactacttcgcacttcggttaggtttcctcactgtgagtaacttttttatttcgttt

SEQ ID NO: 143725 - DNA, 1785 bp, Arabidopsis thaliana landsberg
gcatgatttgggcttagctttttcgtccccaaatatcgcgcttcatcgagattgctagggtttctcctcttcgatcttcgctgctcatcaacatctattgattcaattttcgtgctattgtttccctctctgatttcttaatcggaaatttcgtctcgattcgattcattaggttccatcactcttttctgatcggtgaaaggaggttcgttatcttccctaatttttgagcttgatcctctttctgtactttgattcaaggattaagtattggttttttgctgtttcgatctagcattctttcttttttccggaaaaaaagttatggatttcgcgcgaaaatctctgggtagagtcattgaagttgcgtcttttattttcatactcttctctgcattgctttctagattgtacttgtgaagttttatgtacacatttctgtaatcggtggagtaaatttttggtttttctcttttgtgtgtgtgttggaaattggctttttggctacattttatgtactaaacttttgattggctctatagcatttttgtttctgcagttggttttgatgattgattcgcttgttctgattttgcaggagaagacctgttgttttcttatgtaagtgattctgatattcgttatctgttggctggtttgatgaggaagaagcggaaaggtagtgaaactgagggttgggagaatttaccagatgatttatcatgttcaactgcatcacgatcatccaacttcaggtcgcacttttcactagagggttatgctagacttaagaaacggtgtaaggagactgaagctgtcgagtctgttggttcctttaagagacgaattgctggtgttgctactgcacctccttgtggtgcatcatctttggtttcgtcaggaagaggtttgaagaggaagatagggtgcatagatgtttccacacagactggtaggaagaataaaatagacgatgactatgtttttggtcgaaatattgggaaagggaaatttgggtcagtcaggatctgtaagtctaggaagaatgggactgagtttgcttgtaaaactctgaagaagggggaggagactgttcaccgggaagttgagataatgcaacatttgtctggtcatcctcgggttgtcacattgcatgctgtgtatgaagagtcagactgtttccatcttgtgatggagctgtgttcagggggacgtttgattgatcagatggtaaaggtgggcaggtattctgagcaacgagcagctaatatattcaaggaccttatgctagtgatcaattattgccatgagatgggagttgtgcatagagatataaaacctgagaatattctcctaacagctgctgggaagatacagctggctgattttggcctcgccatgagaattgcaaaaggtaaattatattcagacgttactatttttgtagtaatttgtgtacgcatttaaaaatgcttctattcatggcagtgtcttgtagtgtctttatgaaattgtcaagtgtaatgactccattggttaaggaacatagcggcttgatgctgtaaagctataagttgtcatggcatcaatgtctaacaatactggtgaaaaaactaatgatgcccaaaatctatcatgtcggtacgatattttaactgtcctgtgtttgtcttttcctctggtagtttaacttgtaattgcctaaagttgacttaaactagatgaggaaagctagtcttctatgagtaaagttgatagcagctgttcatgctttacttgttctga

SEQ ID NO: 143726 - DNA, 770 bp, Arabidopsis thaliana landsberg
atggaggtaaagaaacttgttttttgttgcaaatttctggaccacttgatatatttttttgtcgttgaaatgactgtacatataaatcgagttctttttttttttttaaatatatataaatcgtagttctttatagttgtgtgattagttaaaacttaaaaacattgcggcgtttatcgttagcatcttatgtttttttttttaataattattttactgaaaagaaatgtaacataaaaacaaggtagaattagttgaataatatttgaatgaagtgtaaatgttgtttatatgttagggaggaggatggtgtaccgacgttgcttcatgtaatgaacgtaagggtacaatgaagggttcttccaaattcatgaacaaagactttggattttccggtatcttgggtggcaagcaaagcactaacccaggtatattactttttttttttttgtttctaatgatccagaggtttgtgggagagttatgatcaattaatgctgttgaatctatcttgattttcataaaaaaaaatgattttcttttgctcagatttctacaattggaacagaatcaaagtacgatattgtgacggatcatcctttaccggcaatgtagaagccgttaatccggtaatttagtgactaaattgtgatatttcataaatattatttttagtcaaaaagctcacatttcccttgaagtactataaattcgtgaagtcaaaaaagtatgataactttgaatattttcaggcaaacaagctgttcttc

SEQ ID NO: 143727 - DNA, 502 bp, Arabidopsis thaliana landsberg
atgtggagacgcgtggctttactttctccgatgatttcatcatcatcgcgatcccttaagctcagccaggttagattttcaatcccgatcgctttttctccggacaaaatgaaatcgttgtctctatctttgctataactttgattttgtgggtttaactcagttcattacttatttcttcatattcataggcagcttcggggctcaaagttggggaatcttttgcaacagacataattaatcaggtatatagatcaggaaaagctcaatagtttgttttcggcgttaattgtgtgtaaaatgtgtttattatctgtcacaggatgaacgagtttcaccgccgaaagagaaagctccatttattacatttgtactaggtaagttatggattctgctggttaatatgttgggaactaggagttgaatctacctaggtttctgtttgagtttcctgtgaaaaaagttgaaggtgatataaactctcacattgttcttcagcgtt

SEQ ID NO: 143728 - DNA, 1993 bp, Arabidopsis thaliana landsberg
ttggctaccctctaccctattggggattacctgctccttttttataagttaccttattaagaatcaaactattgttgtggttctaaaatcttgctatatttttaaagttaattcaattaattgttgcttttatagtttactctactattttattaaagttataatgttaagatccgtaagtaaacattgtttaagcattaattagattattatcaacattgtttatttatgagaaatcctaatatcaactatcataaattgaaacttttatacattagttgataatatctcgatgatattaaatatgatgtgtatattttagtttgttgagaatcttttatataatcattacctctactgaaagataaataaaccaaaacaaaaatcagtttgttcaatactaaagtttatttcagttcagtaagagttgtgcctatcttattgacaacgaacccccccttgtattatttgtataggacctaacttcatacccatttttcaaatatatgattgattgccttatgtagttggttaacatttaatacattttcttgacaattcatatttttgaaaaaacttcaaagcattctttcaggcttcaaccaagctcttttatttctgaaatcactttccttgcatttttacatgagaagacatgttttatttaaccaaaaaaaagggacataacatttgctagtttgtattttcgctcacacttgttgccgttaacctttttcctaaaggtaataagtttttcttcgtttagataaaaaaaaatttggaacgcattgagatgtgaattacaagtcataattggtgaccgacatgtactttttctcaaataaattaattgaacgaaattaccaaaccaaaaccggttttcagatatacacttaaagtcgatatttaagggtttatcaaaagtcagaaccacgacgacagacaaaacataaaagatggaggaagaaagagaaaacactaactctatctacatagtttccgagctacttgaagaaattttccttggattgcctttgaaatcaatcctcaaattcaaaaccgtctcaaaacaatggagatcaatcctggaatcgaacttgttcgtggagaggcgtagaactcttcaaaagaaccacccgaaaatcctggctgcttataactgcgactactgcacgcggccgggtatcctccctaagtctcagttcgaaggggacgaagagatcgtttatcttcataccgacgccacgcaaccctcgatgacttgcgacggtttagtctgcatcaccgaacctggttggttcaacgttttgaacgtctccaccggacaactccgaagatttctacccggtccagatccaggtaaaatctaatattatactttctccgtcccataaaaattgattttttagaaaaaaatagaagttttacattggaaatgtaaaacttagaacagttgatttattttaaccttcattaaataattaaataataatataatatactttttaaagtgtgttaaaaaataaaattatcactagacaatattacttaaaaaaatgtaaaatttctaaaaaagatccatcatggtaaagcgcagtaaaaaaaaaatatttttacaactttcaggaccgcaagcaaattggctcttgggattcggtagagacaaagttacgggcaagtataaaatagtgaggatgtgttttcatgattgttatgaatttgggattcttgatattgaatctggcgaatggagcaaactgatgtcacctcctcatataatgcgagtgggaagtaaatcggtgtgtgtgaatggatcaatctactggttacaaattagtgtgagttacataatactggccttggatcttcaccaagaaacgttcaatggtgtctaccacctcccggctacgtgggtcccgcaccatacccaattagtgaaccttgagaaaagtaaagccatggccatgacgaccaaagttgggcctgaatggat

SEQ ID NO: 143729 - DNA, 1105 bp, Arabidopsis thaliana landsberg
gctcgagtgcctcaagcaagccattactcgctttatccacgacaagctctccagaaattccgatcatcgctttgctttcgctaccctctcccagtcagccgcttgggtaagacttactttctcccccagctctctttatgttaggttgcttttgcttttgagtatgcatgctccttagatgtcaaattttgaattcgtgatgttcattggactatggtagcttataaatgtgttgagagaatcatatttgatgtattgcataagcttcactagtgtgactgttaaagttgaggtcttttatgtttcagcttaaaaaggaattctccaacgatgctaaatctgctgctgcttctttaagagaaatgtcagctactagatcctctggtccagcggatctcacatttctgttccaggaagcggctcaggaagccaaaacttccagagcacaaaatcgaattttgagagtggtaagttttgttttgtgcaaatactatctcttctagcgacagcgtgataaaagaatctgttttacagatttcgtttatattttgctcttcagattctcatgtactgcaggtcatccgtgagaccaacccatgattggccaataaaccagaagctcttcacattggatgttatgtacctgcacgacaagtcgggtcctgataattgtactcacgatgtgtatgactctcttgttgatgctatagagcgtgtttcggagtatgaaggttacatctttgaggacagtcatgggcttgcacagtctgttttcaggcgtatgtcaacgttattatcacatcctcctcaaagatgtgctcaagttgatctccccaagcctcctgcaaagaaggtgactgcagttaagaaatgattatatgacttttctcttcttttgctgatgcagatattctttgattttgtttcagccagctgtttcctgtgataaatcagcctcagattcaacgaaaggagcgaagcaaccgttagaaaaaaaccctatgacaaacacacagagaatacacagcctatgcaaagagaaagtttgtttttgttcttttcacgttttaataacctgttgctcatataaaagacctctgggaag

SEQ ID NO: 143730 - DNA, 1026 bp, Arabidopsis thaliana landsberg
tcctcctcctgactattgcctatgttgcaatacaggtcttggacctcgcagctcagtttcccgagctaatgacgctgagaagctgtgacttacttcggtcaagctggttttctgttgcatggtattgttgtttgtattttgcatgcacttgcttgctgcaatatgttgttcatgtctctaaaaattcatgtgatactttgcaggtacccaatttacagaatacccacaggaccgacactgaaggacctggatgcttgtttcttgacgtatcattccctacacacatcttttggaggtaaaccaaaactcttttatttatcaaaacaacaagttgtaggtttacactgttccacaacttacactatatctaatcagaatacttgagtggatccaaaatgttccaattgattagagtgacatgtggctagagtagcatcatttgactatcaatcacaatgacaacataaataggtgtgttcattagaagaaatagagactgttggtgcgaattcaaattgtttgtaggataatagtttggtagatagaactattgacaacgtttggctgttgtaggtgaaggcagtgaacaatcaatgagccttacgcatccaagggagagcgagaagatgtcattgcctgtgtttgggcttgcttcatacaagttcagaggttcattatggacacccattgggggttcggagcaccagctcgtgaaatctctgttccaagccgctgacaaatggctgcattcttgtcatgtcagccaccctgatttcctcttcttctgccgtcgttgagtagggtatgaagttgtgacgcactttgagagagtttcaaaaagaaactcaaaactgttgatatggagggttgttgtcagattcaggtttaaaaacgagttgatttttatgtttgtaagttatagataaaacgaattttgtttggtcagataatgtatgtgaaccgtgggcttacctcgtgttgttgtatacctataccatgttgtcttgcaatagaaacttttggagt

SEQ ID NO: 143731 - DNA, 1004 bp, Arabidopsis thaliana landsberg
gagatactggaccatttcttagcaatgtttgtgagctagatttggtgtttaatttccacaaggtacttaacctttttatcttactcttatcctttgtaaatagcttctggaactgcttcgttggattcataactttaagttgtgatgctgtacaacaactggttttgaataaacactgggattttgctttgtcttttgagtattgaatgcttacaagttttgaactagttaagtgaattctcccagatgttttaaaatggttttctgagaattctcatatattaagcttacaagggtatatcaaactaagcttttgtttgcgaaaatcaaaagctagtttcgttttcttctcagtatacttgtcccaattctaagctgaccatcgtgacccattagataaatatctgtatgcagccttgaaaagcattccctatttgtgtttatatatgcagatgctacagtgtgtctagatttgatctgtgtttgtactctaataattgctaactagttccctatgacttaaactgaaaggtgtacttgatactcgatgagttcattcttgctggggagctccaagaaacaagcaaaagggtgtgaaatttttgtttcaagcttctctctttcacttaaatgtatcacacatgctcttgctcaagtgctaaacttttaaatgttggggacttgttttaattcgcaggcaatcatcgaaaggatgtcagaactcgagaagctacagtgatgacggttaagaatcacattctacttggttaactgcgtacctgccagatgtttcttggcatgttcagagatttgctatactttgttgagttgttagacaatggtgtagcgtttacattgtgaatgaagaatttagagtgattctgctaaagatctctcatccaacattttgtttacctgtgagattttcatttcaactagtgatgtactatttgtttcgtagaactatgataccacacatgctttgagaggatatataactaata

SEQ ID NO: 143732 - DNA, 2401 bp, Arabidopsis thaliana landsberg
agtagacctttatttctacttgataagtacggttccataactattccacattctctgtataaactatagagggaacacctttatgaactgaaatatatatattgaaattttgtgttttggtgtgcaattacttagtcactcatgtatagtcttcaacctcatagtttcttttgttgatgcttcataaaactgattatcatactgaagttaatgtgtttgttttgttttccagaatggatttagagtctatacaattaatggcacttctcaatgcacaaaatgacttaatagatatgaacgaagaagacgcagaagtgcaagcaccggagcaaagtgaaaaacaaattcagccaactcaaactcaagttccacgaaagagaggcaaaacgtcaactgtgtgggacgattttattttaataggattaggaaataatgataaataaagagctaagtgcatccattgtggtgtaaagttggtgataggtactagtagtaaaccacatgaaaattatggaacaaatcacttaagtcgccatttagatacatgtcctaagatgcctaagaagatagagaggccggtatatgaccagaagatagatcgtgagatagttagtgcaataattatctatcatgatttaccttttagatacagtaaaacctctacaaattaataatgttaggactgcaaaattttattaatttacagaggtattaatttatcgataaattaatatttataaatttatagagaaattttcttaatttggtaactttttaaaaatttctataaaatttctttcattatagaaaatatctaatatctttctaaaacccgttacaagtaaaacatgataataatgtatagaaaacaacactaaaagttttgattcagtaaaatatgaaaactatagtcaaagaaagaacaaatgaatttaagcaaaaaaatattataaatctattctaaagagtttttttacatatatatatatatatatattgataagtttatacaattattaatttattatattgatgggaccatatgtttacatatgattttaaaaaaaagttattatcttattaatttatcaatttatgtcattttttatactaatcctaatttataaaagttattaatttatcgagtattaatttacagaagttttactgtatatagatcgcacaaaaaccattagaatgaggaggagatggcagattcatcaatgtcattactggtttcatcgtcgtcactgatttcattttctcctatgttttcgccaatattctgtgaatcttctgtatcatcgccactattattatcttcggaatcagtgtcactcatgagatagattctataatgtataattaatctcttttcaaactcaaattagcttcatatattactatattttacccatttttttactactttctctttttatatacaaattaatactgatttttcttcattttttatttatactttctcatttgtacaaatcaaaaacttaaaaaaaaaaaaaaataccaattaaaaatgtatgtactacaataactttcgtttgcaaaacaattcactaatgcgcacaaaaaaaaatgtaatggtaaatttgggggtgaattgaatgaaaaattaaacaagaggggcatttttgtgagttgtttttttttcttttccttcgttggctctggagtctggacaacatcgctaaaagagagatctctagatcgctggtggattcgaagaatctctcacggtcgtttcttgacgacggatcaagctctattcctctagtatcatctaatccatcgagcaattctcattttgatcctccgttttcatcatcttctggaatcaattttgctcttgttaaatctgaaagttctgaggataaaatcatgaattccaacttcgggaagagatcatccggatcgaccaatagcttcgatttcgatctggggcttggatcgagccaaggtagacctctgaatggtcagaagagccaaacatcttcttattcgagctcgaattcgcagccgagacctgcgtggcagcctggtaagccgtcgtggacgcatcaacctgcaccgaagcagagtacgatccgatctgagatcggaagtggaccgacttcaatggtgggtgatattcatggtaagacgtggggttcagcttcgggatcgggttcgggtattgggattgtgaataaggatcctagtttgtttggagatttggttggttctgcgataggtcaaggtaaatctagtagaaacgtgccgttgaagaatgcaccgcctgtttcggcttcaggttcgagtaagagtactttttctatggggaatttgggtgattcgttgcctaaatctggtaattcaatgaaaaatggtggtggtatgggtt

SEQ ID NO: 143733 - DNA, 756 bp, Arabidopsis thaliana landsberg
  unsure (1)..(756): unsure at all n locations
tcatagagtgcctttcgctttttctgatccgtanagcatcccgtggagttggaagaagctgaattccttgttgaatccatggagagtcgtgtagatagaaactttttagccaagaaagagagaacaaatcgatgatcaaaaaaagagattgtcaacgcgctctgatacctattcagatctttgagacagggaaaacatatatattaggaaagaccgaaagagtaagtaatttattcctcaaagtaaacgtgtttatgcagaacacaatcgtcactaactttgctaattactttgtcaactctaactgacaaagtcaaccacaagactaacaaatccgattgttgtaatgttgcatccggttcgatcaaatcggtgatttcaattttgacttcagaattcagactagagcatacccgatcatttggtgttgggttctctcttttttgctctctattatcacttcatcagtttgctctttattcataggattcatgtctcaaggttagtagtatatctacagatgcgaggagaaaatcatcaatcaaaatcaggagtagcaaaaatacagatttgttttctttacttttaattcacacaagtaacaacaaaatcttgaaaatgttcagagagattgaaacaaatagacatgatacataatcagaaaacaaacacaattcccaaattgtctcctctgctaatatgctattgtttttctcaggtatcttccacctgcgagtggaacacaaagctcggaaa

SEQ ID NO: 143734 - DNA, 1447 bp, Arabidopsis thaliana landsberg
cacgtggactctgctgccacaacgactctctccaaccatatccccttcacatatatgacatatttttcttacatttactatatattaaagactccacattgtacattttttcatctcatttattaacgcaacgttcagatttttccatttttaactagtcgtgaaaagtattttcgttgtacggtgaatattgtagcccttttttacggtgggtgtttttttttcatttgattgatgagtaaatctacatcgagaaaagaatataatgaaagatataccgaaatcttttgattattaacagatttattttgtttaaaccttttttttttttttactgttttaaaaagttgactaaatgcttatctgaaaaaataattaacgtgaaaaataatttgatataattcggattaagttaactataacagactgattttgattgagcaacgttgaaatattcacattggctaattacatcaatccatttttgcgttgattaaatgacacttttttttcttcaactattaaatgatattcccattgttgacatttctctaaggatatgattttaagtaattttcataaagaagcaattttctgtattttcatttgaaaaaaaaaagatatgtaatgagatttttcttttaattttttaatgttatgtaaagctcacccatataattctcactcatgatctttgtttctttaagcttttcttctccattgtctctctctttcttatcctctctttctcaatcaattccttcaaacttatacactttattttttttcccctcttgtcgaaaacatcacatataaataaaaaaccaaaaaccctaatttataaaatatatataaaatagttatagctccccacttatatatgcaaaagccaacatcaagtatcttaaatgtcataatggacggtggagacagcgtcggaggaggaggagatgatcaccaccgtcacctccaccatcaccaccgccctactttcccttttcaactactcggaaaacacgaccccgacgacaaccatcaacaacaaccttccccttcctcctcctcctctctattttctctccatcaacaccaacaattatctcaatcgcaacctcaatcgcaatcgcaaaagtcacaaccgcagacaacgcaaaaagagttattacaaacgcaagaggaatctgcggtggtggcagctaaaaagccaccgttgaaacgagcgtcgacgaaagaccgacacacgaaagtagacggaagagggaggagaataaggatgccggcgttatgtgcagctagggtttttcagctaacgcgagagctaggtcataaatccgacggtgagacaatagagtggcttcttcaacaagctgaaccatctgagatcgccgtcaccggaaccggaacaatcccggcgaatttcacttctttaaacatctctctccgatct

SEQ ID NO: 143735 - DNA, 540 bp, Arabidopsis thaliana landsberg
ggttcaagtcagtatgcaaaagatggaaatcagtaatagaatcgggctactttcgacgtctcttcggatcttttcaccgaagctcctcaacctcatggtcgatcatgttcagaacagagtatcttcgtgagatgacacaagccataggcttccatggatgcaaaacatgggatcttcccaaaactctagtttcatatatcatgccatttcaagaatatccgaatctccctacctctgaatactactatatagcttcttccaatggattgatttggatcgatgtgtttgtttctcgcatcaagaacaaggtttatagttataaatctttcgttggtaatccagttttacaagaatgggttgagatccctcaacctcctaatccatgggttcaagataaacacccttggtacccgagtccatatagcggcgttggaatggtaacacgcgttgagaacggcgtcgtttccagtttcaagatggttaggacagtccaaatggaactgattgatcgtagagatgaaggaatgtatttatgagagt

SEQ ID NO: 143736 - DNA, 364 bp, Arabidopsis thaliana landsberg
tgtgttttgttgtgccacaggcgtaacaggctttccgcttcaaccacctcttattcctgaccgttaaagaagcttagagtctttggtagctatgaagcttcatatcatcatctttttcttctcaggtcaagagccattctatggtttaaaggatgctcctggctaatctcaacacttagtttctctccctctgctctaaaagctaccccattttatggaatttggaggtggctttttaagcagatcccaatgggatctcctgtttcagatggtgatcatgtcgtatttgtcatctctcaccttcttgcaattgcatcttctcgagagaatgggtttctctttgagagatattgctaatggagca

SEQ ID NO: 143737 - DNA, 1878 bp, Arabidopsis thaliana landsberg
  unsure (1)..(1878): unsure at all n locations
ccaatcgctcttctgtgtctcctcttgttcaatcagaggtttcgagtaaagtttcttcctttggctcctctctagcatccaagctacgtttgtccagcaagctctctcctcttcctcctcctccacntccgcctcctgttgaggaaaccacccaattccgagatgagtttcggagtgacacgaaaccaccggaagaagaaactcgaaacccgcaacaggaattccgacaagaagggaagatattcgttggtaatttaccgacatggataaagaaaccagagtttgaagagttcttccgacagttcggaccgatagagaatgtgattctaatcaaaggacatcacgaggtcgagaaaaacgcgggatttgggttcattatttacgcggcagagaagtctgcaatgaaagctgtggagttcgacggcgttgagtttcacggcaggatattgacggtgaagctagacgacggaaagaggctgaaaacaaaggctgaacagagagtgaggtgggtagaggaaggagaagaagacacgaaaatgtctaataagtcgtcgtggcatcaagagagagaagggtctcgaaagtcactacagaggattttagataccaatggagataactggcaagctgttatttcagctttcgagaagatcagcaaggtttgtcattgttaacatcaatcacttttgctctgttttttgacttatcatttggtcaattgatgaataatgtaaaaagtctcacttatacaatgtttatactcagccttcgaggacagagtttggtttgatggtgaagttctatggaagaagaggggatatgcatcgtgcacgtgagacttttgagagaatgcgcgcgaggggtatcacaccaacatcacgtatatacacaaggtacaaaatgtgttacatctcttgttcagattctgcttagtcaaacatttcatggataaagtctttgttatgaattggttcactctcttgtctcatttccaaagtaaaattgattggtatcttttgtgtaattagtttgggattcctcaaaggttaaaagaggatttgtttcatgcagccttattcacgcttatgcagttggtagagacatggacgaagcactgtcttgtgttcgtaaaatgaaggaagaaggaattgagatgagtttggtgacttatagtgtaatcgttggaggattctctaaagcgggacatgccgagtaagtaaaatattgtgcctgcctgtattggtaaacgttgttaatcattgtatatgctaattcgatctgatactctgttgtctttggaagagctgcagattactggtttgacgaggccaaacggatacacaaaacccttaatgccagtatatatggaaaaatcatatatgcacactggtaagcattgatatgatttctgactctattagtgatgtttgtcttcattctaaaagattatggacattttctcagtcagacgtgcaatatggagcgggcagaggcattggtgagggagatggaagaagaaggtattgatgctcctattgctatctaccacaccatgatggatggttatacaatggtcgctgatgagaagaaaggcttagttgttttcaaaagacttaaggtattatttggctttagatttggattctttcttacttcctctttagaatctgagcaagtgaaaagttgatttacttgttttgctataggaatgtggatttactccaacagttgttacttatgggtgcctcattaatctttatactaaggtaaggggaacaatagtgttgtgtataaagtgaaaacattcatcttggtattattgtgtggtaatgcagcgcctcctgttcggataaaaagacccaaaagccttggaagtta

SEQ ID NO: 143738 - DNA, 1719 bp, Arabidopsis thaliana landsberg; identical to SEQ ID NO: 30446

SEQ ID NO: 143739 - DNA, 727 bp, Arabidopsis thaliana landsberg
agaagagtttccagaaatcagctctcattgtgaccttgactctcttcttcttcattccagtttcaatctcggttccattcattctgtttcatggtgattaacaatctttcttcttcctcctctttccttttttttatcgactagcttatgtatattgcttgacatagggattagagatcaatgctccaatggtggagtgagcagcttcgtacagctccttagcaacctctctagctcccatggatcttgcttgtaccgaaccaactccttctttttcttgtttcactctgatcttgtaaaagggtttaattgttgtctcctcctttgttatgtctcatctttgtagagaaataggaaatggagagcaagattcggtgactatgccgcttacgcaacaagcgagtgtagcgtgtgagaaagttaaacagatgaaggatttgagtcaaggctacaacattgttgcacagtctcaaggaaacttggtagctagaggtctaatcgagttttgtgacaatgctcctccggtcttcaactatatatctttaggaggtcctcatgctggcatatccgacattcccaagtgtaatgtgagctctctttccattactattggactatgtgtcttaatcacaatcatgatcatcataacaacaacattggtgttctctgtttcaagtctacactttgcgagttgctgaaaacagcggtctacaccgacttcgtacaa

SEQ ID NO: 143740 - DNA, 515 bp, Arabidopsis thaliana landsberg
atgattaatcaattaacaaagaacgagttaatcggattatttacatccattgccgtcctcatatacgttacatgtctcttctacaccaaacgatgtcgtacgagactacctccgggaccaaatccatggccggtgattggaaacattttccagctcgctggtttaccgccacacgactcattgactaaactttcacggcgtcacgggccaatcatgactttacggatcgggtcgatgctgacggttgtgatctcttcgagtgaagtggctcgggagatcttcaagaagcatgacgcagctttggctggccggaagatttacgaggcgatgaaaggagggaagagtagtgacggctcgctcatcacggctcagtatggtgcgtattggcggatgctgcggaggctttgcaccactcagttctttgtcacgcgccgtcttgatgctatgagtgatgtacgctctaggtgtgttgatcagatgcttcggtttgtcgaggaaggtggccaaaacggtat

SEQ ID NO: 143741 - DNA, 1921 bp, Arabidopsis thaliana landsberg
ctcctttaaaagcaccaaaatggtataagcgcccggttggtgcatcttttggatttgggggaaagcttgtatcgtgtcacgcaagggcccctgcaaagggtacttcgagcattctatccgaggtaggtatctatatacatatatttatttatccggttataccccttttgtcgtcaattctaatttgacttagtgtcatgtttaggtttttttgcacagcctggtaacagaacagagtttggtgagtcgaacttctgaatttgaagctgcaatagaaaatggagatatgacttctctaaggggtttgtgcgagaagaaatctgaagagactgagtatgccatccttgtgattgaaaatgttgatattcgcccttataaaaactcatgagataactcagtttggaccattttattccactgatttcgcagatccgaagaggagaaagagacatggggcttgctgaaaatcatgttcgaagaggaaggaacttcaaggacaaagttgatcagccatcttggctttactttgcctgttgcggaaaaggatcaggcagtagatgggctctcatcagatctcaatggcattagattagaggatactgcggcagatgcactggatcttgacgacagtaacgaggcagctgcatttgcgatggataatggagaagacttctttaacaactttcctgctaaaccggatacacctgtatctacatctgccaaagattttatgccttctgacacagatttttctaccaaaggagaagaaacgcaagaaatgcaagaagaagaggaagaaagttctgacccagtttttgataatgccatccagcgagcgttgattgttggagattacaaggaggcggtggatcagtgtataactgcaaataagatggccgatgctttagttattgctcatgttggtggtacagcgttgtgggagagtactcgtgagaaatatttgaagacgagcagtgcgccatacatgaaggtatatgtatattctttcccaacttgatatgtaggtaagtgccatctacacccctgtttgtggttgcaaaatctgtaaactactgtatgtttatctatttcaggttgtttctgcgatggtgagcaatgatctcaggagccttatctatacaaggtcacataagttctggaaagagactcttgctctcctctgtactgtaagtttctccgactgagggaaaaatacttagaaaagaaaggaaatttactaattgatattgtctatcaatgcactccaataatcataaaggaaatggaatctgctttttcgtgtcttactcagcgaaaacattttctgctatcacttttaactcttttcaacaatataatgtgatgttatctccgtgcactcgtgaaccaagatgaacaacttgtcagctacgctattctgctcactagaaaacttctttgtaatgaatgctgatcttatattcattggcaaacagtttgcacaaggagaacaatggacaaccctgtgtgatgcccttgcctcgaagttgatggctgctggtaacactttggctgcagttctctgctacatttgcgcaggcaatgttgacagaacagtagaaatttggtcgaggagccttgcaaatgagcgggatggaagatcttatgctgagcttcttcaagtgtgtatcactttctatgtttcgcgcataaatttttgctgggcttctccgctcatatttttctgcccttatcttataataggatcttatggagaagactcttgtccttgctttggcaactggcaacaaaaagttcagcgcatctctgtgtaaactctttgagagttctgctcagatactggccagccaagggcttcaaacaaaggcaatgaagtacttgaaagttctggattctggtggccagtcacctgaactttcaa

SEQ ID NO: 143742 - DNA, 4036 bp, Arabidopsis thaliana landsberg
taatttacaaaaatgacttctcacgactcacgccattaaactccacatacacctttccctttcactttcatcttcttcttccctcgattcaatgggttatctctcctgcaaagctggatccgccgtcgcaatcgccgtttcatctgccgcatcaacctccggatccacctccagcaaagcttctgctcctcccgaatctcccattgaagaccgtcctagacttcgtcgtttcctccatcgcgatctcgaatcagccacaggaggtttcgacatcaacaatctcctcggacgtggaagccatggaagcgtttacaaagctgtcatcggttcacgtcacatcgcggtcaagagaccttcgaaatctcgagaaatcagccgtgagttccacaacgaattcgagattctctccagaatccgtagccctaggtttgtgaatctcttaggttttagcgccgataactccaaagaaccacttctcgttgttgaattcatgggaaacggaagcttatacgacgtgattcactcagataccgttttaaactccggtgcgatttcgagctggagtaagagaatcaaaatcgctcttcagattgcaaaagccgtacatcttctacattctcaagagacaccgatcatacacagagatataaaatcagcaaacgtattgatggataagaatctaaacgcgaagctaggcgatttcggattagcgatcagatgcaatgttgatgatcaaaaagtgaaatcaacaccacctgcaggaacaatgggttacttagatccagattacgtaacggctgatagattaagcacgaaaactgatgtgtttagcttcgggatcttgttgttagagataatcagcggaagaaaagcaatcgacgttagatattcgccgtcgtttatagtagattgggcgattccgatgataaaaagaggcaaaatcggtgggatttatgatccgagaatcggaccaccgattgatgtaagtgtgaggaatcatttggggttagtggcggctaagtgtgtgagaacgtgtagagagaaacggccggggatggaggaagtggttgggtggctcacggggttgactaagtcggttaggtcacgacggtgggatgagttaagcattggaaacccgtgtatgatggtcgagacggtgggtggtcgacccgtggaatgattttttatttgtttaaaatcaagtgcttcgctttgaagccattgttttttctcttatgggttggtcaatttattcatttaacataataaagcatatactgtaacatcatggttgcatatggtatttgactggatcatcatattcataactaccgcttgttctaaaaacatgccatgtaaagccttttgcactagtgcataactttctcatatcacaagttttttagcatctctttgtagagttggaacttttcatcattgacaccatttcttcgtgcaaaacacctattctcgatattgactcatatacacaagacatgcgtataaaccatatcattgatccaattatatatagttttgtttttttttctactacttatggaagaaacccaaagtagagtgtttttaaatatgttgtcttagtgttaattgaaaaaactaaactgttttttctaacaagaacaaaaaaactgatcgtcttaaaactccactgtaaggtaaaaacagttgacgaaaaaaaaggaaaaaaaaaagaaggtaaaaatagttgtatgaagacagacgtatatctacaaaatgctgtcattcattttctaaacctttcatctctcttgtttcttcaaattcaactcctaactcgtattctgagataactcgtagtctaaaatcatcaaactactcgaagcaattcttttaaattctttcattcaaacactcgaatcacatgttgtacaaacgtatatttttctctttgaatataatttgacattacattcaaaaaaaaaatcatcaaactacaataccaacgtccaagtgatttcataaaccttataatagacaataattagtacattcaggaatcaggagtttattggagtcctaaaacatgatttaaatgatcaatataccgaaagagtgaagcaagatgcatgttcagaaaccaatttagaaaaaaatctaaatcgattccaaacttaaaaacgactctaattaatcaccaaagagaactacttaattagacttacttcttgattgacttggatattggtgagactaaggtaaacactaagtacaatcatatgtacgactttgtaaagtttacgatatttcagctacattggagaaaaatgtaaattccacgaacaagagcattaatcgaccaatttggaacaataaactaaagagtaattaatatgatattcatgttatgattcctcaaattttacaacatttaattttaaagtgattattttgtttccaaatttcacacacgtgtctctaacatcacaaatccattgtagtagccaaacacattttccaagccacaaccgaggagttggtttgtcaagtgacacaagtcacttcaattctattagtcgcgaaaatgtgctttcacttaaggagaaagatctaatcaagaagttccccggacaacctttcggcattagtttcagacagtacggcggttatgtggccgtcaacgaaccagccactcggtttttgtactattattttgtggaagccatcaaacctagtagttctactcctcttgtgatctggtttaacggaggtacctatagaaaatatatattccctatacaaaactcctttacttggaactagttatatatttttatttttttacatctaattagactcttcaaaaacttgaaaagataagtcttctattaatatctagtttttgaggatgtataatttcctataatcgttgagaattatacaagaacaaactttttataaaaaaaaatacaggaccggggtgctcatctgtaggacttggggcatttcaagagcttggtccattccgcgtacatagcgacggcaaaacgcttttccgcaatctttattcatggaacaacggtacatgattgattgtttactatcagtttctgcttcttttgatgattgattgagaagatctaaagcataagacacaaagtatattattatattgtttactttcagtttctacttctttttaatgtttttaaagtttgtagatgttgtttagatcttgagtgatgtttgatgaatttagataaagtaatttgtcttctaaacccaaggcaagtgttcataattgacattaggatgattttacgtcatattttgcttattatgcttcatatgtttaatggcttacttattttataatgaagcaagtagagactaaaccagactaaacaaagactacagttcgatagaaattatatggatgacgtggtatagagcctataatgagcgtcgagcttatacaatgatatgcattcatgtgttaatattttcttcaagttgttatattgtaacattttaatttacattgaatcaaagaaagacataagtattaattctgatcaccaaatgaccaagtttatagaacaatgacatttttacaagttatacacatactatatatatatatatataatttatttcttttagaaaaactttaattacaaattgtcttttattttagataataattcacaagacctaatagattcttagattacaataaatctattttagttacaagatttatactaattttttgtgggtgaatatttttataataaatattagtaattaaagtttttcaaaataagtagatatatttacataatttactatattaaatttacccacgtatcgcgtgagactttttctaatatagtataaagtaaaattgattattattgttataacaaggtcattatctaaaacattgcaatattatatgaatcaatgtatcttaatctcacaattgtgctaagtatgaaattgttttttatttgtcatcataaattttattttagaaaccgatgaatttacatac

SEQ ID NO: 143743 - DNA, 990 bp, Arabidopsis thaliana landsberg; identical to SEQ ID NO: 29215

SEQ ID NO: 143744 - DNA, 1226 bp, Arabidopsis thaliana landsberg
cagttaaattggcttaatcttgaacttgaaagatctggccttatgtaaatgaggtaactttaattaacacgcaatggtactttttttttttttttacctttttggatgtgttgatatatcttcaccaacttcgtttttctgttggttaatcttgtaggcagcttctgagctgattaaaagcagtgtggaaccagtacttgaacagtatacaccagctatgttagcatctctcaagttctctaaattcacacttgggactgtggctcctcagttcacaggtttggttttgttggttcttataaataatctaatagtgttgatatatttatgaagttatccgtaactcggtcaatccagagaacttgtatcttaaacattgatgcaaatgggtgcttaattgaagatgttttattttagcaatcttgtttatgtagctgttttgcttgaatcatacggtttagagaaaagtaatgtgtagtcagaaaaacgtttattatattgccgagttttcaaattataacagtcgttatgctcacctatttgatcaatgagacattaaaagtcgttatgctcactcattttcaggagtttctatcttagaaagtgaaagtggacctaatggaatcacaatggaacttgaaatgcaatgggatggtaatccaaaaatcgtgttggatgtcaaaaccttacttggcgtgtctctacctattgaggtactccactagtaatgctattttttataaactttgttatccattttttgttcttgagcttactgtgttgtgtctgtaggtcaaaaacataggattcacaggtgttttcaggctgattttcaaacctcttgttgatgaattcccttgctttggggcactttcttattcactccgcgagaaggtaacttagtgatgatatatattgcttgttataatatcttactatcacgttttagtaatcttctcttgttttctgtgagcagaaagggcttgattttaccctcaaagttataggtggtgaattaacatcaattccagggatttcagatgcaatcgaagtatgccaaaaaccaaatttgatcgtatgttttgacagcataatgttacctattattgattaacaatctttctttaacgcctttgacaggaaactattcgtgacgccaaagaagacagtataacatggccagttaggaaaattatacctattttaccaggagattacaggtttct

SEQ ID NO: 143745 - DNA, 1069 bp, Arabidopsis thaliana landsberg
tgccattttatcaatatgttggcacataacatacctaaagacctcataagcaatgatctaggtatgcaggttcagcttctccacaatgtttttctcccacagtaagttacatctaaaaactgcagctaagttactactgtataggtgatgatatctccaacatctttatgctactaaacttgcaggagagaacacagtgagtacactcggtcgtgctgttctgctcatctggctatttgtggtactaatcataacatcaagctacacagcgagtcttacatcgattcttacagtgcaacagctaaactcaccaatcagaggagtagacacactcatcagcagcagtggacgagttgggtttcaggtaggttcttatgcagaaaactacatgattgatgagcttaacattgccagatccagacttgtaccactcggctctcctaaagaatacgctgcagctcttcaaaacggaactgttgctgcaattgttgatgagcgtccttacgttgatctcttcctctcagaattctgcggatttgccattagaggccaagaattcaccagaagtggctggggatttgtgagtaccttcatttaaaactgtctctgcggtttgtttgaacattaatcttgatcatcttttttgcggttttgtttgtaggcatttccaagagactctccattagcaatcgacatgtcaaccgcgatcttaggtctatcagaaaccggacagcttcaaaagatccatgacaagtggctttcaagatctaactgcagtaacctcaacggttcagtgtcagatgaagattcagaacagcttaaactccgaagcttctggggattattccttgtgtgtgggatctcttgttttatcgctctcttcatctacttcttcaagatagtccgcgacttcttccgccacggcaaatatgatgaacaagccacagtcccttcaccagaaagttcacggtctacatcatggcagccatttccagcttattttaatgaaaaagaaggcgtatccgagagaaggatgaagcgtataccaatcggcgatcgttctttctag

SEQ ID NO: 143746 - DNA, 522 bp, Arabidopsis thaliana landsberg
tatgtggtttccgaaggctctcatggaagaagaagtttcgtccggaagctggtcagagctgtagcctccggagattccgtggctccggcgatttcggaagaatcaaaagtgaaattgggtggctcggatttgaaagtgacgaagcttgggatcggagtctggtcatggggtgataacagctattggaatgatttccagtgggatggtcagttctcttaatttcgattctcaattttatacattttgtgaaacaaaagtattgaaatgaattaaaagttaatctctttttttttattctctgtgatggtagacaggaaattgaaggctgctaaaggtgctttcgataccagtcttgacaatggtattgattttttcgacaccgctgaagtttatggttccaaggtaagattttgttaaagctgatcactcttcattgttttgaaactatttgcaatcctcacatttcttttggggggctcttcatctttgagtttccctggtgcttaagcttgaactctttag

SEQ ID NO: 143747 - DNA, 917 bp, Arabidopsis thaliana landsberg
gtcattgatgtgagtcatggcaaagaacttggccttttccttaattgtttctatctataaaattttagagattcacggaccaaacgttcggctttctcagtgtgccactactgatcctgacgggcgtaaacgagctcttctaattggaggagcattgccaatttcactgatgtggcagctactttcaacggtatcattcgagcgctaagagaaaaggtgctctttctcacaaactttagtgaacgaacaaacagttgctactgtattttgatgaagatgagaggaatgctcaagaatgaaatcgatgctgacctttttttgtgtgccatgagcaggaaacaagattgaaagcatcaagaatgcacatttacgtaaggagaggtggaccaaattaccagactggtttggctagaatgcgagctttaggagaggaacttggtgtccctctagaggtaaccgaattacttatggttttactcacaatctaaacctaggagaaatggtgaaaactcattctgtcgaaaaatttctcagaaaagaacatgtgtggttagttcgaatactgaactttacaaggattgatgattgcaggtatatggtccagaggcaacaatgacgggaatatgcaaacgagccattgactgcatcatgttgcctgatgcataacctacccaaaccttttatctcttcttcagtttgaaagcagaacaaaagctttggagctggacgaatgagtgagtgtaaaatgagtcatgtccttcatctctctctttccacataagaaaatgaaaatctctttaaaactttttttccactgggtgtgaatttgaaaactgtatcattgtgtgtaagcgtaattgtaatcagacggtcaaaatccttattttgaaatgtacaataagacttcaaaagttaat

SEQ ID NO: 143748 - DNA, 679 bp, Arabidopsis thaliana landsberg; identical to SEQ ID NO: 40056

SEQ ID NO: 143749 - DNA, 732 bp, Arabidopsis thaliana landsberg
gttatatggcatgacgatggaacccttattcaacatctacttacagccaggcttgtctgcgctaaaaactccgtaacgatcaaactctatcaaaattgatgtttttgattgtctattttctgcatctgataaaggggcagaaagtaagttttcgaaatgacaccctaatgtgattcttactggtgggttgcgtttgtaccttgatatgactcagatatggtttagaagaaggttgtaccaaagaggaccctctctcacaagagaactttcggaagctagctttgcctttaccgttctccaagcagcaccattcaaagcttgtttgctatatttctaaggagctaatggacacagagaacccaccacaggtgctgcccaatggctacgtctacagcaccaaggtttgattctgttcttgtacaacttcagcttctctgttctttttctctttttagaatctttttctattagcttgatcagttacatcagtctatcctatacagttcaaaaaatttaaagttgggttactttttttatttatttgatgggtaaatgaacttgcaggctctcaaggaaatggcggaaaagaatggaggtaaaataacatgtccaaggacagggcttgtctgcaactacacggagttagttaaggcatatatatcatgaaaccatatgctcataatcctcactttggtcaccttttcaatggatgactgggaggacaatattagg

SEQ ID NO: 143750 - DNA, 846 bp, Arabidopsis thaliana landsberg
atattcctctcggcggcgatagcaagcctgagtctattgggttcgaatcgccatttaccagaacctgtaattttgggaattttttaacaaaaagtcggattttttgtcttttttaaatgtggaatctgaagaaaaaacaaagcttttgaatctattgagattctcaactctttgattggttcttgactcattatgaaatggtcttcttcttgtgtcttctacggtaaaatgttgactcttgttctttatgtttgttgtttttaatttcagtttatacttcgctaaaatcggactcggaactccatcaagagacttccatgttcaagttgatacaggaagtgatatcttatgggtgaattgtgctggttgcatcagatgtcctaggaaaagtgatctggtatataccatcaattctatccctccaaaaaaaaaaacagaactctaagttacattatgttttcagtttcatagtttcattatctttcaggtagagctgacaccttatgatgtggatgcttcgtccactgcaaaatctgtttcgtgcagtgacaacttttgctcttacgttaaccaaagatctgagtgtcactcaggttctacttgtcagtatgttattatgtatggcgatgggagttcaactaatggatacttggtgaaagatgttgttcatttggatttagttactggaaatcgtcaaaccggttccaccaacggaactattatcttcgggttagtttaaggaaaaacagctttattcttctatgaattttgtagcttgttgtggcttgcaaatctctgaatcactgttatttgtggttcttatacagatgtgggtctaaacagtct

SEQ ID NO: 143751 - DNA, 1182 bp, Arabidopsis thaliana landsberg
gagatgagtggtgttgcaaaggatgaagagaaatctgatgaatatagccaagacatgactcatgctatgggtgctggtaaattgttttcatcatacctatacatgtccttagattggaaactctaatgatgtccaccattttttgtctcatattggaaatattgatttagctcattggattgtattctactcttgtttttcatctttcatcttgattagttttgttcatctgtctaccaaggaatcttatatcttttgcttgtttattgacaaacttatcttcttgttctccttaattatgtatttcagtcactgattcattctcatgtgtctttcatttcagttctaacttacaggcacgagttaggaatgaactacaactttattcgtccagatctaattgttggatcctgcttacaggttcacttttatatccttctctcaaatgatgattttgttttggatatgtggtactttcctcgtgttcttactgtatgctctcctttattgctagacccctgaagatgttgacaagcttcgtaaaattggagttaaaaccatattttgcttgcaacaagatccagacctggagtatccttccaaagccctctttttctgttcatgattatgattttgttttcactttccttcgcattgagtgaggaagaatgatctgcagtgcagaatgccttgaccaatccttccagatattttggagtagacataagcagcatccaagcctatgctaagaaatatagtgatattcagcatattcgctgtgaaattaggtaaggcaacgatctagctgtgactttttaatatattggtattcaaagctgatgcgtaatgaatcgaaggagagatcatgagttgatttttagtttcctttccaatatttttcttattgcttgactttataagaagcatatgaggtagttttttttccagaattatctgaataggcgagggaacaaaggtatatacactgttggagggtagtctcagatatcttttaggcacgcaatctttaaattcttattgttttgtcagtgaagtgttatactttctttttctttgggctctttacttttatcacgtttcctaagctaatgggaaatcagcacacttttgtgtaagcaataactggtttatgacgaattgtgagtgatagttttgtcttag

SEQ ID NO: 143752 - DNA, 864 bp, Arabidopsis thaliana landsberg
aagggcaaaaaaattcccttaaagagtcccccgtttttgtttaaccccctcttctctcatgtaagttttctctctgctaatccatttcccatcttaactaacatcatctctctccctttctctttctccaatttttatattacaatgggtcctttttgtgtgtactgtccctcgcttttctccatttcttagtattgggttttggaaaccattgattcatgtcttgattcattagatcttgctctggatttcccagatctatggatctgcatgtgggttttggtcaaaaatgtctaatggtgttgcaattccctaaaggaattcatctttatccatttcaccttatttttgtttctgggtatctccaagatctaatctttttcctattgaatcataattacattgtttgttgctgaaaatatagaaatgtttagcttaattcagatatagatctttgtgtatttctgtgcatttaggacagagaactcttgagtttgattggttctgtctgaatttggatctgaatctcttaattgttatgtgtagttgaattttgttttgtaatgatgttttttgtagatctttgaaatggatgacgatgggtttcgtaattggggttactatgaaccagctgctgctacctttaaaggtaatctcggtttgcagctaatgtctaccattgatcggaacactaaaccgtttttacctgggcgggatccgaatctaatgatggggcctaacgggtcatatcaccaccaagagcctcctatccacatgagctacaattggattaaccaacagaaggataagttcttcaatatgttgcctgttacaacaaccactcctaactaccgttatggcctt

SEQ ID NO: 143753 - DNA, 1358 bp, Arabidopsis thaliana landsberg
gcaggagaagagaaagtggcgtggaagtactttaccagagatgttgtgccgtttgctgcgatgtttgcggtggagtgtgccactgttgggtcaaacacgctgtttaaggctgctactttaagaggattgagcttctatgtctttgtcttctactcttatattgtttcaacacttctccttcttccactttctgtaatctttggaaggtactgatctcctctctttgcccggtataatcttttcaagaacatgaacttacttttgtacatatgcaggtcaagaagattaccagcagctaagtctcctcttttcttcaagattttcttacttgggcttgttgggtaataacatcgtactcctgcttctagatttatgggcatttctggctttttttaacttgagtggaacaggttcatgtcgcacattgctggttgtaaatggattgcatacagttccccttctcttgcatctgctatcagcaatctggggccggggttcacattcacactcgctgttatcttcaggttccacctctttctctgctgtttctgtttttggaaattagtctagacagtggaaaacggagtaattccacacttactaagcatacaaaatctcaagccttttgcgtatatagaatgaattgaaattttcctttttggacgtcatgggttttccatcttatgttcagtgactagtagtttatacgctgtagcattcgatgccaatcgataccagtaaatacggaaaacttctcacgtttatttaaactacaaagtacttagtcgtcacataagagtaagactcactaatacaagtacaactcagtggttggttagaaatggtttgccctcattctttcatgagataagtttggtgcatatgatgatatgtggtctatttgttactatcaatcttttttttgaactggtttttcttttgggtgactcattaaggatggagcaagtaaggttaaggagctctgcgactcaggctaaaatcattggtgcaatactatctatatctggtgctctggtagttgtgctgtataaaggcccacaagttctcgcctctgcatcttttacaactgtattacctaccgttacacttcaccagcatttgacctcaatagagtcaagctggataatcggagggctcttgcttgcttcacagtattttcttatatccgtctggtatattcttcaggtacaaacacttgaaaatttcactaaaaaagactttgggtttacacattaaattctgtagctgtatatggtttcagactcgtgtcatggaggtttaccctgaagagataaccgtagtctttttttacaatttatttgcaacactaatctcag

SEQ ID NO: 143754 - DNA, 1140 bp, Arabidopsis thaliana landsberg; identical to SEQ ID NO: 61753

SEQ ID NO: 143755 - DNA, 600 bp, Arabidopsis thaliana landsberg
ggtttgcaaacacatttctggggacttacaattatatgtctgtaagtatcttatttgtctcttgagcattgactagtttgaaacccctttcgagtgttataaaaattgagaatcttaatttttcctttttacagccagagagaatcgttggaaacaagtacggaaataaaagtgatatatggagcttgggtttagtagtactcgaatgtgcaacaggaaagttcccttatgcacctccgaatcaagaggaaacatggaccagtgttttcgagttgatggaagccattgttgaccaaccgccacccgctcttccttcaggaaatttctcccctgagttatcttcattcatctccacatggtaatctctcaaaaaattcctgctccctcttttactgagattactttactaagttaacatattccactctacactctcatccagtttgcagaaggagcccaacagtcgaagctctgcaaaggaactgatggtttgttttatataatcccttttgcatgtttttcatccattgaaatgttgaatcatactctgtgtcaaacaatttcaggaacatcctttcttaacaaatacgacactcgggg

SEQ ID NO: 143756 - DNA, 1350 bp, Arabidopsis thaliana landsberg
atctcgactctagaggatccccaaacccatgcatcggtaactgaagaaataattcgattacctgatatattctctctgttaaagtttcaatctcacgcgtcacaacccatcagttccacccattttggaatttgtttttttcttttttttttttccattttggaattttgtcatggcaaatatcattttctcgagtctttgttgtctttttttctttttaaaaactttatattcgttaatagtttattacaatttttaaattaccttaattattgattcggcgtatatagtgcaacttgactaacagaagaatatgggattctttttacaatcatacaaatttgtagatattttagtacacaatatacaagtgggtcattaaaaaataatcatgcatcataattgataagactcaattatttgtttctggtactactgttaaggtggaattgtcgtcagtcaaagcatcaatatacgatcgagacagaaactgagaaagtgtagacattacaataccattatctcttctaagtcttaatcactttcacttaaaaatcacttttgtaaaatttgagttattcttcttcttctgtaatctagtaaaaaaaaaaattctaaaaaataaaatcaatttgagttgaactgagatgactcctccatcaagtaataccgaggcggtttctgaaatttggacatttggatatttttacaggaaaatgggagaggagcaagtacgtcggtgtatctctcgtcggaaaaaccttggccgtgatgggtttcgggaaagttgggacggaggtggcgagaagagccaaaggtctaggcatgaccgttatctcccacgacccttacgcgccagctgacagagccagagctctcggtgtcgatcttgtttcattcgatcaagctatctccaccgccgatttcgtctccctgcacatgcctttaactccggccaccaaaaaggtcttcaacgacgaaactttctctaagatgaagaaaggtgtgcgtctcattaatgtcgctagaggtggcgtcatcgacgaggatgcactcgttagagctctcgatgccggaatcgttgctcaggcagcattagatgtgttctgtgaggaaccaccatcgaaagatagcagactaattcagcatgaaaatgttactgtgacacctcatcttggagctagcacaaaagaagctcaggtatcatcactctcttgatcttgtttatgttacttgtttcatctctctacacttcttttcgagtttatatgattccaatgtgatattttaggaaggtgtagccattgagatagcagaggctgtagcaggggcattgaaaggagagttgtc

SEQ ID NO: 143757 - DNA, 434 bp, Arabidopsis thaliana landsberg
aaaaaaacttacaaagacaaaatccattgcaaaagagcgagcaacaacgacgaaatttcgaaatgccatcgccaccgacgacgacttctctctcggtgacacagaccataaacggatcacacagcttcacaatcaaaggctattctttggctaaaggaatcgggatcggaaaacacatcgccagcgatactttcaccgtcgggggttatcaatgggctatctatttctatcctgatggcaagaatcctgaggataattcggcttatgtctccgttttcattgctttagctagcgatggtaccgatgttagggctctttttgagctttctttgcttgatcagagtggtaaagggaagcataaggttcatagccacttcgatcgtgctcttgagagcggtccttatactctcaagtatcgtggcagcatgtggttc

SEQ ID NO: 143758 - DNA, 590 bp, Arabidopsis thaliana landsberg
  unsure (1)..(590): unsure at all n locations
cctttatatttattttcttccttcgtctccttcaaattcaatctttctccgtcattcagatttcgaggagacagagacagagaaaaggattcgtgtaaggaaaagcttttaaacttctctttctatttatccctcctttcttctatctctctctctctcgatatcgatacaagagagatggagaaagaagaaggagaaacaacaacaacgatcggcgttgttccggcggcgccggcgaaattaccgactccgatatattctctgagcttttgggaggtcacggcagcttccggcgtcgttttagggtttattttgggtcttgtttgcgtttatctcacaatgcctcaatctgattacagctttctcaagctacctcgtaatctcgaagatcttcagattcttaggtaaatttattgtttttagtattgattatttctgggtttttagtaaatgttcattctttgattcanagaccgtgagtttacgttttaggattctggaatctgtatatgcttgaaccatgaagttaaagctaatctcgtgtaggggtattgctaatattgggcatgttgaatctatatagaacatga

SEQ ID NO: 143759 - DNA, 451 bp, Arabidopsis thaliana landsberg
gaaaaattatgaggttttttttaacagtttaatcataagtactaacgagaccaaagagattggttcggtcttcacggataatcgccgttgggaccaaaacgctccaatacggtcagtgacgtcaccgccggtcatcaatgtcaggccacacttatcctcttctctcccattccggtttcctcccaccaaaaaaaaaaaacttctttttatgttttgtttgtttctattccgatcttatcctacgccgtcactctcctcccggtgcgcacattagcaacactactcccgacgaatggagacgacgacgccgcagtcaaaaccaagtgtgtcccaccgaccgccgttgggaagagaagactggtggagtgaggaagcgacgaagacgctggtagaagcctggggcaatcgttacgtcaagctgaaccacggaaatctccggcagaatgactgg

SEQ ID NO: 143760 - DNA, 1068 bp, Arabidopsis thaliana landsberg
tttggaaagaataaagcaacaaggattcatcgatattaaagaaggtactgccatcgctctttggtcttcctgtactgtcccagatcagtactctagtgtctttttatcaattttctggtcttttacaggaaacgctgggtttcgtgttaccgaggagagcttaatggaaaggttaaactctgatatgcatgaagcttgcctcaagattgacaaagaatgcaggtgagatttgctgagttctctctaactcatatcgcatgtttgggattgaaacaaacgatgattgattgtaatggcagggtcttgacggttcatggctcggctgacgaggtaatacccctggaagatgccaaagagtttgcaaagatcataccgaactacaagctggagattgtggaaggagctgatcattgttaacagagacctcgacttaataactttgttcactcagtgattcagactacttttatcttttatgcaacaacattgtattgacatctctctgaatttagtagtatcaaacagaaaatagattccaagtttgtttactggatgagaatataatcagcatcaaagacatctccagcagtaggagagaggttgtttctacggagttgggcatgagtctctgcttcgtgttgaaatatcttaaccacgtcttgtagctccagctttctaacttctacttgttcttctgtaatgggttttttgagccccaagtataccaaaccaaccacaatcagaatagccccaaggagaaccatcagaaaagtgaatagaccaaatgcataaggcgtgttctgcgcccccgggatcccatccacattgatcccaaacagtcctacgatgatggtaagtacaagaccacatcctccgaagacggccaagttgtggcttactctcaagcttttgtcctgaaaatgcaaactggggttttagccaaatggatccattatgctagatttatgagatacaattttaattttgttcggtggagtaagaacctgtaaccaagcgcggacactgctttgcatgacatcttgaattgtgaagagacgtccacgaact

SEQ ID NO: 143761 - DNA, 548 bp, Arabidopsis thaliana landsberg; identical to SEQ ID NO: 12676

SEQ ID NO: 143762 - DNA, 1422 bp, Arabidopsis thaliana landsberg
ctctcctgtgtggtggtgctttttgacttttttttatttatgtaaaatgcttgaaacatgagcggggggggttatctaggatgggaatgctggagaggaattcagtagagaagccgttgagcgtgatgataggcgtttaactgagttgggtagacggactgtggagatatttgttcttgcacatatcttcaggtaataaggcataatttttcctctttgtttttttatttggtgcaccaggcataattttgcctttgctttaaaatttccatacaagtcaatcataagcacataatttgtttacaagctaagacatgcgtgacgatcttattctgaaaccgctgatagtgtttattttgtatttctggtcttctggtattgtgtgtctttgtgttcttagctgtacctcatgtatagcactgcaatctttctgagaaatgcagcaacaaaattgaagttgcataccaagaagctattgcatggaaaaggcaagaagaacttattcgtgaagaagaggaagcgtggctggcagaaagcgaacagaagggcaaaagaggagcatctgaaaaagagaagaaatctaagaagaaacaggtccgtccttacacttctgttacttccaaaatagataatgccattaacgactagttggggtgctaatggagattcttattgttttggaactcataggcgaaacagaaaaagaacaaaaacaaaggaaaggaaaaaaggaaagaagacaaggtgagaacccaaacagaagaaagggaaattgagaaagaggaatgtgtgagagcgatagcagaatcgtcagctgaaaaacctgacacttttggagatgtctctgacgtgtctgattcagtagatagttcagctgaaattcttcagcttgattcagaagatagagagaatagtcctgttcattgggaaatggatgcctcagaggttcatcctccttctgcaggagacactagcagaggaagaggcaattctttttctatacctaatggagttgcagaaagaaagggtctgtccacaatggatgatagttcttccccctgttctaatgactcgattcaatcaggggtagccaatgggtcatacaaagggaatgtattaaattgccaaagccaaaagtggtttagcaagtaagtaaactttttttgaactttccttaaagttatttgtttgttccacatccggataacataccttgtgatgtgcagtggaaaaatacaaccaggaaaagtatctgattccaacagtttagccagtgaaaaagagcatcaaccttcaagacttgcatctgaccctaaaaatcagagccattcttctgatatacgcagagttggtgaagctgacatagttatctcccacattcaaaaaccagagagccctaaggaacgtagtcctgttagcaag

SEQ ID NO: 143763 - DNA, 904 bp, Arabidopsis thaliana landsberg
aggtattgtacttggtttcttaatctctctacttaggcaacttatgccctttacctttatctcagaaaaattaatgaacatctcttttaataacagagagggaacagtgttggagatgctggtggtgcagcagatagagtattgaaccagcttcttacggagatggatggaatgaatgctaagaagacggtcttcatcatcggagctacaaacagaccagacatcattgatcctgcacttctgcgtcctggtcgtctcgatcagctcatctacattcctcttcctgatgaggagtctcgttaccagatctttaagtcttgcttgaggaaatcacctgtggcgaaagatgttgacctgagggctcttgctaagtacacccaaggcttcagtggtgcggacatcacagagatttgccagcgttcttgcaagtatgcgatcagagaaaacatcgagaaggatatggagaaggagaggaagagagcagagtcgccagaagcaatggaagaggatgaggaggagattgcagagattaaagctggtcactttgaggaatccatgaaatacgctaggagatcagtgagtgatgcagacattcgcaagtatcaggcttttgctcagactctccagcaatcacgtgggtttggaagcgagttcaggtttccagatgcgccgacagggactactggagctttccctggagctgctgccacagttgggggagtcgacccgtttgccacatccggaggagcagcggatgatgatgatctctacagttgaaaggtctgatcagaccctgtgactactctctttagtctttaactttgttctgcttgaaaaactttcgatggtctttgttgtgttttatttataagtcttttgtatataatcgttgagactctagaac

SEQ ID NO: 143764 - DNA, 630 bp, Arabidopsis thaliana landsberg
ctcttcaacgaaactagccagagagatgacgagcaagattctagttatcggagctacaggtctcatcggaaaagtcctcgtagaggaaagcgccaagtctggccacgccactttcgctctggttagagaagcctctctctccgatcccgttaaggcccaactcgttgagagattcaaagatctcggcgttaccatactctacgtacgtagtaatcctcttctcatgcttgtgcatgtcttattctaaccttaccttctcaaacactgtatccaatctttaagatcttaattaagttccgtttcatcttttaagcatttatggaaacttatttaattactagtagtagttaagttggcttgatttttgattatatgtgattttagatgaattttcaaaaaaatgttaggaaaatatattttaaattgttggaattatttacaaaaagtagttactaacttttaaagtttttttttaccaaatcatcacgtgaataatggtagattttactaattaatgacgacagggaagtttaagtgataaagagagcttagtgaaggcgattaaacaagtagatgtcgtgatatcagctgttggtcggtttcaaactgaaattcttaatcaaaccaata

SEQ ID NO: 143765 - DNA, 481 bp, Arabidopsis thaliana landsberg
gctctcaaagttcaagtcctacctaagcaccagtcattgccctacacagtcacgaaggccaagtcgaaatcattgatcctgctagttgtcgtttccgtgactatcacgttagggttattattatatgttttcaactcaaattctgttatatcttccggaagtttgcttagtcggagatgtaagctccggtacagcgtccttatcgacgcagggagttcagggacccgggttcatgtgttcgggtactggtttgagtccgggaacccgttttcgatttcggagagaaacattacgctaatctgaagttgactcctggtttgtcttcgtatgctgataatccggagggagcaagcgtgtcagtgacgaagcttgtggaattcgccaagcagaggattcccaagagaatgttcaggaggagtgacattaggttaatggcgactgctgggatgagattacttgaagtgcctgttcaagaacagat

SEQ ID NO: 143766 - DNA, 1440 bp, Arabidopsis thaliana landsberg
gtcgttcggaacaattagtcaccggcgtgtttccgcaactgaaggaaacccatcggcctagaatcatcgccgtctctgaccagagagtctcctcttcttcatatagccaagccacttgacctttcaagttactaccatggaccaattcaattatgtggtaatccaaaataattgtttttctttttttggcatcaagtgtgattttttttttgtcaatagatatcttcttagctcaaaaaagaaaaacaagtatcaaaaaaattacaactttacgatttgcttagaaaggagaagacatctggagcaacaggatttacaaaagttattatctttatcgatttctcttcttcctagacccaacagacgaagagaatttgttgttggttgtctctggtctcttcgtctaggttttttttgggttattaaagatggtgaggatcgtgagaagttgtttacagtccatgttaaagctcgtgaattctctaattgggatggttgggattgctatgattctctacgctgtttggctgattaggcaatggcaagaacaaatgggaaatcttccttttcctgattctgatcaccctgttccgtggtatgttgaaagtttcatctttttgtgtgtttgatcactttctggctttttgggcgtttgtatctttgtttaaattccgagtggttggagaacggtactgagcaatttaggcagagacaagatcatagatttctgtaagatttgaggtgtgtggaagctagaagctgttgttaggctttggaagagacagttttaagattcttgtaagatttgtctttcaaatttgatggcactggaaatgagtgacacatcttgttggggtgaaactatgttttttcccgtggaaagatcataaattctgtaagcttgaggtgtctagaagtagttaggctatggaagagatagcttcaggattcttgtaagatggcactggaaagtggcatatcttgtttttgtgtgagggggaagttatcattgttatgaaatatgaagtatgccattgctgatgaaaatttctgaaccaatcttcttatgagcttcaggttcatttattcatttcttggtctcggggccattctctgtgttgtcacttgtgccgggcacatagctgctgaaaccgtgaatggatgttgcctttacttggtaaacttctgttttttatataagttgttcctgcaactctattgatgaattgtagcatcactacgttagcctgtttttctttggtagtttcatcattccttcctgaattctttcttgtgtttctttttttatgtgtataatgcatctgtttattggctcatcgactgggttcagtatacgggattcatagtcttgctaactatggttgaaggcggtgaaactgccgatatctttctaaaccgtgactggaaaaaggtatagtt

SEQ ID NO: 143767 - DNA, 999 bp, Arabidopsis thaliana landsberg
gaagtaagaaagatgtgaagaatagctttaccatcaactttgttcagagttatgtcgtttggatgcgtagtggtggctcaagccttcattggccactccagtgaaacgggtctcgctgcttatgctctccttcaaagcactttcattcgcttcatctacggtattatggtacgatccatcatatattatatgttaaaacaatagtactataattttcgtccaacaaaaaattcattacaaaaatagatattttgttctcgctaaagactttttggtactaatagtaatatgttgtggtttcacactgtttttaacatttaagcagaaagctatatgaaaaagtaatgaatgatttttttttctttctgatataatgtaatgaatgagtgtttattgtattttcaactcataaccaattatatggtagagaatatgaattgcatggtaatattattattacaggcaggtatgtcaagtgcgacagagacgttatgtggacaagcatacggagcagaacaataccacatgatggggatatacttacaacgttcttggatagtagatacctttattgcaactctcttcgtccctttcatcgtcttagcgggtcccattctccggttattaggccaaaacgttgtgatctccgagacagtagacgagatttacccatgggtcattccttatctctacagcatcgtgttcaccatgacaatgcaaatgtacctccaagcgcagatgaaaaacgccatcataggcattctttcgaccctagccttggtcttggacattgcggccacgtggtggtgcgtaagcgtgatggggatggggatccatggtgcgcttctagggcttaatataagctcatggtcggtggccatagccgagtttgtatatgtgtttggagggtggtgcccgcatacttggaccggctgtagcactgctgcttttcttgatcttattcccatgctcaagttatccatatcctccggcttcatg

SEQ ID NO: 143768 - DNA, 685 bp, Arabidopsis thaliana landsberg
ctctttgaacacatccttccctctcctcctcctccttcccccaaaaaacctggagaaccatgcagttgcaatttcctctttaacccatttcaaagattcgttttttttttttttgtaaatctctttctcctttggcgaattcgtattccttcttttccaatgtaagttcttcttccttgataatcgaattcttcttttgatcttaaaccaatcactactccgtcgttgtaatcgtaattctcgcttcaccgttgttcggttataagatcattcatcagaatcggattccattatttcggtgacctggattttgattttgattttgattcttgctgctatgatcacgatcttgatatgtaaactctcttcttcttttttctgattcgatgaaatcaggagttctagagacagaggatcaccttcttcttcttcgtcatcttcttcggtaccaggaatagaaaagtataatgaaaaggtgaagaatcagatacaagctcttgttcgtgttattaaagttgctcgtacctatagagacgacaatgtcccttcccttattgaacaggttactactactactaatactcataggctttttctaccaaccaaatgaccaatgattcattatcaaagatcaaacctttcgtggaatttgactttttcaggggctttatcttggatctgttgc

SEQ ID NO: 143769 - DNA, 507 bp, Arabidopsis thaliana landsberg
ttcgtttttctttacccttttgatttgatcttctcttctcggttgaaattagggatttctgtaaaattgtaatgtgtttctgagtaaatcatgagcaagcccgaagaaacttccgacccgaacccaaccggacccgatccgtctcgatcttcctccgatgaggtcaccgtcaccgtcgccgatcgggctccgtctgatctcaatcacgtttctgaggagctaagtgatcaattgaggaatgtgggtttggatgattctgcgaaagagctgagtgttccgattagtgtccctcaaggtaatgtagaaacggattcgagggcattattcggcagcgatcaaaaggaggaagaagaagggagcgagaagagaatgatgatggtgtatccagtgagacctgattcagaggattgttcgttttatatgagaactggaagctgcaaatacggatcaagttgcaagttcaatcaccctgttcgcaggaaacttcaagtacttctcttctatcga

SEQ ID NO: 143770 - DNA, 1374 bp, Arabidopsis thaliana landsberg
gttgcttatctgttcaaaagatggaggcacttcctgaacaggaacgcatcgaggtcgttttttgcatccttttgcctcagttccttctatgttttttatcactggatgcaagctggcagatacaactgtattctgacagttatctaaatcttactctttgtacagctgggttacagggattttttgcaggcacccctgcaggttagcctcttttcataagcaattctgatttctatccgttcatcatgataatttaccctgtatgaaaatgctctattcttactgtaaagagcctctactgtttttttttaatgaatacagcctcttatggacaacctcgaagcccaaacctatgagacgtttgagagagactctgttaaatacatccaagtatgttgcatattctagttttttcccctcacatcttaaattttaactcctttggtttctagatttcccctcgtctatttctgcttcggtttgcagaggagagtggactgatggatgaatcatgttgaacaatttaatatcatagcctggtttttttttaaagcatgcttaactttcgtccatctttgtgttgttagtatcaaagagcagttgagaaagccttggtggacagggtacctgatgaaaaagcatccgagttgactactgtatgtcatatgtcaatgttttgcttacaaagtggcattttcatttataagttttttttctgctattcatatgaaatacttcagtaggactgaaattttagtttttaggtcctgatggttgtgggggcaggaaggggaccccttgtgagggcatcgttacaggtaaagtcctgatgcacaaggagacattgaaaattcatttgtttcattaatcaaatgtgttcattgtttcctttaccaggcagctgaagaaactgatcggaagttgaaagtttatgccgtggaaaagaatcctaatgccgttgtaacactccatgtgagttgtcagcactgagtcgattaaaaaattgctaattttcctgtgatttcattcggacgtgcagtgtggtttctaattaactcagagcattgttattttttctgatagaatttggttaagatggaaggatgggaagacgttgttacgataatatcctgtgacatgcgtttttggaatgctcccgagcaagctgatatattggtcagtatgtacacatttttgtagctaatactcatgctgacattatatacagttcatctaattctcgtttgcctcttctatgcaggttagcgaactgctgggttcatttggaaccaatgatctttctcctgagtgtcttgatagaacccaaaagtttctgaagccagacggaatttcaataccatcctggtatgtgta

SEQ ID NO: 143771 - DNA, 1300 bp, Arabidopsis thaliana landsberg
tgttcttttataaaatatgcatgtttccaatatgaaccaggttactagtaatgtacccaaaaggaaacggagatggaaaaggaaattcgttggctttgtatttgtttgcatccgattacgtcaccaatggtcctaagggtggaacattggccatctataaattgagagtgttggaccaactcaatcgcaatcactgtgaaactggtatgtgtatatatatatatatatatatatacacttaattcactaatttatacttttttctaagctttacattttctatatgcatatacatataagccttctgctgataaatagttacatgtttgataaagagtgtagatattggtttccttataaccctgttaatcaaatggattccttatggggacgtcccaagtttttgccgctggaggaactccacaaatcttcgaggggatttctagtgaacgatcagatatatatcggtgttgagatctcaattgtatccactactgagtatctctgatgcgcattaatggattcgatcaagaccagaagaatgaatagctcatgttgaacctatctaccagttatatattctgccatattgtgatgtgtgtttagatatcagtgaatgatacaaacatgcatgtttatacaaaataataaaataagcgacggatcgaatcggttgattgtattgaatgttacaataacgttcaacagaatccgttgctgcaaattctcttatggagaagaatgcatgcttgtctataagtactacctttcttgtttgtaataacaacgatatatctatgtgtgtgttaaatattttattccgactcttaaaaaatataacatatgaaagagattataaaacatatatatatgtttgcatctttataaacattatttctcatagtttttatttatttaagatatatatcattcacacatttctaaggccgactctttggcatgttgtccacatttgtagtttcatttttgtaggttttgtaatttcggtttataattttccaaccctacattttaatacaagtttagagggtgaccaagaaaactatgattcacatatgcattgcatatttattattaactgttaagcatatctctttttttatagtccgctatatattgctgttagattctcgataatatgggaattaaatttttgtgatttagagtggtttttgaagatatatgtcgaggcattaggcatatggttcctgatataactcgcacctacctatcttatgtaggaatctatccccttaagttacgtcgatcggactactag

SEQ ID NO: 143772 - DNA, 800 bp, Arabidopsis thaliana landsberg; identical to SEQ ID NO: 57777

SEQ ID NO: 143773 - DNA, 713 bp, Arabidopsis thaliana landsberg; identical to SEQ ID NO: 13449

SEQ ID NO: 143774 - DNA, 1120 bp, Arabidopsis thaliana landsberg
atcattgtggttaatggttatgttaatagttcaaacgaattcgaaccccgtagaattcgcaaggaatatatggtacatttattttcttcctttcaactttattcatggctacagaacatatatttccccataatttataagtataatcttgaaatccatataaatgaaacttcccacaaatagataaataaaataagcattgatgggaaaccacagttcacgagaagagtgtttgtccctaccacaaagcaacaagaaaggattataagagaggagtcacgggcactgaaagacaacatcaaattcatagaataaaaagccaccttaattagttagttgtgcacgaaactattcacaacacaaaatttaaatgtgcacctctcagtggactctcatcattcatcactcgtcaaaattcccattaaaggtctcaatttctccatcaagatcgaaacttttccacaaccctttacgcgtggcggcgccgccgtctgtacccacttcggattcgacggaggagaagcggatcgaagaagaatacggcggagataaggaagaagaagggtctgagtttaagtggagagatcattggtatccagtttctttggttgaggatttggatccgaatgtgccaaccccgttccagctcttgggtcgagaccttgtactctggtttgatcggaatgatcagaaatgggcagcctttgatgatctctgccctcaccggctcgctcctttatctgtaatctctctctcttggaagaaacagttcaagtagtttattactgtgatttggatttggattagaagaataaattattgtagatgattgtttattgtaaagttttgatttttaaagtatatcaattaggttaaaagcttcaaagaataaaatattagggtcagaatcagaacagttttgtgttgttgttattgttatgacttatgagcaaaaagaagtaaactttgttgtgtatgtaaccaaagttttgagcttgactcattgatgtgtttgtgtatgcgttgatgcattgtggttatgtaggaaggaaggttggatgagaatggacacttgcaatgttcgtatcatggatggtcatttggtgggtgtggatcagca

SEQ ID NO: 143775 - DNA, 1536 bp, Arabidopsis thaliana landsberg
  unsure (1)..(1536): unsure at all n locations
attatggattgcttattcaagcaacaagcaatttttatcagttgagctttctctttagatgtatttggctgaactcatcatttctcttgattaggctgccaaggatgttgtcttagctgaaaagcccgtgatttctgacgactcaaaccagctagacccatcacttcttgatgagcttcttacaaatatttcgaccttgtcctctgtgtaccacaaacccccagaggcttttgttacccgcttgaaaacgacagttcagaaaacagaagacgaggactttgcggaaggaagcgaagcaggatactcatctagtaatccggttgatagtgcagcttctcctccaggtaatatcccacagccttccggaagacaaccagcaccagcggtcccagctcctgtacctgatctgctaggtgacctgatgggattggataatgccgctattgtcccggttgatgatcccataactcaatctgggtgagttatgtcttgattaatgaaactttctattgttgggactagtttattacgttaggtcaatttcggttgcctagttcatactgaaactcatcaaatcttatgaacttgatcgtagtcctcctctgcccgttgtcgtcccagcttcaagtggtcaaggtctgcagataagcgctcaattatcccgaaaagatggacaagtattttacagtatgctcttcgagaacaactcgcagtcggttcttgatggtttcatgattcagttcaacaaaaacacattcggccttgcagctgctggatctcttcaggtaactctatctgaatctaattaacgtctgaaactcaggtctgaatcattgaaaccaatatcnnnnnnnnnnnnnnnnnnnnttccgcctttgcatcccgcaacatccgccaggacaatgctacctatggtcttgttccaaaacatgtctgctgggcctccaagctcgctcttacaagtcgctgtcaaaaacaaccagcagcccgtgtggtacttcaccgataagattatacttcatgctcttttcggtgaagacggtagaatggaacgtggaaccttccttgaggtaacatacttcaaaacttgagctgttcatatcggttctggtttaggaaaatagtgacgactgtgaaaccaaatcggttagagataaatttatacggtttgggttttcatttggatatatctttatgttttcaaagattttaagtttttgtttgctttttaatcagacatggaggtcgttaccggactcaaatgaagtcctgaaagaattccccgggatcaccatcacgagcgtcgaatcaactatcgaattgctcacagcattcaacatgttctttatagcaaagcgcaagaacgggaaccaagacgtgatctacttatcagccaaagatccacgagatgtaccgtttttgatcgagctcactgcaatggtgggccaaccaggtctcaaatgcgcagtgaaaactcccactcccgagattgcgcctctcttcttcgaagctttggagcttctcttcaaggcttga

SEQ ID NO: 143776 - DNA, 1639 bp, Arabidopsis thaliana landsberg; identical to SEQ ID NO: 10782

SEQ ID NO: 143777 - DNA, 676 bp, Arabidopsis thaliana landsberg
ggcgcttcttaacgcatatttcctggcttatgtaatttcacccaaacttgctcatcgtatcactggatacttagaagaagaggctgtaaattcttacactgaatttctcaaagacattgatgccggaaaattcgaaaactcgccagctccagccatcgcaatcgattactggcggttgcctaaagatgcaacgcttagggatgtggtttatgttatacgagctgacgaagctcaccaccgtgatattaaccactatgcttcggtaaggagttgtatagtttatttgtcaaaatgataaaacaatgtgatattggtataaaatgtaaatttcgttacaatatggaattttatgtgtgcaggatatacaattcaaaggacatgaactcaaggaagctccggctcctattggatatcattaaagattatgtgacaaagtcacaaagctgtgtatacatctatgaacatatgttgttgtggatctccatgatatttttattttatgttttcgatttatttaaaactgttattcgtttttattagctcaatctggatatttaaaccatattattttgttacgatttatgaacatagtactactcatgtgtgtgtaaaagatcatactgcctggacacgaagcggatatccggaaaaattataatatttgttttttgattcg

SEQ ID NO: 143778 - DNA, 1726 bp, Arabidopsis thaliana landsberg; identical to SEQ ID NO: 27637

SEQ ID NO: 143779 - DNA, 777 bp, Arabidopsis thaliana landsberg
tctaagtcatgtacgtttggttatgtctattgctcagcgttatgataatttaggagctgaaatgtctgaccttgttcaggtaatttttccaagtcattttgtgtactctatgttataccttttcatgaacttttctctaagatagattcttgtttttttactatgaagggtggtcttatcggacttttgcggggaatagagaaatttgattcttccaaaggtttcagaatttcaacttacgtatattggtggattcgacaggtgagaataaccattgtttgtgcttgccaatatggttagaatgtaaaactgacaagtgatactctttgtttcaaatttctaaaagggtgtctcaagagcattagtggacaactcaagaaccttgaggttacctactcacctacatgaaagactcggtttaatccgaaatgcaaagcttagacttcaggagaaaggaatcacaccctccattgatgtaagtttaacatttaaacaattatggtttatcatgtctacattgtgtatgcttatagtgattgttatttccagaggattgcagagtctctaaacatgtcgcagaagaaagttagaaatgcaacagaggtaaagaaaactaaattttagttcatgtccttttcgttttcgaggggatctatgtgtatttgtgcttactctcttgcatttgcaaaatacaggctgtaagcaaagtattttctctagacagagatgcatttccttctttgaatggtctccctggagaaactcatcacagtgtga

SEQ ID NO: 143780 - DNA, 875 bp, Arabidopsis thaliana landsberg
cgagaagctgaatcatcaatggctctggatgcattcttcttcatcgtctctctatttcttctgtttccgtcaccatccgcgtcagaatccactactcaggtctgtctttgaaccttgtaataatgatcagatatcagtttccgtcgagctttgtctccttgatttgtttgaagtaacactgaaagctccgtccacttataacatctagttcttaacacagtaactttcaagaacaagtttggagcttgatttataattttctggaaaaaaagctatccacatgtgtctacaatcgaaaatgatctctctgatgtgttttaaagcaattttgtagtgcagggagagagaatggtgtgggatcttgtggggtttcatcgacgaggattttgattaaaggaggtactgttgtcaatgcacaccatcaataacttgctgatgtttatgtggaaaatggtattattgtcgctgtgcagccaaacattaaggtctaactattcccttgtaatctgtccttcatcttttgtgagaatctaaattccaagtttgatctgtttgtttttatgtaaacaggttggggatgaagtcactgtcctcgatgctactggaaagtttgtcatgccaggttaatcaattcatactagttgatactttccaaaattttagccttttgttttgaatccttaactagtttcagttctaattaagaatggttagcattttcatcttactcttgtccctgatgtcaataggaggaatggacccccacacgcacctcgccatggaatttatgggtaccgggactattgatgatctcttcagtggtcaggcagcggcattaggtggtggaacaactatgcatatagactttgatatac

SEQ ID NO: 143781 - DNA, 1091 bp, Arabidopsis thaliana landsberg
atgggtagctcaaggtattttaaactctagaggaataaaatggatgttagtgaaatttgtcagcatcatagacaagatcaagttggcacaacttgaagggtcctgacaaaatatcttaagttgcctccataaatgtttaatggataagacttggccccacagagttaaaccagagagacacagagagagacttttgacacctcacccatggctgcgttaacacatgtttaggattcctttctttatatagccaacaatatcatcaaaactttttcttcaaacaccacttgcagtttttcttattctcctgtcttgtctaaagaaaaaagagagaggaagaaatggagacttttgaggaaagctctgatttggatgttatacagaaacatctatttgaagacttgatgatccctgatggtttcattgaagattttgtctttgatgatactgcttttgtctccggactctggtctctagaaccctttaacccagttccgaaactggaacctagttcacctgttcttgatccagattcctatgtccaagagattctgcaaatggaagcagaatcatcatcatcatcatcaacaacaacgtcacctgaggttgagactgtctcaaaccggaaaaaaacaaagaggtttgaagaaacgagacattacagaggcgtgagaaggaggccatgggggaaatttgcagcagagattcgagatccggcaaagaaaggatccaggatttggttaggcacttttgagagtgatattgatgctgcaagggcttacgactatgcagcttttaagctcaggggaagaaaagctgttctcaactttcctttggatgccggaaagtatgatgctccggtcaattcatgccgaaaaaggaggagaaccgatgtaccacagcctcaaggaacaacaacaagtacttcatcatcgtcatcaaactaatgggggaatagtgatgtttaattagtatatataggttaatatcttaagtatgtgaagcatcatgtatagagccaagaacctgttagactagtgtactgaaaagaactcttgcaaaatatgtactaaagagttcctgtaacaatg

SEQ ID NO: 143782 - DNA, 727 bp, Arabidopsis thaliana landsberg
agaaagaagtttctacctcgggaatccatcagactcattctcagaattctctacttctgctgagaaaccaattagcaaaggaagaagaagggatgaggaagaggaacccgagtcacctaaagaacatccagtaagtagcaagattgtcataaagttagacaaaaccctatatataatttagtgtcaagattaccaattgagattcttgtcgtgtaaaaccaacagggttggatactagaacctgaggaatcaccaaagaaaggaaggaaggaaactatagagaaatcaaaaagcaatgagagcgatgaagacccacgtctcgaagatttcaagtgtcccatttcaatggttaggatatttgaagtatatatatatatatatatatttccttgattttcagctcttgaaacaaaactagacttgttccacatcatcaacgctgttgttcgatttcatatgtgatgttgtaggagataatgcgagatcctcatgtggctgctgatggtttcacctaccaggcagaggaattcacaaagtggctaaagtcaggaggtcgaacctctccaaagacaaacaagccgcttgagaatcacaatctcgttccaaatcacactcttcgtataatcataaaagattggctggagaagaacccaaattataaacgttgattcatctatctatatgagaaaaaacaagaaagtcaatgattatgttgtgatttttggaa

SEQ ID NO: 143783 - DNA, 564 bp, Arabidopsis thaliana landsberg; identical to SEQ ID NO: 24080
  unsure (1)..(564): unsure at all n locations

SEQ ID NO: 143784 - DNA, 900 bp, Arabidopsis thaliana landsberg; identical to SEQ ID NO: 11568

SEQ ID NO: 143785 - DNA, 795 bp, Arabidopsis thaliana landsberg
  unsure (1)..(795): unsure at all n locations
caatggtggattggtctacactaccgaaggatcttttagacctaatttcaaaatctctagaatcttccttcgatctcatccaattccgttccgtttgttcttcatggcgatccgccgccgagccgaaaagtcctcttccaacacatcatctcccgatcctccccgataacggggggagtctcttccctgattccgccgttggtttccgtctctcgcagcggagtatcttacttatcaagcctcatgaaccgtgtatcgaatcggattcgtttggatggttgatcaaagtcgaggaagatcttaatgttcctcgtaaggtgactcttttagatccgttatgtgatacaagaaactcaattcctgagaatttccctcgtgttctcgatatgtccaagtttaaggttcgagaattgggtcgtgaattcaagcttcattatttcaatactgttggtgatattgtagagagtttgtatttggagaaagctgttgttaagtatctagattgtgatggagattataaatttgtgttgcttacgattcatgtttcggggaagttagctgtgtttaggtcttgggatcgagcatggactgtgattaatgacatgccttctccttatgatgatgtgatgttgttcgatggacgtttctttgcggttgataacaacggnaggactgtggttgtggattacagttccttgaagttgacgttggttgcgactcctgtcgtttggtggtgataagaagtttttgataaaatcatgtggtgaaatgttgcttgttgatatgtacttgagc

SEQ ID NO: 143786 - DNA, 424 bp, Arabidopsis thaliana landsberg
tggtcttggatttcagattctgggtacaggagaactaagcatgaagctcaccttcaaagctcgtgccttctcaacacaagcaaaagagaagcttgaagcttcaggttgtacactcactgtgttgccgggaagaaagaaatgggttaagccatctgttgcaaagaaccaagcacgagcagatgaatactttgccaagaagagagctgcagcagcagaagcagcaacttcagagccagcagcctctgcttaaattacttcagtttcaagctctttttagtgttgtaaagctgcagagaagataattgtctatgacaaatgttaattacaattcctttgtctttttgtatggtgaagagatttacattttgttgtttgaagagtcattatcaaaaagatatttaaacggtaatgaaatattgaacat

SEQ ID NO: 143787 - DNA, 2155 bp, Arabidopsis thaliana landsberg
ccagctgggggatcaggggccacaatttcagtctcactctcctcaacatcatcagcaacaatctcaatcgcctcaacatcctaaccagaaccaaacagtgtcctttcagaatcagcagttaccatttcagcttcatcaaccacattttgctcaatctgttcagactcagtctcagccacagcagcaaaggtctcaatttgatcagcagttattgcaggagcaacaacaagcatcttggaggcaacaggttggtcaagagcatagtagtggttcgagtggtgactggaaaagaccagtggaagaagtgaggttgattaatttgaacaatgcaactgaaagggttcaatctagtcgtcgttttgctgagccagagcggccgcctagtagatcctttgagggatcttctcataggactccttcaactgaattgacatgggcgtctaagcctactccagtgtctgagcctgtacgtcactctgagcctgtaccgtggcaatactctgagccggctaggcaatatcagttatctagtaggtctagtgaagctgctcaactctcgctgctgccttctgtttctgactcatctcatgcatctcagccaactcgctcgaatcagtcacatgcagtctctaaaccgcagcctgtttctaagccacatccgccattcccaatgtctcagccaccaccgacctctaacccatttccattgtctcagccaccatcgaactctaagccgtttccgatgtctcagtcatcgcaaaactctaagccattcccagtgtctcagtcatcacaaaagtctaagcctttgctggtttctcagtcatcacaaaggtcaaagccattgccggtctctcagtcattacaaaactctaacccattcccggtgtctcagccatcatcaaactctaagccatttcccgtgtctcagccacaacccgcttctaacccgctcccggtgtcccaaccaagaccaaattctcagccattctcgatgtctcaaccatcatcgactgctaggccttttccagcatctcagccaccagcggcctctaagtcattccctatctctcagccaccaacgacctctaagccatttgtgtctcagccacccaatacctctaagccaatgccggtatctcagccacctacaacctctaagccgttgccagtgtctcagccaccaccgacatttcaatcaacctgtccctctcagccacctgcagcctctagttctctctctccactgcctccagtcttcaattcaactcaatcattccagtcacctcctgtttctactactccctctgcagttccagaagcctcgactattccttctccacctgcccctgcgccagtgtctcagccaactcacgtttttaaccaaaccccacctccagaacagactcccaagagcggggctgcaagaaccgattctgaaccggaggtttcgagtttctggactacttgtccatactgctacgtgctttacgagtatcccgtcatttacgaggaaagcgtgcttaaatgccaaactaagagctgcaggagagcttaccaggcagtgaaagttccttctccaccgccagttgccgaagaagatagttactattgctgttggggtttctatccaataggattctcagaagtggtgactaaaatcccagtcactggtttacatactaaaatcccagtgagtgatttacccaaatcagcacccaaaaaaccatctccaaaggtatactattatgacgacgaagaagaagatgatgattcatacattggttctgatcctagtgaggacgacgacgatgatgactggctgatgaatggtacaaaaaggaggaagaatgtgaagcagagtaaagctaaagcaacaaccaaaccaaaacgtcaaaaagtaattgaggttgattgagtaaaatcagtcgggtagggaacagaaaaagaacaacttcagtaaggctctctctgttcttcatttctggctctgttgttgtatttttagttgtagtagtttctgtttatgtagtgtaggcgtgtaggtgtagcgtaatgttgcttgcttccgcggttaacatgttctgcttaggctgggtctgatcggtctaagctattcgggttaagtttagaagtagtggctgtaacgtgtatc

SEQ ID NO: 143788 - DNA, 400 bp, Arabidopsis thaliana landsberg
gttttgaatgatgtattttggcataattaggatgtaacaatgaagataatctcgttttcgcaacaaggacctcgctctatttgtgttctgtcagcaaacggtgttatttcaagcgttacacttcgtcagccagattcctctggcggcacattgacatacgaagtatgtagatttcattctcatcgatcgatcaaatttttgttgaaagtgtaagatgatttatagtgttaattttcagggtcggtttgagatattatcattatccgggtcattcatgcctaatgattcaggcggaacacgaagtagaacgggaggaatgagtgtatcgttagcaagtcccgatggacgtgtagtaggcggtggcctcgccggtttactagtagccgcgagtccggttcag

SEQ ID NO: 143789 - DNA, 1379 bp, Arabidopsis thaliana landsberg
  unsure (1)..(1379): unsure at all n locations
tcaccaaccaacnatttcaggtaaacaatcgggcataaaaatacgcatctagatctacttgaaggattctacactgatgatgatgatgatgatgatgggtccaagttcttacttgtcatggtttttgggatgaaaatgtaaacaggaaagggttggttcgctaagagggggcatagagttcatggagctatgtggatttgagaaaattgaaggaggagagttcttgttcttacctagagacaagatcgattcagccatcataaactcagctggaacagaactcaactccgccatcaacaaccctttctttggagttctttaaatccatgcctcttcttatgaaactaaaaaaaaattcggatatctctatgaataatactggctagtgacattctttttgttttgcttaaataagtggaaaatttggagagcagaactaaaagcttccattactgtttaatccgtcttgttgtttgcattgtaacttttaaggtaaaaaaaatgacatttccatactgctttcgtctgaaccggttcgccaattaaccggtttggtatatttagagcaatacggttgaatccggctaagataagttgcccctagcccaatatataagagtctttttgcaccgcgagatctgatgactggtgagcgtttagactgaggtacgatgaaatcgctttctgttatttttaaaccgaaatcttctcccgctaaaatctattttccggccgatcgtcaagcctcaccggacgagtctcacttcatatctctgattcacgcctgtaaagacaccgcaagtctccgccatgttcacgcccagatcctccgtcgcggcgtcctcagtagccgcgtcgctgctcagctcgtatcttgctcttcgcttctcaagtccccggattatagcctctcgattntcagaaattctgaagagaggaatccttttgttttaaatgctttgatccgtggtttgacggagaatgctcgtttcgagtcttcggttcgtcatttcattctcatgttaaggcttggtgtgaaacccgatcggctaacttttccgtttgtactcaagtctaattctaaattaggttttagatggttgggtagggctcttcatgccgcgactttgaagaatttcgttgactgtgactccttcgtcaggttatcattggttgatatgtacgccaaaaccggacaattaaaacatgccttccaagtgttcgaagaaagtcctgatagaatcaaaaaggagagtattttgatatggaatgttttgattaatgggtattgtcgagccccggatatgcatatggctacaacactttttagaaccatgcctgagagaaattcaggatcttggagtactttgatcaagggt

SEQ ID NO: 143790 - DNA, 559 bp, Arabidopsis thaliana landsberg; identical to SEQ ID NO: 58535

SEQ ID NO: 143791 - DNA, 602 bp, Arabidopsis thaliana landsberg; identical to SEQ ID NO: 50586

SEQ ID NO: 143792 - DNA, 390 bp, Arabidopsis thaliana landsberg
tcactcgagtcacgaatcacccgtttaatcgattcgaatcattatcgctctccttcgaaacctatttactcagataggtttattccaagtagatctggttccaatttcgcgcttttcgatttggcatcttcttcgccgaataagaaagatgggaaagaagatggggctggttcttatgcgagtcttttgaaaacggcgctttttggtccggtgacgccggataaaagtcatgttgttaatgggttttctccgtcggggaatatttttaggtttaagacggccacgcacaggtctttgaatttgtatccgccttttgattctgatgtggttactggtgttagccctagtcctgttaagtctccgagcaagattcttaggtctccttataag

SEQ ID NO: 143793 - DNA, 1191 bp, Arabidopsis thaliana landsberg
tcgtgtctcgattttgcaaactatctctcgaaatcgtcctacatttctttcttcagattcattactgagcttcgctttctgggtttctatcaaaaaatttcacagatttcgtgtgtgaagaatcatttcaagccatgtctccggctaaaggtacgatcttttcattgataaccacttgaatcctcactggaacatgatggatttggatcttcttctactagactttagttttgctgaacccgctagtatctggtctcgattaatgttttctaatcatgtttcgttaggtgattagtttcaatatcttcctgattagcttcaactaagtgagattaatgtagtatccaaatgaattttgtctgtagacgtgtttctgagtattcatgtattgaagtcagatttgtatcaaagtattatatgatgcttaaactctctgttgtatgtaatatgcagttgatactaccaagaaggctgatcctaaggccaaggccttgaaggcggcaaaggctgtgaagtctggtcaagccttcaagaagaaggacaaaaagattaggaccaaggtcaccttccacaggccaaagactcttaccaagcctagaactggtaagtacccaaaaatcagcgctactccaaggaacaagttggatcactaccaaatccttaagtacccactcaccactgaatctgcgatgaagaagattgaagacaacaacactcttgttttcattgttgacattcgtgctgacaagaagaagattaaggatgctgttaagaagatgtatgacatccagaccaagaaagtgaacacactcatcaggtactttaaagagtatttttctatgaagccttgttgtgagattgattatgttcaatatatttgacactatggtttggttttgttacaggcctgatggaaccaagaaggcttacgtgaggcttacaccagactatgatgctttggatgttgctaacaagatcggcatcatctaagtctatctatctctgcagttataaagactattgtggttttgtctcttgtagtctcagttttgcttttaagatatttattattactatcatctggtaattgtagtattttggagcaaaaacgttttacaatacattcatgttgcagtttattgttgaattcaagttctatgtttttgacttatcaagattctcattttaaaa

SEQ ID NO: 143794 - DNA, 2348 bp, Arabidopsis thaliana landsberg
atggaccggtctcagcgtgtcggtatcttcacagaagacttcctttttttccaacaaaagatcctcgaacgttccggtcttggacaaaagacttacttcccggaggctctcttacgtgtcccgcctaatccttgtatgtctgaagcaaggaaagaagccgagacggttatgtttggagctatagacgcagtgcttgagaaaaccggagtgaatcctaaggatattgggatacttgtcgtgaattgtagcttgtttaatccgacgccttcgttatcggctatgatcgtgaataaatataagctcagaggaaacgttttgagctataaccttggtggaatgggttgtagtgctggtcttatctccattgatctcgctaaacagcttcttcaggtaattatttattcaatgaatttagtccatcattacaacttcacaactttttattttttgatactaagattcgctttcaattgaacattctgatataagaaataaaatcttgtgacaaagagaaaattaaattttatttaggtggggaggttgggacttttctagttttcttcacgtcatgtcgttatcttataaaagttggttactgattttatatgaaaaatggtaaaatctctagcttctattattactatttatgaaggttgtgccaggcttattttgtaggtaggtggtagttgtgaaaatttgaatgactatagattgtctttatagcaactacatatttggtatacaatctatgtgtcaatgtgtgtgtatacaatctatgtgtcattttcactatacaattacacgagaagaacttgacaatgatatgaaagaccaatttaaggttgggattagtcaattataaacattgattaaggtaaattatattcttttttttggtaagtaggtaaattatattctagtaagtacctatgaacagttgtacaaaattgataggtgacgtgtcatgtttagttatattcaatcgagaaaaggttgttgaacaatatcaccgaaaacaactaggttgttaagagtataagtttcataaataatcaagtacacgtaaggtcttacgtatggtgccaatgtgccatgcatctgatttttttttttttttggttctacgatatttacttttccaaaaaaattgtcaaatggcgaaaaaaaaaaaaattgtcaaacataaattatttttatttagaacaatgaaaaatagcaaaactgaaaacagtttttaaaaatacgttaaaaaatagacatacgtacacatagacattcatcgatttacatacagtatcatttgtcttcatatttttataattatatatatgcatatgcttttagagtcctaattttgtaatgaattgtaatatggactaataaatatgcgttaagggtcctgtcttttttttttttattgtaatatgcatgcaggtccaaccaaattcatatgcactagtagtgagcacagagaacataaccctaaactggtatttaggcaacgaccgatcaatgcttctctcaaactgcatcttccgaatgggtgcgccgccgttctcctctctaaccgctcctccgactcggccgctccaaataccaactcatccacaccgtccgtacacacaaaggatctgacgacaacgcctttaactgcgtttaccaacgcgaagacaacgacgacaacaaacaaatcggtgtctcactttccaaaaacctaatggctatagctggagaagctctcaagacgaacataactactctgggaccgctagttctaccaatgtctgaacaacttctctttttcgcaacactagtggcgcgaaaagtctttaatgtgaagaaaataaaaccttatattcctgatttcaagctagctttcgagcacttctgcatccacgcgggaggcagagcagtgctcgatgagattgagaagaatttggatttatctgagtggcatatggaaccttcgaggatgactttgaaccggtttggaaatacttcgagtagctcgctttggtatgagcttgcgtatagtgaggctaaaggaaggattaagagaggagataggacttggcagattgcttttggatccggttttaagtgtaatagtgcggtttggagagctttgagaactatcgatccgtccaaggagaagaagaagaagactaatccttggattgatgagattcatgagtttcccgtgccggttccaaggacatctccggtgacatcttcctcggaatctcgatagttaactttttcaaattttctttcatgtataatactatggttcacatcacatctatctcaaaatcttcaatccatatatttatgcacgctaaaaaaaa

SEQ ID NO: 143795 - DNA, 1136 bp, Arabidopsis thaliana landsberg
aatttctcaagcttcattcgtcagctcaacactttcgtgagtttcactctaacgaaaactcatttagtctcaatgtgaatgcttcaattaattcgtctggtgaattgaatcattcttttgtagttggttagccaatttcgtaattttctcataatttgggggttggtgagaaaaccttctagaagctgagaatgttcttgttctttattttttattttttttggtttagggatttcgtaaaactgtaccggataaatgggaatttgcaaacgattatttccggaggggcggagaggatctgttgacggacatacgacggcgtaaatcggtgattgcttcaacggcggggaaatgtgttgttgttggttcgccttctgagtctaattctggtggtggtgatgatcacggctcaagctccacgtcatcacccggttcgtcgaagaatcctggttcggtggagaacatggttgctgatttatcaggagagaacgagaagcttaaacgtgaaaacaataacttgagctcggagctcgcggcggcgaagaagcagcgcgatgagctagtgacgttcttgacgggtcatctgaaagtaagaccggaacaaatcgataaaatgatcaaaggagggaaatttaaaccggtggagtctgacgaagagagtgagtgcgaaggttgcgacggcggcggaggagcagagggaggggtaggtgaaggattgaaattgtttggggtgtggttgaaaggagagagaaaaaagagggaccgggatgaaaagaattatgtggtgagtgggtcccgtatgacggaaataaagaacgtggactttcacgcgccgttgtggaaaagcagcaaagtctgcaactaaaaaaagagtagaagactgttcaaaccagcgtgtgacacgtcatcgacgacgacgaaaaaaatgattttaaaaactatttttttccgtaaggaagaaaagttatttttatgttttaaaaaggtgaagaaggtccaaaaggatcaacgcaaatatataaaaggattttcatgtattatataatttaattagtgtattaagaaaataaaacagatgttgaaagtttattgctgcttaaattatgtcttcataatgtaaaaaagcatgtgaaata

SEQ ID NO: 143796 - DNA, 2567 bp, Arabidopsis thaliana landsberg
atatgcatcatcaagcatgatgaaatactttctggctgtcttaaacgtttaaatgatgtgtatagtgccttaaatgctcatgctttgggagccttagctgaggttgctggtgctggttttaacacgcatcttgggaccatacttcctgctttgctctctgcaatgggaggtgaaaacaaggtaaaaaaaattaagattttcttcactcttatatttgtatgaaagctattgttatctatggttaagattctctttctttttgcaggaagtccaagaattggcacaagaggccgcagagagagtggtgcttgtcattgatgaagaaggcgttgagactctattatcagaacttctcaaaggagtgtctgatagtcaggtttgtttgtaattttttaaataaagtatttttattttagcatgtaagtaatttaggtttgtatttcgttttcaggcttcaattagaagaagttccgcatatctgattggttacttcttcaagagtagcaagctttacttaattgatgaagctccaaacatgatatctaccttgattgttatgctcagtgattctgattcaacaacggttgcggtaggctacttgaccagaaagaaaagaattgaagcaatgttatgtctaacttattttcttttaaacaggtttcctgggaagctttggctagggttattggttcagttccaaaggaagtacttccttcatatataaaacttgtacgtgatgctgtatctacagctagggacaaagagcgcacgaagcggaaggtgaactttttgctattttcaaagaatgtcactatataagagattaatgagcgttcataatacggatgaatcgatattttctgtagactactatctctaaaatatatacttatttgaattgcagggaggatatgttgttattcctggtctatgcctccccaagtcccttaagccattacttccagtatttctacaggtattctttataccttacttttctagcgcttaaggccaccttaaatcagatcatttaaattgtgtattagcagtagcttctgggtggcttgagctaatatcacattggcttttttactcccaaaggcgagttgcattgtaaagaatgagaaaaaaatttcccctttattgtttgcacgtacaagagcaatcaggcagttttgtacttcgttctcagctcgatccttcattattttcttgctttgatttcagggtctaataagtggatctgctgaactaagagagcaagctgcaattggtcttggtgaacttattgaagttactagcgagcaagctttgaaggagttcgtcatacctataacagggtatgtagtgtgtgaatcttcattccttttgtcgatacttcttcttctgttacaaatccatttgtattattttttttactttgcttgggtagtatagttttatctggatgaattgatgttctgaattgcaaaggtccagaaacaagctttaatttcttaggcttagaagtgattgtgcatggtgttaagaagatttttgactgaaaattaccatcaaattttattatgaatcattgtatattgttctgagataccttgtcttattatttcaggcctcttattcgaatcattggagaccggtttccatggcaagtcaaaagtgctatcttggctacattaatcatcctaatacaaaggggtgggatggcgctaaagccattcctccctcaactgcaaacaacatttgtcaagtgtctgcaagactctacaaggttagtccttgtgtcaacttgagtgaaagtgaagtttatgaatttctagtgataggaaagaactacttctacacagtttggatttaatcgaagagactagattacaattaaagagatacatgaatgaaattcacaaatattaattttgatatgatacctttttaccgagttttatatgtcttcaattagaagaaggctacatctgccttgctggagtagattagtgtgaaatttttcatcttaaagtttatagtcagctctctcacatgtttttcttttccaagtaatgtactgttgaatttacatgacacatggaatacatttcctataaaatggagttctttcgtaagaacatctaacatatgctccatttgtcaatatcttgttcttgtgtacttcggtttaatacctttacaactgtaggaccatccgttctagtgctgcggttgccctgggaaagcttagtgcattaagcacaaggattgacccattagttggtgatttgatgacaagtttccaggtacttgttgcattttctttcagcagctaatgcagttattttttatcagtctatctagttcttaattgttcataaaattgttttgtgtatcaggctgcagattctggggtacgtgaggccatcctatctgcaatgagaggtgtaataaagcatgctgggaagagcattgggcctgctgttagagtacgcatttttgatctcctaaaggatctaatgcaccatgaggatgaccaagttcgaatatctgccacaagcatgctgggtgttttatcacag

SEQ ID NO: 143797 - DNA, 557 bp, Arabidopsis thaliana landsberg
ttctaatatctctatatatatctttgcatatctctaagaagaatctcacttacccatagaacttctcttttctgtcttttatatcttctactcttgtcttatctctaaaagaacacaaatgggaggtagtaagaagcatgttgtcactagaacctcttctccttctcttgcaattgtccaggcgaatcctcatgacaacagagaagttgttcccatcgaagcaccgattatatcttcatataacgataggattaggccgttgcttgacactgttgaccgtctaaggaacctcaatgtgatgagagaaggcattcagcttcccaccattgtcgtggttggagaccagtcctcggggaagtcaagtgtcctcgactcgttggcaggaatcagtctacctcgtggccaaggaatctgcactagggttcctcttgtcatgcgacttcagcgaagctctagccctgtacctgagatatggcttgagtacagtgacaagattgttcccacggatgaggagcacatcgctgaagctatctgtgctgcaacagatgtgattgctg

SEQ ID NO: 143798 - DNA, 825 bp, Arabidopsis thaliana landsberg; identical to SEQ ID NO: 13054

SEQ ID NO: 143799 - DNA, 484 bp, Arabidopsis thaliana landsberg
aagcagacgaggttgatcgatcttgatggggaaaaccgacggaagctcatggttcacggccgttaagaatgttttccgatcgccggagaagttaatccctagaagaataaatcgtcgacaagacaacgacctcgtcgaagaagtagaggacgaactacaccaacgaccggtatacttaacactcaattaccttttttttttaatcttcattaattcatactatataaaatacatcagcatttacatgtaagattccttcaatatatccccaagaaaacactttttttttttcttactttagaaaaaatatttatcagcatgaaaacctgatttttgataaagtcttaaaacttggaaattttgggatttacattttttattaatgaaatctataaattttgttaaagaataataataattttgttggtgcagaatagaagaaaaagaagatggctatttaagaaagtttcttctgatccttgtg

SEQ ID NO: 143800 - DNA, 558 bp, Arabidopsis thaliana landsberg
gatagttggtcgcataaacaagcctcgtatgcaacctcttccaaaggctttggatcgtatcttgacttcggcaaccaagccaagcacgcggggaatcacaacaatgtcgattcttggcccgaagagctgaaatcggattggactcagctctcaatgtcaatccctatggctccatcttcccctgttcaagataaacttgcactctcgcctttaaggttatcgcgtgagtttgaccccgcgatccacatgggattaggcgtcaacaccgagtttcttgaccccgggaaaaagacgaataactggataccaatctcctggggtaataacaactccatgggaggtccactcggcgaggtactaaacagcacgaccaatagtcccaagtttggttcctctccaacaggcgtcttgcaaaagtcgacatttggttctctttctaacagcagctcgggaagcagcaccatcattggcgataacaacaataagaacggtgatgggaaagatccgcttggcccgaccacgctgatgaatacttctgctactgctccttctctgtga

SEQ ID NO: 143801 - DNA, 860 bp, Arabidopsis thaliana landsberg
  unsure (1)..(860): unsure at all n locations
tgtgaccggtgacactacagtttctgagaagagaaggtaatgtggtgttgggaaagttttgtntgctttaataactattgtgcatcttacattctttaaaaacattctgttgaaacagtcaagtaagggagcaaaacgcaagagaactcccaagaaaacttcacctacagctgggagttcatcctccaaacgatcagcaaaggtaatgcatagcttagagctgagggcttgcttgttcattaatcttgttattaactctgaaaagaacgtgtaatctcaatgtagcttatttgcaactgtccatcactggtcaacccgtcaatgtttctggctaagtattttaatctgattatattattctgcacttcctttgcagagccaaaaaaagtctgaagaagcaacaaaagttgtcaaaaagagtttagctcattctgatgatgaatctgaagaagagaaagaagaagaagaaaaacaagaggaggagaaggcagaagagaaagaagagaaaaaagaggaggagaatgaaaatggcattcctgataaatctgaggatgaggcgcctcagccttctgaaagcgaggagaaagatgaatctgaggagcattctgaagaagaaactacaaagaagaaacgtggttctagattgtcagctgggaagaaagaatcagcagggagagccagaaacaagaaagcagtggtcgctgcaaaatccagtccaccagagaagattacacagaagcggtcatcagccaaacgaaagaagactgatgatgacagtgatacaagtccaaaggcgtcctctaagaggaaagaagtctgaaagccctaacaaggcccccccggctccttctgggtgtgcg

SEQ ID NO: 143802 - DNA, 790 bp, Arabidopsis thaliana landsberg
gaagtcactcctgagatatatgatattttccgcaagtcgaattggtggaaagcgtattcttgttctgtctcagttgatgtggcagtttcgagaggctactactgcatgctggtaaagattgtgcttgcttggcttaggctcttgccgtctgtatctgaataattccctgtggttcttgtaactgacccttatgtgtaatttgcagttgagcaagttgggagtgaaatctttcagcagcaaaagctttgggaactcgataatgggaagagaactatctatcgcagaagttgaagttccagggagaaagccacttgtttttgcaactagccatcttgagagtccctgtccaggtcctccaaaatgggaccaaatgttcagtcgagaacgcgttgaacaagccaaggaggcaattgagattctcagacctaatgccaatgtgatattcgggggagacatgaactggtgcgacaagctagatgggaagtttcctttgccagacaaatgggtggatgtttgggaggttttgaaaccaggtgatttgggttttacatatgacacaaaagcaaacccaatgttgtccggtaaccgggcattgcagaaacggttagaccggattttgtgtcgtctggatgattacaagcttggtggaatcgagatggttgggaaagaggccattcctggtttatcatatgtaaaagagaagaaagtgaggggtgacattaagaagttagagcttccggtgttgcctagtgatcatttcggtctgcttgtaaccctttcgccaaaatga

SEQ ID NO: 143803 - DNA, 307 bp, Arabidopsis thaliana landsberg
acccaaaatctctacaaagtgaaaacactgagctgaggatctcgctctctctcgattggtatctctcgctccgtccttcctcagatctgatcgtccgccggttttcacgtatgcgtcttcctcctccgccgccgtcctcgtgttccttcttctcgtttcccttctcactcctacgttcgcatccgattcagatcacaaggtaagactcggatctccagtcgttttttcttttcttttaatgcagctcgaaatcgagcactgtgtccgtagatccgtgatttgcatggtgtttgcggatgaatttttt

SEQ ID NO: 143804 - DNA, 751 bp, Arabidopsis thaliana landsberg
atacagtgttggaaaaaaagaatacaagtgttttgtcttgaatcagcaacagttaaggcttgttcttggttaaacatatgttgtatattcaacaatcttgttttgttgttttttgcagaagtaaccttctgagcgtgtatgccgacatgtcgttaacttgtaaggtaagaacgcggcttgtttttctaaacgtgttcctccacttgtttatctatcataaattggtgctctgtggatcttctcataatttttgatggcttatcttgattccgaatctgattcaacaaagcgttttctttctatgataaactgtaggaatattacgatcctaaccggtcaatgctggagctagtatttgcaccagcagaggaatggatatcacggactgattctgacatcatagatgcaacaatgaaagaacttgagaaactcttccctgatgaaatctcagctgaccaaagcaaagctaaaattctgaagtaccatgtcgttaagactccaaggttagtgaagttgtaccatttatttagcttcaaatgagggaccaggctttacattgataaattcaacatctttctctattgttgcatgatcaggtctgtgtacaagaccatcccaaactgtgaaccatgtcgtcctctacaaagatcacctattgaaggattctacttagctggagattacacaaaacagaagtacttagcttccatggaaggcgctgtcctctctggcaaattctgctctcagtcta

SEQ ID NO: 143805 - DNA, 376 bp, Arabidopsis thaliana landsberg
tctctcctttaggtttatctctcgttaacgtcgctcttggtcacgaggcgactctcactgtggagttcgatattcaggcaatctcaaaagcttccacgacaaaggtgtcaaatttggtcatcatgacgggtgagttcgatcaatttacttcaaaagtttcttaatttcttcgtttaacatcgaatctttgattccttaagcttatcattagatgggagagtaattagattccgattgatcttgatttctgacagattgatttgagaattattgggtgttatgttgtgtctcttgtagagtataagcaggagcaggaaatggagattgaagctcttgaagctatacttatggatgagtttaaaggtgagtttttttt

SEQ ID NO: 143806 - DNA, 350 bp, Arabidopsis thaliana landsberg
atcaagaaagaacacttttgtgaacttcttcttccccacatctcctaaaagcttcacacacaccaaaccaagcgtttcttttcttatctactcgattatcaacacatcttttcctgaaactccttccacatctttgtctgatcatggtgaaggaaacagtgtattatgatgttcttggtgtcactccctctgcttctgaggaagagattcgcaaggcttattacatcaaggttagtttttctctcttttttctttttgagttgtgacatagatctgtgtgtctttggtatgactgatataataaataattaggcaagacaagttcatcctgacaagaatcaaggtatcct

SEQ ID NO: 143807 - DNA, 628 bp, Arabidopsis thaliana landsberg
cattctccgcatccgcatctcagctcgtaagggaatctcctctgatggaagaggtatgtttaccaactctccaaaatcaaaatcacatatgctcagttctattattgattgcttcactccaatagacaacaacagagcatcagatgcatcaaagagagctttagactcgatagaagtatgaatataagatagagatctaggctcacgatttgaaatataaatcatttctcttcgtgactttataatatttttatcatctggacaggtcgtactggttgctcgtggacagcgtcagataatgcatcaaatggacacactgagtaatcttcttcgggagtatgttggagaaaagactcgcatagagagactcgacagcagcagaacaaacagtacaacccaaaacctcgaatcctctactttaccgattcttcttggtttggccattggctgtgtgggcatctttgcctacagtcgtctgaaatagttgctctaactgtggaaacccaggcttcgtgaaatagtggcaatgatgtaaataacatggtttgggatacacactggacaaattcagtcttgacaatgtaacatgtgccaagaataaaagactgattcgtttcttaccctttca

SEQ ID NO: 143808 - DNA, 271 bp, Arabidopsis thaliana landsberg
tgaaaaattcaacgcctagaagcggtagtcaacggccttttaaagcgaaggagcatgacacgtgtctttcgtcattatccggcgatgccaaactcttcttcctcgatcgagagaacacagcagtcgtcgcttaattcggacatttgagtcggaactgttgtgatttcaaattttcatttcttgagtgataatttcagttattgatctgtgcgttcatcaatggaggtttcttctttacccagatactgtaactcacgctcctttgttccag

SEQ ID NO: 143809 - DNA, 420 bp, Arabidopsis thaliana landsberg
gacgagtcaaagtgtaaaatcgttaaaccctaagagggagtgagagagagaagaatgaagtacaacaacgagaagaagaaaggaggaagctttaagagaggaggtaaaaagggttcgaatgaaagggatccattttttgaggaagagccgaagaaacggagaaaagtcagttacgatgacgacgatatcgagtctgtggactctgatgcggaagagaacggatttactggcggagatgaagatgggagaagagttgatggggaagtggaggatgaagatgagtttgctgatgagacggcgggagagaagcggaagagattggcggaggagatgctgaatagaaggagggaagcgatgaggagagagcgtgaggaagcggataatgatgatgatgatgatgaagatgacgatgagactatt

SEQ ID NO: 143810 - DNA, 456 bp, Arabidopsis thaliana landsberg
gtttctccgtttcagtatcattaccagaatctttcgaaccaattgagttgcaataatcttaatccttctactatgtctgatgagaatgggaagagcttgagtgttcatcagcatcactctgatcaaattttaccttcctctgtttacaacaacaatggtaataatggtgttggattctacaacaattaccgttacgagacatcagggtttgtgagtagtgtactgagatctcgttaccttaaaccaacacaacaattgcttgatgaagttgttagtgtaaggaaagatttgaaattggggaataagaagatgaagaatgataaaggtcaagactttcacaatgggtctagtgataacattacagaagatgataaatctcaatcgcaggagttgtctccttcagaacgtcaggagctacagagcaagaagagcaagcttttaacaatggtggatgag

SEQ ID NO: 143811 - DNA, 1018 bp, Arabidopsis thaliana landsberg
agttattaaggagcggggaatgttcgatttcttgaagaaaaaggaggaagttaaacctcaagaaacgacgactctcgcgtctgagtttgaacacaagactcagatctctgaaccagagtcgtttgtggccaagcacgaagaagaggaacataagcctactcttctcgagcagcttcaccagaagcacgaggaggaagaagaaaacaagccaagtctcctcgacaaactccaccgatccaacagctcttcttcctctgtaagtaaaagtttgactagtttgtagtttttcttggttaaatcttgaaaacaaactcatggttttgaaattttgaatattcatgaacagccgagtgatgaagaaggtgaagacggtgagaagaagaagaaggagaaaaagaagatgattgttgaaggagatcatgtgaaaacagtggaagaagagaatcaaggagtaatggacaggattaaggagaagtttccactcggagagaaaccagggggtgatgatgtaccagtcgtcaccaccatgccagcaccacattcggtagaggatcgcaatccagaggaagaagagaagaaagggtttatggataagatcaaggagaagcttccaggccgcagcaagaaaccagaggattcacaagtcgtcaacaccacaccgctggttgaaacagcaacaccgattgctgacatcccggaggagaagaagggatttatggacaagatcaaagagaagcttccaggttatcacgccaagaccactggagaggaagagaagaaagaaaaagtgtctgattaagagaaaaatatgataagagtgaataataatgatgtgggagtgggacttatgttgttttttgtttttttgttgatcattgtctcttttattttgtctttctagctgttctccaagtttgtgtttagagttagatcatttgtgtctaaaatctataaaattattttatctatggggaaacacttgtttactcaatggagcttcaatggataaattctcatg

SEQ ID NO: 143812 - DNA, 469 bp, Arabidopsis thaliana landsberg
ctctcggtacctccaccatacgacgccgctatcctccgctactcgtcacctatgcgccgccgcttctcccgaagctcgaacgaagaaactcgagcgaatcgccgacgatttactcaaactgaatcggattgagctttacgattactcactcctcttcagccataaactaggtctcaatcgctacggttccgccgtagctgttaccggatctgtcggcgacgcgtcagcttctacggagacgaaaacggcggagaagactactttcgatgtgaagcttgagaaattcgaagcggcttcgaagattaaagtgataaaagagatcagagcattcacggatctgggattgaaagaagctaaggctttggttgagaaagccccagtgattgtgaagaatggtcttactaaagaagaagctgagaagatcatggagaaactcaaagcggttggtgctattgtagctttggaatga

SEQ ID NO: 143813 - DNA, 707 bp, Arabidopsis thaliana landsberg
accggatgcaaaacgtatagttactttttctaatcaatccgattatttatcattcaggtaaaattttctcacaatgagcagattttacgaattttaattggtgacatcaattgtagtatgcaaagcctaaggtcttaaggcttatgttagcatttggtaatctgatccacatagaaacagcatgtaagaacactgtaaatacaacagatggagatttttataaattcttgtgggtatatatatatatataggaatcatgtctatgataaaggagagggaggtccaaaatcaatcgagcttaaagaaatcggtcctcgatttgagttgcggctctaccaggtacgcattctgcttaaccgaatcaaaactgttttcctcgagtaaaataatggtttgataaagaatcattctagttccttagtaacaatgttgtttctgtgtaatgcaattatttttgcaggtgaaattaggaactgtggaacaaaatgaagcagagatcgaatgggttataagaccgtacatgaacacctttaaaaagcgcaagttaatcggtgaatgatgaataaacggaacagctttgaaccctttatctaaattctgttttacttatcattctgttggaagagctgttcaatttttgtgtccttagagaaaattgcgatgattttgttttaacgtttagattataaaaacaaaattttgttgtc

SEQ ID NO: 143814 - DNA, 1751 bp, Arabidopsis thaliana landsberg
cagttgcccagcaggaaaactcattggactgtggcctctttctgctgcactatctggagctatttcttgctgaagctccccttaattttagtcctttcaagatatataatgcttccaactttgtaagtctattctaattgctactttaataagcttgccaaactgaatctttttcacccgcaatgatttcgcagatgcttgctaggatatttagatttcttggtgtctccagttgtgtattctgtttttttttttgcttactgtagaagtggtctctttgcagaccagtcaaaatagaatcttttgcgagcttcctgatttcatgagtccgtttgaaagaagttgaaatgcctctaagagctgctgggtctgtatttttttcagtatcttcatttgctgataatgctttttctctgattttctcagctttatctgaactggtttcctcctgccgaggcatcattgaagcgtactctgattcagaagttaatatttgaactccttgaaaaccggtcacgggaagttagtaatgaacaaaaccagtcctgtgaaagtccagttgccgtcaatgacgatatgggcattgaggttctctctgagagatgcagccccctaatagactgtaacggggatatgacacagacgcaagacgatcaaggaatcgaaatgactttgcttgaaagatcttccatgaggcacatacaagctgctaatgattcgggtatggtactaagagatttattcgattcaggatccaataacacaggatcattacttgaacaactacaacaaccattcgaggatccgtcttcgttttatcatcttagtaacgactcgtcggcaaaaaaggtactaaaagttccgcaagctaatgacaaaatctttttatttttgacacgccaattataattttcttatatatgctctgttttggatagcaagtggacatggaaactggtgaacagtttatgtgtttgaacgctggagagggcatctttcaatgcatcacggaaactacctctccgagagcatctaattcattctcttcatggaaccttggtattcccctggtgcagaaggaagacgagactgatttgttatctgaaacttcgaatagttctaatgattcaatcggtatcatagaagacaacccaatagaaaatactcatgaagaagaaatcgacgagagtcctccaagagagaccgtctctttaaaatctgcaaccgtgggttctaacactgccgaccataccactgagaatgaagagcccgtttctacacacattgagcttgttgttccatcgagtcagaatgacagagatgaggagaagccattggagcatgatcttgaaattggggacaagacgagtgaagatgttggagatgattgtgatcaaaaggagccaatggaagaagaagatgagaagcgagctgcaaaacggccgaggctatcatctcccactggcgaagctgaggagatggagaaatagagattgtgtgggctatatcaacacaccacgggttttgtgttgggtcttggatggttagacgacttagagggtttatatcaaaccacctttaggaagtgtttataacgttgtaggagtattttacgaagaaaaaggaaagaataacgtctttcatcgttttttatgtaaaatttcgtacgttaacttaagagggttgatgaatatatagcccattttgtggtttttatttgaggttcttccgagtaattttttacatatata

SEQ ID NO: 143815 - DNA, 462 bp, Arabidopsis thaliana landsberg
ttttcatattaacttgtggatcttctggatccttctacaagtactcgttgtcgagaccatctctggtacttgttcaaaacataaaagaaaacaagagaagtcggtttaagagaatccaaaaaaatccaacttatcctcgccgtgagaaagatggacctgaaagaatcagtaaatgatcaatacgacatcctggagaacctgaaagggtcagttgggaacctaaacgacatcattctgaggttaactcagcacgttatcgctagcaccgccgggaaaacctcgaacctcgtcttctcgccggcgttactcagcgtcatcctcagttttgtcgccgccagttctcccgatgagcttaacgctgtctcctccgggatcgtcaccaccatcctcgccgacagcaccccgagtggcggcccgacgatatcggcagcgaatggcgtctggatcgaaaagactctctac

SEQ ID NO: 143816 - DNA, 487 bp, Arabidopsis thaliana landsberg; identical to SEQ ID NO: 22805

SEQ ID NO: 143817 - DNA, 1520 bp, Arabidopsis thaliana landsberg
gctttttttacgatggacttggtttagggttcactaaatggggtgattactacagagatgtgcggaaactctgcgttcttgaacttttctccgttaaacgagccaactcgttccggaacataagagaggaggagctgagtcgactcgttaactcgttatctgactcggcgtcgtctggatcttccgttgacctcaccgcgaatttggctaagttcgtcgcgagctttacgtgtcgaatggcgtttggattgagttttcaaggaagtggaatggataacgagacgtttctggagctgttcacggaggcgaacagagtgatcggtaaattcgcggcggcggatatattccccgggtttggctggatcttggatcggatcagtggtcttgattctagccggaggaagagttttcaagatcttgatacgttttaccagaaagctattgttgaccatcgggagaagaagaaaactgaagaccgtgaagatctcattgacgtcttgctcaagttacagagtcaagaaaccaaacttggttcttcaagaatcaccgatacacatatcagagctattattatggtaagtttttcaactttggttagttcggttcgataccataattcttgttcgatttgggtaatttggtttagaaatttatgtatagtttggttaatacaaatatcaggttacagaactttgtccatgccttatttagatgttgaattataatttattgagttcatgtaagcatttttgttttcatttcaggatttgtttgtagcaggagtagacacatctgttatcactttggattggacaatggcagagctttcaagacatccaagagtaatgaagaaagttcaagccgagattcgtgaacacgtaggagacaaaggtatagtgacatacgatgatctcgacgctctagtctacatgaaaatggtgatcaaggagacttggaggttacacgcaccgagtcctattctgattccaagagaagcaatgactaactttaagatcaagggttatgatatttaccctggaacgcgtattcatgtcaatgcttgggctattggacgtaaccctgatgtatggaaggatcctgatgagtttataccagagagatttgttgatagcaatgtggaaactaaagggacaagttttgagctgttgccgtttgggagtggacgcagaggttgtcccgcaatgtacgtgggattaagtacggtggagtacacattggcgaatcttttgtatcattttgattggaaagcgactgaggaagtgagtgttgaagaagcacctggtctcactagccacaggaagcatcctcttcaccttgttcctgttaatgtcatcaaccgcaagctttagagtgcggaaagcacaaaacacatttagttttcgacgaataaggcttaataatgtttctgtttattgaatcttcgatactttctgtttagctttcaaacaataattctcattacatgaataaaactttggcttatcatatctccacacaaa

SEQ ID NO: 143818 - DNA, 4347 bp, Arabidopsis thaliana landsberg
atgagtctcaagaaagagctttctagattgcagtctgagaaggaggctggcttgctacgatacaataaaagccttgagttgatatcttccttagagaagacaattagagatgcggaggagagtgttagagtattcagggaccaatctgaacaagcagaaactgaaatcaaagctttgaaacaagaacttctgaagttgaacgaagtcaatgaggacttgaatgttcgatatcagcagtgtttggagacaatatcaaagttagagagagaagtttctcatgctcaagataatgccaaaagactgagcagtgaagttcttgctggcgctgcaaaaataaagactgtggaggaacaatgcgctcttttggagagcttcaatcaaacaatgaaggtagaagcagaaaatctagcgcacaaaatgtcagccaaggatcaagaactttcccagaagcaaaacgagattgaaaagcttcaagctgtaatgcaagaagaacaattgcggttttcagaacttggagctagccttcgaaatttggagagtttgcattctcaatcccaagaggagcagaaggttctcacctcagaacttcatagccggattcaaatgttgagagaactggagatgcgaaatagtaagttggaaggtgacatcagctctaaagaagaaaaccgaaacttaagcgaaataaatgacacttctatctccttggagattcagaaaaatgagatctcttgcttgaagaaaatgaaagaaaagctcgaggaagaagttgcgaaacagatgaaccagagcagtgcccttcaagtagagatccactgtgtgaagggtaatattgacagcatgaataggagataccaaaaactaattgaccaagtaagcctcacaggtttcgatcccgaatctctttcctactccgtgaagaaactacaagacgagaactcgaagctagtcgagttatgcaccaatcagagagacgaaaataatgctgttacagggaagctatgtgaaatggacagcattctaaagaggaatgctgatttggagaaattgcttctggaatcaaacaccaaactagacggttccagggagaaagcgaaggatctgatagaaagatgtgagtctttacgaggagagaaatctgagcttgctgccgagagagctaacttggtttcccagttgcaaatcatgactgcgaatatgcagacactcttggaaaagaactctgtattagagaaatccctgtcttgtgcaaacattgagcttgaaagtttgagggataagtcaaagtgctttgatgatttcttccagtttctcaaaaatgataagtctgagcttatgaaggaaagagaatctcttgtctctcagttgtgtaaggttgaggagaagctaggagtcttggagaagaagtatacagaactggaagtaaggtatactgatttacagagagataataagctcaaaagccatcaagtagaagagttacaggtctcacttgccgctgagaagcaggagagtgctaattacaaacgatcgactgaaagcagattagcagatcttcagaagaatgtgagctttcttcgagaagagtgtcgttccaggaaaagagagtacgaggatgagcttgacagagttgtaaacaaacaagtcgagatcttcatcttgcaaaagcttatagaagatctagagcagaagaatttttctctcctgattgagtgtcagaagcatgttgaagcatcagaattttccgagaaactcattgctgagctggaaagtgagaatctcgagcagcagatggaagcagaaatatttttggatgagattgatagcttgagaggtgcaatctatcaggtgataaaggcacttcaagttgaagcagattgcaagactgaacagaagattacaaaagaccaaatttcagtttcacgtgctttgggagagattgatagcctaaaaggttcactctccagtgctgaatatgagatgcatcgacttgtagttgagaactcggtgcttttatctctacttggacaattccagtcagatggtttggtgctcgaatcggagaagaacatactcgaaaaagatctaaagactaaaatacatcagtgtggaatgcttgaaaaggacaagcaagatctactggaagcgaaccggttgttgaaatcaaaactgatcaaaagagagcaacaagagcaaaagctgagagctgaactgaaaattgagaatttgaagtttgagagtttgcatgactcatacatggttttgcaacaagattattcctatacactcaatgataacaaaactttgcttctgaaattttcagaatttaaagatggaatgcatgtagttgaggaagaaaatgatgcaattcttcaggaggctgttgctttgagtaacacgtgtgttgtttacaggtcctttgggtctgaaatggctgaggaggtcgaagattttgttgaaactgtaagcagtttacgagaaattagtacgggactgaagcgcaaggttgagacactggagaagaagttagaaggtaaagagaaagaaagtcaaggtcttaacaagatgctggaaaatttacaggaaggccttgaagaagacaacttcttaactggactcttggaacatcaggtttctaatgtagacgaaatcttggaacatagggaaatggagatcctagaggcagagcatatgctcaaggccacaaacaatgaaaacgaagagctgcacaaagaagttgaggagctgaggaaagactatgaagactcaagacggatgagggcaaatttagagtggcagatttctgaactgtcagatgttgctggaagacaggaggaagagattagaaaacttaacgctttgaatgagaatttggagtcagaggtacagtttttaaacaaagaaattcaacgacaacaggttcgagaggagtacctgagtttggagctgcaagagaaaagcaatgagattggactttgggattctgcagcaacatctttctactttgatcttcaggtctcagctatccgtgaactcattcttgagaacaaagttaacgaactctcaggagtttgtgaaaacctcaatgatgaagttgttacgaaaacgactaagattaaacagatgaaagaaacagttggatttttggagtctcaagtgactgagctgaagagtcagttgtcagcttatgatcctgtgatagcatctttggcaggggatgtaaaagcccttgagaaaagtacacatgctttaacgaaatttcctgcaacagcctatcaacaaagagtggtaaacttttgcactcgttcttctatttcaaatgtcaactcatctttctcgctgtaccgatcttaaataattctaaacatttccatttttttcagggaaacaatctggaagaaagcggcagtaccaccagcccatgcaatggaattgtgattctgaaggaaattaatccaagtattaagaccatcgaacaagcatttgttaaagaaaaaggcaggctatcaaggcaaataacacgaagcacctcccaaaaacgcagagaccgcaggaagattgaaaatatacaacctgatgaccaggtcactggtgaatctagacagccaagattgaggcctgagatgacagaggtgaaaaatgaattattaatgaaagacaatcctcgtgatcaagtcacagactccctgacctatggcagaagccagggaactagtcatggttccaatgacatgtttgagttttgggatgaatctgctgaatcagagaccagtgtaaactttctcatcaacagtaacaaaccgcagaggtcattgaactccaatctccgtcgtcaaagccggaatccctctatagaatctgataaagcggttggagttgttgacaaactagagttatctagaaacatcgaagacaaggcaaagattctggagagacttttttctgattcaaggagactgtcaagtctccggattagcctaacagatctgaaaagaaagctggagatgaatgagaaacaaagaagattcagcaacgctgatttggttatagtgaagagacagttgaaagaaatggaagaagctgtctcgcagctggaaaacacaaacgagattctttcaaaggaaattgaagagactggagatgccagagatatatacagaaaggtggtcgtggagaagtcaagaagcgggtctgagaagatagagcagctgcaaaacaaaatgcagaacattgagcaaacagttctgaagcttgaagatggcaccaaaagcaaaggaaggaaaatgtttttagagaactggacagggattctcttgagagacattattcataagggcgggaaaagaa

SEQ ID NO: 143819 - DNA, 1781 bp, Arabidopsis thaliana landsberg
agagagacactgaaatatagagagaagaaaaagaagaggtttagagagagaaaaatggcgtcaaagctctgcgattcgtgcaaatcagcgacggcggcgttatactgccgaccagacgcagcgtttctatgcttaagctgcgattcaaaagtccacgcggcgaacaaactcgcgtcacgacacgcgcgcgtgtggatgtgtgaagtgtgcgagcaagcaccggcacacgtcacgtgcaaagcagacgcggccgcgttatgcgtcacgtgcgaccgtgatatccactcggctaatccgttagctggcagtcacgaacgcgttcccgttactccgttttacgattccgtctctagtgacggttccgttaaacacaccgccgttaatttccttgacgactgttacttctccgatatagatggtaacggaagccgtgaagaagaggaggaagaagctgcttcgtggctgttacttcccaatccaaagactacaacgacggcgacggcggggatcgttgctgttacttcagctgaggaagttccggcagatagtccggagatgaacactggtcaacagtatttgttctcggatccggatccgtatctggatctggattatggaaatgttgatccgaaggtggaatcgttagagcagaatagctccggtactgatggtgttgttccggtggagaatcggacggttagaatcccgacggtgaacgagaattgctttgaaatggattttaccggaggatctaaaggctttgcttatggaggtggttacaattgcatcagtcacagcgtaagcttaatttttctttaatcacagtgattactttaattgattatgtttgattaaacaattatttatccaattttataacgaaagaagttttgatctttagggtttagactgttgatgatacttaaaattattaatttattgggaagtaatgattggctgactaaaatttagggttatgcgagcaacatgtgtaaattaatctgtaattagaagaaatattatgataatccttaatttaagtatctaattatgtattaatcaaagaattttggtctcttctttttcatttgttttgtttaatcaagtgtagatctaatcatattcacttataagttataatctatagtatttgtcagtttgattgtacttattataatggcttgatccaatggttggtgtaatttaggtgtcatcatcgtcgatggaagtgggagtggtgccagatggtggttcggtggctgatttatcgtatccttacggtggtcctgcaaccagtggagctgatccggggacacagcgggctgttccgctgacttcagctgagagagaagcgagggtaatgaggtacagagagaagaggaagaacaggaagtttgagaagactataaggtatgcttcaaggaaagcgtatgcggaaatgagaccgagaatcaagggacggtttgcgaagcggacggatacaaatgagagcaatgatgtggttggtcatggtggtatctttagtgggttcggacttgtacctacattttagatattgagagagggagagactctaaaatggaagatggtgggtggtttggtctttgttttagtaataaggtttttgacgaacgtttactttaaacgagtttgtttgttttttgttgatgagtttttttagttgttgtgggcgatgaagaggaagagaagtgagtgggtggtgtttaactgtttataagtaacttgttttgtatatatcgtgattttgaatatgttcgtgt

SEQ ID NO: 143820 - DNA, 402 bp, Arabidopsis thaliana landsberg
ttacagagtggagaatgagcacttaaacaatgtcggccaatttagggcagtgaagaccgtaccgttaccgttccttgacagggactcagacggttaaacaaagatttgcagggtttaaggatcgaaccaagtttcaagtatttagaggaagcatttcggattttgcatcgatgtagtcatatcggagaaaaacctttgggaaactcccgaaattgcctaaccatttatccttaaacatattaattatgggagactaatggattctacaactgttaaacgctccaaagtgcaaaacgaagaagacaattttaatttcatatattggtttatgtaaattttgatttgcgttctatgttcaataagtcttctttcttttctaataaagaatgtcactatctcctc

SEQ ID NO: 143821 - DNA, 883 bp, Arabidopsis thaliana landsberg
tctctctgtctctttatctatcttcgtacattatatataatgggatcaaccgtggccgccgctctcctcctcttcctagcggcagtccctgccgtctttgccgcaactttcaaggtcggcgatatttctggctggaccagtaatcttgattacacggtttggctcactggaaagactttcagagtcggtgacactctaggtaaataaaaatgcttgattttacactacatgtagattacttgtttcgcaagaatcatctttttcccctctaacaagctgatgattttattcttacagagttcgtatatgttctttcacactcggtgtccgtggtggataaagctggctacgataactgcgacagtagcggagccacacagaactttgccgatggagacactaagatcgatcttaccacagttggaacaatgcacttcctttgccctacttttggtcactgcgccaacggcatgaaactcgccgttcctgtcctcgccgccgctccatctccttcgactccttcttcgcctccctccactccttcgactccttcttccccgccctccactccgtctaccccttcttcgcccccctcccctccttcgcctccttctccatcgctcccccctagctctctgcctccatctgcatctccgccgaccaatggcacgccggattcagagacattgacgcctccgccagctccattgccgccttcgctgtctccaaacgcggcatctaagggagtcatgagctatggaataattggagtcacgatgatattgatgtacgctgttatgacctaaataacagggtggaaacagagcattgttttgctccatgtcttttttggtcggcggccttggaaatactacaccactac

SEQ ID NO: 143822 - DNA, 731 bp, Arabidopsis thaliana landsberg
tccgtttatatatatattccaagttaaacttcatatcatacacacaaacctaaaacaccgaaacaaaaacaaagagatttaaacaagaagagttattatggcgagcttgctagataaagccaaggacttcgtggcggataaactcaccgcgatccctaaaccggagggttcagttacggacgttgacctcaaagacgtgaaccgtgactcagttgagtacttggccaaagtctctgtcaccaatccttacagtcattcgattccgatctgtgagatcagtttcactttccacagcgccggcaggtaaaacctactaactccgtcgtttggttctttgttagattttgtaaacaacagagatctaattatttgtaaacagggagattggaaaggggaagataccggacccgggttctctgaaagctaaggacatgacggctcttgatattcccgtggtggtgccgtatagtatactgtttaacctggctcgagacgttggtgtggactgggacattgactacgagctccaaatcggtctaaccatcgaccttcctgttgtaggggaatttactatccctatctctagtaagggagaaatcaaacttcctacttttaaagatttcttctgatcgacaaaacctatatataagaccacacatcgttatgatggtgaatggtgatgatcgtaatgtaataagttgggtttgctataactaataaaatgttatttt

SEQ ID NO: 143823 - DNA, 915 bp, Arabidopsis thaliana landsberg
agggcactgtttgaaatggaaagtttcccattatggcgggtaaaaaccaaaatatgtgaagctgtttccggcttgaccactgttgttaatcccatttttttagctcgcctcgtcatggaaaaaactcctcatatatatcttgcattcgatgttgctgaagcttttgcaagagcacatgtcagtgtattctactctcttctttgggtgacttgtattgattattaaactctgctcattgtagatctttccatggattccggttttatagggtgttgagacggtatattctagccatttcataactcctgaaaacattgcaaggctaaagcaggccaaagaattcaatcgagtccaggtactaagttttttctcgaggtttgtgttcatcaaatgatgatataatcctccccttgccttgtgcttcttaacgatctttaaattccttgattacagttggattacacagtccctagtccgaaagtaccggacaattgcggtgacagccaaataggaacggtcggatgtgtagctgtggacagtgctggaaatctagcttcggctacatcaacgggcggttatgtcaacaaaatggttggcagaattggggatacgccagtcattggcgcaggaacttacgctaaccacctttgtgccatctcagccacaggtaaaggagaggatatcatccgtggaaccgtggctagagacgtggctgcactcatggaatataaaggcttgtctttgactgaggcagcggcttatgttgttgaccaatctgttcccagaggaagctgtggactcgttgctgtctctgccaatggtgaagtcacaatgccgtttaacactaccggaatgttcagggcttgtgctagcgaagatggttactctgagatcgcaatctggccaaacaattga

SEQ ID NO: 143824 - DNA, 552 bp, Arabidopsis thaliana landsberg
  unsure (1)..(552): unsure at all n locations
tgtctntgtctcatgcatgtttagtctctcctctcctcctcgtcgtcaatcatcatcatctgagaattcgcagcttttgcttcttcgatagaaaatctaattatcatcaatcatgtctaagttcacgggattctcatctctcgctatctcttattttctcttggtttcaacgattgttgcagccaccgatgttcactactgcggtatgtttcgtctttcgattcccaaaaagcctaacttgattcatgatttccaattgtttccttgtagtattttgattgagttagctataattttgcgataagatttagatagaaagatccaatgttgattttgacctcttgttgcgttataatgaattcgatttgtggggaacttttgattgtttggttgcagataataacgaagagtatgaagtaaaagtacaaggagttgatataactccttatcctatagctagaggcgagccagctactttcagaatttctgctaacacaggtatactcaaatttacctatgaggctattacttgtgtttatagttttgcatttg

SEQ ID NO: 143825 - DNA, 819 bp, Arabidopsis thaliana landsberg
gaaaataattaatcacttgctaattctaagcttcttctctttccaaaaatggcgtcatcatcggctttagctctcaggagacttctctcttcttccaccgtcgccgtccctcgcgccttaagagccgttcgtccggtgtctgcttcttctcgcctcttcaataccaacgccgccggaaactatgaagacggtgtcgataggaaccatcactcaaaccgacatgtttctcgccacggcggcgatttcttctcaggtaaatccatggttcctccgtccaatttcgctatagattttcccaatctgatacatgtttgtgatttatgtatagagtacatctaactttgttttggagatctgttgaatctgaaaatttggttgttttttcaaacagatatactcgatccgtttactccaacgagaagcttgagccagatgctgaatttcatggaccaggtaagcgaaatccctttggtatcagctactcgtggaatgggagcttctggagttagacgtggttggaacgtgaaagagaaagacgacgcgttgcatctaaggatagatatgccgggactaagcagagaggatgtgaaattggctttggaacagaacacattggtgattagaggagaagggcaaacagaggagggagaagatgtttctggagatggacggaggtttacgagtaggattgaattaccggagaaagtatacaagactgatgagattaaggcggaaatgaagaatggtgtattgaaagtggtgattccaaagattaaagaggatgagcgtaacaatattcgtcacataaacgttgactag

SEQ ID NO: 143826 - DNA, 2055 bp, Arabidopsis thaliana landsberg
aatgcattttccttcattctctacggctttctctcactctcgtcaatggtgaccaccgcatcttcatctctcccccgtaattactccttcacaactccgcgaccttcatcattcatccgaggaccgccattagctagaacgctgcctctctatctccgccgtaaccgtcgagtagctctcacttaccgattggaccagaattcgaagcagagaagtggtggaaacgtaagatgcgaggcgacggaggtatcttcttcttcttctgtatccacacctggaaggaattgggttccggtggtgccgttatcggcgcttccgaaaggtgaacggcgagtggttattcaagacgatgagacgatattgttgctttggtacaagaacgatgtgtttgcaattgagaatcgttctccagctgaaggagcttacagcgaaggacttctcaacgctaggctcactcaggttttcttcgtcgtttggaaattttatgatcgtgcattgcccaattgatgagaaaagtaggagcatataaggtgtttgttgaaaatgcttgaccgagtagagtgatagctgtaggaacgaagtttatgagataaaacataacacatggcttgagttacttcatcacattctatgaattacatattctctgtagttttggttatggttttcaactgttgctatgatatattaaggtcttggtttgaatagtactacattctgctcgaagtactcttggtttctctaacggtaagtggtctctttttggcaattatatcaggatggttgcattgtgtgcccatcaacggatagtacgtttgatcttagaactggagagatccgggaatggtacccgaaaaacccggttctcagagtcttgacacctgcattgaggaaactatttgtataccctgtcaaatatgatgaggaaaacatctatatcagcattagagacagcgggaaaacagaggcagctgctgagatcgtcttcagtggaaaagctcagcctgggctcacagcaacaaacgtcaatgtagacgaggtaaaacacctatacatgtgaatttgtttcatttggggggaaaaaaccaaagagtgatggtaaatttgtgaatcacaggtgagaatgattgtggacgagggttctgaaggatttggttttacgaagaagaacgaagtgataaatgggaaggcggcagtgataggattcttgctgctgttagatttcgagctattgacaggtaaaggtctattgaaaggaacagggttcttggacttcctttactctgcttcagatgctttcaagtagaggtaatatctttgttggtctggttttgcttgcctcctttgtgcagtttgccgagaaacaaaaaaaaaacaccatgtaatagtatatagagatggctttgctctgtctttctttgtgtttaccccttatacgagatattctttcttctccttgagttcaaattataatcttcaagctttcccactatcttttgtatttgacatacaacacctcatatttgattgggtgaaacaaaaacgagagaaaatttcaataaccatgctaggccacttggactatatagtcttcatttctattcattttatgatttttgttcatttagcaatataggcatacataatcttttttttaataaataaattaactctaagaatttggaaaatattattaagtttatgagataatgtatgttaaatgtaaaaataacatataatataaacctcttaaccataattttttaattaaaagaagaaagggaggtcattgtagagactagagagtacattgcattcaaatttggttgctcaaaagtgagtgattccgtgtgcggaatcttagtttgtgttaaatttgagtaccaccaatcaaagaagagaccacaaatctcatatcccttttcgttttcagtgtgcaaattgcaaaacgagacaagacaaaaaataacttttctgccctttagtcaaacttataagcccaagacgagcacccgtttaagactatttgaagacgtcatgcctgatgaaatgtga

SEQ ID NO: 143827 - DNA, 605 bp, Arabidopsis thaliana landsberg
ttttcttgtctttgatcaatgaagggagcgattatggctgtcggagcatctcaaccttcagtggttgcaactaaagacggccgcattggcatgaaaaaccagatgcaggtaaatgttattatcaaccatcgttagaacttgttcctcttctcctttttgtcttcatgaaaacgtctcgagttttcctgggaacttgttaatgatgactggtcacttgcaaacccacaggtgaatgtgacggcagatcatcgtgtcatctatggtgctgatcttgcacagttcttgcaaacattggcaagcattattgaggacccaaaggaccttacattctaggccaaattactgcttttcgcatcccagtcttctctgcttttgattccatgggagcttgtatttctgcggtaatcagtttctttgatagaacaaaccttttaagattaaacataatcatttctttgtttgagatatatcttctgcaacattttctgcatggaaaggccgtcccacatgattttgctactgacttcatatatatccacttcatgcgatgaatcttatatgaactgataactttagcatgattaataacatgaatcttatatgga

SEQ ID NO: 143828 - DNA, 2141 bp, Arabidopsis thaliana landsberg
gatgcaagtagttggggcagttgggtttcagcatcgacgtcttgacattcccgactttgtagatccagcaattgcagatctcatcagtaaatgctggcagacgtgagtatagattatttttcaatgtttcagccacaatatgaagtagcagtgcttaaacaacatcatttcacttgaccatgtctcagttaacacatgtaatggctttgtgtgtgtttatcagggattcaaagttaaggccaagttttgcagagataatggcgtctctaaagcggctacagaaacctgtaacaggttccaacatcccaagaccagtccccagttcctcttcattaccaactgaacatgaacaaaaggattgataacagaagaagacgaccaaagtggcaaacacatttttgacgaattcaatctgtttgaaggaaaaaaaagctacaaatgttccttctctgctactttttgcctcagcttcagtgtttgacacagcttgtgaattgtgaaaaagaaagattcatggaagatgacgattgaagaaggtgaaggattgtgctcgtgtgttttgttgtctttgcttgcaagcgatgttcatgttcatgcgtaatttcctctattttgttttccaatattgaaactgtacaaagagagaaagaaaaaacaattgacaaactcgttgaaacgttgaccgaaaacatatattaaaaaaaaatcattgagctctgtctttattcacacacgaacaagataaggctgatctttattattgggatatatgaatcaaaataatataatattttaaaaaactttgcttttacgaaaaatctttgacaatggcgactctcttcactgcgacggttccttctcaccaccgtttcgtctctccatcccaacatccgaaacagagtcttctatcgcagtcgctaagcgtcacattcacggagaatccacaaccaacggcggtggtcacattgcaggagcagcaattgacggattggattacttctccggtgacgcgacggttcggaatcggcgccgggtttacctgggctgggtttttagctttcggtgttgtctccgagcagatgaagaagtcacgactcgatgtgtttcaggaagaggataacacaaggttactcttactcatcaagacttcgaattattctcttgttaagaactaaagatggaaaatttaagtgaatgttagcaattagggatttgataatacaatcaaagacttgagctcatagtttatttgttcttgaatgcgttttttgggtttgttatcatcttcacaaacttgaaatgtttttctgtaatttttggatttggcagaggtttagaaaagcaagaagagatcatcttaccaaacggcataaggtacattctccataacatatgtttcagcaaatagaaaattttgtgagcttccgttgttgggatttacatgtctaaatcgttaccctttagtgttacattgtagcattctctatggtaggcttgttttattttgatgttgttttggggaatccttaatactttttgacgtggttcttaactatatctgctctttgattagcctgaaacttctttgcataccttaacattcatcacgaactcaatctcttgaaaagttcaatttggttctcattttgaaacgggacttttgtcttattttgatctcattttggaaaatacttgtaacatttcgaggtgaaatgcaatctatatctgctcttattgtgacctgaaacttcttgtctattcatggaattgaaccgtgtaggtactatgatctacaagttggaagtggagctactccaagctcaggatacttggtagtgtttgatgtaaagggacaagtacatggcactgaacaagtgttcgtggacacatttggaggcaaaggcaagtcactagcgatggtaatggactcaagaccgtatagcaagggactatgccaaggtatagagcatgttctcaggtcaatgaaggctggaggtaaacgtagagtgataattccaccgtccttaggatttggagacagaaatgtcgaatttggacagggtttggagattcctccatctgcaacacttgactatatcatcgaggttgatacagtttattgtttccaaactattgtatga

SEQ ID NO: 143829 - DNA, 427 bp, Arabidopsis thaliana landsberg
ctcaagctcaagttaaaacagaaaaattgtcaacttcagaaaacactccgtttaatggcgttgcctcatccaccattgttcgagctaccattgtccaagcctccaccgtctacaacgatactcccgccactctaggtaatctattaatcattttcattttaggtaggtcaagtttacgtaacgttctacatgaattttgttttcagaaaaggcgaacaagtttattgtggaggctgcaagcaagggatcggagctggttgtgttcccggaggcgtttatcggtggttatcctcgaggttttaggtttggtttaggggtcggagttcataacgaagaaaggcgtgatgagttccgcaagtaccatgcttctgctattaaagttcctggtaaatgctattctgctgacttttttctcttattgcttttt

SEQ ID NO: 143830 - DNA, 485 bp, Arabidopsis thaliana landsberg
aagctggaaaagctcatcaaccagttgagggaagttggtgaagagaatggacgcggtggctaactgaaccatttaactaatagattttcctctttggcttcaccagatgatctattaaatttctttaatgacatgcgaggttagctacttgcttgcttaaggtctgttttttcttcttttccatcatgtttgactcaaattagttatcatttctttgtatgtaggaatacttgggagccttgattcaggagtcgtgcaagatgatcagattattttggatcccaacagcaacttgggaatgtttgttcgtcgttgcattttggcattcaaccttttatcgttcgaggtattgagctttttacgtttgtgttattcttgttttattttgagactgaataatattaatattattctacatgacgtttagtttgaggttttgcttgaaggacgcggatttgttagctttttcgtcagccacttaattg

SEQ ID NO: 143831 - DNA, 1361 bp, Arabidopsis thaliana landsberg
ctccttcttcctcacttcttctcgatcacctcgccgcgattgtccccgatatggataagcaggtccttcgtttttccgatctccatcctgttgttcctgtgtcgattctggagtcattttagttgattgattgttctttgattaggtttgtcgattagattgaagtgaaattatgcaattgtgtttgtcagtaatgagcatatcgatagatgtttttggtgatttattggacctattagaggagcatatgtttcttctgattaggcttctttatgtctatggatgtctgtggtggtttattggtgttataaagttgttgacatttgtgtgtggtagattcttgagagggcaatcgaggaatgtggagatgacgttgattcagccattagatgtttgaatcagcttcgtttagaatctgccaataagaattctgattctgctacaaaccaatctcctgttgtaatccaggaaccaaatgttgaacctcaacagcaaggtagttttgtgtcctactgatctctaaacagtttactagtttcagtgtattctgcataagtcgtagactcgctctacaaagttttaattatgaaacgggttttggtatttgtaggatcagccaaggaggaaccaaatgtcttgaacttggatggtacagagtgggttgagctttttgttagggaaatgatgaatgcttctgacatgaaagacgccaaagcccgtgctgcaagagcattggaagctttggagaagtcaattaatgcacgtactggtactgacgcaatgcaaaatctccaacaggtgtctcatctatctttctttgtttctttcttcactctttgttgataagaagtcttgttgccagagatgtatatctatctatgaacatccgatttttcaggaaaacatgatgctgaagcagcaattagaagccattgtacaggaaaacagtttactgaaacgagcggtagtgacacagcagaagcggcaaagagaatcggaagaccaaagtcaggaattgcagcatctgaggcagctagtcactcaataccaggaacagttgagaactttagaggtctgtattaaatgtcttcaccttatcttatacaattttgttgtctttttgtcgatatgattagatctaacttctaagttttgttttgattgctccttgcaggtgaataactatgctctgacgcttcatctgaaacaagctcagcaaaacagttccatcccggggcggtaccatccagacgtcttctaatactttgtgaggccctcgtatcattttgtttccagtgtatttttctctgttggtttgtgactatttatatatattcggggaatcaaaactgtgttctttt

SEQ ID NO: 143832 - DNA, 599 bp, Arabidopsis thaliana landsberg
atcacaggcttgttgaggaagccgactaccgggcaactgctgagctctttggagtgaaggatgatgacaaaaaccttgatatgtttatccccaagtctgaaagcgattttttggaatatgctgaaatgatttctcataggattaaaccatatgaggtatgttgtattctgccttatatacctttattctcattggctagtattgaagctcatgatgtgtgaaaatatattttggtttctgttgcagaaaagttatcactatatagcgctgctcaaaacaatcatgagactttcattgaccaacatgaaagcagctgatgttaaagatgttgttcgtccattacaacgatagcaaatgaaaaactaaaggcagagaaagaagctgctgcgggaaaaaagaaaggtattattctgaatgtgttactcacaatcacttcatctttggtttatagttttatgaatgtgttattctgaatccgtttttcatgaccattggcattgcttgatcaggtggaaagaagaaacaacttattgtagataaggccaatgacgatctagtggctggtccttatgatgccatggatgacttcgacttcatgt

SEQ ID NO: 143833 - DNA, 708 bp, Arabidopsis thaliana landsberg
  unsure (1)..(708): unsure at all n locations
agacaattgctggaaaccaagnaggctattgagagacaaagaaagttactaagaaacgacanaatggtggtatgttatcccagtatttttttgtttgtcagtgaatccgcaatctcctgtaatatatcttgtgattttttccttgggcaaattgttatgatgtttggcacccttggtttttccatttgcgtgtagataaaaatgacggaactgacacagaatcaggagcacaggaggaagatatcatccctgacgaggtttacaagtctcgtcttactagtattaagcgggtatgttctttatgcatcatctcagcttcttgtttcctataagttgattcggttctggttacgtatcatacatttattggttttacctttcaggaagaggaagctgttttgcgtgagagagaaaggtacacattagagaaggggctacttatgagggagatgaaacgcatacgagatgaagatggttctcgtttcaaccatttcccagttttgaatagccgctatgctcttctaaatcttcttggtaaaggcggatttagtgaagtctataaggtcagaacattgatagatactacattcttttacatgtgagaattattttgcagtaatatgatgttatgcattttcagcaggcatatgatttggtggaccatagatatgttgcgtgcaagcttcatggtttaaatgctcagtggag

SEQ ID NO: 143834 - DNA, 1219 bp, Arabidopsis thaliana landsberg
atctctctactatggtgtactgtatctttcaatctatagttcagttacaaagatcatcacagccaattttagaaaacttctgacggaaaataaaaagagaggatttatttttatctttctgtgttaccggagaataaagacggtaccttttcactgttgacttaacggagaagatggcgactgtgccggagataaagataatgagaagcgagagcttaggtcatcggagtgacgtgtcgagcccggaagctaagctagggatgcgtgtggaagatctctgggatgagcagaaaccacagctcagtcctaacgagaagctcaacgcttgctttgagagcatccctgtctctgctttccctctctcttctgattcacaaggtatgaggattttgatgatgtgggtgtttgaccatgagctgatctataattggaactggtaattgtgttgaatttgaatcatgttctatggagattgattttgatttttgtgatgcaattattgatgggttctgtgatctcttggtatgtgtttgttgatgacttgtagtaggaatatgtgctgtgtgttgaaattcaagttattgaaagttttataagtcagaatttggaattcaatccagcttgttggatactcgaatcagttcgatttagggaatcagaattagttcttgatggtttttgtttcttagtctccttgtagaatcagagtacttattgattcagttctgctgtctcacatctttgtggtttccctatatagatattgagataagatcagacacaagtttggctgaagctgttcagacactatcgaaattcaaggtcttgagcgcgcctgttgtagatgttgatgcgcctgaagatgccagttggattgatcgctacatcggtattgtggaatttccaggcattgttgtctggcttttgcatcaggtaattgttctccaaaaaatacgagaggcgacttgtttttgtcatgatcaaattggattgtggtacctagtgaactatacttcatgtctgtactctacttgtctcctttaaaaaacagttggagccaccatctccaaggagccctgctgttgcagcttcaaatggattttctcatgatttcaccaccgatgttctggataacggagattcagcagtaacttctggaaacttctttgaggtccttacttcttcagagctatacaagaacaccaaggtgaggggatgt

SEQ ID NO: 143835 - DNA, 544 bp, Arabidopsis thaliana landsberg
acaattactgtgtttaggaagggttatgctgaaacgaagcaggattctgtttctatacgaagcaactgcgtcggttgattcgcagactgatgctatgatccaaaagatcatcagggaggatttctcggactgtaccattatcagcattgctcataggattccaacagttatggactgtgatcgcgttcttgtcatagacgcaggtaacaaaacagaacatacaagttgtttacctttttggttgattagtggagtttgtaacggtttgtgaaatctgcaggtaaagcgaaagagtatgatagtccagtccgtttactggagagacagtcgttgtttgctgcattggttcaagagtatgctctccgatctgccggaatatgagaccacttcttttttttttgcttttcgtttcttttcttagtagtcaactttgttgactcaactaatatgaatatgaaaacaccttgtctttataatttagttgagaattgacggtttatgtagatttaataagatttcaataatcacaagattcctttggcaa

SEQ ID NO: 143836 - DNA, 277 bp, Arabidopsis thaliana landsberg
gacttccggttgcgtaatattgcagaatatgaagaatggtatggtcagcctcacaaggcagtagagttacaggtacatttctctcaatgttattccttgattttaggtctgttgtgttcataatggttatacttaccaagtgtcctacggggttcagaaagaagttgtgtatggtctaacagagatactaagggaggacataaaaaaggcacgacttgtggctaacccaggctgttacccgactacgattcaacttcctcttgttcctttacaacag

SEQ ID NO: 143837 - DNA, 733 bp, Arabidopsis thaliana landsberg
aatgaagctagattattagtggtttctttgtttttatacatcggatcggtagcagaataaataagcttttttttaacgagttagtgaggccactctggagacaaccacacctgccattatctatatcattctccgttacttcgatcccaccgattcgaatcattctctctctctttcttgatctgaaaattgagtcccaattccagcaaaattatcaatcgaatttctgatcaactgagcgcgacggtggtggcgacggtggtggcgacggtgacagcgatcgacggttatggcttcgaagactaagtaagactctttactcagtttcactctgttttagttttatcctattttctctgggaaattttttagtagatcgtagtagatctgatccaagttactattttgagaaattgtcaatgatcgagttttggatctactaaattcatttctacatttgttttgtcctaattttttgcggcaatttatttctttgttctgagatcgactgttgttattgtcttttgttggaaacagaactagtttgtccgaaacaacaactactactactcctaccgggaaatcatctccagcaactccaagaatagcaaaaagaacagttaataaatccgaaactagtaataataattctccatctactactactccacattcacgtctttctcttgatcgttcttctccaaattccaaatcttctgttgagagacgatca

SEQ ID NO: 143838 - DNA, 578 bp, Arabidopsis thaliana landsberg
tatcctagccgccctaacttcaccttaatccgccgtatcccagctcatcctcgcctcggaaactcgaccagcttgctttcttattcgtcaccggtaattcggaaaattctggttcgtagcactctccgggaagaccaacccatcgcctctgactccgagagtagtcctactctactgatcggtgaagattctgctgcttttgaattagggaaacagaagcttgtttcctgggtttatttcggtgttgtccttggagttgttctctttatcctcaatgttgtttggatcgataattccaccggtttcggaaaatcattcatcgacgccgtctctaacatctccggctcaccggaggtatagatcaatttaacagtaactgaaccagtttcaatttcagttatttgattgttaaaaaccacttgtttttgcaggttgctatgttaatgcttatccttatatttgcaattgtacatagtggtttagctagtctaagggatataggagagaaacttataggtgaacgagcatttcgtgttttgtttgctggaatctctcttcccttagctatgagcaccatt

SEQ ID NO: 143839 - DNA, 661 bp, Arabidopsis thaliana landsberg
gtgatatgcattgtacataatgcattttgttgttgtctctttaagattttagctattgaggatcgattaggggaagtagctcttttcctttccttttctggtgaatactaatgatgcaaagcttgaatctacgccctgtattattttgtgctgcagagacagatagctaatttgattgaaattggtaacttgcaagtgcaaatatgtcggtcacagcgggagtgagtgaatctgcaattgctgtaagggagaaactaaaaggtggtattggacagactaaagtaagaaggtattggccaggaaaagctccggagtgggctgaggaagctgaagaagatgatgatgttaggatgcagaagttttctgttttggatagagcttttccaaagaatgatgatttgggtgttgctaggaaggatgatccaaggctgcggcgtttagctcagactaaagttgaaaaccgtgacgaagttagagctgatcatcggcgtattagacaggctgagattatatctacggaagaagaagaatcgaggaatcaagagaatagagacgaggatgatgatgaagatgccttggaagaaagaagaagaagaattaaggagaaaaatcttagtcgagcacaagaggaggctgctttacttcctttagaagaagaaga

SEQ ID NO: 143840 - DNA, 284 bp, Arabidopsis thaliana landsberg
agtgggcgtgtctgttccagaaagggctacgcgaggagttgcaggaaggggtatgtgcagcgaactgcggatggatccttaattatgtgtcagatgtagttgatgaagctgagaaggtagaggccaaacttagaagcatcaaggaaaaggtgccgctcgtgtctgaggagtttgcagatgttgactgcggacaaagcaatttgggccgacccgcatccgaagatgaggtggagagcaaaccctccaaatcctatgatccggaagaccatatcatgcaagattga

SEQ ID NO: 143841 - DNA, 1234 bp, Arabidopsis thaliana landsberg
tacttgctcgagttgcatggttcctgaggatttggacttacccaggtatgagataatttaacttaagcaaccagacatgcttttgtaattttctgttggctgactctgttttctcttactcgccattgcaggcttgctcctgaccgtactcaagatcttgtacaattcgctaaagaatttttcatcaatcttccaagctcaacaatcatctgcattagtttgcttggaggtgctttaaaccaattgttacaggagctaatgcatattcgttcacctgtttgtgcctgggtgctcatatcacgcctaaacccagaaagtcaaccggttgccacacttttacctgtagattcgattgtagaaggtaaatatgaactgcatactggttgatcaatggtgtttcctctttgtactcatgatctcactgattcactagacatgtcagatgacagtgcaaatcttagctctaccgaagcgattcaagtcaagagtttaaaggggccctggctttgtccatggggtaccaccgtggttgatgaggtagctccagcatttaaatcaatattggaggaaagccactcatcttcttctactactgaagaagacacatatagatagtcggctcctgtggtggaaaaagaaaaagaaacttaatcatcgtatgggaataattctaatgcatgctggctctctttctataacacgtgcacatgtctgtctatattacatgaacagcactgtgttttgatccttcttgtgaatggacatctgcgaacgaccctgcatgttggttgtcaactttggataaccattcttttattctaggaatctagaagcttcctgtctgggtccctgaaggtgtctgcttctcggagaatggtcgaactacaaattgcctgcctcagcgcagaaaaagctggtaaatgatctcaagtccaagtgcaaaatggaagtaaatgagatgcttttgaaggttattcttggaggtgggacggataactttaaaggagaagcatgcgttgctcagctttctttaagaaatggttgctatgtaggtagagggggatatctttatgaagaagatagctgtaaaactcctactgctgcgtctaatatatctgaaagtaggcatgaattggccttaaagctgatacatgacgcagcaagcaaactagggcaacaagatggacatgaaaatagagaacctatcattcttgtgttagatcccgaggttcag

SEQ ID NO: 143842 - DNA, 531 bp, Arabidopsis thaliana landsberg
caacatgaatgaccctattctcgtcagttccctaaacgtccctcctttgctaattttagaagactagcattgttaatattctgagttgtatggtttggtttgcagttgggttatggatcaaaagggcacaagattcattactcaggaccgttagtggttccatcaggaaacatggatcaagtgttgaaagaccatgaccgacatatccaagaagctgtgagaagagcacgaatcgataaggctcgagtcaagaaacttcaagctgacgaagcttcgagccaacaagtcgcaaccaatcatccctcatctgtttctagccgttgatccatcagtgaggcaaaagtaaatgatcaaaccgaacctcatttgcctgaaaccttttaacacggcgtattttgagtgaaaaataattgtattttattgattcaaagattatatatcatcatagaatcaaatcttttcacgttttagcttccctgtaatgtgatattattttattataagaaagctgtagaaacagagttatatatc

SEQ ID NO: 143843 - DNA, 462 bp, Arabidopsis thaliana landsberg
  unsure (1)..(462): unsure at all n locations
gganaacgcaagctaccacagatttagagtttatccactttatctttcgccgagatccaacaatggtaagttcctctatctacatacatctctctaattctactactgctatcacatttccgaaatttgtgggtttgtaattcggctccaatgggactctctaggctgatgtggaaccagaggttgcagcagcaggagttccaaagaagagaacgttcaagaaattcgccttcaaaggagtcgatctcgatgctcttctcgacatgtctaccgatgatcttgtcaagctcttctcttcccgtattcgcagaaggttaggctttttgaactcagtaaaagtttcgtcctttgtagaatcatctcatgtgttttgactaatttgaattctctttgtataggttctctagaggattgacgagaaagcctatggctttgattaagaaactccgcaaggcggtaaga

SEQ ID NO: 143844 - DNA, 575 bp, Arabidopsis thaliana landsberg
cgaacaccactgcattgggctatagacagtggccatcttatcgttgctgaagctctggttgataagaacgcagatgtgaatgctaaagtaaataaataaccaaaaccccctaaactaattctttctctcaattacagacttttatgtttttgtcgctgacaaactttgtgcaggacaatgaaggccaaacctctctacactatgctgttgtgtgcgaaagagaagcactcgccgagtttctggtgaagcagaaagctgatacaaccattaaagacgaagacggaaactcgcctcttgatctctgtgaatcagaatggtcttggatgcgagagaagaaggattccaattagtgttttttaagtctttaaaattgtgtgtcaaagctagatgcttgtgtttttcttacatttcctctgagcctctttgcttcctcttaagcttatgttttaacatacaacaacacaagttacatatgatatagtagctctagtttttattggttactatattgaacccagagagatcatcatcatcaatcatcataactcaataatagttttttttttgtttttttt

SEQ ID NO: 143845 - DNA, 457 bp, Arabidopsis thaliana landsberg
gtacttattgatgagtctactcaagcaacagaacctgagtgccttatccctttggtccttggagtaaaacaggtattagggctctcagtgaactgacttgttttcgttatttgctattgattgcttacagaagtttttttgctctaggttgttcttgttggtgatcattgtcagcttggccccgtcattatgtgcaaaaaagcagctcgtgctggcttggcacagtctctctttgaacgacttgtgactcttggtattaaaccaatcagattgcaggtactacattaatcactcagggaataaggaagataatatcttatattccctttcactgtgtgtaggactgtccacttaatgttgtcatatcatattcttgattgcaggttcaatatcgtatgcatccagctttgtccgagtttccatccaacagcttctatgaaggaactctacagaatgg

SEQ ID NO: 143846 - DNA, 1151 bp, Arabidopsis thaliana landsberg
aaacaaaggatccttttttactggaaagatgtttttttttttcttatcttctgagataaattgcgatagagagagagaacaaaaaaattctcagtgagcgcttattgatcaacaatggcgaaagagacagtgtgtgtaaccggagctaacggtttcatcggatcttggataatccgaacgttaattgagaaaggctatacaaaaatccacgcttcgatttacccaggatccgacccgactcatcttctgcaactacccggatccgattctaagatcaagatctttgaagcggatctcttagactccgatgcaatctccagagctattgatggatgtgcgggagtgttccacgtggcgtcaccttgtacgttggatccaccggtagatccagagaaggagctggtcgaaccggcggttaagggaacgatcaatgtgttggaagctgctaagaggtttaatgtgagacgcgtggtgatcacgtcatctatctccgcattggttcctaaccctaattggccggaaaaagttcccgtcgatgagtcgtcgtggtccgatcttgatttttgcaagtcgaggcaggttcgttaaatttcggtttaaaatggttagtgatgatttatatgatatttgtaacgattggtatataattttgattttagaaatggtatccaatttcgaagacattagctgagaaagcagcttgggaattttcggagaagcatggaaccaacattgtgacgattcatccatcaacatgtctcggaccgcttctgcaaccgaacctaaacgcaagctgtgctgttctgctacagcttttacaaggctcgaccgagacgcaagagcatcactggctcggtgtggttcacgtgaaagatgtggctaaaggtcatgtgatgctattcgaaacacctgaagcttctggacggtttttatgcactaatgggatttatcagttcagtgagtttgctgctcttgtgtctaagctcttccctgagtttgctgttcacaagtttgataaagagactcaacctgggcttacgtcgtgtaatgatgcggctaagcgattgattgagctcgggctggtttttactgcggttgaagatgcggttaaggagacggtccagagtcttagagacaaaggcttcctctga

SEQ ID NO: 143847 - DNA, 1102 bp, Arabidopsis thaliana landsberg
tttatatataaagagagacgcttttctttatttcattcatcgcttctccaaaattttcttcaaagaacaaatctcccaaatctaaaatctttctcttctctcttcgtttccataaccatgtctgcgaagaagattgtgttgaagagttccgatggtgaatctttcgaggttgaggaggcggtggctctcgagtcacaaaccatagcgcatatggttgaagacgactgcgtcgacaacggagtccctcttcctaacgtcacgagcaagatcctcgccaaggtgatcgagtattgcaagaggcacgtcgaggctgctgcctctaaggccgaggccgtcgagggtgctgctacctccgatgacgatcttaaggcctgggacgctgattttatgaagatcgatcaagctactctctttgaactcattctggtatgtttcttctctcgatctgatttgatttttccatcgaattttgaattttgggattctagggttttcgatttgggaaaattagggtttcgaaatttaggtgtttgtttcagaaattgaatctgcttgagattgatattgttagggttcttgtggaaccaatcattaattgaatctatcgatttggattataatcatatctgtgtttttggattcggattttgatctaatggttatgaatttgggatcttgtgcaggctgctaattacctgaatatcaagaacttgcttgatctaacatgtcagacagttgcggatatgatcaaaggaaagactccagaagagatccgcacaacgttcaacattaagaacgacttcacaccagaggaagaggaagaggttcgcagagagaaccaatgggcttttgaatgattgatcttcagagagaagaatcaaaagcagcaagcaaccaatttcttcttccttatgtttattgccgttttctagtgttgttgatgacttgctttataatattcttcatgaatcatgactatcttcttcctcttctttctttcttatcaagaaccaatgtttcttactctgtgtgggatggataatttgtgcttgtacataatcttcaagagtgatgctggtttgtcttacaaaataacttcttt

SEQ ID NO: 143848 - DNA, 555 bp, Arabidopsis thaliana landsberg
aaaaccactcctgacataagatggagggtccttagtgggaagttgacctcttcagatgataccaaaatattgcttgcaaaggcactttccattcttcatgtaagtcaagaccacatttcaaactcttctgtcctttctgctggtttgtcccttctaacaattgtatgctataggaacggtttgatcctatcagtgaatctgggaccaagggagatttgataccagccatggtgtatgggtaagcaattttgtatcttcaatcagtcgagtggattattctttgtgctgatgaacaacttttgtgtgtggaacagaaggcaaacaaaggcccaagattttagtggcatgtactgcactatgttggctgtggagtaagattcttcttctttttcactctaatttattttctgtgacgcatgtttcatctttttaatgttgtcctttttttgtttcttgtgcagcgaagtgattgtttcagtgggaatctttagggtttatgggtcagaacttgcagaactccctctggttgctaccagcaaagattgtcaagggcag

SEQ ID NO: 143849 - DNA, 2765 bp, Arabidopsis thaliana landsberg
ctactcttgtgatccactagggcacgaaagagatggagtttttcacagagtatggtgatgcaaacagatataggattctgaaagttattggtaaagaaagctatgcagttgtgtgtgcagctattgatacacatactggagagaaagttgctattaagaagattaatgatgtctttgaacatatttctgatgcgcttcgtattctccgtgaagtacagcttctgcggcttttacggcatcctgatattgtggagatcaaaagcattatgctgcctccttctaaaagagagtttaaagatatctatgttgtgtttgagctcatggaatcagatcttcatcaagttattaaagctaatgatgatttgactcgtgaacaccaccagtttttcctttatcagatgcttcgtgctttaaagttcatgcatacaggtgtgattcgtttcattgtttcagacctgtgaattttggcagcatgttttgtattttttctggttgtaacttactgttatccttttgttcatgcagctaatgtttatcaccgtgatcttaagccaaagaatatacttgcaaacgcaaattgcaagttgaaagtttgtgactttggattggctagagtagcgtttaatgatacacctacgacagtcttttggacggtatgcacccttgtctacacattttgctgtaaactgttaattcagttctggtaatctctccagtgtttttgatttccttctctttgtcttttttgttccaggattatgttgccacaagatggtacagggcacctgagctctgtggatcattctgttctaaggttgttgtaattcttcttctccttccttgtatgcttgttccatttttctgtgtggttgttacacgttagagttgtgtcctattggagatagaatgaaccacccacacatgaaaataattcgtgttcaacctcaggtagcctaggcacttttgtcagaattggtcgctcaatattctaatatgcagtttttatcttttgcagtatactccagcaattgacatttggagcattggctgcatcttcgctgaggtattaacagggaagcctttgtttccaggaaaaagtgttgtccatcagttagacttgattaccgatcttcttggcacaccaaaatcagagaccattgctggggtatgttctttttgcttccacattaccaagttcttttttctgctgggaggagactaataatatgtctctaatgcaggtgcgaaatgaaaaggctagaaaatatttgaacgaaatgaggaagaaaaatcttgtccccttttcgcaaaagtttcctaacgcagatcctttagcattgcgtcttctgcaaagactgttggcttttgatccaaaggataggccgactgctgcagaggtgtgtgttctgtcattatattgtcagttgttactagtagattctttttctttcgtccctattagaacaactgacttgcttctagtgcagtaagctctagttcatatttcagctccttacatggtgatgttaacactgtgatgttctttgacaggcgctggctgatccttattttaagtgccttgctaaggttgaaagagaaccctcttgtcagccgatttcgaagatggaatttgagtttgaaagaagaaggttgacaaaggatgacattagagaactaatatacagggagatactggaataccatccacagctgctcaaggattatatgaactctgaaggctcaagttttctatatcctaggtttgttacgtcttccccttataaaccatagtcatgtcattcatagcaaaataaatgcgagacactgcactctcttgttaatcatttaactgattaattcaattttacattgcagtgccatcggtcatttgaggaaacaatttgcgtacctagaggaaaatagtggcaaaagtgggccagtcatacctccagacaggaagcatgcttcacttccacggtatgttttctcatccattcataccatacatctctgttgattcagtatgacacttgtgattaatatttacctcttcatcttcgtagatctgcagttcattccagtgcagtaaactccaacgctcaacccagtttaaacgcatcagacagtcgacgtgtttctatcgaaccttcaagaaatggagtggttccatcaacttcagcatattcaactaaacctttagggcctccaccaagagtaccatcaggtaattcccgaattattatctatgaatgtaattgactttttctctggggatgaaaatttgtagcaatctcccatcacagttaaaatcataaatagatgcacagtattgttctcaaagtcaatcgccttccttatgtctaacaggtaaaccaggccgtgttgtggaatcatctgtaacttatgaaaatgacagaaacctcaaagagtcgtcctatgatgcaaggacatcatattacagaagcacagtactccctccacagaccgtatctcctaactgttacttccttccaaacaccatgaatcaagagaagcgcagtggtacagaagctgcatctcagccaaaaccgcagtttgtccccacccaatgcaactctgccaaaccagctgagctgaacccaaacccttatgtccaatcacaacacaaggtgggtattgatgctaagctgttgcatgcacaatcccaatatggtcctgctggagccgccgcggttgcagtagcagcacaccggaacattggagctgttgggtatggcatgtcttag

SEQ ID NO: 143850 - DNA, 1048 bp, Arabidopsis thaliana landsberg
cctggacgggtttttgagtagactcgttctgagtcgaaactgtggtcatggtggctccgataggacgatggattttgccggagctttgtcggaaattagaacagaatgggagaagagaggctttgaagctaatctgtttgatcatcacaccatttatgtccaggtacattgactctgcattaccacaagaaaaattcggtaagctttttagggtttttgattcgttcgaaatttaggaatttttgccttttgtcgcaacaagttgcaacttttgacgtcaagtgggcttttacaacacaactcatgatgcttcatgggccataccatgccgccctgaagttgaccatgccaagttttagttttgttgttaaaccttttctttatcaattttctaataatataacaaaacatacggcaaaaagtaaaataaaaaaatacgaatttctaatttatcagccaagaaaatctcatttttgtttgattagtctaagtgtacctaattttagttaaatttaacatcaaggataaattgtggatttatttttctttccaaaatgtttactggtagaggataagcatatgttagccgagggtattataggctagtggcaaagcccaccaaagttggcttctgactacacttactctgtgtgggttaatgtaagccttttgtgtggccaagtttgaaaagtatagctttttttttttaatcatcgaaaagtatagcttttaagtgagtagctcgtgaaattggtaagtgttggaaattcgaattttattaaaattatgtactacagtaccacttgttacagctgaattgatgtattttataaccaaatgtgtaaatgatgagtttggacattttatataattgggcttctttatgctatatatattaatagcctatcaggcccaatccgactgcctgatcgtttcaaattctcgagttggatcagattccggtttacagattttgacgcgacctcatcgattcgaccatcaaagcaaagctctccttcttcaagctccagttactctccttctttag

SEQ ID NO: 143851 - DNA, 1055 bp, Arabidopsis thaliana landsberg
atggatatatggcttgcttatgcacccgtaaagaataaccctgaagatgctgctaaggtaaaatacttaataaacagagacaataactgatcaagaaggttcatgtcttaaactgtaacctgaatttgagaggaataccaaatatgaatgatggtgcttcctttctgactaatataatacgttttcccctatccactgaaggtaccaaagggaaacccatatcatagtgctacttctggagaaatggcgatttatcgtgctaacagcctcattcttcaaaaggtaattagtactctccagagaaacttgattctaaataaatcggttcgaatcagacaattctttccatgattatctaagcgacatctattttctatggttttacgaattctttaggctggtgtcaaagtggaagagcctgtgaagcaagtcttgaatggccaagaggttgaagtatggtctcgtatcacatggaaacccaaatggggaatgatcttctctgatatcaaaaagaaagtcagcgggaactgcgaggtctctcagagatccacaatggcaatcaagggtcgtaatgtatttatcgaagatctctccttggacggtgctcttattgtagattccattgatgatgcagaggtatgtgatgtgtatttgaaagctatcatattccattgttatctctttgattatcatcatattaacattgtgaaaacaggtaaaacttggaggtttgataaagaacaatggttggaccatggagagtgtagattacaaggacacatcggttccagaagaaataagaatcagaggttttagattcaacaaagtggagcaactcgaaaagaagttaactcaacctggcaaattttctgttgaagattgaagttatctttgcacatttatgtgacacttttttaaaaagtgttatttggcaatatgatcaattagcaaattagctattcttttaagagaatgccaaatgatccattaatttgtccttctaatggagagattaattcaatctttcgttttgtttccaacgaaacacttccttt

SEQ ID NO: 143852 - DNA, 251 bp, Arabidopsis thaliana landsberg
tcttcttcctttaccaaatcttttcttctttactctttttcatcgtcgagaaaaaatggagttggatcttacacctaagttgcccaagaaggtttacggaggagatggtggatcttactctgcctggtgcccagaggagttgccgatgctcaaacagggtaacattggagccgctaagcttgctcttgagaagaatggcttcgctgtccctcgttactctgattcctctaaggtcgcttatgttcttcaag

SEQ ID NO: 143853 - DNA, 765 bp, Arabidopsis thaliana landsberg
tgatcgttcgaagcaagatgatgttccttctacgctccgtatcctcatgaactacacttctccttctccccatggtaaaaattagaacgaatagaatcgattttggtgtgtgtgtgtgtgtgtgttgttgtgatttcttctctgtgactgtttgttttgtaatgttcttccttcagattctactaaacaagtcgtagagaagaaggaaaagcttaagaaagctgaagtagttgttcctgcaacggtatagttttctaacttggggttttgtaatttagagatattaatttgactcttgtgctatagaacaactttaaaatgatatgaattgattaatgttgagggaagtttcaattagaattagaaatgtgttggattaaaaagctgagggtacacaaccttgtgtgatcaggagagtgatggagatgatagtgtggtggagaagaagaagaaaaagaggaagagaaatcaaatgacggatcttcgttttgaaaacgaacttgcagagattgatggtcggtctaaaaggaaagaacgcaagaagaagtaagccttattcatttctcttaaatggctaaatctttgttggtcatgtgtttgtgtttaatgactgttctactttgatgcaggtattgggaggccaagaagcaaaagaagaataaaggaaagactgaagataccctccgtgaaaacttccccaagcatgaacagataagatttggtgatgttgtgcaagctccacttaagttggctgttgttccgaag

SEQ ID NO: 143854 - DNA, 551 bp, Arabidopsis thaliana landsberg
ataaagaagaagaagctaacgaaaaataatggcggagagatcaaattcagaggaagtgaagcttttgggaatgtgggcgagtccttttagtcggaggattgagattgctcttacgcttaaaggtgtttcgtatgagttcctggagcaagatatcacaaacaagagctctttgttgcttcaattgaatccggttaataagatgattccggttcttgttcataatggtaaaccgatttctgaatcacttgtgattcttgagtatattgatgagacttggagagacaatccgattcttcctcaagatccgtatgagagaactatggctcgattctggtctaaattcgtcgatgaacaggtatgaattttcaatttcgataactggtttgggtttttgaaccgggtttttaaaaccggtttgttggggagtttcagatttatgtgacggcgatgaaagttgtggggaagaccggaaaagagagagatgctgtggttgaagcgacgagagatttgttgatgttttggacaaagagcctgttggaaagattttcttt

SEQ ID NO: 143855 - DNA, 307 bp, Arabidopsis thaliana landsberg; identical to SEQ ID NO: 13866

SEQ ID NO: 143856 - DNA, 193 bp, Arabidopsis thaliana landsberg
aaaaatagctgagcacaaggggaggatcatcgtcaaagccaacgagaagaatactctgaaatatcttgaagctgcgacaggaaaaatggacgcggcgatagggaaggttttcgattccgtctcagacttcttctccggcgctgcttctgcttccgccgatgagtttcccttgtgcgattccgacatcatctcc

SEQ ID NO: 143857 - DNA, 266 bp, Arabidopsis thaliana landsberg
gagaaaacaatgttgagtactttgcaattcaatatctcgttaccgacacaatacccgttcttgaaaagattcctcaaggcagctcaagcagacaagaaggttagttaaaaataatggacttatgaatcagtttaactagaagtttgaattttagaaaggaactaactgtgaaactgaaaacaaaacagtgtgaggtcttggcgtcgttcttgatcgagcttgcccttgtggagtacgagatgcttctgtttccaccatcattacta

SEQ ID NO: 143858 - DNA, 600 bp, Arabidopsis thaliana landsberg; identical to SEQ ID NO: 7608

SEQ ID NO: 143859 - DNA, 564 bp, Arabidopsis thaliana landsberg
gttagatatggatttggagcttggtctgaaagcaaaaaagctggatataacttagtagatgccgtttcacggtcaacagttcaggttaagccatatctaatctcgtaatttaaagtattaaaccagtgattagttttggttaattgattctgtgtgtgtttaggtttatccatattcgtggacagcaatattgatagctatggataatcaaggaatgtggaacgtgagatcacagaaagcagagcaatggtatcttggtcaagagctttatatgagagttaaaggtgaaggagaagaagatccttcgactattccggttagagatgaaaatccgataccgggaaatgtcatccgttgtggcaaagttcgataataattaattgtctgaaataataaaaacctagaaaagtctattttaattagcaaaactaaagaacgggttaaaggaatgatcagagagtattaggatctgtgttgatcttagggtttgtggtttgattgcgattcgaatcacttgtgtattgcagaagacggttggtaatttaaagagatgatcttagggtt

SEQ ID NO: 143860 - DNA, 1427 bp, Arabidopsis thaliana landsberg
gatatggcggtttcttgcaaccactctgcgattctcttctctccatcatccaccgctggttcctcctccgttacttcttcctcgtcgctcatcggctttcctcgtttccaaacgctgcgtttcaaatccagaagagtttattcgaaatctagagcttcttctcctgtctcggcattgcctttacgttctctagaagctctgattttcgattgcgacggcgtgattctcgaatccgagaatctacaccgtcaagcttacaacgatgctttctcgcatttcgatgttcgatgtcctccttcttcctctgcgtctctcgattggagcctcgagttctacgataagtttcagaatctagtcggaggtgggaaaccgaaaatgcgttggtatttcaaagaaaatggatggccaacttccaccatttttgactctcctcctcagaatgacgatgatcgagccaagttaatcgatactcttcaggtcacttgcctgaagaagaaccaaatctataatttactgcaatgttgatgttaaaagattggattcttatcttttgcaggattggaaaactgagaggtataaagaaatcataaaatcaggaagtgtaagtagccaaatcttagttttgggattacttactctgagagaaactaactctctctgctttttactttcaggtagaaccaagacctggtgtaataagactaatggatgaagcaaaagctgctgtaataagatcttctttttagccttttataattgtctaaactgtatttttagctctttatgagaataggttcttgaaatgcttccaggggaaaaaactagctgtttgttctgcagctacaaagagttcagtaatcttatgtctcgagaatctactcgacatcgtaagttgtttccctttcgccaatctcttatctaccatgcttctttcgagttttttctttatcgattatactttatgtcgtttaggagcggttccaaggacttgattgcttccttgcaggtgatttcatcacattctctctcttcttatacttgcattttatgtgttaaacacttttctaaagtttgaatccctttggttgtatatttggctttgtaggggataatgttaaggagaaaaaacccgatccatcgatatatataacatctgccgaggtaatataactcccaagtaatatgatagttactataacttaacaagaagaattagcccaagtttcacattctgtatatgttggttatttgcagaagctaggtgtttcagtgaaagactgtttggtcgtataggacagtgtgattggcctgcaggtctaaagtcttatcttttgcttgtcctcactattctggaaaaaaaatcttaaaatggcgtgacttttaatctatatatataggctgctacaaaagcagggatatcatgtgtg

SEQ ID NO: 143861 - DNA, 1391 bp, Arabidopsis thaliana landsberg
aaaaaagttataattccaattttgtccttttagagagagaaaaaggccaaggcgttttttcttctctcgttcctccattttctacagagagatatatcaaaaattccattttctacagagagagagagagagagagagagagggacgaaatattaatcatcgatcaagttgcttcaatcgcgaaaaaatccatgaataaaactatggaatggaatgtgaatcaaaggatttggttatggtgatgacgcgatcttcgattcgattcggtgattaaaagatttggaagctcagatctcaagctcggatttctaatttttgttggattatctaacccaaaagccaaaaaaaaaaatgaacggtggtgacgatgccgctactagtggtcctcctccgtctttagagtggagattctctcaggtcttcggtgagcgaaccgccggagaagaagttcaggaaggtaattattgcctacgtgtgttataaattgtgagatatattcggagtttggctcttcttttttcttttagatccggagtgtatttgaggactaagggtttgatttgttgtttggatctgattagtgagttattcctctactacttagtgggtcattgatgaatctctgtggcttttattgcactgttagtagagtttctaagttctatgacaagtttggattgttgtgtattatgtgatattagagcatctctatttagctgattgttgcgaggttgtaactctcatttttgtacaagtttcagctgtactgctgtaaatttgaatcatttgatacgctgatgatagttttaagttgagattaagagggtaatctagcttcaaggttttgtctgttcaatgccataagccatgtatacttttttccactggtacaatggtgtctcgactctgtttaacagcaagaaaggcatatgaagcgatgagggattgggtcgttgagggacaagtgtgaagggttatcattggtcatgcattttgggttcatgaattgaatttgtaatattgagttggtctatagctgctctcttctggctgataagacttcccggagtattgatgtaactaggttgccttcagaggcactttccgtattagataaatttaatctgctctcatgttattggatgtaatcttctttaccggtttacatactctatgttatggagaataatatactagctgcacctcaaggttattatgtgtttagctcctacaatttagtggtgacttctgatgtaatgattctgtttgcacacatttcttccgcagttgacatcatttcagccatcgaatttgataaaagtggagaccatctcgcaactggtgaccgtgggggccgagtagttctttttgaaaggacagatactaaagat

SEQ ID NO: 143862 - DNA, 2115 bp, Arabidopsis thaliana landsberg
atggctgaactcaccaagagaaatgaggatggaatatcaatactgttttatcttcagaaaatatatccaggtatacaattccttttaaagattagcgactcttgcctagttttttatgtttcttacttacgcttcgttatgttttctgtacttaattgtattaccgttatagtagatcctaaatgtttcttatcgatatttgatgtgttgcagatgagtggaaaaattttcttgcacgcataggacgagacgaaaatgcgttagaaggcgatctagataatgaaagagacatacttgaacttcgattttgggcctcttaccgtggacaaacgttagctagaacaggtacaataaacgcatatctacacctcttttcttggggatcactgttcacttcatgatctcacattgcaagtaataatgatatctctatcaataaagagaccttacttttctgctattccctcgcatatattttcagtgtttttctttacgtgttatctggcattctatctgcagttcgtgggatgatgtattataggaaagccctcatgcttcagtcttatctggaaagaaaagctggcaatgacgctacagacgctgaaggatttgagttatctccagaagcaagggcccaagcagatctcaagttcacatatgttgtcacatgccagatatatggaagacaaaaagaagatcaaaaacctgaagctgttgacattgcattgctaatgcaaaggtaagaaaagacttttctggattccactgttggttaaggagatggacttttctatctcaggtctagtgcgtctgttatcattctgttattgtattattaagctaatctttttcattctattgtcagaaatgaagcccttcgcattgcttatattgatgttgttgatagtccaaaagagggtaaatctcatacggaatattattcaaaacttgtgaaggccgacatcagtggaaaggataaggtaaactgttattatctgtgaacccagacgtaaactagtgttcttgtttcactaatgttagaaacacttgatcatactttaattgatcgataaactgtgcttacgctgtaaatggaattttgcgtttcctcccccttttcctctttggtccttctattttgttatatggaatgaccactttgttctttatttatgcaggaaatttactccataaagttgcctggggacccgaaacttggcgaaggcaaacctgagaatcaaaaccacgccattgtgtttactcgcggaaatgctatccaaactattgatatgaatcaggttagtatgcaattcttctttcgtctcttggcatctctttgtttcaaatgtcgtctttcgcgatcttgtgtgggtttgtaatgattaagtttctggggaagttcaatcaagtaaatttgaaatgcataggctttataaaaaatagtaagaataatagtttcaaatttagatcttaagaattaaaaatagggcgtgagaaaaacagtgcttcatagcttatgcacatgtctagtggagacatgtggctgtagattgatttggttagccgagtttcatccaataccttgtccaatctatgtaatttggattaattgactagaattcctcttggtactagaaaaccttaggtgccactatgtagacttttacttgagcataatttgagctcatgcgacattcaaattagatttaacaaatttcgctttccaaaagaataaagtgaaaattttgccaaatctagatacataattttaccaagtacattcaatatgggtttcactgaggaagagtggttcctagctttgattctatgtttgaagctcaaaattaaacacatgtggagtaggaatggttcttaactgaaaagcacttactgattacatttgaatttggagtgggacatcttattacatgaatgattgtacctgaatcttctgacatgtgtacatgtgtgctttacatcctttacgtttgagacaagagctaaatgcatgcccaacctttagcaatatgttcgaatttttttcatttcgtgatttatttggataattattttgaagaagacttaaaaatgagaaaatcttttggtggaatttga

SEQ ID NO: 143863 - DNA, 2383 bp, Arabidopsis thaliana landsberg
  unsure (1)..(2383): unsure at all n locations
ccacgaacttaataaacaagtgaagacctatcacattttgcagtttcaacaaataaatatcccaaaatttagtggcggcgagagggaaaccaaaattcgcgagagagaagtatgtcgaagacgctggtgcaaccggtagggcaaaagaggttgactaatgttgcagtggttcgtctcaaaaagcaaggcaatcgcttcgagatcgcttgttacaagaataaggtcctttcatggcggtctggcgtgtaagcttcgaaatctttgcttatctccactataatcgcttcaatcgatcttcgtcgctgcttgattttgtcgaatttggttacggttttttggttgtttatcactgttaaaagtgtagttagatgaatattgtgtttaaatggatcatgtgtttgacctaatttgataaatcgcatcatcaatctttgtttgcgttgttcttgacttgtcttgtgttgattttggcgaatttgattttgatattgaggtcttaagcctaattttagctgtttatctctgtaaataatgtaaggaattggtatagtgtgatgaatttggtgttaaaatgacctaatctgaagagaaacgagtatcatcgcattatcaatctttgtttgtgttgttctttgactggccctgtgttgattttgttttccgaatttgacgaattctgttatgatttggaggtctcatacttaattagttgtttatttcttgaaataatgtatggtatgataagtttggtgtgatgagggatatgagttaatggcatcatcaatttttgtttgcgttgttcttgactacttgtcttgagttgatgtttttgaatttggcgagtcgattctaatgtggaggtggtaagtctaatttagtcgtttatctctgtaaataatgtacgcaaatggtagagcatgctgaatttggtgtgaaagatggacaatgtgtttgacctcttagaaaagtaatgagatttgagtcaaaatgtttatgcagggagaaggatatagatgaagtgctacagtcgcatactgtttattcaaatgtttcgaaaggagttcttgcaaaatcgaaagacttgatgaagtcgtttggatcagatgatcatacgaaaatatgcatcgatgtatgttaaaacgcttgtttgattttcttagatttctgaagttctgactccttataatatatctaatatgttgcatttccaactctcatgttcagattttggagaaaggagagcttcaagttgctggaaaagaaagagaatcacagttctcaagccagtttcgggatatagcaacgattgttatgcagaaaactatcaaccctgaaacacaacgaccttataccatcagcatggtagagcgcctaatgcatgaaattcattttgctgttgatcctcatagtaattccaagaagcaggtgagttgtttaaagttataatgtagaagcaaagtgacttgtgggctttctatcaaaagcttatgtgagtcttcattttgattatcaaacctnnnnnnnnnnnnnnnnnnntccgtgagctgcaaaagcacttccctataaagcgttctccaatgagactgcgtcttactgttcctgttcaaaatttcccctcgcttctggagaagctaaaagaatgggatggtagtgttgtctccaaagacgaatctggaacacagatgtccactgtaatgatctatatcttcaaacattttgaacttcttcttttctataatcctctctgatcatggtgatacatttcttgtgtaggtctgcgagatggaaccgggcctattccgagagtgtgattcccatgtgaggagtatccagggaagactagaaatactcgctgtatcagttcatgcagaaggtgacacaagcatggatcattacgatgagcatgatgatatggcattgcaaacccacaagccgttgttacctgctgagactgagactaaggatttgaccgatcccgtcgttgaacttagcaagaaactgcagaagcaagagataagtactacagataacataaagcaagaaggtggagaagaaaagaaggggaccaagtgcagcacttgcaacacgttcgttggagaggctaagcaatacagagagcactgtaagagtgattggcacaaacacaaccttaagcgtaagactcggaaactccctcctattagtgctgacgaatgcatgtctgagattgacatggacgactctagagcagatttgaaagactactctttctgaaactacaattttctccttttgtgcttttaattttgtcaatgtgttaaatctcgtagtcatatgtgagtatgaatacacaaaacttgtggaatgaaattttgcgcaaactttaagagtaaaaacttgtgtt

SEQ ID NO: 143864 - DNA, 1186 bp, Arabidopsis thaliana landsberg
ctcttctctaatccctcacctcaaggtaagcttcttctctggcactgattacattcaaatctctcttctccttgcgttgcttttgctggtttattcgaatttcacgacttgactcctttctcttttgattgttgattcaaatcccgattttgcgcttactagttgtttctactctcgtcgctctcttgagtgtctgggttcatctttctgacatctgctctgccaagatgtccgaagacaaggaatctgatgtggttggagaagaagaggagagccatgtgatcaaagaagataaagagttaaatgatgcctccagcgagactctgacagaaaatggtgatcagctactccaaatgattgctgaactgagattagaaaatgactttctcagttcccaatttgaggaactcaaggatgaggtagcgcaaggtaggtctctccagaaagctaagcaagtgaaagcggactctgctcagctgaaacaacttcaagaacaggtcgcatcattgagcagagaaattgatgtggaaaaacaaactcgagttgcagctgagcaagctcttgagcatctaagggaagcatactctgaggctgatgctaaatcccaagaatactcctctaagttttcccaaggtcagaagccatcttttctatttgctcattcattgaccggaaccagtgtttgccttttctcaacttgtgctattacattgttggtgtagttgaacagaaactggaccaggaaatcaaagagcgcgacgagaaatatgccgacctggacgccaaattcaccaggcttcacaaaagggctaaacaacgcattcaagaaatccaaaaggtgaatgtctttctctacattttataatgctttctgttttagccactttgaggctactgtgagtttcaaaaaccatcttatactatttcggaatttctatgctgcattttcagacatatagatttcgctgctatgtgctgtcttaatctcagtggtatattatattgctatcttcaggaaaaagatgatctcgacgcccgtttccgggaagtgaatgaaacagctgaacgagcatcttctcaacactcatccatgcaacaagagctggaacgcactaggcaacaggcgaatgaagcacttaaagcaatggatgcggagaggcgactactaaggagtgccaataactag

SEQ ID NO: 143865 - DNA, 937 bp, Arabidopsis thaliana landsberg
atggccgtcactattacactcgatacgactatgaggtaaaactgacaaatgtcattattggttgtagacaatatgtagaataaccaattacctttgaccaatttctaaatatttgctccatagaacgtagacgcaactgcagctaaagaactcatgggacttttggttaagttgcaatcttcacttcccgaagtcaacaagtatctctctctccacttaatttcaaatccattcctttttacttgtatgactttcagactcacgtttttggataattggtcaggattataaagggaattcatccagaggtggcaaatgttgcaagcgcagatgagttcgagtacaaagatccagtagatggctctgtttcaaagcaccaagggatccgatacttattcgaggatggatcacgacttgtaagtcgatatgtgtgaaatggattcataacaattcaacaacctgtgaaattgtaaaagctaatccgggcttgtttctcttgttcatgaaggtgttccgtctctcgggaactggctcagaaggagcaacaataaggctatacattgaacaatacgagaaggacgcctcaaagatcggccgagattctcaggatgctcttggtcccctggtcagattcccagataccttaattactcccaaatttacgcataatcgatctttgtcatgtttattaacaccaattgttggtgtctgattttcacaggttgatgttgcattaaagctgtcgaaaatgcaagagttcaccggccgatcatcaccaactgttattacataagacagctttcagaagacgctgtctccaatactactctcattccaacttcatttcttatgaatttgggttttgcttttttcctgttatctgttatcttacacaagtatacttcaatacatataatcttaatggaatatacattag

SEQ ID NO: 143866 - DNA, 640 bp, Arabidopsis thaliana landsberg
tataagttgtagtagttaacactttcccgcactctcatatttacaactatatagatacaatgaaaatgaaatttcatatttgttgttgatactctaaaaacaaattatcgcaaggtatcaaacttgaaagaaaaaaaagaaatccaaaaccagtcatatgataggcgccttttctataaaaccgttttatgtatttggattgatcttttaacgatatatatgcatatgatgttgaaataggaggatgatgggcaaggagggaggaggaagaagagcataaaggagaaaattaaagagaagttcggtagcggcaaacacaaggacgaacaaacaccagccaccgccacaacaacaggacttgccactaccgaccaacctcacgagaagaagggcattctcgagaagatcaaggacaagcttcccggccaccacaaccacaatcacccatgaacaccaatcatatgacgtctttgttacatgaataaatcgtttgcacgaatttcattagggcttatgaagaatcaatatatatgtctagtgaagtttactaaattttagttgtgtttgcttgcagtttgtgaatgtgaccatcgtgttatcatgttcttgtttatttataaagaaggaactgtattttgct

SEQ ID NO: 143867 - DNA, 1941 bp, Arabidopsis thaliana landsberg; identical to SEQ ID NO: 76002

SEQ ID NO: 143868 - DNA, 792 bp, Arabidopsis thaliana landsberg
tgggccaataggtgataaaagtcatgtctctacacgagtcatgggtacacacggatatgcagctcctgaataccttgcaaccggtaagtgtcggatcctttttggtcaaatctttgttttctggaattggcttcttcatatgaatgatcactttacattttccttaggtcatctaacaacaaagagtgatgtctatagcttcggggttgtccttctggagctgttgtctggtcgtcgagcagtggacaagaaccgcccatctggagagaggaaccttgtggagtgggctaaaccatacctcgtaaacaaaagaaagatattccgagtcattgataatcgtcttcaggaccagtactctatggaagaagcatgtaaagtggctactctgtctctgagatgtctcaccacagagattaagctgagaccaaacatgagcgaggttgtttcgcacctcgaacacattcagtctttaaatgctgctataggaggaaatatggataaaacagatagaagaatgcgtaggagaagtgacagtgttgtcagcaaaaaagtgaatgcaggttttgctcgacagactgctgttggcagtacagttgttgcttatcctcgcccatcagcctcgccactgtatgtttgaatagggttaaacacgtcctgggtctgtgttcagtgttcttggtaaaacatttgcaggacatgaagttcctatatcatgtcctgagaatggaatctggatgtacagtttttgtctctcttaatgtaagaattctgtttaaatacagttcacctctc

SEQ ID NO: 143869 - DNA, 980 bp, Arabidopsis thaliana landsberg
agaagtttctgtagcagctaggagaaggaatgctagattgtcttttgcgtttgtttatcctaacaataaaggtggctataatgtgagagaggtaagattacgttctcttcacaatcttgatcagataagttgtcaccgtagccacgcatgatcattgatgcattctagagtttctgtgttttcccctgccacacctctttgtcgcacatgtagctaccagtatcattcggagttttgtcaacaatgtttctcttgtacatgtctttcgcttattgacaactcatcttctcatggttattgatttttgaaacttcagagagaccacataatcatagctagttactacagaatgaagtaatttgattgaatggatgctttcagattcaatcgttatggctttacttgttctcttgtgatgcttgcatatgtattcaagaacccatgagaagagtctgatcttgtggtgttgtttctgttaattgataaaggttggggagacgatggcttatccaaaccgaaaacaaccagatgacagtaaaacgctttccgaacttccgtttgaggtaagttttttacatgcatagaagatcatcttgtatgatggttatataatctataacattaatttttcatattctgttacccaagtagctataactgatgttgatcaatctatctgcagattggagattatctggatgtggcaatttactaggaggtttctgtttcttgttaagtgggatttgggtgcgtgcacaatggaagaagtacacattcatatggttgtatcatcttaaacttcgtttagacatgtttgtattttttggatctagtctatgtactaatgtctaatggtttagtatgttatcctgctttttttgtttaacgtgttttcttttctaaagaaccaaaaaaaagatggaagaactcaagccattttatatacaaaaaggtataaatttagactatctatagactat

SEQ ID NO: 143870 - DNA, 841 bp, Arabidopsis thaliana landsberg; identical to SEQ ID NO: 4117

SEQ ID NO: 143871 - DNA, 1051 bp, Arabidopsis thaliana landsberg
gaacattctcttcagttttttctgtcctctctaaaattttctaatctctagactcgtcattgatgagctctgaccccaatctcaccactttcccctcactttctcggcaaaagttcagtgatttgctctgtttcctgggaggttttctctgttttttaaccaagatttcaagattcggttttgacggagcataaatggagagaacaagatcgaaaccggttcggaatctacccgagacaatccattctttgctcggtttgaaatctcatatgaattctgattgggttaaatctgtatgcaacatcgccaagaatacttcttcaacgtcaaagaaagaagaagacgactctgtttctgtcgatttacagagcattagaggtacacttttcctttgagaattctctttttttttttctaagatttttctatttctttggatgtttgttcataaattttctttttttcttctgcatacaaaattcttgtcttcttgtgtacaattaaaatcctttggtggagattacctactacatgcaaatcatactgaccgttagattatctattctggtactgtatgagtgacgtgtcagtcatctaacggctggtttggttattcgtttatatgtgtgggttcaatactgtagtcagctctttgaaagtttttgctactctatgttgtcttttatgaaaaaatcactctgtttctgttaaaaaaacactttattcagataagtttaacttaatatttttggttttgcacttaaattagttgcattacagaaaacatttaattcgaaaaggtatctgtagtcaagatttcagtaggattataatatagaattaaatatgagaatctatgtctgttcagataatgttgactaaaaagtttcacaaattatttattgctatttatttatgctctgtggcttattggtcttgctctgattctcttgttattggtttgcagatcagctctctgcactaactgttcaagtcaacgatcagaacaaacagagaagacaaattcttaatgagttcttggaccttaaag

SEQ ID NO: 143872 - DNA, 680 bp, Arabidopsis thaliana landsberg; identical to SEQ ID NO: 65310

SEQ ID NO: 143873 - DNA, 442 bp, Arabidopsis thaliana landsberg; identical to SEQ ID NO: 48704

SEQ ID NO: 143874 - DNA, 1803 bp, Arabidopsis thaliana landsberg
gcggcaaataacgaaaaccatggatccgaaaccaacctcgatgtggagctcaattgtgaagaaagatccaccttcaaagcctccggttaacgacggagctccggcagcgattctcgggatggtcggaaactgcaaatccacaaaaggaatatctattgcggttgttgacgctaacgccgtcattgaaggacgccagagcttaacaaacttcgccgacaaattcgtaactgtccctgaagtactctctgagattcgtgaccctgcttctcgccgtcgtctcgctttcatccctttcactattgataccatggaaccttctcctgaatctctaagtaaaggtacgcatagattagttttgtgattcttactcttgtgattgtgaaatttgtaccttaagtaggtatgtgtatattgctgtgttggagaaaaaattgtattggatctctgagattgattgtttttggttctgcagttatcaaatttgcaagagctactggtgatttgcaatctctttctgatgttgatctcaagttgattgctttgtcatacacgcttgaggctcaggtttatggcaccaaaaatcttagagatgttcctccaccgattcagaccgttagagttaagagattacctgagaaggatttacctggttggggctccaatgtggctaacttggaggagtgggaggcacttgaaaacgagactgaggaaaaatccaatgctaactccaaaatccttcctttgaaagaccttaacatgaatattattgcttcagacaatgtttctgaggttggttctgttgtctctcatactgagaatcatgaagaggatgggcaggaaggtgggaagaagtataggcgatacccgcccaagaaaacagagattaagcttgagggtaagatggtagtggagggagtcgatgcatctcaggggcaatatgatgatgatgatgatgccagtgattggagacccgcagtcagtagaagtactcactctaagtatcttagaagaaaggcgaggtgggaacattacaatgccttggctgaacaagaaattcagaaagatcaagaagctgacaaagctcgacacactaaggacgccaatgaaagccacgcaaaagatattggaaagaatggtgaggatatatcttccatcctaaaagatatgaggttggaggaagagtcattaagggctctccaagaagagactgaagacacgaatgctgaagcaactttgatcaatggtgaggatgatattgatcatgatattgaagtcgaagctgaggggatcgatgttgcaaatcaagcgctagagaacttggagattgctagtgaggctgaggataccttcgaggcatcatcgattggagatgatggtagcagcgagcagagttggtcactgagagccttatctgagtccagtgtagcttgtataactggtgactatgcaatgcagaatgttattcttcaaatgggtttgcgtttacttgcacccggcggaatgcaaattcgccaactgcacaggtattcttcagatcttcctttttttgttcaaatgacagacacttttctttagcaagggtcattaactgagaaagatacaattcttacactttattgcattgacatcttcaggtggatcttgaaatgccatgcttgctacacagtaactcctgaaattggaagaatcttctgtcccaaatgcgggaatggtggcactctacgcaaggtagcggttacaataggcgcaaatggcgccatcatagctgcatgtaaaccacgaattacacttcgagggacccaa

SEQ ID NO: 143875 - DNA, 1548 bp, Arabidopsis thaliana landsberg
atgcatttctccattggaaatgctattccaggacggctttacggtggtaatccaatagacaacggggaaggaaatggaggtgacaggtgatttgtagtacaatatcgtttgttctgtctctctcattcttcttctggtgttgtaccactatagtgaatctagtttagctccttatctgtttatctagtggcgtatctgtacctctgtttattttgttttattgaatgtctctgtgtttttttcatatgagcagatttggtcatctggttgacatttatgcatggaatccacattgtcggtaccttgatggtcgtggaccctcaggtactttcttatatcagagggctatatcataactcaaaaagcttttaatgactgaaaaattccctatgacgatgttaaagaataactaatttcaactaagaacagaaattacctttttatttgctttggttcatggaagcttagtaattgactatggctcttcaattatttaccaagtttgttaggttcttaaccctctaatgtgtttccccaagtataagtcgtccttaaactataaattgtgtgtattctaattggatgctagctactctagagtgatctctttctcgtgtgcaaattacaaatatgtgatcacatggatattctttttacaggaaatgattccagtgcacagaatgattggcatggagcgtggtggcacagcagcttcaccactctatcaggtcagccttacataccttcataatcagttccatgagttcccaatacagagatatataataatcatgcttttaactggaaaaaataagaggtgtaatttagtctcagtgtttataatcatatcgtagccataggcatctcctctagttacttagctttgaagtttttaacaggttatgtagaggaagacagcccttacacgccagatggcaagaaaggaacttactattttgagtttcaaggcccttgaggacaatggaccgtctccaacaggtcagtaatcatctactcgatcaatgacattcagtttccattggcccttccataaaatttagtataatctccaggcacttttacctctatgaaatcgtagttacttttaaaccaaatccacatgtgtcagacacttgtagttgtcgaaacaacaaatctatcaggtagaactgaaacctggtcaatatgagttatgtataaagaacatctttttcagaaactaaggtcctagattggtgatatctacaggatgttcagttcacgcttggctcgccggccaaaatgtcggtcgcattctggtacccagtggacagcaaaccatggcatggatcaggacactacacgatcaactgcgattggacaccgctagatatctcctcgggctcttcttcgggtgtcacggctgcaactgtcaagggctctagcgatgggaccagcattacagccattttgttgtccatgatatctcttgtgttttcgggttttattgcatataggctatttagtcccaggaacgttccattcacacccatggaaaacaatctgtag

SEQ ID NO: 143876 - DNA, 1464 bp, Arabidopsis thaliana landsberg
gcgaaaaactccaggtttggctgggaacaagaaggctcttgaagttaacctgccagaaagttcacggaaattcataacttgcattcgcaaatacttactgttctatttgagactattggaggaaactgaagatgtcaacacactagaacgagcctttaattctcttcgatcagataagagggtaaggacttgatcatttctatcaaatactttgctagtacccttagtactcactttttcatacatgacatgaaatttgatcctgtttctatggaaataaacgtccctaagtcaggctttgacttggtgatggtaataccatatagaaacctctagatttctactgcatgatactgtggtgatgactgatgatccaagggggtggtcaaagcctgtgcaatggattgttgtattatgaaggcttaatttggtagattttagttatttcattggtgtctaacatctcctaaattacagtagcattagaggaattaagttttgatgctctttacgtgctatgtcatcatcaaattgtcataagctgaatatagtttgctaaatggtaatgttgcactctacaaattttgaacccagttctctctatgcgttgaagaccttgtaccagttgcaataggaagatacgtaaaagcactggtttcctcgatgagtcgggttgagtctgcaggagcaataatcaaccctgatagccagctagagaaaatattttccctctttatagaacaaggaagcatatggccagacatatgcaattttcctgaaacaagaggtccagaaacctcagagagcagcttatacaggtgatcaattttgcatgaagcatgaatttgttccagcctgaccattcgattcttgctatcggatattgatttttccttttgcagatatctacatcaatacatcgtatctcttgagctagacaacaaggttgagaccctggaaaccataaatgaaaagattcgaaagcgtttcaagaatccaaagttgtctaatagtttttcggcaaaagttggcagacatgcttctcttgcttggtgccgagctctgattataagcttggcactgataactcccttgcagccagtatcctcggaggaaagtcaagcaataactccatcatttggtttactggaaaacagacgggtgctttgtgttgatctccagtctgaattctggagttcttcgttcgaggatcccttagaatcccaaatgcttgaggcaaaatggcgccctgttctgtccaagattaagaacgtactgatttttaataaagttgtggaggggaatttggagatcgctaattccctacttaaaagctgttacaatttcttccgagaaactgcttcggtgacactcccttctgatatcaacctctatttcgcactggcccgactcgcaccaagcggagaacttctttcaggcaatgagggagttgaagtcattgat

SEQ ID NO: 143877 - DNA, 1856 bp, Arabidopsis thaliana landsberg
ccaaaggagcctagcctaaatcatgccttcaggtgctaagaaaaggaaagctgccaagaaaaagcaagaggaagaacaacaacaacaacaaggatcttctactctaatcaatctcaaatccaacaaccatggtttttaatttttttaacaccccataatctcactactactttcttctttttgcctttttcttgttgttgttgtctctctgtatctctcaattattcactcacaccacacacgtttaggccacctttcttgtttgtttatatatttgcttcgctttaaatctgagttttttttaactttgttctctgtatagtttcttcaagttttgatttttatggttttgtgctcattgatctaaacaaatgggtatcctttttactcttctttgtgttttgattggggttttaggctcacaattttgggatctcaagctgtaaaaatttgatctttcggttaattttagcatgttctgcttcgtaatccatatgggttgaatctagttttctgttttggactaaagggtagttttgtttatcagattcatgattatgattaaagttgtttatcatttgctgagttttgtttatctctgatgctttggtttcattagtagtagctgtgcctattttgtttactagtatatgtttcattctctggatggtacaatagttagatttgacttgaatagtcagtgttaagtcactctgtttgtgatattgattggatttgtaaactgatgtgctagattcgagaagccaaggtgacaaggagagcgatgatggtgttaatgaacgcatagagatcactgattcaagccatgatcatgacaagagctctagtagcagcagtagtagtagcagcagcagcagcagctccagctcggatgatgagtcacgggaagtcaagaagatagatgatgataagaagactggtgatgatgtttctgaagttattactgtgagttctgtgccaattcaacctgtgcctattgctgcagatgctccgtttatgggatttactgctaatgcgattgtagagaatactggtttgatggattcagctgtgccgaatgatcccgaatctggagaactggttgagatctcgcatgttgatacaatagtctcaaacgaggctgatgataattctttgcctaaagcaactgagattgctgctgaagttgctcttgcatttgatgagattaggcagacgtcttcaggtgctactgactctgatgtgaaagaaaatgagggaaaaacttcgcctcttccagaatccaacggtgttcctgaaggcaacatagagtctaatgttgtcatttctcatgaggaagaggtctttattgtttacctatttggttcatcttttatgttgctcatgttacctaaaagactaacatcagttttctctcaggctcccatcttgataccaacacatggaattgcgaaaagaacctcatggtttagttgctgcggcttgtttgatgtggtcacaggatccagtagataaactcaggtaacttctctgttttatgtgaaaacatcgtcgaatgcataatctctctttttgtttcatgagtctattatctatatgtgattcttagttcatggacagcaaccatacatggaagcatttccttcattatttctgtagcaagagtctataaacatcaatggtactgtcaagttagctgcgagtaaaatagcctcctgcattgctgtctgaaaactcacatgtcttgagtcactgatgagttatcttttctatgtaatagcagaaacagtgtgttgcaaacaaattggaagctgcagaagtgttatagcggcgaagaattatcgggttcctctctc

SEQ ID NO: 143878 - DNA, 426 bp, Arabidopsis thaliana landsberg
gtggttggagaatctgggttattcactcccgaagatatcgcctttgttcaagaagccggtgtcaaagcagtaagctttcacaaactttatagttcaagataacattgcccacaatgatattggttcacctgatcttagctcccatgtgattttcttttcctgttattaggttttagtcggcgaatctcttattaaacaaagcgatcccgggaaggcaatcagcaccctatttggaagagatgtctcagagtaaattccgagtagaaactttttgtatagagaaaatcttcattgaagtctctttttttcttcttaagtgccgctcaagtgcgcagaggcttgtgcctttacagaaatgtccaattattattattttcttgtcttacatacacattgtgtacttaaatttatccatcaaatgtcaaa

SEQ ID NO: 143879 - DNA, 375 bp, Arabidopsis thaliana landsberg
gcttgcggttagggcaaagatgaggaaacgcgatttggctattttgatgctctctggatttgctatattcttcactcttcaggtgattttacacactaatcgtcttcttattctttcttagttcaatcaaattgtagctgaacttctagaatcattgatcgatctgttacttgagaaagctttgaattttcctttgtgggtagaacttagactgctaattcgatccgtaagtagtgtcatgttagcgaatttgtagaatttccagatggaaccaatggattcaattttcttattaatggtgcgtttacttgatatgtgggacttgatgacttttgcagcacgagggtgattttgcgttcaaagaagcagggtttc

SEQ ID NO: 143880 - DNA, 1493 bp, Arabidopsis thaliana landsberg
aatcctctgatattcagattcttacttctcaggaaaaccctaaagaaaatttctgtttttttttgagaaatatgaagatacaatgtgatgtgtgtgagaaagctccggccacgcttatatgttgtgctgatgaagctgctctctgcgctaaatgtgacgttgaggttcatgctgctaataaactcgctagcaaacaccaacgcctttttcttgactctctctcaactaaattccctccctgcgacatctgccttgtaagaatacctcctcttctctcttttgtctctattcgtatctgcagagatctttatttgttttgagggtatcttttgattgagctgttcttggtagattctttaagtataattatcgagaagttcttagctttataacatagattaaggttttagatttaagtttagtaaaggttttagtgggatctcaggaaatttgtttgtttttggatgtttttagtttgctaaggttggatatgtagatccaactttggtagatattcttaatgggatctcaagaaaaacatgctcaaagttgcttatgtagtaaatctctttcttgtgttcatctttgttgacttgcaggagaaggcagctttcatattctgtgtagaggatagggctctgctctgcagagattgcgatgaggcgacccatgcgccaaatactcgctctgctaatcaccagaggttcttagccactggaatccgagttgctcttagttccactagttgcaatcaagaagtggaaaagaatcactttgacccatctaatcagcagagtctctctaaaccgccaactcagcaacccgctgctccatctcctttgtgggctaccgatgaattcttcagctactctgatcttgactgcagtaataaggtgagaactggtttaccaaactgatgaatactcaaatatcctggtttgtaacttgttttgacaactatataaatcacttgttgtacattaggagaaagagcaactcgatctcggggagctggattggcttgcagagatgggtctgtttggtgaccagcctgatcaagaggctctaccggtagccgaagttcccgagctttccttttcacatttggctcatgctcattcctacaacagacctatgaagtccaatgtacccaacaagaagcagaggcttgagtaccggtatgatgatgaagaagagcacttcctagtccccgacctaggctaaactacggatgaatctactaagctttataatatatagcacttgattcgcatagtcttcggctcttcgccttgctttctccatgatctgatatgtgtatcactgtaagtagcaggctaaaacttggaaaaaccttatcattttattagcaagtgatgccttaaattgcaacatacgtcttttctaaatcattacatttgaagaagagaaacaaaaacagagcggaatgccgaatttgtttctcttctcgatttcaaccatcggaaaacaag

SEQ ID NO: 143881 - DNA, 2382 bp, Arabidopsis thaliana landsberg
ttcttccctcttcttcttctccattgttaaaagctctcacacaaccaccgttctccgtcacgggggcgctttattctctcatcggagcgcctcaccggtggcagacggtgtcgttgttcctctcctaaaacctccatcaatcaccatctctttacacagagcctaaccaaaatcttcgagagatggggcagagtatgagctgtggaagtcgaccggagcacggaatattcgcctctgtacagtgcggcgatatcatcactatccgtcgtgtgatggctacggagcctagtctgttgaatcagactactccttatgatggtcactctgttcttcatgttgctgctgttaatggtcagatcgaggttagtttcagtgatattctcagagatctcgccggaatctcgtcggaatcaggtatctttgtttataatgattgtactttttttgcagattttgtcattgcttttggagcgatttacgaatccagatttgttgaatcgtcacaagcaggtttttgattttcgcattgatctgttctgtgtatagttttcatgaatcttttgctgatgctttgattcgtcttgtagactccgttaatgttggctgcgatgtatggaagaatctcttgtgtgaagaagctagctgaagttggagctaatgtacgtttacttttttgttttgcaattgaatcgattttggatttggtaattgaaaatcttttggaatctgcagattttgatgtttgattctgtgaatcgaagaacatgtttgcattacgctgcttattatggacatgctaattgtgttcaagctattctctctgctgctcaatcaagtcctgttgctgtccattggtaagtctcttcctatctttgatcagagtttacttattcctgagaatgaaacttttgacactcaggggttttcattttcaggggatatgcgagatttgtgaacataagagatgataaaggagcgactccgttgcatttagctgctcgacagagacgacctgaatgtgtgaatgttttgttggatagtggttctcttgtttgtgcatctactagtgtatatgggtaatggtttttcttgtcatgcattgaaatcaacagttcttagatgttttgttctattggaactgattctttaagcttttgttgaaacagttctccaggaagcacacctcttcatttagcagctagaagtggatctatagattgtgtcagaaagttgcttgcttggggtgctgatcgtcttcaacgagacgcttctgggtatatatataaattttgtggcaaagtcttgttttggtttcagaacataacttgaatcttgaaatatcttttcaggagaataccttatgtggttgcgatgaagcataagcatggagcatgtggagccttacttaatccgtcctctgcagagccacttgtttggccatcaccattaaagttcatcagtgagcttaatgacgaggcgaaacttctcttagagcaggctttaatggaggctaacagggagagagagaaaaccatcctcaaaggaacagcttattccttaccatcaccctctttctctgacacggatgataacatgtccgaggtaataatactacactctttactttccccgtggctcggtaatttttgtgattgtagtaacatgtaaatgtgtctataggtgagtgatacggaactgtgctgcatttgctttgagcaagtatgtacaattgaagttaaagactgtggtcaccaaatgtgtgcacaatgcacacttgcactgtgctgtcacaacaaaccaaacccaacgacctcaaccgtgactccaccggtctgtccgttctgtagaagcaccattgcatgtttagtcgtcgcccagaacaacaacaacaacaacgaaaagagcaaaagcctagatgatgttgttgttgttgatcgtgaggcaggtgatgttagctcctccaaattcagaaaacatagaagatcaataaaccttggcgaagaaagcagcagcttcatgggactatcaactattggatcattcggtaggataaccggccgtggctcgggaaggatcgcagccgaaaacgagctgatggacaaaccaatattgtgagggatcgattccgttttaagggacattttggggcatgggggagcaataaaaaagatgaggggatgaaattgtgagaatgtataaaatatagatgaatttatgttagatcttttgttgaagggaggaagattgaaataaggaaaaagatgtggggaggtgtgtaatgcaaggatttgttgtttctttgattaagtttggccaaaattgtttgttgttgttattatttggttacttgatatgaaagggaaacccataatctttttgtct

SEQ ID NO: 143882 - DNA, 771 bp, Arabidopsis thaliana landsberg
ctttaaatcatttagaggttgtgaaatattatggagagtgaaggaaagattgtgttcacagaagagcaagaggctcttgtagtgaagtcttggagtgtcatgaagaaaaactcagctgaattaggtctcaaactcttcatcaagtaagtaatgatcccattgatctctctctattttctttttatgtatatagtctgagatatgaactactattttgaactgtaggatctttgagattgcaccaacaacgaagaagatgttctctttcttgagagactcaccaattcctgctgagcaaaatccaaagctcaagcctcacgcaatgtctgtttttgtcatggtaataatcaatatcaaataacatgattttgcttatatattcgaatcaaagattgttgagttttggggtttattatcagtgttgtgaatcatcagtacttctgaggaaaacagggaaagttacggggagggagactactttgaagagacttggagccagccattctaaatacggtgtcgttgacgaacactttgaggttagtagttatttgtcatatctcaaaatgttctttatcatacaaatatgttaacttgattttttttggttgatgtaaaaatgatttataactgcaggtggccaagtatgcattgttggagacgataaaggaggcagtgccggagatgtggtcaccggagatgaaggtggcttggggtcaggcttatgatcaccttgttgctgccattaaagctgaaatgaatctttccaactaa

SEQ ID NO: 143883 - DNA, 432 bp, Arabidopsis thaliana landsberg
aagtgttgttgcctagagaaatctataaggccgttaagacgtccgctccagctcctaagtcgagtaagaaaaagcctaagaacgcggaggctgacgccgacggacctagcgccgatgctccgtcagatgatgatagtgaggtggctgacgataaaaacggcgccgtatcagcgatgattactcgaacaagtagtgtcgtaacggccattgtcgggctctgtttcggagtttggcttatgtgaagtgacgtggcatttacctcgctttgggaatcttgtttttctttttttctttgtgatctgtcggtttaatttattttacatattcttttttttgttcacgttgatacttggtgtggagatttggaataattaattgttccacttgtgttggatctgatatgttttattctaaaaaaatgtgatgatcatt

SEQ ID NO: 143884 - DNA, 668 bp, Arabidopsis thaliana landsberg
gggatcatgtgttttttaggctcgtagcctttctgatttctatgaagcctgcaaaggattggaacttgcaaggaattttcaatttcctgttctaagagaggtactaactgtggacaactttgataaatttaattggcaaccgctgcttgtttctgttacttgatgcatttctttacatttgttcacttcagcctccacaatcttttctgacaacaatggaggagtatattaaagaagcaccgcgtgttgtcgatgtcccagcggaaccactggtatgtatgcatatttctcatattagtgatccaatatttttttgcttctttttttctgtgtcttatgtgctaatgaagttttctacattcagcttctaacatataggccggatgatggactgactaccgaagatactgaaccgtcgcatgaagaacgtgaaatgttaccttcagatgatgtcgttgttgtatctgaagaaacagaaccttctcccccgcctcctccttcagcgaacgctcagaacttcattgataccgatgatctattggtgaaaattttatatgatcactttatgactttgattttaattttgattcttcatgcgtttcttatgtctcaatttctctttgatcaattttccccacagggtctgagtactggtgctcctgatacat

SEQ ID NO: 143885 - DNA, 930 bp, Arabidopsis thaliana landsberg
agaatatcatctctcctgacttctcgacacctattacacaggcgggtcaggctgccggcaagaaagtaccgtcctggcgagaatggtccaaaggcaatgcttcgttcttgtgaatatataatcacatttattttactcaatctaaactcttggtgctgaggttcgttctatatgtttaaatcttaaaatgttctttgtaggttccatttttcactgatgacgaagagagctcaagtacaccaaaggcggatgctcttttcattccaagggagaaccctagagctctagttatacgcccagttcaacagtggtcttcaagggataaatcaatacttccaaaggaacaacgcccgactgctccattacatgacaatggtaagcttccttttttctattctttgcttattgcatggcttgcagtggttctttaagttttcaatatagataaagctttttgagtctctctcctacaatttatttccatagagatggcagcattcaaatcttagactagcacttttaagttggaattttcaatacctacccttttttactctcatcagagcaccttttcttgttcatgcgtggtttttattttgaaacttgattactctgcgtgtgagaaggactatgcgaaatgattacgctaatgaggtgctaggtacttgggtaaaccattcctgtctctttttgacaatattaatcgtaaaatttcagggaagagtcccgacatggccactgatgcagcaaaccatgccagtgagtacataaaatattagaaaagtttggttacgtttttctatgtgtggaaattctcggactgacttgagagccaatattcacaggaaatggtatcggagaacttggtgctactggggaaagaattcatacatcagtcaatgcaaatcagaagccgaatggcacagcacg

SEQ ID NO: 143886 - DNA, 1253 bp, Arabidopsis thaliana landsberg
aggtcgacttcgtggtcaagaaagtgtcagaatcagctttgaagcaatctcctgtggatttaagcaagacctttttctctctcaccgcaagtatcatttgtagagtcgccttaggacagaatttcaatgaaagcggctttgttatcgatcaagacaggatcgaagaacttgttaccgaatcagcagaagctctagggactttcactttctctgacttcttccctggtggacttggaagatttgtagattggttgtttcaacgacacaagaggatcaacaaagtctttaaggaacttgatgctttttatcagcatgtgattgatgatcacttgaagccagaaggaaggaagaatcaagatattgtcactttgatcttggatatgatcgataaacaagaagattcagattctttcaaactcaaaatggacaatctcaaggcaattgtcatggtaaattctcaaattttggttttctttatatcttatgttaacctatattgattcaaaaattttgtgtcattattatgtggtatttaggatgtatttctcgcggggatagatacaagcgcggtaacaatgatttgggcgatgacagaacttattagaaaccctagagtgatgaagaaggctcaagaaagtattcgaaccactctgggtctcaagaaggaaagaatcactgaagaagatttaggcaaagttgagtatttgaaccacatactcaaggaaacttttaggttacacccggcacttccatttgtggtgccaagggaaacaatgtctcacatcaagatccaaggctatgatattccaccgaaaacacaaatccagcttaacgtgtggacgatcggacgtgaccctaagcgttggaatgaccctgaagaattcaaccctgaaaggtttgcaaatagctctgtagattttagaggacaacattttgacctattaccgtttggttctggtcgaaggatttgtcccgggatgccaatggcgattgctactgtggaactagcattgatgaatttgctttattattttgattggagtatgcctgatgggactaaaggtgaagacattgatatggaagaagctggtaatatctctattgtcaagaaaatacctcttcaacttgtgcctgttcaacgttattgatgagccaaaatataagctcgataacatggaaagtgtatgaagcaaaaaacataagattctttagattttgttgtgttatatggagtaagaaagaaatgtttgaat

SEQ ID NO: 143887 - DNA, 1034 bp, Arabidopsis thaliana landsberg
tgtctatccattcatttttttttttcatttcttcctccagagagagagagagaagccacaacaagaagaagaagaagaagaagaagaagaagaagttctggaatagtcatcatcttctctgtttctaggctttgtttatttgtctctaaagtttctggattcaacttctgaagaagatagtagtagtccacaagaaggatcttctttacgtgagttgtttgtttctcttctccctctgtcttttcttttctgattttaataatcccaagtgtgttcttattttcttgctatctgttgtataattggtgttagtgattgattattcattgtatatcgatgaagggttggttttgatttttgttgaattggatcttttgatttggggttttaaaacttgctcggatgatgatgattgggattgatccaaaagttttcgttatttattggaaattcagattttttcgattcagttccatttgaactagtaagtcaaacaaaatctctagatttactgatctggggtttatactttgaagcttgagttgttgttgttttattaatttatttcgattttgagtaatatccatttgtaggttttggtctctgactcttgtttataataaaagctctgtattgagtaaaatctcatgaaagtaggtttcctttcccttttttatccttctcctttggttattaatctcctacaacctttttttagaaattactacctatattcagaaagattccatctatttcttcttcaaggcttgcttttttgaaccaaaagtctctctctttttcatctaataatttgtttacttttttggacagcagaaagttgatttggtcagagccaaggaagatgggttacatgtgtgacttctgtggtgaacaaagatctatggtgtactgtcgatccgatgcagcttgtttgtgtctctcctgtgaccggagtgttcattccgctaatgcaagaaccaaaaaacattctcggacacttgtctgcgagagatgcaatgctcagcctgctactg

SEQ ID NO: 143888 - DNA, 1374 bp, Arabidopsis thaliana landsberg
ggttaagcgaactgaggatccttctcctgcagtttgtgacatagccgattctatggatattgaaattatatctgaggaccaagatgctagtattaaaggtgattagtttgtccttgcatcttgaaattgtgactttctgctcttttttttgaactgaaaatgtatggatcttttggactgaacagaacagaaaattgaagaaccttcttcgaactggtggggatttaaatccgggtttgtctcgggtggtcttctgggggccaagtcgggcaaaaagaaattaaaagctagcgagagaaaaatgtttagtgagaatgatcaagagaatctttacaacatggttcaggtatgttctttgcaggctgttcttggaaaagaggttgggatctaataatatattgacgttttggaatgtctgtaggataaagccacagcgggaaaacaaggactgggtatcaaagaccggccaaagaaaatagctggtgttcgttacgaagggaagaaaacctcttttgataacagtgatgatgatgatgatgatgacgaagaagacgaagaggaagatgaagacgagagtgaagcagatgatgatgacaaggactctgtaattgaaagttctcttcccgcgaaaaggaagcacgatgaaatcattgaacccaaaatcaagttaaagaacctgtgcaagcagattgttaaaaaggttcgttgtcaacttattttgaactgtcattgtattcttctaaaacatcccaccactcatatcgacttatatgtatatgtgcaaaaacattcttaggatgctggtaaaggtggattcatgaagctgaaacagctaaaatctctgatcgatgaacaagcaccatcagttctttcagagttttcttcaagaaaagatgctattgcttacttgaaacttaaggtaatgcaatcttagctaatctttatgccaaatcttcgtatagaatctacattaagcgtatgaaattcattatatttgagattaaagaagtgtgatagtgaagttagtaaacataatcattttaaagtgggattctcatattctacacaaagttccaaagtttgtcattcttactgatattgttctaacgtccttgttgcagctggagcgaagtggcaagtttgttgtggagggaaagaagattagtcttgtatcaagcaagaagtgagcgagaatttttggttggaattatcattatacctgcataggaaagtggagattaggacaagttttgttactaaatcatcacaatgccatatgtaaacaaagatcatacttcagtttggaaaattttgatttgattgtaatctatttttacattctattagagtttgcataaaacttcaccctaataa

SEQ ID NO: 143889 - DNA, 403 bp, Arabidopsis thaliana landsberg
gtctataaggctcagaggaatggggttctgtgtgcggctgggatccttctctactggtacatcattcaactataactcacttggaactttgtatgtttagttttttactgatattctctcgtattcactgacaggtgcatcttccgcatctgcaagtaccacaaagaccttgagcgtttggagcaattagagaagagatacaaggacgagtagaaatcttcccaactgagagtctggtactactgttatagtatcactcggcgtgtgagtagtcccaaaaactgaatgagagcatgatttgatcttgagaaaatttttacacagacccttttgtgttaattccttctgcaacttttggtttactttttggaggaacaacaggctctgtttgtcacgtccagaa

SEQ ID NO: 143890 - DNA, 433 bp, Arabidopsis thaliana landsberg
gatagagagagagagagatccagaaaatgacgatcaacaatggcgttgcaatggctgattctatcgtatgtggtggccgtcgaagtagtaatcaccctcgtgttgactctcccttaccctatgcttcttaagaaacgtgtagttcagcttgtctcattgattctccaacctgctgcttccatcgtcgccttcgccggatttcagctcctcggtaacctcctctcctctctctcgctctatctatctatttcgtagtcggaatatgtatagttagggttttgagccgcgagtgattctgtggatttggtacctttgtgtgcttttgcttatttggttttgatttcattcagatatttactggaaggctgagcatagactatcttgttcatctgaggtttgcactgctacagaacgtgatcgctacgagaaatct

SEQ ID NO: 143891 - DNA, 1454 bp, Arabidopsis thaliana landsberg
agatctataagtaccctgcttggtaatttttgcttttgcttgtttatgtatttgtttgtgttttgacaatagtgtgagtagggagttttgaatacttttagcttgtttgtttggttactactacaggggtgatgtggttgagatagagacttggtgtcagagtgaaggaaggattgggacaaggcgtgattggattcttaaggattctgtcactggtgaagtcactggccgtgctacaaggtaggagaaaactagcaaagttttggactttctgcattggttagggacatggatatatgagttagttacatgttttgtgttgcggtaacttggatatatgggcctgttctgatttattgtgtggcaattttgttatggtttcagcaagtgggtgatgatgaaccaagacactagacggcttcagaaagtttctgatgatgttcgggacgagtacttggtcttctgtcctcaagaaccgaggtaaaggacactttggtatcagggcaaagcttgctggtcaacgaatgctaagtatgtttttttctatgtatcttataggttagcatttccggaagagaataacagaagcttgaagaaaatcccgaaactcgaagatccggctcagtattcaatgattgggcttaaggtacaaacaatagcaatattagatctctttctccaattttaggcttcaaaatatcttaaaggctttgtgaacatgtttttgcagcctagacgagctgatctcgacatgaaccagcatgtcaataatgtcacctatattggatgggttctcgaggtaagtcactaggtttatgagtaaagctcaatgtgcttatatgtgaactttagtaatcatatgatcttgtttcctggtaatggcagagcataccacaagaaattgtagacacgcacgagcttcaggtcataactctggattatagaagagaatgtcaacaagacgatgtggtggattcactcaccaccaccacctctgaaattggtggaaccaatggctctgccacgtctggcacacagggccacaacgatagccagttcttgcacctcctgaggttgtctggagatggtcaggagatcaaccgcgggacaactctgtggagaaagaagccttcaagttaagaaatagacaatgtctttagccattttgttctcaagtttccatcatctcaatgaagatttcgcttcacgattctgagcaggtctcattttttttctctttcaagtttgggttaggctagagggaactggattgttggagtattaatctttgttgaatttcattatgtttgttcatgtttctgtacaaattttggggatttagccaaacccatatggtctttggtcttgtcttgtgcctgcgtgtatttttaatctatccgttcaaacacagattgttcatcagatgttttatataaacagagttaaagacctga

SEQ ID NO: 143892 - DNA, 638 bp, Arabidopsis thaliana landsberg
atgatccaggtaagccgcccaattattcttctagtctttttagtttttgaggcatattcaattagaggatacatttatttttctcttatattcttggtcccttcgttcgattgaacattatatttggcaggcagaactgaaagggagatcctttttatgccgcactgctgctagctttgtgtctgctctaatagggattattccaaaagatcctgtgttgccaaaagatttcgaatctaacaaagaaagcagtggtgcactaatagttgtaggctcatatgtcccgaaaacaacaaagcaggttagattatctactaacaacactaatttctttgatatcttctcaatgaaataaaattaaagagccctgagtcattttcttctaactaacaggttgaagaacttcaatcacaacataaccagaatttaaggagcatcgaggtaagagaagtagatgtaacacgggatacttatattagtatataccacatgttatgcatgctttgtttgctaagtatatagcaatgatcaacagatctctgtagaaaaagttgctctcaagtcatctgaagtgagagatgaagaaatcagaatagcagttgagatggccgatgctttccttcgggctggctgggaga

SEQ ID NO: 143893 - DNA, 566 bp, Arabidopsis thaliana landsberg
  unsure (1)..(566): unsure at all n locations
agtcattgatcgaagaagatgagtgctgttgcgattaaccacttttntggcttaccggagacgatcgagaagctaattctccgattttctcgttccggcgaaagtaataacgagagtcgtggaagaggaagtagcaataatatcccaatagacattttggaatctcccaaagattacatattttatctcgatatccccggaatttcaaaatcagatatccaggtattgatataatcccatagaaatgttgaattgattatgaaattaggttttttttaaaaaatttaatttatgatttgggggttttggtgggaaattaggttacagtggaggaagagaggactttagtgataaagagtaatgggaagaggaagagagatgatgatgagagtgaagaagggtctaagtatattagactcgagaggagacttgctcagaatttggttaagaagttccggttaccagaagatgctgatatggcttctgtaacggctaaatatcaacaaggtgttttgacagttgttatcaagaagctaccgccacagccgccgaaacctaaaactgtt

SEQ ID NO: 143894 - DNA, 1943 bp, Arabidopsis thaliana landsberg
gcgaaacgcgaaagaacaagattcgacaaaagctaaaaataaaataaaagaagaagcaaaaccctagagctcaaggtaatcgccgtcgatttctcaatctctcaccggcgattacatgccgatgaaagttgtacaatagctgctgtaagagagagatttatcaggtatttttagaatcatgtatagagacagaggaacggtgaattcgagacctgaagttgtggatcgtaaacggatcaacgacgctcttgaacgtccttctccttcaacctctcgtcaagttaacggcaaaggcaaaggaaccgttacggcggcgacgacgacggcgaacttgattgggaagcagcagtcgaataacatcaaccatagagattctcgttctgcttctctctcgaagaacaatacggtttctgatggttagtctctcttgctctattgaaatcgaatctacatttagaaacagatacttaaccctagagtttcctgatttgggaatcaagttttgatctttatgtttagtatcttatctccatgagctgaattaagcaaattcctttattagcctatggaatttttgatgtgaatagatgaatcagacacagatagtgaagaatcagatgtgagtggttctgatggagaggacacttcatggatatcttggttttgtaatctaagaggaaacgagttcttttgtgaagttgatgatgattacattcaagatgacttcaacttgtgtggactcagcagtctagttccctactacgagtacgctcttgatttgattttggatgttgaatcttctcagggtaagttgttatccttttattagtttttgcggtttagctaggtacaggcacagcatctgcatttagggatagtagggaaaccgatatgggttcgcttttacgattgtgtctcttgaatgtttgatttggattggtcggtaacaggagagatgtttacagaggaacagaatgaattgatcgagtcagcagctgagatgttgtatggactgattcatgctcgttacatattgactagcaaaggattggcagcaatggtaaacaaaatccttaaacactcatttgcatgtctttcacattctataaaagattcacagattgattctgtttatttgcagttagacaaatacaaaaactatgactttggaagatgtccaagagtttattgctgtggccaaccttgtcttccggttggtcaatcagacttaccgcgatctagcactgtgaagatatattgcgcgaaatgcgaagacatttattacccacgatcaaagtatcaaggcagtatccttttttctacagtttcacttctgctgatatagagttatataaatgcagttctgaaaaactttgatgtttgattcttattgcatgaagaaatgatttttcttttgagtttctagtgatcttgcaggtgttggtgttacctttttttgcggttttccttaaaagaatgaacagacattgatggagcttactttgggacaacgtttccacatctgttcctgatgacttatgggcatctcaagccagcgaaggcaacacaaaactatgttcaaagagtgtttgggttcaaattacacaaaccgtgaaggaagtttgacgacaaaacccaaggatcaagatcatggcgttggaatggaactgagaaaagaagagacgtgtgtgaacagaaacggaaaataaaacgcactgtaatcacacgaatggtgaagagagcattcatgtctctatttgtcttcaggtacatacacattagaagaaagcaaaagcatggttagaaagaaaaaaaacacgaaaatcttttaatgagtttgttaaacttgaacatgtatttttctaccttcggtaaacttttttattttgtttcttttctcagtgtctgatttagtcatttatcatttaaaaaagtatccatta

SEQ ID NO: 143895 - DNA, 463 bp, Arabidopsis thaliana landsberg
aagagaacaaaaaaaagaaaggaattttctctgaaacgtcacgaacgtgtgaattgggttaaaaaattcatctcattgatccaaacgtgaaaccctaatttcgaatctctttgctgatttggtgagatctcaatttcggaaagaagatgacgaaggatttcgcagttccacctgtagttttcccctccggtggatcttcaggcggtgctaatgtccagcaacgaagattcccagcgacaccgtttcaaccgccgcgtccctcttcttccgcaatccctttcatgtcattcgacattggatccgcagccgcgtcttccgctacacctgccggaccattcggcgggacaatcgcttcctcttcttcttttggtggaggttcagcttcgtttgaagatgaggagccattactcgacgagctcggtatccatccagatcaaatctggaagaagactagatcgattct

SEQ ID NO: 143896 - DNA, 727 bp, Arabidopsis thaliana landsberg
agcaaactcttgagactccaaaacgttaaactgtgtgagacttcggagataaaatttcccagaaagcgtgaaaggttaaccggaagaaaatgccgtcacaagatgatgttcaaaatcttccaatcgatatcaccttctctcgtctcggaggtaatgcagaactatcaattacgagtacacggaattttaaatttttatatctctttgggtttttttttttcgttttcttcgttggattcgaatctgcgttggtgattattgtcttaatttgatttcaattttgttgaatttgaagaatggttggtggatcggaagagaattccggcggattggaggaagagggttgctgtgatcagagtcaaaatcttaaaagagttctcttctttgcctaaagagatcgatccattctttcaaaccctagatcctgaaggttttaaattcttcaaattttgttcttttatcagtttggcgaattttcaaaccttcaaaacgaattcgtcttaaattgcgttttggttcactgctctcatttataacttaaagtgttagtattttgtttgaaaatgccaaagagattttattggcatctttgtgaacaccgtaagcttgtttgttgtttggttatgtctgatgattgattaggaggagggccttacttggttgtattctcattcaaatttaatgttgttttgcttccagtgatcggttacttggaggtcaaaaagat

SEQ ID NO: 143897 - DNA, 1148 bp, Arabidopsis thaliana landsberg
actgggaataaagcatgttaaagggatgcttctttttggacctcctggtactggcaaaacccttatggcacggcagattggaaagatgcttaatggaaaggatccaaaggtatttctgattttcataatagtctatcaagaagaattatgataacttacttgcttgtagtccttaatttcatttgtatgttttttgtaagtttgttacccaggattgcactcgcatttacctaaatatattatcacttcatgatttgttaccctggttggatgtacaccttctgtgagaacatgctattgactgtttaattatctcactatttccttcatacattggcagccgcagatcctattttaattgtttgcatcaatagtttacgacattttaatgtttcattcactgccttttattcctgaaatccacatgtttaatgcttcctttgttcttttgctggcattatatagatcgttaatgggcctgaggtgctgagcaagtttgttggtgagacagaaaagaatgtcagagacttatttgctgatgctgagcaagaccagaggacccttggtaaggaaacattgttctttctgatctgtgcttttgtgttttctttttccagtgcatatactaattgggcattcttattttctcaggtgatgctagtgagttgcatgtcattatttttgatgagattgatgctatttgcaaggtacacaactttatcttttcttatctttgatgattttgcttatttgaagttgtaaatatgcttttagttttgaccaccagtcccattaaatctgggtaagaaatcttgctactctgtgttgtgactgtatttttctctggattttgggtatactttcaagtgatctagtggttatgagtttaaacaataaattaacgattgtatgctttgtgattttcagtcaagaggttcaaccagagatggcacaggtgtccatgatagtattgtaaaccagcttttgacaaaggtcagtcaaagatcaagctattatcagtttattcggagttttcacggacgtgactaacacctttttttatagatagatggtgtggaggccttaaacaatgttttgctgattggaatgacaaacagaaaggatttgcttgatgaagctcttttaag

SEQ ID NO: 143898 - DNA, 2733 bp, Arabidopsis thaliana landsberg
atggcctctccactcacactctttctcatcctcttcttcttcttcctttcttctgcactgtcttcctcctcctcagagctcgacattctcctcgatatcaaatcctctctcgaccctgaaaaacgtttcctcacttcatggactcccgacgccgacccttgctcctctggctccttcgacggtgtcgcgtgcgacggaaaccgccgtgttgctaacatctctcttcaaggaatgggtctcactggaactatccctccttcaatcggtcttctcacaagcttaaccggtttataccttcacttcaactccttgaccggtcatattcctaaagatatctcaaatctgcctctcctcaccgatttatacctcaatgtcaacaatctctccggtaaatccctcctctaatcgggaacttagacaatcttcaaggtcggtctatttatgcatgtgttctttgttaacctcactcactataattcatttattgcagctaaaacaccttaagcgggtcaaatttggtttattaaaacttagctaaaaagagtttaggtcttgaatggtgtagattttagtttttttttttaatcatccattcaagtttttagatttttgagtctcctagaaactagggatactctctattgtctccttcatctttcactcttttttatgcaaaactcaaaaacaattttatttggggttttgaaactaaaatgtaaaactcaacaaaaataagggcaaatataattgcatctatatattcataacactttttttttttttttttttttttgcagttatacagttatgttacaacaagttttgtggaagtataccgacacagtttggttctcttaagaagataactgtcttggctttacagtataaccaactctccggcgccattccggcgagtttaggcgatattgatacgttaacgaggcttgatttgagcttcaacaacctctttggtcctgttccggtgaaactcgccggtgctcctttgcttgaagttctcgacattcgtaataactccttctccggcttcgttccctctggtaataatttcttttccctcaagattcataaattcttcagattctaaaccggttcagtgttgaccaatccgattaaacagaaccgggaaccaatccaaaaccggatcgtggagaacttaaaccatatcaattctaaaccggtttttacaaccacattaaagatgttttgctgacttgtttgtttcttgatttttatgaattatgaagctttgaagaggctaaacaatggattccagtattcaaacaatcacggtttatgcggagatggtttcactgatttgaaagcttgcaccggcttaaacggtccgaaccttaaccgaccagacccaacaaacccaacgaatttcacaacagttgacgtgaaaccagaatcagcagatttacaacgaagcaattgcagtaacaacaatggcgggtgttcatcaaaatcctcaaagtcttcacctttaggaatcgtcatgggtctaataggatcaatcctcgcagttgcaatctttggcggttcaacattcacatggtacagacgaaggaaacagaagattggaagcagtcttgatgcaatggacggtaggattagtactgagtacaacttcaaagaagtttctagaagaaaaagctcttctccattgatcagcttagagtacgcaagtggttgggatccgttaggacgaggacagagcagtaacaacaacagtgcattgtctcaagaagtctttgagagctttatgttcaatcttgaggagattgagagagctactcagagcttctctgaggttaacttgttggggaagagtaatgtctcttcagtttataaaggtatccttagagatggttctgttgcagctatcaaatgtatagctaaatcgagctgtaaatccgatgaatccgagtttctcaaagggttgaagatgctgacactgttgaagcatgagaatttagcgaggttgagaggattctgctgctcgaaaggacgtggagaatgtttccttatctatgagtttgttcccaatggtaatcttttgcagtatcttgatgtgaaggatgagactggagaggttcttgaatggactactcgagtttccatcataaacggaatcgccagaggttggattctgctattcattctttcgtaaactacactggttttttgtatgtgaaatatataagttttttatcttcctttcagggattgtgtacttgcatggagaaaatgggaacaaacctgcaaaagctcaccagaatctatctgcactagaagaatctaattgcgcactggtgtaattcctctcttgcagattccggtcttcacaagctattcacagatgataaggttgtctcgaagctcaaagcaagtgcggcaatgggatgcttaactcctgagtacataactacagggaggtacactgataagagcgatgtttatgcatttggtatgattctgttgcagatactgagtggtaaaagcaaaatcagccatttgatgatcttacaagctgtagagtcaggaagactgaatgaagacttcatggatccaaatcttcgaaagaacttcccggaagtagaagcggctcagctcgctagacttggtcttctctgcactcatgaatcctcaaaccaaagaccatccatggaagatgttatccaagaactgaataatctcgccgcggattattag

SEQ ID NO: 143899 - DNA, 701 bp, Arabidopsis thaliana landsberg
gtacaaactggcttactcatcgaactttagcgagattctggatcctataatcgagaataattaccagttattcatgatggagagactggtaatgatgggagccaaaacatacttcaaaacattcaaagagtacgaaacagatctcaccttaactgatgatcctaagaagaataagaactgggaaataccagtatacaccatggatgaaagaagagaagaagcaagctaaagtttgtgcgtctttacaaggtctcataatttagtcttatgatttcccacgttcttgtagtcaaatgctaaatcagtgtatgtaaaaacaagaacagagttgcagagtttagaggtttttcattggctttccagagggctcttgtgtaaatgggttttgtaagaacagatgtagtaaaatctgtagtaaaatcttgtagtcaaatgctaaatgggttttgaagtttcaaatatgtaagcttctgagcgtttcccttaactcgcaaatctgtactacataacctacacaatttttcctaaactacgaacataaagagagaagtttggtcagatctttggccggatcatacatggtgtgatcatgttggctccaaaagtcggtccaatagcagcagaagaaaacatcagctggaattaacaatgtttctgcctcttcccattcagagtaaaacctttttaagttagtgggactg

SEQ ID NO: 143900 - DNA, 1832 bp, Arabidopsis thaliana landsberg
  unsure (1)..(1832): unsure at all n locations
ctgttgtccaganatgtgatgcacatttgattgttntaaggtactttgntatgtagcttctgtatagtttatgctttggagtaatagaggctaaagctaatttatgatttgtctttgtttgtcaaatactctgtttagccctcattctgtacatcgagcacatgctggagaaagcgagaaagtcttaagggaagctttcgctgaggcttcttctcacgctgtttcagacaagccttctgtgatttttattgatgaaatcgatgttctttgtcctcgtcgtgatgctaggtattgcttcacccctagtttatagttgctatcttcagagagatctttaagagattgagaataatcttgttctctttaaaatgcagacgagaacaagatgttcgtattgcttctcaactgtttacacttatggactcaaacaagccttcatcatctgcaccaagagttgttgttgtagcatccacaaataggttcttgtctaccttaagcataatataagttgattatcaacattggttttgaatgcaatgatccaatggttttccccgatcttgtcaaaagggtggatgcgattgacccagcgctaagaagagcgggacgatttgatgctttagttgaagtgagcacaccaaatgaggaggatcgtttaaaaatcctgcaggtaattatcgagttcttaaatgggattttcgtatatagtaagtttgtttgtgatcttcatgttttctatttttttcagctgtacacaaagaaagtcaatttagatcctagtgtcgatcttcaagccattgcaatatcttgcaacggttatgttggagcagatttggaagctttatgtcgtgaagcgacaatatctgcaagtaaaagatcttcagattctcttattctaacatctcaagacttcaagattgcaaaatctgtggttggtccaagtataaacagaggcatcacagttgaaatccctaaagtgacatgggacgatgttggtggtcttaaagacttaaaggtcaatactttttaaaaatattcattttgcactttgttgtcctgttttctccattgcgattaatggtttttttttccttgtgacagaaaaagctccagcaagctgttgaatggccaatcaaacattcagctgcatttgtaaaaatgggcatatcgccaatgcgtgggatacttctacatggtcctccaggttgctcaaagacaactcttgctaaagccgctgcaaatgctgctcaagcctccttcttttccttaaggtatagattttgatagatcacatttaacaaaatccccctttggttgtgaaacttgtttaaagaaacttattttttcttgtgtctttgtgtgggtgtgcgatgcagctgtgcggagctattttctatgtatgttggagaaggtgaagcattattgcggaatacatttcaaagagctcgacttgcttctccaagtataatattctttgatgaagctgatgtcgttgcctgtaaaaggtttgtctctatctctcccaactcttgcttcgtgttatagactcttcttaacatgtttatttccttgggtcttcgtagaggtgatgagagctcaagcaatagttctacagttggagaaaggcttctatctacactgttaaccgaaatggacggtcttgaagaagcaaaggtaaactaaagctcataggcttttaaagattttatctttgttattgggttgcaatgatattgatcgggttttggtttaagggaatcctcgtcttggctgccacaaaccgcccgtatgcaattgatgctgctctaatgcgacctggtcgatttgatctc

SEQ ID NO: 143901 - DNA, 893 bp, Arabidopsis thaliana landsberg
actagatctctctttcttatacatccatatcaccgatgatgcctcgccgtgacgtcctcttcctctcactcctcctcgtcatcgccaccgtctccgctgtcgcattagccgtaagttttccaaatctgacttgcttcctctcatatatgattttgtctagaactagacacacacattaaccagatttgaatatgtataatgacacaacatcaatgacattagtttaaactattagactacaaacttctgtttcttcccatttaaaaaaatgactttcttgatttcacaggacgatgaagcagattgtgtctacacattctaccttagaaccggatcaaccttcaaagccggtacagattcgatcataagcgctagagtctacgacaaatacggagactacatcgggatccgaaacctagaagcatggggtggtttaatgggaccaggttacaactactacgagaggggtaatctcgacattttcagtgggaaagcaccatgtcttccgagcccagtctgttcattaaatctgacctctgacggctccggtgaccaccacggttggtatgttaactacgtggaagtcacgacagccggagttcatgcaaagtgctcgtaccaaagctttgatgttgagcaatggcttgcgtccgatacatcgccgtatgagctcagtgctgttcggaataactgtccagtttcgcttagggaaagtgtcggtcgggtcgggtctgagatccggaagactctctcttggatcgtgtgagagtagtgaatgaaatgtcaaatgtgtatgtgtgtgtgtaacttggagagttgttctttgttgtcttgtgaacgtgtgatggcaataatgaaaatgattcgatcgaataaaagttccgttctttgtt

SEQ ID NO: 143902 - DNA, 142 bp, Arabidopsis thaliana landsberg
agactactacagctgtgaacatgaacaactccgatgccaaggaaatacaacaagagcttgaagatggttcaaggaacggcgatcttagctacgtagcaagcaaaagaaaagtgcctcgtggacctgatcctatacacaacag

SEQ ID NO: 143903 - DNA, 627 bp, Arabidopsis thaliana landsberg
aggtcaataaatggtttaaaaatactcggtatatggcactgcggaataggaaggtaaatcgctattacttgcttcattcacacatatgaacattgtctggatgcctacagagactaaacttcttacaaggagattgatcatttggctgccattgtttatatatgatagactgagagcgtgaaacaacctggggattctaagacagtctctggaggagattctggaccagaagcagtcatggagaacaacactgaaacaaatgaagttcaagatactttggatgacactgttccacccggatttgacgctacaaatcaaaacatactctccccatgtaataacaaccaggaggaatttcaacaggaaaatgtctcttttccttcacccacagatgaaagtcaacagtatctggaacaaaacgattcttctttcgttgtagtggtaagatagaaatgattaagtactgcttccatgaactcgccttgaccagtggttttggacaattttagatttttaaaagtgatttgttcttattctgttcagccacatgaaaagcaaagcagcgaaattagcttaaagacggctgtagaggagaatgagacagaaagcaagatgatgaaagaggta

SEQ ID NO: 143904 - DNA, 1020 bp, Arabidopsis thaliana landsberg
gatcttaatgggctggacctggcacttagtaggcttgggcccaaaaacctgcgaaagacgcttggcccatggacagcccgccaaattgacagacagaccctaaattcacaaagtccctcatcagccagccaccgctataataaaatccctaaattcacaaagtccctcatcagccaccggtacaataaaatcccagaacgaaatctctacgtcgaaaccatgtccagtttcttccctttgccgccagccatcgggaaatccagtaagatgatttctcgaaattaattgtttgtttatgatatcatctttctgtgaagttggtagtatatttatatgtctatgatcgatcttgattagatctaacttgatatctttttcgtaacattagctggatgtggagtgcgtgatgaatcacaatcattagttgtatgggccattgaggactactcaatccctgaaagtatcgatcctgatatgatcaacttgaaaatcgaaacagctattgtcaaaaaatttaatttaaggtcgtcggcggtagtgacaacctggattttcggttctgctgagaatgcatggttggctgaatccaaagttaaactttgggaatccgagtttagagtctctctccacaaaggtccttttctaactcatatatcaacactctatctctttatatgaatttatcggtaagtaactgtaatctattgatgatactaattgcagggggggataaacgtgccagattaaacatgatgttagcagacgtcatttattatgtatggaactggaaggctccaacaaatttggcggtactcacagaaaacaaggagtagatggaacaagaccccaaatttttcagatttcgtcaagctttagaaaataaaggtttctttgttgccgtagaacaccatgagacactcatcaaccaagaaactgccgttgaagacccagccagatgactccccaataccttactacccaagtgacaaccctcaagagctagcgttttggtacaaaaaa

SEQ ID NO: 143905 - DNA, 555 bp, Arabidopsis thaliana landsberg
acttaattaagatacgatcatggcgtcgtttgtctttgtgatttctcttcttcttctctctttttcgtcggctgttttctccgatgatgcttcttttcagaaacttccggtgcctgacaagaggtcaggccctgaatctttcgcctttgactctaccggcggattctacaccggagtctccggtggtaaaatcctcaagtacgttcctggaaagggttatgtcgattttgcccagatcacagattcttcgtaagtgtctccttcttaggatctccaagattataacttttcaagatcatgcttctggtttaaggaatctttttcttatcaaaaatcaattgttatctaattaacgatcttgtttctttatatagtaattattatctaatattcttaagacgtatctggctcattattattttaaattgttgtatatatattgtaccaaaatatttgtattgctgcattttttaagaaatattttttaatcggttgaatactctaggaactcggcatggtgcaacggagcattaggaaccgctttagccggaaagt

SEQ ID NO: 143906 - DNA, 429 bp, Arabidopsis thaliana landsberg
agctccgttaatgaaaatgaagatgatggtactactgagttccggaaatgcatccgagtcctggcagacaaagttagcttcctctccaaacaccgggaggaattattggagaagtgccaaaatcttgaagccacaagtgaacagacaagaaaggatttggaggaaaagaaagagctggtgaaaacattgtacactaaacaccaacttgggaagcaggtagactcgtgttatctctagtaacagtcatggtttcttgcagtaaattttctttctccttttactacacattcataatttggagtgtcctcggctttgaatgagaaaattggtgaattcttgtgatgacaggcaaataaggaaaagatatcattcggtcgtcttgaagtccatgagatagcagcatttgtgctaaaccaagcagggcattac

SEQ ID NO: 143907 - DNA, 820 bp, Arabidopsis thaliana landsberg
tgttatgattggtagcaataggaatcgtaggttgaagattcaggtagatggaaaatctgtggtcgatgaggaagcttctgatctttggcgttgttctttggagtttcagagttactggattagtatctatgatgggttgattagcattggtaaaggtcggtatccgtttcagaacctggtatttaagtggcaagaccccaagcccaattgtaatgttcagtatgttggtctgagcagctgggataaacatgttggatatagaaacgtgagtgtgtttcctgtgacacataatcatatcttgctgtggaagcaagtggattgccgtgaagttaaaggagatgagtctggtgacgagaaggttgtggaggaagggactggttatgattatgaacaatggggacttgggaatttcttggagagttggcaattatctgacacagtcttccttgttggtgacaaggaaatggatgtccctgctctcaaggttatattacaagcatcaggtaattttcctttgagatcatctgatggggatgtcattcaacttcgtggagtgtcgtacccgattcttcatgctcttcttcaatatatctatactggacgaactcaggtaatttctcatatcctcttcccttgacgtaattgtcccttttgcctggtgaaatgctttgttaggaacctttttatttatttattagtaaacatggagattctatatcttcgtcataatttccttcaaacttttgttttgatgtagattttggaatcagaacttgctccattgcgggatttaagttctaagtttgaagtgatgtcattg

SEQ ID NO: 143908 - DNA, 1671 bp, Arabidopsis thaliana landsberg
  unsure (1)..(1671): unsure at all n locations
agaaagagaggattaagacataaacaagtcaaaacaagaagaagagatttatttattacataaaaatggttgtcgccaatgatctctcgtccaagattctccccagagttctcatcgtctctcgtcggactctccgcaagaacaagtacgtggacttcgtaggagaataccatctcgatctcatcgtctcctccggtgccgtccctgtcattgtcccacgtgtcaatgggatccattctatgctccagagcttcgagcctattcatggtgtcctcctctgcgaaggagaagatgtcgatccttctctctacgcggacgatgaattatcaggcctctcgccagaagacatggaggagattaagaaggcgcatgcagaggacatgaccatcgaccgagagaaagacagcattgagctgactgtagctagactctgtctcgaaagaaacattcctttcttaggcatttgtcgtggctctcagattctcaacgttgccgcaggtggaactctttaccaagacatcgacaaagaactcggaactacgatgacaacgacaaatcatatagattatgacaactacgatgggcacagacacgaggctagaatcgtggaggagactccgttacataagttgttcgaggagatggagataatggtgaactcgtatcaccatcaaggtgtgaagagactggctcaacgttttgtgccgatggcttatgctcctgatggtttgattgaaggattttatgatccgaatcgatatgatccaaaggaaggtcagttcttgatgggtctgcagtttcatccagagaggatgaggcttccaggctctgatgagttnnnnnnnnnnnnnnnnnnnnnnnnnnnnnnnnnnnnnnnnnnnnnnnnnnnnncatttcagaagaaacaagtaaacgcaacacaggttgagatgaagaggaagaccaccacactcgtcaaaagcttctcccaagctgagtttctagaggtcagagattcgtttgttttacatacatacaggctctatgttttgccactcaatattggattttctgacatggctgaatgaatcatgcaggctaatacagttctaagcaagcaacaagagaataggctgaagcagatgggagcgacggtgaggaactcatgtgtgtatatgaaaaggatgaaaatgaaagaggaacaagagagagcaatggacaaactttcggcggagcggctgtctgatatgctttccttccaccatatgatggctcgtctttgctccaatgccatcaagagaaaactactagaacccgaacacacagataggaccatagagtcctccttttttctcaactattagcctttattgcaaaaacagttttacacacaataagaaaactagcattctgtgaatttacagaagctaccaaatgaaaaacttttgacagtatcctatatgtaaggtttcctcaagacagtaatcataaagagttcctttttataacttcctatatcatttttcgtcatcatagtataatctatcattaccggcggcagaagaagatgaaatcaggatggttgacttgacgcaacctcagccaattatctgcggcttggaagagagagttcgcgagctggtggcccgagccaccaaagcttgtccatacagaacctctcaacttgtatga

SEQ ID NO: 143909 - DNA, 1666 bp, Arabidopsis thaliana landsberg
ctttttataccttaaaatttatcaacaacgaaaagccaaagacacacaatgctaaattcttcatatctatccttcgcacttatctttttctgctgcatttcattcacagctctcgcttcgtctttgcccgtttccgaccctgagcttgttgtcgaggaagtacacaggtatatattctaacaaaaatgttaaaacattttacatacactactcaaatgtttggtattaaatattgtttccaagttctttctattcaaggctaattttgatcttgatcacaaactcacttgttactattgctgcattaatagctatgacttatgagtacgcctaattacgtacgtcaagaataataaatgctaatatattgtctgttggttaatgctttaggaaaataaacgagtctatatcaagaaggaagctaggtttcttctcgtgcgggagtggtaatccaatcgatgattgttggcgatgcgacaaggattgggagaaaaaccgaaaacggttagcagactgtggtatcggttttggcaagaacgctattggcggtcgtgatggtgaaatctatgtggtcacggatccaggaaacgatgatccagtaaaccctagaccgggaacactaagatacgcagtcattcaagatgaaccgctatggatcatttttaagcgagacatgacgatccaactaaaagaagaactcatcatgaattctttcaaaaccctagacggacgaggagcctccgtacacatctccggtgggccatgtataaccatacaatatgtaaccaacatcatcatccatggtttacacatacatgactgcaagcaaggtgggaatacttacgtacgtgactcaccagagcattacggatatagaacggtatccgacggtgacggtgtgtcaatattcggtggaagccacgtgtgggttgatcattgctcgctatcgaattgcaacgacgggttaattgatgcaattcgtggatcaacggctataacgatctcgaacaattatttgacgcatcataataaggtcatgttattgggacacagtgatacttacagtcgtgacaagaatatgcaagttaccattgcttttaaccattttggtgagggccttgtccaaagaatgcccaggtaaataaaaaatcactttgtgttagtagttaatgtgattgtgaccatggatatagattaattttgggaccattgtattgttgttgtgtaggtgtagacatggatacttccatgtggtgaacaatgactacacacattgggagatgtatgcgattggtggaagtgctaatcctacaatcaatagtcaaggcaatagatttcttgccccgggcaaccctttcgccaaaaaaggtataccttaatttctctctttcggagtaaggagatattgagaaaggatgaatctcaatattgtaatggttttggcaggtgacaaagagggtaggttcatggcaaggggaatggaagcaatggaactggagatctcaaggagacctaatgctcaacggtgcctagcttcactaaatctggagctgctgctcctgcaagctatgccagagcctctagcttgggaggtaaaccagcttctgtagtaagtatgcttacatacagctccggtgcccttaaatgcaggatcggtatacggtgt

SEQ ID NO: 143910 - DNA, 438 bp, Arabidopsis thaliana landsberg
aaactactacaaatgttcagttgatggctgtcccgtgaagaaaagggttgaacgagacagagatgatccgagctttgtgataacaacttacgagggttcccacaatcactcaagcatgaactaagactcgaactaaggctcaaggagaccatgctatattcagcacatcttattttctatggttacaaacgatacttaaaactgcttctacttctttatattcattgtaaactggttgcaggttcacaaattttgagaggtttatgacattctaaatctgtagtacttctatagcatcttattcccccacaagtgagaatcgatggacgtaaaagtccaaagaacctcatatcataccataaactagcaatcttagaatatcaatgcaaatctaagcagataattaccagaacaattcccaaaccactaatgaacaca

SEQ ID NO: 143911 - DNA, 986 bp, Arabidopsis thaliana landsberg
gcttgcttagagcaagatcctgaaagcaaagtggcgtgtgagacatgcaccaagaccaacatggtgatggtgtttggtgagatcacctaccgctgcgacagttgactatgagaagattgttagatccactgccagggagattggttttatctctgctgatgttggtcttgacgctgacaaatgcaatgttttggttaacattgagcaacagagccctgacattgctcagggtgttcatggtcatttgaccaagaagcctgaagatattggtgctggtgatcagggacatatgtttgggtatgctactgatgagactcctgagctcatgccgttgactcatgtcctagccaccaagcttggtgctaagcttactgaagtgaggaagaacaagacttgcccatggttgaggcctgatggtaagacacaagtcacagtggagtacaagaacgatggtggagctatgattccgattagagtccacactgttcttatctcaactcaacatgacgaaactgtcaccaacgatgagattgctgctgacttgaaggagcatgtgatcaagcctgttatccctgctaagtaccttgacgataacaccatctttcacttgaacccatctggtcgttttgtcatcggagggcctcatggtgatgctggacttacagggaggaagatcatcattgacacttatggtggttggggtgctcatggtggaggtgccttctcaggaaaggacccaaccaaggttgacagaagcggtgcctatatcgtgaggcaggctgcaaagagcgtggtagcagcaggactcgcacgccgttgtatcgtgcaggtatcatacgccattggtgtccctgagccgctctcagtgtttgttgacacctacaagaccgggaccatcccagacaaggatatccttgtgttgatcaaggaagcatttgacttcaggccgggaatgatggccattaaccttgaccttaagaggggag

SEQ ID NO: 143912 - DNA, 913 bp, Arabidopsis thaliana landsberg
gttttctatgaagatggtgataaagagaccttggatctgaagaaggagagatgggagttgattgaagaagatgatgctgaatctgaatctgatgaggtagatattagacagtgtttgtttaatcatttattgtcgattttatcctgtgtatcactagcttttaatggttcagcattcttttttttccagatctccctacaggaggaatctgctggtgagagttctgaaggcactccagaaccgtaagtttgcccttatcttcctacctgttttagacatcgcaaccttgagtttctctttatacttaactagggttatgatttagatcgtgtgttgtatcgtatagtaccgattgttttaatatcactaacagtcgtgatttacgaacatgagtgtgtcagatacacatatattcatggctgtggattgtgtccctgaatctaaagatttaggagtaagtaattctgaatgatctttgttgtctaaactctctacaggcctaaagggaaagggaaggcatctttaaaaggaaggacggatgaagctatgcccaaaaagaaacagaagatagattcttcatcaaagaggttggttatgttatactatgcattcttaaataaacaaacgtatatatgcacacttccacgctcacgtgcgagttcaacacagttacgcattaaagtcagcttaccttgtctctgcttcacacgctatggagttgaattcatatcatagagggagctatagagattatagtattattgtgatgctttgattctgaaaatctaattacctcaattgtttttacagcaaggccaaagaggtggagaagaaggcctcaaagcccgaaactgagaaaaatggcaaaatgggtgatattggtgggaagattgtaacaacggcatcacgcatg

SEQ ID NO: 143913 - DNA, 758 bp, Arabidopsis thaliana landsberg
ctacgcacgatgttaatgataagaaccagcttctttcattggtgagaaaataccttgatgggattgcggtggttgatctcaaagacgcttaccctaatgtaatggaggatttgaaggtatgcattgttataattggcaagacacaaagatgacagaaatgtatcctgtagattcttggtagcaattctgatatgaatggtggcatgagaaatgaaagttctctaagcattggtttttggttggacaatcaattagacagcttatttctacgtggagtatgactgaaaaccataccgggatcctgtcttatattgtgttttctgcggcgtcaaaagttgtaggaactgctgtattttgctaagcagatggggaaaatatatgttactctttgaaaccaaaccaggaaggtattgaaagtttcaagactgtcttgtattttgcaggctctgagtgcttcaggggacatctacttgctatcaaattcacaagaggacattgcatacccaaatgatttcaagtgtgagattaaggttgatgacgaatttaaagctctattccgtgacataaacatcccgaacgacatgctggacgtggagaaggagctgctgaaaatcggtttgaagccggcgacaaacactgcagagaggagagctgctgcacagacgcatggcatatcgaataaaccaaaggataagaagaagaagaaacaagagatcagcaagagaaccaaactcaccaatgcccatcttcccgagctt

SEQ ID NO: 143914 - DNA, 1359 bp, Arabidopsis thaliana landsberg
atgagagcaggatttagggataattatatggctgctagagagggtgaaactcgggagccaggtacaattgctgaaattgcagaactttaccgcagtgagtataatgatgagcttgagtggatgaaggacgagaagctaagggacattgtcttccatgttcgagataatgagctggctggtagggatccatttcacctgattgatgatgaagataaagctatgtttttgcaaggcttggagaagaaagttgagaaagaaaatgagaaactgtctcatctgcatcagtggattcattcaaacattgaaaaccttgactacggagtaggtaatcttctacaactttgattgagactcagtttgctcaatatcttacgtacacaaattatgcattaatcagcttgtcaaaatatatctcaaccatctcccttcctcttattattcagatggcgtcagtgtgtatgatccactagaaaagatcataccgagatggaaagggccttcacttgataagaaccccgagtttctcaataactatcatgaacagcgtgaagcactgttttctgaaaaagctgcatctgtatctcctgtgaaatatgaagaacagagctctcatcaggaattatcagagtctgcttcctctgagaacactctcaccccttcatctgaaattacctcaagccagccaaagattgttgtagaaggaagtgatggatctgttagacctggtaaaaaatcaggaaaggagtattggcagcacacgaagaagtggtcacgtgggttccttgagttgtacaatgcagagactgatccagaagtgaaagctgttatgagagacatgggaaaagacttagaccgatggattactgaagacgaaatcaaagacgctgctgatataatggaaaagctgccagagaggaacaagaagttcatggaaaagaaactcaacaaactcaagagagagatggagttgtttggtcctcaagctgttttgagcaaataccgcgagtatggagaagataaggaagaagattatctatggtggttggaccttccgcatgtactggtatgttttcctgctaaacagttgactgacattggagaaacacaaaagtccttgaaaatctgatatgtcttttcatgttttagtgccttgagttgtacacagttgatgaaaacggagagcagcaagtagggttctacacattggagatggcaacagatctcgagttagaacccaaaccacatcatgtgattgctttcgaggacgctgcagactgtcgaaacctctgttacattattcaagctcatttggatatgctacgaagtggaaacgttttcattgttccgcgcccgccaaag

SEQ ID NO: 143915 - DNA, 645 bp, Arabidopsis thaliana landsberg
atggcgattgctctctcgtcgtcgtcgacgatcacgtccattactctgcagccgaagctgaagacgattcatggattagggacagtacttcctggttattcggtcaaatctcactttcgtagtgtctctctccggcgtagcgccgtggtcgtgtcggccattaccggagcttcttccggtgagcttaagtgtcttctctttctatattatattgaatacggagattctagattacttactagattatattgattctccacaggagctggaatagggaaaggtacagctgattcgctagatacagtgaaagtcttggatttgagaggaaatgagattccgatttctgatttatggaaagataggaaggccgttgttgcatttgctcgtcattttgggtaattttctcattatatttgatgattctggtttatgactatgtgtaactatctaagattgcttgttatgttttcagatgtgtgctctgtcggaaacgagcagcttatcttgcagaaaagaaggtaacagaatgatctttggtttaaaaagattggccatttatacacaattgaagtcattgagtgatacctttgagatttttgtttaggatgtgatggatgcatctggtgttgatcttgctctgatcgg

SEQ ID NO: 143916 - DNA, 1530 bp, Arabidopsis thaliana landsberg
cttccatggcggattcggaagcagataagccactgagaaaaatctcaaccgctttcaaaaagctagcaatcatcgtgaattcaccgaatccggaagttcctgtaacgcaattctctcacgcttgctctctggtctcgcctctctttggttgccttggaatagcttttaagtttgcggaaatggactatgttgccaaggtttgtttatgtagtagatttgaatcaaagtccgaatctttttctagttgtgttcactttcatgtactattgagtatattgtgagatgttggaattgatttagtttctgtagtactcagactgaattttgctaatttgatggaaatggatgttgtgtttgtttatctggaggatgaatgttttggaaaatgaaatgttaaaacttgtgaatgtgactataggttgatgatcttgtgagggcgtcgagttcgatatcgacattagtggtaatgatggacaaagatattgaggcagattgtgtaaggaaagctggtagtcatacgagaaaccttttgagggttaagcgtggtcttgacatggtcaaagttctctttgaacagatcatagcttccgagtaagtgattcttctgaactctctcttatttgagttcttgtgaaaattttgatcaaatgcattagccgtgccagtttgtaggatgtgtgatttaaatatggacactgaagtaaatgaaaaaatggagtcctgttgtaattttcttttatttttggtcaagattagaagattgaaatgtagtttgatatcttttgcagaggagataactccttgaaggatccagcaactaagtcttatgctcaagtgtttgctccccaccatggatgggctatacggaaagctgtttctcttgggatgtatgctcttcccacaagggctcacctacttaatatgctcaaagaggatggtgagttcatcaactagttaatatgctcaaagtggatggtgtgtttgataaactagtagtttaagtagtcagattagtttcaaggtcttcacaggattaggtagatatcacggcaatatttggcctgtataagtcctggtatcataagagagaactctttgagattcacattggttttaagttcatttggcagtaggatattagattttgaattttccaatactatctctgtttgagatttcataaatcgagtttcttcttcattatgttcgctgacgatattgtttttttcatttatttatgaatgttgttacagaggcggcggctaagatacatatgcaaagctatgtcaattcatcggcaccattaatcacgtatcttgataatctattcctctccaagcaactcggtattgattggtgaagagcctgaaaaaaaggcataactattgttactctttagacaaaataacctatgttctcacatcaagctatgtaatgtcataacaacagcgacgaaatacattggaataaattgagtatgtccttaatctgtcgttttatctcttcttttataaacacagtttatctcat

SEQ ID NO: 143917 - DNA, 1229 bp, Arabidopsis thaliana landsberg
atattcatgtagtgaataatgatttcactgagtggaaaatgtatgctattggtggtagtggtaatcccaccattaacagtcaaggaaatcgttactctgctccttctgatcctagcgccaaagaggtattttttcttcttttatttaacaaattttacatttttttggattacccatatagaaaaatctttcctttttgttgttgttgttgttgttgttatatggtgtggaacactttctttaatagcttaactttgtagggtttagtatgattttgtggatagattttaggcttttaccatagagaactttttattgagtaattgacaaatgtgtagttttcattagttgattttgattgggttgtaaaatgttttgagtatggtcctatcttctatgaatccagttcatatttcacatggacagttgttaatctttagctagtaggaaaaaatatccagttaaagttgtatgtaaatgggaaaaggaagaatcttatttttatgagaattgggtctacgaggagtgagacagtgatggtatgtatgtatagtattataagtgcatgacagacatgtgggctgcttcttctacttcttctctgtccacacactttattttgttgttgttagttgtttgaataccaccacgcgcaacgacggcgcgtggaaaagagattgtttgctgatcggtggtgaaaagcaggtgacgaagcgagtggactcgaaggacgatggtgaatggtcgaattggaattggagaacagaaggggatttgatggagaatggagctttctttgtggcctctggtgaaggaatgagctcaatgtactctaaagcttctagtgttgaccctaaagctgcttctctcgtagaccagctcactcgaaacgctggcgtttttggcggtcccaggtactatttctttttccctttttacccttctttattttctaattagatttttatttaaccaatttaaaagtatactcccttattagaaaaatcttttaaaaactgaagcatgatctctcatttcggtgtttaatgtataataaaattagctgtgaaagcgcgtgattagagcgcatgatttgttattgtcgttattcgttaagtcaagaacagataacaaccgtactattttactattttagttgtgtattagtcttttactttggagtctagttaacttgtgattagaaaaagaaaactctaaacaggcgaatt

SEQ ID NO: 143918 - DNA, 507 bp, Arabidopsis thaliana landsberg
tcctcgtgtgacgacgccgacatatcacacgatctaccgtgctctcaagcagatgatccggactcggacgacacaaaacaattgacagccatcacaaatttcggttcgggagagaataaccataaccggaaaaaaatgatccaaccggagatgaccgacgagcggaagaggatgaggatggagtcaaaccgggaatcagcgaaacggtcaagaatgcgtaaacaaagtcacattgataacttacgagagcaagtaaaccggttggatttagaaaaccgtgagctcgggaaccgactccggttagttttacaccagcttcaacgagtgaattccgacaataaccggctcgtgacagaacaagagatactccggctaagattgtcggagatgcgtcggattctgatcattagacaacttcaacaacagcaacaatgggaactacataaccggagaatgatcatgactgaacaaaaccaccctcatcttcaatgatagatcaaaatattt

SEQ ID NO: 143919 - DNA, 831 bp, Arabidopsis thaliana landsberg
cgcgtattcacgtcgctagcataggcacgtaactggagctgatctcacgtatattttggatcgtaatcatggacggcgaagattttgccggaaaggggccgtcaatcttctctatactgtcaccttttgtagaatttaacggtatctccgttgaaatcgagatgattttaccataatagctcctcttctgcgatcccggaatgtgcaatcgatttcttaagggttggattcgcgatttgtgggctattttgttaatgatctaaggaaattatgtgatgtcttagctttttagaggaatagaaaaaaataatcatttgcatgcattgctggacaacattgcacgctttgcaataatctcattcatgttgtatacatgtttgcttggtcctatattgttgttttctatgtctggtatcatttatgcatacattggtctgaatttcataggcggctgctgaagccaagggattgaacccgggattaatcgtgctgcttgttgttggaggtccgcttcttgtgttcctaatcgccaactacgtgctttacgtttatgctcagaagaacctacctccaaggaagaagaagcccgtttccaaaaagaagctcaagcgggagaagctaaagcaaggagtccctgtccctggagaataaaagccagcttaagcttccttcacttgtgcctccttcaaagcggtttttgttcggttaccaaatttcacccttgcgggttttttcttcctttacttctgtcatgaggattatcttgagtcctgtatgatttcacatggagagtgtagactattgttttggtctgacttgtttttccttcat

SEQ ID NO: 143920 - DNA, 387 bp, Arabidopsis thaliana landsberg
gttttcttcaggttaaagcaactatgaagcctgttcttcactcgggttcttcatccaatggattttcacacaggagatttgaaaaggaggcatggatgaataacgcacagccttctgttgacaatacaggttttgtatatatatttcgagacatatacatatatacctttactctgatgtagcaccaacatcatgttctgcgttctcttgtttgttgatacatatgtgcagaaaacggttgggacgctgaaagtgtggataccccttctcagaagctgttagtgtatttcacaacttgtaatattggacatcaggtagaagttcatctcaaaaatggatctgtttacagcggcatatttcatgctgctaatgtggagaaggattttg

SEQ ID NO: 143921 - DNA, 368 bp, Arabidopsis thaliana landsberg
attctttctctctttcgtaaaaatggcgagttttgaggaaagctctgatttggaagctatacagagccatctcttagaagacttgttggtttgtgatggtttcatgggagattttgacttcgatgcttcttttgtctcaggactttggtgtatagaaccacacgttcctaaacaagaacctgattctccagttcttgatccggattctttcgtcaacgagttcttgcaagtggaaggggaatcatcatcatcatcatcaccagagctgaattcatcgtcatcaacatatgagactgatcaaagtgtgaaaaaggcagagaggttcgaagaagaagtagatgctagacattaccgaggagtgaggcgaa

SEQ ID NO: 143922 - DNA, 944 bp, Arabidopsis thaliana landsberg
attgcagttgcccttgctgttgcagctattcctgaaggacttcctgctgtcgtgacaacgtaagtgttcactaagtccattgatagcaaatacaatattatgagaaaggctaatgatcgttgaaacttaagatgatttctgtggaacgttagtgataccttggaaacaagaagtttcccagaaagtagatggttcttgtgatcgtcaaatgacaattttgtttcaaattcagctcactctaatgttggttgagtccaaaatgctatgaaaaagtaaatttccatgtcgggaggctactcctggttattatattgttgcttaaatagattatgatgttttgggtatctaggtgtttagctcttggaacaaagaaaatggctcgtttgaatgctattgtacggtcattgccatctgtcgagacgcttgggtgcactactgtaatttgcagtgacaagactggaacattgacaaccaatatgatgtcggtgtctaaggttagcattcttagcaccagtcctcgggactgttaactcttactggtatctgccacttgcaattttctattttaattgtttctaggaatatattgtatgggcaaatcttggtaatgtagttcatgtgtacacatgaccatatatgtttgcaatgttgcacgctgggaagtagctaagatagatcttcaggtctaattaggaaggattaacaattttgttagcagatcttgtgattttgtgaataactaactgcagtgattgcattcttgcatatactttttctcattgtgttgtctccgatggtaatatttgaattctcttactcttctgcttgtatgtcagatatgtgtagtccaatctgcagagcatggtcctatgattaatgaattcactgttagtgggacaacttatgcaccagaaggtaccgtctttgacagcaatgggatgcag

SEQ ID NO: 143923 - DNA, 1944 bp, Arabidopsis thaliana landsberg
  unsure (1)..(1944): unsure at all n locations
caagattttctctcaggtgactgaacaacagagaaaaacatggcgaaaaaagggaaagaagtgttgaacgctttggacgcagccaaaacgcagatgtaccatttcacagcgattgtaatcgcgggtatgggttttttcactgatgcttacgatctatttagcatctccctcgtcacgaagctcctaggccgcatatactaccatgttgatagctccaagaagcctggaacgctccctcctaatgttgctgccgctgttaatggtgtggccttctgcggtaccttagcaggccagctcttcttcggttggctcggtgacaagctcggccgcaagaaagtttacggtaacctttgctaatttcttggccttaacatatgttttagtagttttacgtttaaaatgatctatctagattaattcaaagtatttgatccattggtaatactagaactattaattatagtatttagtggctaaattaactaatggtatataatgaaaattattggaatacacataggtattaccttgatgctcatggtactatgttctctcgggtctggtctatcatttggtcactcagctaacggagtaatggccacactttgtttcttccggttctggctcggtttcggcataggcggcgactaccctctctcagccaccatcatgtcggaatacgccaacaagaaaacacgtggcgccttcatagcagccgtcttcgctatgcaaggcttcggaatcttagccggaggaatcgtgtctctcatcgtctcgagtacatttgaccatgccttcaaagcgcccacctacgaggttgatcctgttggctccactgttcctcaagcggattacgtgtggcggattgtgctcatgtttggagctatcccagctttacttacttattattggcggatgaaaatgccggaaactgctcggtataccgctcttgtagctcggaataccaaacaagccgcctccgatatgtctaaggtacacgttccttaactaatacttaatttcatcatatactaaatcatcatactaaaccatgatgattagtgtaaaagtaattattatttacacaacaggtgcttcaagtggatctaattgcagaagaagaagcacaatcaaattcaaattcatcaaaccctaatttcaccttcggtttattcaccagagaattcgctcgccgtcacagtctccaccttctcggcacaaccaccacatggttcctcctagacatcgcctattacagcagcaacctcttccaaaaagacatctacacagcaatcggatggattcccgccgccgaaacaatgaacgcaatccacgaagtcttcaccgtctcaaaagctcaaaccctaatcgctctctgcggcaccgtccctggttactggttcaccgtcgcattcatcgatatactcggtcgattcttcatccagttgatgggatttatcttcatgacgatctttatgttcgctttagcgattccttatgatcattggagacatagagagaaacgctttggttttttaattatgtattcgttgactatgttcttcgctaattttggccctaatccgacaacgtttgttgttcctgctgagatatttccggcaaggttgagatcgtcttgtcatgggatatcggcggcgagtggtaaaggcgggagcgattgttggagcgtttgggtttctttacgcggcgcagagttcggatnnnnnnnnnnnnnnnnntggttatcctcctgggattggtgttaggaattcgttgttgatgcttgcttgtgttaatttcttggggattgtttttactctgttggttccggagtctaaagggaagtctttggaagagatttcgagagaagatgaggaacaaagcggcggagatacggtggtggagatgactgtggcaaattccggtagaaaagtcccggtttga

SEQ ID NO: 143924 - DNA, 315 bp, Arabidopsis thaliana landsberg
accaaattgaaatttcttcaacttccgtgatattcgacaattacagaaaatatacaacattcgttatatagttgaatcaacacagataacttgaaaatgtaaacagcataaaacaaacaagaaagacaaacaaatttcctttcttggaaatttggtcttcaaaaatttctcttaattgctttattggggttacatttgggtattgttagtcacacctttctttacttcactggtaataccaccaccctccacttttgtcgatgtgttggtgatcggcagcttctgcattcctattttctcttccaccgatatcac

SEQ ID NO: 143925 - DNA, 2918 bp, Arabidopsis thaliana landsberg
acgccataaagataagaaggaggataaggtagagcctgaggctgatcctgaaagagatcagagaacagtttttgcatatcaggtatgcctgtttttatagctatggttcccttgaaacattataacttgatcagtaattgatttatttttttgtgtacaacagattgctttgagggcaactgaaagggatgtatatgagttcttttccagagctggaaaggtttgtccattcctctgccggtttcatgttgccatataaatgttgggctggctggttcaattgaatatttttaacacattgcctcctaaatattgttttaggtgcgagatgtacggataataatggatcgaatttccaggcgttccagaggaatagggtgagtttcaaacagtttgactctctaagactttctctaagacttatgtggctagagcaagttcttctttatgcttaagaattttaaactgtcggtacagtaataagctttaaatagtttctgagcagataaattgtacaaattctatgtagtatcttgtttgagtactgttttctggattctgagctgttcttgcttgcaggtatgtggagttttatgatacaatgtctgtccctatggctattgctctatctggacaacctcttcttggtcagcctgttatggtaaaaccttctgaagctgagaagaatcttgttcagtcaacaactgctgctgctggagcaggggggatgttgggcccctactccgggggagctaggcgtctttatgttggtaacctccacattaacatgtcagaagatgatttgcgaaaggtaaacaatttcttttcctggcagctgctttatgttttataaagaggaagttttatttgaataaatgtcagaaaatcgtaagagcagagtttttcctgtatactacaaatcatatacttattgagctttggggatcatagatctgttttgcaattgctcattttcggatcatagttcgcgttcaggtgacatattatgctttcttttggcattcctaggtatttgaatcatttgggagtgtggagttggtgcaagtacctcgtgatgaaactggcctctgcaaaggatttggttttgttcaggtaggtagtgtcggtgtcagttttaattttttgtcttgttcttgctactgtattcttttgattaacagaattcttttctttttcaaaaccttcaagtttgcccggctggaggatgctagaaacgcactgaatctaaatgggcagttggaaattgcaggtcgtgcaatcaaggtaggggtcgaacttatttttttataattttcaactgatatcggtagtatagaaggtagtagagagcttaagctgtgttaagtactttctagacggattctttctctctgtggtgaaattatgatataattcccgaacagacatttatgttctttgtgcttagtgatgttacattattactttgtatgaaggcaaattctatgagcagtgaattattttggctgatactttgagcagtcaactatcttaaatctgtctcagtggcttctaaatatgcatgtaacaccacattatatctgttgatgatgtagttttacttttcattaggtgtcagctgtaactgatcaaactgaagtcccagaagctggacagacgcaaaccaccggtgatttggatgatgatgatggaggtggcctggttagtacttgtcttcatctccctagcataacttccaaaagtggatatatttcatggatctatagggagaactcaagtaacctgttttacatgatgtatatagttactgcatgatgtaggatttggtatagataaaatatgaacagaagataaaccaactttaagaaaagggtgttaatagacaattttactatgtgtaagatccacggtggagtaggagaacatggagttatctttccagtttccaacaacactgtcataatcattaaatgcatttgttctcttagccttacctggttgcttattctgcagtctctgaatgcacaatcgcgggcacttctcatgcaaaagctcgatcgcagtggaacagcatcgaggtttccttatttcctgttactaatttatgtttttgcagtttgttttcgttcatttatgttccactaaatcttccaaccttctctgcagcactggccttacgtcagcggcgactttcaacggtggagtttcacaatctcttcgttggcagctcctgctcttgtacaagggtcttttcctgctgttgctggactcgcagggtcggcatttattcccggtgttataccagctggtttcgacccaattggtgtccccagcgaatgtctgctgcttaaaaacatgtttgatccatccacagaggttagtggtctgctaaatagtttcttttggcttaacaattcgtacctcaagctatttcttctatacacttgtatctgtttggcagactgaagatgattttgatgaggatataaaagaagatgttaaagaagaatgctccaaattcggaaaactgaatcatatctttgttgacaagtcagtgagcttcagggtcttgtaactttctcatctcgaaaagagtagactagactggtctctgactgacgactttgaatctctgttgctaaaacaggaacagcgttggttttgtctacctgagatttgagaatgcgcaagcagccataggtgcacaacgtgctctccatggaagatggtttgctggaaagatgattactgcgacttacatggtatccaaaaaaaataacatgacttgtgttgtctcagtttcttcgatttgttttcgatttcaattatattactaacaatcttgcttgatttgtcctttgttttaacagactacagaggcttacgaggccaaattccccgagagtaaggtcgtttaa

SEQ ID NO: 143926 - DNA, 1615 bp, Arabidopsis thaliana landsberg
ctccatttttggcgtgttctgttgctgctgatgtcctggtgagccctttgaaggcctatataatgacttcgtcttgtaaagagaaaggaactcttgcatccctagagtctatgcttctcgaggtctcttctcctttccctcttgtccaagtctttgtcactcccttgtcccgccccttcattggttctcgtgttttaggttgctagggtacgccttcatgggttctcagagcgtgaaatatctgttgttcgggctctcatgatgtccgagattgaatctgcttatctggaacgcgatcaggtccaatcaactagcttgcgggatgaatatatacaggtatatatgtgatgaactttaatatccagctttttgtcttccccctctaccaaaatcttgtttatatatgtgtttcatcttgcagcatttccttcacaaggaacctgttattgggattgaatacgaagcacaacttcagaagactcttctaccccgtgagaacatgcatacgcttcttataatgtagtcgagttccattttcactattaaactcgtataaattatattgggttctctctgatgcagaaatatcggcgtcagatgtgtccagatactctgatatgttaagaacatcatgcggctgtgtgataaaatcaatggaacctaaatctgctgctactattgatcatatgagaaatgttgtctcaaaggttaatagtctggaagaagaaaagatgattgctccatgggatgaggaaaacattccagaagaaattgtcagtgagaagccaactccagggtaagccccgaactgtaactataggttcactgacaagcaaaggccaaggtcacccactcttaatagcctcattacttttagatattggttctattgactttaggtttcagagattgtctggggctctgggccgagtatagatcttcaaaagtaaatacctttgttttattatctatttcttatagaaactgactagttaggaagtcttttagtgaactaaaatggctctttttaaaaactaaaagtaggcagagctcaactgacgtgcgtatgtttttacatttcttatttctcatctgttactaatgttcaatgaagggatattacgcaccagcttgaatatccagaagttggagttacagaattgacattatcaaatggaatgcaagtttgctacaagtccacagacttcttggacgatcaggtgcaatattaactgagagctacaataatttgatatgcttgtgtataagcttctatatagggcaatggattaaagctcgtcacttcatgattgtcctttttctctgacaggttctttttaccgggttctcatatggaggactatctgaactccccgagagtgattacatttcatgttcaatgggatcaacaattgctggtgaaattggtatgtttggttataagccatcagtacttatggatatgcttgctggtaagagagtcgaagttagtgcaagacttggaccttatatgagaacgttttcttgtgattgttcacccacagaccttgaaactgctttgcaggttcgccttcttcctactgcaattacacgttcatttcctaagttcttctag

SEQ ID NO: 143927 - DNA, 558 bp, Arabidopsis thaliana landsberg; identical to SEQ ID NO: 68561

SEQ ID NO: 143928 - DNA, 806 bp, Arabidopsis thaliana landsberg
atttcattgactttttgctagatttttggttccacattgatatcttggtccctgaagctgtcaaagagggcacctggtccgcttggtcctgagctcagatggatctgcatccaccaggtgagtttctttttgaagattcaagtgtttttttttttcactctagctgttttcatcatttggttggctaattttcttatcttcttggtgtaggtggttcaaaaaagacatctgtagttgttgtcaccttagacactggtgaagtctatgtcattgcaagtttgttatctaaggctgatactcaagttatctatatcgatcctacgactggtatcctgcggtacaatgggaagcctggtcctgataattttaagtcagagcgtgaagccttagattatattacgaatggatcaagaggaggtgttagaagctctgtttatgccagggcaatactcggttatgctgtcttggggagctttgggatgcttttagttgcgaccaggctaaatccaagtattccagatttgcctggtggtggatgtgtatatacagtggctgagagtcaatgggtcaaaataccactctacaatccacagcctcaagggaaaggtgaaaccaagaatattcaggagttgactgagcttgacatcgacgggaagcactatttctgtgatactagagacatcactcggcccttcccaagccgtatgccacttcaaagccctgatgatgaatttgtttggaatagatggttgtccgtgccttttaagaatattgggctacctgaacactgtgtcattcttctgcag

SEQ ID NO: 143929 - DNA, 1837 bp, Arabidopsis thaliana landsberg
cttctcttcgtcttcttcttcctccgaccttggaaaatctctcgtgactcgctagtcttctctaatgtctttacatgtcaaggtacataacctattgcttactttgataccaaatttcacttagggctgctttaaatcttggtttaaaactggaaaaatctgatctttttcattttcagggacctgtttgtcaaacttgtggcgacataggttttgaagaagcacttgtcttttgtgactcttgtatgtttgagtctattcaccggtgagttcaattctcgatttcccctgtgcgtcgatcaaattgtgcctattaggtttctcctgtggtttgattgaattatgcatatacctatttctcttgttcttcagctattgcttagggataacaccgactccatttacggaatacataacttggatttgtgaggattgtgataagactgagagtgattctgattgcaatgaagttgatcagactgttaagaagaagaagaagaagaagaagaagagtagaaatcaacccattgtggttttagctgaggacaatgtgctccaggaacctttggaggggtctaagagagaagaaagctcaggtagtagaaaacctcatgaattgacttgtttagatggaaatggagaatctgttttagaggctggagattcatctagtatgccagatcatagctcttgtaccagcaaaaggaatgatcgcaaagaagttgatcagactacaaatcttggacaaatcttggtgaagagtgagaaaaagaagaagaagaagaagaagaaaaagagcatcaatcattcgccaccggttttagctgttgaggaccatgagcttcagggtactaccaatgttgttgaacctgtggaggtgtcttcttcttcaccaactaaagaaacgatggagtctaagagacaagaaagctcagatagcagaaaacttcatgaattgacttgtttagttggagattcggagaccgctaattcatctagtgtgccagagcataattcttgtgctgtcaaaaaaagaaaattaagttctggaaacaaacagattcagttagctgatgggagtagttcttgcagagtggctgaatcaaatatgcctctaacgttgacatctaggcattatagagcacaacctatcaaaataccgatatggaggtaaagagaaaaaaatgctctttagttgtatcgttttgcatcatcacttgcttgaattctgattctgttatatcaatttctaggggattgatgtctgttaaaggaggaaacgaatgtagaatggatgggattgttgctcatgtatcgagcttagcttgccctaaagtccatgaaacggcaagttcattaaagggtcggctctctgctgaaatacttcctaggttggaagtatggccaaaaacctttttgaagaatggaggacctaaggatgaaagtgttgctctttttttcttcccttccagtgaaaggtatacatgaaacactgatttgtttttctctccctatgcttatgttgtaaaagtgtctgaccatttttgtgtttggtttccagtaatgatgaaaaggtttttgattcccttgttgataaaatgaagaagaatgattctgcaatgagatgtgtgcttaatgatgctgaacttctactcttcacatcttatatgttaccaaaggattcttggagtaagtcaaatagattttttttgtctgtaatcattcgtttattcgcatgaatcggtaaagctaacagggttgattatcgtttgcagcttttaactcaaagtactacctgtggggcgtcttcaagcctagacagacttctcaacattag

SEQ ID NO: 143930 - DNA, 433 bp, Arabidopsis thaliana landsberg
aaaccttctgtgacaatggtgcctccaaacccagcgcaccaaccggctcggcgaacgcaaccgcaactgcaaccccaatcgcaacctcgagcacaacccctgccgggcaggcgtatgaaccccgtcctatgcatcatcgtcgccctcgtcctcttgggactcctcgtgggtctcgccatattgatcacatacctgacactcaggccaaagcgactcatctacacggtagaagccgcgtcggtccaagagtttgctataggcaacaatgacgatcacatcaacgcaaaattcagctacgtgatcaaatcatacaacccggagaaacatgtctccgtaagataccactccatgcgtatctgcacggctcatcataaccagtccgtggctcacaaaaatatctctcctttcaagcaacgtcctaagaacgagacta

SEQ ID NO: 143931 - DNA, 1483 bp, Arabidopsis thaliana landsberg
aatgacaggttataaagccacagcagaaaatggagtctgcagctactccagtagagagggagaaacaagcagtaaatgttgcaccagcatcagatcctccaaaggtggattttgctactgatctgtttaacatgctatcaatggatgattcgactacaaatacctcagaggcaactcctggcgatactcctgccgatgataactcatgggctggctttcagtgtatgtatctatctagcatgtgataatctaacatcgtggcacatttttcctatccttgttaactttatgtcaattgttcttcttttgaaaatgctttggagtaatagattaatttctgaatcctaaaactgtagctgctggaagtggtcaaacggcagagaaaattgtcacagccaagcctgctgagagcagttctcctccagcttcatcttctgactttgaggatttgtttaaagacacacctaatttaacaactcaacaagcaccaaaagatgtgaaaggcgatatcatgagcctgtttgagaaggtaaattattagttaattatatacgcttctcagatttcactgctttgttgatattcagctttccaagtttcgtttttgtatcattatttaacttacatttacaaatatagcgaatgatatgatttgtgttttgttatcacttactatgatttcttcaacacgggacatttggaacaccagagcagattcaagtgatataactctgtgtgttctatttgattacagacgaatatagtatcgccttttgccatgcatcagcaacaggttgctatgctcgctcagcagcaagccctttacatggctgcagcgaaagctgctggaggcactccaaacggcgtgaatcaacaagctattgctaatgctcttaacgtagcttctgcaaattggtcaaacaccggcggctaccagatccccggaatgactaaccccgtaggtggtcaagctgatctccagaaacttatgcaagtaagatctcccctttactttttttaagcaagatcaatattaccattgaccaaagttcttgcaaaattctcactaattcttgctctctgttacatcgccataattttagaacatgaatatgaacgcaaacatgaacacgagacccgcacaaccgcaagagaacactctacaatacccatcatccaggtatgcacacaaaactgcatcttgtttgtttcttctgaaaacatcataacgttatcaaaagtgcttaacctaactaactctcatatgatctttggttgttattaataatgcaggttctacacaatgggtcaagctaatcaagtgaacggtatgaccccaaactcaaccggtaaacctcagtcatcatccgcaacccaaccaacaagcaccacaccatcttcacaatcaggcaaagactttgatttctcttccttgatggatggaatgttcacaaaacattgatcaagagagagagactttttt

SEQ ID NO: 143932 - DNA, 1543 bp, Arabidopsis thaliana landsberg; identical to SEQ ID NO: 29322

SEQ ID NO: 143933 - DNA, 909 bp, Arabidopsis thaliana landsberg
cactttttgtttttgttaacactcacgtgaaagcttcgttcttcttcaaaccttttgaacaatttctccgatgccggtaaatcaccggtttacgtttagctaccggttactcttcctcatcttccttttgagtttcgaaacggcacagcgtttggtcgccggtgacccaaacgacgaagcatgcttgacgaatctccgtcggagtttagaagatcccgcgaataatctccgtaactggacaaaatccttcttcataaatccttgctccggcttctcttcttatcttcatggagtcatttgcaacaatggcagaatttacaaactctccttaacaaatctctctctccgtggctcaatctctccgtttctctctaattgcacaaatctccaatccctagatctatcttccaaccagatctccggcgagatccgccgcaattacagtttctcgttaacctagccgttcttaatctctcttctaatcgtctctccggtcaaatctcaccacaaatcgctctctgcgcttacttaaacgtcatcgatcttcacgataaccaactctccggtcaaattccgtttcagttcgggcttctcgctagattaacggcgtttgatgtctctaataacaaattatccggtcagattccctcgaatctggcgatgcgtaacggaaacttgccgagatttaatgcgagctcgtttatagggaacaagaaattgtttgggtatccgttggaggagatgaagaacaaaggattgtcgataatggcgattgttgggattggacttggaagtggaatcgcgagcttagtgattagcttcactggagtttgtatatggttgaagattacagagaagaagatggaggaagaagaaggaaagataagtcactccatgcctgtttactaa

SEQ ID NO: 143934 - DNA, 3851 bp, Arabidopsis thaliana landsberg
aagaaaagagacttctgatgatgaggaattagctagacggtcgagaaaggatcgaaaagaagcgaactctggttctgaggatgataaaggtaaaagaattgaggtagatagtgatggtgatggtgagaggagagtgaataaggggagaaatacggatagagttagagctgacacttcttctgatgaagaagatgatttgaaggggaataagaaggaaccgatggaggttgatgatgattacggtcggagaggaaggagaagaagccccaaagtcatggagaaacagggtagagagagaagtcatatgggtagtagagtcatagctgataaaccttctgatgaggaagatgataggcagaggggcaggggaggtaggcgagaaagccagaggaaacgcagggatcatcgagcatctgacgacgatgaggaaggtgagattaggagtgagagaagaggaaaagagaagaatgatagaggtagtgaaggtctcttaaagagggatcggagggagagagacttgactgatgggcatgagaaggggagtcggcgtagggaaagtgaaagaaaagataggagtcggagggacgatggagttagagatgaaaaagaaaggagacacaatgatagatatgatgatagtcaaagagacaagttgagaaaggaagatagcaggaaaagggaagagaagaagattgaggttccaaagcccaagctggcagaactcaatccatctgagaacaatgctatggccttgggaaaaacaggaggagtttatattcctccgttcaagctagcacgcatgatgaaggaggtggaagataaaagcagcgtagagtatcaacggcttacatgggatgctctccgtaaaagtattaatgggctcgtcaataaggttaatgcaagcaacatcaagaacataatccctgaactgtttgctgaaaatctcataagaggaaggggacttttctgccgttcatgtatgaagtctcaaatggcatctcctggattcactgacgtctttgcagctttagtcgctgttattaacgccaaattccctgaagttgctgaacttctattgaaaagggtcgttttgcagctaaagagagcgtataagcgtaacgacaaggtttgtcccttttttggcttttcgaatctaaattttttgtcaagcattttgatttatatgtatcatatttatacattgttatgtctcatatttgttttggcagcctcaattgcttgctgctgtaaaatttatagcgcatctagtaaaccagcaagtcgctgaggagatcatagcacttgagttagttaccatacttctgggagacccaactgatgacagtgttgaggtggctgttgggtttgtgacggaatgtggtgcaatgcttcaagacgtttcaccaagaggattgaatggtaaaaatcatttcaatctctctttgttggatagaaatcttgttttgttatgttgaagaatcattagactatttgtaattacactcaaaccatcaaattctttcacaagtcaatgactattgacatattttggtatgatataatccatctagtaattacactccatccatctagttcttttggaaaaagataacgttgaaatttggttgtgtgtcttagctgtttcatttcggacttcagcaatttttcatggcatacatgctctatatttccacggctcttccttttattttcgtgtctaagctcttctagtttttgtaatacagggatttttgagaggtttcgtggtatactgcacgagggagagatagataagagagttcagtatttgattgaaagtctctttgctactaggaaggcgaaatttcaggtaatttactccttgacacattgaattcgaatctgatattttgggttgttatagatgtagcagtatgcttattgtcacgaatagcataatgctcataaatcttgttgatggtttactttcagggacatccggccgttcgtcgtgagctagatcatgttgaagaaaaagattcgcatgatctctctcttgatcatgaaattgatcctgagactgctcttggtaagcttggtattgtattttaaagtttactccatgctctagagagcggttattattttggaagtactgaaactgctcttaattctacatgtttctgactgcagatattttcaaacctgatcctgatttcgttgagaacgaaaagaaatatgaggcgctgaagaaagagttactcggtgacgaagagtctgaggatgaagatggctctgatgctagttcagaggataacgatgaggaggaagatgagtctgatgaagaagatgaagaacaaatgagaataagagacgaaacagagactaatcttgttaatcttagaaggacaatctacctgaccataatgtccagtgttgattttgaagaagcaggtcacaaattacttaaaattaagcttgaaccaggtcaagaggtaccttcttccaaattcggatactctatattttcctgtgctttctgcttttctattttattgtttaatgttgaaatgaatccatcttaaagtttgtgactttctgcaagtacagaagtcttatgacattcttatccaatcaatgttgcagatggaactatgcataatgctcctggaatgttgctctcaggagagaacatatctgcgttactatggattgttgggtcagcgtttctgtatgatcaacaaaattcatcaagagaattttgagaaatgctttgttcagcagtattccatgattcaccgtcttgagacaaacaaattgcgtaacgtggctaagttttttgcccatttactgggcacagatgctctcccctggcatgtgcttgcctacattcgattaaccgaggaagacactacttcctcatctcgtatcttcattaagatcctattccaggtaactagaatcttcagaactcatttgactatttcatgaaactcaatttcagagctgttcatctcattaatttgattggagatatgttcatgtgattgattaatttcttgtttcatatgaattatgaaattatggatatgttacatcacaattagggctctgctgataaattttgttaaggtgtggaaaattggtatttgagactgtttggtttgcattgtttgcaggaattgtcagaacacttggggattaggctgcttaatgagaggcttcaggatccaacaatgcaggaatcacttgaatctatattccctaaggataatccaaagaacacgaggtttgcaatcaacttctttacgtccattggtcttggaggcatcacagagaatctgagagagtatctgaagaacatgccaagcctcatcatgcaacggcagaagcaagttgcggaatcagaatcaggatcatcatctggatctgacagttctgattccgagtctgaatctgagtcaggctcatcatcttcttctagttcggatgaaagcgacagagaaaagaggaagcgaagaagaagatcatgaagactgttttgcttgctgtctccagactccagcaaatttcttgaaattctcacatcttgttttggctatttcaacttgaattttcttgagaactcactgagcaatcatctggtgctgttcttgcatatcaattacgtaataacctgatgacaagagaatagacagtggaaggtttgtgaacggaaatgtttttgtttgttgttgtctaaatgttttataagacattttaatataatttgcgatggtttttatgggaaattagctaagttctctatataattgctttgcattaaaattgttaaactgtttaagataaatttgatcaataggaccatagat

SEQ ID NO: 143935 - DNA, 295 bp, Arabidopsis thaliana landsberg
caaattaccaaaatccttcgcgacaaagaggagagatagagagagagaaagaggcgaaactaatggcgtcgatccctccgccggagcttgacaacgactcactggcgtcatcgccgagatcggagtacgatagtcagccacgcgtacggttcatgtgtacttttggaggaaggatcttgccacgtccgccggataatcagctctgttacgtcggcggcgataatcgcatggtcgctgttcatcgtcacactactttcgcctctctccttagtaaacttgctaaactctccggtaa

SEQ ID NO: 143936 - DNA, 205 bp, Arabidopsis thaliana landsberg
cgtcaactatcttcttctcactctgttttcgtttagagagattttgcagagatgtcgagaagagcaatggtgataaagatgccaatacttatgatactgatttcatcaatggtgatgacgatggtcgagtcttcgagatcagttaataatggtcatgacgattctgagatcttacgaagacacttgctcactaatggcctcggag

SEQ ID NO: 143937 - DNA, 640 bp, Arabidopsis thaliana landsberg
ctggttgatttccatctctctgccgtttttcgagctcttcattccgaagccaactatattcgcatccaggtatcaaaatcagctagcgcactaaccatttctttttctttgtctccacaattcctaagatttgggtattaattatataggatgacacattaactggggatgctgcttctgttgatatcgctaccgtcgagaatctggacattcttgccaagacaggagatgaactacttaaaaaacctgttgcaagagtcaacctagactcgggttgtaacgaaaatgcttatgaaacgactaatgaacatgctcttataaagtaagtggcccaatttttgcattttatagctttattctttcatacttaaggtgattaaaagtattttgctaatatatttaaattttggttgtgaaggttagcaggaatactttcaaaagaaaagaagatccgagacattcgttcacctcatgcaaaagctccaattaggatctaaagagatcaaatattggatcttgtatattgctgatgattccgttgtttcactaatgcacgtttggatttatattaataaaaaggttgcaccacattgtggtcacttgtacgtttggattaagtcaataaatatttaatggaccg

SEQ ID NO: 143938 - DNA, 1211 bp, Arabidopsis thaliana landsberg
  unsure (1)..(1211): unsure at all n locations
ctttaattcataagagtgatgattatcgctgatggttcttaaaaaagtaaggttagattttttcttttcttttctaaaattctctctctctaacgattttgagattttctcgcgtatactccggannnnnnnnnnnnnnnnnnnnnnnnnncgatagggtctctcgtaatttttctcttagttttgtctaaataacgaatttgtcgttctgctctttgttagaaatcgattttgatccattttcagaattcaattttgaattggttctgtttgtctatacatttttggttgtgattttgattttgttttccccagaaaatcaacatgactggtttcaatttcattctttctatcaccgagtttttgatgatctggagttttattttacctgattttcgccaaatgattgattatcagatgctttttatacatatttagtaacctaaagacgttactagtaactgtgttctaacctaaagacattactagtaaccgggttcttgttgctggttttactcattaattgcttcatctggatgttgttgtttctgcatcatctttggtgtcagggttgtcttgcattgcatttcttgtctgattgatgtaatggagtataattgttttgtggttctgttctgtgttcgtgttacatacttttttttatgtttttgtgtctcaaccttattctactgcttcttcttcctgccaggaacaaacatctgtttcgtaagtttcagcaatgtacagtggaactgtgaagagggtatcaccactgcaagatattaaactggtaagatcatcaaatcaattcttatgtttgtttgaatttttcaagggtttggtttttgtatgttcatgatgattcttttgaatgggacagagattgctttactgagtggtctatattttacagcgtgtgcagattacagtttctttggaaatggaggataatgatccgaataaagaatatttgtatgctaaaggcttaagtgaatttgttacttggctaaatgctgataaggtgagagtttgcctccacaactattttattttggttgtagcaagcctgtcaagcttttgtatgtcggacgatgccaaaatgcaatgcggcagtatcattagttntcttccttacataacttcaagctatctggttatttgaaaaatacaaactgactgcacctcttagaaaccgtttacatgtgctggga

SEQ ID NO: 143939 - DNA, 642 bp, Arabidopsis thaliana landsberg
atgactggtattactgagtttgctgtggctgatatatttgactatatatttcaggtacaggcctcgttgcataagtaatttttttccaaagttaatgctggtatttattcttcttatgcactactaattggatgtggatgctgcagcatgaagaaagggcgttttccgtgaagttttcagctatagagatctacaatgaggccatacgagatctgcttagctcggatggtacatcactgaggctacgagacgatcctgaggtaaatgaatatcattttccttactgagtgttttttagtttgtaaaattgtctgactctccttagttctatcgttttttcttattagaaagggacagttgttgaaaaagccacagaggaaactctgcgagactggaaccatctgaaggaacttctatctatttgtgaaggtaaaactcaaaagtcaaaatcactttccattactatgaagtagccaatgaaagtagtgttgttgtgtacatgatctgaaactctgtattttctccagaacatgttttctgaaaagtaaacttacatgcttctacattttcacagcacagcgtaagataggtgaaacctcattgaatgagagaagttccagatctcatcaaatgatcagactg

SEQ ID NO: 143940 - DNA, 591 bp, Arabidopsis thaliana landsberg
cacgcaagtatgattaggttcgaccatttctctcttgagaaccagagtggtttgtctcgtttggaggcaaacgttgaagatgggtctgttcaatcgggtagtccaggatggatcgaacctagctccgatgttccttatggtccgaagcattttagtgagttatggtctgattcaagcagtgatcggcttgatgatcagaggttagtggatgatgatgtgaataacgagatgggtatagagagaaacgaagtgggtattgttgaatatagtgaaagtatagctcaagacatggatttgataagctctgatgagagaaaggaagaatctttacttcatccagtggaaggagaaggaaactctgtttctattgatcctggtgttaaatctggtggtggaggaggagaagagaaagggtttgtgtggtggaaaattccaatagaggtgttgaagtattgtgtgttgaaaattaatcctatttggtctttgtccatggctgcagcatttgtgggttttgttatgttagggcgtagattgtacaatatgaagaagaagactcgttccttgcagcttaaggttcttttggatgataag

SEQ ID NO: 143941 - DNA, 1112 bp, Arabidopsis thaliana landsberg
ttcagttccaagaatgaagaggaattgacaagcttggatgattatatcgagaacgtgggagagaaccaaaaggcgatctactacctcgcaactgatagtcttaaaagtgccaagtctgcccctatcttggagaagctaatccaaaaagatatcgaggtatatgcttcaagacttgtttttaaacttcgagtttctgtttagatttgactttctcaccacttgcttttgttaattataggttctatatttggttgaaccaatcgatgaagttgctattcagaatttgcaaacctacaaagaaaagaaattcgttgatatcagtaaagaagatttggaactcggtaagtatggtttagcactgctgactgcccgcacatttctctcaaccatttgtttgtaacaaaacgtgtccattctcgcaggagatgaagatgaagtaaaggacagggaagcgaaacaagagtttaaccttctctgtgactggataaaacagcagctcggtgacaaagttgcaaaagtccaagtctcaaaccgtttgagctcttctccttgtgtgcttgtctctggcaaattcgggtggtcagctaatatggaaaggttagtacttcagcaaaagctttataacctgaaatccacataccataaaacttatgtgcttgttcattgacttatgtgcttattcattgtgaaaggctaatgaaggcacaggctcttggagacacttcaagcctggagttcatgagaggtaggagaatactagagatcaatccagatcatcccatcatcaaagacttgaacgtaagtgtgtggtataatattctctcagaaatctcttgtctcgaaaaagccttattaattttctgtattcttttggtacaggctgcttgtaagaatgcaccagagagcactgaagcaacaagagtggtcgatctcttgtatgacactgctataatatcaagtggattcactgtaagaaatctgaaacctttcttgtttcccagtaaaagtcgtggaccattttactcacgtatatgtgcctgatgtacaccctgatagcccggccgagaaagggaacaagaaatatgagatgatgacaatggcgcctggaggag

SEQ ID NO: 143942 - DNA, 5017 bp, Arabidopsis thaliana landsberg
tgatggcttctgattgctcttttaattttccatctctacctctttttctagaccagtcgttgtcataatgtttttgcagatgctgaccaggctttacttttgtagatggtaaatgctaatgtatccttaaaccgtttggaggaggtactgtcaaccgaagagagagttctcttaccgaatcctcccattgaacctggacagccagctatctcaataaggaatggatacttctcctgggattcaaaggtcttctttgtctattttatcacatgttcttacttctattagtttctatcattacatattgtcaatgaagtacaaaaagtgagctacaagtatacatatgcaggcggataggccaacattgtcaaacatcaacctggacatacctcttggcagcctagttgcggtagttggcagcacaggagaaggaaaaacctccctgatatctgctatgcttggggaacttcctgcaagatctgatgcgactgttactcttagaggatcagtcgcttatgttccacaagtttcatggatctttaacgcaacagtaagtttatatatgctactcagtttatagtatggttctcaatgcgaaaatgtcaaattctcctcttggattgttacttattttgtatgtattttatgttttgtatatgatgatgtgtgcttttagatacgtccacatgctgatggttgtaattaacatcgcgtaggtacgtgacaatatattgtttggggctccttttgaccaagaaaaatatgaaagggtgattgatgtgacagcactccagcatgaccttgagttactgcctgtaagttttgtggagagttacttagccatgtgcattgaaaatttcctgaggtgaaacgaaccttgaaatctgttggtgcgatgtaaatcgaaaaaactgaattgcatcagttctgttgatagcatgtacttctattttctagtgctcaggtatctaagcttgtttcctcttctttctcttgattgatagggaggtgacctcacggagatcggagaaaggggtgttaacatcagtgggggacaaaagcagagggtttctatggctagggccgtttactcaaattcagacgtgtgcatcttagatgacccattgagtgcccttgatgcgcatgttggtcagcaggtaaactagccataggctcttttggatagaacaatactttgtttttctttcaattttgcaaatcgtgaactctataacgttttgtttttcaatctgcatggatattctacttcttgtttgccacggatctctgccatatactacttttaagcaaacattgttatctgatgttcgaaactggctgttatatataggtttttgaaaaatgcataaaaagggaactagggcagacaacgagagtacttgttacaaatcagctccacttcctatcacaagtggataaaatcctacttgtccatgagggaacagtaaaagaggaaggaacatatgaagaattatgccatagtggcccgttgttccagaggttaatggaaaatgcagggaaggttgaagattattcagaagaaaatggagaagctgaagtagatcaaacatctgtaaaaccagttgaaaatgggaacgctaataatctgcagaaggatggaatcgagacaaagaattccaaagaaggaaactctgttcttgtcaagcgagaagaacgtgaaactggagttgtgagttggaaagtcctggagaggtaagttggcattcggatttttgctctttcttgttgtgttgttgcagtattcctttctatcgacagtggaaatatccgtaaataagacatattctttggtttagagcaatatgtcaatttatctgtggtgtttctttactacaaaatggatatatattgtttgactcgctctattcatattcatacaaaatgtatatatattttccgtattaaggttcgtattgtaaagccattgtaataacttgtgaggtgtcaccatgttccaggtaccagaatgcacttggaggtgcatgggtagtgatgatgctcgttatatgctacgtcttgactcaagtatttcgggtttcaagcagcacttggttgagtgagtggactgattcacgaaccccaaagactcatggacccctattctataatattgtctatgcgcttctttcgtttggacaggtatgagttgcatttggcaaatgtttgagtcggtatcttcatgatcggataacaatatataactgaacattaaaggctgatcagttaagaatatacaccatgtttcttctgcgccaaagtatcgagcaaacaaaatggaaaataaaaggatacagagagcaaaacgtttatgctaagacgtatttcttcttggtttttcaggtctctgtgacattgatcaattcatattggttgattatgtccagtctatatgcagctaaaaagatgcatgatgctatgcttggttccatactaagggctccaatggtgttctttcaaaccaatccattaggacggataatcaatcgatttgcaaaagatatgggagatattgatcgaactgtggcagtctttgtaaacatgtttatgggttcaatcgcacagcttctttcaactgttatcttgattggcattgtcagcactctgtccctgtgggccatcatgcccctgttggtcgtgttctatggagcttatctgtattaccaggtaacctacatactttttaaacgcaatgctatctacattcatgactacagatcgagacatggaaaactgagaccaaaaggaacactgattgtgtcatatctgttgtgtcataacctgatttttccttattgtagaacacatctcgggaaattaaacgtatggattccactacaagatcgccagtttatgctcaatttggtgaggcattgaatggactatctagtatccgtgcttataaagcatatgacaggatggctgaaattaatggaaggtcaatggacaataacatcagattcacacttgtaaacatggctgcaaatcggtggctgggaatccgtttggaagttttgggaggtctcatggtttggttgactgcgtcattagccgtcatgcagaacggaaaggcagcgaaccaacaagcatatgcatctacgatgggtttgcttctcagttatgcgttaagcattaccagctctttaacagctgtactgagactcgcgagtctagctgagaatagtttaaactcggttgagcgtgttggaaattatatcgagataccatcagaggctccattggtcattgaaaacaaccgtccacctcccggatggccatcatctggatccataaaatttgaggatgttgttcttcgttaccgccctgagttacctcctgttcttcatggagtttcgttcttgatttctccaatggataaggtgggaattgttgggaggacaggcgctgggaaatcaagcctcttaaatgccttattcaggattgtggagctggaaaaaggaaggattttaattgatgaatgcgacattggaagatttggactgatggacctacgtaaagtgctcggaattataccgcaagcgccagttcttttctcaggtatgtcttgcatttcttctggtgcttatatttattttcctgcttctggtatttatctttcttaaagtcaaaataatgtatactatgccaataacttatattaaggtaccgtgagattcaatcttgacccatttagtgaacacaacgacgccgatctctgggaatctcttgagagggcacacttgaaagatactatccgcagaaatcctcttggtcttgatgctgaggtacttaattaaatatttccatttgggaaagtctcatgtattcagtaataataactcagtctttttggtcaggtaactgaggcaggagagaatttcagtgttggacagagacagttgttgagtcttgcacgtgcattgttacgaagatctaagatacttgttcttgatgaagcaactgctgcagttgacgtaagaactgatgttctcatccaaaagaccatccgagaagaattcaagtcatgcacaatgctaatcatcgctcatcgtctcaatactatcatcgactgtgacaaagttcttgtccttgattctggaaaagtacgtatacaaaatattcgaccactacttgcatcaatttaatcacttttgagctaacatatattgagattcccaacacctcaggttcaggaattcagttcaccggagaatcttctttcaaatggagaaagttctttctcgaagatggttcaaagtacaggaactgcaaacgcggagtacttacgtagtataacactagagaacaaacgtaccagagaagctaacggtgatgattcacaacctttagaaggtcaaaggaaatggcaagcttcttctcgttgggctgcagctgctcaatttgcattggctgtgagcctcacttcatctcacaacgacctccaaagccttgaaatcgaagatgataacagtattttgaagaaaacaaaggacgccgtcgtcactctacgcagtgtccttgaagggaaacatgataaagagattgaagactctctaaaccaaagtgacatctctagagagcgttggtggccatctctttacaaaatggtcgaaggtaacgttattcttaagatttctgatacgagtatacgacataaagaattgttgaagtttcttgatctaataatttgtgtatatactctcagggcttgccgtgatgagcagattggcgaggaacagaatgcaacacccggattacaatttagaagggaaatcgtttgactgggacaatgtcgagatgtaaacgatgaaaggcttacactaatagacctaaaactcccattttgatggaacttttatttgtattgcttgggatacacgtaacaaaatgcccattaatcgtggtgtaactatataggctatgcttcttttgggaaaaagagagtttgattacagaggatgtgatgataacacaattg

SEQ ID NO: 143943 - DNA, 1048 bp, Arabidopsis thaliana landsberg; identical to SEQ ID NO: 41613

SEQ ID NO: 143944 - DNA, 1282 bp, Arabidopsis thaliana landsberg
agtaagaagattgtgtttcccacaaagaaagaattatcggaggctttggccatgtacacggccaatctctcagccaagttttgcaaggagagaggctatttcaccgtcgttctttccggtggcgacctcatctcctggctcaggtctactatataagaaaatctttaaatcttcttctttttcttttatttagtcttatattatataaaaatgattaaaatccaatgttaattaacttttgcagtgaattgttggaaccaaagtatcaagaaagtatcgaatggtcaaagtggcacattttttgggtcgatgagagggttgttccattagaccatgaggacagcaactacaaactcgcctttgatggttttctctccaaggtatttttcttgctcctcatttatcaaactatttttgtttttttgttggtaaaacgaactatatatttgaagataccttgatgcaaatttttgtatcaaacaaatatttatgatataaacatatattgttttaaaattaagaaggaatcgtacgtacatatatattcaatttcatatatataaaagaactagaattacaaaatcatctcggcatatattgcaaaaaaaaaaaactttgtgaagttaatgagttgctaactcaaaatcatgctttgacattaattaaactgacgatgtcattcatattcgtgtaggtttatatgcatattttcccaatatgattttattttagttataaaccgtcttgttagatgattttgatatatacatatatttcacactatttaggttccaataccaattgcaaacatatatccaatcgacaaagactgtgcagcccttggtgatgccaaaagtgcagcattactctacgaagaatgtctcaaaagactggtgaaccgaaacatcattcgcacatacaaatcgtctggcttcccacagttcgacctccagctcttaggaatgggtccagacggtcacatggcgtctttgttcccgggacattatcaaatcaaggagaaggcaaatttggtaacctatatcactgattccccaaaaccgcctccgaagagaatcacctttactttaccggttattaactgcgcttcatacaacctcatggctgtatgtgatgaggctcaagccgatgcggtagctaaggttttcaaccataacttcgacttgcctgctgcttggctcacagctgacgtagaagctatctggtttcttgaccaagccgctgcatctaagatcccaaaaggactttgatggtttagttggct

SEQ ID NO: 143945 - DNA, 1937 bp, Arabidopsis thaliana landsberg
atgcaagaacctacaggtacgtttacgtgatatataaattaaaatattgcatctcgtaccgaagcgcattaccgtatttaaaatacctgaaagtaggaaaatatagtactatacaaacaccacttttcggacattattttcatagaaaagttacgaattatcctttttaactattgatctatttaaataatttactaaccataactatcttgttacgttttcacaaaaaaaaaaaaaaaaaaatctcattacgtacgtgtatatatatggaatagctcataacctcaccactaccacagaaataatgccttttggttcttttccataagcttataacatatattttttttaaaatctactctgcgttaaaaaaatgaaaacacgtagcagcagtgtgggtaagatcaaagggtgtttctcgatcagtttcatattcagatgtatcagagttctcattaacagatctgtttctttttccttatctgattaaacaatttccttcagaattttacttttttgaacatatatagtttttctctgttcctatatcttgagttttgtgagaggttaattatatgaaattttacgcattattgttcatctatatcgaaaaacaatgtcaagaaagccatgttgcgtcggagaaggcttgaagaaaggagcatggaccaccgaggaggacaagaaactcatctcttacatccacgaccacggcgagggaggctggcgcgacattccccaaaaagctggtttatacaaatctatacatacactcatttttgtacttgttgtagaaaattgttctgataaacatattgtgtctgattagggttgaaacggtgtggaaagagttgtagactgcgatggaccaactaccttaaacctgagatcaaaagaggcgagtttagttcagaggaagagcagattatcatcatgcttcatgcttctcgtggcaacaagtacgtttctatgtttctatgtgtgtgcgtggaccctcgaatgtgaaatgaatttcatgaaaaagttttcatataatatttattatgtagacataatcatcattttaatcttggtctccgatctatcttattttctttaggtggtcggtcatagcgagacatttacctagaagaacagacaacgagatcaagaactactggaacacgcatctcaaaaaacgtttgatggaacagggtattgatcccgtgactcacaagccactggcttctagttccaaccctactgtcgatgagaatttgaattccccaaatgcctctagttccgacaagcaatactcccgatcgagctcaatgccttttctgtctcgtcctcctccatccagttgcaacatggtttccaaggtctccgagcttagcagcaatgatgggacaccgattcaaggcagttccttgagttgcaagaaacgtttcaagaaatcaagttctacatcaaggctcttgaacaaagttgcggctaaggccacttccatcaaagatatattgtcggcttccatggaaggtagcttgagtgctactacaatatcacatgcaagcttttttaatggcttcactgagcagattcgcaatgaagaggatagttctaacacatccctgacaaatactcttgctgaatttgatcccttctccccatcatcgttgtaccccgaacatgagatcaatgctacttctgatctcaacatggaccaagattacgatttttcacaatttttcgaaaaattcggaggagataaccacaatgaggagaacagtatgaatgatctccttatgtccgatgtttcccaagaagtctcatcaactagcgttgatgatcaagacaatatggtaggaaacttcgagggatggtcaaattatcttcttgaccataccaattttatgtatgacaccgactcagactcgcttgaaaagcatttcatatga

SEQ ID NO: 143946 - DNA, 1819 bp, Arabidopsis thaliana landsberg
caaataccttaagatcacatcatcatataccttttgtatcattaaaatggcagttcaagctcaacaccattcctccaatctcctcttcctcaataaaaggttcattttctctctgtaaattcattatttgcttttagttttgcttattgattacggttttatgtttctttgtgtgaacagaaacgggaaagagaaagaacatagtaattttacattacaatcacaagcagctggagattttcttgatcaaaccaatatgttattcaacaatggaagttcgtaaaagttctcttgttttttccattaaaatttaccaaaattaggagacaaaatgagaatgtgtgtgtatgtctcttattataggttctaatcagagaaaaagaagaagagaaacgaacaatcatcacttattacctatgcagtctcatcagtttcctcaagttatagacttatctctattacacaactacaatcatccaccgtcgaatatggttcatacaggactccgattattttccggcgaagatcaggcacaaaagattagtcacctgtctgaagatgtttttgctgcacatatcaataggcaaagcgaagaacttgatgagtttcttcatgcccaggttttgatttcgtacgagacgatttgggttacgcaaaagttttgattttgttctcatcggaaaaagtgtaaaactttttttcttttgtataggcggaggagctacggcgtacattagcggagaagaggaagatgcactataaagcgcttcttggtgccgtggaagagtcgttggttcgtaagctgagggagaaagaggtagagatagagagagccacgcgccgtcacaatgagctggtggcacgtgactcgcagctgagagcggaggtgcaagtatggcaagagagagctaaagcgcacgaagacgccgccgcgtcgctgctttctcagctccagcaagccgttaaccaatgcgccggtggatgtgtatcggcgcaggatagtagagcggcggaggaagggctattatgcaccacaatcagcggagtggatgacgccgagtcggtgtacgtggatccggagagagtaaagcggccgaattgcaaagcttgccgggaaagagaggcaacggtggttgtgttgccgtgtcggcatctgagcatctgcccgggatgtgaccggacagctttagcttgcccgttgtgtctcacgttgcggaattcaagtgttgaagctaccttttgctaaatgggcctaattcaagcccattaggttgttatcgtaaatagaacttagtaggtaacacaaatataaatttcattggtatatgatataccgtatatcgaatccactagctattaaggaagccctctaaattttacaacaaaagaagatttttttttttttttttacttttcattacttgggattctttacacagatatgggatatggaaatgttgctattcgtacaaaacagttaactaagctaagaaacccatttttggggggcctaaagaaagggttacagatttctatcttacaaatttctcagtcattgggatctatacctttctctgcttcttttaactgatcttcataatcgtccaacaagtaatcacaaatctccagtaactgatctgccaaaggtggtattcctgggttacgcccatcgttgtaaagatgagcattgtactttatctgccagacatcgtgtctaaactgttctcggtttctgtactctatcttccgtaccttatctcggattgtcgagagatccatcgggttttccacgatatcaagataatctggagcttccttc

SEQ ID NO: 143947 - DNA, 526 bp, Arabidopsis thaliana landsberg
actcaatacaagaatatctacaatctctagaaaatggcgatcacttacttgcttcctctgtttctttctcttatcatcacctcctctgtttcagctaatttccaaagagacgttgagatcacttggggtgatggtcgtggacagatcaagaacaatggagagcttctcactttatctctagataaatcctctggttctggattccaatccaaaaacgagtacttgtttggtaaagtctccatgcaaatgaagcttgtccctggaaactccgcaggaacagtcacaacactttacgtaagttcaacaaaacaatctctgtttttcgtttttgcatattataaagttcttgtatctgaaatggttttttgtatatgaacagttgaaatcacctggaacaacatgggacgagatagatttcgagtttttagggaattcaagtggagaaccttacacacttcacacaaatgtctacacacaaggcaaaggggacaaagaacaaccatttcaaactctgggtttgatccca

SEQ ID NO: 143948 - DNA, 1799 bp, Arabidopsis thaliana landsberg
atggatgttatcattgatatggagtatgactatgtaggttcaggtcattatgctaaagtggtccatcctcctgctgaccaaaatgatgcatcatctgttttggaactatcacaagacatggtacttactccagtaaaatactcttgacttaatctgccggttatttctgatcagcatgtttaatgtttgcattgtacctattgtttttggctataatgcttcgtaggtgcatttcttttaatttcagtacctctaccatttatagtctgtatttttctattgtttaggtgaaggatcagacctacttcctctcacatctctctcaaacccagcttaagcgactgcttttcccacttggttgtgtaaaaaaggtactcgaggaagtttgtcccacttggttgggagagcttttattcccatacctctgctcgattccgaaagaaaattaataacgaaaacattttgatttcttcgtggtggttgtcatactttttttctggtgtacaggacgaagttcgcaaactagccacacaattcgatttgccaaataaagatagaaaggattcgcaaggaatttgtttccttgggaaggtatgttttttagtttgctcttctgattaatggctgtttgtctagtgcaagtctgaaacataagaacatggttttctgtaatagataaagttcagcgactttgtctgtagacacataggggagatggaaggaattatattggaagccgaatctggggattttcttggtaaccaccggggattttggttttacacaattggacaacgccaaggcttgcgtttacccggtggcccctggtatgtttcttaaaagatgtatgagattcttagctatttttgtcgttggttgagataccagcaattggctcatatgacaattataagcagcttctggttcttaatatatgaacacttcattagtgttgagaagacaatttggctgaacgccaagtataaattcttttggatctttaattttggttgtgatatccctttatccatgtacaggtatgttgttgaaaaggacaccaagaacaatgtagtgtttgtctccagaaattattactcaatcgacaagagaaggcggattttccgtgtcggctccttaagatggaatagtgggaaaccttcaggcaaagttagagagctccgttgcaaggtaaacaatatgattactttctacacatgatagtttacttggcactgataagttgagagcggcttttataggtccgacatgggcctggcttctacagctgcagttttgaaatggaaggagacggagatgttgcagttgtgcacctagacgaagacgatcaaggtctagctgctggacagtttgcagcgttttacgagggaaccacttgcattggttcaggcgtaattctggagtcatggaatgatcagtgtttcccggtctgtgcaaaagcccttcaactcgcagcattggaagataaacccaaactcgggaaacctgtcaaaatcatggccaagccctactatgtcatctgttgaggctgatacaggagaagccagtgcagagcaaaaactagtcaacgcataagagaagccagtgctctcacaaactctgtaggtccgaggctttagctgagaggctttaagcttcagcatttgatgaaatgctgtatcataaggtgtagtgttatacagacagaggctacgcattgtcttaattctttttgtaactgaatggttcaaccatatgtatacaaaaacgtgccttggtaaagtgtagcactggttccaagt

SEQ ID NO: 143949 - DNA, 3201 bp, Arabidopsis thaliana landsberg
tcggttgtgatcggagctgccatggaacgtatcatcggcggaaagtacaagctcggacggaagattggcggtggttcctttggagagattttcctaggtgtgttctcgttgattctcgagttttgttcttcttctttggtttgaaattgacgtaccttgtttgttgatttcgcagctacgcacatcgataccttcgagattgtagctgttaagatcgtaagtttcaattgaatcagctattaaacgaatctactctgggaattttgtatcatgttcattgtttcgtgtggttctttgaattgattaactctaaatttatcagtcaagctccttgaaatggtactttttagctgacaatttgtctttaactcagatcatttggattgttttgcaggagaacagtaaaacaaaacatcctcagcttctctatgaagctaagctatatagaactcttgaaggaggaagtatgtaactcattcctatcttttctcattctgtcgttgttggtttacgttgttggacattggagggattgattatcagtacaatgctcattttgcaggtgggattccgcgcataaaatggtttggagtcgatggaacagagaatgctttagtgatggatttgctcggtccaagtctcgaagatcttttcgtctactgtgggagaaaattctcaccaaagacagtcttgatgttggctgatcaaatggtatggcatgactttcaactattcattaggctatttataatatctgttgacttatacattgattatctaatgtgcttccgattttcttatcccgctgttacagctaacaagaatagaatttgtacattcgaaaggatatctgcatagagatattaaacccgataacttcctcatgggcctaggtcggaaagcaaatcaggtatatttctgcaacttcttatcttcatcagatgccataagtagagtatggtatgattgataagtctcatttttcaggtttatctaattgactttggacttgccaaaagatatcgggatgccaacaccaaccgccacatcccttacaggtattgtggccttggttcaatatacagattgtaaatgatctatctgtttttaagttttacggtcacgttaatcattatacaacttatttcctttattcggctatattcagggaaaacaagaatttaacaggaactgcacgatatgcaagttgcaatacacatcttggaattggtaagaaatgctggcattctttatccttatgtaaaagtaaatcgcttttgctcatattttgggttctcttcacagagcaaagtcgacgggatgatctagaatcgctgggatatgtgcttctgtatttcctaagaggaaggtgtgttgtctttttgagagaaactagttaacattatgttatttcgcagggtatttctattccttgtttttagagatttacttaactgttttttgtgttcctcatttcatgaacgtccttttctagtcttccatggcagggtcttaaggctgttgacaagaagcaaaagtatgataaaatctgtgagaagaagatatcaactcccattgaggtatgtttccctattgtgtgattgattctttttttgttaatcctcattcgactaagtatatatcgatatcccattgcaggtgctatgcaaaaatcaccctgtggagtttgcatcatattttcattactgccatacactgacatttgatcagcgcccagattatggattcttgaagcggctttttcgtgatttattttcgcgggaaggtaggtactttggataaagacatctcttcatcattcatagttcactcagctgataaggttcaccggcatcatctacctacctcactattatatgttctcttttgcaggatatgagttcgactatatatttgactggactatcatagagtatcaacaagcacagacatctagaaatcagtctcaggtatagttttcaatgttttctcaatcttaatttgcatgctgtgtcacctttcttgttactaacaaaaagtattgtcatttctactgcaggcagttcctgggtctagtaatgctcgtgcaatgccaatggacacaagcaatcatcgaggtcagctcaagttataaattttaattgtgtcacttttctgattaattttgtaatagtatatgatgtgttttttgttttctctcaactttcacactggactcaactggcatagagtgtctggctgatttagtttcccgttgcaactgtttatttcaatatctcgatgctaactctccgtttggcaggaggaactaatatttcacatgaagcccaagtctctgaccgtgtcagaccggctaatgccagtggtccaagcccacacattaataccgctatagggaggagtctgggttttgatcaagtccacaagaatgtacgtgcttatgcatttacctcttccaaataaatgttgtatcctgcaaactcgttgcttgtgttagcatgtcatgtatagtattactcttagaacacttcatggttccctgaaaactgattttaccagtatcgctttgtcaattgtcatgaattaatgaaacaatatattgatcttcgagatgagttcccttgactgttattttactgaaaacccattgcagatgaacatgccatccacttcattatctcctgcgggtacctctaaaagaaatgtcggacccgaaacctcaaattctggatatgggagtgggaatagaactggttggacttcgtcattcatgtctccagagaaatgatgcaaagaaaatgtagctttttcctgaaatggtgagtgagatgatgcgctgttaatgtgactccgtgcccttaattcacctctgaaactacagcagaaatcagaacttggtgtcactaacacctttgtatctcctccacctttggctggaagaaagatgcaatggtttctatgtaaattctctgaagtgtgtgtggacaagaaggcgttggttgaagcatttgtgtttacacacacaagacatgaaagtgtatgtgtgcttttcattcaaagatttcccccaacctttgtataattcttacacccggatgtgtaatcttgttatgtgattcatatatatcatttttagctactctttgctatgtgatcaatgaccttttgctgcagcttgatatatgtatacatgttaatgga

SEQ ID NO: 143950 - DNA, 1347 bp, Arabidopsis thaliana landsberg
agtttcatggataaggttaaggttcacgacttagagaaagtctgcgagccattgttctatcactggaaactagagaggcaaactaaagaatcatttggagaatacacaacccgcatggtaagtatcacatataacttctctttaactctctcactgtggcttgaacatttatattgaagaagaagaaaaaacaaatgactgtgttttttaactttaacaatggtaaaattgcagggattcgagaaactgaaggagctgatagatacatacaaaggagtttctcaatgagcacaacagagatcatctttcgttttataattcatgtaatgtaatgtctctgtctgaactgttactcttcggtaactctgatggagaacttgttctcgttttggtttgattttgtaccctcttttttttttgtttttttggattgctttgtctttgattggataatgaagcattactgtatcaaggctaattagcccatcaataagcctttttaaagctctggatatggaaaagtcagaacctctctctcttatctctctaaatttttcacagagagagagattttgttcgatgtttttccgtctggtatgctttaccagcttatgaatccggatgtgatccggttttgtcgatctatctcgctgtcctatctcgccgtccggtgtatccggtgttgtttacggctatcccgttgccgttctgtttgtttcaccgaattgatttgggaaacaatttgatatcagttttttcttcttttctaactggaaattttcatggccttctctcgatccgtcccaccaccatccacaatcaggtaagtgttttggtgtttcgattgggcgactgttttagtctcatccacatgaatcaatatccagatttgggcgaattatgggttgcttgactccttccaaccgttatagttgaaacggtccggcgtttttgacggcttcaatcacctcatttgaggtccgtcttgccattccaagaagtcaaggtatcaatttccaaagtctattcttattagcaagtgatgacaagagatcagaagcttcacctcgtcgttgattgtttgtcgacgacttctttcatgcttttgttttcggaaaagatccagtgatgagaagagaaagaatttgaagattaaattgaatcctttatctttttcggtttaatagctgtctgttttcataatccggagatgtttccggttgttcactcgctggaaattgtgtcggcttctgtttgcatatttcgctgaaggggttgtgggtaccggtttactaggttatccggttcacccggtttgtaagattggtttatgaataaatatccctt

SEQ ID NO: 143951 - DNA, 651 bp, Arabidopsis thaliana landsberg
tctcaatcccaacaaaccggacccgtcgaacccaactcagcgccatctgagcagaagatgacccgaaagactggttctgcttccaggtgaggaatttcgtctcgcgccgccgaaattaggagtgatcttcgtgatctctactcttctctgttcgctctatctataccttctctgttttcactacaaggttgataatgagctcaagcgatcgattctaattaacgcggggcttagcttggttgggtttttcgtcactctcaaaatgattcctgttactgccagatacgttctgagacgtaacatgtttggttttgatatcaacaaaagaggcacgcctcaaggagatattaaagtgtgagtttttatcaatctctgattttccaaagattaagattagtttgattaaaatttcttcatcctctttgttttcaggccagagtcattgggtattgttgttggtattgtctttttgatcgtggcgataatatttcagtattttaacttcactgaagattctaatgtaagtgtgcattaacgtcttgttttattaatctctgtggttattctcattatcaatgtttgtgagtctggctgatgattctgtgcagtggcttgtggagtataatgcagcactagcatctatttgcttca

SEQ ID NO: 143952 - DNA, 1446 bp, Arabidopsis thaliana landsberg
cgaaatatattcacagatattttcgatcttaaccgagaaaaaggaagaaatggctggaccatcgacaacttcaaacgcaccaaagcagaggaagcgagtcgaagccgagactagcagcaacacttctactaccttacgtcgcgctaaagacggaagcgctttcgctctctggtgagttctacttgcttaatctgttgaatcgacggaatattctgtttcgaatttagagatctaggtttttatttcagatttattagggttttacagctttaacgattgggtttctcataagttttctgtggattgaatcgattacagtgaaggatgtaacaagagtgtagctgtagcgcttataagcatgcacaattgcagtctcgatgctaagatcagagtgaatctcggtaatcatctctttggttttccccccttcttattgtattgtgtgtttcatcgtctcatagtctctgtgtatttggttgttgttgttgttgttcagaagcacaagttgtggagacacaagcagaggctaagaagaagcctgcagagaagtaagactcgtcaagacttgtttgtatagtttctgtatgtgatattgaattatttgaatgtttgtttttgttccaggaagaagacaacatctgatggacctaagccaaagagacttaagaaaaccaatgatgagaagaagagctcgtctacttcaaacaagcccaagcgacctcttaccgctttctttatcttcatgtaatgttttttgttcatacttgctttttttagattgttatatagtctctagggttgatgctgatgttaaccttttactttacaggagtgacttccgtaaaacgtttaagtcagagcataatggttcgttagctaaggatgtaagacttgaaccgagctcattactatgatttgagtactatgtttagtgtttatgagatttactaatctgggctatgtatatatatgattgtaggctgcaaagatcggtggtgagaagtggaagtctttgactgaggaagtgagttgttttattttcgtgtttcttcattagtgtcatggtgatttgtttactgtgttcttactctggtttgtgttctttgatcatttaggagaagaaagtttatctggataaagctgctgaacttaaggcagagtataacaagtcactggaaagtaatgatgctgatgaggaagtatgtgtttcataattaatgggcagtgtttcacttactaaatgaaatctttagtgttaagatgattcgatgactttttcaggaggaagatgaggagaagcaatctgatgatgttgatgatgctgaggagaaacaagttgacgatgatgatgaagttgaggagaaagaaattgagaacacagatgatgacaagaaagaagctgaaggtaaagaagaggaggaagaagagattttggatgactactag

SEQ ID NO: 143953 - DNA, 1012 bp, Arabidopsis thaliana landsberg
caaaaagattctaaccactgaacttatatctggtaactagaaatctgcttattctgttccgatatatgttataatgatatgatgaactaagctttgctattaacatattctcacagggatccccattgataaagtagcgttgttagatcagaaaacacgagattatgttgggaggaagatgctagaactcactttgaaggagctctttgtcttccgctttatgcagacggatccaaactggggtaacttcttatacaatgaagccacaaagacaataaatcttatcgatttcggagcagctcgtgattaccccaagaaattcgtcgatgactatctacgaatggtaaaacaatcttaccgattcctctttttcgctttcacatagtaaagaattctgaaaattgaacattttatggaattctttttcaggtgatggcatgtgcagaaaaagacagtgaaggagtgattgaaatgtctaggagactcgggttcttaaccggagatgaatcagatgtaatgctagacgctcatgtccaagccggtttcatagtgggtctaccttttgcagaacctggtggctatgctttccgaaccaacaacattgcttctagtatctccaatttaggagcaaccatgttgaaacatagactcagtccaccacccgatgaagcctatagccttcaccgtaaattatccggcgctttcttggcttgtatcaagcttggagccaccgtcccttgccgtgatctattgctccaagtttacaacaagtatcagttcgatgatgagccacaagatcccgtagtagctacaagctctgtttcttcatagctccctcatacacacacactacattaatgattttttctcgtccccttgtagggagtataaaacgattctttctttggtacaccttcgagtttaatgtagtataattttttcaataatgtaaaatgttaaatattacaatgctggagaagtcaatcatcaaacttatctaactctatacttt

SEQ ID NO: 143954 - DNA, 2680 bp, Arabidopsis thaliana landsberg
atggctcagaagttagaagcaataggtagaggcctccagtgggatgattcatctgaccatgacaatgtaacaaagattcttgtacgaggtggtcgtgaaggcattcagtacgtgaagtttgattatgtcaagagtgggcaaccccaaactggatcagtccatggtctcttgggtagaggaggattcacgcaaacggtatgtatgtcttcaaaatatgacaatttaagtattttcattgtatagttattattattgacattttgtaatcatttggtatcaaccatttaattgcagtttgagattgatccaaccaatgaacatcttgtatccgttgagggttactatgatgaatctaagggtttggttcaagggcttaaattcaaaaccaacaagaagacttcagacatgataggatacgatgaaaatggtttgaagttttcacttgaagttaacggaaaaaagataattggcttccatggatatgctcagacttatctaaactctcttggagcttatttcgtaacggctcctcctactaaatttgactaccaaggtggttcaggagcccaactttgggatgacggtactaactacaatggtgtgagaaagatttcctttgcgttagatgccaatgagataaggcaaatcaggattgattatgacaaaggtggcttaattgaaagacgagagtacgggggtaacgtaggacgacaagaggaggtccaagttctgacatatttaaatactcttctctggctgccttatattttctgacatataatcttttgcttattttttacttcagtttgtggtcgactatccgactgaatacatcatatatatggagggtacatgcgatattgtaagcgatactagtaaaaaccgtgtgaggtcgctgatgttcaaaacgtcaaaagggagaacctctccgatatttggaaaagttgctgctagaaaattcgtgtttgaaagcaatggtagtgctcttatcgggtttcatgggcgagctgctgctgccgtagatgccatcggggcatatttctctccgctgattctttctgctcctgctcctccgcctccacctgccgagaaactacaagcaaaaggcgggaaaggaggcaatcagtgggatgatttacttgaccatgacaatatcgcaaagattcatgtacgaggtggtcatgaagggattcagtacgtcaagtttgattatgttaagtttgataatctcaagattggtcaacccaaacttggatcaatccatggtctctcgcgtaaaggattcacgcaaacggtatgtatgtcttcaaaatatgacaatttaagtattttcattgtatagttattattattgacattttgtaattgtttttatcatttttggtttgcagtttgagattgaccatctccagtatgaacaaattgtatctgttgagggttactacgactggaagaccggtgtgatgcaagcactccaattcaaaaccaacctcaagacttcagaatttattggatatcaaaagggtactaagttttcacttggagtcgatggaaaagtcatcgttggcttccatggatctgcttggcgtagcctccgatctcttggtgcatatgtaaagactgctcctaccaaatcagaactccagggtggcataaccggaggcgaatattgggatgatggtcctaatttcgacggtgtaagaaaggtgtatgttacttttactgaaactcatataaggagtatgaacattgactatgaccaaggtggccaagtggtgacacgttatcacgggatgaagaatggagaaacgcaggaggtaaaatctctatagcccttggtcggtatatacaataaactgaacgaggtttttataaataaatgtttctatttcgaatggtatatgaaataaatatactaagcttttaagtttttttttggggtatgaaatatcaaatacactaattgtgtatttattgcagtttgctgtggactttccgaatgaatatatgacatctgtggagggtacatacgaccatatcagtgagggtaactatttggttcttacgtcattaactttcaaaacgtcaaaagggagaatctctcagacatttggattggtcattggtaccaaatttgtgttggagactaaaggtaatgttatcagtgggttccatggaagagatggtggttcttttgatgctattggagtatatttctctccaatgatatcttcctaagctacagaagtttgttcatgcatggcttcacgtatcttttactactttaaaatacttatcgattccgatgttgtcaactatgaacatctatgtaacgaaataaaactttatccaaaactaatttcaatatgtcatttaaaatattttcgatctatattttataataaaacttcaattttacaattttttatgataagagtgaaaataaatctttattaaaaacttttcccacagacaaaccaaactaaaattaggtcaagggtgttgatacatcaattgggcctcagtgatcaaccggcccatttcaaggaataacgacccagccccgaccatcactttagaactcgagccggcccaccaggccgaagcccggcctggtcaggatgtgagttcggctgcgtagaaaaggggcactctcgggaattcaccttgcgtaccctac

SEQ ID NO: 143955 - DNA, 772 bp, Arabidopsis thaliana landsberg
gaggggagcgaaagtgaaggagaagaccatgatgcttctgaggtaacgaggaaacatctgaagcgcaaacgtcctcaagttctgcctagtgattttcgagaagaagttgttccaccacattcagttgcatcagtagaaggatgtctctcattcttgaagcagacacaagcttatggtacaatcattattttctgctaaaaacaaatgattattctgcggttttatacgttttttagttcacaccctttatagggtaaccatgtctcacgaaattctgtgtcagcctaacaaattcatgtaaatgaatctggtcaagatcgtgtaatgtgctacttttttttatgtagaaaaaaggcaacgggccactgggaaacgtacacctcggtttcttgtcgcaattacacatgagagggatgatatagaagattttagtccaccaaataaaagagccaagaaacaacttgatgccgatgatgatgcatcaagaaggggaggagggtctccatacagaagaaaagaactcagtgaaatcacaccaactaggcttaggaaaacggtatttatatagctctagcaatttaaggtcattatcatttcagtgttgtcatgattgatcagtgaaaaaaacaatttctaccctttttctcttttgccagtcacaagcacaggaagcacaattcaagcaccctgatagttccatgtttgagaatggggtgagagatagatggcataaaaagggagctgctgatagagatggtgccttgttatggat

SEQ ID NO: 143956 - DNA, 1251 bp, Arabidopsis thaliana landsberg
atgtttttacaggtgaattatatgtgcaatcatcgaagatgtttgatgataaaatgtacatgcaatttgttgggaattgttgatttggctataaaacaggccatcataaatagcgaaaatttcgaaactgaatatgtaagtttgttctctaatcatttactttcttcttgctctcaagcactcattttatgcttattccatttattatttcaagggacatgtaccccctgtactacgtcatgttttggaaatcttgccctctttggggcctcctgaacacctttcgtcaatgtggctaatcttgcttagagagttcttgcattatcttccacgggttgattctgttctgccaaatgacgaaggtgagattcagcagaacaacacaggtcactgtgcaagtaagtactttatgttaatctactctcaacaagtctgaatctaatattcttttatcaccccaggcagtgaagtattggaacagaaagctgatgcttcgtctgaaacaattccaaccacaagaattacgactaatatgtttgcagaaaagctgatccctgccttgatagagcttctccttcaggctcctgcagttgaaaagtatatcctgtttccggaagtcatccagaacctgagaaggtaaaacaactctcgtattatgtcgaacatcgattccaataggcgcattgtgcagatgtgttggctcttctcaacatgagtttagaaagggaatcatgggttatttgatttatctagttaacccaaaccccctttccctctctcaagttccacgtccttgcctagaattgcagaaagaaaaaagttcttgattttctgtatagtggttgagttaccatgtctatttaccttctgttgtgtctgggagaagtgtgtacacaaaacttataggatcattttttttttttcaggtgcatgatgacaagacgagacaatccagatggttcactctggaaggtagcagctgagggcttcaaccgtttacttgttgaagatgtgaagttatgttctgtgggtggtgaaacagaactgaaaattagcaaaacagctcgaatacgcatttggaaagaaattggagatgtttacgatatattccttgttggttattgtggacgtgcactttcttcaaattctctccctgctgcaacacttaaggccaatgagacccttgagattgccttattaaacggtcttggtgatattattcttaagtcgaccgtggatgcaccccgagaa

SEQ ID NO: 143957 - DNA, 1532 bp, Arabidopsis thaliana landsberg
atgtcgactatagatgagtcggtcattcgatccaacggctctgagtccacgaaacacgcaaccaagtggtgctctcttttacaccaaatcatattatataaaacttaaaagaaagagaggatggttcgttggctccttcttgttccttaattaattcaaattatattcatcacctccattgaataagtccatttcacgacaaagtcaccaatgcttcttttacatgtatatatacttctttccactccctcttctctactcaaatcaaatcttcttccttctctgttttcttaagctttttgaaaattttatcaatggcgactcctaacgaagtatctgcactttggttcatcgagaaacatctactcgacgaggcttctcctgtggctacagatccatggatgaagcacgaatcctcatcagcgacagaatctagctctgactcttcttctatcatcttcggatcatcgtcctcttctttcgccccaattgatttctctgaatccgtatgcaaacctgaaatcatcgatctcgatactcccagatctatggaatttctatcgattccatttgaatttgactcagaagtttctgtttctgatttcgattttaaaccttctaatcaaaatcaaaatcagtttgaaccggagcttaaatctcaaattcgtaaaccgccattgaagatttcgcttccagctaaaacagagtggattcaattcgcagctgaaaacaccaaaccggaagttactaaaccggtttcggaagaagagaagaagcattacagaggagtaagacaaagaccgtgggggaaattcgcggcggagattcgtgacccgaataaacgcggatctcgcgtttggcttgggacgtttgatacagcgattgaagcggctatagcttatgacgaagcagcgtttaaactacgaggatcgaaagcgattttgaatttccctcttgaagttgggaagtggaaaccacgcgccgatgaaggtgagaagaaacggaagagagacgatgatgagaaagtgactgtggttgagaaagtgttgaagacggaacagagcgttgacgttaacggtggagagacgtttccgtttgtaacgtcgaatttaacggaattatgtgactgggatttaacggggtttcttaactttccgcttctgtcgccgttatctcctcatccaccgtttggttattcccagttgaccgtcgtttgattagttttttttgagtttttgaacgatgtgtatgctgacgtggacgtacacgtaggtgcatgcgatgaaaaaaacatctatttgttcatatttttgcgtttttctatttgttcattctttttcacaattcacaatacattatttcagttaatgattacggataatttagctttacgttaatttattatgagtactagaagaaatcggagtaattcaacatatagattatactagtataaatgtcaattgcattgacattaattgaggaattatagtagaacctagtataaaaagaatgattcaaacatgagatat

SEQ ID NO: 143958 - DNA, 664 bp, Arabidopsis thaliana landsberg
taagggttgtgacggcgtcttccatgtcgccgcttccatggagtttgatatctcatcagatcacgttaatctcggtacgaccttttcgttgcaccggtcctcctttttcatagcacaatatctaaaccgctctcaaccggatagtattagaagttaaccaataaaaaccgggttttgttggattgaaccgcagagagttatgtacagagcaaagtcatagaaccggcgctaaaaggcgtacggaatgtacttagttcttgtctaaagtcaaagtcagtcaaaagagttgtcttcacatcatccatcagcactctcactgctaaagatgagaatgaactgatgagatctttcgtggatgaaacttgcaaggctcatgttgatcatgtccttaaaacacaagcaagtggatgggtaactactataacaatagtataatttcagtaaaatgccttacaaaattcattgttctgcgtcattaacaaggttaacttcatatggttacagatttatgtattatcgaagctcgtatcagaggaagaagcatttcgatatgcgaaagagagaggaatggatcttgtttcagtcattacaacaactgtttcaggtccattccttactccatttgtcccatcaagcgttcaagttctcttgtctccaattacag

SEQ ID NO: 143959 - DNA, 1546 bp, Arabidopsis thaliana landsberg
atgaactatgaagacttctgtcacattgcctctgtatgcactgaacaaatcggtcccaaatgtcgccggttttttagcccatccaatttcatgaaatttgagaaggatgaggctgggaggattgccattttaccgttttatctttatgtgatgcgcacggtgagtatccttatgtttttataatgtcatgtctttgggtatcatttttgttcattggctgaatatcatctgtcgccataagctaaatattctttggtactgtgtttgagtgacaccagctttgctagttttggatgtttgtttttcaagtttttttaatttggcgtgtcttttacttaaacaactatagttaatacttgttttgattaatcatatgttcaacactattcaggtgtcgcttacacaagctaggattgatatgagtgagcttgacgaagactctgatggtttccttcattctgatgtaagtactcaagtggctctaaagctttaactttagaattggctcaagattctttaggtagtcgtcctacctgcaaatgtcaaatggtgttgacttttatgtcaagttccttacagttagtctacttgctgttgttattataggaaatggagtcctatattggtggtctaatccctaatctggcacaactgagagacatgcctccggcctttaatcaaatgtattgccgcatagcttcacaaaagtttttcttcttctgtgatccccataggcgaggtaagtgaaagaaaatattattattattaggcaattagaaatttctttgacccagtattcaatcgctcgtaaatgtgatattttttgcgtacaggaagagcctgcattaaaaagatactgctcagtaactgtctgcaggaactaatggaattgcatcaggtaagtttagttgaaggatgtatgacatacagcttcgtcaccgtataactttccactttcataagctacttgcttgtgttttctgattgttccttggttactcaacgttaggaaagcgaggaggaagtcacagacactgaacaggcagaaaattggttctctttgacttcagcccaacgcatatgtggtgggtgtgctattttgtcttaatagctgcagagaactggaaacaactctcgttatgtcatattaagaactaaaatggagattgatctagagtttctctttcttctgtagatatgttcctcgcacttgataaagatatgagtggatcgctgtgcaaacaagaacttaaagaatatgctgatgggaccctaactgagattttcattgaaagaggtaaatttaagcccttttggtgattgtaggctcgtggtactgatcgagacacgcttagtatactaattcccctttgtttttttagtgttcgatgagcatgtccgccgtggtaaaatcgtggcaggcaattcccgggaaatggactttgacagtttcctcgattttgttcttgctttggagaacaaagatactccagagggtttgacgaatttaatccgttgccttgatctccaagggagaggctttctc

SEQ ID NO: 143960 - DNA, 1200 bp, Arabidopsis thaliana landsberg
cagggatgtgaagcatcagtgctgctagctggatcagccagtggaccaggagaacaatcatcaatcccaaatctgacactacgtcaacaagcctttgtcgtcattaataaccttcgtgccctcgtccaaaagaagtgcggtcaagtcgtctcttgctcagatatcctcgctctcgccgctcgcgattccgtcgtcctagtaaccacatctatcactttttcgtctataactcaatcacatttagtttcaactaaccttggattatgacttgcggttacatgcaataatacaaaccattagtctacaagtcacactaattctctaacatgataattatttttgtgtgtcaatgtagtcaggagggccagactatgctgtcccacttggccgacgtgactctctagcgttcgcgagccaggaaacgacgttaaataacttaccactaccgttcttcaacgcgagtcagctcatcgccgacttcgccaacagaaacctcaacatcaccgacttagtagcactttccggtggtcacaccatcggaatcgcgcattgtccgtctttcacagaccgactctacccgaaccaagacccaaccatgaaccagttcttcgccaacagcctcaaacgcacttgtcccaccgcaaactcgagcaacacgcaagtgaatgacataaggagtcctgacgtgttcgacaacaagtactacgttgatctcatgaaccgacaagggctattcacttctgaccaggatctcttcgtggataagaggacacgtggcattgtggaaagctttgcgatcgaccagcagctgttttttgattattttactgtggcgatgatcaagatgggtcagatgagtgtcttaactggaacacaaggagagattcgttccaattgttcagccagaaacacccaaagtttcatgtccgttttggaagaaggcatagaggaagctatttccatgatctaaataaccataaatctcgacctttcctttgtcaactctgtttttatttagttcatgcacttgtggttgggttgtcgaatgcgtaaaactatctgataaataagaacgtcgcttcatcttaattaacttcatccaataccatgcactccttgattatttatgtgccaatcgagttactaaaatttaacgggctaaaagagaatttaaattaggcccactagttacaataacct

SEQ ID NO: 143961 - DNA, 1002 bp, Arabidopsis thaliana landsberg
aaaagcataaacgtagactcgcggtgatgaatgctctgattcaagatcgactgaagcagaatggttcagaatcggttagttttgtttgaatagtctttcatatattgcattacactgctgatctaatctctacttataaacaggatgatgattgctatctcaacttcttgatgtcggaagcgaaaacactaaccaaggagcaaattgctatcttggtttgggagacgattatcgagacagctgacactactttggttacaactgaatgggccatctatgagctcgctaagcatccaagtgtccaagatcgtctgtgtaaagaaatccaaaatgtctgcggaggagaaaagttcaaagaagagcaattgtctcaagttccttatctcaatggagtattccatgaaacgcttaggaaatacagtcctgctcctctagtccccattcgctatgcccacgaagatacgcaaatcggaggctatcatgtccctgcaggaagtgaggtacaccgagtcaattcacattttgaagttcatttacaaagtctagtttcaaaatcttgatgtgtagattgcaataaacatctatggatgcaacatggataagaagcgttgggagagaccagaggactggtggccggagcggtttcttgatgatggcaaatacgaaacgtcggatcttcacaagacaatggcgtttggagcgggaaagagggtttgtgctggtgctcttcaagcatctctcatggcaggcattgccattgggaggttagtgcaagaattcgagtggaagcttagagacggtgaagaagagaatgtggatacatatggcttgacctctcagaagctttatcctcttatggctattatcaatccaaggcgttcttaagacacagatctcttctttcatttgttagtttttaaccttttatcaacttttatttgtatcaaatgttgtttgtagaactatttaagtttaatagtgtaatattaaactatcctgtga

SEQ ID NO: 143962 - DNA, 1843 bp, Arabidopsis thaliana landsberg
gaagaagaagaagaagaaatgagcgttaatggtgagaacaaggtctcaggaggagatagttcatcttcagatcgacctgttagagtctacgccgatgggatcttcgatttgttccatttcggccacgctcgtgccatcgaacaagccaaaaaatcgtcagttaccaatttttgttttctttcgattattttgccagaattgagaaattagggttgtgaatttgtgatttgtgattccaattttgaaaaattaggtttccgaatacgtatctgcttgttggatgttgcaatgacgaaattacgaacaaattcaaggggaaaactgtgatgactgaatctgagcgatacgaatctcttcgacattgcaagtaatgtttcaattttctatggagctattgtagattctctggagtttttttgtttgttataatggtgtttttgttaataggtgggttgatgaagtgattccagatgcaccatgggttcttacaacagagtttcttgataagcataagatagattacgtagctcacgatgctcttccgtaagattcgtttttttgttgttgtgtatttttccattagagagaattagcaattttaaacaaggttaatgatttgtgtttgtgtttgtttcaatagctatgcggatactagtggagctggaaatgatgtttatgagtttgtaagtattaacatagagatgttctttcttcttcttatgctgtttcttaaagatttggagtttattttgtgcaggtaaagtcgattgggaagtttaaggagactaaacgaacagaggggatatcgacatctgatataatcatgagaatagtgaaagattataaccagtatgtgttgcgtaatctggaccgaggttattcaagagaagaactcggtgtcagcttcgttaaggtacgctctccatttttctctgccttgatgtgggaatggtatattcaacgtgatacactaacttgtttactatacgaacaggagaagaggcttagagtgaatatgagattgaagaaactacaagagaaagttaaagagcaacaagaaaaggtgagaggcgatgaatctattcttatgcgttaatgatgcacggcttgtaaatagtaaatatacagaagaagtgcagtatgtttgtctaagaatggagttagagtcagaatcgctcattgtgtaactttctgaatcctgaatctttttccctttgtgcagatacaaaccgtagcaaaaactgctgggatgcaccatgatgagtggcttgaaaatgctgatcgttgggtggctggatttcttgaaatgtttgaggaaggttgtcataaaatggtaagcagcattacaaaaaaaagatcatttgaaatctcaaacatgagtatagtagtgtctccgtcgctaattattgttttatttttctcagggaacagccatcagagatgggattcagcaacggctaatgaggcaagaatcggaagagaaccggcgattgcttcaaaatggactgacgatttccaaagacaatgacgatgaacaaatgtctgatgacaacgagtttgcagaagaagactgcgtcaatgtgagcaacaaagggattgaaacagtaaagaaatgagagattttgggtcatggttgaagtatttccagatacagaaccaaaatctactagatttcaccagtaatggtattaggcttgtttattcaactgtacatcaaactctgtttcaaaatctctacttgtgtctaaaactcaaatgcatcagaaatcaaaagcagtcatggatatatctatgatcaaacactccaaatgattacatgatgaccataatagaaacagctcaa

SEQ ID NO: 143963 - DNA, 909 bp, Arabidopsis thaliana landsberg
atgttgattcgagtaagtattaattttggttgcgatgataatttctatgtataattttatgatattaaatatcagtttaagtcggttacacgaaattatgagagtaaaattggatattgtagttaaccgaggggaaaatatgagataattaaaaggatggagactgtttaagaataaattaaaacctttggagtgattatgtaaatcgaaagaaaaaggggaagaaaatcgtggcagttgctggtgagtgatgacaacttggaagaaagtacgagaagagaacaaatcatttcagtttctgtttaagtgaatatccacatgtatatgtgggaccttttgtgttagagatgttttttagtgtttttaacttgaataaaatatcctacaatatatatcacaacccaaaacacaaattatacaagcctttaataactaaaacggtttaatttaacttttaagtaaggtttgtaaattcatttaagataattttgtaaattttactagtaacttggtatattttggaattttaggattgataacataatttttgtatttttcacttttccttattcgttcgtcaccaagagcaggtaagagattaggttatcttctctttctacttctctttttcatcgaagctactccaattcctatggcggaactctttacgatcgatggaactataaatatataaagagaacgaagaacacttttaagaacttaaaaccaatgattcgccatatgttctcctctctgactcacagattcgcatggcggattccacacttcgtctacggcgcaacgtggacgttgtttctgacgttaacggtggctatcatctcgcttgcaccggaattcgctttcgtgtcggcgattttcccgtcttcttctgaggtgttctcgcgccgg

SEQ ID NO: 143964 - DNA, 331 bp, Arabidopsis thaliana landsberg
ctggtttcggatcctctctctttctctcgagatcttaaggatcttttaaaactttagcttcaagtcttgggaaaaagatgaagaagctaaagatcctttaattttcttttctttttttgtaagaaaaaaatagtttcttgacatgaaattttgggagtatgagaagagaaaatgtaaatgcctatgtgaattataatagtccatggcatgtttgagttatattttttcttttgtttttagatttcggtatcaatgtctttcgagggatatacagatgttaaatcaaattttaatatgttgaaatatgagaatattatacgagaaaacaaga

SEQ ID NO: 143965 - DNA, 856 bp, Arabidopsis thaliana landsberg
cagctggggttcagaggaagagtttttcgctgtaatgcaccgaagtttcgatgtggataaggaagagatcaccgtggctcaagggattatcgaagaggagatgactgatttacctgtttctgttgctgttgatgatgctaatactgttgctgatgaaatggatcaacttgaaaaggtggagaaatcaagtggagacgcagggaagaatctggttgatgtagcttgtgagacgttaataacgtctgcagctgttaagagagaaggaactgcgaaagaaacagtgtctgttgatgcagtatgttgcaaacctgttgaaccgcttaactttgatgacttcaattcaccagccgacatggaggtacgtatggaatttcttatacgcagattaaaaaccaaaatggtgtctctgaacagaaaatattataaactttaattgctttgtacaacggtgtgtcatatagttcatgtattacatcaatcacgaactcaacctatattgaacccatcggttgtttggtttcaggttttggggatggggagattgaagactgagcttcagtcacgcggtctgaagtgcggagggacattgcgagagcgagctgcgaggctatttttacttaaatcaacgccactcgagaagctcccaaagaaattactggccaagaaatgaaatcaacatccaactccaaaaatatcccttttgaagttttttgcttgtagtacgataatacaacgcacaatgtgtaatatcagctgtatttttcactaatccaccaacattatcgctttcgcaatgattcttctcttttttctttcccattgtatatagtgcacaattctgtccacgttcatgaac

SEQ ID NO: 143966 - DNA, 1108 bp, Arabidopsis thaliana landsberg
ctcacttggacgccacaactgtgctctcaagacaggtgtgaatttgtgtctttctgatgcttcttacaatgtacttgtgtaaatctcataaaggtgacatctagatacttctattttgtaaatgtgaagatttctgagcttggtatctaccctgctgtggatcctttggattcaacatcccgtatgctgtcacctcacattctgggagaggagcattacaacacggctcgtggcgtgcagaaagttctacagaactacaagaacttgcaagatattattgcaattttgggtatggatgagctaagtgaagatgacaagttgactgttgcccgtgcccgtaagatccagagattcttgagtcagccgttccacgttgctgagatcttcactggtgcccctggaaaatatgtcgaccttaaagaaaatatcaacagtttccaggtatgatacacacaacaagtttttgctataatcttatgattttgaaacattttgctgtgagttcctataagctttcaatgctcccttaacatgtctgtggatttgaagttgacctacaactggcttttagtatagaagactcctttgtgatgtctatatctagttgccatagttagatttgttgttatcaaaatggattatgtagagtaactgacctaaatcatcttgtgtttgtttcagggtttgttggatggcaagtacgatgatctttccgaacaatcgttttacatggttggaggtatcgatgaggtggttgcaaaggcagagaagatcgctaaagagtcagcagcttaagagattgattcagatctttcatgcttaatacttctcttttttttcctgacaataacgaaaaaaaaaaaccaatgcgtgcgactctccgaccaaacggaatctgagttccgtaattatagtttcttttggttcaaattccatgagagctggcaagatgatactgaacagatccattcactgttaatcaaatttttggttgttttgcttcctttgttgaaataaagatgaaaaatcttgcagattctaattgcaatatgtgtttaagatttcttgatgccagtctcttatgttattttgattcatagaatggtgt

SEQ ID NO: 143967 - DNA, 978 bp, Arabidopsis thaliana landsberg
tctctcttctccacgttactaccacctaacctctcatccaccttttcttttttaagcatatttcatttcatctccgaaaggaattgtatcgttcctcacacacgcctctcatctcttatccgtaagttttgtttctcttttctctattgatgtacccttttgcccatatttgtgctcgtggtttcgcatttgatcgtttatgctagatctggtttgggtttagtcgtttagatgctcgtcaagctccctttgaatcactagtgctcttagactcttatatttactgatttggagttttgtaattcaaaagtccgagtcttttgatgaacccccgtgccgaccacacgattgctttcaatttgggctattgaggattttcgcaagtttctgtgtgaatcgtagagcagaatgattcaaaagtgatttcttttgattcaattatatacgattgttaatgtctttgaggttctatgatctggaataagattttggtattatcttagtatatcaaagcttagatgatgtttctttagcatgtaactactattgtccatataaattgcataactcatttaactttcgagcattctctgcgtctcgattacttatatggttcctttgtttgtttttgttcagattcttgtccttttttcagctcaacaagaatggataattgtactggagaaaatcccatggcttctcagttgaacattctccgatgcccgttcttgaggaacatcaatgagcccactaacctctctttctcttcatccttgccttttcccatccctgtaagtaaccgtctgttggttcactccatattgacatttcttatagattctgatcttgtctcatcatatatataggcaagagctgggaaaggacctatatttgaagatggtcccaattttgataccgcgtttaagcttttccatggccaagatggagttgttcctctctctgacaccgctcgaactg

SEQ ID NO: 143968 - DNA, 1801 bp, Arabidopsis thaliana landsberg
atgcaaacaccaaatcaacaatccatgttcatccataggattaagacctcaattttgatgtaatttcatagattcgtaagatcttgtagtaagcaggggaaaacagagagtgagagaaagagagactcaccacaccaacattaactttttcaggactaggatcagcgagaaaagcttcggtaactccgaggatcggatctttaggagcaggctcaacgctctttcaccatgaagacatagatctcaaaccaccgaaatcaccggagatcggagtcattcctcgcttcgaagctgcgtttcggatcatcatcgccaaagccataactctatctctctatctctctctgtttctatctcttaacgtcaaaaaatcagaaaaaaagagagtggtaaggagtttatatatagagagagaagtagcgactcgtacgaagtttttggcagatgaggacgaaggagagtcgcacaagttgcttagaaaatggccttggtctgtgtgtgtgagagataaggttttgattttaaataaaataagctttactctaatgatcaatactataaaaagtaataaatgttgcttggctctatgtgtctgatttatttcccttttagttagtcttccaacacctgaatctagtaataaaacatttatatttattttagaatcttacatgtttatggtagttaattttttaattttgactgttttatcatattatttgtaacttgagtcaattataacaagatgaattcattagaatgttttgtgaacttaagtgcttccaacttaattatgttttgtgaactttacaacaaaattatcagaaaatctaagaaaagtaaaggaagttacgggccagccaatgggcctctaaggaagtgcggtataaaaagttaatgctattgcgtaggacctctctttttttacttttcctttcagcattttattactacagtacgcttttcactatttcagcttcgacgaggtttgtttgtgaagcgtgtgaaggaaatgatttcaatggaggagaagaacacatacggcaaaagaaagactgttcctctgattccggctaactacatcagcatccttcagcttcaggagcgttggctcaatgagaaagagaagaagcgaaaggaagaagaagagagacgacggaaactacaggctgaggaagagaaaaagatagaggaagaagatctgaagaaagcggaggaggagaagcgtatgaatcgaagtaatcggaagcattttgggagaaaaaaggaatctatagacggcggagaagcacgattcgttgagaaggagaaaccggaagtcacggtggcgatcgagagcggtggaggtgaagatgcggcggatggattaccgaagaagaagaagaagaagaagaagaataagggagcttggaggaaacgatataatagcaagacgaataaaaatcaagatggagctgtggttgaggatgtcatcgattgcggatgtgtatcatcaatcgtgccgcctgagtccgtcgtgacggagaataatactccggtgaaagatgtggttccagtttattggatgaaagcgaccaaatctaaagagattaccaaatcaatggccatagaaacacagtttgagaacttctctatcaatagaggagaagccaaaactctcaagacacaaaccaaatggagatatcgtaatcggccaatgccgagaggagcttcttcttctacaatggtgtgggtgaagaaagagcagaacgagagagctggttatggaattgcaagtggcgtgaagccatttaatgcgtaa

SEQ ID NO: 143969 - DNA, 580 bp, Arabidopsis thaliana landsberg
tgatttggctgactggttgggtgttggggaagatcggacttttcaattttaaaccaagcgtcaggcctgtaccaattgaagttcatattcaggtaaagtcaatatcttttctctagtttgcaaacaaattaatacctttcttaaacaaaacatttatgtatgtctcctacactgtacttgactacgctatttaatttccattttcggtgggtggattaaaggtattcaaggaaaccatacaagtatgaaatttccagacttaaccttgtttattgttttcagggttatcctggaaagtattactgcccaaggatgaatagcatgaacaagccagcatatgcagccatatgtactcattcacctacgaaacctgttcttatctttgtttcatcccgtaggcagacaaggcttactgcattggatcttattcaggcatgatttatcatcaaacaccgataccgaatcatcttttaactatataactctaatttgtatcatcctttgatcttcttttcctatgaaatgaagtttgctgcctccgacgaacatccgcggcaatttctgagtgtgtcagaggaag

SEQ ID NO: 143970 - DNA, 1261 bp, Arabidopsis thaliana landsberg
  unsure (1)..(1261): unsure at all n locations
acaaccgaccgagtcggagatcgaagttttgaacctaagaatctccgtgtcttcttcttctgcagagcctccaaagtctaaatcttttggttacgtctctcaaaccccaacctttatactcactctctttctttttctctcttacctccattggcttcttcttgagatctcgtcaggctctgatcccaatctatgttcgatctcactctcaccgagatctcatcttcctccattttttcaaagatccatatatgagctctaaaaccannnnnnnnnnnnnnnnnnnnnnnnnnnnnnnnnaatcggagccagattctaacaaatcaaagaaaggaagaagaagtgaagaacaatgggagctgaaaagaaatggcttttcacactcttctctgtagtattcctctcagtgttccttctcttactttattctatctctgctttcacctctaaaccattcccttcttcaattcgtcacggtgctcattacccacctgcttttgcttattacataaccggtggtcgtggagataatgaccggatctttcggttattgcttgcggtttatcatcctaggaatcggtatcttatccatctgggtgctgaagctactgatgcagagaggctagctcttctctctgatttgaaatctgttcctgctgtgaatgcttttgggaatgttgatgttttagggaaagttgatcgtttgtctgagaatggtgcttctaagattgcttctactcttcacgctgtttctattcttcttaagcttgatcctacttggaattggtttattgagcttagtgctttggattatcctctcataactcaagatggtatgttttaattttgatttctttctattttaatcttaaactagagaagaaactagctttttagtttgcttgtgattttgattcattttcactctagatctttgtttttgacctgtctttgagctttttaatgttctagtttctgctcttagcttcttgagattgcagtgtttatgatatactctagaatatatatactctttttctggaaataaagtggaaatgtaatcactttcactgatctctttatggcaaataatctgatttagaactttattactccactggttgtttgtttgtcttcttatgacctggattctaatgaattttctttgctcatgatttctctcagacctatctcatgtgtttgcctcggtgaacagaagtctcaattttattgatcacactagtgcccttgcttggaaaga

SEQ ID NO: 143971 - DNA, 1209 bp, Arabidopsis thaliana landsberg
acatccaactattaacatgaccaaatcgtatattatccatttttaaaaagttatggtgagggcatgaacatgtttcaaattaagtgtacctttcaagatttgtagtgttcaacacaagtcacaataacttaaagaaaaaatgtaattttcttgaaaaagatacataataatctaacgtacaaaaatgaaaaacagacatggcaagagcattagcagctccagatacagagcatccgaatggaacagaaggtcacgatagcaaaggaatgagtgttatgcaacaacatgttgctttcttcgaccaaaacgacgatggaatcgtctatccttgggagacttataagggtaattattacttgttatagtctcttcaaagacttcaatcttcagaaaaaaaaaaaattcaaataattgtataaaaattgcaggatttcgtgaccttggtttcaacccaatttcctctatcttttggaccttactcataaacttagcgttcagctacgttacacttccggtatggaaaataatccagagacccttcgaatttaatttgaattttattattattttgtgattttaatttatgttgtgatcaattttatgtaaaaagagttgggtgccatcaccattattgccggtttatatcgacaacatacacaaagccaagcatgggagtgattcgagcacctatgacaccgaaggaaggtaacattaacatatatgtaaaatataatatccaataattttaaatagaattttgatgatactcaattttgtaaaattgcgattgtttataggtatgtcccagttaacctcgagaacatatttagcaaatacgcgctaacggttaaagataagttatcatttaaagaggtttggaatgtaaccgagggaaatcgaatggcaatcgatccttttggatggttagtactaaaaacattattggttattagttgatttttttgaatgaaatttattagttgattttacatacacggtaataagttaacactaaatcctaacgaaatctgctaaatttgttgtgttggttatggcaggctttcaaacaaagttgaatggatactactctatattcttgctaaggacgaagatggtttcctatctaaagaagctgtgagaggttgctttgatggaagtttatttgaacaaattgccaaagagagggccaattctcgcaaacaagactaa

SEQ ID NO: 143972 - DNA, 618 bp, Arabidopsis thaliana landsberg
gcagaagatacagctcttgacattctggatgcgtccaacgaacttgctctgttcttagctagagctgtgatcgatgatgttttagcaccttttaacctggaagagatcagtagcaaactacgccctaactcaagcggaactgaaaccgtgaagatggctaggtcactcatctttgctcgacatgcaggagagaggcttctaagatgctggggaggtgggagcggttgggcagtggaagatgcaaaggacaagatatcaaatctcctggaggaatacgaaagctcagggctggtatcagaagcatgcaaatgcatccatgagctaggcatgcctttcttcaaccatgaggtggtgaagaaagcactggtgatgggtatggagaagaagaaggacaagatgatgctggatcttctgcaggagagtttcagtgaaggactcataaccacaaaccagatgaccaaagggttcacaagagtcaaagacggacttgaagatcttgctttagacatcccaaacgcaaaggagaaattcaacgactacgtggagtatgggaagaagaatggttgggtttcgtcgtcgtttttaacttccctaactgaagatgctaatgtaggctag

SEQ ID NO: 143973 - DNA, 492 bp, Arabidopsis thaliana landsberg
cccatggaagaaatcagtttccgtggccatcctgtctcttacatcgctccaagttcttacggacactcacatgtacgtagttcatttttttatgcgcaactaaatttacatgataagccttttttgtgtgtaaattttttagtgtttttgtggttgataggcattgttgatacatttaatgagttacgcggataaaatgataatttcgttggcgtatgatcctaccgtcatatcagaccctcacaagatttgtgatgatatggaagaatcactgaaagcaatgaaagcttctctctgtgaaagaggtttactctaaggcgcatgagccatattaactgtaatccttaagactgtgtatatgtttttgtttggtaaaaaatgttgtgttttagcagttttcaatgcttttgtagtatctataaatattggagtcagaaaaaaatgtaataagagtcggtccactgtgttggaaattagtaggtacgtattgtc

SEQ ID NO: 143974 - DNA, 1075 bp, Arabidopsis thaliana landsberg
aacggaaatcatgttatccaggaatgtatcgagagtatgcctgctggtaggattggattcgtaattgctgctttccgtggtcaagtcgccactctttctactcatccttatggatgccgagttatccaggtaattggaaaagagcgagctctgtctcctcttgtactctgaacttgaaatattcattattttcctgtctgctttgttatagagaatcttggagcattgctcagatgatgaggagactcattgtataatagatgaaatattggaatctgcgtttgctcttgctcatgatcagtatgggaattatgtcactcaggtcctggttaatttcggatccattgtccctcttggaattgtcttgaaatctttttgttcttagtattgtgctttggtttatgtttttcttgtagcatgtcctggagagagggaagcccgatgaaaggagacagatcattgagaagttgacttggaatgttgttcagatgagtcagcacaaatacgcatctaacgttgtagagaagtgtttggaacacgctgatagtaccgaaagagagttcctgattgaagagataatgggcaaatccgaggaagacaatcacttgctagtaagaacaaaatcctaaagatagctctttgaatcctcctggacttattttaacactcttttgttctgcaggcgatgatgaaggatcagtttgcaaattacgtggtccagaaagtcttggagatcagtaaagatcagcaaagggagattctggtgcagaggatgaaaattcatctccaaagtttgcggaaatacacatacgggaaacacatagtagcccgattcgaacaactgtttggtgaaggtacttttctctaaaactaaaacttgagttgtcaatatgactctgctaaagaaatctgaacgttctaatatgttattgttacagagagtgaagtctcagaagagggaacagaaggttagacagaaaattttcttttgggttgcaaaattgtacaatggttgacttaaacaaatttgtattggaaaaagcttatgtatatatgcttgtatctatgaatggaa

SEQ ID NO: 143975 - DNA, 796 bp, Arabidopsis thaliana landsberg
gattgctctatattcttatccagaacgaggagagattcaaatttcgcaatgcgattctagtgaagcttctttgtcttctgtacatggttatcgtcgtaaaatggcgtctatagacaatgttttctcactcggtactcggttctcaatcccagaaaaccccaagagatcgatattgaaacacgcgattacatcgagtttctccgcgagaactcaaactcgatggagagctccaattctgcgtcggtcgtttacagttttgtgcgaattgaaaactgggtcatctagctccggcgagacgaacaattcccctgctgctgacgatttcgtaactagggttttgaaggagaatcctagccaagtggaacctcgttaccgagttggtgataagctgtataatctgaaggagagagaagatttaagcaaaggcaccaatgcggcgacgggtgcgtttgaatttatcaaaaggaagtttgattcgaagaagaaaacagagacagacaaaagcgaagagtctgtttatttgagtgatattttgagggagtacaaaggaaagctttatgttccggagcaagtttttgggccagagttatctgaagaagaggagtttgagaaaaatgtgaaagatttaccaaagatgagtttggaagattttagaaaagctatggagaatgataaagttaagctgcttacatcgaaggaagtttctggtgtttcttatacgagtggctatagaggttttattgttgatcttaaggagattcctggagtcaagagcctccagagaaccaaatggtga

SEQ ID NO: 143976 - DNA, 2107 bp, Arabidopsis thaliana landsberg
atggtgtgtggtcagtgtggaggcactacagatggtcaaacagtagcatacccacctggctatttggacaaggacaaggaagaagaaaaatcgagaaccatcttctcagccgattttagtaaccatcttcttgtttgctccgaacaatcaagagatcgaaaatggctgatgttcacaaaggaaaggtttgtgtaaccggtgccggagggtttttgggttcgtgggtcgtcgatcttcttctctctaaggattacttcgtccatggcactgtcagagaccctgggactgaatcttctctccttttactctcttcctctgtaaattttccgcctttattcactctgatgtctcgttgacttgtgtgtgcgtgcgaagtagaaagtctgttcccaaagtttgatttttttcttaatctactttctaggtgtttagattcgctagtttctgttctctcgacggataaaagccttagcttttgatttttgtttgttgttcccaaatcattttagtttgcttctcttcttttagtgtagttgttgttgttctgatgaagagtttcgcatggttcttgttatagataatgaaaagtatgctcatttgaagaagctcgagaaagctggtgacaaactcaagctcttcaaggctgatttgttggactacggctctcttcaatctgctattgcaggttgcagcggagtcttccatgtcgcttgcccggttccaccagcttcagtccctaatcctgaggtgaggatttcacttcactcctgtaatctcactggggatatataacatagtctcactctgcttccactggttttgcaggtagaattgatcgcacctgctgtggatggcacgctgaatgtgcttaaggcatgcattgaagcgaatgttaagcgtgttgtgtatgtttcctctgtagctgcggctttcatgaaccctatgtggtcaaagaatcaagtattagatgaggcatgttggtctgaccaggaatactgcaagaaaactgaggttaatgcatcctcaatccctcatctcatctcacttgttatatatcacatctttttttttgctgacttttaaattcctctggcagaattggtattgtctggcaaagacacgagcagagagtgaagcttttgaatttgcaaaacgaaccggacttcatctcgtcagtgtttgccctacccttgttttgggacctatactgcagcagaacacagtaaatgctagtagcctggttcttcttaagcttcttaaaggtatacaacaagccttatcattcacatctgggattgttagaagcagcgtggtatacatgggttggtgaatctcgggttttgattttacttttgtgtggtgcagagggttttgaaacacctgataaccaagaacgtcatttggtagatgtgcgtgatgtagctcaagctttactcttggtttatgagaaagcagaagctgaaggaagatacatatgtacatcccacacggttaaagaagagattgtggttgagaagctgaagagtttttatccacattacaactacccaaagaagtaagtaaacaaacaacacatctctctgcttagttttgtacactcaaaaccatccttgacaattttttgagcgaaaaccttttgtcttgagaacagactaattgctgtcagctcattactgatttcattcaataagcaatgacacttacctttagatcagtgttttgaagtttctttaagacctaactttgatccaacctctacttatccaatgttagatacattgatgcggaagatagagtgaaggtgagttcagagaaattgcagaagttgggttggacttaccggccgttggaggaaacacttgtggattctgttgagagctaccggaaagctaagcttgtggactgaaaacttggaaagaagagcaaaatagtgttttggcttcatatgttatagttatagtgttccattctgcacacacacacacactctctcatcgtttactcaataataagagttgtgcattcaccatggatttctgagtttttgttattttctttttagatatcattacttttattaccaatctacaattttctttccataata

SEQ ID NO: 143977 - DNA, 868 bp, Arabidopsis thaliana landsberg
agcctgcgtctgggactccaataagtggaaaaggagtagttatctgcaaatacccatctgatccaactgttgccttgggatacctttctgctgcttttctccttgcctgcactgtagcaggatacaaatccttgttcatctcttacaagggaaagtctgttcctaactctgtcttgttcaaaagcaccagcttctctgtgttcttcaacattgccttgtaagcatttcctcttcttttcaagaacacagtagctagaccattacaaatattcttggattccggtattataaagcctaataataggagtctttttgtgacctatggttattgtcgtgtaggataacatctggactggccttgtctctgttgctctggccaaccattacagaacaacttcacttgacccgtaatgttcaccgaaacttagaaaccagttgccccacggctaagaccggtctgcttggtggaggtgcctttgtgtctttggactcgtgccttttctggttggttgctctgatgctcgctgataacgcccgtgaagaccattttgatgaagttgaaagcagaagcatcgatgggaactcttcctccagggatgtgaatctcaagattgatgcttgagagaatgatatgcttttattggtattgggtataagaagggtttttcatttgttttctacttgtttgattaggaaaataataatttgtttcttctgttgttttttttttttttttaatgattggctagaatgttatgaaacccatctctgcaccttgatgcattgtgattcataagctgtatatgtgaaaaataatcttttggttatatctcttacatttgacataattgatatgagaaagcacttc

SEQ ID NO: 143978 - DNA, 2268 bp, Arabidopsis thaliana landsberg
ccaaagcaatagacgaatatgccagtctcagatcaaaggcagttgagtcaaatgagatggtgaacattgatcccaggctagaggcgattgttgaaagaatgcttggaaagtatgcaatgcttatacatttaatgctcttgttttcatagtgcttcaattcttcttacatggttttccttctgcagatgcatcagtgatgggaagtatcaacaagccatgggcattgcgatagaatgccggagattggataagttggaagaagctatcattaagagcgataatgttcagggaactttatcatattgcatcaatgtttctcattcctttgtcaaccgcagagagtacagacatgaggtgagactgatgttcttagacaatgtttaagtagaaaggtgttctaattctatcgactgattagaactgtatagttttgcctcatctggaagataatgtgaccatttagtttctatgttgcatcttccattaccatgcctgcaaacatgtatgctagcatcctctatgtcctaagctgtagccaaaagtcctgtttcagttttcgtgatacctatctgagatgtgtcaaggcctgaattaaaaaaatctcccttttctaggtcttttagtctaggctgtttagtttagtctttatttaaaaaaggtgatgacatacttgtctactctttcaggtgcttagtttacttgtaaaagtctaccagaagctgccctctcctgattatttgagcatttgtcaatgcctcatgtttttggatgaaccttttggtgttgcaagcatattggagaagcttcttcgctcagagaacaaggatgatgctttattggcattgcaaattgcatttgatcttgtagagaacgagcaccaggcctttctcttgagtgttagagatcgccttccagctcccaaaacacgtgctgtagaagcaactcaggctgttgaaacaactattgctcctaatgagaacccttcgggagatgttcagatggcagatgaaactccagctcagacaattgtgcatgagacggatccagttgatgctacatatgctgagaggctaacaaagattaagggaattttatctggagagacatctattcagctgacactgcagtttctttacagccacaacaagtaagttactgttgcagttttgatatcttcaagggatattttttcttctaaaaatcgcttattccaggaagtaatcatttgctccattgataattttgtctttctgtagatcggacctgctgatactgaagacaatcaaacagtctgtagagatgcggaacagtgtatgccacagtgctacaatatatgctaatgccattatgcatgctggaactccagtgaacactttccttagagagaatttggtaaattatttactttcactcaaatatttctgtatgtttgagtttaactgtctgtgtggcttagtgtatttaactttctttcatcattcttgttttttaatgccaggattggctaagcagggcaaccaattgggctaagttcagtgctaccgcgggattaggtgttattcacagaggtcacctgcaacagggtaggtcattgatggctccatacttgcctcagggaggagcaggtggtggtgggagtccttattccgaaggaggtgctttatatgctcttggccttattcatgctaaccatggcgagggaatcaagcaatttctacgtgatagcctacgcagcactaatgttgaggtgattaattaatatcttacttcaatatagtcttccgttatatcaccaaaaagatagtcttttgtttagaatgattttcattaaaaaaatatggttgcaggttattcaacacggagcttgtttaggtcttggtttggctgctcttgggacagctgatgaagacatatatgatgatatcaaaagtgtgctttacactgacagtgctgttgctggtgaagctgccggcataagcatgggtctattgttggttggaacagcaactgataaggcaagtgagatgctcgcttatgctcacgagactcagcatgagaagataataaggtaactaaagtctggaatatatttttggctatgtgtgtgggtgcatggtaatttatttcaatgttttaagtaaccaacatctggttttgtgtttaggggattggctctaggaatagctctcacagtatatggaagagaagagggagcagatactttgattgagcagatgactagagggcaggatcctatcatccgttatg

SEQ ID NO: 143979 - DNA, 1001 bp, Arabidopsis thaliana landsberg
aacagaaaacgatgactaacttctcccgatccaaatccaccggaactatcgggttcccggagtttaaacccactcgacccggtccagacaaatacgagaacatccacaacgatgacgacgagtacgaagaaggacatagcactacgagtacagactactacgacgcttcaacgccgttgagctcacacgcgtcaagatccgggaacgggtccggctcgggtcagttaacggtcgtagaccttcttgcggcggttctgaggaagtcgttggtgatgtcgtgtgcgatggagagaggggaagatgacgtggtggcgtctatggatataggttggccgacggaggttaagcacgtgagtcacgtgacttttgatcggttcaatggttttcttggtcttccttctgagctcgaaccggaggttcctcctcgagctcctagcgccaggtccgttattaattaattattatcccaaagatgagtaatattccaaacaaaaaatgaatttaatattttattccatatatattgaaaaaagattatgatatgaggaattaaataaatattttcctagctggaaatctgtatatggcatgttactgtgttgggtagaatcattaagatggttgttgtttggatttaaatgcatgattacgacactcgtttcttcacaaaagaagattctctttttgtttttttttctctcttcaaagattttcaatggtatgtaaagtcaataaccatttattcaaacaatgaaactatttagacataaatttggtctttaatcaactcatgaagtagtggttgaatgacacatcctggaattggggattagtgtttaagctttcacaacataatgatattatttttgggctttccctagagattggtttgtatgatgatacatggagctctaataagtttggtttgtatagaagatacaaacttttgggtcctatggagatatactaacagaaacacgattacacaacaaatttctcat

SEQ ID NO: 143980 - DNA, 723 bp, Arabidopsis thaliana landsberg
tgtgctctacagtcacatctccacctctcctctccaccgtatctcctccgctaccgccttcactcacgtactccatagccgttacgaatctaaagaagatctagcctcctacgctgcacatccagatcacgttcgtgttgttaaggaatctgtgttaccgatctgtgatgatatcatggctgttgattggatcgctgatcgaatccccggaaccgtagcgccgcttcctggttcggttgctaaactcacattgctcaaattgaaagaggatgtagcagatgaggcgaaatcggagattacgggagtgattaagggactaagtgagaaatttccagggattgatcagattactgttggagaaaacttttctcctgctagagctaaaggtttctctattgcttcgattgcgtatttcaaggatttgagtgaaatggaagctgtggatgctcagaaagagttggtgaattcgcaaaaggataaggttcgtgattatgtggattctaccattgttgttgagttcgttgtgccgtcttcttcacagtcttctagtctgtagaaagtttcaatttcaatcccttgaaagctttgggacctgtttgttatttgagaataaagaaacttgagtgtgatgatatatgcttctgtttcattatcttcttatctctcggtgaggaactctgttggaataagaatttttaagcactaagaaactttgagcaatca

SEQ ID NO: 143981 - DNA, 879 bp, Arabidopsis thaliana landsberg
tttgattcaagcaaattaagaaaacatttaagcttacaacccgtggaatctactacttctcctggtgggaggcgtagtagacccagggatcagaggagcttgcagcaaaatgatggccaacttagccaaatgagcaataaatctaggactaaaatagaagccaccttgagtatcgaaaatggtggaaagagcccatctgttatagaggcagccaaagctgtagtctctaacttaatacagaatgtgagttgctcttttctcatgctactgctaaaatttttggtactttaaaaaagtttcaactgctaattctctacacatttgtttcttaactgctaattctctacacatttgttttttttttactcagaagtccagtccaacgtttagtgaagatggatcatcagaacatccaagtccagtttctgttctcaatgcagaaatctaccgagagatcgaaccatctcctgtgaaaatccaagctagtgaaggcagtaagacttctctttaagagtctatatacatctttattggaaaaatgcaaattgttttatgttttcaatcatcttgtaacaggtgttaatggctctattaactcgggtgttgaacattgcgaggaggaccagtggaatccagcttatagcttctcaaagacaacaacaagcttttcgccagagatgaaccgaaagaagcttcagaatgttgagcatttggttcaaaagctaaaaagactaaactctagccatgacgaaaccagtcaagattacattgcatctttatgcgagaacagtgatcctgacaccgatcacagatacatttccgagattcttttagcctcgggtcttctcctcagagatcttggctcaagattaacaactt

SEQ ID NO: 143982 - DNA, 910 bp, Arabidopsis thaliana landsberg
cttgcaggtaatgagggccgtgagtatgttctgcggcgtattcttcgtcgagcagttcgctatggaaaggagatcctaaaagctgaagaaggatttttcaacgggtaggaaattatgtttgattttcgttgcatgttttgtttgaatattgtttcaaatactgtttcgttgtagctggaacgtttatttctgtcttgtatctttataaatgagcatattttttgacacatgttttatctcgggctttcatattacctgtaggcttgtaagttctgtcattcgggtgatgggcgatgtctttacagagttgaaggaacatgagaaaaagatcacagatataattaaagaagaggaagcaagcttttgcaagaccttggcaaaggtaagggctggatttaatttccgtcaaagctttgaacctcttatcttattttgttttgggttcttctggctcgtcgcactgaagtaaaagagacagttcacagcttcaatcagtggcatgtgatatttctgtatagattgtttccaatttcatcattgttcagttttaatgatggttagacataattatagtattttctatagggaatcttttttctgaaagatgaattggctttacctggtcgttcctcccttttttatgtgaataggtggtgagtataagaacagttagactgattataaattttcacggcagggaattgagaaatttcggaaagctggacaggcggttcaggggaatacactgagtggagatgtacgtatcgaattatttttgtgatgtatgttaggtgttgcagtattttcatctgggatgtttgaattccatctcaacatgttgtcttctctttgcaggatgcttttatcttatgggatacatatggtttcccgttagatttaactcaggtac

SEQ ID NO: 143983 - DNA, 834 bp, Arabidopsis thaliana landsberg
gatccaactgatgatggtctgattacattacttcccttcttagagacattggctgatgccaacgatgttcgtcctgtcattgccaagagattcggtaacaaggaataagaaatctcttccttttgtttccactatatcttgattgcagattctggatttctttaacagatttagtcatagactagtttagttcctcaagacttcttaggtgctatttaattagtgaaccatagaataatgctcggtgatattagtacacaagtaaagcgtaacccttgttttagccaggataatagatcattgaaatcttaagtgttctaaatgtacagttggtgaagctgagatactgaatgtataaaagtgagtaactattgagtgaaatatcagttttggaggttaacaacagccattatctccttgtggtaaattcaaactgttggttagatctttgtactactgcattgtcagtaatataaatgaagagaggttcaatctggaaccttctttttcgtgaatttatcgaattttctagcttctgtggtctttcataaaggaggaatatcgtatatgggcgcccggatctggtggttctgtggtattataataagctatttaatctataactctcagtaaaagtttcatgattctgttggcatggtccttattgtgcagatcattcaacaagaagttcttttgattaggcgtaaggaagtgacctgactattgttcttctctgtgttaacttgactcttaaggttttgtctaaggtcttaagctccctgacaaacttgccaatatgtacatctttacaatgttaacttgttttcattaaca

SEQ ID NO: 143984 - DNA, 579 bp, Arabidopsis thaliana landsberg
tccacaagaacaactgaaaaaaggaaaagaaagaaatctataaaaaaaaatggattttcagacaattcaagtgatgccatgggaatatgttctagcttctcaatctcttaataactatcaagagaatcatgttcgttggtctcagtctccagattctcacactttctctgttgatcttcctggtaattataattacttattttctcactttattcattaccacatattgtaaagaataaataatcttggataatcttcatttttttgtatgtgttctgttttttttgtttgttcacttcccaaccagggttaaggaaagaagaaataaaagttgagatcgaagattcgatatacttaatcatacgaacggaggcaacccctatgtcgcctccggatcagcctttgaagacttttaagaggaaattccggttgccggaatcaatagatatgatcggaatatcagctggttacgaagatggtgtgttgactgtgattgtacccaagaggattatgacaaggaggctcattgatccttctgatgttcctgaaagtcttcaacttcttgctagagctgcttaa

SEQ ID NO: 143985 - DNA, 802 bp, Arabidopsis thaliana landsberg
attgctgggcggtcccttttttgtcttggcttgcttattcgccatggaaactctcttattagtacctcaggtggcaagaatttcaatctctctggctgtcttaatttgtttaaacgacatctccgaacggaagatattgctttgaaagtcaggtcgctgcaggtatggtgcttacagtgctagctgttgcacattctcgatattgtgatatgttagaataacagtgtccccaaacttcccgtaggctttaggattcatcctaattgcacgacctgagtacatgttggaagaagacattggaaagataatcgagactacattagcagatgaagcaaatgggcgtatgaaggtaatattacccatctatgtatgttttctatatatggtgtacatgtttttttgttttacgcttacatatggttgcatcctttttttaatgctcatgattcagatgcaagcattacaaaacatgtatgaataccttcttgatgcggaaaaacaattgggatcagagaaagccagtgataacacggttaactcagttgaacaaggtggccataatgtacctgtggccgctggtgcaggtgacaccaacatttgcggaggcattgtgcagttgttttgggataaaatattaggtagatgcttggactttgatgatcaaattcgccagacctctctcaaggttcgccttttttttttcattaataatttttgcttctgcatcttttcacttgtctgaattattgagaggtaaatgtttcgcagatagtggaagttgtactacgtcaaggccgagtgc

SEQ ID NO: 143986 - DNA, 1114 bp, Arabidopsis thaliana landsberg
gaaaacataccaagccggttagtttggattcagatatgtcaccacctcgcaaaaaaaaagccaggaatgattcgccttcaccagaacctgaagctaaatatctgagtgaagatctatctcctcctcgtaggagacatgttcattctccatcgcgtgaatctagcagaaagcgttcagattctgttgagttggaagatgatttatctccgcctcgcaggaaaagagatttacatggttcacctgtctcagatgtaaaaaagaagagcaatgatctatctcctccacggagaagaagatatcattctccatcacctgaaccagctagaaggtcttcaaaatcttttggctcgaatgctgatttatctccacccggccggaatataaatatgaaggattctcaagactcagatctttcgcctcaaagaaaagccgcagatctgccacgtttttctgaaaatgtgtccaggagttccaattttgatagctctcccccgaggagacctcgcaaagattcatcacctcctcaaataagcaaggagcaacgaaagaccggattgattagtggcaaagacattggaagtgaatatcgaaagaaaaaggaggatgaaaaattgaggtaattatcaaaaagtagattaagctttttagaatctgttactgcattttagttataggcatcaggtttgtttcagtttcagtagtattgggccaagagtagtttcctatttccttgaagtttcatgttgcccacttcctaagtttctaagattttgtcttctgtgtctttaaatagggaattcataaagagaccagtcttcagtaacgatgatttgagattcgcgattgcatgtttttaggctaccatctttctgacaaattatactcttctacaggtttaaaaatatggattccgagctaactggtcaaaacgcagaagcagtgttccgtgacaagatcacaggtgaggactataggtccctagtcgttataagttgcagtaagaatgcataatctcatgtctcacacccagatacttattgatattgcagggaagcgtatatcaaaggaggaatatcttaaatcgaagcaaaaaaaagtgatagagaagccaaag

SEQ ID NO: 143987 - DNA, 909 bp, Arabidopsis thaliana landsberg
acaggtgttcttttcgatctcctttgtgcccaacccgaaagaccatggaatctcacggtaatttttcagattgaactttgtattatgatcttaagtaagcctgagggaaaaatattcttgtaatctaagcttaagtggacaatgttaatgatccactatgtcattctcttattcttgtaagctgacactcgtaagtatgttattaacaagatctttcaccagtgtccctcttgactagctaattgcacaaagcttacctccttatatctttgcatttcttgagcttttctgaaaattttgcttgcagatacactttagaggatatcctagcaacatactgataccatgtgaaggagaagattctgtaaaatggaactttgttaattctttgaaagaggttagtgaaaatttcttcaaagtttatgactttcttatcattttaagtgaaagtctatgttcaaattattttcgaatagactataaatactgttctattggatttcacatcgtagaacagtgaaatatttgttacctttgggagtgtttctcttttgttataagagtggttttcttcaacatattgatgatgtattgtctatataggtgtagctgcgtatatccgcaaatagtattgttagtaatttgttagttttgctgcaattggtttgccattatctaacgtaatacataggcttctcttgtgttatatttttacaatgctccatgccccaagtaaagaaaaaggataaatgataagacgttttgacatatgtgagatactgttatccgcttatcctgcaggcacaatatatcatcaatggaaattgcaagaatgttatgaacatgtctcagagtgatcaagaggatctatggacctctgtcatgaacggtacgagtggacgatgttag

SEQ ID NO: 143988 - DNA, 651 bp, Arabidopsis thaliana landsberg
atgatggcgaggaagaaagaaaccgtttcaatggtcgccggttcttacggttacattgctcccggtaaggtttaaataccataccgattactaaattgattacaatccggtttagtctaacaacatatggttgatcatttgcagagtatggatacactttgaaggtggatgagaagatagacatatacagctacggcgtcgtactattggagctgttaaccggaagaagaccattggaaccggagtttggagaatcagtagacattgtggagtgggtgagaaggaagataagagacaacatatcactagaagaagcattagatcctaacgtaggaaactgcagatatgtgcaagaagagatgcttttagttctacagattgctcttctctgcactacaaagctcccgaaagacagaccttcgatgagagatgtgatatcgatgctcggagaggctaaaccgaggaggaaaagtaatagtaatgaagagaacactagtcgtagcttggccgagaaacattcatcggtttttagtacttcacctgtaaatggccttctttagtatgagatttaagaatcaaaagaggccgataaactgattcgttcgattcgtgttctgtatgtagaagaaagagagaaagagagagagatat

SEQ ID NO: 143989 - DNA, 1349 bp, Arabidopsis thaliana landsberg; identical to SEQ ID NO: 6063

SEQ ID NO: 143990 - DNA, 1305 bp, Arabidopsis thaliana landsberg
atctgttgttatgcactgcacaagattaccctttgaagcatttgctgctacttcatcaaaccggcttcttgggaaacattcattgcctttgagagcagctttggttacttcgaaccctttaaacatttcatcttcctcagttatctctgatgccatttcatcttcctctgttatcactgatgatgccaaaattggtgtcttgttattaaaccttggaggccctgagactttagatgatgtacaaccctttttgtttaacctcttcgccgacccggtatagtatatctttctctgcatccttgaaatgtttttgattaaaaatgtttttgattgtgtaaagatacaatctttgtctgtttcatacgacttatgttcgttactcaatcttttgttaggacattatacggttgccgccggtattccagtttcttcagaagccattagcacagtttatatcagtagcaagagcacccaaaagcaaggaaggatatgcatctattggtggaggttctcctcttcgccacataactgatgcacaggttagttataatatgccaatatgatcttggttactctgcttttcttatcctcttgtcattttagaagcttttctctctgttttgtccaagtttcaagtactgaaatcaaaacgggttagttagtgtaccaaatttcaagaacaatattgtcttttgctctgttttgtccaagtttctccttgcttgcatccaagtaaaatggctagttataatcccaaagtgtttcagtttgctttattttgtaaatcgcttgtgcttgtgtgagacacctcaacttgagagtagtatgttattgagatgacgcaaaatttatacattcttatgttgtacctgttatactttcaccaggctgaagaattaagaaaatgcctttgggaaaaaaatgtaccagcaaaggtatatgttggtatgcggtattggtatccgttcactgaggaagccattgaacaggtatgttgaatatggtgtttggtagtatcttgatttaaggctaaaacacaaagttttcttttcgtatttgcatcttcaaatatttgcttacatttaaagtaaaccactacattctgtgtttttatcaaacagcatttgcaaaataatgattgaagtatgtgtgaacacctggagtttgcactttgtgagtcttactcgttttctttatatatcttgtttcagacaaaaagcgatggaattacaaaactagttgttcaaccactaaatcctcaattttctatatcaactagtggttcaagcctaaggctcttggcaa

SEQ ID NO: 143991 - DNA, 429 bp, Arabidopsis thaliana landsberg
cttcatgggcaagtcggcaagacttcgccggagccagacctcatcgccggagaatgtcttgttgggtaaagatagctccgatgatccttacagatccgactcagagactgaatcaaactcgagctccgggaccgagtcgaacatgagctctgactctacaacttcggcaggagtgtcggcgatgatacgagtcttgtctgattctctgcttcgaacggaactcgcggagatggagatgatcaaggctcgtgaagcagcgaggttggaagctgagaagagaaggttggaaatggaagtcgacttgactcagatggtgcttcagactcatttgcaagcgatgtcgtcgttacccgtcggagaacataagatttatcaggcacagaggaagaggaagagatcagacgttgaagaactcgagtcctctacaag

SEQ ID NO: 143992 - DNA, 464 bp, Arabidopsis thaliana landsberg
atggagccaatggaatcttgtagcgttcctccaggatttaggttccatccgacggacgaagagcttgtcgggtactatctaaggaagaaaatcgcatcgcaaaagattgatctcgatgtcatcagagacatcgatctctacagaatagatccatgggatctacaaggttacttaccgaacaccgtgagatattttactttggttaaggttttattgattatcaccttaaattttaaatgttacagaacaatgtcgaatcggttatgaggaacaaaatgaatggtatttttttagtcacaaggacaagaaatatccaacggggacaagaactaatagagcgaccatggctggattttggaaagccacgggaagagacaaagctgtttacgacaaaacaaacctaattggtatgaggaaaacacttgagttcaacaaaggacgtgcacctaatggcaagaaatccg

SEQ ID NO: 143993 - DNA, 1854 bp, Arabidopsis thaliana landsberg
ttgtaagacttatgggtcgtgctgcttcccacattacgcttgagtgtgctttacaaactcacccaaacataaccattattggagaagaggtaacgtttttggttgacttcaattcaaattaccgtaaagatatctgaatcttaatcgtgtagatgatagaattagactgcaaatcagattcatatttgtgacacttttccattgaagcaaattattcatttcaatatggggttattggttcagagagacctcacacatgcctcattagatcagtttatatttactcaactttgatctggaaatacttttttgcaggtttctgcccagaagcagactttgaagaatgtcacagactacatggtggatgttatctgcaaacgtgctgaacttggttacaactacggtgtcatactgattccagaaggtctgatcgactttattcctgaggtgtgttgtcattgtaaaaaaatagaatctactacttttaaaccgattaatataaatgttctttttaactgatgattaaatttatttaatgacttctcaggtccaagagctcattgctgaactgaatgaaattctggcaaatgaggttgtcgatgaaaatggtttgtggaagaagaagctcaccgagcaatccctgaagctgtttgatcttctgcctgaagcaattcaggaacagctgatgcttgagagagacccacacggaaatgtccaggtaattgatcatggtcctgtctcctcgtactaaatttccaccacaatgcagttagcttcatctctcacaaatcattattaataataccatgtcctcatctcaataggttgctaagattgagactgagaagatgcttattcaaatggttgaaactgaattggagaaaagaaagcaagctggtgcatacaagggacaattcatgggacagtcacatttcttcgggtaagttacgcaatttgttctttcagttaaaccaaatcgttatataatacattgcttatttattgatgtgaataatacaagcttgatttatggtttgtaatcaacttgaatacaggtatgaaggaagatgcggcttgcccacaaattttgatgccacatactgttatgcacttggttatggcgctggagtactcctcaacagtgggaagaccggactaatttcttcggtttgtactccaccatttccactaaaatctgttttccatctgtgatcataatagcctttggtaaactagcatgtgcttagaatgagatgagttaacttattggcgcaggttgggaacttggctgctcctgtggaagaatggactgtaggtgggactgctctcacagccttgatggatgtcgagaggagacacggtacagaaatataaatcaataaagcttactaagacacattttgaaatctagatattaaaaaatcagagttgatttcaacttgcaggtaagttcaagcctgtgatcaagaaagcaatggtggaacttgaaggtgaccctttgattcccttcccttttcatagttttcgattggcggttagattgtcttgctgactgtctttttgagctctgcaggtgcaccatttaagaaattcgcatcactgcgtgaagaatgggcattgaagaaccgatacatcagcccaggtttgttgcatgtttcttgtctttttttgacataccgactgttgagtttgagattctaatccctccgcgggaatgttatcgactggcacgacctatccaattcactggacctgggtcagactctatcagccacactctacttgttgaactctgggctcactagtccctcgactaaccaccatgtcctatgcttttctgacccccttggaatt

SEQ ID NO: 143994 - DNA, 1973 bp, Arabidopsis thaliana landsberg
aaggttaaagtggaagaagctgctacgacgacgacgtctattaccaagaggaagaaagagatcgatgaggatttgactgacgagtctaggaacagtaagtacaggagatcgggagaggatgctgacgctagtgctgttaccggtgaagaagatgagaaaaagagagctagactcatgagaaaccgtgaaagtgctcagctttctaggcagaggaagaagcattacgtcgaggagcttgaagaaaaggttaggaatatgcattctacgattacggatttgaacggtaagatatcgtatttcatggctgagaatgctactctaaggcagcaattgggtggcaatggaatgtgcccgcctcatcttccaccacctccgatgggaatgtatccacctatggctccaatgccttatccatggatgccttgtcctccttatatggtgaagcaacaaggatctcaagtgcctttgattcctattcctaggttgaaaccacagaacacccttggaacatccaaggctaagaagtccgagagtaagaagagtgaagctaagaccaagaaggtggctagtattagttttctgggtcttctgttttgtctatttttgtttggtgcattagctccaattgtgaacgttaattatggaggaattagtggtgctttttatgggaactatagatctaattatattactgaccagatttacagtcagcatagggatagagttttggatacatctcgtagtggtgctggtactggggtttctaatagtaatgggatgcattgtgggagagattctgatcgaggagctaggaaaaatatatctgcaacagagagttctgtcactcctggaaatggtagtgagcctctagttgcatcactctttgttccgaggaatgacaagcttgtgaagatagatgggaatttgattatcaattctatattggcgagtgagaaagccgtggcttcgagaaaggcttttgaatcaaaggagaggacagctgacttgatgatctctaaagattatacccctgcactgcctctacctgacgtgggaaggacagaggaattggctaagcatctctatagatctaaggctgaaaaacagaaagctctatcctctggctctgctgatactctgaaagaccaagtcaaaacaaaagcagccaacggtgaaatgcagcaatggttccgtgaaggtgttgcaggtaatcatgggtttttgatcttactttctgttcccttgacttggttatgtaggcaggcattgtaggtatactagtccttatcatatcttgatattagacacaagaacattttaatgaggcttaacttaccttcagcaaatctctggtcatgagtagatgtattgtataatctggattagatactaaacactaataaggaacatgtgaaattgttactcatattgtatatttttcttcatctttctcggcagaagctgtaagcgcagtagtagcgtttatatctttcttgttcactaaataataacaccttttttgtttgttaaatgactatattgtaggtcccatgtttagttcagggatgtgcactgaagtgtttcagtttgatgtatcctcaacctctggagccatcattcctgcagctaccaacgtctctgctgaacacggtaagaacaccacagacacacacaagcaacagaacagaagaatccttcgtggtcttcccattccactcccaggatcagattttaacctcacgaaagagcaccaaagaaacagcagtagcaaagaaatcaagcctgcttcatcaatggttgtatctgtgcttgttgatcccagagaaggaggtgatggagatatagatgggatgattgggggaccaaaatcactgtctcgagtttttgtaatcgagcttctggacagtgcagagtatgtaacatactcctgtgtcagacctcgatcaggagctcttcatcttgtggccgcttga

SEQ ID NO: 143995 - DNA, 850 bp, Arabidopsis thaliana landsberg
aggtggcaaattttgaatatatagatgaaaatgaggcagcagcattagaggcacagagagtcgctgctgaaagcaaatcttcagcaggcaattctgatagagcaagttattgggaagagttgttaaaagataaatttgagctgcaccaggctgaggagcttaatgctcttggaaaaaggaagagaagtcgcaagcaggtttggtctcttcttgatcccccttatccaattgtggcatcatattgataactggatttttcaccatttatgttctttctgattctgtcctgtttcatatatttattcatgttgtctaacttttccttttgaattccttaggtagctaaattcagaaagtaataatttagttgactgtatccttctaaattgagaaagtataatttagttgactgtatccagtataaaactaaacgcccttgtcctcctatcaactggtttgacagatcttacgggtttacatgttggatcaagtaattggggttggtagaggctcaattaactatagtcttctgttttcctctgcaagaaatacgttttgtttcactctctaacttgatatagctcaattactgacaatatacattggtttggtctgccatcatcgtttcatgtctttcaataaaggctgttctaattcttctatgggatttttttcatagttggtatccattgaagaagatgatcttgctggtttggaagatgtgagctctgatggagatgaaagttatgaagctgagtcaacagatggtgaagcagcaggacaaggagttcagacgggtcgacggccgtacagaagaaagggtcgcggtattaccacgtttcggatttaa

SEQ ID NO: 143996 - DNA, 2099 bp, Arabidopsis thaliana landsberg
caaaaatttcaatccgatttgaataatttctgttttcttatcggaacaaaaaaatctccggcatctggaatctccggtgattttgtcaatttcgaagaaatttgattgaaatggaggcgagaatcggccgatccatggaacacccatctacacctgcgattaatgctccggcgccggttcctcctccttctacgaggcggccgagagtaagagaagtgagctcgagattcatgtctcccatttcttcttcttcatcgtcgtcttcctcttcttccgccggagatctccatcaattgacttcaaattctcctagacatcatcaccaacatcagaatcagagatcgacttcggctcagaggatgagacggcaattgaaaatgccagagggagacgagaatcgtccttccgagacggcgcgtagcttagactcgccttttcctcttcaacaagtcgacggaggtaaaaaccctaagcagcagattcgatctaagccgttgaaagagaacggtcaccgtctcgacacaccaacgacggctatgttgccgccaccgtctagatcgcggctgaaccaacagcgtttactcactgcctccgctgcgactaggcttctccgatcaagcgggatctcgttatcatcttctacagacggtgaagaagataacaacaatagagagattttcaaatccaacggcccagatctgttgccaacaattagaacccaagcaaaggcctttaacactcccaccgcctcaccactttctcgatccctgagttccgatgatgcgtcgatgtttcgagatgttagagcttcattgtcgcttaaaaatggtgttggtttgtcattgcctccggtggctcctaattcgaagattcaagccgatacaaagaagcagaagaaagctttaggacaacaagcggatgtgcattctctgaaactgctccataaccgttacttgcaatggcgatttgcaaatgcaaatgctgagatcaaaacacaatctcagaaagcacaagctgaggtcagtttctatagctctgagaatcagaaatttgatagcttttacatatagatcaatgtttgacacattaacttcagtattagtgatgaatgttgtttaggtcagattctttttgatgatggtgatcttatggatgctgtaatttttttttcttgcagagaatgttttattcacttggtttgaaaatgtcggagttgtctgattctgtagagaggaaacgcatagaactccaacatttacggagagttaaagctgttacggagattgtagagtcacaagtaagtaaagatcttaaatatcgtagatttcacactatttttacatttatgaacgtttagagcaattgtgtagtttccttgtaataattggtgttaaactacttttaactctatgcagactccttctttggagcaatgggctgttcttgaagatgaattctcaacttcactatcggaaacaattgaagctttgttgaatgcttcattgcggttgcctctcgattcaaaaatcaaggtatatgttgtgttggtcgaaatcaactaggaaaaattctattcctttttaccttttgtactaaaacatttggattttgcttctcaaaaccaggttgagactaaagagctagctgaagcacttgttgtcgcttcaaaatctatggaaggcattgtgcaaaacattggaaatcttgtgcctaaggttagtaaaatacagtcaatgtgcttcacattaaacatgaacaaaaacaaagttcctacacacgcaaatgttgaaactgaaacaacttcaatggttccttttgcagacacaagagatggagactttgatgtcggaattagctagagtaagcagcatagagaaagcatcagtagaagattgcagagttgcactgcttaagacacattcatcacaggtattaaaacttgtactgtttgggggacataaccatttgtttcttttcagtttctgaaatcctaaagtgttttttcttctattctgcagatggaagaatgctatcttagaagtcagcttattcaacaccagaagaatgcatatcagcaagagtgcacaacttctgtttga

SEQ ID NO: 143997 - DNA, 1913 bp, Arabidopsis thaliana landsberg
acaacatcttcttcctcgttatcttcaacctaccctttgtcttaccttgatcctctctctctctttctctcgccaacacaaggttctctccgatttctcttcttctcattcaatgtctcgtcttctacttttctcgatttccagttgaatttttctggggatttaacaatatgtgtttattttcttcttctttagtcggtttattgtgcggtggagagtttctcactctcttcttcttaaccatcggaatttcttgagctcgatttttgtctaattctagtttttggttgacccaagtttgcttcaagaaatttttggtgctctttcgatttctctagtatgaaatgttctcttttgggtcaatactccaacactttccatgtgaataattatatgattgcgaatcttaggtttttgggttccattgagctcacttacataacatggactcatggaatttggggaaaatgggttccattagatcttgcaggtgttttgcatattattttagcaagtgaacaagattgccacttgtggctgagacgaaatgtgccataactttaatatcatcttcttgctgctgggcagatagttaaatgaaaggcttcaaagactgggttttcgctctatccaactcaatggcatcatctagaccacttttgggaagtgacccttttttccgtgaccctcatcaagaacaagataaccactgtatggtatctcttttccttccgtgtatcctctgtttgtcttctgaacgatggatgatgcacttgatttatgggtttatatgttacaatgaaaataaacattgtgagttgggtgtggatatatattacattattactacctcttaaactgatctacttaacctctccttgtgctctaccatatcttctttaggcccgtttattgaaatgtctaaaaagtacttcatgtgttttgcttgaagatttcgttgctttacattgcttttcaaattgaaaattggacttttctttctgatactttagcaaattcttgagattatccaggttgattatatgatcaatctcacaagtttctcttcttcctgatgtattatttgactaataataactttcaatttttattttcagctcaagcacctgccgcaccacaaccagtgacactctcggaaccaccatgttcaaccagtagtgatttagaaattctgcctcctctctctcagcaacaagttccacttgaaagcttgtaccagtcaagtattgatcttaacggaaagaaacataatccactagcaaagattggtggccttcaagtgcagttcttacgccttgttcaaaggtttgggcagtcacagaataatattctagtctccaaggttttgtatcgggtacatcttgcgatgctgatacgagctgaggaatcagaacttaagaatgtaaaacttaggcaagatagggccaaagctttagcaagggagcaagaatcatctggcataccggagcttgatttctcacttagaatccttgtcctggggaaaacaggtgtcggcaagagtgcaaccataaactctatttttggtcagcccaaaagtgagactgatgctttccgaccgggcacagatcgcatagaagaggttatgggaactgtcagtggagttaaagttacctttattgatacccctggttttcacccactgtcatcttctagcacaagaaaaaaccgaaagattctcctatctattaagagatatgttaagaagcgtccacctgatgtagttctttacttggaccgccttgatatgatcgacatgcgatacagtgatttctccctcctgcagcttataactgaaatctttggtgcagctatatggttaaacacgatacttgtaatgacgcattccgcagctactacagaaggacgtaatg

SEQ ID NO: 143998 - DNA, 726 bp, Arabidopsis thaliana landsberg
gccgaagcactagcagtagaagaagcaaaggaaaacaatatctcagtcgatcaaagggaaaacggtcagctagatatctatgttaaatgggaaacagctgctgataaccctcgaaagctcataacaacactgagagttacaaaggatgcaacactagctgacttgaggaagcttattgagatctaccttggatctgataatcaggcttttacctttctcaagctcggggtaataaacttgaaccaacaagcacaaaaagcttttcatttttatctgtttgttatgctctgatcctaaatgcagttatttcaatgtatgaaggaaccatgtggagctcaagtggcaaaggagaaagaatcaacagttcaagctacgagcctacctctctgcaacggacacgcatacctcgccactttgagaccaggaaagagctcacaacataaaagtcttcaacctgcaagcccacttccacttaatcccatagaaaacatgatggaagttacccccatctcaaaagtgacaccgaaccatcaagttgatgaattttcatcacccaatctcgtagctcatctcagctccactccattcatcactctcagaagacattagtcgctatgtcttgttttctctattcttcttttgtctgtccaaaggtagcttttgaaagatgtagcagcctttgtctatttctctgtgttgagaaaaaaaaaactcttatgtacgacc

SEQ ID NO: 143999 - DNA, 2325 bp, Arabidopsis thaliana landsberg
  unsure (1)..(2325): unsure at all n locations
cgttattgtgataatgataggccgggatcgttnnnnnnnnnnnnnnnnnnnnnnnnnnnatcaactcctaaaactgctcggaagctcaagacttcagaatccgaccctgtctcgtctcctaacacgaaaatcaggacaccgaaaactcaaagcccaaaagtagttgctgatcgccgttctccaagaacccctgtaaatgaggtacttgtagctttgcacaatgctttgtaaatcaatgcctttatatgatttgactcacacttgtctcagttgtccactttttagcaagaactactatagtgttgttgtcttttttgagcgcccaaaactcaattatagtgctgccaactgtcaatgatactccttaatgacgagaatatttgatggattcaatgatcgaaaccattgtaaatggccacgtctagaatcttactttgtaagaccgccgctactatacaatgccatggagagagatgtcgaattatcatattctacatggtaatcagagcataaaacggtactcattcggctgctttctcgtcttctacttctttcctattcaacactaactgctgttagggtgtttgaagttcaaaccttgaaagttgttgattcaggagtctttgcaagaaccctaaacctagagggttaggcttcttgttttgttctgattgttacttttgtggcttgttacttgatatatgtgaaagtgatatgtgatgcatctgttgcgtagttgagttgttaatattcattgttgcttttttatgcaagattcagaagaaacggacaggaaaaacacccgaattggcatctcagatatctcagcttcaagaggagctaaagaaggcaaaggaacagctaagtgcttcagaagctctgaagaaggaagctcaagatcaagcagaggaaacaaagcagcagttaatggagattaacgcctctgaggattccaggatcgatgagcttcgcaagctctctcaagaacgagacaaagcgtggcagtctgaactcgaagcaatgcagagacagcatgccatggattccgctgctctatcatctaccatgaacgaggtccagaaactgaaagcacagctgtctgaatctgaaaatgttgagaacttaaggatggaacttaacgagacgttgtcacttgtcgagaagctcagaggtgagctgtttgatgcaaaggaagggaaagctcaggcgcatgaaattgtgtcggggactgaaaagcaattagagatagccaacttgacgcttgagatgttacgttcagatggtatgaagatgtctgaagcttgtaattcactaacaactgagctagagcagtctaaatctgaggtaaggtcactagagcaccttgtgagacagcttgaggaagaagatgaagcccgaggaaatgctaacggggactcatcatcagtggaagagctcaaggaagagataaatgttgcaaggcaagagattagccagttgatatctgcagtggaagtaacagagagaaggtaccatgaagagtatatccagagcgcgttgcagatcagaactgcttatgaactagtcgatgaagtcaaatccggatatgcacagagagaggctgagttgggggaagaactgaagaaaaccaaagctgaaagagattctttgcatgaacggttgatggataaggaagctaagctcaggatactcgtcgatgaaaacgagatactgaactcgaaaatcaaagaaaaagaagaagtatacttaaacttggagaacagcttgaaccagaacgagcatgaggataccggtgaactcaagaagnnnnnnnnnnnnnnnnnnnnnnnnnnnnnnnnnnnnatggacaaggagatggagctacagagcgtaatgtcgcaatacgagagtctcaggagcgaaatggagacaatgcagagtgagaagaacaaggctatcgacgaggccttagcaaagctcgggagtctgacagaggaagcagataagagcgggaagagagccgaaaatgcgacagaacagctaggggcggcacaagtcaccaacaccgaactagaagctgagctgaggagactcaaggttcagtgtgatcaatggaggaaagcagctgaagccgcagctactatgctctctggtggtaacaacaacaataacagtaacgggaagtacgtggagagaacaggatcgttagagagtccgttgaggaggagaaacgtcaacatgtcgccttatatgggtgaaactgatgatgaattgtcatcaccaaagaagaagaatggaagtatgctgaagaaaattggtgtgttactgaagaaaagtcagaaatga

SEQ ID NO: 144000 - DNA, 565 bp, Arabidopsis thaliana landsberg
cgttgacggaaaatttgggagagaatattctcgatgggaaaaggaggaggttgtgttccgagcaagaagaagaagccggccaccaccggcgatggtcccggaatcgatgatgataacgacgctactaatgctccgatccaaattgacgatgatcaaaccaccattgacggcgatcgaacaacggcgacgaatactgcaggaacaacaacaccagcgattactactacggctgctaagatctcgtcaccgctcaagatcttcgtcgtgttctattcgatgtacggacatgtggagagcttagcgaagaggatgaaaaagggagtggatagcgtcgaaggagtggaggcgacgttgtacagagttccggagacgctttcgcaggaggttgttgagcagatgaaggcgccggttaaggatttggagattccggagattacggcggcggaattgacggcggctgatggatttctgtttggatttccgactaggtatggttgtatggctgcgcagatgaaggcgttttttgattcgacgggatcattgtggaaggagcagagtcttgctg

SEQ ID NO: 144001 - DNA, 456 bp, Arabidopsis thaliana landsberg; identical to SEQ ID NO: 73683

SEQ ID NO: 144002 - DNA, 251 bp, Arabidopsis thaliana landsberg
ctaacaagaccaatgggcgaaggatatattcaatatctacggctttctaaagagacgactcaaccggcggattctaagattcccggtctttggtcttcttccgttagaccagagttttgttgcatctatagagtaccagaccggttgcgcaaagtgaacctcgaggcttacactcctcaaatgctgctaatcggccctcttcaccattccaagaaagctgaagccctcaagcgctacaaaaccgatttaag

SEQ ID NO: 144003 - DNA, 1878 bp, Arabidopsis thaliana landsberg
atggtttcttttatagttacctatagctggaagcctttaaccatggccgattattactgttctaccattctctcccatccttccatctcctgtaccatctcttactacagaatcctcagctccagtgtttccctccttaccggacgcgtcaacctgcccctatctttctcgcgcgtctctctgtctatcagaaccacagccgaccttaaaaaatgccccctttgtctccttcgttgcccagacttcggattgggctgaagaaggtggagaaggaagcgtcgctgttgaggagaccgagaacagtttagagtcacaagatgtgagcgaaggagatgagagcgaaggagatgcgagcgaaggagatgtgagcgaaggagatgagagcgaaggagatgtgagcgaaggagctgtgagcgaaagagctgagttcccggagccatcggaagaagccaagcttttcgtcggaaatttggcttatgatgttaatagccaagctttggctatgctctttgagcaagccggtactgttgaaatcgccgaggtgaatttagctgctttcttcttgtgctcatatggtcgtcttgatgcgtttatatgttgttcattatgcattgcttaaggttatttatgtgtgttttgtgcattgcaatttgcatcaactatgagtctaatggatgagaaaagtagaattctttggcctgatgactgtgtttggagcatctctgctttgagagttagaattccgtggattgaattcatatctgttgacattatacttttggttctctcttttttatttagttcaagagataatgttgttagtcctgacttgttctttgaattcttgtggttgtaaggttatatacaatagggaaactgaccagagtcgtgggtttggatttgtgacaatgagttctgtggacgaagctgagacagctgtggagaagttcaaccgttatgtaagtttatatggttcaaactttcaatcatttctgtttctgagttattagcatgtattgtgatgggatattgctcctttgatttcgtcctttctgctctaagaaaacagttttctattgtctatggaatgctgttatccaaaactttctatgttactatttgtcacactttctctgtttctattagtcaatcgaatatggaagctttggcattttatgtgtggaattgtttttgggaaatgagttgagttggggattctctaacatttgattctgtctgtgagaacattgctgaatatctgtgttggtattttcattgtgtttcaggatcttaacggacgtctactaactgtaaacaaggcagctccaagaggatcacgtccagaacgtgcgcctcgggtatatgaacctgcattcagagtatatgtagggaatctaccatgggatgtggacaatggccgtctagaacagcttttcagtgagcatggtaaagttgtggaagctagggtggtttacgaccgtgagacaggtcgttcacgtggattcgggtttgtcacaatgtctgacgtggatgaactcaacgaagccatctctgccctcgatggacaggtaccctactcttcctcatatatggttatgctaatgcagtcaacatgattttgtgatgtatctcttaatcgacctttcattgtctcttgatttacagaacttggagggtagagcaatcagagtgaatgtagcggaagagcgtcctccaaggcgtggatattaaagctgagatctagctgtgccctctctctctccctatcttgcattttgtttagacgagattcttacactcttcaacgattgtttttggctgaactctgaatgtgaaagttaagctgcttctaaagtaatttgtatcgcttgtttttga

SEQ ID NO: 144004 - DNA, 1654 bp, Arabidopsis thaliana landsberg
ttcagaaaaagagatgaacaacgtcaaagttccaaagataccaggtggtggtgccatttcgacgttgcttaaggttgggattattggtgggcttggtctctatggtgctacgcacagtctctacaatgttgaaggaggacatcgagccatcatgttcaatcgtttagtcggtattaaagataaggttagtcagtgtttcttcaaattgggtctttttggattttcagtaaatgtattttcccaatgagtttttttgctgtttgtgagatttggatgaaattttccaggttgatttgttagttaaagtctcatatgttgttcattaatccctgagactgattagtcatgaaattttgttgttctcgttaagcgtaaaaacagtcttcttaattcacaagtatgtagcttgtaaccttgttattacgcaggtttaccctgagggtacacaccttatgattccttggtttgaaaggccggtcatctatgacgttcgtgctcgaccttaccttgttgagagtacatccggaagccgtgatcttcagatggtactctgcttctactcctcccattttcagtcattttgttttgtgaatttagtgaatgtgaagtcgttcgcttcaacatcataagctcttaagttttttgtggttttaaaactttcaggtgaaaattgggcttagggttctcacacgtcccatggcagaccagttacctgaaatctacagaagccttggtgagaactacagcgagagagttctaccttctataatcaacgagactttgaaagctgtggttgctcagtacaatgcaagccagcttattactcagagagaggtatacaaatgactgtgaatatatgatcatcttttttctctttcttagtaagtgaagttcttaaagatttattccgggcttctctcaggcggtcagtagggagatcaggaagattctgactgaacgagcagcaaacttcaatgttgcgcttgacgatgtgtccatcacaaacctgacattcgggaaggagttcacagctgccattgaagcaaagcaggtggcggctcaagaggctgagcgggctaagttcattgttgagaaggccgaacaagacaagagaagtgctgttatccgcgcccaggtaaagagattctctacatttccacttgtaatctaaactctgagagcgaaattgttgtgtgacgaaagttcacatggcttgtgtagggagaagccaagagtgctcagctcattggtcaagcaattgcaaacaaccaagcgtttatcacgctcaggaagatcgaggctgcaagagagattgcacagaccatagcaaactcggcgaacaaggtttacttgagctcagacgatcttttgcttaacctacaagggatgaatttggatgttgatgcaaagaactagagaggtttcttaagtaaaactgcatgtgggtcatttcgtcttttaagttcctagaatccgttggaacaaaagcttgatttgtactactaaatactacttttaaaattcttgggatcagtctatctcaaggtgaaagttgaaaaagaagatactgtcttgctgaatgagttaattgtaataaacttgtcgtttgggggagaaaaacacttgcatttggatttaccataggcatttgcat

SEQ ID NO: 144005 - DNA, 1243 bp, Arabidopsis thaliana landsberg
atgaagcaggttactagtggatcgtctagagaatattctgatgacgaggaccttgatgaagagaatgaaaccaccggttccttgaagccagaggacgttaaaaaatctagaaggtaatcattactttttctccaatttcttgtcgtttgaagattacatttatagagccttgttcttccttttaatatttgtaggatgctgtcaaatcgtgagtcagctaggcgatctagaaggagaaagcaggagcaaacaagtgacctcgaaacacaggttttgtgttgtatcctctcaacacctcatttttgtgttgaaggatattaatgagacctaatttgtattttgataggttaatgatctaaaaggtgagcattcatcacttcttaaacaactgagcaacatgaatcacaagtatgacgaggctgctgttggcaatagaatactaaaggctgacattgagacattaagagctaaggtaagaagacttaagtattatcctcctctcctttttctgaactaccctttttttgtatacagttttagtaactcccatgttatgttaaggtgaaaatggcggaagaaaccgtgaagagagtaacaggaatgaatccgatgcttctcggaagatcaagtggacataacaacaacaacagaatgccaataactggtaacaacaggatggattcttctagcattattccagcttatcaaccacactcaaacctaaactatatgtcaaaccaaaacatcgggatcccaaccattctacctccaagactcggaaacaatttcgctgctcctccatcccaaaccagctctcccttgcagagaattagaaatgggcaaaatcaccatgttactccaagcgccaacccgtatggctggaataccgaacctcagaacgattcagcatggtaagctaaaacatggctctttcttttaagaccattgaacaatttaaaaccatttgaagtactatgatccctgtttatacatatcagattcctgtctcccctttttttgctcattttacaggccgaaaaaatgcgtggactgatcaaacaagaagcgggtttcgcactatattaatgtctatgcatctgtaatttgtaagtgttattaagttacgaatcatgagaaaacatcttgtgaaaatacagtctcatggcttatatatatatataagctctgtcttataacattacaagattcttatttgagaatcgtctttctatttatagctaat

SEQ ID NO: 144006 - DNA, 1225 bp, Arabidopsis thaliana landsberg
attacttacgacaccgcgagctctcaatcttcttcttacactctattgcttgtgtttcctcttcactacaacagtttcgtgtaccaaaggcagttctttcttttgtcccaaggtaagctttgtgattccttgagactgtgttgatgaagcacagactcagagacttttggtttatgattctctttatctttgtgacatgaagcagagctaaagaaaacatgggaataccagatgcagctcaagacttgtcgacagagatggaagttgatgcttttagaagaatcttccctcttcgtttctttgagcgtcatctctctgaatctcttcgtcctgatggaagacaacttggaaaagctagagacaccattgttaatcttggtataaacaatgaagattgattctttttagtttttatcaaattaaaaatgtcaactttatagtggtttcttgtgtttgttgtaggacttgtttcaactgctgatgggtctgctcttgctaagattggttccactgtaagaacccgccttagtcgtttcgatagtattcacatgatcagcaatgttttgcttacatagttgtttcgtgtttatagactatgcttgctgctattagaatggaagttatgactccttctacggactctccagacgaaggatgcataggttgttatctcgttgtcttgttctctatgtggttttgttgttcttctttggtgattcattttgtgattcctttttggtagctattgagttccatatgcctccaatttgttctccgactgttcgtcctggaagaccagccgaagctgctcccgttatttcaaagcgtttgtctgatactattttaaggtgtgttttggtttgatctttctctttatattttctctgtctcattgagcatcaaatacaatgttccttctaaaagtgtttcttttttgttctagttctggtatgattgatcttaaagaactgtgtctagttagtggaaaagctgcttggatgggttatctggtgagtactcgttggtcttatatcggtgcttgtccgtcagttgattcacatctattcttctagggatctttctctttgatatttaactgagttctctagcatatatatgaacattgttgctctctgaaatttctcataggacatatattgcctggatgctgatggtgctctctttgatgctgctctgcttgctgctgtcgcagccttctccaatc

SEQ ID NO: 144007 - DNA, 1729 bp, Arabidopsis thaliana landsberg
agagagaatctttccggtgaatgggaaatggcaagaagaaggatacgagtacgatgaagttgagttagagcgggagagagagacataccgttgaccactaaagacgagagctttagagagagacgcaacaatggagctgaatatttccgagagtcgaagcagatcaattcgttgcattgtgaaacttggtttgtcttttgatccctattaaaatacttgctggatcgattcttagatcgcattttagttgttctgtcttatgggtttgattctgatttgactattgaataccgaagatgaggaaagactttaaagatctgtcttttattcatttcccatcaattttacctgtctagactttgtaacagcagaatgtctaaatgatttgataggaggtgcggcaattacttgcaaaaacgagctggagaagattcacgatgaaaatctggaggtcgtggcgtgtcagttacgtcaagctatgttggagggttcagctccaagcaaggttattggcatggattggagcaagagacctggaagctctgagatttcttgtgatgtggatgacataggggatcaaaagtcttctgagtttagtaaatttgttgtggttcatggcgctggttagttggagattgattcttatctgcttaaatcttataatgaaggatcaaaatacatttttgatttagctcttacagatcattgacctgcttgtgttagttgagctgttatttagtttttgggtttcttatgtgttgttctgatttttgtcattaggttcctttgggcactttcaggccagtagatctggggttcacaaaggaggacttgagaaacctattgtcaaagctggtttcgttgctactcgtatatctgtgagactgttagctaaatctgatgctcttacgtaagatagtcttgagctgttctgatagtctacaacttctttttgcaggtgacaaatcttaatcttgaaattgtacgagcactagcccgaggtatctcttaagcttattctcttttcctactctggctaagaggaaaagatgaattttgaagctaaacattatgatctcttgcagagggcattcctacgataggcatgtctccattttcatgtggttggtcaacctccaaaagagatgtaagagctaactgaacttcttaacatatttcctgatctgaagcatgtgggtttagatttcaatgagactgctttttgcattaggtggcttctgcagatctagcaaccgtagctaaaaccatagactcaggatttgtccctgtaagttttgatcccaccagtgaaattaggtagatgtttaccaaagtctcttgactgtaatttggacagtaatttttgtcatggccaggttctccatggagatgcagtgctggacaatatactggtaatatgctctccagagataccaaatagctatctagattcttgtccgtttagaatttgaacagttgaaaatcttgtcctgaacagggctgcaccatattgagtggtgatgttatcatccgtcatcttgcagatcatttgaagccagaatatgttgtctttctcgtatcctattcatagtataaaccggaaatttaatttgtgttctctctccctctttcctatatattctttgttatctgagtaactctttacaaagacagatgtactaggtgtctacgatcgaccaccttcaccttcagagcccgacgctgtgcc

SEQ ID NO: 144008 - DNA, 551 bp, Arabidopsis thaliana landsberg
ttccagatgagtcaccgaaactaagacatgaggagactggtcttttatctatgtcgattgctgaccgtgacaagttcggatcacactttcatattaccttcaggccaaatcagcagcttgataggtttcctctcaatattactttgtttatttcaggaatgtggattttcctttgggcattgtgttatttctgactggtttatattttcatcagaaataatgttgttttcggaaagctaattcaagggaaagagatattgaaaaaaattgaacgtgtgggtgatgaggaaggtaaacctactgtcagcgtgaagataatccgttgtggagaatattctggaggtacgaatctgctcctattggtttctactacataagtcatgatttcacaattataaccaatccatgcagataagaagaaaagtgatggtaaaaaaaatggaaagcacaagaagtctctaagagtgagaagaataaagaggcgaagacactcttcatctgagtctgagagctcttcagattctgagacagattcctcagaatctgatagt

SEQ ID NO: 144009 - DNA, 1853 bp, Arabidopsis thaliana landsberg
  unsure (1)..(1853): unsure at all n locations
tagaaaagtatccgaacacaaagacttaagtaagtcaaacagaaaaaaatggatctcttattgattatagccggtttagtagcggctgcagccttctttttcctccgtagcacgaccaagaaatctctccggttacctccgggaccaaaaggtcttcctattataggaaaccttcaccagatggagaaattcaacccccaacacttccttttccgtctctccaagctatacggcccgattttcacgatgaaaatcggtggccgtcgcctcgcggtgatctcctcggccgagctagccaaggagctactcaaaactcaagacctcaacttcaccgctcgtcctctcttgaaagggcaacaaaccatgtcgtatcaaggccgtgagcttggtttcggacagtacaccgcgtactaccgtgagatgaggaagatgtgtatggtgaacctcttcagcccgaaccgtgtcgcaagtttcagaccggttagagaagaagagtgtcaacggatgatggacaagatctataaagccgctgatcaatcaggcaccgttgatctaagtgagcttctcttgtctttcactaactgtgtcgtatgtagacaagcttttgggaaacggtacaatgagtacggcacagagatgaagagattcatagatatcttgtacgagacgcaagcacttttgggcactctgtttttctccgaccttttcccttatttcggattccttgacaacctcactggtctcagtgcacgtctcaagaaagctntcaaggagcttgacacttaccttcaagaacttctagacgagactcttgaccctatccgcccaaaacaagaaacagagagtttcattgatcttttgatgcagatctacaaagaccaacctttctccatcaaattcactcacgaaaatgtcaaggccatgatattggttcgtaactctatatatttaacccttattgcaattctctaagttagttaaacctcaatattattattaactcggtttgtttgtaatttcatcaggatattgttgtgccgggaactgacacggcggctgcagtggtggtatgggccatgacttaccttattaagtaccctgaagcaatgaagaaagctcaagacgaagtgaggagtgtgataggtgacaaaggatatgtctctgaagaagacatacctaatctcccttacctaaaggcagtcatcaaggagtctcttcggctcgaaccagtcatccccattcttctacacagagaaactatcgcagacgcaaagataggtggctatgatattccggccaagaccatcattcaggtgaacgcatgggcggtttctcgtgacacagccgcgtggggagacaaccctaatgagttcattccagagaggttcatgaacgagcacaaaggagtggacttcaagggccaagattttgagctcctacctttcgggtcgggccgaagaatgtgcccggccatgcatcttgggattgcaatggtagagatacctttcgctaaccttctctacaaatttgactggagtctacctaaagggattaaaccagaggatataaagatggacgtcatgactggactcgctatgcacaagaaagaacacctcgttcttgcaccaacgaaacacatctgatgctatatatatcattaggacgtttctgctggtagatatggcgtgaccaatggttatttttcattgcaatatccctttttgttttaatgagtactatgttctcattttaacgaataaaaatgtatcagtgctcttgtttttggactagaaaagaaagtagtccgatgtttaatattcgggtccctttaatattccctctggtttacaata

SEQ ID NO: 144010 - DNA, 177 bp, Arabidopsis thaliana landsberg
ccgcgcaatctgcggcgcgatcttcaccatccttgtcatactaggtatcatagccttaatcctttggctcgtctaccgtccacataaaccacgtctcaccgtcgtaggagccgccatctacgacctgaatttcacgcgccgccgttaatctcaacctccgttcagttcagcgttttg

SEQ ID NO: 144011 - DNA, 2521 bp, Arabidopsis thaliana landsberg
cgaaaccctaaattcccaaattgcggaggctgagagatctcaaatcgacgaccaacaggtgaattttcgcttcctctgcttcagacattcttgataaagtttgaatcttgactttggacttgtgtttttggatttgataaaggaagaatgagcagtcgttcgagtagaaccgtgtacgtcggaaaccttcctggcgatatccgtgagagagaggtcgaagatttgttcagtaaggtaaaggattcgtctttatgctatgaaaaccttgttttcgcttacactcgataataacaagtctccgtaacatttatttcttccttttgtttcagtatggacctgttgttcaaattgatttgaaggttcctccaaggcctcctggttatgcattcgttgaggtcagcttaccacctcttattcttgcagtgacatgtgttatgattcttgatgttattacagtttggctctctgttgttatgattcgagaatttgaacttgttctgacttttcttcctatttgtgtttcgttaatctgtttagtttgatgatgctcgggatgctgaagatgctattcatggtcgtgatggctatgactttgatgggcatcgtttgagggttagttattattactcgaatttcagatatttaattacaactcttgagtgttttcggattggttttcaatctaatttaacgaatgtttgccttttgtaggtggaattggcgcatggtgggaggcgttcatcagatgatactcggggtagtttcaatggtggtggccgtggtggtggtcgcggccgtggtgatggccgtggtgatggtggtagtcgtgggccatctaggagatcagagtttcgtggtatgtagtcatataatttgcattattctgtccaaagttgtaggaattgttcctaattttacttgtttttcttttgtccaccacagttctagtcacaggcttgccttcatctgcttcttggcaagatctcaaggtgacttcacactggtcaacaaaactccttacttccccttgtatctttaaagttttctgaattctaacatgaatcacttttacattaggatcacatgcgtaaaggaggcgatgtctgtttctcgcaagtgtaccgtgatgctagaggtaataagtgtgcccatataatcttgtccatctaaaaccaagttgaatggttttaatcttggacaatcttactgtagggacaactggagttgttgattacacctgctatgaggacatgaagtatgcggtaagctattttccctgtttctcttctgtggttgagagtttgttctactcatccttaatcactgattagctctcactcttgaatttccccagctgaaaaagctcgacgacacagagtttcgaaatgcgttttcgaatggatatgtccgggttagttgaagctgactttcctgtgaattgtgatcttttcattgttgtgtttaatattttgtttcatatctctttaggttagagaatatgattcaaggaaggattctaggagtcctagccggggaagatcctattctaagagccgcagccgcagccgtggacgaagcgtgagccgaagcaggagcagaagcaggagcaggagcagaagtcccaaggcaaagtcttcacgtaggtcccctgcaaaatctacatcaagatctcctggcccccgctcgaagtcaaggtcaccgtctccaagaaggtatgcttcatgtcttctataatgtttatgctaaaatatccaacataaaacataacataggctctatttagctcttcccttgaagtttggtgacatcacattaaaagatgtcactgagatgactcgagttgttgattgagaatgatgattgcttctagttaagggtacacgatttatttcctttgaaagtctggtcttttataattatattgttgagaatggttttgtttcttagatatggatatacatacaatcaactaaaatatgggaaatagtatctggatcatggatgtcttggttggttgtacacaactgtttcgtctcagaggtatatgctctttcttagatgggcaagttcgttttctgataatatccattgctgctagatgggtaacagtggagagacattggatcgcattgatatagtgtcatcaaaatagacccatcgagcttggacagatattttcattacctgctaatcgacaagcgatctggattctcatggaaccgatgctgttctggacacagggtttgatagaattagatttgctttgatattctccatctctaccatctgttttaacgaaaagcaggcttgtgttggtttgattttctgctagaaatagtctgaagatatgtttttttcttttttgcttcttgtgattgtgttttgatgtctgacatggaatgaggcatcaagggtcttggtgaaacagctattaaacacggaaatattggatttttacaactggatttgtttctcggacttttgcagatctcgttcaaggtcaagatctcctctaccctct

SEQ ID NO: 144012 - DNA, 766 bp, Arabidopsis thaliana landsberg
gcccagatgagagtctcagatcctaagcctctatttctcgctggagaaagatctgcggaaaacctcttaactagagagtttgtacttgttgcatctgaatcgcagcggactaacgagctagctgccatggtgatcaagataccaaaacttacagacacaacaagctcaaccactcttggagattactttgcagaggttaacgcaacagtggtacttccaagtggagttcacagtctcccgcacaaaggagggccgtcatcactgatccaacgatggaaatcagatggatcatgtgactgtggaggctgggacatgggatgtaaccttagaatcctcacaaatcagcataataaacccataaacccttctccaaccacttcagatgccttcaagcttttctttcaggtttgttatgtaacatctcaaaactctgaatactaagaccaacctttggcttaataatgaatctcactaatgtgaatttgttgcagggaggagtacaggagaataacaaccaaccatacttgagtttcactacatacagagaaggtgtttacgcggttgagtacaatacatcgctctcactcttgcaagcattctccatttgtatagcggttaacgagggacgaaatccgttaataaagaccaccgtggaacccaacacttcacgtgtagagaagaaagcttatggaggagagatgtcatcgattcaaaacgagaatttgaagtcattttcaggtcctgttgaagctgaggctccggctag

SEQ ID NO: 144013 - DNA, 550 bp, Arabidopsis thaliana landsberg
cttttggctgttgcaagaaaagatggcaatgtaagttttccttactttaagctatgtgtatttgagtaatatatttatctccatagcctggccaacatttatacaatcattttgttcatttctatcctttccataggttgaggttattaacccttgtaatggtgatcttcacttctcatactctgtatttggtgatgatggttgttcccctgaggataacgaaatttctgccctgcacttattcaggaaaaagatagatgatcagacagaaaggtatataactttacactaattctttgaaattcccattgaattatgtttttatgttgtgttgccattgacgtttctaaacaaaatttggtattcttagatcttgcacattgcttacatgtacgaaaaagggagatgtgagtctcagatcagttaaatttccagatgcacatggtaattccacggatgatgcttctcctaaaacatggaaagcatgtggttctggtgaaatattggttggtaaagtggatgggagcgaaaacttcagcttatttggagg

SEQ ID NO: 144014 - DNA, 401 bp, Arabidopsis thaliana landsberg
tgagaagctttctcgatacaagaacaagaagagcaggcgaaatttcgggcgtaagattaaggtatacaagcaaaacacttgaagtcattttagctcaaaaacaagcacttgaagatcctctaaatgttgtttggtttggtttcagtatgcttgcaggaaagctcttgcagatagccaaccgagagtccgaggaaggtttgcgaaaacagaggagaggaaatagaatggttcaagaaaagggctcagaggaaggagactaagcaaaaggaagaaacatgaagaataaggagataaagcccatctcattagaaactagttttgttttatatatctatgtataaactttaaaatcttataagcatccaattagttttttgtatataaagggtttctctaaataa

SEQ ID NO: 144015 - DNA, 484 bp, Arabidopsis thaliana landsberg
ccaaaaacctcgtcttccaaggttaagattagctctgacaaagaaaggactcacctgaatcactattgaccaattttacgaaatatgaaggatttgactcaattttaagttttctggagaattgaaagattgtgaatggttgatatttttgtgagccgttttattggaataacaggttgaggttgtgattgtggatgtttcggcgggtgctgatcagaagcagatcgataatgttgcagactttgcgtttgtaacaagagaagaagttctctcatgctacattggatcgaaccaggaggaaaaaccggttaaacttccggatgatagaggcgaggcagttggtgtcatgagcaaatgtcttgagaattttcttaggcaagcctttgaggataattctcttgctggggctataggccttggcggaagcggaggaacatcgctcatatcatctgcttttaggtctctccctattgggattcctaag

SEQ ID NO: 144016 - DNA, 207 bp, Arabidopsis thaliana landsberg
atgagcaagaacaataagaagaagagaagatgggatttgaagaacggagggattctattagaggagctaatcgcttccttcgacggcaaaaccaatccgattcgttgcttctcctccgatcagatccttaaagctaccgacaatttctccgaaagccgaattatctccagctggggatacttcatatggtacaaaggcgtaatcgaa

SEQ ID NO: 144017 - DNA, 1711 bp, Arabidopsis thaliana landsberg
  unsure (1)..(1711): unsure at all n locations
gttgaatgtactgatcaagataacaaatttatcaaaaataaatacatcatactggttaatgagcaagaaacattgctcagaattattaccaaataagatgtttagaaaccaagactgaaaatacttgatcccggtgcagaaagaagcgccaccggtgacaactttaccgatgaaagcttcaacggtgaaatctccacacaactgtgaggccattctcagagacgcagatcctccgatctctctctcctctgttaatctctctgaacagctacggtctggtgttttcttgaaacccaagaaacaggttcatattctttttaagaattagctcacttgtgtttctattttcagaaaataactacgcaaaacggagcctttatgtaaacaaaattgcaaacacagaacttctggttcaaaaaaattgaatctctcatttctaaaataaaaagtagcttaaaaaaatgatcagatcacaaaacaaacgtttccattctgcttggtttagaaagacatgattgctacttccacataggtttcaaatgcttcgaaagataaaataagatagaactaatggactaaagtaacactatcaacatggtaactttttgttaagaaaatcaatcttaatatatttaagacggaccatgaattcatttggtttgatgatctgcgtataatatatattaaacagatcaaatangggtggacgagagaaacagcaactgctcatgctctttgcaaagaacctctctataacttggtcagatgacgtcaactattggacttggtttaccgaaaaagagtcaccaaagtaagatacgtttcatttaaatcccatactatgaatattaccacaaaatgaatatctttgttacatatttgatttacaataaagttgagtataaatcaaagtatccttgataaaatcgaaacaggttacacgacgttttaagtttgtgtataattttatgtatattatagcaatattaatacgaactggtaattattatttcttttggtaaccaaatatttcgaggtattagacctattatattttgttagacctataattattaatgcaaagtaacaaactttagtgtgtttttgattatttttaaagcgagaatgtggaagctgtgggattgaaaaacgtttgttggctcgacatcacgggaaaattcgacacgaggaacctcactccggggattgtttacgaggtggtctttaaggtgaagctagaggatccggcctatggatgggacacgccggtgaacctaaagctagtcttgcctaacggtaaggagacgccacaagagcaaaagttgagtttgagggaacttccaaggtataaatgggtcgatgtcagagttggcgagttcgtacctgagaaatccgctgccggagagatcactttctcaatgtatgagcatgtggctggtgtttggaagaaagggctctccctcaaaggtgttgcaattcgtcccaaacagtaataattgttatggcatagaaaaacataaatctccatatgcaccaatggaccttctcaacatatatttcacatcatgtcatgtgtgtataataaggttgttctatcgtatttttagttttaataataactttaatgttggtggttaaaaaactcaaaaaaaagtgttttaaaggttgtaatattggaatcaattctttcacaatgttgtagcttttatcg

SEQ ID NO: 144018 - DNA, 1313 bp, Arabidopsis thaliana landsberg
attcttaatccaaacccagaagctatgtctaagctgatcacagaaaatgcaagtgaggaatttctccattcgctgagtaactattgtgcccttcaggtaagggaatttttttcccagcaaatatactctgaaggtatcattagtatgttagcaagctagttcctagaactcttctggtgcgtcccaatttcatgttatatcattcaattgtctaatccatgatacctcttttcttccttctctatcaaacatcatgtgaaatctcacattgagctttttgcgagtatgattgagccagtcatatgcatgcctatcgcattttcaacctaaatgttgcatgtttgtgatgagtatttacataagaatattttttctcctctgtaaaatccatagcatcctctctgttttctgttgccagcaatgacacattctcttgcttaatttactctataaggtgtgaatgatagaccaggtactggaaactttgttaaagtggatgctctacctgtgcctgatgaaatttgtatccatattcagggttttgttgaagatcagtttggcttaggtttgattgccagagcggttgaagaaggaatatctgtcatcaaacctgcaggggttatgatattcaacatgggtggtcgtcctgggcaaggtgtctgtagacgcttgtttgagcggcgaggagtccgtgttacacagatgtggcagactaaaatacttcaggtaagaatttcatctttaaagtctgaaagttcatgctcctccacaatggccacttgacatgtgttttcacaggctgcagatactgatatctcagcattagttgaaattgagaggagcagccctcatcgttttgagttctttatgggactttctggagaccaaccaatttgtgctcgaacagcatgggcctatgggaaggctggtggccgaatctcccatgctttatcggtttatagttgtcagattcgccaaccaaatctggtgggtagataaagaagctttcatttagttaatgtgtttttcttaccatgaacaacaaagtaatcaattaagttggttgtgattgacaggttaagataatctttgacttcttgaaaaatggattccaagaaatcagtaattctctggatttatctttcgaagatgaaactgttgctgatgagaagattccattcctagcctatcttgctagtgtcttgaaaaatagctcctatttcccgtttgaacctccagctggcagcaaaagattctgcagtctaattgcaggctttatgaggacataccaccgtataccaattaatcaggat

SEQ ID NO: 144019 - DNA, 1080 bp, Arabidopsis thaliana landsberg
cagattcatgaaagatttgatgcacgcctccataaccccaagtggacgatgcacgtacttgaatattttaccaaaaaggtcatttttttttttttttttgatgctatggttttgcagtaattagattttcatgaataaattgcattgttgcatatctttgttcgtataccattgaaagtagggtcataagtcattgcacatattacactttttaggtgctaaataaaatagttactgattccgttcttcttttcattacagattttcccaaagattaaagattctgttcaggtactcccatcattcgaagtcattcaaagtctaaactgttttgttgaccatacttctaagttgccataacatactggacaataacaaagttgggcagaacaaagaccttattgttatcacgtaaatttgggagcttgattgttcgtattccaatcatgcttgtagggaggagtaatgatctttatccattcttacttcgagttcgtcaggcttagaaactttttgaatacgcagaatacctctttctgtcttcttggagagtaagatcattttcttcctgttttgaagttgctgcttctctgtgttatctggatttcctttaccggatatagttaattgacttctgtttttcagttatgcaaaaaatgcagatatatcccgagcaagagaacagttttttgtagggagccgaaagatcatgctttacactgagagagcatacttttataagagatacaaggttttttcttcttcttaaattcatctttgatcttttagtaggttctgtactgttctgaccaatttggctgatgtatgatgatgttgctttctcggtttcagatccgtggtataaagaacttaatcttatattctcttccggagcggaaggagttttaccctgaggtaagtgcatctttaatcgagaattaaatacgacccaaccctaatcaggagaacgacagtcgagtctcatcgttcgatctttaactgcagataatgaacatgcttgaagaaggatcacatgacatgatgtccactgcacttttttctcgttttgatatgctccag

SEQ ID NO: 144020 - DNA, 2153 bp, Arabidopsis thaliana landsberg
ctctctttttcacttcactctcttcttccccatcgaagactcgtcttcttctgcttcaatggccgaatttccagaaccgggcactgtaaaccctgactcggatctatcgaatggtcgagctgagaagcctgagatagacacttcggctccgttcgagtcagtgagagaagcagccactcgtttcggcggttttggtttctggagaccttctctcaataaactcccagatgcttctcaggtttctttccctttctctatctccctcacttgcagtcttttctttaaattctctctgaaaaatatgatttagagttttactgttgttagattaagcgtgtttggctgttgttgtctgaaacaacaaaaagatatcatcaaactttgaaattgatgtttaatgatgtttggtttatgtcttaaacgacattatgatgaagataatgatgatgacgatacttgatttccctttcatgtttagcatcaatgatgaagaaaacttaaacctcattttaaggaattgttcattacctacattttgcaacctgattcatcacatcagtgaagattttgtgttgtgtgtcatatattaaagtatcagagttgttcaaattaggatatgtaaggtaaagtttgtctttctgatattggtggcaggaaaatatccaagaacctgatatcatgggactcaaagcacaagcttccgagctacaaagagaactaattgttaaagaacgcgaaacgctagaggtgttgaaggagcttgaggcgactaaagccacagtcttaaagctgcagcagaggaatgaagcttatgaggaggacacgttgagagaagaagttgacagtcatatcaagccagcgggtgtggttctaaaggatttaagccaggcgaagatgaatttgtgcaagattgcaagtatacgcgaatctgtggagcagttgaagaataaactgaatgaggaaagagctgcacttgagaagacacgcgagagacttatggagaaatctctcaaggtgttttctttagaggaagaagaagtgagagtaagatttgccaaggagggtcaaaccggcgagaaagatcttggaatgttgaatgaggttcaaagattgagccgtcaagctcaagaggtgaagaaaaccggagagaatgcagagttggaagttgtgaaagcaatggctgagactgaaagcacaagagataagattagaacagctaagataaggttggtggctgctagaaagatgaaggaagtggccagagcggctgaggcggttgcaatcgcagagattgaggctgttactggaagtatgaatgttggtaaggccgaggctgtgactatctctgctgaagagtattctgtgcttgctcgtagtgctagagacgcagaggaagaggcgagaaagcgagtggaagatgcaatgtcgagagttgaagaagctaatgtttcaaagaaggatgttctgaagaaagttgacgaagcggctcaagaaattgaaaccagcaagagagtattggaggaagctgtggagagagttgacgctgcaaatgcttcgaagatcgaagcagaagaggcgctgcgaaaatggcggtcagagaatggacagaggagaagattatcttcttcggtgaacaacacttccaagttcaagagcagaagagagacaacaacacgtctgatggatgtaaacggtctgcatctgacatacgatgttgttgacgggtcatcatcttcttcaacggtcccagtcttgaaaccaacaatgtcaataggacaaatactgagcaagaagctacttcttgcagaggattcagatatgaatgttgctaatgagagaagaaaaatgtcgttgggtcagatgcttgcaaagaatagcagtagtgataaaactgtaagcaagagaagtgaagggaaagagaatgagaaaaggacgaagactcgaaagagaaagagtttcggatttgctaagatctctgtgttgttgaacaaagagagcaagatcaagaagaagaagaaaaagatagctttgaacttaaggtgatattttgaatctgttgatgacttctttctgttttgtacgtgaaccagtagtttaagaaaacaaagtgtatcatcaagtgctttattataacgctaatctaggctaattaa

SEQ ID NO: 144021 - DNA, 1329 bp, Arabidopsis thaliana landsberg
gttgagagagggttttccattctctgtggccgtcaccgtcgccgtgaaatagctctcctctctctatctccggtgagttcttatttattcctctgcgagatgtgcttttctgtgtacacgatctctcacttctttggaagcctgaaattttttgtacgactttcattaaccatttaccattttgttatccaatctcgatttctctttctgattgttgttgatgatcagattatataactgcgagctcaaaggaattgtttgttgttaaaatgtttcttacgcgatttgtcgggaggagattcttggcggctgcatcggcgcgatcggagtccactacagcagcagcagctgccttgaccattgggacgccaacaaattcactccaagagttctttgagttcgacagaagccaagacgaagataaacctgttgtctatggtagcttctctctgtatctgccactcatctgcttaatactagtttactagtgggattgttcatagaatgtacagtgaagaagtaaagtaattcactgtagcttaggtctgtagtcaagcttgctaatcgttcgtttttcttcttaactttgttatcctcccatggagtttttggaattaggattgtttagttttgttaatggggggaaatttgtaaacttctggtgttaggtcgaggttggaaagcttcagagctgcgtctcaagtcatgggatgatcttcagaagctgtggtacgttcttctcaaagagaaaaacatgttgatgactcagcgtcagatgcttcaggctcagaacatgcagtttcctaaccctgaacgcattccaaaggtaatagactctctattcaattaagttgttgacaaaatagtagatactatgaaaagaaacatgaatcctttcttcaaggaacggttatgttagttgttaccgagggagattatgattattttttaatgaatgtcaactttgtttgcctctcacaaatataggtgaggagatcaatgtgccgcattaagcatgtgctgaccgagagagcgattgaagaaccagatcctagaagatcagccgagatgaagagaatggtaaatggtatgtgatcccattggctcttgttttggcaacctagcagtaagcacgagtcaatccgcagaggtgttgagtttttcggagtaagaaataacgcatagctttcaagactttggaactggtccaatgattgtgactgtagtagtgtcggcagtagaaaaacgtttggttggtatctgtacgcacatttctgtaacttatggttgatgtttctttttgagacacatgttggtcagtgttgattc

SEQ ID NO: 144022 - DNA, 2537 bp, Arabidopsis thaliana landsberg; identical to SEQ ID NO: 69986

SEQ ID NO: 144023 - DNA, 1676 bp, Arabidopsis thaliana landsberg
ttgggtaaactttttgttcgggggtggtttttttggctataggctcggagacagcaggctcaatgacataccctgcagcgcggtgtggcataacagcattgcgtccgacatttgggagcgttggtagaaccggagtgatgagcatatccgagagcctggtatgttgaaaatagtagcggttttaatgtgcttcaaaaccgagtgaaaacttgagaatatctaacctttaagatccaactcctcttgttacaggataagctgggacctttctgtagaacagcagcggattgcgctgtaattcttgacgctatcaaaggaaaagatcccgatgatctctcatctagagagatcgcgtttgaagatcccttctccgttgatatcacaaaactcacagttgggtatacaaaagatgctgatatgaaggtaaacaagctgctaaatactttttccaatcacagtaatgaactagtttgtgttgattcaacatttgacttcttcaggtggtggaagttcttggttccaaaggtgtcaatatggttccttttgagctaaattatactgtggaatcggttcaagggatattgaacttcacaatggatgtagatatgttggctcattttgatgaatggcaaagaaccggtcaagaagatctctatgaagctcaagatcaatggccggttgagttacgccgtgctcgtgtagttacagcagtagattacattcaggtttttgtccatttcaacttctcattttggtttataggttggttttgtgatagttatgtccgatttatttatctatctaatttaccggcttaggctcagagagctcgtggtaagttgattcgggaagtggagaagagctttacagtcgatgcgtttattggaaatgtgaccgattgggagaaagtctgtatgggaaacctagtcggtttgccggttctagtgattccgaccggtttcaagaacataacggatccaccaaccaacagttgccggagacggacaacgatcaatgccggaatttatgcccctccagaacgtgatcacattgtaagtaaaaccaatagaatatatatcttatatgtcgttcagtgaactgaaatttaggaaaattgtgtggtaggctttggcattgggtatggcgtaccaatcggttaccgatgcacataggaagcgaccacctattgatgatcttggaccggatgactcgataccaaatcctcctcgggctttaatccctccccgtaggttacacatttgagctttcttcaatctttttttttacattgggaaatgtagtcaaatcaatgttgtgtgttttgtttaaaaagaagttatgttataagtagcatattgttctgtctcaatgagtgatcaagtcaatgttatgaaatgaacatatggttgggaccgtttttgacgatcatgctttgtagtgcgcgactctggatataaattaatctattgggattttgtctaatgattaatccgtgaaagggttttgtttccatatcgaacgtgactgacggtgattggaattttggaactagtgctgatataaaagtggaaatatacacgtgttttttattcgttttttatgtagctgtcgtgtatgtgtttgaaattgcattttttgctttactagaagaggaaatgggaattgcgtgggtatag

SEQ ID NO: 144024 - DNA, 2352 bp, Arabidopsis thaliana landsberg
atgcaaaggaaaaaaacaaaaaaggaaggatttttatttttttaccgtgatagtaacgaacgagacagtgacgagacaacaatcatcattcccaataattcttctcaccaagaatctaaaatccttctccgatttcctctcatggcggcggaatcaaccagaaactcttctccgccgtctacttctcagtcttcaagccctataatcaatttacccgatgaccatctcttaaccatcttgcttcttcttcccgtagattcaatcctctccttctcaatgacctgcaagcgatacaagtctctagcttgctccgacagtctctgggaagctctgtgtgaacgagaatggggaccaacatctgtagatgctttaaagttgtcatctttacgagatgggttttcatggatgttgatgtttcagcgagtttataagatggattctgtttgctgtcacaagatctcagacccagatgatgatgatgaagaatcttcttcgtttccgatccctagagcttctcattctctcaacttcgttaatgatcatcttgttctctttggtggtggttgtcaaggaggttagctttgctttagctatatcatctttctcaattcttaccttgttgaaagcagattgattttcgatattatcgactcgagtttctcggttacttttcggttagctagatgagtgtgtcaagcacacgacaatgatgctagttggattattagggaattacttcattaaatttgagatctttgtgtatattgctttgttaattttcaggacgccatcttgatgatacatggacatgatatgttgataagagcaatcaaagcatattgaaatggaagaaagttaaatcagggactccaagtgggagattcggacacacctgcatcgttataggcgagtatctactcttatttggaggtataaatgaccgtggagagaggctaaatgacacatggattggtcaagtcttttgccacgagggactctcttggaaactcctcaatgttgggtctttgcagcggcctcgtcctcctcctcgtggtgctcattccgcctgttgtattgctgagaagaagatggttgtacatggaggaatcgggctgaatggagtcaggcttggagatacatggattcttgaactttctgaagatttcagctctgggacatggcacatggtggagtctccacaattaccgccaccgcgctcagggcatactttgacctgcattagagaaaaccaagtggttctatttggaggcagaggattaggatatgatgtgcttgatgatgtttggatcttggatattcaagaaccgtgtgaagaaaaatggatacagatattctacgatttccaggatgttcccgaatacgcatcgttgcctcgggttggtcactcggcgactcttgtattgggaggtcgaatcttgatttatggcggtgaagattcttataggcataggaaagatgatttctgggtgttggatgttaaaaccattccttcatcaggtttgaaaccacaagggcttagcttaaacggatcatcagtgtggaaaaagcttgatcgaatctcatatggaccaaaaagtcggtcttttcaccgtgcctgcgctgattgttcagggagatttttatatgtgtttggcggaatggttgatggtcttcttcagcctgcagcatcgtctggtctaaggtttgatggagagcttttcatggtggagcttgttcttggcttctctgacctagaccatcaacaaagacccggaaaaagcatgtaatagtggtggttccttcttttgtaaattagcagattttgtttaaaagcatatcgagaaaccagaaatggaacccacatgatcaaatctctgattacagaggaacacaaaagatgtgttgaaactggaactttcttatagattctgattcagtttacaatatacaaaattccatgacagtggatgtaaatatgtaatgtaaggacttgtttgaattagatacaaagaatgcagaattttgtgctatgaaaaacaaacttgcttgcctcatgggttgagtatcaatttggttctccacatctctgccatgaccttcctcggggcgggatcatctggacctttgtctctttgtcctgaggtgaagtataactgtccatcccaatacccagccagcgttgtcttcacacggtatggtaatttcccaatcacataccatttctgtagaggaaaggcaaaatcattagctttgtctcttggacaggtttgagtaagaaggctttaggattttaccagtgtatttaagttgaactggaagatttcaccaacgagaaccatctttttggtttca

SEQ ID NO: 144025 - DNA, 1067 bp, Arabidopsis thaliana landsberg
tgttggagttattttcatctggatatcggtagacccgagaaatccgaagcgtgtttcccgcttgctcttttgtggaaaggtaaaggcagcagatccaaaaccgacctatctgagtaccgcagagaactggacgatcttgatcctagcaaggtaaacccttcagttcatccttatgaattttgtattgctctaaatgttaataattgatggttgtgaaaatgcagatcacttggtgtccatatgaaagatttgagaacttgattccaccacacattaaagccaagctgattctaggaagatcgaaaacgactcttgtatgctttgagaaaatagagttacattttccagataggtgtctgaggcagtttgggaaacgccagccgatacctctgaaagtaaaacgccgcgacagaaagaaccgtcggcttgatgacttggacacgtcaatgagtctagcgtgtgaggaatgggctgaacgtggggatcacatcgtggacagtcctggaggtggcaatgtggtggatgatggagcttacatggaatggtatgctaggatcagtatcaccaaactataccgagaagcgtttctcgagtcccaagtcatgaatatggtaaaataagtttaatctctatcatttctgtttttaaaacatcttatatttgaaaccggcaaaataagtttactttggtttggtgtagattgcttgtatgagggaatttgaggaagctgcttcagggattgcactagagagattatctccagcggagagagaagtgatggagagtgtgaaagatacattcgctaatagtttgacgtttgggggatggcaagaggtggcagttaacagtggttatgggaagcgccggcgtcggaatgaacacactccgacgccgaataatggtggtggtaatgatatttcgtctcttctgcttcaaaaggaagactcgtgaagcctttttctgtttgtttcatctttaaaatgttacagtgtttatgtatatgtatattattggccatttggtgacaatggcagaactttaataaaacgataatgcttaacacaaaa

SEQ ID NO: 144026 - DNA, 936 bp, Arabidopsis thaliana landsberg
atggctacgatttggtttctttcacttctctttctctgttgtattctcctcgccgcctttaaacacaagaagcgtcggacaaatcagcagcaaccaccgtcccctcctggctttccgatcatcggaaacttgcatcagcttggagaattaccacatcaatctctatggagtctttccaaaacgtatggtccggtgatgcttttgaagcttggaagtgtcccaacggtcgtagtttcttcttctgagacggcaaaacaagttctgaaaatcaatgatctacattgttgtagccgtcctagcttagcaggtactataactctaacttaacacatacaattttctttctttctatttgttcctttgttcatagaactcaacaaaaaccatgattttgatcattcgttaggggcaaaagagctctcttacaattacttggacattgctttctctccttttgatgattattggaaagaattaaggaggatttgtgtccaagaactctttagtgctaagcgagttcactctattcaacccatcaaggaagaagaagtgaggaaactgatcgtttcagccacggaatcagcctctcagaaatcaccagttaacttgagcgagaagtttcttgatttaactgtaagcgtgatatgcaaggcagcattcagtctagacttccatacttcagttctcaataatgatggatttgacaagttaatacgcgatgcgtttttgtttttggggagcttctccgcctcaaacttcttcccaaatggtggctggatcatcgactggctcacgggtctacaaagacggagagaaaaaagcgtgagggatcttgatgtgttctatgaacaaatgtttgatctgcataaacaagaaaacaaacaaggagtcgaagatttcgtggacttgctcttgaagttagagaaagaagaaact

SEQ ID NO: 144027 - DNA, 311 bp, Arabidopsis thaliana landsberg
ctcactatcaaaactctgaatttcgatttcaatggagtcacgcgtgctgttacgcgccaccgcgaatgtcgttggaattccgaaattgagacgaccaatcggagcgatccaccgtcaattcagcactgcatcgtcttcctcgttctcggttaaaccaatcggaggaatcggagagggagcgaatctgatctccggtcgtcagcttcgtccaattcttcttctcgattcgtcggcgatcaacggaggagagaaaagagagattctcaaacccgttaaagcccgcgctgctgaaggtggagataccgctgggt

SEQ ID NO: 144028 - DNA, 659 bp, Arabidopsis thaliana landsberg
tcttattaagagagctaccgcctgtagatgatcaagtggctgtaagaatcaccctttcttctccatatcatttacatttaagatttgacatggctgagtataaatattgagttctgtttacagcgtttggctctcaaacggttgattgatgtcagtatgggagttatagcacctttatcagagcaactaacaaagccattgcccaatgccatggctcttgtcaacctcaaggaactatctggtggcgcttacaagcttctccctgaaggtgtcccaattgtttacctgaaagaattcataatatagagaacagttttctttcgttatttcttagcttcggttatttcaggtacacgcttggttgtctctctacgaggcgatgagccttacgaggagcttgaaatactcaaaaacattgatgctactatgattctccatgatgtacctttcactgaagacaaagttagcagagtacatgcagctcggaggtaataattgaatattctcaatagctaatcttttactgagttcaaaattgtcacttttaagcgctaagtggtttttttttcctggacttgtaggctattcgagttcttatccgagaattcagttaactttcctgttattcatcacataaacttcccaaccggaatccacag

SEQ ID NO: 144029 - DNA, 609 bp, Arabidopsis thaliana landsberg
ccaaaacacattacaaacaaaaaaaacaagttagatattatatcatcatggatgtcgtttgtacggaacatcaaatgaggaagccaacggtggagattcctccgagaaagcttcttttatcttccaagagttttccttctgattcttcttcccctcgctcgccgcgtaaacataactggaacaaaagcaacaagattacatctgaacatgaagaagacaacgaagacaacaacagagagaataaagagtactgttatgattctgactctgatgatccttacgcaagtgatcatttccggatgttcgaattcaagatccgtcgttgcactcgtagccgaagccacgattggactgattgtccttttgctcatcccggtgagaaagctcgccgtcgtgacccctcgtcgctttcaatactccggtgaggtttgtcccgagtttcgtcgtggtggtgattgtagccgtggagatgattgtgagtttgctcatggagtcttcgagtgttggctccatcctattcgttaccgtactgaagcttgtaaagacggtaaacactgtaaaaggaaagtctgtttctctgctcattcgccacgtcagcttagggttctt

SEQ ID NO: 144030 - DNA, 920 bp, Arabidopsis thaliana landsberg
  unsure (1)..(920): unsure at all n locations
gacaagatttcaactaagaaaaaacttcaagatattgccaaagggttcatcttcatcatacaaagttgtaatgggatcgcgtatagttgatggtgatcatcaatcttgttataagattgtaaaacgcaaatcggttttcacaatcgaggatggatcatgaagattattggcagaagttaaaaagaaacaatcaaatatcaaaagtttagatcttgggaaagatgtattaacaatgatggtggagccacaagtagatcactctttaataatgggtattgttatagcatatagtcttctcaaatgtaaattgtgataattagtaggggtgagattgaactattgtgtaaactttagggtcgtaaatgtaaatatacaattttggagagccaaatgataatattattgttaatgaagttcttaaagctaaattaaatgttattacaggcatgaggcataaaccccaaagtctctagcttgaaactgagattttcgaagaattcatcaaaatgtggagagaatcggcttcgtttatcctcgataagcatcagaacaacaaccccatttctctaactcattcaattgattctcctccaccaccatctgcttcannnnnnnnnnnnnnnnnnnnnnnnnnnnnnnnnnnnnnnnnnnnnnaaaccagagcggcgcatcatggaattgtgactagcgagtggttggagcaggctcaagccgcggttcgacgttaccctgatcgtgattccttagtttcgggaagaccctttagcgtgattgaggactttaatagttggagacagcaacctgatttggcggaggctgttgcggcgattcgtgctcttgcggctgttattagggctagtgaagctactactatgatggagcttgaaattgaactcaagaaagcttctgatactttgaaa

SEQ ID NO: 144031 - DNA, 308 bp, Arabidopsis thaliana landsberg
taattccagtagctcgagttggcaaagctcgtgcgccattctctcaagcaaagttaactcacaagaacaatctgaatccttatcttccaattccaatggatcatcatcctaccacgtttccgccgtcaacggtcacaacaacggcgccggagtctcagatttgaatctagttccattcaacaacaaccaatcgattcaatcgaagaagcctttaagtatttcagatctatctccagctccgatgcatggatctaacctccgtgtagcttatcaaggtgttcccggagcttactccgaagccgccgctg

SEQ ID NO: 144032 - DNA, 1371 bp, Arabidopsis thaliana landsberg
ggatgtgatgcgtctgttcttctagactacgaagggacagagagaagatctccggctagcaaaacactaagaggcttcgagctaattgacgatatcaagtccgagatggagaaatcatgccccggaaaagtatcctgcgccgacatcctaacatcagccagccgtgccgccaccgtccaacttggtggtccttactggcccaacgtctacggtcgtcgtgactccaaacactcttacgctagagacgtagagaaagtcccttcaggccgccgtgatgttaccgcccttctcgaaacgtttcagtcatacggtctcaacgtcctcgacctagttgtcctatccggggcccacaccatcggaaaagcctcctgtggcaccatccagtcgaggctttacaactacaacgcaaccagtggttcagatccttcgattgacacaaaatacgctgattacttgcaacgcaggtgtcgctgggcctctgagaccgtcgatctcgacgctgtaactccagcagtgttcgataatcagtactacattaatcttcagaagcatatgggagttttgtcgactgatcaggagcttgttaaggacccaaggactgctccgcttgtaaagactttcgcagagcaatcacctcagatattcagacagcagtttgctgtgtcgatggctaagctggtcaacgttggtgttctcactggtgaagatcgcgtcggagagatcaggaaggtttgcagcaaatctaactccagagcttactaaattataatcatcatccctcatgagaaggatcttttgtttcttgaaataatttcttgtttggtttttgagctcttttctattgcaattttgtaatttgttgtatgaacaagaacaaaaactgtgaattattttcgttgcaacttcgatttacatgagttctacacttaccgtcattatatttgatatcggtccaacatgatcaatttatgtcaaagggttcatgatgttaatggtaataaccctaaacgtcaactataaatcaagttgtgctgatagcttttggtgcaagaaaaatgaaagatgggagacacaattcagaggcgatcacgtttttagggtttctatagtactgaaactcatggaaaaaacacagtacaaaagatgctatattctaagacattgaagaaccccaaaattaagagagaacataaattatgcaagtagaaaacaaacccagtagaagaaagccaagaccagttttagtttcgtttgcctcgaaggacacccttactacgacgattcttcatccccagcttaaacttcttcttcaacttcttcccaataggttttagcgacttgtttttcttctcatcatccatttcctcatct

SEQ ID NO: 144033 - DNA, 2012 bp, Arabidopsis thaliana landsberg
ggtttttcagtagatagtattgtgctatttggaggttacagagcagcgcctcgtcctctcggacccgcattggcatgtctgtatgtggctttctcagctgaagttgctgaagcacgtgatggcgttgttgtatgtgattgccaattagtttttggagcttatgggaccaaacatgcacacagggcaaagaaagtagaagagtttcttacaggaaaagtgatatctgatgaagttttgatggtagctattagcttacttaaagatgagatagtacctgataagggtacttcgaatcccgggtatagatcaagcttggctgttacttttctcttcgagttcttcggatctttaactaaaaaaaacgctaaaacgacaaacggttggctcaatggaggatgcaaagagattggttttgatcagaatgttgaatctttgaaacctgaagctatgctgtcatctgcacaacaaatagttgaaaatcaagagcatagtccggtcgggaaaggcattacaaaggctggagcttgtctccaagcatctggtgagtgctctttgatcattttccaggtgaaaatgtgaaacattgcttctttgttaatgttgtaatatattttcaggtgaggctgtttatgtagacgacattcctgctccggaaaattgtctatacggcgcatttatttacagtacaatgccgctagcgcggattaagggtataaggttcaagcaaaacagagttccagaaggagttcttggcattattacttacaaagatattcccaaaggcgggcaaaatatcggtaccaacggtttctttacctcggatcttttgttcgcagaagaagtcactcattgtgcgggtcagataatcgcctttttggtaagtttggtgaagaattctcattttctctgaatcttttatttagaataaaacttagattcaatatgttttatctacaggttgcagatagtcaaaagcatgcagatattgcagcaaatcttgttgtgatagattacgacaccaaagatttaaaaccacctatactgtccttagaagaagctgtcgaaaactttagccttttcgaggtccctccacctctgcgtggttacccggttggtgatatcaccaagggaatggatgaagctgaacataagattcttggatcaaaggtggttcttttccaagacatatacacctctaaagccgtgctcttttctaaccatcatataaaatctttgtgattgtgtagataagtttcgggtcacagtacttcttctatatggagacacaaacagctcttgcagtgccggatgaagacaactgtatagtggtttatagctcgactcaaacccctgagtttgtacatcaaaccatcgctggatgtcttggagttcctgagaacaatgtgcgtgtcatcactagaagagttggaggcggattcggtgggaaagccgtgaaatcaatgcctgtgagttcgcgttttgaaagtactatcaagtgagagttttgatgttttggctttaacatttctctttctatcaacaaattgttttctaggttgctgcagcttgtgcacttgcagcatccaaaatgcagcgtccggtgaggacatatgtgaaccgaaaaacggatatgataactaccggaggaagacatccgatgaaagtcacatatagtgttggattcaaatccaatggaaagattactgctttagatgtagaggtgttacttgatgcagggttaaccgaagatataagcccgcttatgccgaagggaatacaaggagcactaatgaagtatgattggggtgctctgtctttcaatgtgaaagtatgcaaaacaaacactgtgagcagaaccgcgctgagagctcctggggatgtacaaggatcatatataggagaagccatcattgaaaaagtagcttcatatctttcagttgatgttgatgagatcaggaaggttaatcttcatacatatgagagcttaaggttgtttcacagtgccaaagctg

SEQ ID NO: 144034 - DNA, 804 bp, Arabidopsis thaliana landsberg
tggattatgcctcataacatctgttaccctgcattagagtacgatgattggcgtataataactggaagcgacccaaagaacacgtgagtttcgcttactctttactttctcctttgtgaactccctgggcttgtgacaatatatgtatttgccttgaactttttcggtgaatcaaccctgaaaacacttgttaaactttgcaggccttggtcgtatcacaacagtggatcctggccaacacttctttggcaggtatgcagatatatgtcagtaatttggattagagaaaaagtattaacaattctcggttatgcatatcatccttaacatctgaggatttctggtttataatagacttttgtgtgtgattttcgaaacagttcacattagcatgtatgaagatgggaagaccagagctagctgaaaaggctcttgcagtggctgagaagagactgttggcagatcgttggccagagtactacgacacccgatctggcaaattcattggaaagcagtctcgcctctaccagacatggacagtcgctggattcttgacttctaaactcctcctagcaaatccagagatggcatcactgttattctgggaagaagattacgaacttctcgatatttgtgcatgtggtcttagaaaatctgaccggaagaaatgctcccgagtcgctgccaagactcagattcttgttcgatgaatgcaaaacagtctcttttgcttctctgaacattcgaacacaataagctttttaggctatagatcttacagaaattggaaaatcattacagaaa

SEQ ID NO: 144035 - DNA, 1713 bp, Arabidopsis thaliana landsberg
ggagagatgaatcacggccaacaatctggtgaggcaaagcatgaagatgatgctgctcttacagagttccttgcttctctgatggattatactcctactgtatactttcctttgtactagttacaactttttctcggctctacatgactgaaatttgggtattgattgagttctggatttttatttttctttcagattcctgatgatttagtggagcactacttggctaagagtggatttcagtgccccgacgtacgattgtaggtatttccgacaagttatatctgatacttacaatgaaagagcagataagttgatattgaatggaatcattgttgggtcttagaatgggtgaccagtagttagatcaatggcttggtttaaatcattttggattaaggttttgccctgtttaacattcctgtaaaatggtatgataaagaagtctatgttggactagcactgaaaaagattggcaatttgaatgtaaacttcagagttcagtttgaatgcgtagaataatgaggggattcttctctttctatcaaattgagtgctgaatattggtatattttagtttttgagtttttcactcctgtcataatcttttcctgtatctattcttgccaatattctgtttttttgtttacttgtttgacaggataaggctagttgctgtggctacacaaaagtttgttgcagatgttgccagtgacgcccttcagtaagttttcattctcttcacaacgaattatcataccctttttcatatttgacttgtaattgagaaagagaagacactgcccattctgagtagatgagatgaaaagatgtctacgctagattttcccagaagctaaaagcattgatataagctcctgaataataaaaattgtcaattatatacaggcattgcaaggctagaccagcaccagttgtgaaagacaaaaaacagcaaaaggtaacatctgactcccttttgttttttttccctctgcaagactgcaacaaatatgttttggatgatgacatgaatattaatgtttccttaacaggataagcgtttggtattgacaatggaagatctttcaaaagctttgcgtgaggtaaatgcttcttcctctaagttcatgcttctggtattgttgtccctcagacctccaatgtatgagaagaaaatgtagatgtctcttgtttttttttacttaagctgcaaattactctaaatacacatggcatgaaactaattcagtatcacagaatcaacataaaatgcttagaaacatgttttagagttagtggttataatattgtgtattgcagtagtgtaggtagataggtaaggttttacagtctcgtcttaactagtagtgggaagctaactcgtgagtaaactcggtttggcagtatggtgtgaacgtgaagcatccagaatattttgctgatagcccttcgactggaatggaccctgcaacaagggacgaatagaaaccaggaattcctcaaaatctttgcctaataaggacggtcatgtgtctcagatccctgattctctgatgtgtttcagataaaaacaaaactcacttgtcttgctagtcctcaattactacattacatgtatattcgtttgttgtttgttctctggtgatttttggggttctagatcacttatccaccattcttgcaagtctccaagtcgtgaaaataagataa

SEQ ID NO: 144036 - DNA, 127 bp, Arabidopsis thaliana landsberg
gtgatcattcagattattggcagctagacttgctgttgaatatggagctgcagggataatagtctctaaccacggagctcgtcagctagattatgttcctgcaactatagtggccttagaagaggta

SEQ ID NO: 144037 - DNA, 507 bp, Arabidopsis thaliana landsberg
acaacaagaataaatacatcacatttttcagacaaactccaatttcacagtgaaaataaaaacaatgacaagctccgatcaatctccgtcgcacgacgtcttcgtctacggcagtttccaagaaccagccgttgttaatttaattctcgaatgtgctccggtcatggtttccgctcaactccacggctagtacgtctctctgtctcttcacttctccgatctttatcttccttaagcgtcaagaattgattcaattcgatttatttttgcagtcacttgtatagacttaaaggtcgtttgcatccatgtatttctccttccgacaatggattaatcaatggcaaggtattggtttcttctttgattttgtgttttggatcttagaatataaccttgatgtttttgttgttgtagatactaactggattaacagattctcagttagagagtttagatatgattgaaggaactgaatatgtgaggaagactgttgaagttgttttgact

SEQ ID NO: 144038 - DNA, 712 bp, Arabidopsis thaliana landsberg; identical to SEQ ID NO: 18583

SEQ ID NO: 144039 - DNA, 1734 bp, Arabidopsis thaliana landsberg
tgagctcaaattgaaaacacgagcttcctaaaccctagcagcagagtcttccgtaaacccagctctcttagctctcacgcctcgtcaattgttgacctgtaggatagatatgggcaacgagagcaaaacctcggctttggaatcggagcagaaggctcttcttctccgttcggtagctcaatacttggaacgatgtggtttttccaaatgcttcaagaaattgctctccgaagctgaaatcgaggtttgtataatcaattttcgaactttaagagacttggcttttgccgtttggtggaaagaccaaaactttatccttaattgatgacttcactgtagattagattactatggaattgatactttgttaatatagcgtaggattctgacaatgaatctgctgttttgttattgtttcagaagaaggaattgaacactagtttacctgatttagaggaaattttcagcgagtttttgaacaagaggtaagcttgtctcgcttgtttcgcttctcaagtatgtaacaagatgttctttattcgaatttagttgcattgtatcattagtcatgttctgtgtcttgcagagatcatgaagctgcagctaatggaaataccgaggcgaatgtagtggaagctgtagagaatgtaaagaaggataagaagaagaagaagaacaaggaaacaaaggtggaggtaactgaggaagagaaggtcaaagagactgatgctgtgattgaagatggagttaaggagaagaagaagaagaaggaaactaaggtgaaagtaaccgaggaggagaaggtcaaagagactgatgctgtgattgaagatggagttaaggagaaaaagaagaagaagagcaagtcgaaatctgttgaggctgatgatgataaggagaaagtttcaaagaaaaggaaaagatcagagcctgaagagactaaagaagagactgaggatgatgatgaagaatcaaaacgtaggaagaaggaagagaatgtagttgaaaacgatgagggtgttcaagagacacctgttaaggagactgaaactaaggaaaacggaaatgctgagaaaagtgagacaaagtcaacaaatcagaagtcaggaaaagggctttctaactcaaaagaggtatttgcgtttgcatcagttgaatctttttgagggggatcgaggattgtgtactgatgtgttttttcatttatttacagccgaagaaaccgtttcagagggtgaacgttgacgaaattgtgtacactgagaatagcaactcgtgctattcaaaggttcgatataatcttcattgctccttgtatagcaatctttgttttatcaatgcctttattgaagtttgcttcactgtcttatagggtggtgctgaaattggctatggtcttaaagctcaagaggttctcgggccagtgagaggaaggtaatgctcctccccctatagacttattgtatagagttagacaacgaggctctaggttgttgattcagtttggttatttcgggtttgacaattcataactaaagtaaaacctagtatgttcctcaccctttggacttgtcctatatcactgatttaggctcatatcttgatctcttatatttcaccttgttttggtttagggatctccgacctcagaagacgaagaagaaacgaggaagctacagaggaaaattgatcgatcaagagtcacattcgactaagtttaataactcagacgac

SEQ ID NO: 144040 - DNA, 573 bp, Arabidopsis thaliana landsberg
ttgtagttgaacagctttgtggaaggagtttcgcaaaagatcaggagacagatcgaagaattggagaggatttctggtgttgagagcaacgctcttacagttgatggagttcctgttgattcttatctcaccaggtatttgtgattttccgtctcagaaggagttaattgctaatttggtggtgatcgaattgttaaagaacgaaacttttgttgattggtggactcaaggtttgtgtgggatgaagctaagtacccaacaatgtcacctctgaaggaggttgtggacaatattcagtctcaggttgcaaaaattgaggatgatctcaaggtattgtagcttaaaccttttgttttattgtaaaaaaagcggaagcttcacctttaagcagaaagattagctgcatgagaccgatggtataaaatttgcaattccagtttcttacgatgatcaaatgaattgctttggttcaaatggtggtgttaacgactctgattgcacattttattcaggttcgtgttgctgaatataacaatatccgtggtcaactcaatgccattaaccgaaagcaaa

SEQ ID NO: 144041 - DNA, 1081 bp, Arabidopsis thaliana landsberg
atgtatcacggtgttgacaaagaaggtagacctatttacattgaaaggctagggaaagttgatcctaacagactcatgcaagttacaagcatggatcgatatgtaagatatcatgtaaaggagtttgagaggagctttatgatcaagtttccttcctgcactatttctgcaaagaggcatattgattcaagtacaactattcttgatgttcaaggagtggtaagtattttctacagttcatgatattagttgtgaaatgagtttttttctcatgtgtttatataacttcatattcagggattgaaaaactttaacaagtctgctcgagatcttatcacacgattacaaaagattgatggagacaattatcctgaggtattagttaattggagcttctaatacttgatctcaggtatcaaatgctaatcttggctttgtggtatttcatgcagactctccaccaaatgtttattatcaatgcagggcctggatttaggctactctggaacactgtcaagagctttcttgaccctaagacatctgctaaaattcatgtatgagagatctaagttatatctctatttaaaagtcttgtctttgattatatagaattcaatatggactattctattgtttatgtaggtactcggatacaagtatctaagcaaattgcttgaagtcattgatgtcaagtatgtgaaccttgacccacccttatttgatctgttctatcgaaagctgcacgtttttttgtttttgcttatgttcaaaatggtctgcacttttttatagcgagttgcctgagttcttgggaggtgcatgtacttgcgcagatcaaggcggttgcatgctttctgacaagggaccttggaaaaacccggaaattgtgaaggtcatttacttagactaatctctttttggattctatttgtatcatccaagttggaatctgagacatttggttttcttctcattatttcagatggtgcttcatggaggagcacatcgagcgaggcaggtggtgaaagtgttgaacagcgaagggaaagtcattgcttatgcaaaaccttcatatacatgg

SEQ ID NO: 144042 - DNA, 1747 bp, Arabidopsis thaliana landsberg
ctttctctctctgtctttccttgttcaaccctcgagagattacggatagtgaaagagaagctacaaaatttcccaatttatcaaaaaatagaaatttcttacttttttcaaaattcatttctccccaaaaaaaatatcttgtgaaaactgcaactgtgatccatggcggaggatatggctgccgacgaagttacggctcctcctcgtaaggttcttatcatctccgctggtgctagccactccgtcgctcttctctgtacgtctctcttcttcttcgctgttttttttccttattacggactcaaataatcaccggaattgtgaaatccgctgctttagtaggctgtgctcttcgcgaattctcttgatctggcctttaatcgagtttcccttactttcgtcgtctactaatgagtagttttatgttttgattttgtagctggtgacattgtttgttcttggggtcgaggagaggatggacagttaggtcatggcgatgcagaggatcgaccttctccgactcagcttagcgctttagatggccaccaaattgtttccgttacctgtggtgctgatcacactgttgcttattcacaatcaggcatggaagtctacagttggggatggtttgtttctcatcattatcttcttctttgctgctgaatcaattgctcttcagtctgtttgatatattcgggatgagatgatgaccactagttcctctctagatttttgtgtagaaaacagtaactaattatacactcatttgcacatattttaagcctcgtgttctctaacctttatgtgtactttgcaggggtgattttgggagattaggccatggtaactcaagcgacttgtttactccgctaccaatcaaagcattgcacggtattcggatcaagcagattgcttgtggggatagtcattgtttggctgtcactatggaaggagaggtccagaggtattttctctttgttattgttcttctccttatgtgcaatcatttacagtttacatctcagctcaattagatgaatttcatcggaatttgataatgtcgattgcgtcctgtgtcatttctatatatcttggttattgtgtacattgccttttaaacgttttgtctgtcttgtcttgttttccaacatatctctttgacttctgtttatacagttggggccgcaaccagaatggtcaacttggtctgggggacaccgaagattctctagtgcctcagaagattcaagcctttgaggtttgtatcactaaatattcttctaacatcttttttcgttgtagtttcctcaacttgccaaatactatgcttcagaattgggtcaatgttgggtctatttctgcaacttgatcttcttaaacatatgactgttactagttaagggtccacatctggtgaagatgtcttcagaatcataatttaagttacataattttaggagtggtagatactaaattggatgtctatgtgttatactatctgcaaaacacagatagaaggtaggatcttattgataatttatcggactaggtaaactagaagattaagtgattagagaccctgagtttatgttgttagtttcgctgatctccattgttacatcaacactttaaacttgtaatgggtgcagggaatacgaatcaaaatggttgctgctggtgcaaaacacactgctgcagttacagaagaatgggccctctatggatggggctggggaagatcccgaaa

SEQ ID NO: 144043 - DNA, 2361 bp, Arabidopsis thaliana landsberg
  unsure (1)..(2361): unsure at all n locations
agttgtttctttcttctctgtttttttgctttcgtcttcaagagagagagagagagagatacaaagagagaaatttggttgtttgttgacggaagcttcttcggtctctcttctccgtcttacgattgtcaacgcgtggttccatcttcaattttgtttctattttagcagaagtttctcgagcttcaaatactgtttcagatcaatcaatcagtcaatcatggctagctctggaaacaagaacatcaacgccaaattggtcagtttaattattctgggttttgcttatcctttgaaggatgatcgtcaattttgattagatcgttgatttcgatgagttagttctgtttccaatttggggaattttcaaccaaattctctgatctgaaattggatgattgtgatcgaattagaaatcgcatggtttatcagtataaaactagggtttggagtaaaggttatagattttattcgatctggtagttttgttttagggttctaacgagtcagaagaaaaatctgtttttttccccctttattttgtttttggtggttaacttggttaagcgcttcaggtattactaggagatgttggagctggaaaatcaagtcttgtgctacggtttgtgaaagatcagtttgttgaatttcaggttggttggtggcattttcctcctgtgatcttgatagaggttttcttctcgttcctgtggttgattcttgactttttgatactcgttttgttgtaggaatcaaccattggtgcagcttttttctctcaaacattggctgtgaatgatgcgactgtgaagtttgagatatgggatacagctggtcaggaacgataccacagtttggctccaatgtactacaggggtgcagctgctgctattattgtctttgacattactaatcaagtacgaactcacgatccttgtgtttttagtcacgaatgcaatatcagtggactttagtggcagtttaaggctctctgcaaagttaggtttgcttaatttttgtttttctattgccacaggcctcatttgagagggcgaagaaatgggttcaggaactgcaggcacaaggtatggaatagctgactttggttttagctagtttatgattcctactttctgatagttggtgtggtttatttggtaccattatatgttaatgtggatcatgtgaataggtaaccctaatatggtgatggctcttgctggaaacaaagctgatttattagacgcaaggaaggtgtctgcagaggtaaactaaatctttctttcttttgctgtctgattttgctttgctaatgccaaaaatcttgatgaaattcgaaagtaccgggagaaaatgttaactaacactcggggatgagattcgactggtgcctgtgaaatcttctattacatcacctaccgacttgtttttttcatttctgagttgggttgttaagtaggtcttgatattgntatttacaggaggcagagatatatgctcaagagaacagccttttctttatggaaacctcagcgaagaccgcaacaaatgtcaaagacatattctacgaaataggtgagtcattctttcatcaagaaagctatttccaacaattagttgttttcaattaaatccctttttcacttttgtttctcttgttcaaaccgctacagcgaaaaggctaccacgtgtacagccagctgaaaacccgacaggaatggttctcccaaacgggccaggggctacggcagtgagttcatcgtgttgtgcttagattcgtacctgaagagagatctcatttggttagtcacatagtagagaacatctggactttcatgtgtttgcttcttcttcgtctttgttactttactttgcttgcattgacaacaacaacagtgtatatcatgatgatacttattctgcctttgtgaaatctgaagatatttgtatttggagagatttatatatatatatatatatatatctcttttgtaattagaaaacaaaacttagtccgaaaaaaatgtgcttatctttcgtttatgttttaagtgaatgctcagatttataggccttattatcttttgtattacttaaatctccaaaatgttttttccattgttggaatgctgtactatgaaagtatatatcaataaaagaaacacctttgaaaaaaaaaagtggcattggttctctctcccttctcttctttcatctttcaaagagaaagaagttttttcggttcagattttgccggcgttcttctccaatgactttggtctcacttcgatagcatcttcgtccggctatgaattaagtggaataatattcttgtcaaggctttcgatttccaatggatga

SEQ ID NO: 144044 - DNA, 671 bp, Arabidopsis thaliana landsberg
atgaaacccgaagcctgcaccttcttatgggtgagtattctattatattagtagcacagtgttaatcttctttaatttattttgagacattcttctcataaacatttattgttgtcgcagaccgagcttgatttatcgagctttgtggacatcgaagacgatcaagacttttgcaataagcttgctaaagaagaaaacctcgtcgttttaccaggtaaatagttaatcaatctcttttacttatggtttcttagccctttctacagtttcaacacatagtatcaagttatagggtttaggatttatagaaaaaattattcggacactacttaattataaacataattaaggacatgttgtgtgttggatttgatagggattgcattcagtcagaagaactggttgaggcattctatcgatatggagactccggtattggaggatgcattggaaagattgaagagcttctgcgatcgccattccaacaaaaaagctcccctcaaagacgtcaatggtgttaagtaaagggtcaatatggttatttgcctaagtcatttacgtatgctataatgataaataaatgagtgtttcttggtttgaggtaaatcatgaacactttagtgtatttgtaacaaataaaattggtgcacttaatatcaatcgtgtgtaat

SEQ ID NO: 144045 - DNA, 1690 bp, Arabidopsis thaliana landsberg
caaatccgagtccttcttcttctttttcttctcgatctctgtatctctggatcatttggttctaaaggaagcgtctttgatctgaatcgtcgtgtcgttcgtttctaactgtaagttttctccttttcattcattttgcttcaatctcgatcggaatcaagtaaaaaatcggaacttttacctagatttcctcaggaatcgaaaagttcttgtgatttagcagaacctctattgtttccgatctcttaattcaattacttgacaaaagtgattatactttctctgttgcagttatattgaaagatggaaacagaaacggaacatgatagaactgtctctgtcgatgacaacgacagccttgtacctgagccaagctcaacgaaagaaagcttttttgaagatctctcgcttactgggcaagttatgaatcctcaactttcaagtgcaggcgaagttttgacaaaagttgaattggattttgcttttgtctctgagaaattggtcaatcttagtcttcttactatgcaactcggcacgagggaaaatgattttgagtcttttgtttctaagaaagaagaagatgaagaagagccttcgagtaatgttgatgatgatgatgattctgctgagaaggcattggagtttgatctcttgtcttcaattctcaattcagaggtgaaagaacttgaatcgcttcttggttttctccagaacgagattcaaagcgcccgtgtcatgatatctccgtttcaacatgatggagaagctttcttggatttggaagggaagttgaatgatactgaacaatctttgggtcagttaatggaacaagtagtggaaatgaagaagcaatcttctaactttcagaggttatcttctggtttggatgaacaaggaagctgtaagtgaccaatctagctttctttttaaccttgttgtgatgatcacttggtgagaaaaatttcaggctttaatgaatactatataactttgtttttgcagggtctggagggcaaacttcagtgtctcaaaacgatggtgagttttgtgatctaagcgctaagatcaatatgcagactgctgatcagcaaaggaatgttttaaggatgcttgagaaatctttggctaaggagatggaacttgagaagaaactaagtgaatcaagaaatactgaacgagaactagagatgaaactgtattcttctgagcaggatgttgtctacatggaagaagtaaccgaagatgcgttctccaggtggcttgaggcagataatgctgctgaagtctttaagggaacgtcaaaggagatgtctggaaaactccagattcttcagttcaatctaagtggctcttttaagcgggaagacaacttgaagtctaagcttgttgattcaaaggaacgtttagaagctaaggaatgcgccttgcacaagcttgatagcagcaatgcaagacttgctgactttcttgtggcacaaacagaaggcttaaaagagagtttgcaagaggctgaagaaaaattgattttgttgaacactgagaattccacattaagtgagaaagttagctcccttgaagaacaactgaatgaatatgggattcaaacagaagatgcggatgctacttctggtgctctgataacagatctttgacgtatcaacgaggaactgaaagataaatagccaaactg

SEQ ID NO: 144046 - DNA, 1257 bp, Arabidopsis thaliana landsberg
cgacacactttctcgccgataaatgggaatcatatcggaagaagaaggtcgtcattcgaattggatacgttggtactgattacagaggtaagaatgtttagttcctgattggttttaattatgaattgaagcattcttctgtataaagtttgtgactttgttctccattttcaggcttacagattcaaagagacgacccttctatcaaaagtaagtttcaagtcgtaaagtttggatttttactttctacaatgaatcttagcataaaccctaaaccccaattcttctgttggttcctgcaatttcttctttcgcttgtacatccctgtaagatcatgtttttatgtacaccttgaatttgtagctattgagggtgagttggaagttgctatatacaaggcaggtgggattagagatagtaactatggtgatcttcataagattggttgggctagaagtagtcgaactgataaaggagtaagctttttttttcttgctctgttccataagtaatgattgtcttctgatgcattgtgtatgtcttggattgttgtttattgataagttgttttataggttcattctttggcaacgtcaatatcgctgaaaatggagatccctgagacagcgtggaaggatgatcctcaaggcactgttcttgctaaatgcattagcaaacaccttcctgagaatattagagttttcagtgttttaccgtcaaataggtcagtgagaacttttatcatgtcctgagcttggtgcaatatgattctagcatttgataggttgcaagctcatacttaaatcatttacaattaaaagctttgtatcttcacaggagatttgatcctcgaagagagtgtacgctacggaaatattcttacctcctccctgttgatgttcttgggatcaagaatagctttacttcagatgagattgactatcacattacggatttcaacgaaattttaaaagaatttgaggtgagggtctttgcatcgtttctttggttatcagagacttcaagtttgttacatttttgcttcattggcactgcttttttccacttgtagggtgaatatcctttccataactatacacagcggtcacggtacagaaggaaatcggaacaaaaaataaagcaaagaaacggacgccctccaagagaaccaaaatcaatcaaagcatcagaatcagagtttagagaggagaaccacatagaaattggagaagaagaagaagaaaaagaagtggatg

SEQ ID NO: 144047 - DNA, 1262 bp, Arabidopsis thaliana landsberg
agctctctgtcaccttcagaatgccttattgaagaactatgagatcgactgttggacttgtgcaggtataatccagcctcaaatgccaataagatttctggtgggaacttaggaagcacttcgcttcaggataataatagtcaggatcttataaaaaagactgaagcagcatatgattgtcactcgaacatgaatgagagtctcccccataatcatcgctcacatgtcggtagcaataactttgatatgagttccacgactgagaacaacgctttcacaaaaccaggagctccaaaagtaagctcagcaggatcttcatcagtgaagcattcatcgtttcagcctttaccctgtgatcatcataataatcatgcctcctataaccttgtccatgtcgctgagaggaagaagctaccgccacaatgtggatcctcaaatgtgtacaccgaaatgattgaaggtaacaacaacacagtaaattacagtgtgaatggaagtgtatcaggtagtggtcatggaagtaatgggccatatggaagcagtaacggtatgaatgctggaggaaagaatatgggaagtgataatggtgctggcaaaaatggaaatggcgatggtagtggaagcggaagtggaagtggtagcggaaacttggcggatgaaaataagatctctcaaagggaagctgctttgacaaagttccgtcagaagagaaaagagaggtgcttccgaaagaaggtaaattctcggtcaaatctataacaaaggaaaaaaaaagtattcttgtaaattgcgaaagcaaatgcaaaccgcaaaaatgttttttttttggctttctcaggtacgataccaaagccggaaaaaactagcagaacatcgccctcgagtgcgaggccaatttgtgcgtaaaacagccgctgcaactgatgataacgacataaaaatcattgaggatagctaacggaaaatcaacaaaacccactatttctcagcccaaaaacatgagtaatgtgctcatatctatcttatatatatatctatcacatgttttaacattttcccttcaaagtctgattctttgataatactactactattcacgaaacaaagacactacgacatttgattgtttgttattattgtcgttgtctggtctggtttgtgaaattaggacgaagggtttggtttcaggatgtagtgaaatctttgtagatgttgtaaacttgtaaaacaataaccccttctctgtatattttttggtataa

SEQ ID NO: 144048 - DNA, 1005 bp, Arabidopsis thaliana landsberg
gtgtgaggggtacaattgaaaggtacaagaaagcttgttccgatgccgtcaaccctccttccgtcaccgaagctaatactcaggtaccaatttatattgtttgattctctttgttttatcttcttcttttcattatatatatgatcaacaaaaaatataacctacaaaaagagagagttcttggaaatgcattgaaacggtttcgttatggtgtttgaatacatggatttttgaagtactatcagcaagaagcctctaagcttcggaggcagattcgagatattcagaattcaaataggtaattcattaacttttcatgaactcttcgatttggtattaggtcacttaatttggtgtcggtccaaaagtccgcttgtagttttctttagaagttgttttgtttaatgttcatgtttacaaattgaaggcatattgttggggaatcacttggttccttgaacttcaaggaactcaaaaacctagaaggacgtcttgaaaaaggaatcagccgtgtccgctccaaaaaggtaaaatctacgttgctctctctctgtgtctctgtctctctctctatatatagtcccttagtttatatagttcatcacccttttgtgagaattttgcagaatgagctgttagtggcagagatagagtatatgcagaagagggtaagaacgtttctcccattccaagtaattagatctttcttcgtctttgtgagggtttgagttttcccataaatcatgtgtaggaaatggagttgcaacacaataacatgtacctgcgagcaaaggttagccacgttctgttccaaatcttaatctcaatatctactcttttcttcattgtataactaagataacgtgaataacaagaaaacttttgtttttgggtttaatagatagccgaaggcgccagattgaatccggaccagcaggaatccaccgtgatacaagggacgacagtttacgaatccggtgtatcttctcatgaccagtcgcagca

SEQ ID NO: 144049 - DNA, 480 bp, Arabidopsis thaliana landsberg
acacgtctcacttatctctcttcttcatttcttctctcttcaagctccaagatgtgtttaagttcttcagaaacattttcagacacacccacgagattagttttatacctcaaaacacaaagtcacgttcgtatccctcgtctctccaggttagttcaatctccatcatcatatatacaccccctctaggagattctcatcgactatgtaattacgttctgaatcactattatttttcctttttttcaggaggagacggatgtggcgggaagagaaaaagatggagatgatcaatctaaagctttacgtggagaatcaaaacatcataagagagaacgagaaacttaagaagaaagctcttcttcttcaccaagaaaacaaaactctcttctctctgcttcagaccaaaaaactctcctctgtccataaataaaatcttaccatcatcaccaatcactaagatcatcatattcttctttc

SEQ ID NO: 144050 - DNA, 678 bp, Arabidopsis thaliana landsberg
ataagagtagactagagtcttcttggttgtgattcttttccaatttcgtaattttaggtacctttttgctcttgttgctcttgtagattatgtttaatgggtatctcaaagattcatgctttacttgttaaatttctgggtttgggttcttataaccaattagctgatttttgaactgttttagaacttagatcttactcttagaggatagagacataaagaatctccattgtttgatatatcacttacgttgtcttcttgtctcattgattcgagcattgtagtcttttagttgccaaatgcaattgtgaaaatgtacaaaactgttcttgtttcatatctgcagtaaaattgtttttggtatttggtgttctgtagatttctcttgtttatgtctttcatgtttgtttaaattgggtttataaatgttttgtggataattcatttgacataataatgggtatgtttcagaaaagttgtagaagatggcgagtgtgtcgtggcgggctgtggctgtagctatggtggtggtgttgctgtcattgcagtggtttgcaaaagggtacccggaagaagatttggtggtgaggctgccaggtcaaccaactgttgggttcaaacaatacgcaggttatgtcgatgtcgatgtgaaagctggtcggagtctgttctattact

SEQ ID NO: 144051 - DNA, 1894 bp, Arabidopsis thaliana landsberg
attcttgagatgagtccagaggatgatgcagaggaagatggagcgaatatcgatctggactctcagaggaagggaaagtgtgtcgttctaaaaacatcaactcgtcaggtgaagttttagactcttatatcaccgttagagagattttcagaactagtggggaacaaactctgactactagtgtagtgtttgtataatgatctcatgggttaattatacttttcagaccatcttcctccctgttgttggacttgttgatccagatacattgaagcctggggacttagttggagttacaaagatagttacgtgattctggatactttaccttctgagtatgattcaagagtaaaagcaatggaggtcgacgaaaaacctactgaagactacaatgatatagggggactagaaaaacaggctagttgatgactctcctgtttcatgtttccttagtttttagtatctctggtacaatatttgatgttggtgactctcctgtttttgtaattaaacagatacaagaacttgttgaagccattgtgttgccaatgactcataaagagcagttcgaaaagttgggtatccgtccaccaaaaggtgtactcttgtatggtcctcctggaaccggaaagacgttgatggcccgagcttgtgcagcacagacaaatgcaactttcctcaaactagcagggccacaacttgttcaggtatgaaaactagagtaaacgtaactgattttgatcttgttcctgtgatattttttgaaccaaacggaaagtaactttttttagacttatgtatagatgttcatcggagatggagcaaaacttgtccgtgatgctttcctgcttgcaaaagagaaatccccttgtattatattcatagatgagattgacgcaatagggacaaagcgttttgataggtactctatctagagtcatgtcataactattttattttctttctgatgactaatgctgacttttaattggcttacagcgaagttagtggagaccgtgaggtacaaaggacaatgttggagctgctcaaccagcttgatggattcagcagcgatgatcgcattaaggttgttacccctcatattacccctgcaaatgtctatttatttagtgaaaggcatgaaaaactcataattttacaaacttaggttattgcagcgacaaatcgtgctgatatactagatcctgcccttatgcgttctggtcgtttggatcgtaaaatcgagtttccgcaccccactgaagaagctagaggcaggatcttacaggttctgtatcctttactgcatcttttcttttttctttctttatttctatgtcgttttaaagctaaaattagagagcttcatgcacttagacaagtcttgctgtgattttctatgtattccgcggataacttatcttgggtactgttttgtttttgcataatgttggcgatggggttacagatacattcaaggaaaatgaatgtgaatgcagacgtcaattttgaagagcttgctcggtcaacggatgatttcaatggagctcaactcaaagcagtgtgtgttgaagcgggtatgcttgccctgcgccgggatgcaactgaggtatgcatatatctttcgtcttagtggttgtaactttaggatgtggatgatatggaggaaatggtaaatgtgtgtgcaggtgaaccatgaggatttcaatgaaggtataattcaagtacaagccaagaagaaagcaagcttgaattactacgcctaagtcctcttttatgtacactcttctttctcctctttacattatagaaaacttcaagttgtagtctcaacttttgaatctagaaccccttcaaagtgtggttataattataatagatatcagcttgacat

SEQ ID NO: 144052 - DNA, 219 bp, Arabidopsis thaliana landsberg
attcttctttatctctctctctctctcaagactattgagcttctttcttttttcctgagtcttttagtctgatctcttacaagaatggcgttcgcaggaacaacccagaaatgcatggcatgtgacaaaacagtttatcttgtcgacaagttaaccgccgataaccgggtctaccacaaagcttgtttccgatgtcaccattgcaaaggaactctcaag

SEQ ID NO: 144053 - DNA, 411 bp, Arabidopsis thaliana landsberg
ggtcgaaagagaagaaagctgagacagggtagctgagaaagccattggagaggccaccaagaattttcttttttctgtgttcttggagtttcgggataagaccgcaatggtctccaagtctcaacggtctaaaacagacatcactgaacgaatcataaaatgccacgtaagtgcaaacaagtttcctctgctatacaactaggattatagtaatagataatgtatttcaagtttcaacaaagattatattcgttttttttttgttttctgatgcttgaaagtttatgaattatacacacatacaagtgaaatcgtgtatgtcacatggaagatcatatacaaaatctttttacgtgtacttttaaattatatgttacattatagaatctaattgatctggtagtgaagtag

SEQ ID NO: 144054 - DNA, 1071 bp, Arabidopsis thaliana landsberg
acaaaacaaaaccaccattttctctctctctctctcctcgccagcttctgcaattcgaaagttcttcgcatcatcttgctgtcaccactctctcgcgaatcgaatcacgattcttcaatcttcttcttctctattgcgatctctctgaattttgtagcttcacgatttcaatatctctactttcatcaccaatcgttgggggtttagggtttttgcatcgacgccatctatcgagctccggagaagcatactcatcttctattttggctaaatccgaggtgggttttgctcaggttttgctcttttaggtttctgttgggttttaatcggatttttttccgtatgattctgaaattgctaaaaccctaaattgaacatgtttttgggcgtgcttcgttgtaggtcaacttaatctctacgaaatagcttttgagtgatgattccgatggataattattgcgtaccgagcactagcacgaccggtttagtgttttcggcgacttcgagcatgaatgcttcttctggatttcatcttactgtaaattctccgacttccgttaccggactcaaacatgaagcttctttggctgttgattggtctgttgaggaacagtatatattggagaaaggtctttcaaagtaagtatttttgttattctccattgttcttcgttctctgcaaattttctcacttcgtagctattatacaatgttagagtagataaatttttatatgtagatgaaggaaaaggttttgcatttatgtttcatatgaactgttatagctcgtgttgttatctggaatcataagctgattcagattcttatagatgtattttgtatcagaaaatttctacgaaagatggctgagtttttctctgtgttagtttcttacctttcgctgttttatgttgttcgagtttgtcttttattgttttgtttgcctaaaacctttgtcatgtcttttgtagatttaaagatgaaccacaagtcacaaagtatgtaaagatcgcagcaactctaccagataaaagtgtacgggatgtagcaatgagatgtaaatggatgacg

SEQ ID NO: 144055 - DNA, 160 bp, Arabidopsis thaliana landsberg
atggtgaaattcgaaaatgggtatagtgtagagactgtgtttgatggaagtaaacttggtattgaaccgtattctattgaagtcttaccaaacggagagttacttattcttgattctgagaacagtaacatctacaagatctcatcttctctttcacttt

SEQ ID NO: 144056 - DNA, 2207 bp, Arabidopsis thaliana landsberg
gatttatgtttgatgattttgtatgatgtgtttttggtttgaggatgatttattcctttggtcttacttttctctttttgtgaatttaagcagtgaagcttgaatcatggcctcgagaattgctaaagatgtgactgaagtaaggctttcaagttctttcactgttcatttcacgaaggagtgagctttgttccatgttcatgtattgattgattctatttggcagttgattgggaacactccattggtgtatttgaacaatgttgctgaaggatgtgttggtcgtgttgctgctaagcttgagatgatggaaccgtgctctagcgtcaaagacaggtttcttctctagtccagaaactatgtgttgtttctcgcttcgagtttcggttttgtgaagaccttgtactttgtttatttctgcaggattggttttagcatgatttctgatgcagaaaagaagggtcttatcaaaccaggagaggtcagtttcgattatctgaatcttcaaaccactattttgtttttgttttcattgtttctgactttttgtttgttctttagagtgtgctgattgagccaacaagtggaaacactggagttgggttagcattcacggcagctgccaaaggctacaagcttattattacaatgccagcttctatgagtactgagagaagaatcattctcttagcttttggagttgagttggttttaactgacccagctaagggcatgaaaggagctatcgcaaaggcggaagagattttggcgaaaacacccaatggttacatgcttcagcagtttgagaaccctgccaaccctaaggtatgcttattatttactattgctttagtgtatctgtttttgtctgtttttgaaccatattaagtcgatggaatttcactgtcaaatgcagatccactatgagactacgggacctgagatatggaaaggcactggtggcaaaatcgatggctttgtttctgggattggtactggtggtaccattacaggtgctgggaagtatcttaaagaacagaacgcaaacgtcaaggtgagagctccatcttttcgaacaactggctttgttatctaagtgactaagtggtgtgtctttgcacggtttctcattttgtttcctcttctgttagctgtatggagtggagccagttgaaagtgctattctatccggtgggaagccaggtgattttggttccccctgcgtttattacgataaccatgcatgcatgttcctcgtttctcggtttgcctcatgtcttattttttatcctcggagtttcctaacacatgatgtttgctgaaaatatcaaggtcctcacaagattcaagggataggagctggttttataccaagtgtattgaatgttgatcttattgacgaagttgttcaggtaagactgctttttatattatcgactgatagcaaaacacaattgaatgcaagagagcttcatttcttacttgactctcttcattttcctgtaacgcttcaaacaggtttcaagtgatgaatccattgacatggcaaggcagcttgctcttaaagaaggtcttcttgtaagtgtttcacatttcacaacaaaaagctatctccatcagaattacaacttcgttctgtttctaaaaacaaaagctatactgtaggtgggaatatcatccggtgcagcagctgctgcagcaattaaacttgcacagaggccagaaaacgctgggaagctatttgtggtaagctctttgattctatcatcaccccaaagccaataagctctgattacataacccggatttctttctgattctgatgtaaacgaaatcaactgaattattttacaggcgatattcccgagtttcggggagaggtatctatcaacggtacttttcgatgcgacaaggaaagaagcggaagccatgaccttcgaggcttgaacattctccatttcttcttaagagacgccaaaataaaagagatgttcagtttctcctatagagactcttcatctttagttacattgcgtctttgcttccatctgtatcttctcttgtgtgccaataaaagtcaaactagattttctctgtttcttttgtgaaccacttgcttgttaatgaagtttaaatttgctatgtaactttgttcatatcatactgtttcatgatcaaaactaaaccaacataacccaagtcaatat

SEQ ID NO: 144057 - DNA, 1894 bp, Arabidopsis thaliana landsberg
ggacattatagacacaaaagatggaagctataagatgcagaagaggcagagagaacaacaaaagtccagagaggatcataaggtctttgaatcatcatcaacatgatgaagaacttgaagaagaggtcaagacaaagaaacccattttccgaagagtccaagttgtttactatctcacaagaaatggccaccttgaacatcctcacttcatcgaagtcatttctccggttaaccagcctctccggttaagaggtaaaagaccgaacaacagaaagagggagatcactatacgctatttatatatagtccatgggtcttgctctgtttagtgttttgatctcaatttatgctaaactttcgatttttgtttcgtatacatcaacttaagagtgtgtttgttctaatgaagatgtgatgaaccggctaacgattctgagagggaagtgcatgacatcacaatatgcttggtcgtgtaaaaggtaacaacgcttttaaaatgaagcaaaatctgtaatcaaaagcgcaaatgttaaacattgtattttgatatattcatcaggagctatagaaatggatttgtgtggaatgacttagcagagaatgatgtgatttacccttctgactgtgctgaatatgtcttgaaaggatctgaaatcaccggtaagctgttaaaaatcggaaactcatacaaattgaaatttgtgattttgcagaatttgagtttaaaattttatgttcttgtttgctaaacatttttgtagacaaatttcaagaagtacatgtgaacagaccattgtctggttctattcaagaagctccaaaaagtcgacttctcaggtcaaaactcaagcctcaaaaccgaacggcgtcgtttgacgacgcagagctctacgtcggagaagaggaagaggaagaagatggagaatacgagctttacgaagagaaaacgagttacacatcttccacgacgcctcaatctcgctgttctcgaggcgtatcgacggagacaatggaatccaccgaacaaaaaccgaacttgaccaagacagagcaagatttgcaagtacgttctgactcgtccgatttgactcgttccaacccggtggtgaagccacgtcgacacggagtttcgacgcgggtcgaggacggagatccggtggaacccggatcgggtcgtgggtcgatgtggctgcagatgatctcttgcggtcacatcgccaccaagtactacgcaccgagtgtgatgaatccgagacaaaaagaagagaaccttcgaaaaggagttttgtgcaagaacattgtcaagaagactgtcgtagatgacgagcgtgagatgataaggttcatgtcggagaatccaaggttcgggaatcctcaggcggaggagaaagagtatttcagcggaagcatcgttgagtcggtgagtcaggaacgagtcacggcagaaccatcgctaagacgatccaactcgttcaacgaggaaaggttagtacaccgagtcagctctaatcgacaagtatggttacaaaaattctgactaaatccttaaatatttgaacagatcaaagattgttgagatggctaaggaaacgaagaagaaagaagaaagatcgatggcgaaggtgaaatgcataccaagaacgtgtttaatgtcatcatcgaagcaaatcaagaaataaaaaaagagagtttaatactatagagtaaacgaatgattatggactagtattttattagtatttactgctacagatagatgcagtaaatggtaatgaattttaacgactacatgttgtttttttattatggggaatatatttgctccactttatctgactagttgtttaaagagaatggaaatggcaaaatccgtattcgtgttgcaaaatcgtaa

SEQ ID NO: 144058 - DNA, 1119 bp, Arabidopsis thaliana landsberg
ctttctaagatgtggtcaagaccacttcctgaagtttatgattcacaagctgttgcagattactttaattgcaggcctcatgtcgttgcctttaggcttctcgaggtatttgtttagagtttttgttggttctgctactaatcactggatgatttgaaattatgataaatgctttagagatactgatgtttatctgatgaagtgtttcgtttagcctaacgcattagtattcttgtttttcttgagtgacggaaaattcggatgtgattttaattgattcttaaaatataggtattttctgcgttcacgattgctgccatcagattacgaacatcagcatcagttaagggcaaaagtttagaagcttcagagcagatttttgggatggtgttgaaagaaaccatgctacatttgggcccaacttttatcaaaggtctgtgattagcttattatttttgaagtgaaactatccatcagtcaccatttacatttactgccatatattagatactttgatctgttgtgaatgattcttccctctcttctgctggttcagttggtcaatcgctttccacgaggccagatatcattgggactgaaatctccaaggtcagatagaagttatggtcacatttgtctaaatctcttagcttttaatagtgtctttctggtgcatgtttccattgttctttctctattctgcatgctacatttggttgttcttagggatgtagctgtctgactatgtttgttatgatttgaaactgcaggcactatctgaactgcatgaccgaatccctccctttccctggcctgaggctgtaaaaatccttgaaggggaattaggtggtcctgtcgaatcattctttagtcagctttcgcaagaaactgtagcagcagcatcctttggtcaggtatttactctggtttttatcttacaagaagtaagcatcatatgaatcaacttgtaggatgcatgccttatacttgatatgatatgttaaggtctaccgaggaaggacccacgatggtgcagatgttgcactgaaagttcagcgccctgatctgagacatgcagcgatacgcgacatctacattctgcgacttggggctcggtga

SEQ ID NO: 144059 - DNA, 365 bp, Arabidopsis thaliana landsberg
tttttctgtcacgaataatttcatttaagaaaaaaatatagaaagtcatttatatgccaacgagagacaggacattgctaaatccagctcaggacattagaaagttattctcacaatctctataaaataatccatgtcaacaaaaaaaaaacctttattaaacattaatcgaatttctaattcattatgaaatataatcagaagagtcctcatcttattgatcaatcgtaatacacaagaaaccatgactttagaggagcagaagaaagtcataatgcccgaggccgtagcatcggagccatcaccaccatccaaggaggagaagttcgactattcgaaagctattgttcttggcgtcgctgcaa

SEQ ID NO: 144060 - DNA, 4276 bp, Arabidopsis thaliana landsberg
agccaaaccaactctaccaacaaactttgaggagaatacatgggagaagttgcagtcagctatcagagctatattcctcaaaaaaaaaatttcgtttgacctcgagagcctttaccaggttaggttacgtgcaaatttacttacttcctttcttattcgtatgtgtaaatgtcgtgctgatgagattgtgattgttttttcaggctgttgataacctttgcttgcataagttggatggaaagctatatgaccagattgagaaggagtgtgaagaacacatctctgcagctttgcaatctttagttgggcagaacactgatctgactgttttcttgtcacgtgttgagaaatgctggcaagacttttgtgaccagatgctcatgattcgtagtatagccttgactctggataggaagtatgtgatacagaatccaaatgtacgttcattatgggagatgggtttgcagcttttccggaagcatctttctctggcccctgaagttgagcagaggacggttaaaggtctcttaagtatgattgaaaaagaaaggtaaatttttaaccttctggtcttccaaaattaaacgagggttgatttatcacattgagaatataatttcataaaaccactttacctcaacttacttttctggcttttgagtgaatatggtaagtttggatggtctatgaactattcctgtctagcagtgataacttgttataggtaaaatttcaaggcaaatcaggactagtgtatgtcatttatatattggataatgttttcatctgaatctgctgaactttcttgcatgatattggtcctgcaggttagcagaagctgttaataggactctactaagccatcttttgaagatgtttactgcactgggaatttatatggaaagctttgagaaacctttccttgaagggacctctgaattttatgccgctgaaggaatgaaatacatgcagcagtcttacgttccggagtacctgaagcatgttgaggtgccttgcatgacttcatatagtttccttatgattagctgcactacaggttaatagtctttctaaggtttctactggtgattggtgcagggaaggttgcatgaagagaatgagagatgcatactctacatagatgcagtaaccaggaaaccattgatcacaactgttgaaaggcaacttctcgaacgtcatatacttgttgttcttgaaaaggttccaatctcctattattcttgtgttggcttgcatattatccaattttagtttgtcgtagtcttactttatttctgaacatcttcagggttttacaacattaatggatggacgtcgtacggaggaccttcagaggatgcaaaccttgttttctagggtcaatgcacttgagtctctgaggcaggcgctaagttcatatgttcggaaaactgggcagaagattgttatggatgaagagaaagacaaagatatggtacaatcactgttggacttcaaggcttctcttgacataatatgggaagagagcttttacaagaacgaatcatttggtaacacaatcaaagattcgtttgagcatctgattaatcttcgacaggtatcaaatagtgattttcttgattattgcctgagtctcttgctaataattttactttcatgtaaaagcaacatactgattattgtggaaatgtcaaccttaaattacaattgtgaaatcgagaaatttatattttataataatctatagatttcgttactgattaagcactgtattgctatgatttggagacatctttgggcagtgaatactattttcaaacataattttgagatcaagcttcttgtgggcactggacctgattacagtagtgttgtttgctaatatatatcactttggataccaaatactctgatttagcaagcatcccaaataatatacattttatgctgataatcttttttacagaaccggccagctgagcttattgccaagtttttggacgagaagctccgtgctgggaataagggtacttctgaagaagaattggagagtgttcttgaaaaagtcttggttttgttcagatttatccaggttatctctaatttcttacatttagtactgtgtttgtcactgtaaatcactgcttcgaggccagtgcatggtctgtaaaccagctatttgatcttctggatatcggttttgctgatggatttttattatttatcaaagggtaaagatgtgttcgaagcattttacaaaaaggatcttgcgaagagactcctgttgggaaagagtgcttcaatcgatgctgagaaatccatgatctctaaggttaaaaactgatttatattctgggtgtttccctttcccacagtttgttttctatatctgtagttctcacccactgatcccaaccttggttttacctacagcttaagactgagtgtggtagccagtttacaaacaagctcgaagggatgttcaaggtatcctttcttctccttctctatattcaaaaaagacgtcggtcgtttaacgcttactaaggaacaaacttaatgatcttatattctgatacgttttacgatataccccggtatacatattcattgttaatccaatctaagacaggattggcggatgatcctgctccatacttattttaatgaacttgtgtacatttacaataatcctaatgagcttgaactctccgttttattgaaattttctccaggatggtgaattgtcaaaggaaatcaacgagtcattcaaacaatcttcccaggccagaacaaaactgccatcgggaattgagatgagtgtccacgttttaacaacagggtatgtacaatgtatcaattttatccaggatataactgctggaatgcggatatcatgacatatataaagcttgttaacttcccgtctataatacaggtactggccaacatatccgcctatggatgttaagcttcctcatgaactaaatgtctatcaggttttactaaaagttcttcttatgtatttttttttgcttcctcgttggacgttttcttacaagctttttctaagctatctgtatgtttcgtaggatatcttcaaagagttctatttaaagcagtacagtggtaggaggttaatgtggcaaaattcattaggccactgtgttttaaaggcagatttctccaaaggtaaaaaggagctggctgtttccctgtttcaggtcagtcaaatttttttttcccccccttttaagctctttcctgtcttcccgaggttacagtgttaatcaattgctcttttctttttgtctcaggctgttgtgttaatgttatttaacgatgcaatgaaacttagctttgaagacattaaagattccaccagcatagaggacaaggagctgaggaggactttgcagtcgcttgcttgtgggaaagtccgtgtcctgcagaaggtttggccaaaatctggactctgttaactctcttttcagctaatgcagaaactgccgagattatggctttgcctttttccataaggataagccttattgtgtaaatatttttgcagaatcctaagggaagagatgtagaagacggtgatgaatttgaatttaatgatgagtttgcagctccgctgtatcgcattaaggtacgttggtttttttcttggtctcttcacttaaagtatcctagaatcttgtgatactgttttgtatgtagcttatagtgaaccaattctttcttttgttcctgggtgcaggtaaatgcgatccagatgaaagagacagtagaggagaacacaagtacaacggaaagagtattccaggaccgacaataccaggttggtttctgctctccattttcctttacgatactaatttcttaaatcgttcttacaactttggcttcttaaacaagaaaagattttgacaaaatggttttccccatcacacccttctcttacagatcgatgcagccattgttcgtattatgaagacaagaaaagtcttgagccatactcttctaatcactgagctcttccaacaggtaaatttcactcctgcttgatgattttaaaatccgaaataacatgtcggtttatgaaaaaagaaagcatgaaattcgttactaggtccagtcctattggtaatatactcgtgatgatgattagagttctcagtagtctactaaatttaatataccattgctatgaatggatatatgtttgtgatttgcagctcaaattcccgataaagcctgctgatctaagaag

SEQ ID NO: 144061 - DNA, 1732 bp, Arabidopsis thaliana landsberg
aaactctatgaatccttttgggcttggtttctagagaagataagggtatgtaaatggatttgattgattttaaaactcgatcggtcgatgtgataatcatagtcagtttttttttcttcttccagatttcgagtgcgtagtgttggttagttaaggtagggtagggaaaaatcgttggcttctagtgtgttgcagtgtgtgtatttgagaatatatgatttgtgagactaaaaagccgaaatcattatcggggtttattgtttcttctacttataatgatgttgatgattgatgtcttttaggcttttagctcatcggttagtaagtgtcaacagcaagagtgttcggctggactaccgtggcccattctgtagatttctttctagcccggcccacaacttccattgggctagatatgtttttctcacgtaaaagatatctgactgtcgatattgaagtaacttcttaaaacatttagatttaattgataatttaaatgtcaattttggttttttagatgacgattaaaatccttttcataacccaaaatattagttttgccgatattagaaatccgaagaaaatgacagaaaataggattaatcaatttagggtttaataaaaaatagtgagtgagagagaggctacagtgctccacattgacatcaacaaggttgaagaagaacaacatcattcaacatcagcatcacgaatattttcgagtcatggagagaagcgccgttgcctcaggttttcatagaaattacatcctctgtgcttcacgcgccgccacttccacgacgcgcctccactctttgtcctccctcagaaactttccctcttcctctctcagggtaatttaaaaaaatatcacttcttccgaaaacttatgttttatgaacaaaatctgattcgaatattctgattcttgtagattcgtcactgtccttctcccatctcttccaatttcatcgttagtgaagtttcccgaaaccgacgatgcgacgccgtttcttccaggtttgacttcttcgatctcaatggaaacaacgacagaatcagttttagttgacttgaattcgtacttgcgttgtgtttacaattctgtgattttgtgacttttgggtgcagcaccaccgatgtgactgaattagccgaaattgattgggacaagattgattttgggcttaaaccaacggattacatgtacgccatgaaatgtagccgtgatggtgaattctctcaaggtcaattgcaaccttttggtaacattgacattaacccagcagctggtgttctcaactatggacaagtaagtatatttctctaagtcatcacctttataactgatctatggaagtttgactatacctaacttgatctatacaagttgaattgtagaagttctgatactttgttttgttattatagtgatgccttgtatttgtgtgtgtagggtttgtttgaaggtctaaaagcttacagaaaacaagatgggaatattctactcttccgtcctgaggagaatgcgatccgaatgagaaatggcgctgaaagaatgtgtatgccttctccaaccgttgaacagtttgttgaggctgtgaaaactactgtattagctaacaaacgctgggtaatttggataaggcttttgaatttgcttcttttatgtgtttgggttacatcattctacgattgatcgtcttttgtttgttacagattccaccttcag

SEQ ID NO: 144062 - DNA, 3853 bp, Arabidopsis thaliana landsberg
atgagagacgaatccaccgaggctaatgaagactgggacgagagagatccaggcgaggaaatgtccgagctgatctccgggacggtaccggacgtgtgtaagagttacggccttgagctgctgaggtattaggtccattgacgatagatccaaaggaatttctgttaatcgagagaatttggctttggtttcaggtttcgtcttcgtcttctttattttctcgagaaaatgaaccgagaaagtgacggaaaagtgggtgagaaaaagccagccggtgtgaactcatcatgttcagggaagaggatcatgtggatgcgtgacacgtgtattatgacacaagagttattaccacatgcgtcacattagattacggtgtacgtaaagaaccaatgatgagtcgccatgtcattattttagtttgcaacataggcgaatgtcaaagacttcgtgaaaccacgatcgttgatccattcggaaattggtaataaagttaaatgggctatttattgtatacttggaaatactagggactaatatgaaattatatgcaaatatgagtcggcaaaattttcgtgtttcttttttttgctgggcgggcgcgagggaacggatccaaattaaccaattcgttttcggcgaaatcctattcttactccggtgaaattaccgaatcaaaaaccctactctcgaagaaacttgctgtgctcaagcttcttcaatggcggatgatggctccgcctctaatcgaagggacccaataaagtcttcaggtgattttccttctgacttttactgtaaaccctcaacttgattttggcacctgagtagtgttagtgtagtgtttttgtttgcttctcgagataattaggttagttggtgattagggtaggaacaaatttagattcttcattccttttagtattggtttttcatgtatattgattagttcagaaccatataaatttacaattggtggcatggatttgattgtaattctggaaatggtggtgtgtagttggaaatgttgcgggacaaagaagacggcaacaagctgttacagtggcgaaggaaagaagggaattactggttagggcaaagcggctttgtagggtgggtactaatggcgatgttgaggatgctcttgttgagaatgagatgatggttgatgaagagcagcctatattggaggctcaagccagtaaatctgtggaagagctcaagtccgctgttcaataccagtaagtgaatctgtcaatttttgtttgtcattcttttcgttttcttcactgtttcaggtattgttcgtgatttttttctgatatctacttcttatctcaatttcaaggggaaaaggtgcaatgcagaagagggtgactgctcttcgggaactcaggcgtttattatcaaaatctgagttccctcctgttgaagctgcgctccgtgctggtgcaatacctttacgtgtgcagtgtctttcatttggctcccccgacgaacaggttacatttgccttatatatgctttaatactatacctttgttcttgcatttatttgcttatatattcgtccggcactttactgtagattttgacaagtaactcatgcattgaaagaagatatattaaggagagttgtaatcttttgatcacagttctgtctaactgcagttacttgagtcagcttggtgtcttaccaacattgctgctggaaaacctgaagaaacaaaagctctattacctgcattgccgttactcattgctcaccttggaggtttgttgtactggccaaccaagtctgttattactctattgtttttgttggattagatttcatatgattccaagtttatattcagaaaagagctccgcaccggtggctgagcagtgcgcatgggcaattggtaatgttgccggtgaaggagaagatttgagaaatgttcttttgtctcaaggggctttgccacctctagcacgtatgatttttcccgacaagggttcaacagtgagaacagctgcatgggcattgtcaaatctgattaaggtggggaaaaacctggcacggatattatcaccttggttataatttacaagcctttgttacaaactattttcattataccttaatacagggacctgagtcaaaggcagcagcacaacttgttaaaattgatgggatactggatgcaattcttcgacacttgaagaaaacgtgagcaaagttacatctctctgaatttcaacaatttcttagcgtgttgtggtgtcttgctttttagtgattctttagatttataggggtctgttttatgccattgatattctattgttcaattttggtgaataatttgatcaaaatattattgattgttggattcagggatgaggaaactgccacggaaattgcatggatcattgtttacctatctgccctctcagatatcgctacaagtatgctcttgaagggaggcattcttcaactacttattgacagattagcaacctcaagtagcctacaacttctcatcccggtaactttcagatagaccttatcgtccaaaagaaacaggattctagttaaaatattacctcagattatgctattcaattgcttccagttccaagtcccatcgatgtcatttatactcatattagcatgaatgattagaatcagaatactcactacgtggtccttaattttcaaatgttgcattcttgattatctctaaaacaaaaatgtgaatccaggttctccgaagtttaggcaattttgtcgctgttgatcccaaagcagtattaacaattcttatccgtgaacagaacactgaaggctagtatctattatcttttccgggttaaacatcatcaccttaatcctatatattcaagatacttatattgcaaactaaatttcagaaagcatcattggtgtgcttgcaaagtgcttaagaagcgagcaccgtgttttaaagaaggtcagtatcacattcccgttgtggttttaattttttacaattatatgaagctttcatcactatactcgattctgtaggaagctgtttgggtgctatctaatatagcggcgggatctattgaacacaagagaatgatacattctactgaagtaatgccattgttgctacggattctttccacatccccctttgatataaggaaagaagttgcctatgtcttgggaaatctctgtgtagaatctgcagaaggagacagaaaaccagggataattcaagagcatttagtctctattgtcagtggcggttgcctccggggtttcattgagctggtcagatctcctgatatcgaagctgctaggcttggtcttcagttcattgagctggtaagcaactaatttaatggctcttaaaagctcaatgagacacgagttttgcttatatgttgatgtcgcatagtcatatttggaacaggaatgatcctaattggttttgatttctttggtggataggttttaagaggaatgccaaacggggaagggccaaagcttgtggaaggagaagacggtatcgatgcaatggaacggtttcagtttcatgagaacgaagagctgagagtcatggcgaacagtcttgtggataaatactttggtgaagattatggaatcgatgaatgaaatcgcctcggattttagggtgagaatacaaagaaagtcggatgatgaaatcaaaaggaaactagtcatcttagcgtttgcttgtaacgatagtgagtgagagagaaagacaatagtctttaggttttgtcttttgggttgttgttgtaactacttgtaatacagttttgtctcaccgaaggtttgattcctttttgtcgtatcctc

SEQ ID NO: 144063 - DNA, 1077 bp, Arabidopsis thaliana landsberg; identical to SEQ ID NO: 26570

SEQ ID NO: 144064 - DNA, 1797 bp, Arabidopsis thaliana landsberg
atcgtctaaagattatttaaaaaaacgatgtctcaactgaaaattggatcttcacaatgcttatggacaagtatttgcattgtgttatttgtattgtcgatggctcgtggagctgtctctacaaattatggagacgctctcacaaagagtcttttgtatttcgaagctcaacgttctggaaaattgcctccgaaccaaagagttacatggagaggagattctgcactcaaagatggttctgatgctcatgtaagtttaatatccaattacttatttttattccatatttttttgtgtaatgaatatttattacttgaagtaaactgtttgctaattgtaaaaatagattgatctcaccggagggtattacgatgccggagacaatatgaagtttggatttcctttagcgttcactacgacgatgctagcttggagcaacatagagatggcatcagagcttagggcccaccgcgaggaaggaaactcgctcagggctctcaagtgggccaccgattatctcattaaagcccatcctcagcctaatgtcctgtacggacaagtgggtgagggaaactcggaccacaaatgctggatgagacctgaggatatgaccactccgcgtacttcataccgcatcgatgctcaacatccaggttctgacctagcaggtgagacagctgccgcaatggcggcagcgtctatcgccttcgcaccatttgataaagcctatgccaatatactcattggtcatgcaaaagatttatttgcattcgctaaggctcaccctggcctttaccaaaactccattactaacgcgggtggcttctacgcgagtagtggatacgaagatgagttgttgtgggctgcagcttggctccaccgtgctactaacgaccagatttatctcaattacctaacacaagcatctggtaccggaggtccaagaagtgtttttgcctgggacgataagttcgtgggtgcacaagtcttgatggccaaggtaagttatgactatttcactaaagaaaacatatcactatcttatgtggcaagaaacaaacataacacaaagttttgcaaatgcagcttgcacttgaacggaaagtagggagcaatggaaagatcgcagagtacaagagtatggcagagcagtttatctgcaactgtgctcaaaaaggttccaacaacgttaagaaaacccctggcggtttgctctacttcttgccgtggaacaacctccaatacaccacaaccgcttctttcgtcctctcagcatattctaagtatctcacaaaggcaaaagcctccatccaatgtcccaaaggtgctcttcaagcttctgatcttctccaaatcgctcgttcccaggtagttaataaaacctaatatagtaccaactataaaacatgttgttgaaaatatatcaagacttttttcaatataatatatactaatttgcgatttcctcatgttatataggttgactatatacttgggtcgaacccccagaaaatgagctacatggttggagttgggaccaattatcccaaaaaaccacaccatagagcagcctccatagtatcgatcagaaaggacaaaacaccagtgacgtgtagtggagggtatgataaatggtataacaatcctgcaccaaaccctaacgttttagcgggagcagttgtcggaggacccgacgataacgatgtttatggagatgaaaggagtaatttccagcaagctgagcctgcgacggtcactactgctccgcttgttggtgtcttggccctcgttttttaa

SEQ ID NO: 144065 - DNA, 894 bp, Arabidopsis thaliana landsberg
ctaacttcttcttcttctcctttcagaaacccagcgaccatcttcttcaccggttatggtgacttcggagggattagcaagcgttgattcttggttatatcgccaaggtttcaacgttgattcatggttgctttctgataccttctctcacgacaacgatttgctcgcaagagctctccataccaccgtcacagcccctcatactctcactccttcctctgctttcttcgattcctccgctgtttctcacccttcttccactaacacactctcctctatcgtctccggtgcttctgatccagaaatcatcggcggaggagctaaacggaaacgtaactgccttcttaccgacggtaaagccgccaagcgccgcgctcgtgcttccaagaaatctcagactactttcataacggcggatccgtccaactttcgtcagatggttcagcaagtgactggcgccaagtacatcgatgactcttcttcctttggtattttcgatccgattgtcaagccggagccgcttaggttcgttaacaaactgccttgtggtccttcggatcgatccacggcggttccaatgctcgacacatcagcatttttgtctaatcatcaccaggagaatctcgcagtgggaaatgctttctccggtaacagcagcagtgtaggattaccgtcggggaagccaagtgcaacggccgaccccggtggttctgccgtggagtttgataattacccaacatttccaacgcttgaatcgtggaaggttatgtgatctgtttctttcagtcttagacgtaatctttaactttttaggtttgttttctttgcatcccttcatgaataatcttgttcatagttttcgtttatcgatgtaatggatcaaatctgagttct

SEQ ID NO: 144066 - DNA, 373 bp, Arabidopsis thaliana landsberg
gagttcttgatgctcggttaacgctagaagacgagagaattgtctctcatatgctcactgtgttaaagattgcacttctttgcacaagtgtgtctccagtcgcgaggccatcgatgcgacaagttgttctcatgcttattgagtctgagagatcggaaggagaacaagaacatttggatacagaagaattgacacaaacaactaccccatgacacaatacacattcttgttgtatcttcttcttttttcacacgagattattcttctatgtaaccatggcgaataattattgtaaagtctatacgcacgcagctatatcaaaagatataagcagtatctatatctacaagttaccgttaggtttaattaatta

SEQ ID NO: 144067 - DNA, 2421 bp, Arabidopsis thaliana landsberg
atgagttgtttcttgggtccatcgacgaacaacaaaagtagagagaatgaaggctcatctatgactgctccttatgaacaacaaaacctaccacgtaagcgctctctagtcgtaataaaacttcgagaaatcggtcatttttcattaacattttccaaatttgttaacagggaatgatcgtaggcagataacaacatgggaagcggtggggatgaacaaagaatcaccgaaaaatatcaaggcaaagagtttcaaatttcgtgaattagcaaccgctaccaacagtttcaggcaagagttcttgatcggagaaggagggtttgggagggtttacaaaggaaagatggagaagacaggacaggtaaaaataaagtaagaaaatgagagagagttgttctattaatcaatggctttggtcttatttgtttgttgaaatggtgactttaggtggtagctgtgaagcaactagaccgtaacggattacaagggaacagagagtttctggtagagatcttcaggttgagtcttcttcatcatcccaaccttgccaatctcattggatattgccttgatggagaccagagacttcttgttcacgagttcatgcctcttggttcccttgaagatcatctccttggtatattcttctcaatccctaaagcactttctttcgtccgcttttattattaggtcaaaattgttggactgagccggatagtttaatttcactcaaaatttaaaactaattttttttttggttttaggaatttagaattttgtactatatagtagtggaacccgtttaattatttgattgatcaaccagatgttgtagtaggacaacaaccattggactggaactctcggataaggattgccttaggagccgcaaaagggctcgaatatctccacgaaaaggcaaaccctccggtgatatatcgagatttcaaatcgtcaaatatattgcttaatgtagattttgatgcaaaactatcagattttggtttggcaaaacttggttcggttggggacacacaaaatgtatcttcccgagtagtgggaacttatggttattgcgctcctgagtatcacaaaaccggtcagctgacggttaaatctgatgtatatagttttggggttgtgttgttggaactcataaccggtaagcgagttatcgacacaacgagaccatgtcatgaacaaaatctggttacttgggtaagtaccatctttaacttttaaatacattttcattttaatcaacatataagagtaatcaaactgtaaattggaattaaaccaacaatacttattcaatcctaaccgtaaaagccttacatgcttaaaattcattaatcttaaccatctacaattgtggtttaggcacaaccgattttcagagaaccaaatagattccccgagctagcggatccacttcttcgaggggagttccaggaaaaaagtttgaaccaagctgtagcaatagcggcaatgtgtctacaagaagaaccaatagttcgacctttaatcagtgatgtaatggttgctcttagcttcctttcaatgtctacagaagatggtattccagccacggttccaatggaatcgttcagggacaaaagtatgtcgattgctctaagcagacacggttcttgttctgtaactccattttgtatttctcggaaagatgtaggcaacaaatccagttcttcatcagactcggaggatgaagaagaagaaaaggaacaacaagcagaaaaagaagaagaatcaacaagtaagaaaagacaagagcaggaagaaaccgcgacagattcagatgatgagtctgattcaaactccgaaaaggatcaagaagaggaacagtctcagttagagaaagccagggagtctagtagctcatcctctgactctggaagtgagagaagatcaattgatgaaacaaacgcaactgctcagagcttgaagataagttacagtaattatagctctgaggaagaagataacgagaagctaagcagtaaaagcagttgtaaatcaaacgaagaaagcactttttcgcggtatgacagcggtagagatcacgatgattcgtcaagaaacacaagcatgcgaatcaatagtcttgctcatgatgataaggaggaagacgaggaggagaatcatgaaacacggagctatagtgatcacgatgattctccaagaaacactagcatgcgaatcaatagtctttctcatgatgatgatgatgaggaagaggaggaggagaatcatgaaactcggcttgagcacattcatagctcgaaatctgaagaccaaagtgtttattcagatgatgatgccggcgaggaaagtggtgagtcgtctttgcataggatcgaagcaaaggaagaagaacatatttcttctgaccatgattaa

SEQ ID NO: 144068 - DNA, 314 bp, Arabidopsis thaliana landsberg
gcacccaactgtccattcgattgaaaaagaagaggacggtaatgtttactccgagtcaccttcacaagttccagataatatggctggtgaaggtaatactgcaacaaatacagctccagagtatgatgtcaccaagcaggagaatatgttggagtccgaaagcaatcaaaactcgtttgaccaggttccaagtaatattattgggattgttcctccagctcctgggaaccagcatccacaatttgagacttctgaccctcaagcacgtgatgcccttcgtcttcccagttttatggtatgcccttaattacatt

SEQ ID NO: 144069 - DNA, 1517 bp, Arabidopsis thaliana landsberg
caaatacaagaaatttaataacctcgagcagttaccctatttaaatcccctctagccttgttttccttctcacacctatgaagcaatggaagaagagagagaccacaatgcatctgagtcgtctctcccatctttgagcaagcagttggagagctcgactcttggaggaagcacggtcgacgttcccgtcgttgatctaagcgtttctgatgaagacttcttggtgcgtgaggtggtgaaagcgagtgaagagtggggagtttttcaggtggttaaccatgggattccaaccgagctgatgcggcagctgcaaatggttggtacgcagtttttcgagctcccggatgctgaaaaggaaaccgtggcgaaagaggaagacttcgaaggatacaagaagaattatctaggaggtataaacaattgggacgaacatctctttcacagactctctccaccctcaattatcaattataaatattggcctaagaatcctcctcaatataggtacgtacctttcctaataaaatcgtatgagttagtaattcatgttttacgttaaatttcatttctttaacaaaatatcaaattttaaacgttggattttcgtccaaatttttgggggtaccagggaggtgacggaggagtatacaaagcatatgaagaggctaacggagaagattcttggttggttatcagagggattagggttacagcgtgaggcgttcacgcaaagtataggtggtgacacggcagagtatgtgcttagggtcaatttctatccgccaactcaagacacggaattagtcataggagccgcggcgcacagcgatatgggtgcaatcgcactcctcatcccaaatgaggttcctggacttcaagccttcaaggacgaacaatggttggaccttgactatatcgactccgccgtggttgttatcattggcgatcaactcatggtatggttgacttttttgttgttgttttttttacttgagattcgttaatgtttttggggttgatttgtggattcaaattaattgcagaggatgaccaacgggaggttaaagaacgttcttcacagagcgaagtctgataaggacaaattgaggatttcttggcctgtttttgttgcacctagggctgatatgtccgtcggacctttgccggagtttaccggagacgagaatcctcccaaattcgagactttaatatataatgactatattgaccagaagataagaggctgggcgctcgaagatcttcctgtctactgaaaaccctcaatacctacaataaatgatgatgaattgttcaagtagacaattctttaatagcttccttttgagggtttctatatgtggtacaataaaactatttcaagaatttaaaataatatgtggaaaagctaagcggttagacaaaatattcatctgattgatgctatacattcaaatgtaatcgctcctatcctatgtacgtagtgattaacctcaaaaataatcagcttaagttgctgt

SEQ ID NO: 144070 - DNA, 4455 bp, Arabidopsis thaliana landsberg
  unsure (1)..(4455): unsure at all n locations
atgtgtcggaatttggatccgacaatccacgaccagaccactaacctgcgattggtaaaattatctaagaaaggccacgtgtcatcacacattctcctgacttcgccatcatcattagccccacgcaaaaagggaaaacagaatccattccttaaatcgatttcatccagatctaaactcgagcttttgttgatcgaaaaaatggaagaggatttgattaagcgccttgaagctgcggttacgaggcttgaggggatctcaagcaacggaggaggagtagtttctctttcccgcggaggagatttctcctccgccgccggaatcgatatcgcgtcgtccgatccatcgattctggcttatgaagatctgatttctcaatgtgttggtagggctctgaccgccgctgagaaaatcggtggacctgttctagatgtgactaagatagtcgccgaagcttttgcttcccaaaaggagctgcttgttcgnnnnnnnnnnnnnnnnnnnnnnnnttgaatcatggtgtaatcgaccaattcgttttggttcgtcattgtgcttttggatgttgatttctattttattcggatttgaacagaagcctgacctcgctggattggctggatttctcaaaccgttgaatgatgttacaatgaaagctaatgcaatgactgaaggaaaaaggtcggattttttcaatcacttgaaggctgcatgcgatagtttatctgcattggcttggattgctttcactgggaaagattgtggtaagcaaaaagcgatcatgttgaaaaagattctgactttatgaaacttttatgatgtaaattttctttcttggttattttgtctgcaaggtatgagcatgccaatagctcatgtggaagaaagttggcaaatggctgagttttacaacaataaggtgctaatcttcgatatctctatgcttcaatatgttatgatgttaggagcttatggaaaacaatagcgaacgaggactttatagttacttgttcaggttgcagaagcttatattgctgtttgatgctctttgtacagtggtaattctgtgatctccatgttcttcttcaggttctggtggagtatcgtaacaaagacgcagatcatgtggagtgggctaaagccttaaaagaactttatttacctggtttaagggaatatgtcaaaagtcattaccccttgggacctgtatggaatgcatcagggaaacctgctagtgctcctgcaaagggtccacctggtgctcctgctcctccaccagcacccctcttcagtgctgaatcttcaaagccatcatcatcgtcaaaccagaaacaagggatgtctgctgttttccagcaactcagctcgggtgctgtgacctcaggtaggtttgaagctgtacctcttcatatttatggcatggtgtttatttagaatgtgaatcattagtagcttacaatcattgtgctttgctttccaggtcttagaaaagtgacggatgatatgaagacaaagaaccgtgctgatagatctggagctgttagtgcggttgagaaggaaactcgtaccagtaaaccggccttttcgaaaactggaccaccgaaaatggaacttcaaatgggtcgcaagtgggttttactaacaatgactatatattttagtttttcaaaactatgatcaaaatgctataatactgattgttggcttctactgtattattaggtgggctgttgagaaccaaattgggaagaaggacttggttatcagcgagtgtgattccaaacagtctgtgtacatatatggttgcaaagattctgtcttgcaaatacaaggtaattttgcgccattccaatctcactgtgaaagttggatatctactcaaaagtctatgaagcccttactgttgttgcctaatctgtaggaaaagtgaataacatcaccattgacaaatgcacgaaagtgggtgttgttttcacggtgagtggaataatactgtttcctcttacattcttacagtatacagttatgtgatttctaataaagtaaaatataacatgtctgtataggatgttgttgctgcatttgagattgtgaattgcaacaacgtagaagtgcaatgtcaggtttgttttctagattctataagctgttctaatggttgcagatgtatattcttaaggaccatctcttttgcttctcaagctcatgatatagctctaaccatatgcaacatttttccgagacactgattgctcttgctactcatctatggctgatctagggttcagctcccacagtttctgtggacaacacaactggctgtcagttatatctaaacaaagactcattagagacagctataacaacagccaaatcaagtgagatcaatgtaatggtgcccggtgctacccctgatggagattgggtatggctttcctctctttgtaatcatcaaaacgttttggttttcttatattcttcagattcattcaccactgtaacgaagatagtcatgtgtgtgacactgttcatggaaggaatcattctcaacattgttttgttgcaacattgtaggtggaacatgcgctgcctcaacagtacaatcatgtgtttactgaagggaagtttgagacaacaccggtctcgcattcaggtgcctaagcaaaggagaaactattatcactctggattgtgcttgaatatcaggcctttttatactcatatactttgtttcttcagattataatagaggaaagaatctgtttgtttgtttgttggttttttcttttgtctctatcccccaattttgggtttggaggttgtgggtttttgatttttttgtgtgatctgatcatcttgtgtcttgttagtccttggggttttggatttggatttgggttctcgtttcttttgttttaacatgtgggcttgtcccgagtccttgctgatgacgttgtgcacaaatcatacttatcatggatagaaaaagttgcaatcctgtttttggaatatgcagttatttatttaacctttttctttggttttgttttgtatatgatgtgaccacagtcaacataataattgtgagttgtacattgtggaatcacgaaagctaaaattattggtggttgtgggtgaaactttgaagaatgtttaacttggactactgagaaatagcatggaaacgaacaaatggtgtatttacacactgaaatatgtgttttgcgatactaatcatcctatggaatacctcatgcttcaaaagcaaactcaaaaaacaaatgctctcttttcgattctcctaaagatttcctctccagaaatagcacttttcagtttccaaattagatgacgagaaaaatcaaaagtataaaattacaaaataaagaccgaaacgaagacttaagctcaagacttgtgaacagaagtcaacacgtgtagtgtggaaaaacaagcacaagacgtgtctttggagtttgtatataaccgttacagtaaaaaacctcttctttaagtaacaacagcaacaacaacacaattcctaaatctctctctctctcaccatcaatggctctctccatctccatctatttcctcctcatcttcctctctcacttcccatcctcacgtaagtatcttctagttcctcactacgacgtcgttcttctttcttcatctaacctttttcctctcttcctctgttttttgttaccgacagatgcagagcctttcatcggagttaactacggccaagtcgccgacaatctccctccgccttcagaaaccgtcaagctcctccaatccacttcaattcagaaagttcgactttacggcgccgatcccgccatcatcaaagctttggccggaacaggggtcggtatcgtcatcggcgctgctaacggcgacgttccttctcttgcctccgatcctaacgccgctactcaatggatcaactccaatgtccttcctttttatcccgcctccaaaatcatgctcatcaccgtcggcaacgaggtccgtcaaaattcaattgttaaagtttaaacctttagggaaaattctctaattcttctccgatcattgcagattctgatgtcgaacgatccaaatctggtgaaccagctacttccggcgatgcaaaatgtccaaaaagcccttgaggcggtgtctctcggcgggaaaatcaaggtctcgacggtgaactcgatgacggtgctcggtagttcagacccgccatcgagcggttcatttgcggccggttatcaaaccggtttaaagggaattttgcaatttctaagcgacactggttcgccttttgctattaacccgtacccgttcttcgcgtaccaaagtgacccgagacccgaaacgctggcgttttgtctctttgagcctaacgccggacgagtcgactccaaaaccggaatcaaatacacgaacatgttcgatgctcag

SEQ ID NO: 144071 - DNA, 2163 bp, Arabidopsis thaliana landsberg
atactaccgttacatctcacgttgcagtccttgaagagttctttgacctcaggtttgaatactatgagaagagaaaggctagaaaaactgaaactatgattcaagtcttttagaggttttacggcaatggtctaacattaacgttctttatgatgtgtacacaggaaaccgtggtgaagaatatggaaattgagctgttgaaactagaaaacaaagcgaggtttattcttgcagttctcagtggagaaatcatagtgaacaagaggaagaaagccgatattgttgaggacttaagacagaaagggttcacaccatttccgaggaaggccgagtctgtcgaagctgcaattgctggagcagttgatgatgatgcagctgaagaacctgaagaaatcttagtggatccggagtcaagctccagttatatacccggctcggaatatgactacctattggcaatggctatagcttcgttgactatagagaaagttgaggagttattagcagacagagataaaatgattattgcagttgcagacatgaagaaaaccacaccgaaatccctctggctcagtgacctagagtctcttgacaaggaactagaagtaaggattcacactatcccttatttataccgcttaaacataacaaactatcacaatttgtcattgatacatcattttcctcatattgcagaaacttgatctgaaagatgctcaagtccaacaggctatagaggcagcacagaaaaaaatcagggccaaatctggagcagcagtaaaggttaaaaggcaggcaccaaagaaaccagcaccaaagaagaccacaaagaaagccagtgaatctgagacaacagaggcttcctattcagcaatggacacaggttagtctcttattcaagtgtttacattgtgttatgttttctggttggatctaatatacattggaaattttgtattgattctataagataacaacgtagcagaagtggtgaagccaaaagctagacaaggagcaaagaagaaagccagtgaatctgaaacaacagaggcttcccattcagcaatggacacaggttagtctcttattcaagtgcttacattatgttatgttttctgggttggatctaatataaattggaaactttttattgattctataagataacaacgtagcagaagtggtgaagccaaaaggtagacaaggagcaaagaagaaggctccagcagctgcaaaggtaattgactgtataatctgtaaaacttgtttagtttttttcaaagtttgtattctgattatagaaacgaagtgattaaaactgtggtctgtttgtgttttgcaggaggttgaggaggatgaaatgttggatctagcacaacggcttgctcaatacaatttcggctcagcacctgcggattcaagcagtaagtcagtcacataattgacaaagaaacattgctctaacacaactgcttgtatgtattgctggttcctgaagtttatgtcttgtcttttctgtggtttaatcaacagaaacagctgaaacatcgaaagcaattgctgtggatgacgatgatgatgacgtggtagttgaggttgcaccagtaaagaaaggaggaaggaaaccggcggcgactaaagctgcaaaaccaccagcagctccgaggaaacgagggaagcagacagttgcttcaacagaggttctggcaattggtgtgtccccggagaagaaagtgaggaagatgagatcatctccgttcaacaagaagagtagttcagtgatgagcaggttggctgataataaggaagaggagagcagcgagaatgtggctggaaactcgtcgtctgagaaatctggaggagatgtttctgcgatatcgaggcctcaaagagctaataggaggaaaatgacctatgtgttgagtgattccgagagtgaatctgcgaatgattctgagtttgatgacattgaagacgatgaagatgatgagtagagagagcgagaactgactcggttcttaatatgatttagtttcaaacttgtagtttctccctctggtcttctttggatttggtattactctgtagaaagacatatttctctaacgttggtcacaaaactcttacattgtttaagcgtttagtgactttttggtcagtcat

SEQ ID NO: 144072 - DNA, 3089 bp, Arabidopsis thaliana landsberg
ccaaacacaacaaacaaaaaaaacaccgccacgagacgagccaaactaaagattaggatttgggaggttgatgatcaattccggacaacggaggaaaccatactgatagattcaacgacggtgattgcggcggaggagtagaaacccgttggaaacatggcgatgagagaccttgttaacggcggagccgcttgtgccgttcctggttcgtcttcttcttctaatcctctcggagctctcaccaacgctttacttggttcgtcttccaaaacccaggttagcttcctgattcctttttgatcgaaacagtgttgacatttgaagtctcctgattccattcttcgccttttccttggttctcctggaactaagaagtcgaattagatctcatttttcgttgggttttgttatttgcttgccaagtttcgatttttctttccgtagtgttagggttttagacgttcttcgattatgtcaagtgatttggctgacaattgtttaaaggtttaaaatttcctgagaatttgaagaaatgttgatgattggtgatttgttgtgcaggaaaggctcaaggagatacctaatgcaaaccggtcaggtcctgggccacaattttactctgaagaccaacagataaggtcacttcctggttctgagttagatcagccacttctgcaaccgggtgctcaggttaatgttgtggaaagttttggttttacaatggtagtattgactctgattatctagcctctgtgatggctgatgggtttgcaatttttacattaggggtcagagttcttccgtggttttcgctctgttgatcagaatggtttgggtgcagcttgggatgaggtacagcaaggtggacctatgcctccaatgggacctatgtttgagccagttcagcctacatttgaaggtttgtgatttgatctataccacttttatttaatcccggatacaaaacggttagatgtagtggttttgatattgaataaaaggtagtatatattttcacatattcatcttgaatcgagaagtacataacattatttttgtaggaagagaagttaacactgaaggtgttagttagtaatttagtatagcgacatgaaataaatagtgtggtcatttctttccatgagtcctatttctcctgaatgacacgttgaatattcatagctctgtcttagttatatagcctaatgtcgagtgaggcatttttcgtttgcttgcttgattagtttttccattgcttatatattgcaggacccccacagagagttttatcaaactttctgcattcatttgttgagagtagccgtggtggtattccatttcgtccagcacctgttccagttctaggattgtcacaaagtgacaaacaatgtatacgtgatcgtagtagcataatggcccggcatttttttgccgataggggagaggaatttattaattctcaggtttgccatttatctgatagtgttctgtagctgcaacattgtgttatatgctttcaacttaggttttaagggtcgagtatatacttaatattttggtgttatatcattcatgcccattgcccttttgaaatcaagatctattcaattatataacgaagtgtaattacaagaaagttcaggtccactctccttcatcttgagtttaaatcaaaatgtaacattttggaatgcaacgaggtagcactgtcactgtcatatatcacaatcatctgtgggtcagggcttttgtttgggaattatagctgttgttttacttggtaattgttcctatctagtatggatttctcgagaccatgccagctgtgcagtatagttaagccttttgtttgttgccgatggcctaagccgttttctcttctccatgtcgttggctgaatattttgttcggcattgtttttcaaggtaaacgcattattgtcatctttagatattgatgatgggatacaagctcgaggtcatgttcccgggagatttcgggagctagatgattactggaatgagtctcaagctgttgtgaaacctaatttacatcctgctgacaattgggcggctgaatttaaccaacatgggatggatcatggtggtcctgattcatgggtccagtcttttgagcaacaacatggtgtgaatgggtgggctactgagttcgagcaggtaactagcataaatagctatatgatagaacttttttccttcagttgtttgaaacttctctttgattgcccatcccaaacatatgtttataagctttcaatgagtatcaaagacattatgagggcatttattttggtagtgtagactttgatttcgatagtcactagggcatagttgttcacaagcctgaatctgttgtgactttttttatgctgtattagtcatcagtgtttgagtcgcatttgatatcccaacagcttggctttctgataatttatcatgttcttctgaaaatatttggcgcctcatcctttttattttcttgaactttctaaagggtcaatctcaattgatgtcaagccaaatgagaagtatggatatgcaaaatatagctgcaatggagcagactcgtaagcttgcccatacactatctcaagatgggaatccgaaatttcaggtcagtataacctaccattaataattatgtgctttcgaagtgaattccttcatttctaaacagcctttgatagtagtatcagtcggtcaggttgctgtaaactgtactgttggacgacatatctcttttctgggctgtgatcttttactgaacatagaatttttttttgttggtctatgttctagaattcgaatatctctgaaatcatatcacaaattttaattatgcttttcctgttgacttcatgtgctgagctgttctcgatttatgtaaaacttggcaaacatgtttggtgaatgcagaattcaagattccttcagtttgtttccaagatgagccgtggtgaacttattattgatgagaatcaggtcaagcaagcttcagcccccggggaatgggctactgaatatgaacagcaatatctggggccaccaagttgggctgatcaatttgca

SEQ ID NO: 144073 - DNA, 1515 bp, Arabidopsis thaliana landsberg
gatgtcaattcaagtgacatctctgacaaatgcgaagacatccttaagctcctatcaaacaatcacggttgcaaagtaatctgaacatttcagtacttctctctcaatctacggatacaatgtttcagctacaatctctctctattgttttcatttcaggtggtggagatagtggttcctgaactggaagagatgcgtgcagcccatgttatttcgattgggtctccaacactgtcttctcttactccctactgtgaagctgggtatgtctctagctctatcatctatgaaccaaattagaactttggtttaagaactcccacatttgtcttgtatttcagcacatattcagaattgagttatggcactcgtaccagctttgcaattttccgttcattctctgcttcagactatatcgctgctcaatgtcttaggtaagcggcaatagaataatgcactgtatgcgcagctttcacttttgcttctaaagtcacaagagtaaaccaatattgatagaatttttgttgcaggcgaagattgatggagtatcacttgaatatcttcaaagacgttgatgtcattgtgacccctacaactgggtacgtaatataatttcataccttatcaaaccatctagcaaattgaagatccctatattacttgcaatgtcttcggatatagttacttgtatattacttactgcttaaactcctctcactttacaaacagaatgacagctccagtgatacctcctgatgctctcaaaaatggagaaaccaatattcaagtgacaagtttgtcaagcaaagctctaacttcttacttttggtgcaatctaatacatagcacatttacatcagagttctgatattcaaattgcttcttttctagctgatttaatgcgcttcgttctagctgcaaatctcctcggcttcccggccatatcagtcccggtaagacattttttttatcagtctctaaccaaggcttagacaatcatgttacttatttcattcttgcaatataatcgtatcttctttctgattaatcactctctttttctaacttattggcaaacaaaaataaacgcaggttggttatgataaagaggggcttcctataggattacaaataatgggaagaccttgggccgaagctaccgtccttggtttagctgccgcagtcgaggtactctctctttttctctctctgatacgttttcaaaagatcaagtagaaactagtgcggtaagaggcggtaaatagtaagagcggactctgtaacttgaatcgattttggtatttcaggaactggctccagttaccaagaaacctgcaatcttttatgatattctcaatacaaactgaattcataaggatcttccacagaactgaaaaggcaaggattgtctctggctgcggaatattatttatgtttaccctatataaggttaacatgtcaattgatctacaaatcgacgattattgtgctataaaccgtgttggaatttcttac

SEQ ID NO: 144074 - DNA, 561 bp, Arabidopsis thaliana landsberg
atggctaccgttaccaatttcaagctcgtcactccgccggaatcttcccgcgccgataagccaggagctacgaaggcctccgacgcattccaggagaagaaatctgtgtctgtgaactacgaccgtggtgagcatgaggtctcggtcaacatcggcgggctcaggaaagctgatattccgagacgttaccgaattcgggttgagaacgaccggtttcagaaggattggagtgtatcggaggttgtggaccggcttatggctctcaatcgttgggaagaagttgatggcgttcttaattcctgggtcggccggtttgctaggaagaatttcccggttcttatcagggtatgtatgtctcgatttcgattggtattattcactgatgctcttttgaacttattggagttttgaattttgtaactttgcaggagcttagtagaagagggtgtattgagctttgtgtgaatgttttcaagtggatgaagattcagaagaactactgtgcaaggaatgatatatacaatatgatgattaggcttcatgctaggcataattgggttg

SEQ ID NO: 144075 - DNA, 681 bp, Arabidopsis thaliana landsberg
caaagagagagatgggagggagggtttgtggcagataaactgatagaaaactttcgaacctctcttctttaacttttactactctctattcgtttttctcttacttttgaggtgccgcctccaactgaaagtcttctaatatatattctcaattattctagctctccgggagaagtcttatctcacgccaatctctcatttcccactatgtatatgtcccacaagatcgctttcttagttctatcttctattaatttcctaatctttaaattcacacttttttttttgaaatttctggcaggaggcatgaggagaattacttagacctcaacaatcttccagatgatttttctaaagatggcaataagcaagccctcgaggaaggttcttcctctggtatgcataccatgaaaaaccctaattctttatatatatatatattttaatttaaatatattcttttaactttatatatatgaaacatggaggtatatagttattagtgtgtgtattgttaatgtgaaggtttatttggtgttggtaattaattaggtcaaagaaagaagaaagggagtaaagaagggaaagatgagagtgggaaagtgtacgaatgtcgattttgttcactcaagttctgcaaatcccaaactcttggtggccacatgaatcgccaccgacaag

SEQ ID NO: 144076 - DNA, 4842 bp, Arabidopsis thaliana landsberg
  unsure (1)..(4842): unsure at all n locations
gcggatctcctaaagtcagaggaggaagaagaggtagagtaggaagagtaaggggaaggggaagaggtggtagaggtaggattactttagaaattgtttattcagtgtgtagtttcgttgtaagcttttgcatgtgatttgtggataagcgtttgagtggactgtgctaattcctttttttcgacttatcaggaaatgggcctgcgaatgttgagtatgatgatggaggaaggggaagaggtggcagaggtaggatatctttagccaaatcgtatttgagtttaggattttgcatatgatttgtggataagggtttgaatgtgttgtgctatttctttttttgtttgatttaccaggaaacggatatgtgaacaatgagtatgatgatggaggaaggggaagaggcggcagaggtagaattgctttagaatatttctttccaaatcttagtttcaccttttagcatatttgcatgtgatctgtggacaagtgtttgattggcttgtgctatttcttctttcggatttgccaggaagtggatatgggaatgtgaacaatgagtataatgatggaggcatggagcaggacaggtcctatggcagaggacgagggcgtgggagaggaggaggacgtggcggtcgaggaagaggaggttacaatggccccccaccaccttactatgaagctcaacaagatggaggagactatggatacaccaatgttgctcctccagcagaccatggatatgatggtcctccgcctcagggacgtggtacgttgatgattttgttacactatgttttctcattaaataatgatgagttgtaaatgtttaaaaattgttggaacaggacgtggccgtggaaggggaggtcgtggaagaggaggaggccgtggtggattcaacagatcaaatggagcacctatccaggctgctgcatgagcgaccagggtcattgaatgaagttggatctctcttacattctcatgtttttgtctctgttcttcaaaaacaacttgttgccgtagaataatctttcgttcatgtcgctttaggttatatatatcctcatttattttattatggatcttggattttcaagtttttattccttctaagagttttctagttttgtctcttttttgagttttggatatttgtttgactccaaatacattcgtcggcgtattgacactaacaagtaaacaaccccctttggcattgcctttttccattggttcgtatatcagttgattatatattctaacaacataaaaagataacaagaaaaattcatgaataataaaattgtaattccaagttccaacgtgttttgagacaaaaagaaattcacccaacttgcgctggttgtgttttgggctattcgaagaaagcgtacgaaaataagcgagaggtccaaacaaaactagtaaccaaaaagttaatcgccgttgccggggatcgaacccgggtcacccgggtgacaggcgggaatacttaccactatactacaacgacatttgttgctcaatcgtaatgtagaacatataaatactaatatggaaaaaggctgtcttgaacaaaaagaaatatacttttttttgggtccaaaaaaaggaaaatacttaggaaagaaaagagtctcagcagcatcagctcgtccttaaatctgatccatcatcgtcactttctcccggcgaattccgttttatcgatttagtaagctctctgactttatctctccgtctttctcagtcaacaaattggttgaaacttcaatcggttccttgaaatctcaccggcttagttgcatacttctgcaaaaaccctaaccttctttttgtctttgtgaagagtaacgagatttgtgcaaagatgactcaggacgtggagatgaaagataataacaccccttctcaatcgattatctcttcttcgacctctactatgcagagtaaatctcgatctgaatgcttcaattcacgaattgatttcataattgctaagttccttctgggttttgacactttttgttttttgtttaccagatttgaaggagattgcagcactcatcgatactgggtcttacacgaaggaggttcgtcgtattgctcgtgctgtgcgtctcactataggccttaggcagaaactcaccggctctgtgctctcttccttcctggattttgctttggttccaggatccgaagctcactctcgcctctcttcctttgttcctaaggtatttgtgggttttacttcttcactttgatgtttcagaattctcaacttggttgttccttttagcatctggctttaggttgtttagattcgtgttatggttgttatactttcttttgatgttgtgaatggcaagttatctaacatacaactggcttagagactgaaatattggaacttttaatggtttagggtgatgaacatgacatggaagttgatactgcctcatcggccacacaagctgctccttctaagcatctacctgcagagctcgagatctactgctacttcattgttcttctttttctgattgatcagaagaagtacaacgaggtaactactgctgtatctttgtgttttgtcataagttacttttctgttgtgattttaattttgatgagttgcttttaatcatctcttaggctaaagcttgttcttcagcaagcattgctcgtctcaagaacgtcaaccgaaggaccattgatgtgatagcatcaagactctacttttactattctttgagttatgagcaaaccggtgatcttgctgaaattcgcgggttagtagctcaaagactgttttagttttgtactttgtcttacacctcatattaatcagtagctcaatagttaataatctggtcattttttctacctgcagtactcttcttgcgttgcatcattctgcaacgctaaggcacgatgagctgggtcaggtatgtctttgtttagctcatgcagtcggcattcattattttgaaactgttacttgcttcttattcaaatttatcatgttgaatgcaggaaacccttctgaacctgttgctacgtaactatttgcattacaacctctatgatcaggcagagaagctaagatcaaaggcacctcgctttgaggctcattcaaaccaacaggtagctcttggctattccttcatactcttaagttttctcggttctctagattctatatttgcatgaaaactccaatgccacttctgcaatctttccagagaattattttttctattcgctatagcattttccatttgcagtcttatctacatctaggaggctcttgtgttttcttttcaatcactaattatttgctgaacttacttgaagtgtccattttgcctgtccttttcatacttctgacaccacctcttaccattaccattgatctaccttgtgtttttctctgctacatatgaattttgttctttttttaacccttcaattgttactgtttcaaatgaataaacagcaagatgacttgtctaaaacattatactttgcagctttgtaggtaccttttctatctcgggaagattcgtactattcagctcgaatatacggacgcaaaagagagccttcttcaggcggccaggaaagcccctatagcagctttgggcttcaggatccaatgtaataaatgggcaattctggttcgtctactgctgggtgagataccagagcgttctatcttcactcaaaagggtatggagaaggccctcagaccctacttcgagctaacaaatgtgagtccactttcataatcttgctgctgtgacatgtattcattaatttatgagcggataactaaactggtattagtatgtggtcacttgtgatcttgctacttcacttctgattttaaaccggttcctacttttcacttactggcctatacacctcttctgttaaaatctctctgtggtcacttgaaacacaattttgttgctgctgttgttttctgctccttcgaattatattnnnnnnnnnnnnnnnnnnntttactgttgctttttagagatatatgatgcaactggatagttgatactgattttgatctgaggcttactattaaaactctgttttgattttacaggcggttaggattggggacttggagttgtttaggacagtccaggagaagttcttggacacatttgctcaagacagaacgcacaatctcatcgtgcgactccgccacaatgtcatcaggactggactgcggaacataagtatctcctactcgagaatctctttacccgatgttgccaaaaagctgaggctcaactctgaaaaccctgtggctgatgcggaaagcatcgtggcaaaggccatacgcgacggagctatcgatgcttcaatcgatcacaaaaacggatgcatggtctccaaagaaactggggacatctactcgacgaatgagccacaaactgcgttcaactcaagaattgctttctgcctcaacatgcataacgaagctgtcagagcattgaggtttcctcctaacactcacaaggagaaagaaagcgatgagaagaggagagagaggaagcaacaggaagaagagcttgctaagcatatggctgaggaagacgatgatgacttttagacaaaggtcatctatttcttataagagttgactctccatctgtctcactttttttatgttcacaagtttacttggtactcttctcatcgtctctaagtgtttctttattgaggatttttatcctcaggaacctttttattactctggtttcactttaggaaaagatatttatcttgttggtttcagaagatcaaattcaa

SEQ ID NO: 144077 - DNA, 602 bp, Arabidopsis thaliana landsberg
  unsure (1)..(602): unsure at all n locations
tatggtctggattctggaatcacaacatatatgatcactgatgatacgtatattaatatgtttgaagggaatttaaatcatgcaagctcaggtactgaatgtggtgttgttaatgcttctaatggctacatgagtagccatgtctatggatctatggtacgtaccaaactataattcattaattcaaataatatttatactacatatatgaatagaaatttaatgaaactgaaatttttgggtgaaggaacaagactgttctatgaattacaacaacgtaggtggaggatgggcaaacatggatcatcattactcatctgcaccttacaacttcttcgatagagcaaagcctctgtttggtctagaaggtcatcaagacgaagaagaatgtggtggcgatgcttatctggaacatcgacgtacgcttcctctcttccctatgcacggngaagatcacatcaacggtggtagtggtgccatctggaagtatggccaatcggaagttcgcccttgcgcttctcttgagctacgtctgaactagctcttacgccgtgtcgctcgggattaaaagctcttcctctctcttctctttcgactcgatg

SEQ ID NO: 144078 - DNA, 726 bp, Arabidopsis thaliana landsberg
gacaagcagctgacaatagaaatgaaagataagttccaagatcatgatcatcattgcaatatctttacaaagaattactatgtaagatcccccaaaaggccaatacgtataccttctcagtaggaggtggcggcacatgtacagtctcagcttcttccacattgaagggctcatcaattttgttagagtctgtcgagagatacctcccgccagcagaggcagaaacaaacctaatgcaacataatccataagcacagaacagtaaagctaaagtcaagtatctgaaatttcacaaaacactcaattgcaacccaaatcacctaattgttagaatctagatcatgagaccaacctagctacgagtaattaccaaaacaaatgcacatttccttcaacatcctactaattgatgcttagaagacgattaaggtgcgatcagagttattaaagagctggggaagagactattcaccgtatctgggaaagagacgattgataacgaatcaaacgcgaaacgattgtcctcattttcgaatcggagaagaagagaaaaagcaattcgacgtagagatgagagctaacaaaaatgaaaagtttgtaagaggagagagtccgatggcgatggaaatggaaatggagaagctcacggccaaaataatcacagcaaaacgtcgaaaagagcgctacgaccgtgaacacgtcgcctcttaccaaagtgccacgtag

SEQ ID NO: 144079 - DNA, 399 bp, Arabidopsis thaliana landsberg
caggggtagctgtgaagctctatagcgtctcttttaagttactattgaaacatcgtcttcagaatctgatttcaatttcagctgctgatggcttatctgattcctttggtgtttcgacccgatccgatgaatccgtcgccgccgcgaatccgtctttcaccgacggtgttgccaccaaagatatacacattgatccaatgacgtcactcaccgtaaggatctttcttcccgaatctgctctttctccagaaccagattcgttacgccacaaggataattataaccaccaacccagatctgatcggagacatagctatggccctaatcataactctccggcaccggcggagaggaacgaatctcgaaggaacagctatggttgcaacaacgagaatctag

SEQ ID NO: 144080 - DNA, 637 bp, Arabidopsis thaliana landsberg
ctccccagctcctcaagtggcattgtcaattcctgcggagcttgccgccgccattcccctcatcgatcgcttccaggttgaagcttttctgcggctaatgcagaaacaaatccagtctgctgggaagcgtggcttcttctattccaaaaagtcctctggctccaatgtccgcgagcgcttcacatttgaggatatgctttgctttcaaaaggtttttctttccccccctttcttccccattgacaatccattgactgaatatgtctctctccccttccttccttcaggatccaatccccacatctctcctcaagattaacagcgatctcgtcagccgtgctaccaagttgtttcatctcatcttaaaatatatgggtgttgattcatctgatcgatctacgcctcccagtttagatgaacgcattgacctcgttggaaagctcttcaaaaaaactttgaagcgtgttgaactcagggacgaactttttgcccaaatctccaaacagactagacataatcctgacaggcaatacttgatcaaagcttgggaattgacgtacttatgtgcctcctctatgcctcctagcaaagatatcggtggatatctatctgagtatattcataatgacgcacacga

SEQ ID NO: 144081 - DNA, 1175 bp, Arabidopsis thaliana landsberg
atcgccatgcccccaaattcatatatgcaaatgcaataaagagtcctaataagaacaatacaagatgccacaaagcatccaatcaacactgcaaagttttgaatctaacaatgtgcttattgcaaattgcttatagatttcaccgcaagctaaacccaagatacagtgatactcaggcttaaacaaaaggtctataaagaggacagcaaacgaagaatcagtatctttatttttgcgaaaagagagaaaatgtgaaaacccaagttaaagctctcactttttcaagagcacggcactgcactgcgccatgatctttgatgctcttgtgatcgagtttgtcatgtaaaagttctcaaccacggtttggaacggtgttgtgctcattgtctccttgcactcaggcttcaatgaaggcccaaaagcagctggctctcgctcatctgtgtggactagatttggtgcaacgctctttattcttgatctaacaccttcgattgagttgtatggaagcttcacacccgagacctcggataaggctcttcaatcttccagtcatctcttgcatcaccaactgttggaacagctggaacagtctgttgggtaaatccttcagtattttcataggttccttctttctcagtgaaggccgatgcagggagaattacgtttgcacggtaaaccgctttgtctccatggtgtccttggtaaaccacaaaggcgtctttaggaatcttgtcaacatttacatcgtctgctcccatcaagtagacgaattttgcagactcgagggctttggcggactgttgaatgagaccaagatcaagagcagccgcttgggcagcatactgaaggagaaagttgagaccgttccagtctggtcggacgacattgttggcttgtgcaatggactccacagaagagaggatagcatttttatcagttctgttgaagagcccagcaccaacaatgattgcagggtttttggcgttcttgagagccgtacagaatggatgccgtccctcagcaatttccttgagagtatcaggcccagtcccgaggtgtttgcagtcgtagttgaactctgcaggtggaccaacatatccaaccttggcatttgatgcacggactgtcttgcagatcctagcattcaccattgcagcttccaccctaggctg

SEQ ID NO: 144082 - DNA, 1378 bp, Arabidopsis thaliana landsberg
tgaccaatgaaaaggtgaggacccttatggagttagcccaactacgacaggaatatcagtcgctaagagagtatgataccatcctttcctcataacttcttttaatcagatttgtcctagttttattttgcatgaagttccgtttctggtgcttacattacatgcttacccacatggtatattctgaatacgtgtgctgctctctctatcattctgttacgtctacttgaaatacatagtaatatgtgcaattgattgcatagtcgctaacaatgtagacaacctgaaatgttgttgatattaaaagttaggcatggcacgttctgtaaatggtgtaagccgtcttttaaaaccaatttcgctctatcttctgttttgaagtcagggatttgctttgtaatgttgtttccttgtacctgcgatgctagtgacatttctcagggatgatactgtgttgtaaatatttttgattcttatgtagaggtaactgttacattcctctaaaaatactatatcatttgccagcaaaatgagtggtacaagagaggaagaatcaacgggaaacagtggcaggatagttatctccaatgagaaagatggaagactaaagaatatgtggaagaaatcttacataaaccgttggattgacccaagttcaagaggcggaagtcacttgaacactgaagcagattatgccagtaacatcgaatattccaggtttggcatcctacatctacattgtcttatcgtacttggaagcttctgcgataaatcactattgttttggcagaatgaaagtagaatatgcagctataaaagagaacctggaaagcatggggcacttgacgacttcaatccgcaggctccgtctagcgctcttgaaggataatttaagaacactagcgtgatatggatcactttttggttccttcctgttaggccaaatttcagttgtttctttttttttcaggtaaaggaattaaatgatactgaaacaactgcaagaagttgcgaagtagcgattgccaacatccttgtggaggcaacccatttgaagactgcccttgggatctccataccaattagctggtcggcggaatcagacattgaatcagttactgatggcgagtcgagctgtgaaaggaccgattctgtttctgctgcaggatttgagatggtggagcttgttattctagcagccgagataatgaaagaacaacaccattgaaattcattcttcagtttgttaccggcattttaagttggtctgtggctctgtgaatataatttattgagaatttgatttcaaaatctcttgtataacctctcatgggatgattcacaatatgtgatacataatatagtgcagttttcaagc

SEQ ID NO: 144083 - DNA, 1437 bp, Arabidopsis thaliana landsberg
  unsure (1)..(1437): unsure at all n locations
tcttcctctatctctcccctcctcacaaccgccatntcagtcgcaatcttcttcttctccaccatctccacagcggcgacaattccaaacatccaccgtccattcaacaaaatctacgccttcggagattctttcaccgacaccggaaactcacgctccggcgaaggaccagccggattcggacacttgtcaagtcctccatacggcatgactttcttccgaagaccaacaaaccgttactccgacggtcgtctcaccatcgacttcgtggcagagtcaatgaatttaccgtttctgccaccgtatctcagcctcaaaaccactaacgctaacggcacagcaacggatactcacggcgttaatttcgctgtctctggatcaacggtgattaaacacgcgtttttcgtcaagaacaatctgtcgcttgatatgactcctcagtctatagaaacagagcttgcttggttcgagaagtatttagagacacttggaacgaatcagaaggtttcgttgtttaaagattctctcttttggattggagaaattggagtgaatgattatgcgtatacccttggatctactgtgtcaagtgacaccattagagaacttagtatctcaacttttacaaggtttttggaggtaattaattataaattaagcgcataattaacatatatgaaatattatgattttagatctacaaaatattactaacaaccaaatcaagattgacatgtttctttttctctttgtgtttttggctctctaaccaaatgttttatttttcattacaaaaatgtgttcaatcttgacaaattatgtttttttgttttcgttacaataacaaaataggcatttgatgataaaccagtctggcttagaagttaaccggatcatggcagaaataattctggtggtcatggatctaactgaccggtttgtgttgaattcattgtagtatgtttagttaataacatttttcttaaatcataactgcagacattgttgaacaaaggtgtgaaatatatgttggtgcaaggacatccagcaactggatgcttaacgttagcaatgtcgttggccgcagaagatgatcgggacagtctaggatgtgtgcagagtgccaataaccaaagttacactcacaatcttgcccttcaatccaaacttaaacaacttaggtcagttgtgtaaagataactaataatttgatgttatatagtagtagactatatattttaaacatatttaataaatgcaggatcaagtatccgagtgccacaatagtctacgcagattactggaacgcgtaccgtgcggtgattaaacaccctagcaagtacggtatcaccgagaagttcaaggcgtgttgtggaattggagagccgtacaacttccaagtgttccaaacgtgtgggacggatgcagctacagtgt

SEQ ID NO: 144084 - DNA, 669 bp, Arabidopsis thaliana landsberg
gttaatggtcgggagatcaggacagcttatgtatatgcaaccaatttctcaggtaagaagaacttgaataataatattattgtgtacataaacaatcacattagccttttttgcttacaagaaactcaaatccgcttcccttttatgttcttataaggatttggttcaaggagcaccacataactcacatttgcctcctcgtcctctctttactccccaacagtttcagtatccaaagcatcagagtaaaacattcttctctgtccaattatggtttcatgttaagtaagaccaaagattttggttttcactaaacttcactttcttggtaattcaggtctaatcgcaactggtcaaccgatgcatctatatgctccacaaccatttgcagccaatggacatcagccttacacagtcatgcctaccgatattccggttatgcagtcaccttttcccattaaccgggccatgccaattccggttcctaatggtttctatggcacaaagtttctatagaaagtcttgtttttcatcttcattaccttattatttgcctcccagcttaataagtttttgatacatagttaaaaaccaaaaattatagatccgtctgatgacttggattttttttctttctcaatgatatacaactactagctaaagaaaaca

SEQ ID NO: 144085 - DNA, 1156 bp, Arabidopsis thaliana landsberg
gccaaatctatcaccgccaattactctctaatcggaaaagagccccgacgacaacgaccaccgtccctccgtcatgccggagatagacgcgttgtttgaatcgatcactgttcgggaccttctcgccggacacgatctaaacgatcccacaactccgttatctgcaccggatctccgtctcctcataaaccgcttagagtctcattctctgcggatcaagtccaaagttcagtcttatctcgtcgctcatcactctgatttctcggagctattttctctttgtcaagacaccgtctcgaggactcgtctgatctccgatgacgtctccgatgtcctacaattggtttctgaccgtccgattgatgttgagatacgcagtgtggtagatgagataacggaaaagactaaggaagtgaaattgaaaagagaatctcttgatttagtgaatgcgatcgtgggaatttgtgaggcattgcaggaaacgaaggaagctttgaaaaatggacgtttcagattcgccgctgagagaatcagagaacttaaagttgtattgagaattggtgaagaggaagatggagaacctgtggcttacgctttacttaggaaggaatggtctaattgctttgacgaggtgcaaccttagttaaactcagtgccaatggctagcttagtgtctttaatcttcgaatttgcatccacatttcaaagaatcgtgtatgtgttttgcagattcaagaggtgcttgcaaagttcatggagaatgcagtgcgttttgagctagactcgagtagaatccggattaagtatcagctaagcgttggtgagactgctggaatcgctcttagtactgttctagaggcaatggaggtatggatatatgatttgacttctgtatcaatttttatttttatttctgtgttaagtcatttgttagattacactttttggcatttgactgttctggatttatctaggtgattggaatattagactatgggcttgcgaaagcagctgactcaatctttaagcatgtcatcacttcagctgtaactcatgcatctacctttgccgctgtggaagatttatgtaaatccgcaggggaagtcaccgaagcgacactaaggctagagcaatcctcagatcataaggtctagag

SEQ ID NO: 144086 - DNA, 895 bp, Arabidopsis thaliana landsberg
atcaaatcaatacagaaagttttttctatatataaatataaaaggtaaaatgccagggatcacactaggagacacggtgccgaacctagaagtggagacgacacatgacaagttcaaacttcatgactacttcgccaattcttggaccgtcctcttctctcatcccggtatatatgttaatatatagatcttgagttcttgacttctgttgcaattccttttttgttttcttgatttttgttgacggtcacacaggggatttcacacccgtgtgcaccacggagcttggtgcgatggccaaatacgctcatgagttcgataagagaggcgtgaagctccttggtctgtcttgtgacgatgtacagtcacacaaagactggatcaaagatattgaagcctttaatgtataatttaaatctcatgcatgcatataccagactagctagagatcatattttggttttgattaatttgttacatatgtatgatatagcacggaagcaaggtgaattacccgataatcgctgacccgaacaaagagatcattcctcagcttaacatgattgatccaattgagaacggaccgtctcgtgcccttcatattgttggtcctgacagtaaggtaataatttcatatattattgcatgtatgattttattggttaattggatttgtgatatatagataaaattgagcttcttgtatccgtcgaccacgggacgtaacatggacgaagtattgagggctttagactcgttgttgatggcgtccaagcacaataacaagatcgccactccggttaactggaagccagatcaaccagttgtgatttcgcctgctgtgtcggacgaggaagccaaaaagatgtgcccgcagggtttcaaaggccttcga

SEQ ID NO: 144087 - DNA, 2210 bp, Arabidopsis thaliana landsberg
  unsure (1)..(2210): unsure at all n locations
tggatctacacctctcctcagtctcatactgagatcaataatccaaaccccaaagaaaagaaaaccagagaagagagtttaaaaaatgagaggttcttgcaaagtctctatagttcttcttctggttttaatcaatggtgtgcttggagataacccttatagattcttgacctggaaaattacttatggcgacatttatccccttggtgttaaacaacaggtatttcaactgtttcttcttctttctttctaggtttgtcacattttctctgtttgttctctcgagaaatctcgtgataacattatcttgggttgggttttgagtactgcagggaatattgataaatgggcagtttcctggacctcacattgacgcaatcacaaatgataatatcattatcagtgttttcaattacttgaaagagccttttctcatttcttggtaagttctttcacatatctttactttttttgccgtataatgtgttgccgagaagttgaatattcttggatagaaagcaataaagattgaagattaggataagatcttaacttttaatttttgtgaattttgtttttgttttttgttgtccaaaagaatgcagctttcggacaaatgtgctttgagtaaatctcatctcacacattatcaatacttgcatatttatgtattagtctacaagagaaagaaatgatacatctcttccaaagaacaatactttttcatgaataaaacaaaaattgagatcgttaacttttctcgttgattttaatgctattcaaaacgtaatatttgcttgtttaatagaagatttaaagcaactaaagtacttcattaattaacaacaattttattttgtttgtagttagctaataaaaagtatagtaaacttataacaatgaaaaggtctcaactcaaacgaacaaaaatagtttttactctgtagggattaagtaacttttattttgtcatttgggacttaaaatcagaaaatctagcattctagtgtttcaagtaaaatagatttgttacaaaaaaatgaaaaataattttcttgttttatttcatttgagaatgtcaatttctttttctcattgagagccataaaagctttttcttacacccgacatgattggctgtcaaacatacaatacataatatcataatatagatatgccattagaaaattaaaatattccacttgatccatccaaactagtcacatgcgatgacacatgtgagctttaagtgtcagtgggaaacaaaaggcagtcattcaaattaacttttacgtcccggatctatttgaatatccgtaattaaccccatactcttaattcgatcaaacatacccctaatctttaaagactttttcttcttaggaacggagtgcaacagaggaagaactcatggcaagatggagtcgtagggacaacatgtccgattccaccaggcaaaaacttcacttatgtaattcaagtcaaagatcaaattggtagcttctactatttcccttctcttgccttccacaaagccgctggtgcatttggagccatccgtgtctggagtcgtcctcgcatccctgtcccgttctctccccnnnnnnnnnnnnnnnnnnttctcgccggagattggtacaaaaccaatcactatgtaagtacactccttattgccctaatgccactgacttgtactgcaagaaaaggaccgaaagttttggggttttggcaaaatctcattgttttgttattttaaggttttgagacgtctactagaagccggaaggaatctaccgaatcctgatggagttctcattaatggtcgcggctggggaggcaataccttcaccgttcaacccggtaagacctatagattcagaatatcaaacgttggggtcgcgacttcattaaacttcagaatccaaggacacacgatgaagctcgttgaagtagaaggctctcacactgttcaaaacatctacacttcacttgacattcatttaggacagtcttactctgttcttgtgacggctaaccaagctcctcaagactattacatcgtcatctcctcgaggttcacgcggaaagtccttacaacgacttcgattctccattacagtaactcgagaaaaggcgtatctggccctgttccaaatggtcctactttggacatcgcatcttcactctaccaagctcgaactatccggtaa

SEQ ID NO: 144088 - DNA, 2284 bp, Arabidopsis thaliana landsberg
cttcttcttcaatgtagtttcatgtccctagaaattttcgttttcttctctttgaatcatctatcgttttctaagaaattgagttcactcttcggcgatggagcgaaactcgtcggacgacgaagaagaccaccagcatttgattccccaaaacgacactcgaatccgtcaccgggaggattcagtttcctccaacgccaccacaatcggtgggaatcagagatcggcgtttcagatcgacgacattttacatcgagttcaacaccgtgggaagatctcgctcaacaagcgttacgttattgtcttcgtttctctaattatctcaatcggtcttctcttcttactcactgatcctcgtgaactatttgcggcgaatttctcgagttttaagctggatccattgtcgaatcgtgtcaaagaatctgagcttcgtgctttgtatcttctgagacaacaacagctcgcgcttctatctctttggaatggtacgttggtgaatccttctcttaatcaatctgagaacgctttgggatcgtctgttttgtttgaggatgtgaaatctgctgtttcgaagcagatttcattgaataaggagatccaagaggtgcttctatcaccacaccggagtagcaattactccggtggcaccgatgttgattcggtgaatttctcatataatagatgtagaaaagtggatcagaagttgtcagatcggaaaactgtagagtggaagcctagatctgataagtttctattcgctatttgtctctcaggtcaaatgagtaaccatttgatatgtttagagaaacatatgttctttgctgcattgctggatcgagttttggtgatacctagctctaagtttgattaccagtatgatagagtgatagatatagagcggattaacacttgcttgggaagaaatgttgttgttgcttttgatcagtttaaggaaaaggcgaaaaagaatcattttcggattgatcggttcatatgttactttcatcaccacagctttgttatgtggatgaggaacatattaaaaagctgaaaggtttggggatttccattgatgggaagcttgaggctccttggagtgaagacataaagaagccgagcaagagaactgtgcaagacgtccagatgaagtttaagtctgatgatgatgtgattgcaatcggggatgtcttctatgctgatatggagcaagattgggtgatgcaacctggtggacctattaaccacaagtgtaagacactaatcgaacctagtaagctgattttgttgaccgcacagagattcatccagaccttcttgggaaagaatttcatctcgcttcatctccgcagacatgggttccttaagttctggtgagttttttttgttgccatcactccctttttaggctacagaaccttgccattgttgccattatgtatcttgatagtgtagctcacactcaattgattgggataccagaacacctttccacctggtttgttaattagtacatatctccatccagaagtttgtcatttgctttacttaggcacttctgtgtaacaattgaatactgtgctgattgatatagggactaggattggattttgacaaactgtgtctcatttatagctggctctgtctaatgaaatgatttctggccagcaatgcaaaatcgccaagttgtttttatcccataccacaagctgcagactgcatcagtcggatggtggaaagggccaatgctccagtcatctacctttcaacagatgctgcagaaagcgaaaccggtcttcttcagtcactagtagtcgttgatggaaaagtcgttccccttgtcaaacgtccacctcaaaactctgcagaaaagtgggactcgttgttgtatagacatggtatagaagatgactctcaggtaacgcacttattgctttgtttatgggccaaagatcttgttctctacttgaaccgtatctctaatgtggtattgaacagaaatcaattctaatggctatgatctagtaacattctttggtctgagaaaaattcgtagatattctttgacgagacattcacttgcttatgctttggtttttggaatggttaggtgtatgctatgttggataagactatatgtgcaatgtccagtgtattcatcggagcatcgggttctacttttacagaggatatcttgcggctaagaaaagactggggaacttcatctatgtgcgatgagtatctctgtcgaggcgaagaaccaaacttcatagctgaaaatgaataa

SEQ ID NO: 144089 - DNA, 966 bp, Arabidopsis thaliana landsberg
  unsure (1)..(966): unsure at all n locations
atgataaaatcattgttctacactttccttcaaacgaaacaccaagaagaaagcaacaactcaagagatcctaattatcctctatttcctcaagagatcgagattcgacccatagcttatttcccttgggaaatcatcaaaactctaacaaccgatgaaatcataagtaagttccaacttccaatggaaaaaatccgagataccatgcttagacatgcttcagaagaagacatatatcgcacaaaatttatgagttgtgagaccaatatattggtaaaagatctcgacacaaacactatccatcaaggtaaattgtggaagcatccatgcgaaaataattttgcattgcgtgaatcttggatcgaagaatttgtgaagaggaggaggcttgtggttggcatggtggttggtatgtattgggattatgaggcctgcatgttttgtttctctgtgttagatggaagacaatgaatctaaagattcaaattattatttaggtttggggggggggggggacctaaatngcccaattgatctggattagattctgtgaaccgattttgcctgcgtcagagtgagtcaaaattcatttctcagacagaactagaagatgacaacggccacataaagtttgtgatgtcttaatccatatggttaagtatgtgtgatgaagcatttagatttttggttttctttgttttttaactggtttgattttgctttgcagtgtctttaaagtcggacaattttgagggtttacgcttcgactttaccagggcgttgaatcagaagttttctctcagtcataggtatgtagcttgtatttatagttattgttgtaccatctatttatttgtggtcttcgctaagcatgtgtactgatggttaaacagtgtaatgatggggccaaccgaagttcctgctcagtcacctgaaactactatcaaaattccaacagcccattat

SEQ ID NO: 144090 - DNA, 404 bp, Arabidopsis thaliana landsberg
gggcatcacttagacctaaggcttatccggaatcagtggctcctaattgatccaaagatagagtttctcatgtctgaggcaaatgaggagagaacacatggcgattttagggaaatgggtcagaggcttgcgcaggaagttgtttcttttttcaagaggaaaaaggataaacatgcgagatacgggcgcttgaaaaacatcaagctgagttttgttggacattcaattggtaacgtcatcatcagagctgcaatagctggtatgttcttagaatctctcaaacaatgtttaaaacggttcgtgaatccggtttggtgttaatcattatttcccgcttatgtatttgttgcgatagtttgatggatccatacaggaagtattttcatacatatatattgcttttc

SEQ ID NO: 144091 - DNA, 2830 bp, Arabidopsis thaliana landsberg
atgattgatgttggaacaaacaatgaaaaactacgcaacgaccccatgtgtaagattcatttgctcctcttaccttcttaaagtcaaattattggagctgattataataggttaataacggttttcttctttccgaaaatatataattagtataactgtttactgaggtttgatattttattatggtgaaccatatctatcatctgtctctttacatattgaggttgagaatgcatattatttttttagtaggatgggacagaatgtgtagttgagatttgtgtatgcatatatacatatattgaaaggtcaaaggtttatagtattctgtatactgcaggagtctgtcataaaatttggttgtacgacatgttattcttgtctttcatggtttagggatttccaatagttcagagacatgaacgagaatagcttattatctgtcatgtaatcgttctttctatgttttctttttgacagacttgggtctgcaacaacgtcgtttagaggatgacgactatatagatgttattgatgaatttatggaggcagtgtatactcggtggccacatgttattgtgcaggtaaccgatgcttcatagatctctggtatatcaaatgtttcttattatgaaacttaaatgttttttctacccacagtttgaggatttccagagcaagtgggctttcaaattattgcagaggtatagatgcacctaccgaatgttcaatgatgatgtccaggtaatgagtcttccgccttagaacgattcttgtgaagattaaatactaattatttatttatttctgcagtatttttactatttttagagcattttagtcactactatttataaaagtatcatattttctgtgctcaatccatcatcttatcgttcaatagttattcttaatcttttttatacgaccagatgcattaaagagactgacgaagggaactcgaaatctaaatgctgatactagaatcttgtttttcattctatgttttcatgatctcgctcaggggacagcaggggttgctatcgctggtcttcttggagcagttagagcacaggggcgacctatgattgatttcccaaagatgaagatcgttgttgctggcgcgggaaggtaagccattctcggttggtgtttttctcgtctttcctggtcctagtttaccagaaattggtattggtaaaagattggtcttgctgttactgtttaattatttgttggtcagggatctttcgtttatttgttggttttgagtaatgtttgaagagatttaaaatgaaaactttcagctgcatcactgcataagttagcttagactacttatattagaatactgagcttccttgtaaaaatctttgatttcttcagtgcgggaattggtgttctaaatgctgcgaggaagacaatggcacgaatgttgggaaatactgaaactgcgtttgatagtgcacaaagtcaattttgggtggttgatgcgcaggtatgttattctatagtggagtaattgattttcagattagggagctgataagacgttttagccagtcaagccatttccctctggtttccttttactgctgatgaaatcacttcatcatcattttttttttgggcgtgtgttttggtccaatagcttaaggagctgaagttgtgaactcttttttttgcacttaaatcagggtcttatcaccgaaggccgggaaaatattgacccagaggctcagccttttgctaggaagactaaagaaatggagcgtcagggattaaaagaaggagcaactcttgtggaagtggtctgttattctttctatcaatatgttcatcaagtatactaaatctaatttggcaatgagtctggtgttggagagaaattctcccttaaaaaagtttgcctgcttaatactgacaagaaacaacggttttctgtttcatctgtgctaggttcgtgaagttaaacctgatgtgcttcttggtttatcagcagttggagggttattctcaaaagaggtaatgaaagctgccaaacggctaaacatatctagtgctatgcaacagaatcagtgatttaactaattagatgagcgcgcaaatgaaatctagtatttcttcagtgaccactgtcttcataatctggtttccatggtaactgctaagtagatgagtgagctagtagaatgtagcatagctcattgcttgcatgattctgacatatggtagttgatttttgaagtcattgttgggatattgtgttgaaggttttagaagcaatgaaaggttcaacctcgacaaggcctgctatatttgcaatgtcaaaccccacaaaaaatggtaatttgtcttctttctttgccataaaatgtggtttgcggttatttgtgattcttttttggatagatgtaataggtacttgtgttttgaataacagctgaatgcacgcctcaagatgcattttcgatattaggcgaaaatatgatttttgcgagtggaagcccattcaagaatgtggaatttggtatgtatgaggacctctgtatcatttagcatacgccattttatatgaggctttttcaaatattagtaccttttcttgtggcaggaaatggtcatgtaggacattgcaaccagggaaacaacatgtatctatttccagggttggttcctcttgtttattgtccgaaagaattgcatacattcttgaattgatacattaattgtcatgaaataaattgattttctaatcctgtaaaatttattgtagtattggacttggcactcttttatctggtgctcccattgtctccgatgggatgct

SEQ ID NO: 144092 - DNA, 1778 bp, Arabidopsis thaliana landsberg
ggagaagcaatggtgacgattctatcaactcctcctctctctccaagacttacatttctctgtgagttcttccctctatctctcaaaactcttattgatcttacgattcagtaagctggttccataagactagttaagtgaccaaaactgttccataaaatcttataggtgaaacaaaactgtcattatctcggagcaatcgctcggtatgttgttcattgagtgaagacccaaaagaccaatggtaaaatttgcaatcttgagagataatttttttcctttttttggtttgattctggagataaagcttggtcttttaattgcagcttgagtcggagaagtcttgtttatgttttagttgcttcgccgtgtttgttgttaccagcgttgtcttcatctgcgaagactaaatcaaagagtccttatgatgagagacggttactagaacagaacaagaggatacagagagagaacaatgctcctgacgagtttcctaactttgttagagaaggtttaagcttttattcactgtttctttgagtattattcattcttgagtggaagaagaatatgagaacttattgtccttttgtttgtgtttatgtttttgctgatatagtgcaggttttgaggttaaggtattagcttctgataattacatcaaggctgattctggcctcatatatcgggatttcaatgttggtcaaggtgatttcccaaaagatggtcagcaggtactacttcctctatgttagattagttaaacttaggatctgaagttagatcatttatggaattggtatgctctttacttggatatatagaattgaagatatcattgagttttatggttattttgacaggtgacttttcactacattggctacaatgagtctggaaggcgaatagatagtacttacatacgaggttctcctgctagaatccgcatgggaaccaatgcacttgttccaggcaagtagaagacattaacttggctctttagtagtaggatgttaatgaagaatcttctttgacaggaaacacatattgaagatttttaatactatatggataatgatgatgcaggatttgaaatgggaattcgtgacattaagcccggtgggcgaagaagagattataatccctccagaattgggacctccggttagtgttcttacttgttccttacaagtatacatttgtctgaactgtaaacctgactagtggtaaacttttgctgagccattccgttgaatataccatccctctatcaacaatgtttcaaatggaattactagcttgagcatgctcgtttaggcacatatctaaaccaatgtagattagacttgtactgtgtaaaaactgtcttcactttggttcgatcatatttttgtcacaacaatgttcattgggctctcaccaggtgggaccttcgactttcttcagctcgaagcaatttgaagttttcgacgtggagttgctcagtatccagcattgtgagaggaggactataataggtttctactcagatgtcacatgcagttaacttccaaatgatggtcatcagtaagcttcaatgaacctgcattcttcaatcttcaatactctaaatctgcacggcagatgagagctacaaagaaacaaaaagaacaattattctttgcttaggcatttatcttgtgggtttcatgtagagatgcgcaattacatagagagacagataaagatcatgtaaagtctcgacctttttcataatcgtagtttacttttgttgcttt

SEQ ID NO: 144093 - DNA, 589 bp, Arabidopsis thaliana landsberg
acccctaaacctataacaagggcgcgccttctcttccgtcttctccaagaagccaattctacatctccggctgaagcttctccgcctttcaactccgacctcgtcctcatccttgcggttcttctttgtgcactgacatgtatcatcggcttaatagccgtctctcgatgcgcttggctccgccgtatcgcctcaagaaacagatcggatcaaactcatccaccgccggtagctgcagccaacaaaggattgaaaaagaaagtcctccggtcgttaccgaaactcacctactcgccggattctccgccggcggagaaactcgtggagtgtgctatctgtttaacggaattcgccgccggagacgagcttagggtgttgccgcagtgtggacatggtttccacgtatcgtgtatcgacacgtggcttggatcacactcttcttgtccttcttgccgtcaaatcttggtggttaccaggtgtcataaatgtggcgggttacccggtagctcaagttcaggacccgaacccgatacccgaatcaaacaacgtgaagatggtcctgataacttgccttgattcttttctttag

SEQ ID NO: 144094 - DNA, 2601 bp, Arabidopsis thaliana landsberg
catagttgtgaaaagtccgccattaaagaccgtctctcttttctccgtctttttctccctgcagttaccggattcctccgggtagatctctccgttcatcgccggtaagttgctccatattacatttttcctttcccgtgtgcgcgattggtcatctttaggttctaaattttgttgtattcggcggagtaaacagcgattaccggtgatgacttaacttagaagatttacactagtgtaattttgatttagtatcattgaagaatccagaatcatacgcatctctttctgctatttattgaatgtttcatatatgatctgtcagacttgattcttcaattctttgaattttccattttatcagatgacagaaggaatcagagcaagaggacccagatcatcctctgttaactctgttcctctgattcttgacattgaagactttaaggtgaggttttcagttgcttatgttttttcacttttgaatcataagggatattgatttttgttcggtcactcgtagggtgatttttcatttgatgcattatttgggaacctggtaaacgacctcttgccgtctttcctagacgaagaagcagattctggggatggccatggcaacattgctggagttgatggtttgacaaatgggcatttacgtggacagtctgctcctttgtcctctgctcctttttttcctgaagtagatggtcttttgtctctgttcaaagatgcttgcaaggagttagttgatcttcggaagcaggtgagtgtcttgcgtctacatcgatgactagcccttgttttatcttttcatcgttccgatatctgaggtttttgttatatattttggaaggttgatggaaggctcaatacactaaagaaggaagtttcaacccaagattctaaacaccggaagacactgactgaggttggcagactaatactattagtttgattaaattccttgggtacatggatcacttcctgatgaataactgacaccccgatcatttcttcaaatggtaattgaattctctttttagatagagaaggttgtggacggtctgtttgagagctttgcaaggttggacggtcgtatttcaagtgttggacagaccgctgcaaaaataggagatcatttgcaggtaatatttaccttgcttataaccaactatctggtggtctatccaatattaacccatgcttcctttgtcagagtgcatatgctcagcgggaaactgctagccagacgatagatcttataaaggtaagtgtgcatctatgttgcaaggttggtcacatatttagttagatgaatgcttaaagtaatccttgttcaacaaatgcagtacctaatggagttcaacggcagcccaggggatcttatggagctttccgctttgttttctgatgatagcggggtagctgaggctgcttctatcgctcagaaattacgtatgatgtgatagctttatgttacttgaaatttgtctggagtgttagaacaactttttatctatcatttgttaacaactaagaatttaactctccaacaacgaaactttactaaaaccaaaaagaaacaatgaaaatttacagttaaattaggctgcaattgatttccatgctctccttgtcgatatcaggatcctttgctgaggaagacattggaaggcaaggtgcgagtgcagctgcaggaaatgctacccctggccgaggactggaagttgcagttgctaatcttcaggattactgtaatggtaaactaattcgtttatactgtgttttctgtatatttactgaagaggattattgtatgttcaactttttctttgtgacatttgagtatgatgctgtagaattggagaacaggcttttatctcgttttgatgctgcatcacagcggagagatttatcaaccatgtcagaatgcgctaagattttgtcacaggtgaatgctttattctgcagcatgcccctttacaattcagtaggaaaacctgttcttttatctaagatccgagcgaaggccttccttacgtatcgagtgattacatcctggttaattctacataaagctgtcacagaaggaatggatgtctagttctcctcttgtacatatggttcttgatacttagtattttttcttcttgattttcagtttaacaggggtacgagtgctatgcaacattatgtggctacacgtccaatgtttattgatgtggaagtcatgaattcagacattaggttggttcttggtgaccatggttctcagcctagtcctagcaatgttgcccgcggactttctgctttattcaaggaaattacaggtttgaaggtcattgatctgcatgcaatacttgaaacatgcttctatgctgattcatatattttgttacttcttatgtgtagacaccgtacgcaaagaagcagcaaccattacagctgttttcccgactccaaatgaagttatggcgatcttagttcaggtaactggcaccgataatttggacactgtagtgttaacccggcatatggataagctataccaactcttcgtgtattttacgcagagagttctggagcagcgtgtcacag

SEQ ID NO: 144095 - DNA, 656 bp, Arabidopsis thaliana landsberg
tttgtctatgaaagatggaatcaaagacgttctggatcgttactcttcttctctgtggaacaattcaattagcgatttgcagatcagaagagaaaagcacagagaagacgatgatgctaggaggcgttcatgatctccgaggaaatcagaacagtggagagatcgagagtctcgctcgatttgccattcaagaacataacaaacaacaggtttttaaatcctctgttttcgatctgattataataacctatgaatatatctttatctgattagtttttgttttttccgggtaagtacagaacaaaattcttgagttcaagaagattgtcaaagcaagggagcaggtagttgcaggaacgatgtaccacttaaccctagaagcaaaagaaggtgatcagactaagaattttgaagccaaagtgtgggtgaagccatggatgaacttcaaacagttgcaggagttcaaggaatcatcttcttgaatttcacttgttcaagttaatgattacaaatgctctgagagtaattaattatatgtgtgtaaaatactttgctatatgcgaaacctaaaaagttaatgtaatcaagaaacttgttcttatgtcctgcaaatatctttgtatgtttgcttcctgtttattcttatgtttcaagtt

SEQ ID NO: 144096 - DNA, 468 bp, Arabidopsis thaliana landsberg
gaaagaaattagcattgttttctttaattcttgcttttgttatgattgcgaatttgcacgaggaagtcaaagagagcgtgaccgtgaaagggctctagctcgaacggagcaaaggaaagaacaaagatgatggattaaatcctgagcaacgtcgtgaaaggtaaccaaatttgtatatgttcttgaatctgattacaacgttaatctctatggattgatcgatttcattgtgctttagagatgcaaaagcattgcaagagaagactgcaaagaaagctgctcaagccgctgctgcagctagttccggaggaggaggaggcaaaggaaacagtaagtgagaaaaaatgatctatgcttcgatgtttgtaactgtgcttttgaatatgaaagtttggtgtttgtgttgagaatgttttggcttcgtttggtttgagtttgtacaaaacttagacttggtgatgtactttg

SEQ ID NO: 144097 - DNA, 781 bp, Arabidopsis thaliana landsberg
gtccaactgcaatttactgaaggagcaactaggctaatcgcaagaaaggctatgtcgaagaacactggtgcacgtggcttacggtctatactggaaagtattctcaccgaagcaatgtttgaggtatgaggatttcacccttatagtttttgatacttcaatgtagatattcgattgcaatgtactacaaataccctgtttgtgtgttttaaatgttaaatgtgaattctaaacaggtaccagatagcatcacggaaggatcacagagtataaaggcagttctggtggatgaagaggctgttggttcagttgggtccccaggatgtggcgcaaaaattcttaaaggagataatgtgttgcaacaatttgttgaagaagcagagtcaaaggtaagtaagtgcagcacgtgctaagttgacgcaccttacgatgtattttatgcgaaagcttcagaaattgtttaatgttataggagaagagtaaggaggatgaagctaagagagctcagagtatgtagccaagctgatgtcatgagaagtgtgagtaatgttagatatatagggcatgaatggtctcagttggcaaacctcagtagtttcagtgttcagattcattaacaaagagataaagagtaaacagtattttaatggagagagcactctcaaacgagcttgttggataagttgtgaataaaaatatgtgagtgtgaggaatgcactctacattgtatgagatagtagtatgaatagtcagatgctattatatctattttgttacttct

SEQ ID NO: 144098 - DNA, 1397 bp, Arabidopsis thaliana landsberg
taaagcttactctttctgtgcttaatacagaggacgagtatcttgttaacatgcaacatactgttataccatcgtggtatcagcgggagggatatataaaggcaatggcaaatctaatccaaagcgagttgggaaaatttggttctcctaatcaggtaaacaatcttgtgtctgctcactagtggaaagaaagaattttcaagtcttttgtagttttttctagctttgcctattgaactatcctaagacgtgcttcaaaccaaaatatatgttacaggttgtaatatttttcagtgcacatggcgtgcctcttgcatatgtcgaagaagccggtgatccttacaaggcagagatggaagaatgtgttgatctaatcatggaggaattagacaagagaaagataactaatgcttacactcttgcttatcaggtacttcccatttttgtcgaattagttgtttgtcaaaaatttcactcattctgttgttttattatgtttaacagagcagagttggaccagttgaatggctgaaaccatacactgaagaagccattactgaacttggtaaaaaaggtgttgaaaatcttctggctgtacccataaggtaatcatctgtctattctctgccacaaattctctcttctctggttatttgaaactcacgtttgtttctattttaacagttttgtgagcgagcacattgaaactctggaggagatagatgttgagtataaagagttggctttgaagtctgttatcaaaaactgggggcgagtacctgctctaggaacagaacctatgtttatatctgacttggcagatgctgttgtggaaagtcttccatacgttggtgctatggctgtctcaaaccttgaagctcgacaggtaacaaacacttttcatcttacatctagttaaagctccacaaaagaatctgttatcttcacttctaattcttttcttttctggttgggcagtcgttagttccgctcgggagtgtagaagaactattagcaacgtatgattcacagagaagggagttaccagcaccggtgacaatgtgggaatggggatggacaaaaagtgcagaaacatggaacggaagagcagcaatgttagcggtgctagcactcttggtgctcgaagtcaccaccggaaaagggtttctgcatcagtggggcatcttgccttcattataataaagataacgtatagtctttttctctatgaaaacccaatccaagaatccaaatgtgagctttcacatgtggaataaggccagctatgttattatgctctcttcttctctgttgtagaaatgttgacatttaaatacttcatactgtatcttcataaaacattaaatgttgacattttaatcggcatgctttttcgc

SEQ ID NO: 144099 - DNA, 1048 bp, Arabidopsis thaliana landsberg
cccatttctctatattaatggtgcttcctctcctaaaccattcctctctctttctctcagccaccatttattctctccttaatcactgactcgactcgggtcgtgaccaggtctgttctcttctaacaattcgtaactttttttcttagatctgtattgattccgattcgtgtttttgataccaaagtttctatatccacgaggagggttgcgtaaaaatcggcactttttttctctctcaatcccagattcgttaatgcagtcatgagatctgtttgttagtgattatcgaattagtgtaatgttgcctaatttcgaattcgacattgagataggaacaatttatagcttgtggatctgatcattgtctctcttttgtttgttgtgattctcagttttttctatctgagctatggcaacgggacagcttttttctcgtaccacacaagctttgttctacaactataagcagcttcctgttcaacgaatgctcgatttcgactttctctgtggtaacataacaatttacattgtctagttttcagttggtttggatcaagttttgatgttaaagatgatttgcttttacaggacgtgaaacgccttctgttgctggaatcataaatcctggttctgaaggttttcaaaagctctttttcgggcaggaggaaatcgctatccctgttcatgccgcgtaagttttgagaatgtcatgtgagttcttgagaggaactaactatgtgaaaattttgttttaacttgttttctgttatacagcattgaggcagcttgtgctgcgcatccaacagcggatgtattcatcaactttgcatcttttaggaggtttgttatgagaatttcatggaataaacttagcattgcctctttgtgatagttttgttgatgttttcattctttcttctgttttatagtgctgctgcttcatccatggctgctttgaagcagccgactattaaagttgtggcaattatagctgaaggtgttccagaatcagacactaagcagctgattgcgtatgctcgtgcaa

SEQ ID NO: 144100 - DNA, 2066 bp, Arabidopsis thaliana landsberg
ctctctcaacattatctctcagcgacaagtttagttcagattcctctagaacccattttcagatgtctcgtcagatttccggccaaccctctcgccgtctcatcgtctccaatgctgcttcttctccttctctctctggtggcttcccaggtttcttacaaaaattgttcctttctttctacttagaattcagatttcaattgatgaatctttctgttcgtgttaggtaactaccatattgaggtttcttgactcacctatgagatttagtattctgctaattgtggaacatttgagcttatagttccaattggatgaaattagatttgagtaatctctctgtgtatcacaaattgttcctttttctcccataaagatctaattttatatgagtaatcttcttgtttcatgaatatttagatgctggagcacatagtaaagaggagatggaagctgaaacagaacaggatccaatgaacctagctgatccagacagttgtttctgtgagtttcaaggtgttcatatacaccacaaagtgtttgatccacatacactctctgatgatgtttcaaacacaagccctcatgctcaagaaacaccaaaaaccaagtttccgatgattctattgcacggtttcggcgcttctgtgttctcctggaacagagttatgaagccattagctcgtctcgttagttcaaaagttcttgcctttgatagaccagcatttggtttgacttctcggatttttcacccgtttagtggtgctaccaatgatgcaaaaccattgaatccctactccatggtgtattccgtgctcactacgttgtatttcatcgatgttcttgctgccgataaggcgattcttgtggggtaagtaagctagtaggttccatatactttgcatttcttattaaagtgccaccataagctgagattgttaattcatatgttgtaggcattctgctggttgccctgtagctttagatgcttactttgaagccccggagcgtgttgctgctctcattctcgtcgctccagctatattcgctccccgtcctgtggccacaactgatgctggagagaaccgtgacaaagaagctcccactagcaactttctagggactctagttgagttaaccaaaggtgttataagagcagtattgagagtggtaacgggaatggcgaatatgctgagttctctctacaagaaagctttagcagctttcctcagatccttccttggagtaatgctggtaccgcttttttttgtcttggcttcattcaccagtcatgtcattttttatatgttgttagaccagaacacttgatgtgtttctaaggtggttgtttttttcaccaggtgaggatggcaatcaataaatttggagtaacagctgttaggaacgcgtggtatgactcaaaacaagtgacggatcatgtcgtgcagggttatacaaaggtgagattttcgggttttctcaggtttctttatttcttctgcattgttatgttaaaaatttaggaaatttgattgtatttgttgcaaaaaaaacagcctcttaaagccaagggatgggacaaagctctcgtggaattcacggtggctacactaacagataataatggctcagagaaaaaactcccattgtctaaaaggcttcaagaaatcaaatgccctggtaatatctctttctataagattctgacaatgaattagaaattggaaccaaatattgtgcattgtatgtctgaactctgaaccaatgacatcatactatcttcatgtttctaatagttctgattgtgacgggagatacggaccgtattgtgccagcatggaacgcagagaggctggcacgagccataccgggatcagtgttcgaagtaattaagaaatgtggtcatcttcctcaagaggaaaaaccagatgaattcatatctattgttgcaaagtttctagggaatggttttggagggtcacaacaacaagacgtggacttgaagttccaaggcattgtatcatgaagtataactatatattttagctcaatcaagactaaatttt

SEQ ID NO: 144101 - DNA, 1850 bp, Arabidopsis thaliana landsberg
acccaaatctgacgcttctctctctctttctggtatctgcgtttgattcggagaagaaaaaaaaaaaaaaggcaaagagagagcttcaatggagttagcttctttccttggtagagctctgtttgtttccgtatttcttctctccgcatggcaagagtaagcaatttcctcttctttactcggtttagatctgtaagtaggatctgctttttctttatatctgagaaaattcaaaatctgggggctctttgtctctgttgtcttagagaagtgcacaaattatgaatcatggatttaggttttagctcgattatagctgagtgagtgagttcttggaggagaaagagaaatagaatgttggacagtgaaggaaaagtatggatcttgcttgctttgctggggttgaatttgatagataagatatctctggttagattctgtttctgattggtcaataactgtcgaacattgctatgtgttcttctgttattacatcattctctacctttagccctttgttttttttaagttctttcttttattactcattaagtgggttgtcctgaagttgcgaagtttcttgttgagttggtctcgttggtagttggtagttggtggttggttatttaagcacatgattctaaagtcttgaaaccaagaaaatcttactaggtgctttgttatggttgttgtgaatcaatttgactcaaccaatgaactcatatattgaatgcctgtataaggagtttctcttctaatttcttgttttaagttacacaattcttctgacgttacaaatgtagtatctttatacgttgattgaagaaaactttctttgttccccttgactgtctgcttggtttagttgaaaagcattgctatttgagtctctacagagacagtttacctcacttttgttctttccctcactgattgaaagttccaatatttttaatgacttcattgttcaggttcaatgattttggtgaagatggtggccgatcagctaaatctttgaaaccaaaattcaatgcctttgtaaaccatgtgacaactcacactggccagcaattgccaccagtcgatgtatgtgcttcttcatgtccattctttgtccaaacacagtaaccaaatcgtttttttttttgttttcctgttttattcactttgctttggtttgcagatgaagattcttgttgctgctgctatagccttgaagggtattgggggactattgtttgtctttggcagctcattgggagcttatctcttggtatgcaccaactgttccttcgaatatattgtcgcttatcagaatgacgaaaacaaccctgtttaactctatgaaatctggtttcagcttctgcatcaagccgttgccaccccaattctgtatgatttctacaactacgatgttgacagaaaggaattcggccaactattttcaaaatttacacaggttagctaatgtcatattggttgtttaatgaaagtttaaacaactgttgacatagacctgagatctttttctattctgtgttaacttttcagagcttggctcttcttggaggactgctcttcttcattggaatgaaaaactcaaggaaacacggtaggcaactcaggaaaaaggctccaaaggcaaaagcaaactgaagaagccatatctttcatcggttttattcggtctgtattttattttcattttggaatccaggatgggtttaaagagtctatctgatgaggccattgaaaggcaaaatctctgcaaatcattttgcttacttcaagaagcttttatgacacttttttgtagaaatatttatggattattgtttcttagagacacc

SEQ ID NO: 144102 - DNA, 875 bp, Arabidopsis thaliana landsberg
agagttaccgatgctgacttaatagctttagtatctgatgaagtgtttcagccagaggctgtctggaaactcctggacatgcaggtgaatagtggatatgagatttgttttctctctttacttgttctaacttcttctttagtcaattcttattcttatgctgattatggaaattgggagtgtagataacttgtggaactctcggtctctcaacatctactgtaaaacttgctgactccgatggcaaagagcatgtagcttgttctgttggaaccggacctgtagatgcagcttacaaggcagttgatcttatcgttaaggtacttcttttgctaggattgccgattatatatatatatatatatatatatatatatatcaatgattacttgtttaatgctgatcattagctatgcatatacaggaacctgcgactctgcttgagtactcgatgaatgcagtaacagaaggcattgatgctattgcaaccacacgggttctaatccgcggagacaacaactactcatcaacaaacgcggtaacgggtgaatctgttgaaagaacttttaggtaaattcactttaacttcatcatccttgtttgaaacttgaaactaatctagcaactgaagctaaagaaaagaatcgcagtaattactctgactcactgagtttgggttcttacagtggaaccggagcaggaatggacattgttgtgtcgagcgttaaagcttatgttggagctttgaacaaaatgttgggtttcaaagaacacacctccactttaagtaaaacccctttggagaccaacgaagtccctgcctgaagaaaatcttacctgcaaatctcagagatcaaatcacaatttagatgagt

SEQ ID NO: 144103 - DNA, 2134 bp, Arabidopsis thaliana landsberg
  unsure (1)..(2134): unsure at all n locations
gtgatgcagaacttcaagaacgtaccgcaatatttttacgggcttaattcagctcaaatggatatgttcatgacagaagatagccctgtccgtaggcaagcggaaaaagttacagaggttagtttttctcttctaagccttcttatctgtgcatttacaggtccagaatctggaaacagctaagaggagaacaaatttgcttctctactatatgattcttatctcgtcttttggcatgcttctttgttcaggaaagcatctcgtctagaaataactatttgaacaatggaggaatatggagtatgtccggtatgaatgcagcagatgctagaagatatagcatgagtgtccagatgtacagaggtggaggtggcggcggaggatctgaaagaccaagaactgctcctccagatttgccttctttgctattggatgctcgcatatgctaccttggcatgccagtaagaccttcatgtgtcgataacttgttactaaacccatttctttgctactgtgtttgctctctgcttagctattggatctagctcattttgcttcatttttacttgcagatcgtacctgcagttactgagttactcgttgctcaatttatgtggttagactatgataacccaacaaagcccatctacctatatataaattcacccgggacccaggtcagtagaagaagtttgattatatattgtttgttggtggtagttttctggatttatttagataacccacttgttacttttaacaagctatctattcttttgtttccttttgcttatgccatgtagaatgagaagatggaaactgttggatcannnnnnnnnnnnnnnnnnatagccgatactatttctgtaagtgattttactgaaactatctacatttttcttctgattgtacaaacacgaagttccttttgctgatgtttgtcactgattattgtttcgatagatggtatgcaaataacctatgtagcagctttgattctcatcgcctcactgttttttatttttatgtggcgtattagtattgcaaatcagatgtatacactatcaattgtggcatggcttttggtcaagcagcaatgcttctttctctcgggaaaaaaggttatcgtgccgtacaaccacattcatcaagtatgtactcttctctaaaatatttgaactctaactttgcattttgatcataataaacaaatgcaatacctcttgcccacttgtgtaagcttctaagttttgatggttaatggtgcagcaaaattatatctgccaaaagtaaacagatcgagtggagctgccatagacatgtggataaaggtggtgctcacattcttatacccttctgtgtaattccctcaagtttctttacctctactgtaatgaataatcctctggcaggccaaggaacttgatgcaaataccgagtactacatcgagctgttagctaagggaacagggaaatccaaagagcagatcaacgaggacatcaagcgacctaaatatctccaagctcaagcagccattgactatggaattgcagacaagatagctgactcgcaggacagttctttcgagaaacgggtaactttcaaaattatacttttatattcacccaaaaccaagtgatctttgtgttgacttcattcatgcttaaatggaaatatatctgggtttaggattacgatgggacccttgcccagagagctatgagacctggaggaggcagtccagcagctccagccggactaagatgatcaattcccaccagaaagaaagaggttgaatcctaatttcctagtcactctggaatatgtagctcttacaatctataagcaaacacatgtggtagtaacatacaaaaaagtgttggcaaaaagggaaatatcatcaaaagttatctaggtggaaagttatttgtattatacatgtatctctctagatgcaggtttctcacactctgaaaaaaccgagttttgggttttcgggattttcagaatgaagggaagaatcggttgaggttgtaaggcaatgcgtaaaattcttctgttcgagtatcagtgtggtagactctgaatttctcccaccaatgtcttccgctgtctctcctcaccgaggcatgt

SEQ ID NO: 144104 - DNA, 1078 bp, Arabidopsis thaliana landsberg
tgaatattttcaggtgcttgcttggagctaagttttaacctcacggaaggaatctttattctgcaatcactgcaaagagaaggagtctatattttggtggagaatgttgttggacgataataaacatatgatttcagtgcaacgcggctttaagagtcgtggtcagatgaaatatctgaggtattgaaattgatgagcaccataggagatgatctaattctatctggagaagccagtttttgtgtatattttgtagataattaggctttttgctaatacagttaaagattgatcaaatggctattgctggtctgcaaaatattttggcgatcgattcatctttccgtcgggactctgaggttcaggcgactagacaaagggaaaatgagggaaggtcaagcgtccgggcatcctcactcctacagatgtggagggaacttgaggatgatcatgtgatgggtcatgctcgtgagagagatggtgagaggaggagtgtttcttcaccatctaatactatgaggggaaatggttgtgacagtaatattagtgcacatgatattgttagagatagtgttaatctgggtgagaatgaacttggtggatggtctcccacccagagtcatgttgggtcacataactcgagtgaggatctcggcccttttcagagcgagcatttttctgatctggggatgggtgaaagggaaagagttagacagatttttcgtgagtggacgagctctgggacaggtcagcatactgattctgcttcccaagcaaccaacagctcaagagcagaatggcttggtgaaactgaacaagaaagggtgaggatcataagggagatggttcagatgaatagccagcagaggcctgctcttggtgatctcagggaagaacaacctattgaaggtgctaatcagattgaaagagtacttgatggaatagttgttaatccaaacagcatccagaatgaacatgctagaagaggcatacgcaagttgtgtggtaggcaagtgtgggtggatatgttaaaaatggctgagatggaaaggcaaagagagctggagggattgatgca

SEQ ID NO: 144105 - DNA, 797 bp, Arabidopsis thaliana landsberg
tgtatattttcacttttcaggaagagaagtctggactacttcagctctctgactcatcagaggactcttccaacatttatgtttttcaggtaatcagtcgtgatcaagatatgcaaatacagatttacttaaaaacaaaactagcatccctaaataactcatatgaattctatgatttcttgatctataatcctcattttgcaatgcagatttccacgacgaaccaatcaactatagacattgcctttgtctctggaataaaagaagaaacgtccaacatggaaaatcgtataatgagtcttacaggtttatatggcctacattttctcaacaagcaaaatgttaatagttttggatagtggacaccatttctctgttgtaggtctaagagcatagtttccatataataacatgttttgtctaacaccatttttgattagctgggattcatgttatcttgtgtacttagcttctacgcctttaagctaagtttccgtctttatttcgtgtaggtttgccactctctagtctacttgaagagaaacatatagcatttaatgctaagttcaatgaatgcttcaacctttctgacaaggtgtgattctactcctttccttaacacacaaaaatacttttatgaaggatctcttttgcacattatttatgactctctctttatgtgactccagcttgatcctgaaactttggtggttggtaaagcagcaatcgggaacatgcttggaggcattggttacttctatggtcaatcaaagattcattttcctaaaagtcctctg

SEQ ID NO: 144106 - DNA, 1355 bp, Arabidopsis thaliana landsberg
tgttttcccttaaaaaaaccaaggacaaaggcataatgccgtattcacaatcttgactcttcgttatctggatctagggtttctctcgatttttagaacgccacaaaacctaataaacttttcccagatacacaaacaaactcatcatcaaccaaggaagaagaaagaaactagggtttttttttggggattcatcatcggtattttacagatctatattcaaagggaacaaaatcttaaggaacaaacactaaattttcattctttctcttatttacccatttatcaaaaatcttccttttgttttcctgattcttgctaaagaaaaaaactcggatccaattcataaactagtgtggactggtgatcaatctatcaattctggccaagggacaacaaaaagtttagattttgatgaaccaattttgagatgagacaatggacatccattgatctgtaaactttaagaaggagaaggagaaaagaaagtatgtatagtaataatagagtagaagtgtttcatggtgatggaagacttggagaattggagatatacccttcaagggaattgaatcagcaagaagatgatgtgatgaagcagaggaagaagaaacagagggaagtaatggagctagccaagatgggaatcagaataagccacttttctcaatctggcgagaggtgtcctcctcttgcaatacttactacaatttcatcttgtggcctttgtttcaaattagaagcttcaccttctccagctcaggagtcactcagtttattctactcgtcctgtctcagggacaacaaggtatctaaaccttacgaacctttaagccttactcagacttagattttatcaactaaaactcaaaaacacttaatgataaataggattttgtgtcattatttaacttccttaatgtcagagctgcatcaagtttggggctttagaaacttttagtagagtgggggtttgaatcttgtgttgtttgttatgttacaaattgtcctcatatttgtgagttttggatttttgcttcttgcagacagcagtaatgctcttgggtggagaagagctccatttggttgctatgtactcggaaaatatcaagaatgaccgtccttgtttctgggcatttagtgttgctcctggaatttacgattcctgtcttgttatgttgaatcttagatgtctgggtattgtctttgatcttgatgaaacccttgtagtggcgaataccatgcgctcatttgaggataagattgacgggtttcagcggagaataaacaacgagatggaccctcaacgccttgccgttatagtggctgagatgaagcgttatcaagatgactaa

SEQ ID NO: 144107 - DNA, 802 bp, Arabidopsis thaliana landsberg
cagacgaaggatatgttaggttaatttttgttcatttgcccttggatggttgctacgatggacttaaatgcttcaccccaacccgaagaagatgacgaaccgtatgtgagacatctagaagactattcttctcgggatgaacggatagagtctgctgttgaaatcgctagacgggtactattgattttcttcactcaacatggatttctgtagtcactttaatgcaggacactttaggaaactattaactaatgtcatcgttaatgtggaatctctaataattgatgcccacatgttttcttatcttcccctgagtctgaggatggattttcatatgtttttgctttaggaacgtgaagagagaaagaaacgaatgagatatgacaagccaacacataactctcagccagttttccgtgatcaatattaccagaatcgaaatactaaagcttatgatagatacaagatccctcaaggtgatattttttttaccgaatgaatacttatcatttcatgcttaagatttacttcaagtataaacggcctctaaatttactgaaatggttttagcttgtatgtgttcttttctttatctttcggcaaatttctttaaatagggtaactctttgacagcctgtccgatatcacaggttggctagactgccctccttctgggaatgagataggattcctcgttccttcaaaagttcccctgaatgaatcttacaataatcatgtacctcctggaagtagatactcttttaaacaggtgatccataaccagaggatagctgggagaaag

SEQ ID NO: 144108 - DNA, 1589 bp, Arabidopsis thaliana landsberg
tcgttttgcatcgccattgttgtttgctgggctaaatagagagcaagagagagagtgtctgtgatggtgatgagaaagctacagttaccgttgagccagacgcagaaggttaggtttgagagagcaatcgagcggcttcaatcactgtcgtcgtcggctaactctgacgcttctgttatcgtcaccgactctattcccgtcaaccatgacgatgccttcctcaagtaatttcatctcattctccctctggattgaaatttttgtcaaattgcgttttcacgattggttttttcattaaaggggacatggaacttccgaggtcgatggtgagttgctcgcgacggtctgtggagtagtggagcgtgtggataagcttgtctatgtacgcaccttgcgagccaggtctgtgattgatctttgaatttgtttagtttcccagaaaatgtgaatagaatggactctctactctgagattaagtagaactgatggttttgatgatctacgttttaggtacaagcctgaagttggggatattgtggtaggccgtgtcattgaggtagatttttgttttggtgtttggatttttgaaatcggattgagtgagtaacataaaggtttcaatcacattgcacagttactggattgatctttacttattcaagttgctcaaaaacgttggagagtggagctcaacttcaatcaggatggagtactgatgctttcttccatgaacatgcctgatggtattcaggtacagcttgattcttgatattttaccatttggatgattgcttttggcttcaatgatataagtttattgttgttgccagaggcgaaaaacctctgtggatgaactcaatatgcggaatatctttgtagagcatgatgtcgtatgtgtaagtcctgtgattagtaatgttccaatctttacatatcttaacagttacgtcaacctgactaaaagggttccctctttggtttgttcaaactcttaggctgaagtacgcaactttcagcatgatggtagcgtgcagttacaagccagaagtcagaagtatggcaaggttggttttcatttggtcacatgctcatgtagttatacctttcgctagtctcttcctctgaacattgattaatccatgaatcgctacagctcgagaagggacaacttctgaaggtcgatccttacttggttaagagaagcaaacatcactttcattacgtagaaagtcttgggattgatttgattattggctgcaatggtttcatatgggttggagaacatgtcgaagtgagagatcctatggcaatagatgatcagaaagatgaggaaatgatctcatcctcctccacaggaaaagagcaaagccatattccactcgagactcgacaaaccatatgcagaatcgggaatgcgatacgtgtcttgtctaatctaggcttcaccgtgacactagaagtaatcatggagactgttaacctcagtaactcaaagaatattgacatacatgatatgcttggatcagagtttcacgttgtggtagcagagaatgaagctgaaagaagacgtacaaagaggaaaaagtga

SEQ ID NO: 144109 - DNA, 2521 bp, Arabidopsis thaliana landsberg
atggcgagtaacaatgttcccttccaagtcccggtgctcacaaagagcaactatgataattggagtctacgaatgaaggctatcctaggagcacatgacgtgtgggagatagtcgagaaaggtttcattgaaccggagaatgaaggtagtctttctcaaactcaaaaagatggtttgagagactcaagaaagagagacaagaaagctctctgtctaatctatcaaggattagatgaagatacgttcgagaaggtcgttgaagctacgtcggcgaaagaagcatgggagaagcttcgaacctcttacaaaggtgccgatcaagtcaagaaagtacgtcttcaaactctaagaggagaatttgaagcactacaaatgaaggaaggtgaactcgtctccgattacttctcaagagtgttgacggttactaataaccttaaaagaaacggagagaagctagatgatgtgagaatcatggagaaagttcttagatcattggatctaaaatttgagcatattgtcaccgtcattgaagaaacaaaagatttagaagctatgacaatagagcaacttcttgggtcattacaagcttatgaagaaaagaagaagaagaaagaagatatcgtcgaacaagtcctcaatatgcaaattacaaaagaagaaaacggccaaagttaccaaagaagaggtggtggtcaagtacgaggacgaggtcgtggtggatatggaaatggacgtggttggaggccacatgaagacaacacaaaccaaagaggtgaaaactcatcaagaggtcgtgggaaaggacacccaaaatcaagatacgataaatcaagtgtcaaatgctacaattgtgggaagtttggacattatgcttctgaatgtaaagctcctagcaacaaaaaatttgaggagaaggccaactacgttgaagaaaaaattcaagaagaagacatgttattaatggctagctacaagaaagatgaacaagaagagaatcataagtggtacctcgatagtggtgcaagtaatcacatgtgcgggagaaaaagtatgttcgcggagcttgatgaatcggtgagaggaaatgtggctttaggagatgaatcgaagatggaggtaaaaggtaaaggaaacattcttattcgattgaagaatggagatcatcaatttatttccaacggttactatattccgagcatgaagacaaacatcttgagccttggacaactcttagagaaaggttatgatattagattaaaagataataacctttcaataagagaccaagaaagcaatctcattaccaaggtgccaatgtcgaaaaatagaatgtttgtcctcaacattcgaaatgacattgcacaatgtcttaagatgtgttacaaagaggagtcttggctatggcatcttcgattcggacatctaaattttggaggattggagttgctttcaaggaaggaaatggtgagagggctaccttgtataaatcatccaaagcaaggttgtgaagttgtattcaagtttaaagcaaagtaataaaagttctatttcctaaaaaactctctcaaaacacttaaacactttctccattacctctaaaagaattttactctaacagatttatcttccaagttaatagctttacttgaaaaaacaattccttactgatattcaaagcataacacgtttaggttcatggatgcactctataatttacttgacggttctattgacgacaatacaaagtttgaagatgagtgccgagctatttttggagcacagtcatatgttcttttcacattggacaagctagttcagaagtttgttaagcatgtaagcaaaactagtgtcttgtcttcttgactctctacttccattctctcttttatttctctctttcctctgatcatttgggatggtttttggaaatgcttcagctccatgcagttgcatctgatgaaacagacaccaagcttctgcaactacatgcgtatgagaactacagaaaactttgggaagatgatttgatctagtgtatcatgagaatgcatgtgccctcctccatgaggcaaagatataccggatcagatatgtaggtttctcttaactacgcatatatgtccattcaaattccgtaatttattaatactactttggaactgattgcagtcatcagaaggaacacgtctctcgattcagcttatgaacagtgggaacaatcagcttgaagtaatgggtgtagcgatggagccggcatttgcagattatctacaaaataaatgtctgaaatccgtcaatgatgaagagaatcacggactgtttctgaacaggtgactgaagcatgataagagcgtattggtatatatattcttttggttgtgaagtaacgtataactaaactctctgcaggaacaaaaagaaattcaccagcttagatgaatctagggggatgcctgttgcgatggaaagattgaatattatcaacgagatggaatgtaggatggcttgcagttcttccaag

SEQ ID NO: 144110 - DNA, 1103 bp, Arabidopsis thaliana landsberg
ggtttctcaacatggagcagaagagattttaatactttcctcagggcttgtgagaagtatggccgcaacgacataaaaagcattgcctctgagatggaagggaaaacagaggaagaagttgaaagatatgccaaagtatttaaagagcggtacaaggagctgaacggtaagtaacacctttcaatgctaagttatgcagtgtttttacatgtttctaagtaattcctacctccaaaaagagcttatgctaagtaagtttatcatctttccctctaaatatgtagactatgatagaatcattaagaacattgagaggggagaggcaaggatctctaggaaagacgaaatcatgaaggccatagggaagaaactggatcgctacagaaacccttggctggaactgaagattcaatatggtcagaacaaaggcaagctgtacaatgaagagtgtgaccgtttcatggtatgtctttttctcgtttccctttttgctgttctgtctcattaattatatcatgaagtttttgactgttgaggaactttggtggtgaaaaacagatctgcatgattcacaaacttggttatgggaattgggatgagctaaaggcagcatttaggacatcgtctgtgttcaggtttgactggtttgtgaaatcccgcacgagtcaggaacttgcaagaagatgcgacactctgattcgactgatcgagaaagagaaccaggagtttgatgaaagagagaggcaagccctctaagagaagaagctcgcgaaggtaaaataatgcaatattttcatgtataaggttgtattcttttgatttgatttctttaggtggttaatgcttttctggtttttaatctttgaagagtgcaacaccatcaaagcgacctttaggaagacaagcaagtgagagtccttcatcgacgaagaagcggaagcacctgtcgatgagatgagattatgtgtttacggatctgtcgagtctttgttgttacatatagttaagctaatgttaaaaacatagcaaatggatttcattctgctttcatgaatgtttgtcctggtttgacttggatttaatgaaatgacttaattataatt

SEQ ID NO: 144111 - DNA, 2791 bp, Arabidopsis thaliana landsberg
  unsure (1)..(2791): unsure at all n locations
ctggggaagaaaaggatcgtctatggagggagacgtcggaaaaggtttggtatgccagaatactatggatgggaaggcgagtaatggaaatggtttagagaagactgtaccttcttgttgccttaaggctatggcatgtgtacctgaggatgatgctaagtgtcactccactgttgtttctgggtggttttcggaacctcaccctcgctctggttagactttgttttcttttcttgtcaagaagctaccctattttcttagatccgatctcttattttggatcttgttcttaattggatgcagggaaaaaaggcggcaaagcagtctatttcaacaaccctatgtggccaggtaggttacctcttgataggcttgttgttgttgctttccattatcttactaccttacgttttttgtctttgaatgagcgcctacttggtttagatgctgaatctgtatgttaaagtttgtgagttgtagtttttcagagtgcttgctcatgtgactgatgcagctggtttatgtttaattgtaggagaagcacactcactgaaagttgagaaagttctgttcaaagacaagtcggattttcaggaagtcctagtgttcgaggtttgagatagcatctatgcttttgtccgattgttcttatcatctgagtctttcttctattaattgaggctgttgttcttctttttgcagtcagccacgtacggaaaggtgcttgttctannnnnnnnnnnnnnnnngaccgaaaaagatgaatgtgcatatcaggagatgatagcccatctgcctttatgctctatatcttcccctaaaaatgtaatttctcaccttaaaaagtttagtctctctggtttcctatatcttgtagcctgttgcaataaatcagtcaatctaaaagtatgttcaatttgtgatgaatgtgcctctttttggagaatatgttggaacacaatgagattgtgttgttgtagctctcttcttcctatatgatctcatgagatagctcttatcgcaaatgatgactcattccagtacattgaaatgtagaatcagctcagattaaaatagggaattgtcaagcttacacattttacttgcgtattaatgctggccttcgctgtctaaatatttgcaggttcttgttgttggtggaggtgatggtggtgttcttcgagagatttctcgccatagttctgttgaggttattgatatctgtgagatagacaagatggttatagatgtaagtttttggttttgtgcttgccatatgtatgaacaatttttagttatgttctatctcagaaagtgggatttctgtggtcttgtaggtgtctaagaagttcttccccgagttagcggttgggtttgacgatcctcgtgttcaacttcacattggtgatggtaattaagcattcttctacttgttctctgttccaaaaacgtagtcaaaaatttgcttgttttgatatcactttcctctggcagctgctgagttcctccgtaaatcccctgaagggaagtatgatgccatcattgttgattcttcagatcccgtaggtatgattcatctgcaaaactctttggatatctgagtgattcttattttgttcttctaaatcaaaactcggttcagacttcagctacaaactctcacgtgtttcactctatataatcataggtcctgctcttgcgcttgttgagaagcctttcttcgagacactggctagagcgttgaagcctgggggagttctttgtaacatggcagaaagtatgtggctccatactcatcttattgaagatatgatatccatttgccgtcaaacattcaaaagtgttcactatgcgtggagcagcgtccccacatatccaaggttaactctacttttcttctgattacattgtgtgatctcactgaaatcagaaacatgaattgagcaacatatcttcattgcagcggcgtgattggtttcgtcttgtgctctactgaaggaccagctgttgacttcaagaacccaatcaaccctattgagaaactagacggtgcgatgacccataaaagagagttgaagttctataactctgatgtaagtttaacacaactatgacttcctcatttactgttttagattaacttaaagcaaaatcttgatctatctttttactaaaacagatgcacagagccgcatttgctttgcccacattcctgcggagagaagtagcttcacttctggcttcttgacttctgtttggctctaccatatccctcatatcaaactttgtagaactcttgaagaggaataataaatcattggaggctttgtatctctaagtttactcctttataaaaagacttctatttatatattggctctatggtttgcatgattcgtgctttgataaaatctttcatatacatatatgctaattaattaatcatcactgttgaaatctggttctgctggtttctgaagtagcataggtggcatacgttctggcatccttggtttccttacggagccgctcctacgtattgtgcgcaagatattcgcagcaaaccgtgatgcatatattgtagcaccgaggcttggggaacttccacaagcttctttagccaaagcgtcctgcagccgattctcttcttctttaagagactcttctagtttcttcttaatgtatcttctccaagcggcttgtatgaagcaagcggcccaagtcttccattgttgcgagtagtacctgaaagtatgtctaagctgtttgctgtgaagacgtctgaactggg

SEQ ID NO: 144112 - DNA, 3133 bp, Arabidopsis thaliana landsberg
ctctctatgtacagacaagatgagataaatcattcatctcatttcttcaactggctttgcttctttcttcttcttcctcaacaataattttaacacaggtatcatcaatctctattctctcttgaccccttttttatctagcaaaagcttttagtaagctgtttatgtgagtttttgcaattttatcaacatcacaatccgttattgattagtacctaaagaaagaaaaaccaatagaagattgtcaattctctgtgtttgtagacgaaacataattaagcaaagagaaaacatgaatcattttattgtagtttccatatatagaaaccgttgactctcttcttgtgtgatgatatctacttgttttgctgggtcaatggatctgacgcttttttttttctttttggaatggtcaggtttgagatcttatcatagagttttgttttaagtttgtgagatggaattagtgtctggaaaagtagttccaggttgctccaacgcaggcaatcctttccatgagtgtactgctatctgttttgagagagtaaactctccagatgtccacaagaaggagaagaaactctttggtatgaaacaaatatgcttctgattctgttattgggtcaaagtcttctgtcatcaagaagagtctctgatgtttttgtcttgtgtcagggtttggtaagagaactcccagcagggatcagactcctccagctagtccggctcgtggaagcagatcacctctggccagctatttcgccaagaagaaggttgactcagcagagagttcaccatcctcttatgatcacaccaatggcaacttcttaagtcgcctttccccgctacagggacgcaagatcgagccttcaagcaatgtcgattcgctgccagtctcgccttctctcgctctttactctagggggagactactttgcaaggagggtaaggattatttcttaaatcaaagaatagctaaacttgctcacttggctgctgaaactcactcttctgttggtatttgtttaagccaggctgatcagcgtggagatgaggatgatgatgtatcaccaaggccttttggaactcagcctaagacccctgaacaccctcttaggacgcctcagcataggccacgcacaccgcaacaccgatctgcacaccaagaggacgctttttcactagaaactaggccgaggactcctgaacgccgatccactacccctgatactaggccaaggacacccatacatgagtctgcggcaacaggaagaaggcctcaaacaccagaaactagaccaaggactcctgatcaccgatatgccacctatgataataggccgaggacacccatacatgagtctgctgcaacagaaaggaggccccaaacaccagaaactaggccgaggactcctgaacaccgatccaccatccctgacactaggccgaggacacctatacatgagtctgctgcaacaggaaggaggcctcaaacaccagaaactaggccgaggactgcacaacatagagggaggtcacctgagttcatggatagatcccccggaccaaggtccaagaccccagagcctcaacctacttacttcgaaccatcctcaaggactccaaaacagcggtccaagacgcctgaacccagccctaggattccccaaactcagcccatgtcccacagatcccttgacaacgctgctcttaaaatgcctcggacagttgaaactaggcctaggacgccagaacaccagccgaggactgtggaaacaaagccaagaatacatgaaagtaggcccaaaactgcagtctatggaggaaggtcacctgatcacagggaaaaaatctcacaagaaatgggtcaaagatcatctcatgcctacaattatcttgggagcaaagctgagtcagtgtacattgagaagaacgaggaatcagttctactctttccagaactgattttgtcacctcaagaaaggccaccctctagacttattacggtactgctctctactctctactttcacatcttcatatatatatatatatatatatatatatatatatatatatagatatatatttctacacatgctaatgacagtttttgcctcttacctcagcttaatcaccgaggatatgaaacacctaacaaacagaaagaacattgtgatgaaatggatgattctgcaagcacagacgacgataaattttcatttgtggatgatcacgacgaacacactgtttcaatttacgctgaaactacatcgaaatctggaagcagcgaacaagaggaacagcataaagcaaacaacgagccaccggagctgccagatgaatcacagagcttcagtctcgctgagatctctcgtatgaaaggaataattaccaataatgaaataagggacgagatgcagtctattctatctgagtcttacgtttctgtgggacagtacaaggtcagagctagcgtctcgaccactctacaacacatactccagaagcacggtgacattgcgtctggttccaaactacaatcgctcgctacacgatcctactacctcgacatgcttgcctcggtggtattcgaactccaaacaactcccctgaagtatctcaaggagagccgcgtggtggaaatggtagcgattgttaaagacgttgagtccgtgaaaatcaaagcaggatggctcaagcctgtcctggaggagattgtagaggcggtaaaacactacgatgaacacaagatgagcgtagtggagaaagaggagtgggagagagatgtgttacttgcgagacaaaaaactgagaaacaggtgaaagaactggcagagaaggagaagaagatgaaggagtggagagctagaatgacggagatggctgcgaagttaggggatctggatatgaaaagagctcgtctccacaaaagcttcacatttctgagctccaaggtcgacaagtttcaagggaaaccccttcttcaaggcatcttgtaaccaaccaattagtctgaatattcttttgttcatcttgttacccgcaaataagcgtttgtgaacggtttgctttggaaaagttttatgtattatcaaattttcgtttctaaaaaacctcaagtcttaatgtc

SEQ ID NO: 144113 - DNA, 1124 bp, Arabidopsis thaliana landsberg
gctttgcaagaaacatatggtgttcaagatcacgagaagaagcaggagatgattcctaatgagattgaaacacaaaacaacaatcaaagttttggaacagaacgtcagataaagataccagcatacatggtgagtaggaactctaatgatggttatggttggagaaaatacggtcagaaacaagtgaagaagagcgaaaaccctaggagttacttcaagtgtacgtatcctgattgtgtttccaagaagattgttgagacggcttctgatggacagatcactgagatcatttataaaggtggtcataatcatcctaagcctgagttcaccaagagaccatctcaatcttcattaccatcatcggttaatgggaggcgcttgtttaatcctgcttctgttgttagtgaacctcatgatcaatcagagaactcttcgatttcgtttgactatagtgatcttgagcagaaaagttttaaatcagagtatggtgagatagatgaagaggaggaacaacctgagatgaagaggatgtaagtagttttttttaattagtggaagcaaaaggtttcttcttgggttttggaaatgacatgttttgagttttgtgtaacaggaaaagagaaggtgaagatgaagggatgtctatagaagtaagcaaaggagttaaagagccaagagttgtggttcagacaatcagtgatattgatgttcttatagatggctttagatggaggaaatatggtcaaaaagttgtcaaaggaaatactaatccaaggttgtttatacaaaacttagtttctcaaattgttaacatgtttcaagtttctaatcctctctttgttgtaacaggagctactacaagtgcacattccaaggttgtggagtgaagaagcaagtggaaagatccgcagcagacgagagagcagttctcactacctatgaaggaagacacaatcacgatatcccaaccgcgctacgtcgctcgtaaaattattgggacttagtcactagtaatatgatttaggctttctaaaaacaaaaaatcttactatggcttatcttttgtgctcattcacagtttgtttatttgtttgttacacagtcaatactttgttttgtacaga

SEQ ID NO: 144114 - DNA, 1046 bp, Arabidopsis thaliana landsberg
atggccggaactaaagattctcatgtagtggagattccagtagatgaagagcataaagagagacaacaacaacaacagttggttgcggtctcaaatccgggaatgggaatactcaaagtgattcagcagcatccgttgtctgaaatctcagagagtccaggacatttgttgcttttgaagttatggcaaagagaagaagatttgttctgtcgtcgtgttcttcttaaagaatcaagactagagtcaatcaaaagagagatctttcagctttgttgtttcttcctagtcttccatgggttcttcttcacacttgtctactcttcttcttgttctgatgatgctgacgtggtgaaaagtaatgcggtttgcaagaaatggtggataccttctgcagtgtcattagctacttcattggttctggtgtttcttgttcaagctaagctgtttgtgttctggaaagtttacagaggtgttaatagggagaggaatgataatagaacgcttacacggtgtgttttggagttgaggatgaaagggtcgagctttgatttgtcgaaagagccgatgagtgggaagaggatgaagagttcaagcgttgagatcaagtggaaacctgttacttggttctctcagtatttgataactattgttcttctttgctctgcagggttgttcttcccggtctcaaagttcatcctctgcggattttgacaaactcttcctattcactgtttgttcggtaagcaaatcgtgtgctcttcttgttctttaatccaaaattgggctctcagtaataaatgtgttttctttctcaggactctgcattctttcttaaaccttcattgtggggatgatgcttttggtccgatcttaccattggcctctgttctagctttgagagagtagctgtcaaatctcccagactgaagattcgccggagggaataagaacaacctgtaacttttagcagtactcacacatagtagaaaattgatgtaattcgggattagaattctgatcttgatcttattaatttcattcttcgt

SEQ ID NO: 144115 - DNA, 997 bp, Arabidopsis thaliana landsberg
aatagttatatctccgaggctccattgttcatcccgataaccggtacaccataaattctcgtcacgcttttgaattttgttttctgagtcctttaacttttaatagtttcataagtaggccttatgttttattttgtattattctagtccacttactttgttatatggattttagggtaggtattgattaatttcttattttctttatactgagactaaatcttatagaaatcaatcttcctatatattttgaagctacgtactacttttattagagaaattttgaaggaaatttgttagcttaacaactttcggggtcaattgtagtgcaaacaaaaacattaggggcttgattgtggatttaaccttcctttttagtgtaataacattttcttcggttattcattcatttcccgccactttatgacacgtatcagtttctcaatggttacaaatgatcgttggttaaaaatgtaacaaccatgagtctgtacacgtcagaccagattaaagaagaaaactctgtttcgctgaagtttggagcaataatagaagtagactaagtagtgagtttagtttagctactaaatactctgtccggatctaaagattcttgaatttgcaggtggtacaaggcgtggacgatgtttatattgatatgggcactttattcttccttcttcactccattggaattcggattcttcaggggattaccagagaatctgttcatcctcgatatcgctggccaaatcgctttcttagtagatattgtcttgacattcttcgttgcttatcgtgatagccgaacttatagaatgatctataaacgcagctcaattgctttacggtattcaaactctactctgtttctgttttcttgctatctactcaatgagattaacctcttcatggtgtttgtcaattttgtaggtacttaaaatcaacttttataattgacttacttgcttgcatgccatgggatatcatctacaag

SEQ ID NO: 144116 - DNA, 360 bp, Arabidopsis thaliana landsberg
gttgtagagtctgtgttgaacaaagttatggaagaagtccagcagcgtttatcaatccacaatgaaatggtgaggggcaaatgatgtcaactatgatgtcaatttcttttggagtgaatacaatcagtctgaggttttgaccgatcgatctttcaatttttttcagatgaaatcaagttcaaagcctattccagaagatgattcatcctgtgagacagtggtccggtctcagctgtctgatgcaagacaacatgaggaagcagaagaaaatagtccgcccaagttgtggaaaaaagtttcaaaggacaaattttgaacatcacgaagaacaaaagattcttctgaatcaacaaaaacaca

SEQ ID NO: 144117 - DNA, 1265 bp, Arabidopsis thaliana landsberg
atggtgtaccgtttctttggagtgttggcggcacatctgatcacagaagctctcctaaagctctgtttggttgcggacataaacgcaaccggaatctgggtactgctgacgtggatgactcccgccatttactacaacaaagactacaaggagacctggaaagaacttttgtgtttataatcaaaccaatattaaccgttcgattatttattttcacctctggatggctcaattatgatgggcctaagaaagattcgtagaagatagatcggcccaaatgttccaaatattaacacaagtctttgggcccataaatggtattcgggtcaaaattcgcccgttagatgatgaaccctaatttcgtgtgtacagggagcggagaggggaaacaagagaatgctcttgttgcggcgactcaatcgagttcggattgcttccccttactccgttcggcttctgtcagtaaaacctatttcaaatgtcgatgatgcgaagtttcgatctcaggaagaagaagatcagtccagttacgatcagaaaacagtatgcgaagctctcacatgttacagcaacgattggcaaaaggcgttggagtttttcaactgggtcgagagagaatccggattcagacataccaccgagacattcaatcgggtgatcgatattctgggtaagtatttcgagtttgaaatttcttgggctttgattaaccgcatgatcggaaacacggaatctgtgccgaatcacgtcacgtttcgtatagtctttaagcgttatgtgacggctcatcttgttcaggaggctattgatgcgtatgataaattggatgatttcaatttgagagatgaaacatcattttataatctggtcgatgcgctttgcgagcataaacatgtggttgaagctgaagagctttgttttggaaagaatgtcattggtaatggttttagtgtgagtaatactaagattcataatctgattcttcgtgggtggtcgaaattgggatggtggggtaaatgcaaggagtattgggagaagatggatactgaaggtgttactaaggatcttttttcgtattccatttacatggatatcatgtgcaagagcgggaaaccgtggaaagctgtgaagttgtataaggaaatgaagagtagaaggatgaaactcgatgtggttgcttatacccctgtccctcgagccattggagcgtcgcaagatgttgaaatcggtatcagggtatttcgggagatgagggaaagggcttg

SEQ ID NO: 144118 - DNA, 1072 bp, Arabidopsis thaliana landsberg
atggtgacgacgaccatcggcggagttccggtggtgattgctcagtctcggaggattccaacgagcctgagatgcttctctgccaccgcaaattctgaccttcttcgctcccagcttgatcggcttcacgcggaggcagagtccactcgtgccaaaggtggaatctttattcgctaatcttcgttttaatgtgtgatttcaaagtcgtagactttggaaagatgaggtgctggtttcagcatggttttactgcttgtgaatccagtgattgatgatgtcaatttgatttatttttggtctttgttgttgttggtccagcaaacagtaataggttgagacttttgagattatctgaggctgcagagaatctacggaaacaagcagctgtcaatgttcgaacagggaaagagaatgatgccagagatctacttcttcagaagaaaaaagttatgcaagctttggacaaggctaaagctcgtatcgagttgctcgatacgctttcttccaaacttaacgaggtacaaacaaacaatactcttacttgttaagaaatgttattgttttggttgtttgtttgttttcaattgccccagaaatctatctaactatgtcttgaaagcttggtttggtttcaggcaatatctgtcaaggaaacacagctgataggcaatatatctttggatctcgaagaggatggagagaatacttcaggtggtatccacattgtatcgccaaagcccgaatctactgaagacggggtcgaaaatgaccacactcacttggattctgagggaattcaacttattgaaaggaatgttgaggattaccaagaacttcttgataccaataataatgtactagaagatgtttcaataggtagcatcctgaaagaagtgtcttcttatgaatctttcttggaaaatttagaccagaaacttagcagaatcgaagctgaactagttactgttgtaaatgttgcatccttggtgcttaatcatgaagataaacccaagaatcttaaggttcagcagactgcagaaattcttgaagagattcgtcgtgtgagggaaag

SEQ ID NO: 144119 - DNA, 2050 bp, Arabidopsis thaliana landsberg
atgtggtcaacatttgtccctcttgtaccaaacagtatcttgcctgggacaactgcttttggtattgctgtggcagctataatcatggtaagctttcaaaaactttttactttccccccataattttatctgtaagtaacgtgttgacattggttagtcatatcagtcacttttagcctctaggagattatctcgaaacctttttaacaagttttcatattattagcttgggtaatattgtaaccatttgcattgagctaagtgttggatgccgaatctctttcattgcaatttcgcttcagtcctcgtgttgttattgggctttatgaacaaaaaaaactatgtcaggaaataggagttttcttttttatagaaaaaaaaaatggtggccttgatgctttttctccaagtctgtattaggattctctgacaactaattcctggtttcgtagatccttcaaaacaactgttaagatgtgtagttgtttatatggataagtgttcttcttttctcttaactacctactggtaagaatgcaggctcgaactgggaaactttcagagaaaggtgttaggtttgtagggtctttatctggatggacagcaactcttatgttcatgtggatgccagtttcccaaatggtataacaactcattttttctctcgttctttgaactttctcctaattgctctttccctattggatatctgatgttcttctacacttcagtggacaaattttctaaacccggacaacataaaaggcttatcgtcaatcacaatgttgctctcgatgatgggaaacgggcttatgatccctcgagcactatttatccgtgatttgatgtggtaaatataagctctctcaattcgaaacctttcagcttaaactatattcacccgtagtaaaaaaactgcttgatattcattaaaccatgacgcaggctcactggttcgctatgggcaactctcttttatggatatggaaatattctttgcttatacctgtaagaacccttgcacacaactctcttttgtcacaagtaaatgagtttatcgataatccggtattctccacagggtaaattgcaccagccagtcattcttcgtggcagctacaattggtttgatctcatggataggttggttacttcacagatactctctcttacattatcatcgttccattttttagttttccaccatatattcaagtgtgagatgttcataaatcactctctgaacgcatttaaccgtttcttcccccatttgtatgaaacaggactggctttgtggagagatgcagtggcttatggtcacaactcgccgtttagatctttgaaagaacttgtttttggaccgtaatgaatgaatgtacacgccataaacgccctttgttcaagcaagtccatagagattacatgtattttcattcttttttcctaagggttataagacaactactctgtaatttcatgtatttttttacttgaatcatatagtaaaataatgtctgatatcaaaaaataacttttgatattgaacggtcaaaaatcaaaatcgaaacattctcggttcagctttggctatcgttttcccgggttcagctttggctatcgtcttcccggtttagtctgattagttggcttaatatttgtggtctttaatcataaaagcccaattagattggcccagataaatcacaagcctctttcttctctcacttagacaagacaaccattattcacggcgaagaacatttccccgaaaaaccctagaatcccaaaatagaatccctaaaagagaaagaaagcaaaaatggaggacacgaagccaccattgggaggtaacaacaatcctcagcagcagcagcaacaacaacaacttctctatcaacaccaactacaacaacaacagagacaacaacaaatgcttctattgcagcaattgcaaaaacaacaacagcaacaagcagctatgtctagatttccgtcgaacatcgacgtgcatctccggccaccggggttgattcagaaccgacccattaat

SEQ ID NO: 144120 - DNA, 629 bp, Arabidopsis thaliana landsberg
tggtccagccatgaagtttacaaactatgttccccaagctaaggagcttcaggatggtaaactagcgccaccagagctacccaaattcgaagatccgatcgttgcacttccacctgctgtagagaagaaagaggtgtgtgtgacagtttttcttatctctgtacaaggatcaccaaaagcgactctgtttagcattgttgtttcctttacttgtgcctcttaagcttacaaaaaatgttatcattgtaggacccatttgttaacatcgctccaaagaagccaaactgggacctccgaagagatgtgcagaagaagcttgataagctcgaaaggcggactcaaaaggcaatgcataaactcatgggtaagtggcaactgtatctacatactgatatcttctatgtaagcttgataattaagacattagtctgtggttcgtgagtaagtgagtaacatttcactgaatctgttggtagtatgataccaaatcatagaagtccaaaatagagtgatctgttggtgtttgtttattatggaactaacacatgcactttcatcatctaattgcagaggagcaagagaaagaacgtgagatggctgaagctgatggtaacaccatagaaagttga

SEQ ID NO: 144121 - DNA, 3652 bp, Arabidopsis thaliana landsberg
gtcaaatggagcctgcttccattgcgcagggtaatatatgtgctatttttcactttaaatcatgcatagtgtcaagtaggttcttattgaccagtgagagaaaaagaaaggaaagaagagagcatgtaactgatattgaatggttgaaggtttaacattaggaaatccaacatatttctccaattttttcctgactctttccttcctcagatacaacttgatattggcaatgcctctgaatccatcatcttcagatcatcatgctcaaaagttgaattccttgggtaccaggcagtttacgaggtacgacctatttcatattttcgctgattacctagcagttatattattaggcgggtttctaatgcactgatgactccctagatttagcctttggagcaattcttcgtaattatttgcttctctttgctgtgattgtcatctgcatgtttatattgactgcttttgccttttgtggatttaattttgttttatatcaagcatcagctaatgcgtgatccttcttctctttggacatgtgctaaagcagtttttgttgtttctcctggtgatattgtaggatcctgaagctaaggcaatcaaaaataacgataatgatcagagtagtgagcgtgaggaaacttttaaaactctcagttcgttgaaggtaccatttctatcacattttttttttcacctgtgctttgtaattgtaccgtggtttcatttctttctgtcgtcagttttttcgtccattagagatgttgggactttattaggtgtccctccttttttcaggatggagatttgctacagattggtgaagtggagctcaagcagcaccatactcagcacccaccacgctattctgagggctctctggtataacactcctatttcctctgtgtcaaaagtatgtataatcccgttccagaatatgctaattaacaatatagcactttttgagaattagcagtcatggtgaattagttttctatagacgaagagatagaaatatgactaggaagatgagaagaggacactgacacaatagtttttccaaattgatctattcttttgtcttcttgtttctgtatacaaatctaacttacctttttaagactcaattaatcagcagatgcgtaatgaactctgactgttcgcgttttagtctccagtagctcattttggttccagttctccacacaattgtttcattattattgaaagttaagcgttgatcttaaacagttctcataaaagataaggagtttcgttttgtatgaagtgctgaatctggtggttgtgcagacattgcatgatatctttttgtactgccgtcaggtttcacaatacataatatgttaaatatgttttaatgtgtttcaggttaaaaagctcgaggagctcgggataggtagaccctcgacatatgcatctatatttagggttttacaggtatgtgctcgtactaggaaactattggcgtttttctagtgcttctgtttcatgctgaagttaaaaggcgctaccatcccttgaaattaacaatacccctcctttcatgtgaggcatagactggcagcattttgaaacctcttctttttttaacagcacagaaagtacgtaacaataaagaatcgagtcctgtatccggaattccgtgctaggatggtattttcttttaataaattgagctcacgaattgatgatttagtaaaccaaccattgcaacatatctttctaacctctgtactatctttccaggtttcagcttttcttacccactactttactgagatcacagactatagtttcactgcggatatggagactgaggtgggtaattagttcgttcttcacttgactctctgttgactatagcagtttctacattcgcatagatattttccaatattgcaaaatgagatactcagttttttcccttacgattgattttccttcagcttgataacgtttctggtggtgtaactgaatggaaaggtctcctaagagactactggacacgattcagcgcatattgtaaacgtgttgaaaatgtccaacgctcacaggtactatcttacaagaatgaactctggaagtttagtttctttctacaatttcttccattagtttcttacattgtcatacgtttacaggtggaaaaaatgttggaaaagaaatatgaggacgttctgttttctttgcttccttatcccagtaggacatgcccgaggtcagcataccattcatgccaatcaatttcaagatagagcaactgatttaagttgacaaaatcccatgctttcatatatggctgcccatgctaaagatactttcacatcagtgatatacagaggactaaataagacaaagtttctttatagtttgaatgagtgtatgttgatccttattgggtttctttccatgtttcagttgtatggaaggcaccttaagtttcaaagcaagtaagtttggtgcggggtatttcatcggttgtgatcagcacccttcatgcaagtaagtcgtacgctgttgagtctcttagtttttacacctacgatacttactcatgtatcctctcttatcagaatttacctattaatttttattagttttttatatatctatattgacatggtcgctgacataattggagctatgtggttcatatacaggttcattgctaaaacgctttatggagaggatgaagatgaagatgatcctccaaagaataactgcgtagaagagcccaaattgctgggtcttcatcccaataccagtgagaaggtatcgctgttctgacccttttctgttcacaatttgctaaaactttaatttgctgaatccatttccttgttcaggttattctaaagtgtggaccctatgggcattatgtacagctcggtgaagataaaaaagggcacacaccaaaacgagcaaatgcggcccatgtatgttggagttttgtcaatcaaataaatatatgtctatgtttccttcttacataaacggaggcatactgatcacacattcagcttaccttttcttactgagaaatctcctgcaaccttatttttcagataaaggatgtgaactccattacgcttgaaagtgctctcgaattattacgctatcctttgacactggtaagactgatatgaaggttaaagttattgcatttctggctgggctgtttcaacattttggagtgctgacgacttggtatactgatttcttaccagggaacccaccctgaagatggacagcctgtggtcttgaagcttagtaaatctggatttactattaaacatcgccgcaatatggctactgttccaaaggtatagctgtttgatgccttcttaatgatataggtatagaataagatgttggtgctatatttgatacggaaataaggtgtggatctgctaggatctattgttttctatcttatgaaatgagttaaaagtgttgtcgttttcattgtggataacttggtacttggcagaacacggaaccaggtgaggttactttagagagagcaatgaagctcttgtctggcaaaaatgtgagaaaaagtggcagacctcctaagagtatactgcctgaggaagagaaaggagatgaagaagttgtggtagcgatataa

SEQ ID NO: 144122 - DNA, 388 bp, Arabidopsis thaliana landsberg
gcacatactacctcagaggatatagatgagcccttccatgtaaatttcgatgtaatttaacgcgcccttccacctttcagtttttcaatctaaaaatgtgtatgtttctatttataattgacatggaacttgtaatgtgttgtgcaggtggaggatataacacaagatgaaaacaaaatggaagaggccaataaggatgctgaagaaatcaaggtaatactactgcaactgcaaagatatgtatattttcgattcttttacctgaaaataacctcaaaactaaaagaaaacggaatccgaacctctgcagaacatcgatgctaaaatccgcaagtggtcaagcggaaagagtggaaacattcggtctcttctatccacgctgcaatat

SEQ ID NO: 144123 - DNA, 502 bp, Arabidopsis thaliana landsberg
  unsure (1)..(502): unsure at all n locations
gtcaagattttcagatacacgaggaaatgaaaaacagatttctaatattttttattataaattcacaatcatagacattagacacatcacacatgaaacttaataatagacacatgagcaaacatagtccaatttaattcccaaaaaccggaaagaaaacacacatgaagacgatctaaaatataattttcttcccattgtacatactattatttaaagatgattctttcggtagcaactgaatcttaaacatttcaagatccactataccaccaaaatcaaatcaatagaactcgaaaaacacgagcctgatgccgatatatgacttgccgttttgtctcctccttgcttctcatggccaagctaaacaaactgttggggagattttccaaactgaggttcctctgtctcttccttaaatggctttgtctgcattttttctaccggtttcattcccttgaagataaattttatccattatttggttcnaggttttgtatta

SEQ ID NO: 144124 - DNA, 1035 bp, Arabidopsis thaliana landsberg
ttgtccgtctccgtcttcatcttcttcctctctctcacgcagctgctttgattaactcttcaggtatttaatatctctcatcttctctcttcacggtgtttcacttttccattcttgctggagattgtggagtttcgaatactcatactcggacagagttttaaggctattgtagtttatctctctgttttttcttctcctgtatttcttatgtgatctaaaagtaggattagggtttatatggaatgctgtttctcgctagtttttaatctcaaaacgaacttttagtttaattagtgtgactctgacacgtatctttactgttctgagttaagtgttgtcttaattttctcttcaggtccagcttaagagttttgtgaagatggtcttagtgctatacgagacagcggcggggtttgccctctttaaagttaaagatgaaggaaagatggctaacgtcgaggtgagttctcttcattcttttgtactctctttgcttatccttaaggctctaaaagtattcatggattatttttttattttttttgcaggatttgtgtaaagagttcgacactccagactcagcacgaaaggtaatttttttgcttcttcatcaagtgtggtttcagaacatctaaaattagatttagtgttgagtttctcatatgtttttattggtgtaccagatggttaagctaaaagcttttgagaagtttgacaatacatctgaagctctcgaagctgtggctaaattgctggagggagctccaagcaaaggtctgcgcaagtttttgaaagctaattgtcaaggtgaaaccttggctgtggctgattcaaagcttgggaatgttatcaaggagaaactggtttgtaattcccatcattacacccatattcctgtctgctctgtgttttgtttctaatgaaagttcttaatttcatacagaaaattgattgcattcacaacaatgctgttatggagcttctacgtggtgttagaagtcagtttactgaactcatatctgggttgggtga

SEQ ID NO: 144125 - DNA, 1664 bp, Arabidopsis thaliana landsberg
ttctcgttgaggaatataatgttcaaccggttaagtgtccggttacggtatgcggcgatatccatggacagttttatgacctaattgagctatttcgtattggtggtaatgctcctgatactaattacctcttcatgggagattatgtaggtatgtctttctctcttctctatcacactatttcatttattttttgtgggtaagttaaatttcctgatttgttgggtttttagagatctgtgttcttatgttgattttcagagcatgtatgcttgattcaaagtatgctggttctgtttgaagtttggagctgatagttatttctttggtttattgtttttgtcttggttatatctgtgcagatcgtggctactattctgtagaaacagtctctctattggtggcattgaaggtgcgttacagggacagacttacgatcctgcgagggaatcatgagagccgtcagattacacaagtgtaagattttctttctaagaagacttgtatttcatttgcttctgactcgctctaacaatggtttgtgcttgtttttgcttatgtttgttcagctatggtttttatgactaatgcttgatttatacggaaatgcaaatgtgtggaagtattttacggaccttttcgattatctccctctaacagcactcatagagagtcaggttcgagctgttcttgccaatcgtcattctttcatttccgcacttttcttcatcaactgtattccgtgacaggttttctgtttgcatggaggcctttcaccttctctggatactcttgacaatatccgaagcttggatcgaatacaagaggtattgttttgggtatagaagcattgatttgcatttagtatctgtaaatgtctcctctttttccctaaagacactgtttctctctggctataaactctctgaaaccaacctcctagttattattagttttggcttcagatagaacaaggattgtaataatctgatatggtatgctctgggattgtaggttccacacgaaggaccaatgtgcgatctactctggtctgatcccgacgatcgttgtggatggggaatatctcctcgtggtgctggttacacgtttggacaggacattgctactcagttcaatcataacaatggactgagtctgatatcaagagcgcatcaacttgtaatggaaggctataattggtgtcaggtatataatatgttcataacaatagattggcatatctgttgaatagagttctggttgcaaaaatgctgaatctttcggtgtgttgataggaaaagaacgtagtgacagtgtttagtgcaccaaactactgttacagatgtggaaacatggccgcaattcttgagattggagaaaagatggaacagaacttccttcaattcgatccagcacctagacaagtcgaacccgataccacacgcaagacccctgattattttttgtgatttcattttttttcttccaaagtttgtttgttgctgtatcattgtagatgtgtctctgttttattttgttttttcgagtctctagatggaatgtgataccaaagacgaaaaacccatcatttttttgttgatgttgatactgaaacaggtttgtagaagcctcttcttattatagaaaatgtcttttgataataa

SEQ ID NO: 144126 - DNA, 445 bp, Arabidopsis thaliana landsberg
cgggtgataagaattgttcgtctacagttaaaatgctcatggaaatccttaaagatgacagcggcacaaattcagtaagcactttgaatttttgttagtttgagagccattagggaattagattcaggctttatcttccttagtagatctacagctacttaaaggcttatttttgtactgatgttttctcgtgcaggcaaaacaacatcttgccctgttatctcttggtgagattgggagaaggaaagatctcagcgcacatgctggcattgaaacaatcgtcattgagtctttccaatctccttttgaagaaataaagtccgcagcttcatatgctcttggaaacattgccgttggcaatctatccaattatctaccgtttatattggaccagatcgataatcaacagaaaaagcaatatattctccttcattcactcaaggag

SEQ ID NO: 144127 - DNA, 861 bp, Arabidopsis thaliana landsberg
gtttaccatatgttcacttgttaaacgtctggaaactccagattgaaaatggcggaggagaaggtgagatttgtgccgctctaaacagtagtgctgcaccggaactgaaagaatggaaacgccatatggttcaagcatttgacaaactcagaaactacttctgtctgcagtttgtcttgagcttcatctactctagggaaggactaacgcgattagacgcactcatttatttaaccgaaacaccagatgacttgcatctgccgtctttaccgtttcaggtctcgccctcttctttgatctagttttatagttcccagtttataagttttagcacacagaatcatctgtgtctgttcttatgcaggcattgttttctaagctacaacagttggccataattgctggggatgttctgcttggtaaagagaagctgcaaaagattctactagcgagattaacagagacggttataatctggctatcaaacgagcaggagttttggagtgcatttgaggacgagtcaaatccacttcagccatctggattgcaacaggtagaaacactctctttcaccactcttatatacctcagctattctctgatctcaggctcagcagtcaaagattgaaaatttgaaatgggaaacaattgaaacttgatgttgaagttcatttcttgagaagattggggttgaaagttgaagttttgttgtcacgtgttgcagttgatcctcgacatgaacttcacagtggagatagccaggtttgcaggttatccatttaaagtagttcagaaccatgcatcagtggtgatcaatcgagccatcaacatattctcggaaagaggcatcaacccacaaag

SEQ ID NO: 144128 - DNA, 1693 bp, Arabidopsis thaliana landsberg
  unsure (1)..(1693): unsure at all n locations
gtgatgatgacaactttacttaaggtttatatcaaaggagggttgtttgatagatcaagagaattactttctgaacttgaatctgctgggtacgccgagaacgaggtaattaggctatattattttttcagtagatctggctgtatatattctagaaaagagcaatataaacctggctggaaatataaatttgtgcaaaatgttgaatttactaaacatttacttttataagtagagctcatatactgttcctatttatttggcaattatcttatagtcaaaaatttgttttcttctctagatgccgtattgtatgttgatggatggtctttcaaaggcgggaaagttagaagaagcgaggtcaatctttgatgatatgaaagggaaaggtgttagatctggtatgtgtttattaagctgatgatttgttagcaagttagctttcatatttcattcttgcctctttaatgattgctgctttcactgctgttcagtataggatcggaatatattgcaatgatatcttgagataaacactattcattgatttaattcaagatttgtcaataacttggattgaaaaattcattctgtccttgaagacctatctcttatgagtcagcaatttgctacaactaggggtgtctttatggttagatattttctcagatttttcagaacaatgatgtcagttttcttgtttcagatggctatgccaacagcatcatgatatctgctttatgtcgaagtaagcgttttaaggaggcaaaagaactgtcaagggactctgaaaccacttatgaaaaatgcgacttggtaatgttaaacacaatgctctgtgcctattgcagagcaggagagatggaaagtgttatgcgaatgatgaagaaaatggatgagcaagccgttagtcccgactataatactttccatatcttgatcaaatacttcatcaaggagaaattgcacctgcttgcgtaccaaaccacactggacatgcacagcaaaggccacaggcttgaggaggtaacaagcagcatcgaggcattgctcgttaagtaatgcgagataatgaaaaatttgcattaaccagacccgatttatgaaaaacttgcaggaactttgctcgtccttgatatatcatctcggcaagattagagctcaagcggaagcattctcagtctacaatatgttgcgatacagcaaaagaactatctgcaaagagctgcatgagaaaattcttcacattctaatccaagggaatctcctaaaagatgcatacattgtagnnnnnnnnnnnnnnnnnnctctcaggcaaattttaatattccgtccattgcgttaatggtctaatttggtcatcattctgtttcaggacaatgcgaagatgatctcacagcctactttaaagaaatttggcagagcttttatgatctcgggtaatattaatttagtgaatgatgttctgaaagtattgcatggttctggccacaaaatcgatcaggtaaatagccaaccggtaacaatttgatgctattttgccaacgttttacttggaaataattttcattacagttgagaaataaggaaaatttcgttctttaatcatactgaatctcatttcttgccttcactgtgtacttttgatttcaggttcagtttgagattgcgatttctcgatacattttgcagc

SEQ ID NO: 144129 - DNA, 1179 bp, Arabidopsis thaliana landsberg
agcaccactggtagtcatgatcttcagatggtgcgttttggtttcttcttcttttggcttcttttctgtgtgtgtttgtacaatatttagcccagggatttaattttaaatgatgttactgaatgtggtgctatatagatcatactagatattccttcttttgacgttatgttaagacccttcaatgcagcattaagagcatgttttagaaaattttgggtgtggtttgaggttatggagctgtagattaaatatcacttactcttttaggatattacacgatcaatgttgatccttatatgaactgtgtgagtgtatggataagtggaaaaacaagagacaagttacacttgctttcagtagacttaggtagagcaagaaagaacttagtctccattttctttcttaaaggagttgctgtgtttctgatatttttcttgggtgttgcacaggtgaaaattggattaagggttctcacacgtcccatgggtgaccgtttgcctcagatttaccgaacccttggcgagaactacagcgaaagggttcttccttccatcatccatgaaaccctaaaagcagtggtagctcagtacaatgcaagccagctcattacccagagagaagtacgtatctcaacattctttttctacaacttttctgctcttttgtttctaatggtggactctgtttactctctcctctaggctgtgagcagagagatacgcaagattctgacagagcgggcttctaactttgacattgctcttgatgatgtctccatcacgactctgacattcggcaaagagttcaccgcagctatcgaggcaaaacaagttgctgctcaggaagctgaacgggctaagttcattgtggagaaagccgaacaagacaggagaagtgcggttatccgtgcgcaggtatagcattggtgatcttgattgcaaatctaatgacatgagattagtggttttggcctgaagcattagctctttttgaatctttgtgcagggagaagctaaaagtgctcagcttatcggccaagcaattgcgaacaatcaggcattcatcactctgagaaagattgaagctgcgagagagattgcacagaccattggcaatctgctagcaaggtttactgagctcaacgatctgttgttaacctcaagaaatgacttggag

SEQ ID NO: 144130 - DNA, 4436 bp, Arabidopsis thaliana landsberg
  unsure (1)..(4436): unsure at all n locations
tcgtcacctccgtagcttccgccgttgccgttcagatgaccacctctgagttaaatccatttccgtctcgctccgtttttctcggtgtcgacgttggcactggaagcgcccgtgccggtaatccttctgtcttattccccgagttaaaatctcgtcaattttgaaaaattgtagtcttcttagattcgtgagaatgatgattgatttagtggcgatgaaatttgatcagtctactaaaaatcgattctttttaatgttgaaaatcgaccagcaatgcaattttggttttgtagcttaagttgattatgatgcaggtttattcgatgataatgggaagcttctaggatctgctactagtccaatacagatttggaaggatggggactgtattgaggttattatgttggataagggagatcatggcttatttgtttagagattaactttgacattgataatattattggaacagcaatcttcaacagatatttggcatgcagtttgtgctgctgtgaaatctgcttgctctcttgcaaatgtttcggatgtggaagtgaaaggaataggctttgctgccacgtgctctctcggtgtgtagaatctgcttataaccgtctttgtgtttggctgaataagaggagcttaacggtgacaatgtaacgtttatttttgtttgtagtggcggttgatgctgagggatctcctgttacagtgtcgtggagtggtgattcaagaagaaacattattgtatggatggaccatagagctgtaaagcaggcagagagaatcaactcatttacttctccagtcttgcagtactgtggtggcggtgtttctccagaaatggagccaccaaaagtaggtacaactttcttataggggttctttatatgattgctttctttgtgtttgagcttgacgaaaaaagatttctccnnnnnnnnnnnnnnnnnnnnnnnnnnnnnnntaaggagtcttggtcaatggtgtataagtggatggacttgagtgattggctatcctacaggtgcctcaggcctttttttctttaaccttttgttccctatgagataattatctttgcatttcctgatttcttttgtttctccctagagctactggagatgatacacgtagtttgtgcaccacagtatgtaaatggacttatcttggccatgcacacatgcaccagatgactgagaaggcttctcgtgatatggaagcttgtggatgggatgatgagttctgggaagaaattggtttaggcgatttggtagatgggcaccatgctaagattggtatgcatctctctttgtttgccccagctgctcagaaaggctcttagaggaactgtgaaacctctactttttaccttctgacaatgttatttctattgttatacaggacgaagtgtagcttttcctggacatccactgggtaatggtctaactgcaaccgctgctaaggtaagttctttacagagcaaccactaaaaattaagaaaatagaggtatttagatacaagaacaatcgctttatttcttctgtgggtcttagagcatacttactacttcttaggtctatattttcattctgttacataattcccttttatcctattgttttcattattcacaggaactgggtctgttagctggaactcctgttgggacttcactcattgatgctcatgccggtggtgttggggtcatggaaagtaaattagaatcagactccttgacgaaaggtagacttacttttctataatagtatagcgtaacctgacatatgagtccctaagaattggcattttcagagtcagatgtggataccttgtgctctcgaatggtcttggtatgtggcacatcaacttgtcatatggctgtttcccgtgaaaagctgtttattcctggcgtgtgggggcctttttggtcaggtactgacacttttggtttctattcttacaatttgatatatgaaatctcactcttgtttctccaaaacaaacaactattgtagctatggttccggagtattggcttacagaaggaggacaaagtgctactggagctttacttgatcacatcatcgaaaatcatgttgcttctccccgtcttgcaaatcgtgctgcttcccagagtagaaaatcttcctctttccacttctcttggcgaaatatttgattgaatgctataattgtcttatagtttgttttgcacttgccattgtctcgatctcgtgcagaagtttctgtgtttgaactcctaaacaacattttgaaaacgatggctgaagatacaagttctccatttatatctgcccttacctcagacatgcatatccttcccgactttcacggaaacaggtgactaaaacagagaattctgctctgtttcttctcttttgagctatattgattcaaagttgtgttacagatctcccgttgcagacccaaattcgaaaggagtgatattcggaatgtctcttgacacgtccgagaagcagttggctcttctatacctcgccacaattcagggaatcgcatatggtacacgtcatatcgtagagcattgcaatactcatggtcacaaagtaagttttctccaactttcttcacacatcgttctatagaaacagtacaagacatttacttcctcaggaaacaaaacagcctcatatttctctgtctctctacctgtgatgttagattgatacactgcttgcttgtggcggcctttcaaagaacccattgtgcatccaagaacatgctgatatagtcggtatattaccaaccacactcgctttcctcttctatattcgaaccaatcactaaaatgatccaggagtaatcttactaaacctatctattcataggttgtccgattattcttcctcgagaaagcgagtctgttctcttaggagcagcaattcttggagcagttgctggcaagaactaccctagtctccatgatgccatgaaagctcttaacgcagctggacaagtatactctgatctaactactttgtttgagtaccccaattcatacattaatcatgttatttatgctatttcttttgatgaattttcaggtggttcatccctcatcagaccctaagatcaagaagtatcacgatgcaaagtaccgtattttccgcaacctctacgaacagcaattgtctcaccgttccatcatcgctgaagctcttgcataatgtttctgatcaacaaaaactgtatagttctctgcaacatttaccttcctttttctatacattcacagtaataataataatctgttttgattgctcttcttgactaatatgtatatagaataatacaataatgtcatgaaacttgggaaattggaagtaaaacaaagaccagtgtgagctaccgaaaccaaaaccgtaacaattcgctacatgttatatttggactcatttagacattctcttataaaaatatcgaaactcctgatgaataaaaaatttatcttgtttcgataatgtcaaaaggtgaataataaagaaaatgaaacatcgatatccaaacactgctggatgacttagttccaaaaaaaaaaaccaattatcgtttataaaatactggtattatactattgttaacgaaaagttcttaattttaaatcttcctacccaagacttttttagggtggccaatctatagtattaatattacctactatgcataaactataagttatacacataaaaaaatactagaatacatgcttaattattcacaaaatctaagaattcaaaacaaattcaagtgtggctatcataatcgaacatgtacaccacttaatcatagagttgacactttctcccttataatattaaaaaaatcataccaacaattttctcttcatgattcttccaagcttatataaaaccataagcaaataccatttgttcaagcctcacccaaaatggcttttcctagttgtgtttcggttgcaatcacggctatgatgctacttgtaacatgttgtcattgtgcaacataccaagaacaattcatgggtccacaaaacgcagcaagagctcatttaaggctcaaaccgctaaagtgggacgccaaattggcccgttacgcgcaatggtgggctaaccagagacgcggtgactgcgccttgacccattccaatggaccctatggtgagaatctcttttggggctcaggcaatagatggggtccatctcaagccgcctatggatggttgtctgaagcaaggagctataactatagatctaactcgtgcaactccgagatgtgtggccattacacacaaatcgtgtggaagaacacacaaaagattggttgcgctcacgtgatctgcaatggcggaggaggcgtattcttgacttgcaattatgatccaccggggaattttcttggtaggaagccttat

SEQ ID NO: 144131 - DNA, 2250 bp, Arabidopsis thaliana landsberg
acaccgacgttgggtaacgtagcaccaaagattgaaggtaaagtacggtggacaacataatttttgtgatggctatcttttctcttccatttttcaacctggtattgtcctattatttattttggatgagttacctgccaaatgctaatgaatccttgtgcttgaaagaacatcatgcagttgtctcttaggttagttttgctgtaagcctgagcatatgcataataaatcattgttgcaggtattcgtgttcaaagtttcaaggaaggtcaagtcacaatggacgttgatcttcgatggggtggtgatccaaatattgttttaggtgtgacagcacttgttgcctccatacccattcaggttactagagagatattttagtatttgtcgtttgggttgtcgtttgtgccaatagagattgagtatctctacaaacacttgtttctggctgaaacagttgaaggatcttcaagttttcacagttgcacgtgttatctttcaacttgcggatgagattccttgtatatctgctgttgttgttgctctacttgctgaggtacacttttcctgtaaaggtccagaataagattcatttttcttatatcattttatatctcctgtcttacaatgaccaactatttaaatgatctcaaccagccaaaaccaagaattgattacactctgaaggctgttggtggaagcttaacagcaattcctggactatctgatatgattgatgtaagttcctctcttggtagttcaagcagtttcaagaggttttatttgttcccatttggtcttatacacagcttttgcttctctctatgttaggatactgttgatactatcgtcaaagacatgcttcagtggcctcatagaattgttgttcccattggtggtattcctgttgatttaaggtactcatgtgttctgcttgattttcattttgcgttttttcactcacaacatttttgcctgccactgccaatcttttgtcttttcttctcttctgttatagccataggatttacgtattgccaatcttggggaggtcatgatacgtattgagaaagcactagatagtttgacgattctctctatcttttctctttcccagtgatttggagcttaagccacagggaaagcttatagtaacagttgtgaaagcaactaacttgaagaataaggaattgattggaaaatctgacccttatgctaccatctacattcgtcctgtattcaagtataaaacaaaggcaatcgagaacaatctgaatcctgtctgggatcaaacattcgaattgattgcagaggacaaagaaacccagtcgctcactgtagaggtctggaatctgaaatatttatgcttcatacttgttcaattttgccattgcaaacgttaactattctcttcattctattaaacattttgcaggtatttgataaagacgtaggtcaagatgagcgccttggacttgtgaaacttcccttaagcagtttggaagccggagttacaaaagaactggagctaaatctgttgtcttcacttgatactttgaaagtaaaagataagaaagatagaggaagcataactcttaaggtatatagatcttccttgaataaactgcaaaccttttcttttcgctgattcctaaattgacttgaattgaaggtacattatcatgagttcaacaaagaggagcaaatggctgcgttggaagacgagaagaagatcatggaagaaaggaagagactgaaggaagcaggagtgataggtagcacaatggatgcagtcgggatggtgggaagtgggctcggtgctggtgtaggaatggttgggaccggtattggcacaggagttggattggttggaagcggtgtgagctcgggtgttgggatggttggtagcggttttggagcggtcggtagtggattgagcaaagcagggagatttatgggaagaacaatcacaggtcagtctagcaaacgtagtggctcctcaacacctgtgaataccgttccagaaaacgatggtgcaaaacagcagtgagtaaactttgggtttaagcaagatttgtgatcatgacttcgtttttactctttattgttctgtttttttcccctttaactctctcgaacttgatttctggattcactgcagtaatttgttttcgttgtgagccttcaaattaaaatcttgtacaaaagtcatttgcttaatcatcccataaacaatagattccctctcaa

SEQ ID NO: 144132 - DNA, 1284 bp, Arabidopsis thaliana landsberg
cggaatatctctcttcctctgtttcttcgccattctctcagcttttctccttcttcttcgtctttgtcaggtaaagagatagaatgagcatatcccacatacctctctcctcttctcatctttttagtttctcgaaagtttgcatgcgcagactttgttataggttataaactttagttttaagcctattttcgtatgtttatggttgttgtaatagttgagaattcagagtatgtcaagtgaaacttaaaaagaattctatatgtatgtgtgtatgtgttaaagagtgaatggagctgtggacagaagctagagccttaaaggcaagtctaagaggagaatctactatatctctcaaacatcatcaagtgattgtgtcggaagatttaagccgaacttcttccttgccggaagatttctccgttgagtgtttcctcgatttctcagaaggtcaaaaagaagaagaagaagaagttgtctctgtttcttcttcacaagagcaagaagaacaagaacatgattgtgtctttagttcacaaccttgcatctttgatcaacttccttctttgccggtaaatttctaaacttctttataccttttctttctcttcttataatcgaaagattttaagttatatttttcttgatttctttttttttgggatatttttaggatgaagatgtggaagagcttgaatgggtatctcgtgttgtggatgattgttcatcaccagaagtttcacttctcttaacacaaacacataaaaccaaaccaagcttctcaagaattccggttaaaccaagaaccaaacggtctcggaacagtttaaccggtagtcgtgtttggccactcgtttcaaccaatcatcaacatgcagcaacagagcagttgaggaagaagaaacaagaaactgtccttgtgtttcaacgaagatgcagccattgtggcacaaacaacacaccacagtggagaaccggtccggtcggtccaaaaaccttatgtaatgcatgtggagtccggtttaagtctggtaggctctgcccggaatacagaccggcggatagtccgacgttctcgaatgagattcactcaaatcttcataggaaggttctggaattaagaaagagtaaagagttgggtgaagaaacaggtgaagctagtactaaatcagacccagtcaaatttggcagcaagtggtagataagacttaggtaaaacctactttttgtaacataatctgtagaagttgtaatttaacaacttgcttcttaacattttgaaac

SEQ ID NO: 144133 - DNA, 630 bp, Arabidopsis thaliana landsberg
gagagaatgactaaaatctccgttggattgcaacttgtgacaagagattcaaaggaaaaacttaacaacatagtgatcaaatcttcactgagactaaaccgatccaatccaaacatctcggagctttgtttcctcaaaacatgtcatctctgcaataaacaactccatcaagacaaagatgtttacatgtacaggtacgatattattattttttattactatattatatagtctttgtaaacgaaatatgttctgttcttgattctcaattttttttttttttgttgaaaacagaggagatttgggattttgtagtagagagtgcagagaaagtcagatgttgattgatgatagaaaagaactagaggcttcgacgaagatgatgttggcttcgtacagacgatgtaataacggcgccggaaaaagcgagtctcggaatttgtttgatgatctccggcgacgacgtcaattatttatagttccttgaggcttctttaagcaatatctaattatagtttttttggttacacatcttatgaaagttattagtaaaaagaaagagaattaaattgtatctccggttgtcatttttcaatatcttaaatgttaattggacagtttatgtggtga

SEQ ID NO: 144134 - DNA, 857 bp, Arabidopsis thaliana landsberg
gttacctgcttttgctctgcgtgacacacaacgtaacatctgaaattgttcagtctcacgagttggagatcagaacccttgcaaatctatcatccttagaggtaaattctatcttcaatttatgtcttacggtttatctattgtttcgtgtatcatttctgagtttctatggggctttggtataggttgtgtcaaaaggacaacatgcagcaccacctggatcttcagttgagacggtgaacgagaacctcaaagtatatcttaaagtggacggagccattaacacagaagctgatcaagaaaaaatcagaaacaagattggtgaactacaaaagtaagtccttagacccgtcactgaatcaaaacaagatgcttgaatctcatgttagtttcctgagatttcctcctttgacatttttatttcttgtttcatcagacaaaaagagaagttgcagaagatgatgagtgtgtctacttacgaagagaaggtccctgcgaatataaaagaagacaacgcaaacaagcttgctaagatactccaagaattcgatttctttgagaaggaaagtgctcgtcttgctgcagaaacaagcaattcaggaaatcaataaatggaactgaagaactgagacacagagagtcacagtttctatctgcgaaggccaacaaatgaaatatttcaggttaagaaactatgtctgatgatgttattgtgaactagttttgagttataacactatttttactacatctctgaaaagaagactgttgatattagttttgaagagattattcccaaacaccatttgttttggtcaacatgaacaacttaattgttctttgtttattgttgcact

SEQ ID NO: 144135 - DNA, 3585 bp, Arabidopsis thaliana landsberg; identical to SEQ ID NO: 30234
  unsure (1)..(3585): unsure at all n locations

SEQ ID NO: 144136 - DNA, 2232 bp, Arabidopsis thaliana landsberg
aatcagattctagcagcgttgttgacaaaacggagaaggagcataatttaagtggatccatttgtgatttggagaaagatgttgatgagcaagaatgtaaagatgctaacattgataaagatgctcgtgaaggtatcagtgctgatgtttgggaagatgcttcgaatggtgctcttagtgctggcagtgagaatgaagcagctgatgtaacagagaataatggtgggaactttgaagatggatcttcggaagagaagattgaacgtttagagacgaggatcgagaaacttgaagaggagcttagagaagttgctgcactcgagatttcgctctattctgttgtgccggaccattgtagctctgctcacaagcttcatacgcctgctcggcgtatttctagaatctacatccatgcctgtaagcattttactcagggaaagcgtgctacgatcgctagaaactctgtatctggtcttgttttggttgccaaatcttgtgggaatgatgtttcgaggtacacatattctatttgacatgtgagtgaaatttcaggatcttgattcttctcagttgtgagtctaaacaaatgttctgttgttttctcttggttcacattttttaggttgaccttctggttatcaaacatcatagctttgaggcagataatttcgcaagcatttggtaggtctcgcatcacacaaatctctgaaccaaatgagagtggtaatagtgattcagggaagaaaacgaacctgagatggaagaatggtttccaacagcttttggaggattggcaagaaactgaaacatttactactgcacttgagaaaatcgagttttgggtattctctagaatagtggagtctgtttggtggcaggtatatatataccaaatgtcctaactaaaaaaatgagcttcttagttagttgatgaagcatctcacttatgttctgcttcttctcctatctttaaggtctttactcctcatatgcaatcacctgaagacgactcatcagcaagtaaatcaaatgggaaactgatgggaccttccttgggtgatcagaaccaaggaatcttttcgataagcctatggaaaaatgctttccgagatgctctgcaacggctttgtcctatgcgaggagcgggacacgaatgcggttgcttacctgtattggctagaatggtaatcagattttccatatgttttagttcaagccaattcataagaatcatattcttatatcgtctttaaacaggttatggacaagtgtatcggtagattcgatgtagccatgtttaatgctattctccgcgaatcagaacatcagattccaactgatcctgtctctgatcctattcttgattccaaagttctgcctattcctgctggagacttaagctttggatcaggggcacaacttaaaaacgcggtaaacaacacgaaacaaagttcatattttcatagccattagaaacttggtaatgttgattaatctaatgacacaatagttcccttgcagattggcaattggtctagatgcctcactgaaatgtttggcatgaactctgatgattcttcagcgaaagaaaaacgaaacagtgaagatgatcatgtagaaagtaaagcctttgttttactaaatgaacttagtgatcttcttatgctcccaaaagacatgctgatggaaatatccattagagaagaggtttgtttgggatacatatctcagttactctttgtttatcggataagcccatcctatacatatttcagttactctttgtttttaaaacagatatgcccatcaatcagtcttccactcatcaaaagaatactctgcaacttcactcctgatgagttctgtccagatcaagtacccggagctgtcctagaagagcttaatgctgcagaggtacaaataattcagagtttggattcagtttgttctcataatcccaagaagtaaaatttgtaaacttcatttttttgttatatttccagagcattggtgataggaagctatcagaagcaagcttcccttatgcagcttcttctgtttcttacatgcctccatcgaccatggatatagcagaaaaagttgcagaggcttcagcaaaattgtcaaggaatgtgtctatgatacagagaaaagggtacacaagcgacgaggagcttaaggaactggactctcctcttacatccattgttgacaaagcgagtgacttcactg

SEQ ID NO: 144137 - DNA, 959 bp, Arabidopsis thaliana landsberg; identical to SEQ ID NO: 10994

SEQ ID NO: 144138 - DNA, 1986 bp, Arabidopsis thaliana landsberg
atatcatccaatgaagtaacgaacctaactatatttattcgctttatggaaatgacaacagtaggtaagttttaaatccttatttacttgtcccttttttggtctaacaagcttctttttgttcttgtttcttatttccgtcctctctaaccttgtaatctttatgctgaaagctgtttcacaatcttgttgcttaacttggtccaaaacctgtttctgtccctctgtttctccccctggtttcatgtagagtaaacaggttattgtcttaatatattatacacgtttagtcacagatgattgtttaaagtatatgtcagtaattgctgtttatcagtttctgagcttggtttgttttctcctcggtttaacatttatgtgctgtgtgactggtttaaagtagtgtgttgatctttgatgttatcctcagtgaattttctaggaacaagagctcctaaaaactagtcgcagtctcgcgggctctttgttttcccatacaagtatactttgctcatatatgaatgatgtattacattgtagaaattctacaatctatagaaacttttacagtataatatataaaagttctttgatagtcttaggaaacaggaacctatctacaacctatgaaggctacccgacaacactgttttttaaagctcgacaaacagtccttcattgaaaacgaaacaaaactaggcctccgtctctaaagttaaaatatgatgagctatcttatttgcaatgcgattacattctcggggattacaaaaacagtaacataacaaaacaaagttaccatgacatgttcacatgaatgtcatgcagcataggttgaactgcagtcaagtatgttattgcccatcaaatctctaccacttctgcttttaacttttgaggctaataaaaaccaacggcaatgcacggcacgaggcaacgagccactccaccaaacttaagtgctcacacgtgagacatggaccccccatgaacatgagaaccgtccggatcaaatagagtctttctttgtttcagtaaagctgggattttttttggttgttgttgcgacattcgtcgtatccattgcttagggagagaagagataatgctgagagcttcgctgctctgttcttcgacctcaatcactttcacaccaattcaactattcaatcccaatagttcccatcgtttcccaagattcgaactatctcgtcctgtctcggctttgtctcgtaccaaatgtcacttgagtctcctgagagctcgtgggaaatccagcttcctcactcgcagcaccggtaactagttttttttattgggtttatccttgttttgtgattctgtggtctctgtctttttctcttccaaggtgtggaaacttaagaagttttgggttttgagaagctgttagcaactgtattattgaattgattctaatttttgtttctttggctctctttgttctttgatcttcagctactgatgaagctgttgaaactagtagtaacagtggattggatttggttgaggttggattcttgtctggtgttcatggccttcaaggcgagatttgcataaaaccaaacactgattttcctgatttacgtttctctaaggtattcaaaggatagaaatttgaagaaagtttgtgttttttttcttctcttttcttgaaaaacaaatatgtataatttgacatttttttttaccattggcttgattgtttcattagcctggtagaagatggttaaaacaacaattgttgggacaagataagattgatgaggttgaattagtcgaaggaagacctcatcctgcgcagaagagttggattcttaagtttcgagggttggacgatgttgatcaggtagtgtagtgatccatgggagattttaaaagacacatttgaaaatgatttgttacatttgatggggtttccgtttccttcaggtgagacaactcgttggtgcaactctgcttgctaag

SEQ ID NO: 144139 - DNA, 2438 bp, Arabidopsis thaliana landsberg
  unsure (1)..(2438): unsure at all n locations
cttgttcttcctcttcttcgattctcctcttcgacgtctcttgttactgtgcgccgtcttagccttacgtgcgccaacggcgcactctcctatcctacgctcatctatcgtcactcccacagcgagagctgtctcggaagtttccggttgtactacgatcgatccagattttctcgtagagatctctgattctaaccagacgcgggcgatgtcgaaagctcgtgtgtacaccgaagtcaatgtgattcgacccaaggattattgggattacgagtcactcattgttcaatgggggtaagattgttaaaccctagaattagctgaattggtagttgctaaagtaatttaatcgatttttctagtgtttgtattgaatttgaattcagcttgctctggatttgcttcttgatgaagctaatctaatcaaattgatgctgctaatgtaaaaaactttacttttatctctattgatgaatttgattttttagttgtgcttattttgccttttagttcttctattgtaaagcaatgattttttagtttaacattttgatcttgttatttgctctctcagggcgcaagatgattatgaggtagtaaggaaggtagggcgtggaaaatatagtgaagttttcgagggtataaatgtgaacagcaaggagaagtgcattatcaaaatcctcaaacctgttaagaaaaagaaggtgaattgttttacattgttttggatgattggggttgtttcttgaatctctctatgatctttttttcgtagataagaagagagattaaaatacttcagaacctatgcggtgggccaaatattgtcaagctgcttgatgttgttagagatcaacattcgaaaactccaagcttgatatttgaatatgttaacagcacagactttaaagttttgtatcctacgttgactgattacgacattcgttactacatctatgagctgttgaaggtataaattctggtattggttggattatataagtattccatttgacttcatactcacatttggtaagactacttgttgcaggcactagacttctgccattcacaaggaataatgcacagagacgtcaagcctcataatgttatgattgaccatgagctgcgtaagcttcgtcttatagattggggtcttgctgagttttaccaccctggaaaagagtataatgtccgtgttgcctcaaggtatggttttacttcataccctttattttatttttttcgctgttgcctagcttcactctgatgtttatctctcctaatgtgtatcagatatttcaagggacctgaacttcttgtggacttgcaagactatgactattcattggatatgtggagtcttggctgtatgtttgcagggatggtaagttcatgatataacatttgagcggctttcctttcttttctgagaaatgaacttgtggtgatctaattttgacctaatttttcctcattacccatattagatattccgtaaggaacctttcttctacggccatgacaaccaggatcagctagtgaaaatcgccaaggtatattacttgtaattcagtattagaatatgggagatctccgttccattgtcgtcatgaactctccttcttattcaccaggtgcttgggactgacgaattgaatgcttatctgaacaagtaccagttagaacttgatccacaactggaagcacttgttgggcggtatgtgaaacttaaacattatattgtaatctccgagctttgaattgccatgtaatgagctgaagctgagaattagtgttgtatcattctctggttcaatggaacacaacctacaggcatagcaggaaaccttggtccaaattcatcaacgcagacaatcagnnnnnnnnnnnnnnnnnnnnnnnnnnnnttccttgagtccttaactccttgtatagaaaatggtttagttgggttcttaagggttttgtttaaaacggtgtaggcgattgatttcctcgacaagctacttcggtatgatcatcaagacagattaactgcaaaagaagccatggtacgcatgcttcagaaaacaaattagaagcctttgtatttgtatataaatcacatattaggtaaattaatatggtttgttgatttgatgacaggcgcacgcttacttcgcccaagttagggcagcagaaaccagcagaatgagaagtcaatgaaacacagagatctctctgtctataaacttactgatgatgatgatggtaatgttcatcttttcttcaaagtattttttttaaatcaaggtgatgtttcttctgtccaacttattaaacaatttgtcctgaattcgaatgtctgaaacgtcttatattttaaatatatttttcatgtatgttatatcaaaccaaaaaaaaaaaacagaattacaataaaacaaaaaaacgta

SEQ ID NO: 144140 - DNA, 7337 bp, Arabidopsis thaliana landsberg
gcttctgattaccgtgataacaaaattcacactggttggttggatagtaggattgctatgcgggtcagagctgagaggcctccatggtatctctctgttgtcggcggagctctctatgtaagaacctctttctcagagatttatttgtcttgaaaagtttctatctggtgacgaaatgttctatctgtccagaaagcatcagcgaccagtgctgctgtggtttcagattacgttggttatctggagaaggggcaaatccctccaaaggtaatccaataccagggatctcttttgcctttctagtaatgttcttgtagcttactttttctctcttaacttgcagcatatatctcttgtacattctcaagtgtctctgaatattgaaggaagtaaatatacggtattcgcctactatcaaaattttacgtctctgcaatttcgtattttcctctgccatattatttttgcgctgaagatattgttaccaggcttactaacatgaacataactgttctagattgatgtagtccggggtggatcaggaacctacaggctaagaatgaacaagtcagaagtggtagcagaaatacacactctacgtaatggaggtctgttgatgcaggcaagttttctgcctttgttctatactacaagacaaggacatacatgtgtcgcgcagaaaaaaacttctggagaatctcacttccttttcttgttttcactgtcattgcagttggatggcaaaagccatgtgatatatgcagaggaagaagctgcaggaactcgtcttctcattgatggaagaacttgtttgctacaggtttctgctaatttttttgtgtgtttaccattttacttcacgtttctctgaagtcatctttagcttttaagctgtctgtcaattttggcttattcagaatgaccatgatccatcaaagttaatggctgagacaccgtgcaagttgatgaggtatttggtttctgacaacagcaatattgacgctgatacgccttatgccgaagttgaggtcatgaagatgtgcatgccacttctttcacctgcttcaggagttatccattttaaaatgtctgaaggacaagccatgcaggttcacttcattgctaaacaaaaagcctacagttctgtttaaattgattaacccatccattatttttttcacaggctggtgaacttatcgccaatcttgatcttgatgatccttctgctgtaagaaaggccgaacccttccatggaagtttcccaagattagggcttccaactgcaatatccggtagagttcatcagagatgtgccgcaacattaaatgctgcacgcatgattcttgctggctatgagcataaagtagatgaggtaaacactgtttgtttttcctatttgatccaacttctctactagattatttgactatgagatagctcatacgttgcaggttgttcaagacttacttaattgccttgatagccctgaactcccatttcttcagtggcaagagtgctttgcagttctggcgacacgactacctaaaaatctcaggaacatggtaaacacctgtgtagtattcataatccggtttcttatatattgatatttgttttgagttcaagacttttaatcatatctaaataaaactctttatcagctagaatcaaagtatagggaatttgagagtatttccagaaactctttgaccaccgatttccctgccaaacttttaaaaggcattcttgaggtaattgactattatttcttccattagaattaccatcctgtttcttactctctgaattgtttctgtctacttcttgcaacaggcacatttatcttcttgtgatgagaaagagagaggtgcccttgaaaggctcattgaaccattgatgagccttgcaaaatcttatgaaggtggtagagaaagtcatgcccgtgttattgttcattctctctttgaagaatatctatcagtagaagaattattcaatgataacatgctggtattatatggctcaatagctaattaacagatttttggttactagcgatgtctgaggcgtctaaataatcattttatttttcttgaataggctgatgttatagaacgcatgcgtcagctatacaagaaagatctgttgaaaattgtggatatagtgctctcacaccaggtctgtgatcatctttctcagaccaggtttttctttccgtcatgactatgtcactgaattggttcttcttttcagggcataaaaaacaaaaacaaactcgttctccggctcatggagcagcttgtttaccctaatcctgctgcttacagagataaacttattcgattctcaacacttaaccatactaactactctgaggtgcgtttggttgctttatgttttataatatttttgtctacactctcaactaatgatcagtttgtgtgtgtagttggcgctcaaggcgagtcaattacttgaacagaccaaactaagtgagcttcgttcaaacattgctagaagcctttcagagttagaaatgtttacagaggacggagaaaatatggatactcccaagaggaaaagtgccattaatgaaagaatagaagatcttgtaagcgcatctttagctgttgaagacgctctcgtgggactatttgaccatagcgatcacacacttcaaagacgggttgttgagacttatattcgcagattataccaggttcgagttcattcttccgcacccttattgttcaaaattctttttgtactgcaattgattacagaaaattttgacttcattttaacccgactcttgtcatcagccctacgtcgttaaagatagcgtgaggatgcagtggcaccgttctggtcttcttgcttcctgggatttcctagaggagcatatggaaagaaaaaacattggcttagacgatcacgacacatctgaaaaaggattggttgagaagcgtagtaagagaaaatggggggctatggttataatcaaatctttgcagtttcttccaagtataataagtgcagcattgagagaaacaaagcacaacgactatgaaactgccggagctcctttatctggcaatatgatgcacattgctattgtgggcatcaacaaccagatgagtctgcttcaggacaggtacttgacacagtataaactagctttggtgatatagtgtctagctaatctgttatcatttctggtttgtttatctcagtggggatgaagaccaagctcaggaaagagtaaacaagttggccaaaaatcttaaagaggaagaagtgagttcaagcatctgttctgcggtgtatggtgtaatcagctgtataattcagcgagatgaaggacgaacacccaatgagacattctttccattggtcgttggagaaacagtattatgtagaagagccgttgctgcgtcatcttgaacctcctctgtccatttaccttgagttggtatgatcatgacgatgaatttcttgttaaagcatatcatattctttttaatggctatttactgtttgtctgatgcaggataagctgaaaggatactcaaatatacaatatacgccttctcgagatcgtcaatggcatctgtatactgttacagacaagccagtgccaatcaagaggatgttcctgagatctcttgttcgacaggctacaatgaacgatggatttatattgcagcaagggcaggataagcagcttagccaaacactgatctccatggcgtttacgtcgaaatgtgttctgaggtctttgatggatgccatggaggaactggaactgaatgcccataatgctgcaatgaaaccagatcacgcacatatgtttctttgcatattgcgtgagcagcagatagatgatcttgtgcctttccccaggttgctatggctgtgtccttgacaagttattgtttgtaatgtcagacaatatcctaataatatcaacgtgtttcttacaggagagttgaagtgaatgcggaggatgaagaaactacagttgaaatgatcttagaagaagcagcacgagagatacatagatctgttggagtgagaatgcataggttgggcgtgtgcgagtggtaagtgcggctgtggttggtgtcctctggactggcatgtggtgcttggagggttgtggttgcaaacgtgacaggccgtacatgcactgtccacgtaagttccgcttacaaaaaatttggttgtacaagcaatacagagagtaagagtacacatctcgatgacttacctgctgtgatttaatatttcagatataccgagaagttgaaactcctggaagaaacagtttaatctaccactcaataaccaagaagggacctttgcatgaaaccccaatcagtgatcaatataagcccctgggatatctcgacaggcaacgtttagcagcaaggaggagtaacactacttattgctatgacttcccgttggtttgttactgaattcataagattcacacatacgcttactcttttggctatttccaaccccccttatgttatttctttccttttcaggcatttgggacagccttggaactgttgtgggcatcacaacacccaggagttaagaaaccatataaggatactctgatcaatgttaaagagcttgtattctcaaaaccagaaggttcttcgggtacatctctagatctggttgaaagaccacccggtctcaacgactttggaatggttgcctggtgcctagatatgtcgaccccagagtttcctatggggcggaaacttctcgtgattgcgaatgatgtcaccttcaaagctggttcttttggtcctagagaggacgcgtttttccttgctgttactgaactcgcttgtgccaagaagcttcccttgatttacttggcagcaaattctggtgcccgacttggggttgctgaagaagtcaaagcctgcttcaaagttggatggtcggatgaaatttcccctgagaatggttttcagtatatatacctaagccctgaagaccacgaaaggattggatcatctgtcattgcccatgaagtaaagctccctagtggggaaactaggtgggtgattgatacgatcgttggcaaagaagatggtattggtgtagagaacttaacaggaagtggggccatagcgggtgcttactcaaaggcatacaatgaaacttttactttaacctttgttagtggaagaacggttggaattggtgcttatcttgcccgcctaggtatgcggtgcatacagagacttgatcagccgatcatcttgactggcttctctacactcaacaagttacttgggcgtgaggtctatagctctcacatgcaactgggtggcccgaaaatcatgggcacaaatggtgttgttcatcttacagtctcagatgatcttgaaggcgtatcagcaattatcaattggctgagctacattcctgagtatgtgggtggtcctcttcctgttcttgctcctttagatccaccggagagaactgtggagtatatcccaaagaactcttgtgccccaggatttgctatagctgggattaacgattatactggtatatgtcttggtggtatctttgataaaaatagctttgttgagactcttgaaggctgggcaaggacggtagtgactggtagagctaagcttgggggaatacccattggagttgttgctgtcgagacacagactgtaatgcatgtcatcccagcagatcctggacagcttgactctcatgaaagagtggttccgcaagcagggcaagtctggtttcctgattcagcagccaagacagctcaagcgctcatggatttcaaccgggaacagcttcctttgtttatcatagcaaactggagaggtttttcaggtgggcagagagatctttttgaaggaatacttcaggcgggttcagctatagtagaaaatctgagaacatatcggcagccagtgtttgtgtacatcccaatgatgggagaactgcgaggtggagcatgggtggttgttgatagccagataaattcggattatattgaaatgtacgctgatgaaaccgctcgtggaaatgtgcttgagcctgaagggatgatagagataaaatttagaaggaaagagctgttagagtgcatgggaaggttggaccagacgctaatcaatctgaaagcaaatatccaagatgccaagcgaaacaaggcatatgcaaacatcgagcttctccagaaacagattaaaacccgagagaagcaacttttaccagtttatacccaaatcgctaccaaatttgctgaactccatgacacttccatgagaatggctgcaaaaggtgtgatcaaaagtgttgtggaatggagcggctcgcggtcattcttctataaaaagctctatcggagaatcgcagagagctctctagtgaggaacataagaaaagcttctggagacatcttatcatataaatctgctatgggtttgattcaggactggttccgcaaatccgagattgcaaaggggaaagaagaagcttggacggacgaccaactgttctttacatggaaagacaatgttagtaactacgagcagaagctgagcgagttgagaacacagaaactgctgaatcaacttgcagagattgggaattcgtcagatctgcaggctctgccacaaggacttgctaatcttctaaacaaggtatgaactcaaacactagagaaaactgagcttttggaggccccctaaatgaattatgtgtgatgcaggtggatctttcaagaagagaagagctggtggacgcgattcggaaggtgttgggttgatatatctatatgaggtttagcttctgttccaataaagatggtgttttggagttgcttgtatcattagatttgaacggcttccttgtatttgttagcgcgcacaatttagttcgtaaaaattcattcgacagcccaatgttgcaaaagtgggacagagataacttgcagaatatatatcgttgttgcttctactatgggaaacttttggtggttgatgtcaagattctagtaaaggaacttaaaagcttgtgacaagatcataacacataaaataggagttttgaatttagacacaattaaatttttttttctcttttctcaaggtgtaactttatgtatcatttaaaagaaccatacatggaatgccaaacacttgtttagcccaacacattctactcgattacatattttgcattttgaaacttttaataatctcaaaccacataagagagcacttggaacactacagacggtaatagtagtgcgcttcagcttcttgatctga

SEQ ID NO: 144141 - DNA, 1778 bp, Arabidopsis thaliana landsberg
gttaagctccgacactgcattttccgagtactcaagagaaaggcgatggggtcatcacagtcttcgcaattactcgatgaaggtgaagaagtagaagaagaagaagcagagagcgaaggtgaagaagtagaagaagaagaagatgaagcagagagcgaattgaataacagaagaatcgagctggataatctcttggtcaagaaagttctcgagcaagagcctgagatgcttccttgtcacgcctctgcttctccactctctcctcagctctcttctcttggaactcctcgaatcggaccttccattaaagtctgggatccttacaacgtcctcgcgccacctcctccttcttctccgcctcttttctctcgtatctcctccgccgcggaacacgatcgctccgccgtgacggaagtctatttcatcagccacggcgagtgtgatctcaatctcaggcctgatctgattggaggtagatgccacgtggctactctcacacccaacgggaaacgtcaggcgagagctttagccgtatttttaaactccgaaggtgttcgattcacctccgtcttctcttcgcctctggatcgagctagatccatggctgtttctgtttgccaggtacagtctctactcttcgatttctcaattctagatctaaggctgtgaaattggaatccaattcttcaaaattaggtattagtatagtagctaggaagctcatgaaacgaaaccaacctgaatcattctataatcttgttagatcgaatcagcctgatgattctaagaaaaacaactttaagactctatattattgttcatggttcaataatgttgcgtgatggattagtaataagaacaaacaaatatagtaagaatctctgaagactgcgatggaactagttaggatgcttgtaggatgatttctggattgaatgctgcattgatacttgttgcaggaaatgaattttcctgaggagcatttgcaagtctcggatgctgtggttgagatgagtttaggggactgggaaagctgtcatcggtcagagatctacacacctgaaactctaagtttaatagaaagatgccaacctgatttctcagctccatctggtgaatcactcagacaagtagagtttcggatggttcagtttctgaatgggacagtctcaggactttcggagaagctcaggtcagaacttcttccatctacacagcacacaaattccagagggttctcgttagctacttctattcatcgtccaattcttacaaggaagaaatctgggaagagccggtttcaggtgatgaatgcaactggtgatcacgagggtagtgaagagatatttagtaatcacaatgatgaacaacacctaggtgatataaacatcaagagttcttcttctctactctcaacctgcattggagttttcactcactctttacctataaagtgtcttcttaccggtatccttggatgcagcccggtaatgacacataagatctgtgtggaggattcctctgttaccgtattacagcattcgtggaaaaccggttggcaggtaaagcggttaaatgacaccgctcatcttagactgttgtagcctcatcatcatcaaattcttttactctctgaaagctctaaaacacaacgagctggtaaattattgcaagaccttcacaagtcatttaagtctgcagaagaagatcaacaagcttgcagattacatgctacctccacgagcctcttgtacgctgttttgagaaagaaaagctaa

SEQ ID NO: 144142 - DNA, 1561 bp, Arabidopsis thaliana landsberg
atgcctccacaaaaagaaaaccatagaacattgaacaaaatgaagactaatctttttctctttctcatcttttcacttctcctatcattatcctcggccgagcaatgtggtcgccaagctggaggagcactctgccccaacggtctatgctgcagcgagttcggctggtgcggttcaccgatccatactgtaagcagcctggctcgcaaagccagtgcactcccgggggtactcctcctggacccaccggcgatctttcgggcatcatttcaagttctcagttcgatgatatgcttaagcataggaatgatgctgcttgtcctgctagaggtttctacacttacaacgcctttatcaccgctgcaaagtccttccccggttttggcaccaccggagacaccgccacgaggaagaaggaggtcgccgccttcttcggccagacttcccatgaaactacaggtacccaaaactcattaacaatttgacgtagattgtttcaaaacacaattgctaaattttggtgtttattattaaaacattagaatttgaagttctttttttcttctgtaaagagttttggatccaagtgctcatatatacaaagaactactatactatatatatatatatatatgttttattgaaaaaattatagcttctcatatttagaaacgaaagaaaaaaatcaaacaaaaacgccaaacgcaaagaaaaaatgttttggtcttagatgtttgcgtttacaattaaaaaactattttaaaaatatgaaattcttgattaatctaaacgcaaataaccaatcaaggaacttacgaatattccagtttccaaattatacacttttgaataatgtcaagtttgtgagttgtgactatatatatagctatatactaattaattaagtggacggttacgtcgtgcaggtggatgggctacagcaccagacggaccatattcatggggctactgtttcaagcaagaacagaatcctgcttcagactactgtgaaccgagcgccacgtggccatgcgcatctggcaaacgctactacggaagaggaccaatgcaactgtcgtggaactacaattacggtctatgcggtagagcaataggagttgacttactcaacaaccctgaccttgttgccaacgacgcagtgatcgctttcaaagccgcgatttggttctggatgactgctcagcctcccaaaccgtcttgccatgccgtgatagccggccagtggcagccttcagacgccgaccgtgccgccgggagattaccgggttatggagtgattacgaacatcattaacggtggattggagtgtggacgtggccaagacgggagagtcgccgatcgtatagggttttatcagaggtattgtaacatatttgttgttaatcctggtggtaatcttgattgttacaaccaaagatccttcgttaacggcctcctcgaagctgctatttagtaacgagagtattattattataatataatacgcagctttgtattatcaaaacaataatatcagactaataaaactctttccaatgat

SEQ ID NO: 144143 - DNA, 1541 bp, Arabidopsis thaliana landsberg
atcacccaaagtatggagcaattgcgcttccggagctagcggattctttgtaccatgctgatgtaagtgctctttcttttctaaattctccacagttgaatctcaatatttgtattgaaacttgaattccttgtctatgctataaacagattgctagattattcaatgaagcttctcagttgaatcctgaggacgccgatgtgcatatagtgttgggcgtgctctacaatctgtcgagagagttcgatagagcaatcacatccttccaaacagcattacaactaaaaccaaacgattattctctgtggaataagctaggtgcaacgcaagccaacagtgtccagagtgctgatgccatatctgcttatcaacaggttctgttctacgcacagaaatcaaaacttctcaaagttttatatttccgtctctttctgactgtttttttacttgcaggctctagatttaaaaccaaattatgttcgtgcttgggcaaacatgggaatcagttacgcaaaccaggtttgatttcagtctttgtttcttgtttgatggttgtttatggactggaaccaactgaaatgtggtatgctatcatgtttgttattgtaacaggggatgtacaaagaatcaatcccgtattatgtccgtgcccttgcgatgaatcctaaagctgataacgcatggcaatacttgagactctcgttaaggtacagtataagctcgtaaactcgaaaaacgccatttaaattccgatgcgatttcttacaaagtcagttgatattttggaactttgttaaaacataatgcagttgtgcatcaaggcaagacatgatagaagcttgtgagtcaaggaatctcgatctcttgcagaaagaattcccgctgtgagtagacaaagcagacgattaaaaccctaaatccacatgaaaatcttacaaagacgttacgtctttttgttgtttagttttgtaaaaactacaatttaaaaataaaaactatgggttgaaaattaataaaattgttattgtttttaccctcgtaaaataatgcaaagaatcagtaagcaaaaaggaattgatacattcatgatgcattgtataatgtattgtaataacttgtcttggtccagagagagaatgtatttgtaataacttgacactgacttcagaattggacgtaaagtgacacattcatgcattgtatcaaacattgttaatctgaatatatatatggtcccaaaattagtacttaagtgggaatatatatcgtggtccaaaaaaacttgagtacagagataacattatttgaatcgaatatgttgtactatagagtttttctcaatcctgtaaggttggacctatatatgctctaattgctagtctttgtcttaaactatgaatgggtgggactaattacatattttaaacgctatgcataatgcatttgacctagttttctgcagcgcaccgaaaactttgatgaacagtgcaaaacgtgataaacatatgaaaaacattgcaaaaaaagattcttacacttga

SEQ ID NO: 144144 - DNA, 540 bp, Arabidopsis thaliana landsberg
tgcaaagagactaagtatgcttgaagaggtcgaacgggaatttgattttactttgtttatatatataccacaaactgtctcaatcctatgattcataaagaaagttttgtgttacttaataatatgtttctgtgttctgtttctcatagctgcttcaaaaggtcttgaacaactaagggctagcgattcaaccgcggacaataacgaagaagaacacggtatgaaacgtttgcgttttgtcccatcttctttatctaattccttttcctgcatacagttttctgaatcagattgaatatactgtcataaaaacagctgcaaagggacaaagtttgttagaagagatcgaacgggagttcgaaggtatctcctacataacatttactaagagtcttaattagttcacatcccaaccctgagtaatatctgagagtcttatatcttcatttatcacttgaagctgctacagagagccttaagcaacttcaagttgatgattctactgaagacaaagaacactgtacgacactcttcttctga

SEQ ID NO: 144145 - DNA, 162 bp, Arabidopsis thaliana landsberg
cgtcgtggtggtgatttttgggaattttgaagagccgttaaaccctagaacggacggagaagaaaaccctagaccggcgaagaagataaatcagattcgatgtcggataataaagaccatgattccgattccgatgctccggaggaattaacccaggagcag

SEQ ID NO: 144146 - DNA, 4635 bp, Arabidopsis thaliana landsberg
ctcaaagaagaaatcgaaaaagaaaattcggcggataatcgatgacgctgaactagggaaagatacgagaacaaagattgcaatcgaaaaggtgtttaattttttggcagttgcttttgttaaacttgtatataaacttcaaaaaaaaaattatttaagtattgctcgttgtacattgggttctttctttttgtaggcacgacaggagcgccttaggtccttgcagttttctgccagatacaaaacaattagctctatgggagacgtgaaatctattccagaaggtgcggaagttgaggttcttggtgatgctcacagtggttacatagtgaatgtggttagggagattggtgaagaagctgtgagggttcctcgtagcatatctgccaaactaaaagtccatcaggttagcatttacatatgtgtatccctatcatcataatatacttccatctcgcttgtcacctataccattgggtattaaagatagccatctcgactagaaatgcctattatggaaatagcttttgctgtaagtttggagttttttttttcaggtaacagggataagatttatgtgggaaaatattattcagtctatcagcagagtcaagtctggtgataaaggtcttggttgcattctagcacatacaatgggcctgggcaaaacttttcaggtgcttaattcttttcatgcacgaggctgtttggatatatcgtattatcgtccgattctattagtgcatactactaatggttaatcgttatttgttaattactggctctttatgtcttctctcacttaaacctattcaggttatagcattcctgtacaccgcaatgagatgtgttgatttagggttgaaaactgctcttattgtgactcctgtaaatgtgttgcacaattggcgaagtgagtttgagaagtggatgccttcagaagtgaaaccgcttcgcatttttatgcttggagatgtttcaaggtataaattcttctatgaaagaaacttttggtacttgacaattcagattcttatgttttctaatctagtctaggttttagatatttaaaataggggctgggtagtctatagtggtgtgccataacttatggcccataagactgctgaatgttacttatactaaagctatctgaagatcttttccctaatcaaagaatatagatgcaagccctctcgtccaaacacaagatctcagctgtcttaacttcctactaaactgacctattggcccatatatcaaacacttattttggcctatgtaagttgtatttttggtgacagtttctctatccacttcctgctcgaatgttttttttgaagggagagaagatttgatttgctaacaaagtggcgaaagaagggtggagtctttttgatgggatatacaaattttagaaacctgtctcttgggaggggggtgaaggacttaaatgcggccagagggatctgtaatgccttgagggtgagactataatgtcacttgcaaaattttattgatttctatcctgttaatattctaggtcattttaggaaagcgtttgacgtgctgtttatgtttacacattactttttgaaggttaatatttctgctatttaaaggccatatctgtatcatagattttgctgttttcatgttctctcttgcttatgatttcccttgtgcatatacctctgcttgcaatattttattcttgcaattcctaaacctatgtggctgcaggatggacctgatatacttgtttgcgacgaggctcacatcattaagaacaccaaggctgacacaacgcaagcattgaagcaagttaaatgccagagaagaattgccttaactggctcaccccttcaaaacaatctcatggagtattattgtgtaagttactgagggaactatataaaattgtgacctaattttttcttatctccagtatctttagctatgtctgtactgcaacagatggttgattttgtgagagaaggattcttgggaagtagccctgagtttagaaaccggcaagtctttcataccagtttttttttttttatgtctattatgatgttatgtttctagagttttaactgtggttctccatacctgcagcttccaaaatccaatagaaaacggacagcatatgaattcaactgcggaggatgtaaaaattatgaaccagaggtcacacattctgtatgagcaattgaaaggttttgtgcaaagaatggatatgaatgtggtgaaaaaggatctgccacctaaaacagtcttcgtaatatctgtcaagctatctcccttgcaacggatattgtatcagagatttcttgagctttatgggttcagcgatggaagaacagatgaaaggatgagaaaaaacttttttgctgcttaccaggtcttggctcaggtataaatgtgataaaggccttgctatacttaaattaacaacttatttgagaaaaaaatgttaagaataataatgttaataactgatttatctggtattcgttttcatattctgaactctctctctggtattacgtctcccagattttgaatcatccagggattccgcaattaagaagtgaagatagcaagaatggtcgtcgtggtagcattgttgatattccagatgactgttcaagtgatgaaaatatagactacaacatggttacaggaggtaactcttaattggcactactcacatattttaagattttattaaactagtatgaaaaatagaaggaacagaaaaacattggacttgttccatggttaagatagatgtcttttggttttgaattcaaggaatactaggtgcagtagatattatacctttttggtaccgttccagtttgaataagattgccaatagaggattagttttattggtctaagactttcttaccaagaataatctatgacatgcaatagttaagggaccttcgattcagcaatgttatgttttaagcttcatcatattctgtggagctttcaggagtgatctttctttgtttgcatctatgcaagttcaataatagtgagaaaagtattaataatctgtgtcattgttgttttggatattgacagagaaacagagaactatgaatgatctgcaggataaagttgatggatacctccagaaggtaactatagtttactcagcctgagtgaattagtaactactgcctataactttaaagtaaacagcagcgtagtgaggcggtcatgctctgattctaaccctgcctttgtgccaggattggtgggtcgacctacttaaaaaaaataatgataaggtgtcgtacttcagtggcaaaatgattctgctattggatattttatctatgagtgctatgtggaggataaggcgcttgtgtttagccagagtatcccgacattcaatctcatagaactttatctttcaagagtacctcggcatgggaaacaaggaaagttctggaaaaaggggaaagactggtataggttggtatcttattctcttatattcgcgtgaatgttttttgaacaattatgaagactctaacttcccttgatggatgcagaattgatggaaaaactgaaagctcagaacgccagaagttggttgataggtttaatgagcctgacaacaaaagagtgaaatgtacactaatttcaaccagagcgggatcccttggaattaacctttatgctgctaaccgtgtgatcatcgtcgatggttcatggaatccaacctatgatcttcaagctatatttcgagcttggaggtattttctagactatggaattaaaatttgtcaatatagcattacaaacggtggcttattatacgtggacttattggttgcaggtatggccaaaagaagcccgtatttgcgtacagattgatggcacgtgggactattgaagaaaaaatatataaacgtcaggtattgaaaggcataaaacaatgttgaattttgctgtttctttccttcaaagagacattcatgaatcagatctgttaatatgattaggtaaccaaggaagggctagctgcgagagtagtggatagacaacaagtgcacaggactatctccaaagaagagatgttacatctttttgaatttgacgatgatgatgaaaaatctgaagccgtaactgagataagcaagcaaaatgaagcgggacatagcaatctggtggagcaagcaatcttgtggacaaagaaggccactttatctcgtgttggtggcgacaaattgatggagaacttactacagagacacggccccaagtaagtttcacaagcgtaaccatattcacatcagtacctaaaatctttggttttttatgctacttgctttgtaacactatatgtcctttttcactagctggatttccagtttccatgagcacgagacattgctacaagagaatgaagaagaaagactgacaaaggaagaaaaagacatggcctgggaagtttataggagagcacttgagtgggaggaagttcaacgggtcccattcagtgaatctccagtggttccaaaaccttctccttccacacaaacagagcccttgccccagccaaaggggcttcaacaggagtcgttttgtaaaccgcaactgcactag

SEQ ID NO: 144147 - DNA, 553 bp, Arabidopsis thaliana landsberg
ctctcgttttctctcacagacacaacaaacaaagcaaaaaaaaataaaaaatcgcacgtttcttcttcttcttctctctcgcaacaaatctgtattagggtttttgagaaatcttcatttcgtgattttgaaatttatttgtatttgattttgttgttgctttggaatcatctgcaaccaccatgatttctgattcgatcaccaacgcttctgctacttcagctccaaccgccagggatttcggaaaaaagaaaagggtattggtttcaatctttcctcaaatctcatttctctcttcaaagagttgatttcactctttgggtttgcagacgaacaggtctgccaaattgaaacagagcaagctaggtcttcgtcgtgaacaatggctttctcaaggtaaaattaaatgatctatctttacatgtgggattttgtttatattgatttgggtttttgttgttattagttgcgatgattaacaaaggggataaggaggaaatggaatccaatcgaagaattgggagtgaaaagcctgatcagagagatcttccgc

SEQ ID NO: 144148 - DNA, 1244 bp, Arabidopsis thaliana landsberg
atacattgaacctttcctcttcttcttcttccttctaccttcttctctctgatcaaatttgggggaaaatgggtcgaggaaaaatcgagataaagaggatcgagaatgcgaatagcagacaagtcactttttccaagaggcgttctgggttacttaagaaagctcgtgagctctctgttctttgtgatgctgaagttgctgtcatcgtcttctctaagtctggcaagctcttcgagtactccagtactgggtaacacttatttctttttgattcaattttgtttttgcatgtcttgtcttgttgtgattagaatcgatttcgggaactgtaattgatttttgtttttgcatgtttgttaagattaaaagttttctgattgagctgaagagagtcctaattttgaattctcatttgattttagaatgaagcaaacactttccagatacggtaatcaccagagttcttcagcttctaaagcagaggtgagaatcattcattcttgtctcatatatcttgaaattgtttttttgaaaatctgattgctgtttagaacctccaggaggattgtgcagaggtggatattttaaaggatcaactttcaaagcttcaagagaaacatttgtatggaaactaaataaatctcactatgcttgttcattactttattcttctctactttgtgttcgtttatattgtttggctttgtgtgttctgttctgttgtagacaactgcagggcaagggcttgaatcctctgacctttaaagagctgcaaagccttgagcagcaactatatcatgcattgattactgtcagagagcgaaaggtaactagtaatatcactcttccatcatcatttctctttgcattgtcctgattatggttatctgatttcaggaacgattgctgactaaccaacttgaagaatcacgcctcaaggtaaacactagcttttcctctctagcttccaaatgtaagcttatgtgtaatcacatgattctgaaccttgttaaaaccagtggctatcctttgacaagctcatgctctaactagctagtgtgcagtttatttgtcttaagactcctatataactaggtacagagtgcaaaagtataattcgtttcttgattagccatatatatactttgcaggaacaacgagcagagttggaaaacgagaccttgcgtagacaggttcttattatttttgttgaatcatctcctaatgaacgcttcttcctctga

SEQ ID NO: 144149 - DNA, 819 bp, Arabidopsis thaliana landsberg
gataagcgatattgaaggagcaagaaaagcaggtgaacttttcggttaccctcttatgatcaagagcaaacgattggcttatgatggacgtggaaatgcagttgccaacaaccaagatgagctttcttctgctgtaacgggtaaacccttaactaaccatatttaatgtggtttcatagtttctagtaacagttaaaccagttaatcgtgtacaatgccacagtcaacgagaaaacaaaaaattgtgagttacatgaaccagaatgctcatgtgaaactagcaatagtgttctgagacaatccttgacatttattctaaagttggtattaagccctgacacctatgtctatagtagatatcctagacatactttttagctctacagtgtaatctttgtttccctgcgtttgcctcgatatttttttctcttttccagctcttggaggtttcagtcgtggtttgtatattgagaaatgggcaccttttgttaaggtaggatgacaaatttatctgctttagtaacttattgagctctgacatgtataatcggttgcatatcaaattttaggagttagctgttattgtggctagggggagagatggttctatggtttgttatcccgttgttgaaaccattcacaggtaactcaaaagcgcgactaaattttaattataagattgaaaggtatgatacaaattgttactttctagtttctactaatacaccttgaaatgcattctagggaaaacatatgccatatagttaaagcacctgcagatgtgccttggaagattaacaaacttgccaccgatgttgc

SEQ ID NO: 144150 - DNA, 850 bp, Arabidopsis thaliana landsberg
atgcagcctgatatagcagcccctggtgtgacgattttaggagctacatctcaagcctaccccgattctttcggcggttattttctaggcacagggacatcctatgccactcccgttgttgcggggctcgtcgtactactcaaagcttcacaccctgactggtctcctgctgcgctaaaatccgctattatgactacaggttcttgaaatcgaaaaccactttcttctcctcaccagaaaaccaccattcgttaatctctaatcttaccgagtttcttctcttgtttttatagcatggaagactgatccatccggggaaccaatctttgcggagggagaaccacggaaactggctgatccatttgactacggtgcaggactcgtgaacgcggaaagagccaaagatccaggactagtttatgacatgaacatcgacgattacattcactatttctgcgccactggttacaacgatacatcaatcactataatcacgggaaaacccacaaaatgctcgtctccattaccgtctatcctcgatcttaactatcccgccatcacgattcccgacctcgaagaagaagtgaccgtcacaagaacggtgactaacgttggacctgtggattcagtttatcgagccgtggtcgagcctccgcgaggtgtggagattgttgttgaaccggagactctagtgttctgttcgaacacgaagaaacttgggtttaaagttagggcttcgtcgagtcataagagtaacactggttttttctttggtagtttcacttggactgatgggactcgaaatgttaccattcctttgtctgtaaggactcgtgttttgaacccttga

SEQ ID NO: 144151 - DNA, 1356 bp, Arabidopsis thaliana landsberg
gtgtgttggagttcattgactatgtgtcaaagttttcgggtttacctatgagctaaacctttcaacggtaccatatttgatgatttcttcaccagtgcatctaccaaatcttatagtcttggcgtgacatgtttctttgcccattatttgcatgttaatttaaatttcagaggccagagaagtaccttggagatttggaaacatgggataaagctgaagcggatctcaaagaagctatagaagcttttggaaagccattagtggtattgtcacttgttgttgaatactcaagtttattcacaaagtctgcattcattctaatgtaagctgttttggcagttgaacgaaggagatggtgcattttatggtccaaagatagacatcacagtttctgatgcaatgaataggaaattccagtgtgctactttacaggttatactcccaaattctttttagcttttcttgtctatgcatttctcttgctgttatcagtgcaggagttgattttatgtttcttgtggcctcaaatcagcttgattttcaacttccgattcgcttcaacttggaatatgcagctgaggatgaagcgaaaaagagtagacctgtaatgatacatagagccgtgttgggatctgtggaacgtatgtttgccatattgttggagcattacaaaggaaaatggcccttctggattagtccgcgacaggccatagtttgtcctatatcagagaaatctcagcaatatgcagaaaaggttacttttatggctgttgctgtactcttttactgagcacatgtggttcttatcgacttatttgcagtgtctaatctctggtttttcttttggcacaacaggtacaaaagcaaattaaagatgctgggttctatgttgatgctgacttaacagacagaaagatagataaaaaggtaaacgatttcggttcatgttccaagttttgttctgtggttggctggtgattcctaagattgacttgagtgatgatgattgtggtgtgtttgtaggtgcgagaagctcagcttgctcagtacaactacattctggtcgtgggtgaaacagaagctgctacaggacaggttagactgccgatccttatcttgagtctctcgagtaatttaattttgattttaagaccatttgtatgttgcactttcacattttcaggtgagtgttcgtgtgagagacaatgcagcccactccgtgaagagcattgaggatttactggaagaattcaaggccaagactgccgaatttgtatgagatccgactcatgaaattcaagttctgatatgatgtgtttttttttttgttgcaaattagggtcgacccagatcgta

SEQ ID NO: 144152 - DNA, 2452 bp, Arabidopsis thaliana landsberg
atgatgctggatctaggtccattctcagatgagaagttcgatgcgaagcgatgggttaactcgtcgtgccaggcgcgtcacccacaggattcactcgagaaacatcttgtggatctggaaatgaagcttcagattgcctccgaggagatcggagcttctcttgaagagcagagcggtggtgctctcctccgtgttcctcgtgccacacgagacgtgttacgtctccgtgatgatgctgtgtctctgcgtggttctgttgctggaatcctccagaagctcaagaaggtacgcatttgtgctgattcctgagattttgtttggatctcttctcgaaaattagattatatcaaattcctgaaacttgtgctcttatcgaattcggtactctgcaggcagagggttcttcaccagattgtatagctgcgcttgctagagtggacaatgtcaaacagagaatggaggctgcctacaaaacactacaggttagtattcatagtgattttgtgatccattatgtggacacttgggggtagatctgcaattgattctcttctttttggtatatgtacaggatgctgcagggttaactcagttaagctcgacggttgaggatgtatttgctagtggcgatcttcctcgtgctgcagaaactcttgctagcatgcgaaattgcctgtctgctgttggagaggtagtttaatgtcagcttcagtactctgaggatttaagtctttttccgtcaccacttaaagtccaatttttgtcaacaggttgcagaatttgctaatgtaagaaagcaactagaggtattggaagataggctggaggcgatggtgcagccacgtcttactgatgcattaacatatcacaaggttggaacctgtatatctagagaacccaactactttaggttgtaatgtctctgttgccattattggactgaaaagcctttccccaaatttggcaggttgatgtcgcccaagatttgcgagtaattctcatccggattgggagattcaagtctctggagttgcaatattcaaaagtccgtctaaagccgattaaacaactctgggaagattttgacacaaagcaaagggcaaacaagcttgccaatgagagaagtgaaagtcaaaggttgtctagcggcgatgagtttcagtcgacatcatctcagacatcatttgccagttggctgacaagcttttacgacgagttgctactctatcttgagcaagagtggaaatggtaaatgttttacttttatttacagtaaactgtatatattttccgggcccttccagtgacagtatgtcagatctttaggtgattgcagctttaagtatcaatcactgttgtacgtttttgctttcatgattgtttaggtgtatggttgccttccctgatgactacatgactctcgtcccaaagctgttggttgagaccatgggagtactgggggctagttttgtttctcgtcttaaccttgcaactggagatgctgttcctgaaacaaaagcactcgccaaaggttagatatgatgtcagtacagtttgattattaggtttccttcttagtctagtctttttacccagctgaattgggattgcgttgcttctttagtggttctactctaccatcctcatgtttgggtagatagatgtaagaagagtatcacttttttctgcctttacatgagctaaagtttttggctgttcttgttaagtttgtaatttttgtgcatagtggccgatgtcatgaatctgtcaatatgcaagagagacttgcaggaagtttgaacaacaacttatttgttacatttttcatttagtgactggaaattttccagacaatgcacgattatcttcaattgacttatatctgtattttgtgtatttaggagaatactgacaattctgatgttttccttgaacaggtgtgatggatctattatctggagacttgcccaagggtattaatattcagaccaagcatcttgaggctctgattgaactgcacaacgtaactggttcctttgcaagaaatattcagcacctgtttgcggaatctgaacttaggatcttaatagatacgctgaaggccgtgtactcaccctttgaatcgtttaagcaaaagtaagttttcatgttgtgtacttctcttcccccatgtcttgtatccatttctagtatttatggattgtcccatttttttgatgaaacttttttgggtcgtggttcttcaaggctgtttgtgacataaggtttgatcatgctttaggtatgggaagatggaacgtgctattttatcctctgagattgcagtggtggatctgagaggggctgttactcgtggtgttggggctcaaggaattgaactcagtgaaacagtgcgtaggatggaagagtctattccccaagttgttgttcttcttgaagctgcagttgaaag

SEQ ID NO: 144153 - DNA, 843 bp, Arabidopsis thaliana landsberg
aggcatgtgcaatcagtgcctgtggaaactttgcagtagtcggaacagctggtggatggattgagagattcaacctccaatctggaatcagccggggtagttacttcgatatgtcagagaaaagaaggtacgcccatgatggagaagttattggagttgcttgcgactccacaaacacactcatgattagtgcaggatatcatggggacttaaaggtttggaatgttttcttgttctttctttaagttattaattacttagttgatatggttaccttcaacattaactctagtttatgagtcaaatagactctaatatttcatttgtgtaatacaggtttgggatttcaaaaagcgggaattaaagtcccagtgggatgtcggatgttcgttggttaaaattgtctaccaccgtgtaaatggtaaattttcctaatctaaccctacattttcacttgtacgatctcacaaatgtatcattttccgtcattttctcctagggtaccaccgtattgactctgactttgctaatttcttatcaattggtaggtcttttggctacagtggcggatgattttgttatccgtttatatgatgttgtgacactaaagatggttcgtgaatttagaggtcatacagaccgtataacggatttgtgctttagtgaggatggcaaatgggtcatctcatctagcatggatggaagtcttagaatatgggatgtcatattggctaagcagattgatggtgtgcatgtcgatgtgccaataacagcattgtctttatcaccaaatatggacgttttggcaactgcccactctgatcagaacggggtctacttgtg

SEQ ID NO: 144154 - DNA, 225 bp, Arabidopsis thaliana landsberg
taaatggcagatcaaaatccaagaatcatcgtcgagcaaaacccatctcaagctcgtcttgacgaactaaagttcaagtcatggcccaagtaagatcgactcttgtttttaatccttacttgtgggtgagagatccatttggtaaagttgcatgagatagatttagaaaattgagttttggttttctttgttgttcaaggtggggatgttcaccagggaagtact

SEQ ID NO: 144155 - DNA, 2792 bp, Arabidopsis thaliana landsberg
gtgggcttcaatagccttgacaactgttcttatccgtggagttacaatacctattcttttgaatcaactaaaggctacttacaaactcaatgtcagtttttagatttttgttctctgattgcttttttcagtcactaggatttgcctcttttccatttgtgatttatctatcatgttcttgcaggttctgaggccacaactggaggagttaagacaagagatgagcactaaggtacaatctgtttctgcgccttctcttacttcatctttgtgtgcagaagagcgtttgtgagtttgacactgttcaaggccgtgaaaatgccttctggataaatataaagataaactcagtttgtcatagttagtaattggatgattccttcagggttttctaactatcacttgtgaactataatcttgattgagtagctttctcgagttttctgtttggttaggaattgtcgataaagttccaactagcgtttctagagtgtcgtggttaagaccttttgcatgtgttataatattttttaggctcaggatcctgaagccatggcagaaggtcaaagacggatgcaattattgtttaaagagtaagtccacttttatggatgactggtggagatgatttatctcttcaaattaaacgtactactagttcctcatccactgatatgcttctattgtttcgtggactggcttagacatggagtaactccatttacccccctcaaaggacttattattcaaggtcccatcttcatcagctttttctttgcggtaagatgtttatacgtatatactcaagtcttttactgtttctgattattattgtctatgtgttcactgatgtttgtctacagatcaggaatatggccgagaaagtcccatcatttaaaaccgggggaactctttggtttactgatctgaccaccacagataccacttatatcttgccactcctcactgcagtgactttcttgattatggtagaggtaagagcttatactttcttgttggcctattcatgactaacttttggtagttggttatatttcatgactaatttatctaacccaagtcttgtttctcttttcacatagtcaaacatgcaggaaggtcttgaaggcaatccagtagctggaactatgaagaaattctcaagaatcattgccttcctttctattccagttttgattggcattgaaaaggtaaagcctaatgttcctctattgactttttgatgttcataagcattggaaacgtaagaaaaatgacattttgcttaccacaaacgaatgattttttgtctgcaggcattgttttgttactggcttacttccaacctatttactcttgtgtatggattaagtaagtcccctgaacattgttcttactctttgagacgtgagttttgcaaatcctgaagagttttttttatttgtatcttttgcttgtgtatatatgcagcattaagacgtcctgatgtgaggaagctcttgaatctcccagatgttgtcaactcttctactaggcagccatcaccgtcttcgcctttgccattttcctttgccgagccaaaagaccaaagtgttgttgctcaagaaaaacctcctatgtcctccgagtcatcttcaagtgttccagatagaagaatctcacggagttcagttctgaatcagagaatcagaactctggagagacaactcaaggaccgaaagatcaagaagtgagagattcttttatgtcagtgtttttttgctaaaactagccgatactgaaaaagaaccaagtatcctcgggaaattaagattttgagttaataggaaaaatttcagttgaacctttgcattgaaatgaattagcttaattttaacttgaagatgaatgataaaagtaaattttcccatgatggtcgttttagattttatactaatacagaaaaaagaatactatatatttatataccaaagaaaaaaaatagatgtatatttgtatacctttttcttttgacgatcagatatttgtttacttagaaacgtatatatatcgataacagaacttagggcaaaactgagaacagagtaaaaccctaaccagatatacaagttatgacagagctagaaaaacaaacaagttgatgaattcgttgaatttggatgtattggaaattatactagcgaggttaccgataaagagcatcacaacttgcaacttggtttgcaaggaatggaaatcaatcgtagaatctgagtttctccgggagcttttcctttctcatcatcaaaactctcattcttcgtggtcgctcatatgcgccgaatatcaaaactatccaagtggttgtatcacatgatttctatgctgaatctgatctatgccaagtcttagattttcccgacttggataacaaagcggatttcagaagaccttgcacaagttctcaagggtttcttatgtatatgaacataagtctagagcataagttaagtatatggaggctagagagcgcggaatggaaattagtagctcaaatatctccaatgaccgctttcgattacattccgctggcagtaaacccttttgattctaatacagtatacgtgcagaggaagatgcacccctgtttggcctctgctaacttgcacaatggcaagtttggggaccatagcagcgacaatggcactctgagttttgctggcgagtgggactccgcggttaaacgtttatatgaatattctacctttgctctcccgcgttggctctatcggatcccttcgccactttcttga

SEQ ID NO: 144156 - DNA, 909 bp, Arabidopsis thaliana landsberg
ctgagatttcgtatttgaggaagatagcttgtctctatctgccccacaaacacctctctttgttggactctctttttctttcttcttcccttagtctattttaactcagaaacctctgtttttttttgttagagagaaaggtaagaaatgggtgttgatttgaggcaagtagttgctggtattctcaccattaccatgtttgtgatgcttggacagatgcttcatagagattactttgattctcttcaggtaatcttctttgccgacacttttttcactcttaatgtgatactcatttcagcttagttcagataggttctgtgttgattcttatcttagatgccttttgaagttagatctaattcaaagttagaaaatttagttgttctgtgaaatttacttgatcaaaacaagaccttccatttttggatcataagttggattggacattgatcataagaaacccaaattagactcaactgtttttttctgcggatctttaggacataattgatttcatctcgtttggtgtaaactaatagtgaaacttctgtagccaaaactcaaaatcttactctaaatctttgtcattttgggtatttttgtacaggagaaagctcagggagatgcacaagatattgaatttgaaggatctaaagtctctgtgaaagatggtcttgtcggaaccgttgaaggcagtaaaggactttggatggaagataacactgatcttactccttgttggccaacattactatctggtatgtgtctttcttattttctttgcatcatttattttggacttttttactaaggacttgattgttgcagatgacgctgtatcatcgaaagggtatgttacattctcacttaccaatggtcctgagtaccatatctctcaggtatgct

SEQ ID NO: 144157 - DNA, 596 bp, Arabidopsis thaliana landsberg
ctgctcttagaaagaggagctgatatggaagtgaaagatgaagacgaagcaattcctctacatgatgcttgtgctggaggtaaagtttgtcatggtcctaccattcttttggtaattctgtctcacggcatggtcacattctgtggcttattgttctttctctttaacttgggctcgcaggatacttggaaatagtacagcttctttttagccgagctagtagtcctgaatgtgtgaagagaatgattgaaacagcagatatagaaggtgatactgtaagtattctcaatcttgaattgcctcattccctctagctcttgctctctataatgtaattcatcccaaagtttttcttgttcacagcctctgcatcacgcagcaagaggtgaacatgttgacgtggttaggtttttgctgggttccggggcttcaccaacgacacaaaactcctatgggaaggtgaaaaaaatcaattgaaagcaatttctatctttggcttttgaagtatggttagcgataataacaaggttgtgataatgcagacaccaggtgaattagctgatttgaacactgatgctaagaggatactcgaagaa

SEQ ID NO: 144158 - DNA, 3310 bp, Arabidopsis thaliana landsberg
caacaacaattacaacagcaacaacaacaacacaagaacaaccatcaagacgacgatgaccaccaccacaacaacaatagatccggctcgaaaaaccctaattctctcaatcaccgatccaaacgccggaaccctaattcaaacgacggcgattccccttggatcaaagacgaaggtgaagacaacgacgatgacgagcggcgagagaagaaacataagcttttacatggattgaactctcactctcatcgacattctcctaattctcaatccgatctgaatctcgaccaaactccagaaccgtcctttaatagacgcaacctctccgccgccgcctccggatctgattatcatacggtagcaaattcaatccctttttctgatccaatccctaaattgaattttgattatcagaaattaggtttcaaataatttcgcgcgtctgttatcttcttcttctctgatttgagtgagtgggaggattgagtttgactgagtcattccttgtttttaattggtgggaatgagaattcataattctgctttttctctctgtgtaaattaaattttccctttttttgtcttcagcttaagaaaattcttttgtgtgtgtttatcgctttaatataatattgattttgtctgctaattaaaattgttaacttacctctgaaatataagatactgaaaacaagttccaattttgtctttgctttactgcttaaacatgaagataaaacatgaacacatgtgtactttgttttctctgtgaatctacgaaagctttacattattaatggatatactttggagttgatgatgatgatctgttggttaatactattgcagggagaaaaggcttcgaaagcgacagacattcttcttcaaagtatatatcttttttcttgtttttttgttttgaagttatgaaaaggcagaaacttgggatttgttttgtggtaattaattaaatagatttgggtattttaacttgtggacaggagggtcacttgtggagtctacacctttgccagacaaaaagttgttgttcttcattcttgatagagttcaaaagtatgtcaatttttatggcttctgacatatcttccttctccatgtaccatgttcttctatttttgattgattgttgttttactatacttgcaggaaggatacttatggagtgtactctgatccagctgatccagaggaggtgaagttttctttatttgtttaagcttgtttgatgttaaagtatgttgttttgccttttatcttatctgtgaatgttttgtttacagcttcctgattattatgagattatcaagaatccgatggatttcaccacattgcggaagaaattagaatccggggcatacaccaccttagaacaatttgaggcaagtcttgtaattgaatccctctatacatttctgcgctttgctttagctaaaatggagtgttcacctttcatagttttggttcttcatattgttaagtcttgttcaagagtttctctggtagtaacaacatcgtgtttgcctacaagcgtgtaaggttttcttagttttcctagccacaatgtgttaattctaccatgagaaggtgcagatatactgttaaaagtgaaagccttgtggggtctgaattgtttcgttttgttgcagcaagacgtatttttaatatgtacgaatgcgatggagtacaattcagcagatacagtatactaccgacaggtttgtcttggcttatataaacttgctattttacttccttttgttataatccattctctgatagtatatctatggcatgacaggcaagagctatgcttgagttggcgaaaaaggactttggaaatttgagacaagaaagtgatggagaagaaccagtgtcactgtcacaacagccgaaagtagtcaaaagaggccgtcctccaggctcaggccttaagaaacagcttgagcaatctttgattgatcgcacgacttctgatatttctgctgatgcagcagcattcacttatgctggagatagctctagattatccggttcttacaatctaagaaaaaatcctccttcatatggattccgtcatgcagaaacttcggttagaatcaaccataatagcgagaaccaaagtggcttgttgatagattgggagaaggagtttccacgtaaagatctacttttctaatactaccttcttcagaccattataccaaatacgtttttgttgacataaaccattttgtgtagcttctgttgtgaaggctgtcaataaatacgggatgaaaaatgtcgacgagaacaggcgagatacctacaaccagaactctgcttccttgcaagattcttcgatttttacactgcttgatgataatttaaaacaattaactccagtacgtgcttagcaacttaaaagttaaaatatttctccttttgttctaagcaacaaagaatctgaccattgtttcgttattttaccaggttggactgaaagctgaatatgggtatgctaggagtctagcacggtatgcagcaaatattggtcctgttgcttgtacatttgccaatgtaaggattgaaaaactgttaccaactggaaccgaatttggtcccgggtgggttggagagaaccctgagaatcctcctcaacagcaaaacttaatgtcgggaaagcaaaagtgttcgaatgactatgcatctgatgatcatcatcagtcaagtagaatcatgtctccatcaacctctgtctcaagctccatcataggaaacatacattcttcccatgaaagcaaagagtctgttcaggtattgaatcaagaaaccgagataaatggtctagtccgtggttccagcggatttaaccataaaccaaaccagatgctggaaacagctggctcgcagcaaggcaacataaaacaggaatttcagcggttgccaccagatctcaatgctaggctttcctcaccaaactcaccaggctctaaccaccaggcaggttcatcgcagcatccggatttggcgttacaactctaagtaattcctactaatattgaaagccttaccgatatatgagggagaagaagaggcaaaggcatgtgattcttgctacaaggttgaatatatagggaaagtcttatgtacagattgttgcaattttctgatttttttagggtaaaaagaaaaagaaaactgatcgataagagtactctcacaagatgtatgactgtaaaaaaatttgtacaatttcctagtccatcaaactagagtgtaatgaatgtactcgggattgtatatcatgtac

SEQ ID NO: 144159 - DNA, 1562 bp, Arabidopsis thaliana landsberg
tttgtttctctatcaatagtagcaatgtcgctggttcgaacagtgacgatcgttctttttataatcgcgtttctgcaaaacgctgcggctcagaaaagacagcaaagtattgttaagtctcgcggtgcggttgcgacagatgatggacggtgttctgttatcgggatgcgtgttcttcgtgaaggaggaaacgcgattgatgcgtctgtggctgctgctctgtgtttgggcgttgtaagtcccgcgtctagcggtataggcggtggagcgtttacagtggttaagatagctggtgggaaagaaattgcttatgattctagagaaaccgctcctctaagagccactgaggtaaaacgcgttttagtaataatgtctttctttatcctctgatcaaatatgcgttttgtaataagcgttttcgttaaaagtctttgtgaatagtacacagtcttggttttttctcatgagcttaaaataacgttttccttatacgtttttgaatcaaaggcattatttattggttgtttcacttgatgcagaatatgtatggaggtaatgttgacctaaagaagaaaggagccttatcagtaggcgttcccggggaagtcgcaggtctattcacggcttggaaacaacatgggaagctaccgtggaagcggttagtgactcctgcagagaaacttgcagagggattcaagatttccaagtatctttatatgcagatgaacgcgactagaagcgatatcttagcagacaaaggtctctctgacctatttgtttcaaatggagagctcaagaaaccagggacgatttgccataacccaaaattggctttaaccttgaagctaattggagagtacggtccaaaagcattttacaatggcacagttggggttaacctagcgagagatatcaaaaaatctggaggaataataactttgaaagatctgcaaagttatagagttaagattaaagaaccgttgtctgcagacattcttggatatagagtccttggtatgcctcctccttcatctggtggcgctgcaatgatgcttgtaagttcggttttttcgtgacagagtttcacatttgatcaaacctaagtttcaaaatatttatacggagtttaatttcttgtgttgcaggttttgaacattctttctcaatatgggattccatcaggtgtttcaggccctctcggtgttcatcgactaatcgaggctctgaaacatgcattcgcagttagaatgaacctcggggatccagatttcactgatgttaccaaggttgtttcggatatgttgtcgccaaagtttgcaaaagacttgaagagcaagataaacgaccaaaaaacttttgatccaaaatattacgggggcatgtaagttctaatatttgttaacacgtagatttcttcttaaattcatgatttatagatctttctatctccaattcataggtggaatcagatcgacgaccacgggacaagtcatttatcgatcatagagcgcgagaggaacgctgtgtcctatgactagtacaataaatggttactttggggc

SEQ ID NO: 144160 - DNA, 1647 bp, Arabidopsis thaliana landsberg
tgctctctggtcaacgtgaccctaacaatcctatttttggtcaaaatgagacttcttcactcagtatgattgatcagcctgatgtattgaaaactaggcatgggggtggggaagagccttctcatgcttcaacctcaaattctcaaagatcagatgtccatcaaccagatgctttgcacccagatggtgataagcctagagtaagcagtgttgcaccagatgcctcaacctctggcacagaagatgttagacaacagcatcgaatatctctttccgccaataggacatcgacagataagcttcagaagctggcagagggcgcctctaattgttttcctgttactcagacagaacaagttcgacctttgcttagcttgttggataaagaacccccttcaagacattattctggtcaactggattatgttaagcatatcactggcatagagagacatgaaagtagacttcctcttttgcatggatcaaatgaaaagaaaaacaacggagacctagattttctgatggctgaatttgcaggtaggttttaaagttgtatgtttagcaagagtgttcatatatgatttttttgtaaacaccttatcattacattgtttcatcagaggtctctggacgtggaaaggaaaatggaagtcttgatactacgactagatatcccagtaaaacaatgacaaagaaggttctggctattgaaggagttgcttcaacatctgggattgcatctcagacagcatctggagtactgtcaggttcgggtgttctaaacgctagacctggaagtgccacatcatctggtttacttgcccatatggtctctacgctgagtgcagatgttgcaagggaatacttggagaaagttgctgacctgcttcttgaatttgctcgagctgatacgacagtaaagtcatatatgtgcagccaaagcttactcagtcgtctttttcagatgttcaaccgtgtagaacctcctattctgttaaaggtacttgcatatactcagaagtttctttatttctctctggccgagcttggatgtttcttctagaggatcttcaggacgcatgcttacaatgcctttcatttccagatactggagtgcacaaatcatttatcaactgatccaaattgcttggagaatctgcagcgtgcagatgcaattaagcatttgatccccaaccttgagcttaaggatgggcatcttgtttatcagatccatcatgaggttaccttcttgactttcatatagatatcattggcttgttggttacaacctcttgtccagtatggtatctgaaatattgaagtttaaaatttcttaaacgtttatttatgtaggtgcttagtgcactattcaacctgtgcaagataaacaagaggaggcaggaacaagcggctgaaaacggaatcattccgcatctgatgcttttcattatgtcagattctcctctgaaacagtatgcattgccactactctgcgatatggctcatgcatctcgaaattcaagagaacagttaagggcccacggtggtctggatgtttacctgagtttactcgatgatgaatactggtccgtgatagccttagattcaatcgctgtttgcttggcgcaagacaatgacaaccgcaag

SEQ ID NO: 144161 - DNA, 859 bp, Arabidopsis thaliana landsberg
atgaaagctgagaaacaaggttactttacacatgtaaggaaaaatttgaagaatccataagagctagtgatccttttttctttgatacttgaattaagtttgtgatttgtgttttgatcttaactcactgtccatctgtaggaggagtggagaagaggcctcaaggctttaagagctgatacgatcaataagttgaagaaagcccttccggagcttgagaaagaggttcaaactcttatcctttatattttcattttgattgacatcttctgagtatcagtttagactgaatcattcttatttctgtctcttgaaggtcaggaggccatcaaattttgcagatttctatgcttatgccttctgttattgtttaacaggtaatattaaaatttctgcttctgcatgaggatatatatattgctgttgtttctcttttctacctttcatgtgtatgtgacctatgttttattgttcaatgcagaggaaaaacagaagagcatagacatagagactatatgtcaactcctagagatcgtcatgggatctacatttcgagcccaagttgactactttgttgagtatttaaaggtttggatcactcaaaagtctcacattgtataatttccagaatgttttcacgcaatgttgtcatctcacattggttatatttgtttggcacagatccaaagcgactacaaagtgataaacatggaccaatggatgggtctttaccggttctgtaacgaggtatgtttcctaattcttatagttccccagcttgacagtttcatcaactaactctgattgtttgtaatatttacagataagtttcccggacatggggaactacaatccagag

SEQ ID NO: 144162 - DNA, 1211 bp, Arabidopsis thaliana landsberg
  unsure (1)..(1211): unsure at all n locations
ctaagtttctgagaaaccgtagcttctatggctcctctcaatctctcgcctctcatcggttcgcaatcattcccgatcagggtcactcttgttctgactctgcacacaaggtaattttaacattttcacttgtgcctatgtagcgagaaaatattcgattagggtttttctgataattgagtgttgtggagaaattgtttttttttaaattactctgtagcagatgtaagatttatgatctgtgctaattatctcggtttttgtctaatcattaccatggagattgtgtttattcaataaaggtgtcgtttttattttgcccatctattatttagggagttggttggaattgaaaattttccctttttgtttgtgatgtaattttgtaagacattgtggaaaataatggagtaatcagccaaaactagtgtttctctttctacattttgccatggattatcatgggtcctatttggatgcatcaaactgttttatctgtgtgtcagagagagaagaagaaaagagttgtgagagatcagtttattttaaaatcttatgtgttataaagaattggtgacctaaccaatgtgttattctttgtgatgttttagtagggttacgtttgcagaacaacttattcattgaaatctccggtttttggtggatttagtcatcaactctatcaccagagtagctccttggttgaggttcgtacttagctcactatcatcctctattgttaaactttcacatatacttcaattttgttggacattgcttcagttgtagaagaaaaaactgtcaaaccccaactttaaattttctcactttttgtcactgaacttgttgagatggtcattgtttttttaactttgatttattgctgtaacttcttttcttttccgactgctganagagtaagattgtcctttcctaggaggagcttgacccattttcgcttgttgccgatgagctgtcacttcttagtaataagttgagagagatggtacttgccgaggtgagtggccttttttcattcattagtactcattgtgtgcacaatggtgtggtgaaagcaaattcgctactgatgttctgaagctaatctctattttttttctatattctgctgtttaggttccaaagcttgcctctgctgctgagtacttcttcaaaaggggtgtgcaaggaaaacagtttcgttcaactgt

SEQ ID NO: 144163 - DNA, 543 bp, Arabidopsis thaliana landsberg
  unsure (1)..(543): unsure at all n locations
atgggcctttgtctaagcatccggtaagatcccttaccagaccctcttgtcagatcgaatttttggttgtaaacgggagaatgcaatcccttactgtattttgctgtaannnnnnnnnnnnnnnnnnnnnnnnnnnnnnnnnnnnnnntcaagatatggaagctcttcgaggagagcaattccgtcaagctctcgaccaagttccgcaggtggaccaagcgatagtcgatcctctagccgtctggtgacatcaactggaggagtcggaacagtaagtaaccgcgcatcaacaagccagagaatccaagcaggaaacgaatccaggacgtcgtctttttcgcgtgctgctagaaacactcgagaagatccattaaggaggagcttagagcttctcactctcagaaaatgaaacctgacaaacaagaaagtcattattatacgtacaatccaaaagaacaaacagacagataatcgtaagagaatctgcgtaaagatacattacaatgttccatatatactttatatagtttattttgtatatgt

SEQ ID NO: 144164 - DNA, 317 bp, Arabidopsis thaliana landsberg
agcaaagcccttcttgaaaggggtcatatatggcgggtggtatcggaaaatggcaggatttttctcgttaggacacggcggaggaggaaacactccagacaaccacagaacaaacactaataatccttcttcatcgggaacagaatcttggctttggtgcagaaaccctaactctaacgctgacggtggagaagctggtccttcttacaaaggaacccttgagctatggcaacacccaaacaatcaagaaatcgttttccagcagcagcagcaacagcaacaaaggctggatctttacacttccgctgcgggtttag

SEQ ID NO: 144165 - DNA, 522 bp, Arabidopsis thaliana landsberg
gagtgcgtgtgtagcacggtgcaggctttcgaggaggccgaggctgtgtcacagagcgtgcgggacttgctgttacaggtgcaactgtgtgcctccgggtacgtacggaaactacgacaagtgccagtgctacgctagcctcaccacccacggtggacgccgcaagtgcccataagaagaaacaaagctcttaattgctgcggataatgggacgatgtcgttttgttagtatttactttggcgtatatatgtggatcgaataataaacgagaacgtacgttgtcgttgtgagtgtgagtactgtattattaatggttctatttgttgtaacttgcaagttttcttgttttgaatttgtttttttcatatttgtatatcgattcgtgcattattgtattatttcaatttgtaataagattatgttacctttgagtggttgtttatcatacttttgtttttttctatggtaagaggttttggaaaagtatcgagaatgatatataaagtaattttgatatcgac

SEQ ID NO: 144166 - DNA, 2440 bp, Arabidopsis thaliana landsberg; identical to SEQ ID NO: 22114

SEQ ID NO: 144167 - DNA, 1443 bp, Arabidopsis thaliana landsberg; identical to SEQ ID NO: 5623

SEQ ID NO: 144168 - DNA, 1442 bp, Arabidopsis thaliana landsberg
gtggctgtggctctctcacatgctgcaattttggaagaatccatgcacgctcgtgaccagcttatggagcagaattttgctttagacaaggctcgtcaagaggctgagatggcagtacatgctcgaaatgatttcctagctgttatgaaccacgagatgaggacaccgatgcatgccatcatctctctttcttctcttctccttgagactgagctgtctccagagcaaagagttatgatcgagacaatactgaaaagcagcaatcttgtggctacactaatcagcgacgttctggatctttcgagattggaagatgggagcttactcttggaaaatgaaccattcagtctacaagcgatctttgaagaggtaactaaatccccctgattaaccagtgaagtccattatatatgtcttacatgaataacatgggcgctttgaatctgcaggtcatctctttgataaagccaatcgcatcagtgaagaaactatcaacgaatctgattctgtctgcagacttaccaacttatgctattggtgatgagaaacgtctgatgcaaacaattcttaacatcatgggcaacgctgtgaaatttactaaggaaggctacatctccataatagcctctatcatgaaacccgagtccttacaagaattaccatctccagaattttttccagttctcagtgacagtcacttctacctatgtgtgcaggttagacccaatctacaaattactaaactacaaagttaagcttcttactgtgttcttactgttataatcatggtgcaggtgaaggacacagggtgtggaattcacacacaagacattcctttgctctttaccaaatttgtacagcctcggaccggaactcagaggaaccattccggtggaggactcgggctagctctctgtaaacggtaacaacccaaaagtatatataagttataagcagatggtgttacaaatagctaaaaggtaagtttctgttgatggatgtctctggttaggtttgtcgggctaatgggaggatacatgtggatagaaagtgaaggcctagagaaaggctgcacagcttcgttcatcatcaggcttggtatctgcaacggtccaagcagtagcagtggttcaatggcgctacatcttgcagctaaatcacaaaccagaccgtggaactggtgatacattacgttggaaagacttgtattgaggtgagactttttaactacacagcagcaagagaaagaagaaaatacatgaccggacggtgtgatctaacttattggattttgttggatgtaatatgtaaaataaaaatcctatatacggtgagaggtaccttatctggtctcactatatgttattgaacattactttagagaatatgttttggaattcactactaaataaacgatttaaatctttacgaatagagcaaca

SEQ ID NO: 144169 - DNA, 1973 bp, Arabidopsis thaliana landsberg
ctattgacagagactgaacaaggtgttgctcttgcgatcttgcggggagttcttgattttaagagagacccttggcctcagatatcagagagtgccaagagccttgtgaagcagatgttggatcctgatccgactaagcggttaactgctcagcaagtgttaggtgaagttcttgtgtttctgttttctttaatggtcgtagttaccttaatccactctattactaatgattttctttttctcacctttcagctcacccatggatacagaatgcaaagaaagctcccaatgttcctttaggagatatagtcagatctaggttgaagcagttctctatgatgaacagattcaaaaagaaagttcttcgtgtaagtgttttttttttgccttttacttttctgctgaagtttgtagagagtctgttgtgtgtgtctatatttggttttgatcattatcatccctgttaatgcttccaggtaattgcggagcacttgtctattcaagaggttgaagtgataaagaacatgttctcactgatggatgatgacaaggatggtaaaataacttacccggaactcaaagctgggcttcagaaggtcggttcacaacttggtgaaccagagatcaaaatgttgatggaagtggtaatttaagcattgcccttatctgattaaagaccaattcagtgttcttctctgataaacatagctgaaatctgtatggctttgacgcgcacgcggatgtcgatggaaatgggtttctggattatggagagtttgtagctgtgataattcacttgcagaagatagagaatgatgaacttttcaaactagcttttatgtttttcgacaaagatggaagtacatacattgaacttgatgagctacgggaagctttagcggatgagttaggcgagccagacgccagtgttctaagcgacatcatgcgtgaagttgacactgacaaggttctttcaaatatccaaaaaaatcctcctttaaggcctaacaataaagcttgtcaagagaaaagatatatccctctgcttctgagtcggattgttgggcttgtttgctttttacaggacggacgtataaactatgatgagtttgtgacgatgatgaaagctggaactgactggagaaaggcatcgagacaatattcaagagagaggttcaaaagcttaagcattaacttgatgaaagatgggtcattgcatctccatgacgctctcactggacaaactgttcctgtttaaatttattcgttatcaccaaaaacagagcaatgctccgttttttccccatttcataaattgggaattttccgggcttgttctttgagggatgggaattttacggaagctatggttctttacatatataaacattttacattgtattttgtatgtaatgttttgttcaaaggttgtatttttattgtctcaaagcccctaaaccaaagagtcaaaggaaagatctttattacactgacaccttatcaaactcagcagaagtcttgtccatgtccttgtccttggccacaacatctttgtaacggtaccaatgtgagaccaacaagaaataggccaagtttagagtcatcataccagcaaccaagaagtagaaatactccaatcttcccttgtttaatcttccggaagccaacttcctcctgaaaatccctctgtggtatcgtgtaccgccgataacaaaaaggtgctgaggtaactcgccaatccgattccacaataatacagagaaccagcaaaacttcgcatgttctctggaaactgtttgtagtaaaactccatttgtccaactccagcgagggcgtccgcgatacccattagcactagctgaggaatcaaccacataccggacatcgaagagattgcgccttttcttggggccaaccctagcgtcggttttgtgagagctacctttcttctgtattgttctacaattgcagac

SEQ ID NO: 144170 - DNA, 744 bp, Arabidopsis thaliana landsberg
gccttcaactgtagtgtccctaaactctacgcctacgacccctataagcccattcctaggattctctgatttcaccgagagagtacaaaacgagaaacgcaacactacagtgcgtaaacagcaatcgttacccccaattccactggagacaaggacagagaacaacacaaatggtgaatcttccaatccttcagatgttgttccaaagagcggcttaggttgcacacatctctggctacaaagtcgagttcccttagggtaaacatctgataataatatccaatgagcttctggtatgggtttaccattataaattgataacgatattcctaaatgcatcagatgcgttccttcgaaatctacggcgacgatcaagctagagctactccctttgactgatggcataatcactctggatactcttcagatccatgcaaaggagaaaggttagctaaaaaaatctctagtctctcagcaaagagactataaacactttgctgcgtcttctttctttccgtgaaaacatcagtggttccatatgaagaatgcaaatctcgaagctttaatatgttttggagtgaatcataatcataaaatgttagatgctcgtgtttaatgactgaaacaccaatgaacttgtgtgtgtgacaggtcgtagatacattccagagcagtcactgaagataaacgcaacttcaagcatttcctctgggattttctagtcttttacccaatgccactttt

SEQ ID NO: 144171 - DNA, 1046 bp, Arabidopsis thaliana landsberg
agattttaccaattcatgaagctagccgcaagtgtgtatggctaagatccatagttcaccatatacaagaagactgtggtatatatgcagggaaaaagactccaacaattatgtacgaagacaatgcagcatgcatcgcacaactcaaagacggatacatcaaaggcgatagaacaaagcacatcctaccaaaattcttctacacacacgatctacaaaagagcggcgatgtacgagttctacagatccgttcgaatgataatctggctgacttattcaccaaggcgctacctactgctactttcaagaagttagtctatcgtatcggattacgccgtctcaaagatctcgacgaatatactcataagggggagtaattgtatgttgcactctttttcccttaaccatggtttttcccattgggttttcctggtaaggtttttaatgaggcagcatttcaaatactttacgagttatgatactataatggtcatcagggggagtgttatgaataaagatggatgcccattataaggcccatcatctaagcccatcatctagatgtttctagggttttacccttttccttgtactcctatataaagaaccctttatctcaatggaataacacactcatttcctctatctctttctctgtttataacacgttatcagcacgctctaaaaggtagatatagagattcttacatttttttttaagaaccatgtttacttatcgactcatggttcatagtacttattttctattattgaaacaaaacaatatgagccgatcgatgattatagtatagatcggtaaaagcatgttttcaatgattcaataaagaagagaatcatgcttatcatttgtttctataattactatcgcatgattcaatgattctacaaagaaaatcgttaaagaagagaatcatgcttgttaattgttaatttttgtgatttactattacaatattgaatatataaattaccaattttataattatataactaattttgtaactattcatagcccggtggtgggt

SEQ ID NO: 144172 - DNA, 874 bp, Arabidopsis thaliana landsberg
cacaacaacactcacaaattctcttaaagctcacagacgaattctttctatttttaatctttccggcgaacaattctgatctctaataatggcgggtaaaggtgaaggtccagctatcggtatcgatctcggtacaacctactcttgcgtcggtgtttggcaacatgaccgcgtcgaaatcatcgccaacgatcaaggcaaccgtaccactccttcctacgttgctttcactgacagcgagcgtctcatcggggatgctgccaagaatcaagtcgccatgaaccctaccaacaccgtcttcggtaaacatctcacttccttctcatcttacttactatatctgctttgcttcctgcatgtgattaagtttgtgtagatcggtccatagtgattttggtttatgaatcggttattcaattttggttatatcgaaacagagccggtttagtgtgtcaagcagatagaaatctgttttagtttattagtgttctctatgttgttgttaattaggaggaagtaagtattaaacttgttgttgtgttttttttgcagatgctaagcgtctaatcggaagaagatacagtgatccctctgttcaagcggataagagtcactggccttttaaggttgtttccggtccaggtgagaagcctatgattgtggttaaccacaagggagaggagaaacagttctctgctgaggaaatctcgtcgatggttcttattaagatgcgggagattgcagaagctttccttggttctcctgttaagaacgctgtcgttacagttcctgcttatttcaacgactctcagcgtcaagcgactaaggacgctggagttatctctggtctcaacgtgatgcgtatcatcaatga

SEQ ID NO: 144173 - DNA, 871 bp, Arabidopsis thaliana landsberg
ctcttcattttctcaggctccaatgtcgctggacttagctcgttgatcatcgtacaaaaagcttgctcgtagctatcagctccccggagaagaagatggtgcggaaacagtttcaacaggctaaaactggtgagatgtttttctaccatccttttacttgttttcccgatcgaatctcttctttcttctatctttttccccgcattgggatgaaatttatagggatagatccataaaatttatgtcctatattcgcttttatctccgtatatcgtgggtttcgtcaaaggtttcggcttttacttgttggtgtgaccttaagttagcggtctcacataaggtgttcgatgaaatgcctgaacgaaatcttttgagctcatttttgactcggttggtaattgttttggtaattttaggaatagaggcattgaagtcaatggatgctaacaactacttgaagaaggttggattatggcgtgacgatatgttcttttggaaacaagtgggaaaagcattgctatgcacttacacaatctttggtatggcttggatttacaatgaaacgtctcctttaggttggtggacgctgaagccaagaccaaaggaagagagagaattggctcatttgtatgagcggcgtgagtttccttatcctggtgatacagaggctatggaggattttgttgcaaaggggggaatgattggtactgcaattggaccgaaaggaattgttgagtccgaaggtgaggctgataattaccaaaaggaaatggagaagaagaagtttgataaagaggctcagaaactgtggttgagaatgaggaatgaggttattactgaacttcaagagaaagggcataatcttgaataa

SEQ ID NO: 144174 - DNA, 4163 bp, Arabidopsis thaliana landsberg
cacctccactttcccttttgcccctcttttttacagatttcactctctgctctactactctctcctcctcctcctaaagaaagttcttaactctcctgggttcttcaggtttttccttttctggaataaaaagaagaagaaatgggtgttcttgatcatgtctctgaaatgtttgactgctctcatggtcacaagattaaaaagcgcaaacagttgcaggtaccttccctcttccttttcttatcttagcagattcagctgataacttagatcttggtttgcaaaaaaacaaacattataattcgttgaaaagttatgatgaatgagtctagtagaaactagcttcgatggttactaggaaagtttgagtgttacttagtagatctcgtatattatagttccataaatagacatcattagcaagtttataattgtggttttggctggctaatttgtgttacctttcttacttcagatcttttttaatagtatctctgtttcttttatctgaagaagtatatccaaattgttacatgatataagtgggattttatttgaagcagtttttgttttgagttaatgttccttcctaacgccgaccgaatagattcttttaatctgaaatataagttgatacagccatctgttagattttacaccgggatttgtattcttctcgctgtcaggaatactatataaaatcattaatttccggggaaaccaaccacgttaatttttctcactagtcatgatgatatggttaaagtctttcaattgtggacatttactattcttcttagatatttttaaagtaggctaattttgtcgttttgtgtcgactgcttgatgaggatagacggtggagattaaagtgaaaatggactgcgaaggttgcgagcggaaagtgcggcgttctgtcgaaggcatgaagggtgtgtcttctgtgacgttggagcccaaagcccataaagtcactgtagtcggctacgtcgatcccaacaaggtggtggctcgaatgtctcacaggaccggcaagaaagtcgagctctggccatatgtgccctacgacgtggtcgctcatccttacgctgccggtgtctacgacaagaaggcaccctccggttatgtccgaagagtcgacgaccccggagtgtcgcagctggctcgtgctagctccaccgaggtccgctacaccactgcatttagcgacgagaacccggcggcttgtgtggtcatgtgatgtcatatggactactactgtttcaatttgttatggcttaatttaatgtcttgttttgtacattcataccataacggtaggtttcgtgtctttgctttgagttccatggtctgtattccgtgcactttatgattgcaatatgtgtttttccctttcttccaaagacgtttaatgttaataaatatttctacccaaaattaaattattttcatttatggtttgtaattgtgaagaaagcttcaaatgcggatcaagttgtagttaagaaaaccattaaattaaaatagagagagtagttgaaacaagggttccgagcttccctctttaacctaggacatccttaaaacaagggaacaatataatacaagttgtaacatttatgtatcaaagtgttcatcgatgagcaatcaagtagaattaggatgaagtcgagaacacgatacttgatagcgattctacttgtaatttcgctctgttccaaggcaagcagccatgatgatgagaaaaagaagaaaggagtaacatacgacggaacttcattgatcataaatggaaaaagagagctctttttctctggttctgttcattaccctcgaagcacacctgacgtaagcacgtctactctgtttttattattacccaatcaaaaagatgatttcacttcatggatcggattctggttttgttgcagatgtggcccagtatcattgacaaagctagaattgggggacttaacaccatccaaacttatgttttctggaatgtccatgagcctgaacaaggcaaggtatcatcgacttcaattctctcttaagatcattccttcttttttctttttgggtgatttgatcatttgccttaaaatggttcagtatgatttcaaggggagatttgacttggtgaaattcatcaaactaatccacgacaaaggtctctatgtcactctcagactcggaaacctttatccaagccgaatggaaccacgggtacgaaatattccaaccataacaattcctttataagacatgctaacctaattcatatttcacagggttgccgtactggctacgcgaggtcccagatgtttacttccgtacaaataatgaaccttttaaggaacatgcagagaaatatgtgaggaaaatacttgggatgatgaaggaagagaagctgttcgcttcacaaggaggtcccatcatcttgggacaggtacacatatactacacattcatcatccatcttgtgaaagcagaaacattgaaatctctaagattacataaataaatggcagatagagaatgagtacaacgcggttcagctagcctacaaggagaatggagagaagtatataaaatgggcagcaaatttggtggagtcaatgaatctgggaatcccctgggttatgtgcaaacaaaacgatgctcctggcaatctgattaatgcttgtaatggaaggcattgcggagatactttcccaggaccaaacagacacgataagccctccttatggaccgagaattggactactcagtacgctccacacatcaaactctcatgatcaacacaaactacaatcttacgttggtttcttttgttcttaggtttcgagtttttggggatcctccaacacagagaacagccgaagatattgcattctcagtcgctagatacttctctaagaacggatcccatgtcaactactacatggtacttttaaatcatgatttttatatgcgtcatgtttacatagattgagctttgtttctgtacagtaccatggcggaacaaacttcggacgcacgtctgctcatttcgttaccactcgttactatgacgatgcgccacttgacgaatttggtacatccagaacccaaaagttaagccataccagctttgggtcgtaatcacaagttgacggttattttataggtttggagaaagctccaaaatacggtcacctaaaacatgtgcacagagcacttagattgtgcaagaaggcacttttttggggtcaacttcgcgcccagacacttggtcccgataccgaggtaacctaaaccaaaaattatgttatccggtttttgtaaaccggagcttaacgattcaatactggttttgcaggttaggtactacgagcagccagggacaaaagtgtgtgcggctttcttatcgaacaataacacaagagatactaatacgattaaattcaaaggtcaagattacgttttaccgtctcgttctatcagcatcttaccggattgtaaaacagtcgtttacaatactgcacaggtgagtagaaataaccggttcgatttggtttaaagaaaaccataatgtttgatttatccgcattgttctgaaacagattgtagcccaacacagttggagagattttgtcaagtcagagaagacaagcaaaggtctcaaatttgagatgtttagtgaaaatattccttccttacttgacggtgattctttgattccgggggagctttattacttaactaaagacaaaacagattatgcttggtataccacaaggtataacttccttcgcaagcaacattttgtttttggtcttttaagctttatagagaaactttgtaagttgattccattgctaacagcgtaaagattgacgaagatgactttccagaccaaaaaggtctgaagactatactgagagtagcgagtcttggtcacgcactgatcgtttacgttaacggagagtacgcaggtactttaacactaaaattaaggggatataagacacatagaggtttttaactttttgtttgctaattttttggtagggaaagcacatggacgccatgaaatgaagagtttcgagtttgcaaaaccagtgaactttaaaaccggagataatcgcatttcaattttgggtgtactaaccggattacca

SEQ ID NO: 144175 - DNA, 1191 bp, Arabidopsis thaliana landsberg
tgctttggctgcaatggaggaaaactgaaaagagtttgatgatgaagggaagaacaaccaacaacagtgtacagtcgaatcgctctacgaagaatgggaaaagagatcaaaagccacagaagacaaatggtgctaaacgatcttcagagcaagaaagactcaaagctactaaggaggaatctaatgtctcagtagtagtagatgatacaactacacaatcaaagctctctgatgatgatgatcatgcagtgaatgactcttcagagaaaactgagaaggaagagactataaatggcttggcttgtgatgatgaagatgaggaggagaaggaagaaagcaaagaattagatgctatagctcacgagaagacagattctgtatcttctcctgaaacttgcgaaggtgtcaatgttgataaggtagtcgaagtttgggatgatgcttcgaatggtggtctaagcggtggaagtgagaacgaggcaggtgatgtcaaagagaaaaatgagaattttgaggaggatgaagaaatgttgaagcaaatggttgagactttggagacaagagttgagaaacttgaagaagagctaagagaagttgcagcgctcgagatttcgctctattcggttgtaccagaccactctagctcagctcacaagcttcacacacctgctcgaagaatttcaagaatctatattcatgcttgtaaacattggagtcaaggaaaacgagcaactgtcgctagaaactctgtgtctggtctcattttagctgctaaatcttgcggaaatgatgtttcaaggtaacaaaaacacagtttaacattgtgcgtgtagtagcctttaagatcttgatcttctcagctttttcttggttccttatgtttcaggttgaccttctggttatcgaacatcatttctctcagagagatcattttgcaggcttttggtaaaactagtgttcctagtcatttcacagagacctctgcatcaaatgggagtgaacataatgttttagggaaggtaagaaggaagaagaaccaatggactaagcagtcaaatggttttaagcaggttttcgaagattggcaggaatcacaaaccttcactgctgcattagagaaagtcgaattctggattaactctagaaatgttgaatctgtatggtggcaggtaaaattttaagaagggcttt

SEQ ID NO: 144176 - DNA, 1387 bp, Arabidopsis thaliana landsberg
aaactctatcctttcgttttcttgtcagacaaaaactaatactagatgggtaacagtttaggcggcaagaaaacgaccaaagtcatgaagatagacggcgagacttttaaactgaaaactccggtgacggcagaggaggtcttgaaagactttcccggccacgtcttgttagactccgaatctgtcaagcactacggtgcccgagccaaaccacttgaggatgtttttggtttttttctatcaaaactatatgttatgtttcttgttaaactacacgaatcatgtttttgatagacaaagcgtttaatgttgtttggtgtgtagagaaagcagaggttgcagtcgaagcggctttattttgtggtggagccggtgaaagagtgtccaccgagaagggtaagatcaggaattcacgtgagtgcaaaggagaggcttgagagtctcatgctggcccggagatcgtcttccgatctctccatactcaaaccaccaggaggatggacgacggaggaagaagaaggagcggtgaggagggtgaaggtgaggattcccaaagctgagcttgaaaagctcgttaaagaaggagccaccgaagccgaagctacgcagaagatcgctgctctctttatggccaaacagaggcaagaggaggcatatcagaacacacgacaggacgagcccgccaccacggccaccgccaccgccaccaccaccgccacaagaggagtcaaatcccgtttggtgagttccttatatttttctcctccatttgtttgtttttttcgtacaaagtaaataagcaaaaatattttaattacattagagtggcatttagctagtcttgactttaataatattgaaattttttcactttttataggaacttttttgtggtcaaattttgcatgctaacacttttatattgtttcaaagatataggacaaaatttattacacaacttttgattttgtctttcaaataatcatttaaaagtttcattctacaacaacaatggtattgatatgtttagtaatgatgttgcagaaacgagtgagtttcatggcggaaacaggaggagggagcgagatcactgtagcttgaaccaataaacatatgtattagagaatgcttcccaacgtttctgcaaattctatgtacataaatgacgcagaaagtttgagagatagcttattcagatattcatccatgtctccactttattgtactcaagagttttactattattacattgtagaagaagcagtcattttataggcagattcattcgtttgcctctcaccttattgattacatgtttcccggtaaataaaaagaaagtaagtatacgaggaagtctatgttctctatgctcgtttggtcctcttcc

SEQ ID NO: 144177 - DNA, 703 bp, Arabidopsis thaliana landsberg
atctacatttatctcttctcatggaacggaagcttgtggtaatttggttttcacacgcattgagctcaagtttttagcttttgtttgaattgtgtaactacgatgcttttatatgtaattttgaattgatttataggttttgggaatcccgtgggatattgattccgatgggcttaaggattacatgtcaaaatttggagacttggaggattgtattgtcatgaaggtttgcatttgtttttgtcttatttgaatttgagcattgattaagcaacgtcacgtagagctttgatatgtttgatgttttaggatcgatcaactggaagatctcgtggatttggatatgtcactttcgcttcagctgaagatgcaaaggtatatttattagtttcaatgaacgttggatattattgtttgtactggaaaatctgtcttagttgcttgtttcctttgagtacctgtagaatgctttgaaaggtgaacactttttagggaacaggatcttggaagttaaagtggctacaccaaaggttcgttacatggagttgtgtgaattcagtaagacattagtttttttacccgataatctttgttcaaggttattttattcttgccaggaagagatgagacagcctgcaaaaaaagtgacgaggatcttcgttgctcgaatcccttcatcagtctctgaatcagatttccgaag

SEQ ID NO: 144178 - DNA, 3246 bp, Arabidopsis thaliana landsberg
gtcattactgggtatctattggctggatctatcattggaccgggcgggttaagctttgttagtgaaatggtgcaggtagcttacatcagctttagtacttcaaagttcatctttttttgtcttcatatacgtttgtatgttttcatgactactagattgcctggtacaaggacttgatttataagtttttgtgtagcacaggttgaaacagtagctcagtttggtgttatctttctcctttttgctttaggattagaattttctgcagcgaaggtttgcatgtttccactctcttatatttgtctggtttctttgccaaaccgattgaaacttttgagacagttattgtactgtgtggttgcagcttcgtgtggttcgtgcagtagctattccaggaggtcttcttcagatatttttgttcatgtgcttgagtggaataacagcctcggtatgttctaaaagtgtagcaatcgagttaagaatgagttagtaggcatttgtggtatgacatgtatatagagtgcattaggttgacttagctgtttcttcattgcagttatgtggcggtaaactaacagaaggaatattcgtaggcgcgtttctatcaatgtcatcaacagcagtggtatattctaatttcctatgtgtacttcaattaatattttgatcttgttctacactgtttgaatatttccctactctcactgatttgatcttttctttactgtgccagttatattttcctaaagtactctttagacttgattgtcatatgttatccttacctccccatgattcttgtaccaggttttgaaatttttaatggaaagaaatagcataagtgctctacatggccagataactgtgggaactcttattcttcaggtatctctacctgataactctcaaaacaatagcttctctattatcatttttcacacgtttttttggttttcctattattctaaaactgcatttccttttgatccgaaatatgattcaaatccaattccaataggtagtatgttgcatgcagcaagtacttttgttaaaactttaatttactgtttcatatatcaccaggattgtgctgtgggcttgctgtttgctctcctgccagttcttggtggcacatctggtgtccttcaaggagtgttgtccatggctaaatcgtatgtatttttctcttccacgaatttctgtgaaactatccacaataccctgcttccattgttcacttgttacaataaaacctagttttttgttacactttctttttgactgggctgtaatatctttccaggttggctattttgattgcgtttttgggagctttgtttgtattgtcccgtacctgggtaccttggtttctaaaacttatgacaagcctttcttctcaggtatagacacatttcttagctgctccagttttggtctttaaattgtatatcaactcaagcgtttttcaatctttgacagactaatgagctctatcagttggccgctgtagcattttgtttacatgtcgcttgggttagtctgatccctttgttcatcttagctattggctgtttgcacatttgtgactctcgaattttcatttcttaaatccagtatcgttttggcttctacagtgtagtgacaagctcggcctaagtctggagatgggttcctttgcggcaggagtgatgatctcaacaactgatctcgctcagcatactcttgaacaggtaagaagtcaagtttgactgtttcgaactagagggtctctactcatattttttggacactctcttatgttgaaagtgtctttcttgcttatatactatcttggtttcctgatgaaatacgtttcctttcgttggcacattgtaccaaagtttatcatataaacctgttctgatcgcttctgtttccttgcaggtggaacccatccgcaatttttttgcagcactgttccttgctagtatcggcatgttgatacatatgcacttcttgtggaaccatgttgacattctgctagcagctgtattactggtgatagtgataaagacggtggtagctgctatcggtgataaagtctttgggcacaataacaaaactgcactacttgtaagaagcgaacccttattttatttttttccttctttctcatcatttgaaatcttcttgtagataagccttacggttttcttgtctgtaggttggtatgtcccttgcacagattggggaatttgcttttgttctgctaagtcgagcatctaatcttcacctaattgaggtaagctataagagacctctatgattattgatgcttagttatattatatgttagcatatatctttgaaaccgtgtgtgaccatatatagatttctcataatttgcttttggtggagcgataagtaacaatgaaggggttttgtgtttatttgcagagcaaattgtacctcctgcttctgggaacaactgctttaagcctggtatggtctatttcctcatcatatttataataagttcatattcaaaaacgaataaacgaatattgacacggacgttgctttatcaatgaataacagtagaattcacatactccagtatcaatattgtataattactaaacaaattaaattatgtaacaggtaacaacaccattgctattcaagttgataccagcagttgtacatttaggagtgctcttacggtggttctctcccgacagctcaaccgaggtaaatacaaatcatcgtcgtgtgtgtctctctcaatgactttggctcaaactcaactatgaactataatcttcatctgtacagattggtttcaaaggagagttgtatcactcagagagtgcaaagcgtatatcactgatgatccaaggttctcttcacgactcttgaagtgttgatggtatgttcacagcataacacacaacatgaagccacatttggtctcaaggtaggcaaaggcaatgaatgggagcttccgaatgtatagatgctttgagatatcagaagagaacccccagaggaacctgtataaaatctctctacacgaagataattacagagacttgtaacttcacttcaattttttgttttgggattcttttttgagtaaaaaggtagaaagaggttatattttagtttgtttactttcttctcatgtgctctgaaacaaaataagaaacatctccaacgtattgtagtgattaccaaccgataaaaagctaaagaatttttgagtta

SEQ ID NO: 144179 - DNA, 941 bp, Arabidopsis thaliana landsberg
atgcctgatagtgttggaaaattgcgtcggatgttgaagtcaaagcatccttatatcgagcgtaatgttgattcggtggtcagtgtcatcaggcaatcaatgcaacattatgcagcatttgagtctgctgctctatctttaaaagatgtgtctcctggaaatgtgagatatctctattgatttagtttctattccctttttgtataattattattgtaagctttcggttgaggtgtataagctagttgaaagccgattagggtattaaaaaccctctaaaactcaacctgcaaagaaaacaagagcctagagttggaataatttactgtcaaagactaattatgaatccaaatttcatatttctgaaacctcaccttatggctcgaattcagagtgcatgtgatacttattggtttcaactgttttcctgtattctccatgtctgtttaaaatgtggccttcttatattgtaggtaatggataagaatattgaacctataagagagaagaaagacctgcacacaggagatgtggcttctccaagtctgaaggaaaattcttcgcagcttgagagtaccagggacctaattatgggtgcagcaaatactaatgaagggagaggtttaggatccggcttgtttggttctgctaaggtgacacctagttgtttcttttggttggtgctctttagtatccatgccgggctctcaaagacatatctgttatttattaggtttctgcggctgttcggatctctaagaaaccaagcagtggtttaggagctttgctgggaaatgcagcctccaagaagaaatctcgaactgatgagaaggtgagtttatatatgtgaaaactctatagttggttttggttgcagaatgattgataaaaatgttttcaggtgaaggaagatgtgaagctccatcagataagatgatctg

SEQ ID NO: 144180 - DNA, 437 bp, Arabidopsis thaliana landsberg
caccacacgtctagaaatgtacgaatagagagtgaagtgaacgacacataataaaaccaaagaatggagatatggttactcatattggcctctctctccggatctctccttctccatctcctcctccgccgccgtaactcctcctcccctccgttacctcctgaccctaacttcttacctttcctcggaaccctccagtggctccgggaaggcttaggtggcctcgaatcctatctccgctctgtccaccaccgtctaggccccatcgtcaccctccgcatcacttcccgccccgccatattcgttgccgatcgttccctaactcacgaggctctcgtcctgaacggcgccgtctatgcggaccgtccaccacctgctgtaattagcaagatagttgacgaacacaacatcagctccgggtcatacggagccacgtg

SEQ ID NO: 144181 - DNA, 953 bp, Arabidopsis thaliana landsberg
cagccagatagagaggatgaatatgcaagaatagaaaatgctgtaggcaaagttatacaatggcaaggcgcacgtgtttttggtgttctcgccatgtctaggtccatcggtaagcattgcttcttttgatgaccagtaatgcacatcacacaaacgtggcttgataatgtaattactcccctacatgaaacattagatcctacgcgtttctttcctcctctggaactatgcaggtgacagatatctgaagccatatgtgatcccagaaccggaagtgacattcatgcctcggtcaagagaagacgagtgtctcatactagccagtgacggtctttgggatgtaatgaacaaccaagaagtctgcgaaatagcaaggagacggatattgatgtggcacaagaagaacggtgcaccgcctctagcagagagaggcaaaggaatagatccagcttgccaagccgcagctgactacctctcaatgcttgctctacaaaaaggaagtaaagacaacatctccatcattgtgattgacttgaaagctcaaagaaagttcaagaccagaacctaaagcttaattacaagcagtacgcttacttacttttttttttactgggggtaagtttcgagttttcgtataatttagatcgttaaggatctaatttcgacaggtttttacatgttaattactcaatattgttagaagggagaaaaaataaagaaaaaaatggaaatgcgggttggggaggagaagtaaagactaaagactgaagattaagaagatgatgcatagctaattataagtacattccttttttctcatggtacttgagttcgtatgtataagaagaaataggcagagaaatgcttttttttttgggggtattgaaatagttaaatatgttgtaatagtttgagagatgtggcaaatgaaattgtaattgaaactatgtcac

SEQ ID NO: 144182 - DNA, 1115 bp, Arabidopsis thaliana landsberg
atgagctgtactgagtgcaagaacaagctgcaagtcagaatctcagctgatgatgtatgttttgagtctgctattacgtcttctcagcttaacatctacataaatcccctgtgggatgtatatatactagttattagatattaaatgcacatggagaggtagtttggttttgaacaaaactatcacttgctaaatacctttactgacgattcattttgcagatcatggaacctccatggaaagcctataatgtgctgaagaagatggattatccgtacgaggtgagcaccacaaagtctatttatcaacccaacagcttgctatgtttactacatctttaccgtcttatgagtcatattttctatttcagcacattgttcacagcatgaaagatcccagcattgcaaatttctggttgatcactttgcctcagattgtgggtgggtttgattatgatgaagatgtcaagaagaaaatatggtggcaatatgaggttagtatctctttctacatatgtagatctccttcagcatgagttatttgccaggcttcacttttgaggttatggtcttctagaggcttaaagcatgcataccgtaaaaggtttagtctacaattacctgatagttgaatcttcttaatcctcatttgggatggttttgctacaccaacatagtttcgattccatatctggataggtttgtgctatggaattggagacatttgtgggatactgatgtactcagggatctgtattgcatagaattttctgttcaataggaactattgttgttgaatacttcagctttaagcatcaatgagagtttaactatttatgtcttctgtgatcaggaatctatgcgatatgatcaacttcgggacttggtggctaaacgcaatcctggctgggaatatttgcaggatgtaagatcgcctatttgtggttttaaagtttaggcaaatctgggggaactacattggaatatgttagctgaagaagtttagcaatcaccatatagttgtcatggttttacaggccttggtctccattgatcctgtccgtgctcgggaagaccccgtcatagtgaagaatgtcccttattacaaggctaaga

SEQ ID NO: 144183 - DNA, 2151 bp, Arabidopsis thaliana landsberg
gggctgcaacttggttttttctggtcaaacgggtccaccaataataacttctgtgccaaatcaaaattctgagctggtatgtaaacttggttccacatggcttgaaatggttctttagaagttctatatgatattcgtggaaggctttaaattactttatagtccagaaatgttactgttaagtttcagaattgattgtctttatttcttaaagtaatgaaagacagaagcagaactaaaaaccaaacctgggatcaattctatttatagtgcatcctctactttcccaaacccccaatggcactaaaccagtccccagatacttgaaacttctcagtacttaatgcttctcttgtttgtaatgatactggtttgactaacttgctgatatggcacctatagttgacgacactcttacagctgcccgtctttaataatcttattccatatgtacttccgttgcgttgaacaggttcttacccctaatgttccggatatcactgttgttacccctgaggacgagcacctcagacatgtgattgatacattggctctctatgttctggatggtgaatgtgcttttgaacaagctatcatggagaggggccgtgggaatccactgttcaagtttatgttcgagcttggctcaaaggagcatacttactacgtctggagactctattccttcgctcaggtacattttgattgccttattactagacatatctttgcattgtcataagctgattgaatatttttgcattgtttagggtgatacacttcaaaggtggagaacagagccgtatatcatgataactggtagtggaaggtattgaaccttgccaactttgaaactaatccgggtgttcggttgggtttacctttgcatatgacatttgttgtattaacactgtctatttgctcttattgcagatggataccgccaccactgcctgtaactaggacccaagagcacgaaaaagagtctgccagcacatatgcggcgggaagaaccagagtaatcttcttgcagtctcacttctgatttatttatttctttttcttttgttagctaagttgttcttttggtgtgccggatacctgacactggtaaatcttacagcgtgcggaagttgagaggactctaaccgatcctcagagggatgagttcgaggacatgttgcgtgctcttactttagaaaggagtcagataaaagaagctatgggtttcgctttagataatgcagatgcagctggagaggtataatacgttctgacttatatatttcggtacattttagtttacagaagatcctatacttcatagatatcatttagaagcttcagcatatgttttaatcctgatttgttatggaaatatctgaagattggttcgtttgtatgcagtagtaaaaaatgcattatacgcctaaagcatatttagaaagataacttgttattagaccaaaatcagatgcttttcctcgctgtttattatattttcagatggttttttctagacaccacaaaatttgaacagatggttaataaaatagatattcatatgcctcttcctacttatatatgtgtacttattccacaggttgttgaagttttaacggagtccctgactctaaaagagacatcaattcctactaaagttgctagactcatgcttgtgtctgatattcttcataatagcagtgcacgtgtcaaaaatgcatctgcataccgaaccaaattcgaagcaactctacctgatataatggaaagcttcaatgatctgtaccgaagcataactggaagaattactgctgaggctctaaaagtactgtcagaaagaaaattgatctttgatggttttcattcccttaaaaatatactgttctaaactctttctgactttttgcaggaacgggttctcaaagtactgcaagtatgggcagattggtttctcttttcagacgcatacatatatggactacgttccacatttctccgatcaggagtctctggtgttacctcatttcattctatctgcggtgatgcacctgaaatagagaacaaaagttacgctgacaatatgagtgatattggaaagatcaatccagatgctgcactggcaataggcaaaggagctgcaaggcaaga

SEQ ID NO: 144184 - DNA, 1300 bp, Arabidopsis thaliana landsberg
gcaatagtaaaactggcggaggaagaaggaaactatctacaagatgcttgggagcatatactgacttgtgtttcacggtttgagcatcttcatctcttgggggaaggagcgcctcctgatgccactttctttgcatttcctcaaacggagtcaggaaactctccactggctaagccaaattccgtacctgcaattaaagaaagagcacctggaaaacttcagtatgctgcatctgctatgataaggggttcctacgatggttctggtgttgctggaaaggcttctaatacagtgacatctgaacagatgaacaacttgatatctaatctaaacttgctagaacaagttggtgacatgagtcggatatttactcgtagtcaaagattgaatagtgaagccataattgactttgttaaagccctctgcaaagtttccatggatgagttacgatctccatctgatccacgggtcttcagcctaacaaagattgtggaaatagcgtaaggatcaatcttttctttacgatatctgttttgtttttgctcactctctcttatttataccctgtttgttgtaatggcaggcactataacatgaaccgcataagacttgtctggtcgagcatctggcatgtgctctctgatttctttgtgactattggctgttctgataacctctccattgcaatttttgcaatggattctttgcgccagctgtctatgaagttcttagagcgggaagagttggcgaattataacttccaaaatgaatttatgaagccttttgttgttgtcatgcgcaaaagtggtgctgttgagatcagggaattgattatacgatgtgtctcacagatggttttatcccgtgttgacaatgtcaagtcgggatggaagagtatgttcatggtatttgatccatcaaacttccagttacgttgatgtctctctaagttcttgctggcagatatacttactaaaatctgtttgctcttgcagattttcacgacagcagcacatgatgcacataaaaatattgcgttcctgacttttgaaatggttgagaagattatccgagactactttccacacatgacggagacagagacaaccaccttcacagactgtgtgaattgccttgttgcggtcaccaattgtaaatttgagaaagatattaaactcccagccattgctttccttcagtattgcgcaagaaaacttgctgaaggctatgttggttcgtcactgaggaggaacccaccattatgtcctcagggtggaaaaattggaaaacaagatatttg

SEQ ID NO: 144185 - DNA, 2174 bp, Arabidopsis thaliana landsberg
tcattttcatatgtttatatcaaacataaatcagacattttgacgtggctgcatacgtgtatacattcattgatgagattgaaagagagtatccatacatttgttacttattacatgcatttatatataactctctacttccctaagaaaacaatatcccacatctctactcatccacattactcaaagatctctattggtacttctcaaattaaatggatcacaaaatcctactaacacctcccaaatctttatacaccaaatgtatcataaccatcatttacgtagtatcaatctctcatctaaatgcccatttcataacttcatgcaaacaaaccccataccctagcgtctgcgaccaccacatgtctaattcacctctcaaacctttagacgaccaaacggatgggttcactttccacgaccttgtggtcagctccaccatggaccaggccgtacaactacaccgccttgtgtcttccgtgaaacagcatcattctctccacaaacacgcaacatcagctttgtttgactgcttggagctctacgaagacactatagaccaactcaaccactctcggagatcgtacggtcaatattcttcgccacatgatagacaaacctcgttaagcgcggccatagctaatcaagacacttgcagaaacggatttagagattttaagttaacctcttcgtattcaaagtatttcccggtacaatttcacaggaatctcactaagtctattagcaactctttggcagttactaaggctgctgctgaggctgaggcggttgccgagaaatatccatcgacggggttcactaaattcagcaaacaaagaagtagtgccggaggtggtagccaccggagattattgttgttttccgacgagaaatttccatcgtggttccctctttccgaccgtaaactactggaagattccaaaactacggcaaaagccgatcttgtggtggctaaggacggttcgggtcactacacaagcattcaacaagcggtaaacgcagctgccaaacttcctcggagaaaccagagacttgtgatatacgttaaagccggcgtttacagagaaaacgtggtaatcaagaaatcgatcaagaacgtgatggttatcggagatggcatcgattctaccatcgtcaccggtaataggaacgttcaagatggcacgacgacgtttaggtccgcaacttttggtaagtcgtccgtgctatatagatagagatttatcaaaattactttctaaaagtgatatttattagaactatatcaattttggcacatacattaaaataaatacttatagccatattatttaaaagtcatcgtctctacaattttctaaaaaaaaactattatattttgttttattactatactatttacgttttagggtaaagaaaaataattcactcgttttttggtgtgtcaacatatataacctttggactaatatttaaccaaacaaattttgttttatccgccaacagctgtttccggcaatggttttatcgcacaaggcataacattcgagaacacggcaggaccggagaaacatcaggcggtggctctccgatcaagttcagacttctccgtcttctacgcctgctctttcaaaggctatcaagacactctctaccttcattctagtcgtcagttcttgagaaactgcaacatctacggcaccgtcgatttcatcttcggagacgcaaccgccatcctccaaaactgtaacatctacgctcgtaagccgatgagcggccagaaaaacacgatcaccgctcaatcacgcaaagaacccgacgagactactggcttcgtcatccagagctctacggtggctactgcgtcggaaacttatttaggacgtccgtggagatcgcattcgaggacggttttcatgaaatgtaatcttggagcgttggtgagtccggcgggatggttgccttggagtggtagttttgctcttagcactctttattacggtgagtatggtaataccggcgccggagcaagtgtctccggtagagttaagtggccaggttatcatgttttaaagacggtgacagaggcggaaaaattcacggtggggaatttcttggacggaaactattggattacggctacgggagtaccggtcaacgatggactttga

SEQ ID NO: 144186 - DNA, 1351 bp, Arabidopsis thaliana landsberg
agggggcatacccatcagtaatccatggttaatataaccatgaagagacgattgcaactgcgtcttttgcaggaaagtacatcattgtaaagaacatgaatgaggtgtgacttttatattgatcaaactttggatatccatagaattttgcaagatgagttactgatggggtaccttattactgagcacaggcaaattacgtttgagattacattctctgtggccaatacgacggatctagctccacaaaagaggagttcatggaggtatgtaagcttattttgctaattctttgtaacattctggtttttttaatctctatgtcggcgttgtagaaattcaaatacgcaatttccaagggttttgatcccgacaatgaccttgtcaaagttggtattgcaaaccaaacaacgatgctaaagggagaaacagaggagataggttagttactctaccgtttttttacatgacaatcgtcttttatccttggaaacaaaaacaccttagtttgagtctcatgccaaaaaccccacaggaagattactcgagacaacaatgatgcgcaagtatggagtggaaaatgtaagcggacatttcatcagcttcaacacaatatgcgacgctactcaagtaaaattcccatacctcaaaaaccatgcatctagacaagttttacacttgaggaagtgtttattcatcaatactataatctcttcaggagcgacaagacgcaatctatgagctagtggaagagaagattgacctcatgctagtggttggcggatggaattcaagtaacacctctcaccttcaggaaatctcagaggcacggggaatcccatcttactggatcgatagtgagaaacggataggacctgggaataaaatagcctataagctccacgtaagcgcatttcaaaactaacttactccttaccaaactgcattcactgattttttctattttacattgatagtatggagaactggtcgagaaggaaaactttctcccaaagggaccaataacaatcggtgtgacatcaggtgcatcaaccccggataaggtatatatatatttgcagctatatttttgtttggttctcttgtttcccacacgaacatgagtgaaaatatttgtgaaaaaattacaggtcgtggaagatgctttggtgaaggtgttcgacattaaacgtgaagagttattgcagctggcttgattcggcattgtgatcgtattcaaatactatttgtcatgtcaagagtgtactaaaatatatgtagttgtatgatttgtctttataacttttgtaagaggttttgtaattcaaagtcaacaacactcgttatctta

SEQ ID NO: 144187 - DNA, 1741 bp, Arabidopsis thaliana landsberg
ggcatatgtttgatgatcactgccttgcaagtggttcgattacctaacatcaaggtattttatctagtttgctgtgtagtaaaatatgattgttctctgttatgcttataatggtctgtactccaggttgcgactgtacttctttgctgcgcatttgtctatgacatttttgggtcttcatatctccattgatatttcacgagagtgttatgattgtggtgagtatctcttacaaagtcgaaaatttatcatttctattgctacactcagtttatccaggttaggcttagaaaggggctagttatgtgatttgtttcgtttctgcaattctgaccaaaaaaatatgctgtttcggaaggtatcattgaagtttgttttgtgacacataaatttgttatggtagggctgtagtatctttgtcgttttgtcaacagcttacacaagtaactttataactcaataactttgaatagtagtcgattgtgataattgagtaattgaagggcccagagaagctcagccagtatattcttatttgaaactcccttctttgtaggttgcccaaggagacagcagcactggggagtccattccgatgctactaaggattcctcggttctttgatccttggggtggttatgacatgattggttttggggacatcctcttccccggtttgctcatttcctttgcttccaggtacttttagtcagtgacattcttagagcttcaaagaacaacttggaattccatctttgcccatactttctccagagtgtctttctcaacgattctctcatccaatcctctcccacgattaatacttgctccactctttgatctcagatatgacaagataaaaaagagggtaatatcaaatgggtacttcctctggttgactatcggctatggaataggtaagtgtccacgcattactaactctgtgaacattaatggcgttacatagcttatacaacagagtaaatgatctcaattattttatattttccgactataaaataacatagcttgctaatcgagatggcttctcacattcacagtcttggaacttaacagaaacattgtttcttcctgttctgttttgtaggtctattactgacatacctaggtctgtatcttatggacggacatggccagccggcactattgtacatcgtaccctgcacactcggtaaaaccagaagcttgagttccctttcctccatctgtttttgaacactcctctccatcgttctcaaacaaaacctgatgtgttttctctctgtaggtttggccgtcatactggggttggtaagaggagagcttaaagaactatggaattacggtatcgaagaatcagagtctcacacaccggaggatccaatgcctgtggcataataacatgattcaacaatattctaatgatgtgttatcaatcaaactgaattagcttttccccaaaacatcgagcatagcttaagcagatttcatatgtgagaggtacacaaaagctgatgatgtaagttctctgcaaagccaaagttaatcggataccaaaagtaattcaagacacatcggaaagtactgtattatatcgtttttttttccttgttttgggggagaagaaagaaaggttctctagtaagactcatgacatgttgtacagagtctatattaaccttctcttgaattcagactcgtttttgtagaatttcaagtataatgcaaattcccttttgtt

SEQ ID NO: 144188 - DNA, 3695 bp, Arabidopsis thaliana landsberg
gtctttctccagatgaactttggaaacgacgtaactcgatcgaaacaatcagtgagctattgcgtctattagacatcaacagggagcattctgaaactgctctcgttccttacacaatgaatagccagattgtactctttggtggtggcgctggagcaattgtgcctgtaactcctgttaaaaaaccacgcccacgaccaaaggttgatctagacgatgagacagacagagtgtggaaactgctattggagaatattaatagcgaaggtgttgacggatcagacgagcagaaggcgaaatggtgggaggaagaacgtaatgtgtttcgaggacgagctgactcatttattgcaaggatgcaccttatacaaggttatacaccacacttgtccttttatgtgtttctgttctaaccacatggtttcaattagtatgtctcagctactgcttcttgttatggtctttggtttctaacaggggatcgacgttttacgccttggaagggatccgtcgtggattctgttgttggagtatttctcactcaaaatgtttcagaccatctctcaaggtacaagctcttacataattctatgtcaaactaaatccaagacagcaaaaagtcacaaaactaacttgctttgatgttttttgctccttgtagttcggctttcatgtcgttggcttcccagttccctgtcccttttgtaccgagcagtaactttgacgctggaacaagctcgatgccttctattcaaataacgtacttggactcagaggaaacgatgtcaagcccacccgatcacaatcacagttctgttactttgaaaaatacacagcctgatgaggagaaggattatgtacctagcaatgaaacctccagaagcagtagtgagattgccatctcagcccatgaatcagttgacaaaaccacggattcaaaggagtatgttgattcagatcgaaaaggctcaagtgtagaggttgataagacggatgagaagtgtcgtgtcctgaacctgtttccatctgaagattctgcacttacatgtcaacattcgatggtgtctgatgctcctcaaaatacagagagagcaggatcaagctcagagatcgacttagaaggagagtatcgtacttcctttatgaagctcctacagggggtacaagtctctctagaagattccaatcaagtatcaccaaatatgtctccgggtgattgtagctcagaaattaagggtttccagtcaatgaaagagcccacaaaatcctctgttgatagtagtgaacctggttgttgctctcagcaagatggggatgttttgagttgtcagaaacctaccttaaaagaaaaagggaaaaaggttttgaaggaggaaaaaaaagcgtttgactgggattgtttaagaagagaagcccaagctagagcaggaattagagaaaaaacaagaagtacaatggacaccgtggattggaaggcaatacgagcagcagatgttaaggaagttgctgaaacaatcaagagtcgcgggatgaaccataaacttgcagaacgtatacaggtaaaaatttagtggctaaatttcgtgataacattcattttaagtatttgactctgaacatgaaaatcatgcagggcttccttgatcgactggtaaatgaccatggaagtatcgatcttgaatggttgagagatgttccaccagataaagcaaagtaagtttgaaagacgaagcattttatttcttctttattaacctatacaaagattactactttggcagttttagtgacttaataatgaattatgtactctcgtatattaaaaaaccctgcagagaatatcttctgagctttaacggattgggactgaaaagtgtggagtgtgtgcggcttctaacactgcaccatcttgcctttccagtaagcaaggatcaaacttttgtttctgtccctataaaaagtgaattatatgatgcatgaacttaatttattgacaggttgatacaaatgttgggcgcatagccgtcagacttggatgggtgccccttcagccgctcccagagtcacttcagttgcatcttctggaaatgtaagcacttttcaaaatggtcctacttggaaattgtaatttgttacttaatacatctgaggtttggtttgtctaggtatcctatgcttgaatctattcaaaagtatctttggccccgtctctgcaaactcgaccaaaaaacattgtaagaatgatgtttatcactaactttttttttttcatgcctcagtctaatacacttattcattagtttaataccctattatctcacaggtatgagttgcactaccagatgattacttttggaaaggtatgtattaaagaaatacatatatacgtatgtcaaaatcagctcacatgatgaggtttgtaatctgcttgattattgtatcaggtcttttgcacaaagagcaaacctaattgcaatgcatgtccgatgaaaggagaatgcagacattttgccagtgcgtttgcaaggtgctacaacatgttctcttaaacctttagtaccactatgactctatgaggaaagtccttgttaaaatataacccagttaaatgagaattggtctgtatctaaacgaagctctgaatcatcattacagaaaatttagtaacattcatttgttttacagtgcaaggcttgctttaccaagtacagagaaaggtatggggacacctgataaaaaccctttgcctctacacctgccagagccattccagagagagcaagggtctgaagtagtacagcactcagaaccagcaaaaaaggtcacatgttgtgaaccaatcatcgaagagcctgcttcaccggagccagaaaccgcagaagtatcaatagctgacatagaggaggcgttttttgaggatccagaagaaattcctaccatcaggctaaacatggatgcatttaccagtaacttgaagaagataatggaacacaacaaggaacttcaagacggaaacatgtccagcgctttagttgcacttactgctgaaactgcttctcttccaatgcctaagctcaagaatatcagccagttaaggacagaacaccgagtgtaagaatccatttttctctgtttttcttcgttcttaggttaaaaatgaaatcagaaacacatttttcaaaattattaaagcttgaacagagtagaatatttaagtgattgaccaagcatgaactcgtaagttggaaagcagacaaacttcccaataattacaggctatgccataacttgtttcttttcccgtatcttgcagttacgaacttccagacgagcatcctcttctagctcaggtatgtgagctaactggataaggacacatgccgtatagagtgctgtctatattgtaaaatctgactagctgtttgtgatttcttgtggcagttggaaaagagagaacctgatgatccatgttcttatttgcttgctatatggacgccaggtaatttaatgatttgcatatcttttaatcatgaaatcaaatcggtatctttaatcgatgtgttatctcaacaggtgagacggctgattctattcaaccgtctgttagtacgtgcatattccaagcaaatggtatgctgtgtgacgaggagacttgtttctcctgcaacagcatcaaggagactagatctcaaatt

SEQ ID NO: 144189 - DNA, 384 bp, Arabidopsis thaliana landsberg
tttgcacagggtaatccagagctagggttggtccaagcaaggtggtcatttgtgaacaaagatgagaatctcctcacgaggctacaaaacataaacttatgtttccacttcgaagtagaacaacaagtgaacggtgtgtttctcaatttcttcggattcaatggaaccgctggagtatggaggatcaaggcattggaagaatccggcggatggctcgagagaaccaccgtggaagatatggatatcgcggttagagcgcatctcaacggctggaagtttatttaccttaatgatgttgaagtcacttgcgagttgccagagtcttatgaagcttacaaaaagcaacaacatcgttggcattccggtcctatgcagctgttccgg

SEQ ID NO: 144190 - DNA, 989 bp, Arabidopsis thaliana landsberg
tcaagcttaaggcccttcgcgaggtcaaaaaccagattatcggaaatcgtacaaaaaagctctcttttctcaaactcggagctattcccgccatagcttctgttctcgctgatgctgacgattctgatgaatgtaataacatcctcgtgcaatctgcggcggctcttggcagtttcgcttgtgggtttgaagccggtgttcaagctgttcttgacgccggcgttttccctcatcttcttcgtcttctcactaatactgacgaaaaggtttgattttgaataaatctattgacttttttttttgttaaagtctaatccttttcccccaaatttgtgtctagattcgaaatgacattagaattacttgtgggtctttgaaaagaaagcttgaacgatttagaattactcttgtctgaatcttattagtttgggacttgtggttaaagttttcacctttttgaattgtctgcatctgaggaattaaagcattggcctttagaattttgtggatcctctcttgtcttgctttcttatggcttccttattgcttctgtttcgtatttatgattcttcttcaggtagtagatgcgggggctcgttcgcttagaatgatatttcaatctaatcaagctccaaagtatgattttcttcaagagaaaaacatggagtttcttttctcgttgttgaatagtgagaatgagaacgttagtgggcttggtgcgagtattatcgctcatgcttgtggaacaagtgtagagcaacgggttctctgtgaagctggtgtcttggagaagcttgttatccttcttgatggttctttaagccaaagagaagcttgtcttgaatctttagctacggttttgaagaataatcctgaagctgtttctgattttgttggacttgagtctgggaagtattttaattctgtgactgagttaacaaaggataggtatccgaggactaggctgctttcttgtctttgctgagtcg

SEQ ID NO: 144191 - DNA, 1340 bp, Arabidopsis thaliana landsberg
cgttccggtttgttttgtggctggcgataaaacagagcacaaaagaaaaaaaaatttagggtttgttttgagactaagaggaagagaaagaagaagaagagaaattcgtacaattccgccattaaagcttcaacctttaatggcgacaacgactctttcttccttctctctttctcttcctcaacttctccataaacccacaaagcctcttcctttcctcttccttcttcctcgattcaatcggagatttcgaagtctcactatcacttcttcttctacaacttcttcaaacaatttcagtagtaattgtggcgatgatggcttctctctcgatgatttcactctccattctgattctcgatcacctaaaaaatgtgtcctttctgatcttatacaagagattgagccattagatgtgagtttgattcagaaggatgttccagtgactactttggatgcaatgaaaagaacaatctcaggcatgttgggtcttcttccatctgataggtttcaggttcatattgagtcactttgggaacctttgtctaagcttttggtatcttcaatgatgactgggtatgctctctcatcaatacttattcattaggataccttctctttgaacactgtgatgttgaactagcttagttttagcctttaggtatagtggaaactggaagcttgaattacatagagttggtggattatgatagttgggagatttatcaaagagcgttttgataatccgtgttgaaacttgaaatttattgatcatttgaatgaaacatactgaattatgattctcatgaaagtcaattttttttgtggggctgaatctaagcttttaattcaactgtcctgaagcttatatcaaagaatggtctctgtagaatcaaattgtgtatctgctattatgatatcacatagttggcttagttcactagtcagccgttgtaattatactcctcttcatttggtgtcgataggttcttttctactaaattagcttttagtacttaatagtagtatgtcttctggattagtgcatctttctgatgttttggtaccctacaggtatacattgaggaatgctgaatatcggctttttcttgaaaaaaaccttgatatgagtggtggaggcttggacagccacgcttcggaaaacactgaatatgatatggaagggacgtttcctgatgaagatcatgtttcatccaaaagggatagcagaactcagaacctttctgaaacgattgatgaagaaggtttgggcagagtatcctctgaagctcaagaatatatcttacgtttgcagtcacaattggcttctgtgaaaaagg

SEQ ID NO: 144192 - DNA, 378 bp, Arabidopsis thaliana landsberg
ttcagatgggtattgggaagaagtggaaggagatacttgatgtcaccgacaagataactttcaataaccatgtaattacacttctctaaagaagaagctatcatctttttgtacatgttttagatctcatgtggcttaatatatctttgtctatacgcaggatgattccagaagaagccggttcactgtctgaagaaacgagtgtgaagccagaggaagatgcaatatggctttttttgtgatactgtttggtcggtttactcaaatagctgagacatttagggacattcactttgaggtgtaaactctacaaagttttctgtttcattaaaatgattttttgttataaattaagttgagttatataaatctctttcg

SEQ ID NO: 144193 - DNA, 2038 bp, Arabidopsis thaliana landsberg
  unsure (1)..(2038): unsure at all n locations
aaaaaaaaaacctagtcacactcagataacataaacctttgacaagagattttgatgctccttcgtcttacggctcgctctattcgtcgtttcacaacttcttcttcgtccttaccatttctctcatcgtcttcgtattgtactgtttcaacaatggcagctaatcatccaaaggatgtagcgtatctctccgccgtcatccccaaacgtatcaggcttttcgagcagatccaagcgaatcaactcgagaatcttaagtctcttccacacgatccgatcaagtaaaatacgatgccgatgttctttatgtatcactgtaatttgtatctatacggttttactttgtttccttgaagattgacttcgattttttggtcttgtgtgtgctttagggttacgttaccagatggaaatgtgaaagaaggaaagaaatgggagacaactccgatggatatcgctgctcagatttctaagggtttggctaattctgcattgatttctgctgttgatgatgttctctgggatatgaataggccattggaaggtgattgtaagcttgagcttttcaaatttgatagtgataaaggtcgtgacactctttggcattctagtgcgcacattcttggtcaggtaaaggagttttgatcttatctgatttgtgaaagttctgcttgtggtgaacgaacgatttctttactgtgggtgtgggtttgatcttggtgcaggctctcgagcaggagtatgggtgtcagctgtgcattggaccatgcacaacgagaggagaggtaagaggagcttgtttgtgctaattgttacttgtttgtatatcatgttccatcatttgtgaagtttggtttctctgtttgggtgtttcttggtattttaatgaagtgttgtgtgtaaataagatatcgctgatgttagtagtgaatttgttattgcagggtttctactatgatggattttatggtgaattgggcctgagtgacaatcactttcctagcatcgaagcaggtgctgcaaaagctgctaaggtgttgtttcttctttttgattcgattatttttaaggtttcttacaatgtatgttattaaatatttgcttattttgtcaaacctttttagtgaaaaatgattgatatatgtctcccaactcttagccatagtttctattggattgattcgcttctatttgcatctcaggaagcacaaccatttgaaaggattgaagtgacgaaggatcaggcactcgagatgttttctgagaataattttaaggtgggttaagctgtgtataaatatcattggattgtgttatgctcaaccttacattcatttctgtcctctatgaagttgttgtttggactcattattctgctgttaatcatgtaggttgaactcatcaatggtttgcctgcagacatgaccattactgtctacagatgtggccctttggtggatttgtgtcgtggaccgcacataccaaatacttcctttgtgaaagcgttcaagtgtttgagggtgatttgctactgtatctctaggagctacatctctacagattctagtttgttttcttatgctgaccaatatatttttctcaggcctcatcagcttactggaagggtgacaaagaccgtgagagcttacagagagtttatgggatatcttatcctgatcagaagcagctgaaggtactcaaaatatcttaattattatggcagctacgctgtgtcataagtatgcataatatctatcatttggtcgacagaaatatctccaatttctagaagaagccaaaaagtatgaccacagactattgggccaaaagcaggaactcttctttagtcatcaactcaggtacttcattgctaatatactgtggtttcctctttgtgtttcactttactaatatctattctccatccttgagcttcagccctgngagttatttcttccttccactcggcactcgtgtatataacaggttgatggacttcattaagaaccaatactggcacaggggttacacagaggtt

SEQ ID NO: 144194 - DNA, 739 bp, Arabidopsis thaliana landsberg
gtgttaccacgtgtgatgccaatgccatggggagccgccattgaagagggcttcgactgcattgtcgccagttagtctataagggacttgaccaccaaagatcaacaaaggggccagaccaggaaagttttcaggacctgaactgatggttcttcctctgatttctctgtcgtggctcctttcagctaagcggttcctcataaacacagagaaagcatccatgagatcaaaagtctgatcacgttctacaacacccctgtgggatctaaacatatcaaaggggctggcttgagccatatcaagttcttcaacaaatccacctccgcaataagagcatacaggctcttggccgtgaaggcggacagcacgctgacatctgtgacaccagtgggtatttcgactgcttgacatcctgagcttctcactcttctttccttctgtggacacaaacaagaccacaacaatgcaatgctttccttgaagctcttagaagaagctttagcttatttgacaggtctcagttaaaaacctgcaaaagtgggtataagttagtaatcagttatctacagttttttccaagtaagcaaaccaaagactccaggaaatcccgcttgcctcagtttagtgcacatcagaagattcaattataggtcatacttcaatatatagagaaaaaaatttctaaaacataggttccaactttctttttctaatacattaatagaaagttattgtggtg

SEQ ID NO: 144195 - DNA, 571 bp, Arabidopsis thaliana landsberg
tcagatgggagattcaacatttctcgatagaatgcttctccagcttcgctccacttgcaagtaatgagttcgtttcgttaattctataactgtgtagaaaaccaatcatgataatgggttgatctttctgttaaaatgaaggtattacagcggttaccctaaggatctcgggccatcgcgggttctccattttacatcagaaagagagtttgtccaactccttcaccagggctatcctgtggttgtcgcattcaccataaggtaacttagcatttcccaaaacctttcaaactacactatattcaatcacgtgcgtcttcttctataaaacaggagtaactacacacaacatcttgaccggatgcttgaggaagctgctgctgagttctatcccaacataaaatttatgcgtgtgagtcgatgtaaagctgtataaaagaatacaaagaaaatagctggtaaaccatgaagtgactgttgtgtttggattgtttcaggttgagtgtcccaagtatcccggattctgcataactcgccagaaaaatgaatatcctttcattgaaatattcca

SEQ ID NO: 144196 - DNA, 489 bp, Arabidopsis thaliana landsberg
gaaagtcccattgagccacaaagatattatgagctttttgagaaagacaccataaagtttggcaacagcaggtattctaatgaagacacattctagttctggtttcccattatgaatcataccccgtgcctattctctgtgattaatctttgcttgcttgcgcagttaacatctactttcttctgttcttgacatgttttgttcttttggttgcagccgagagtacgtactgttgcacgagaattctgccgagtgaatgaaatcagagtcaagcagaagcgagtatatcacaagattagatagttgcgtttctcagggtttttagagatgtttgagctgcttcatgtatgctttctaccgtgctggtgataatctcagacatcatttagaaatcttttgcttgcttgttttataataaatgatgatgaacgattggtaagagaaaaaggttaacttttggtataactgtataagatcaatctctacttt

SEQ ID NO: 144197 - DNA, 5134 bp, Arabidopsis thaliana landsberg
  unsure (1)..(5134): unsure at all n locations
agtttggcttgattcgctgtttttcgctagaattgactaccaagatcgtgcaaagaggttaagagagaagacacttgaggttatttggcaaggttccaagtctcttggctcttcttcacaggtttaaaccgttaaacctcacattgtaattctgctgtttccatagctggctttgtctcattgctatttgatgttacttgtagatatttactggtgtattcccaagacattatgaccctcctgaagggttcacgtttgaaataaatgatgtatcagctcctatccaggtaaaagcaattgaaccggctgtgctgtttttgaactttgtttgaacgtgcactgatgaatcatcttgaatataggatgatcctctcctttttgactacaatgttcaagaaagagtcaacgactttgtagcagcagccctcgcacaggtaaagatcatatccattttttcttgaaattagctaatagaaaagaagctttgctgtgatgtgacttggatttctcttttcaaggttaatgtgaccaggacaaatcatataatgtggttaatgggaactgacttccgttaccagtatgcatattcgtggttcagacagatagacaagtttattcattatgttaacaaggtacactggattttcatactagcatactcatatcaattgaatctcactagtctcaaggtaagagaaataccaatcttgattctcttgttctttggacaatccaggatgggcgtctcaatgttctgtattcgacaccatctatctacaccgatgcaaaatatgctgcaaacgagtcctggcccctaaagactgatgatttcttcccgtgagtttgatagctcgggttttactttctacaaatgcaaaatgcatgttgatcaaataaataatacatgtacctgtgtcaggtatgcggacaaacctaatgcatactggacagggtactttacgagcaggcnnnnnnnnnnnnnnnnnntgagggatttaagtggttactatctggtatggcctacaattattttatataaatttcatagatttgtggtttatattttgctcttttcttacacggccttatctgttttcaaacaggcagctcgacaattggaattcttgagaggaagggatagttcaggaccaacaactgatatgctagccgatgctttggcaattgctcaacaccatgatgcagttagtggtacacaaagacaacatgtggctgcagattatgctcttagactctcaatgggctacctgcaggtgatttttagttaggcatctcatgtgttgttcatgcaatttttgtgtttcttgttggcatagcagtttaagaatttctccatgatcattactaggccgagaaattggttgcctcttccctttcctttctatcagcagcaaaatcaagtactgaaaagaagaatcctggcacaaaatttcagcaggtaatgtgctttaagattttgcaggattccaatattactggtcgtgttggaagagttgaaaagacattgatatcgaatttgagtggttattaatatcgcttccgcaaatgatgctgttgcttaaggcaacaaagaagttttagtaagctgctttgtagcattttcatgacttgaatgacttaagttcccaaaacttatcataatctatgttaagctgattcttatcttgtgcattatattcatattggcagtgtcccctgcttaatattagttactgtcctgcatctgaagctcgtctgttgagcgggaaaagcctggtaagtctagcagacaggcttcctctgagtctatgaagccttggacctcttggttagtttttatcttctgttcacattgatctctccttgtaggtggtggttgtttacaattctctaggatggaaacgagaagaagttgtccgagttcctgtaagtattttcttatctacttggttgaccagtgtagttctcgctttatctttgtttgttatccaatattatttaccaaatctacctgataacttctttaggtgtcgtctgaaaatgttattgtgaaagatgcatctgggaaagaagtcgtgtttcagcttctacctctttcagaaatcgctttgagaattagaaatgagtatgtcaaagcgtatctgggaagatcaccacgggatactgcaaaacacgtgcttgcatttacagcttcagtaccacctcttgggttcagctcgtatgtaatctcagacactggacgaacaggtatgtttcagaatatgtaatattgtgtcataacattattatgagttataggatcttgaatacaattgcatatgttctagctctactagccgcaacttccttactgataccaacggatgttatgtatttaattacatcttcgttttctaatttgattaagcgcgtggactatctgcatcatatgttacttctggaagcatgaatcaaaatgtagaagttggccagggaaatctaaagttacgctattcagaagaaggagttaaaataactcgtcacttaagtaccaaaaatcaggtgtgcctgtgttttttatatcttaacttacctatttttccattcggatatgtaaacatcatctgatgttgatttttggtggattttaaggttactgcagaacagtcatatgcttattatattggaagcaatggaactgacaaggatcctcaggtagctcagctctttaacagatacaaccttatctacttagctatcattttgatgtgtgtctgaaccattctcatatacttttataaggcttctggagcttacgtttttcgaccagatggtgtgcttccaattaaatctaaagaagaggtaatacatataagctgcatctataaccttatttcccgacagtatgtgaaaacacaaaagaaaaactaattgtctagcctgactcaggctcaattcactattgttcaaggacctttgttcgatgaagtgcaccaggagcttaactcctggatatcacaggttataaactctttgcaactagttaatgctcttaaacagtttaattacatcacagaagctataactgtttgatccatcttgtgatgggtctgttaatttgcagattaccagagtgtacaagggaaaaaaccatgctgaaattgagttcacagtgagttgatctcttttcacaattcttcatgttaaactgatgaagagaaatttcagtattttaatttcctactttctagattgggcctataccagctgatgatggtattagcaaagagattatcactaaacttacaaccaccatgaagacaaatggaacattttacacagactcgaatggccgtgacttcatcaagcgggtattagatgcaaaattcatgtgaagtagtttatttttatttttgtaacaaggggtattttgtttttattgtaacatactttgttacattttcttgcagattcgggacttcagaacagattgggacgtgcaagtgtaccaaccggttgctgggaactattatcctgtaaggcatcaaacccatctgagattccttctcgtggtgtactaaggtcttgtactagactgagctgcactatatctggccttttgtctaatatatatattttcttccagctaaatctcgggatatacatgcaagataaaacctcagagctatccgtgttggtggatcgagctgtaggtggatccagcttaaagaacggccagatcgagttgatgcttcatcggtttgtcaactaactttctctatataaccaagacaagcatatgttgttttgcttgtatttcacctttttttcattcatgtaggagaatgcagcatgatgacattagaggtgttggtgagattcttaatgaaacagtctgtctccctgaaggatgcaaaggattaacggtaagcttaagttctcatctcatttttagctgtccaagttgcaacgtatcagcttttaagggaacatgtgacagagcttgtttccaaggtggtattaaatcgttatagttggtcttataaccgttatggtaactctgagttgttttgcagatacaagggaagttttatgtacagatagataaacctggagatggggcaaaatggcgtcgaacatttggtcaagaaatttattctccactacttatagcattcacagaacaggttgctcttaaaaaaataaatacttacttccctccagttctataagatagtgaagtgagataaggtactttttttgtaggaaggagatagttggattaattcacataagacgacattctcagcgtttgaaccgtcatattcattaccaaaaaacgtcgcattactcaccctccaggttagttggattgtgtactgtatacatgtcaaatacggttttttattagtttgaccacactcacactatgattaattctgacattttcaggagttggaaaatggggaagttcttctaaggcttgctcacttattcgaggttcttacttgtcctctctatgcgtttccaccgttaataatgtgttatagctatgtgctttttggttgtggaaatgtagtttaacactaggccgattaaactagcaaataattagagatatagaaaaacttgtattactcagaaaacccaaatcttgcagtgtcaggaaaccagacaattagttgtatagagttagttcataaaaccaaaccgtaacgtttagggtgtatttttcacctaaaaatcaaactgttttcatgtttatactcgtaaaaagctgactatgcggttgatcatcgtgctatgtcatttggttttccttaatagttccacatgtgaaataagatgagacctaaagtaatatagaagggagatggtcaagtccactaattggttttaaattgagaacccatgaacttcgacaatgttgcttttttggttcactaagcaacgggtaaaatctaatgtggaatttgataattattttctatctcttctcttaatggtttcatcgaagttgagtccttctgagttactgtcttgttaaccttgtgaaggttgtggaggatagtgagtactcagttatggcaaaagtagagctgaagaaactattccacaacataaaggttcgccaaaaaaagacgacccttttttattt

SEQ ID NO: 144198 - DNA, 2561 bp, Arabidopsis thaliana landsberg
  unsure (1)..(2561): unsure at all n locations
atggttttttttggtaagcaacttcaacatggttatataagttgtttaaccatgatttttaaaaaaaaaacaaaatgatgtcattttatcttatacataaaccttttttcactaatgattttggaatcaaaggtcagttttatggtcaaaaacaatttggccgcccattgacttgtacaccaccaatataccaagtcgtacttaaattctcattggagaaaagttgtcatacttttaaacattataatatgatatcaagaacattcctactaaggtcattannnacttgtatatcatatactacaaaattcataaattacattttttcggcaaaggcattttcgtatctattttctacttcgtgggataacgcgatttagtagaagcgaactccaataaaaaaaacttaaccaattgactaaaaacacttacccgttcctcaattacttagagacacaatcatcggatatacccaactcgataccataaacaaaattgaaaattgacattacaaagaaaaagaacaaaaaccaaagaagaagacgcaaacccggtttaagggtcacgggtgacccgagaggagacttcctctttaccgttcaataaaaaaaagagggtaaaggtagagactttataacgaaatgtcaacacccatcttctcaattcctcaatttctctagggttcttcattttcgttgttgtgagaaattttgctccgatgtcggcggagagttgtttcggaagctcaggtgatcaaagcagcagcaaaggagtggctactcatggtggtagctatgttcagtataatgtctatggcaatctcttcgaagtttctagaaagtatgttcctcctcttcgtcctatcggtagaggcgcttatggaattgtctggtgagttccaaaattaatcagattgggtttttgaaacttgtaatgttcacttctggggttcttagatttgggaattagggttttggaatctgttgttattataataacttgtgttgataattgttgatcagtgctgctacaaactcagagactggagaggaggtagctatcaagaagattggtaatgcttttgacaatattatcgatgctaaaaggactttgagagagattaagcttctcaagcatatggatcatgaaaatgtacgtgttactaatcatcagcatctctgggttttttttttgtgaatcttatattggtttattgtgcaggtgattgctgtaaaggatataataaaaccaccgcagagagagaacttcaatgatgtttacattgtttatgagcttatggacactgatctccaccaaattattcgctctaaccaacccttaactgatgatcattgtcgggtatgcatcaatctccatcttgcttatatctagcagctgaatcttctgtttctactttagaagcagctgttattgtgttagagcatctgatgagtattgcttgatactttataagtgagagctaataaggatttctatttttatgctttgaagttgtgtttagtaattagtttcgattttgttttgcagttttttctgtaccagttgttgcgtgggctcaaatatgttcattcagctaatgtattgcatcgagatttgaaacctagcaatttgctcctgaatgcaaattgtgatctaaagcttggggatttcgggcttgcaaggaccaaatccgagactgacttcatgactgaatatgttgttacacgttggtatcgagctccagagctgctacttaattgctctgaatacacagcagcaattgatatttggtctgtcggttgtatactcggtgaaacaatgacacgagagcccttgtttcccggtaaagattatgttcatcagcttagactcatcactgaggtaatctagctttaatttgtttcatccaaagaatcgccacttagtgtttcttcaaggtattgctgcatttattgatgaatcttggaaaagcagcttataggatctcctgatgactcaagcttgggattcttaagaagtgacaatgcaagaagatacgttagacagcttccacagtacccgagacagaactttgctgttagattcccaaacatgtcggctggtgcagtcgatttgctggagaaaatgcttgtttttgacccaagcagacgcatcacaggtgagttatattttatataactgcttcttctctgtttcatcggttagtttctgaacatgtttttcgtgtgtgtagttgatgaggcgttgtgccacccatatttggcgccgctgcatgatatcaacgaagaaccggtatgtgtgaggccgttcaattttgatttcgagcaacctaccttgcccgaagagaacattaaggagcttatataccataaaacagtcaagttcaatcctcaagactcagtgtgagagaaagagagagagagatatatccttaaaaggaaactcatcaaaatgctatgttttgttttgctctgcttttgttatcaaatctctgataagtttgataatgtctgtaatttgaataacatcctaaaagattggaaaaaaagaaaagaacaacc

SEQ ID NO: 144199 - DNA, 310 bp, Arabidopsis thaliana landsberg
gttcgaagccaaagagcaaaccaaaggtagaaaagaccgaagaggagaaaaaatttaagaaaagagcaaggttctttctagctgctcagtttctagctgtcgtcatttacgtatcagtgatgggaggaggtagttctgatgaactggagtatgaagatgaagatgactaaactaaagcttttcttattaaatggaccggtaactctcaggcgaactctctgagactaagataaaaacataaccagtaatctctacgcttttttcttcttgaactcttagttatggagaggatacagatgtgagatttagt

SEQ ID NO: 144200 - DNA, 125 bp, Arabidopsis thaliana landsberg
attctcaatttttggatttctaatgatttcctaacaaatattagatccgacgaaaccgaatggaaccaacacgcagtgacgaatccagatgaagtagcggacgaagttctcgccttgacagaaat

SEQ ID NO: 144201 - DNA, 1764 bp, Arabidopsis thaliana landsberg
agttaaagaagcaggtcagagagttaacagagaagctacgcttagcggagcaaggatcagacaatgcaagaaaacaggttctagcattgggaacacagatcaaggctggtccttttggaactgtcaagagtctgagaactaatccaactattcttcctgatgaatctataaacccaagattggcaaagattctagaggagattgctgttgataaagaggtaattgtagctcttgcaaacgcaaatgtgaaagcaatgttggaggttcagattgctagcattaagagagtgggtataacaaactatctggttgttgctttggacgattacatagagaatttatgtaaagagaacgatgttgcgtattacaagagagatccagacaaggacgtggatactgttgggaaaactggaggtaaccatgctgtctctggattgaaattccgtgtgttaagagagttcttgcaactcggttatggtgttcttctctcggatgtggacattgtcttcttgcagaacccatttagtcatctatacagagactctgatgtggagtcaatgagtgatggccatgacaatcatacggcttatgggttcaatgatgtgtttgatgaaccagccatgggatgggctcggtatgctcacactatgaggatatgggttttcaattccgggtttttctatttaaggcctacaattccatcaatcgagctgcttgatcgcgtggcagatagactctctaaggctaaagtgtgggaccaagcggttttcaacgaggaactggtgtatccttcacatcctgagtacactgcgctacatgcatccaagagagtcatggatatgtatgagtttatgaacagtaaggtccttttcaagactgtaagaaagaatcatgaactgaagaagaaagtgaaaccagtgattgttcatgtgaattaccatccagataagctcaatagaatgcaagccgtcgttgagttctacgttaacggtaagcaagacgcgcttgatagcttccccgatggttctgaatgattcacctgaaaagcagataggctaaaaaaaactttccgagtttcttgacatttgtgattctaatatatttctcccttttccaatgtttactgcttcatgccttctactttcctctttgtattatgaatttttgtgtatcttatggctaaaatcgcaagtcttttttttctttcttaacctctctgatcttgttattacatcccaagtctttgttttagcctcacttgtttttctctgtttcatcatccgatatataatttacatttcaagccacttaatcatgttttatatttgtaatgttttcaagacctaaaaggaatgataatagaaacatacatcttaaacattctatctacaaataatgcgttgtgaaacaaactcactggtacaatgaatatcgattctagaacaagaaccaaaaccatgaactgaatgaacaacacactaattctcattctccaatccttccttccgacatgacataacaggttcatgtatacttcatctcaactatgagctttaccatttccaagcgtgagctctagatcctccatagccacatcatggatcctctccccttcccatggcttaacttggctgttctcaaacttaaactcggagctttgaccaatctcttggattgctgctgtgtttggagacaattgctgtggtgcaggtttcacgagattgaaggtaggcgaggttggcaccatagaggcagagaatggct

SEQ ID NO: 144202 - DNA, 1161 bp, Arabidopsis thaliana landsberg
tggataaaatggcgtcaactttcactgccacatcttctattggttcaatggttgctccgaatggtcacaaatctgataagaaacttatcagcaagttgtcttcaagctcatttggaaggagacaaagtgtgtgtcctagacccagaagatccagttctgcaattgtgtgcgcagcaaaggaattacatttcaacaaagatgggactaccattaggagacttcaagtaagtatcttttttaaaaaaagttaatggaaacttcattcccaaaccggagctaaaggtttacattttctgtggtttctaattttgtgttgtactaggctggtgtcaacaagctcgcagatcttgttggcgttacacttggacccaaaggacgaaatgttgttcttgagagcaagtatggatcaccacgaattgttaatgatggtgtgactgttgcaagagaggtatggaattattacccctctgataatgatttttgttctcattcaactgagtcttagagtttcaaactttctcctgtaggttgagttggaagacccggttgagaacattggcgctaagcttgtgaggcaagcggctgccaaaaccaatgacttggctggtgacggtacaacaacatctgttgttcttgcacaaggttttatcgctgagggtgtcaaggtctgtgtaacattcttctttcagctttctctatgtgaaacttcaaaaacttttgtactaattttaagattatcttattcaggtggtagctgctggtgcaaaccctgttttgatcaccagaggtattgagaagacagcaaaggctttggttaccgagctcaagaaaatgtctaaggaggtttcaaatttatagaactctctttcttttaatatgttaagagtctttttcaaaaggttctgaatgtaagtcatgtcgatgtaggttgaagacagtgaacttgcagatgttgcagctgttagtgcgggtaacaacgacgaaattggaaatatgattgctgaagcaatgagcaaagtgggcaggaaaggtgtggttacccttgaggagggtaaaagtgccgagaacaacctctaaattgtagaaggaatgcaatttgaccgtggttatatctctccttactttgtgacagacagcgagaaaatgtccgtcgaggtcttt

SEQ ID NO: 144203 - DNA, 2374 bp, Arabidopsis thaliana landsberg
gtggtggaacttctcatacgaaagttggaaagtgaatctcacttccatcgtaaagtggacttgttctttctcgtcgactctatcacccagcattcgcacagccaaaaaggtgagctttcctcttggatagatgcaatacctgttctcaaattttcacttccttccctgaaatgctaataataccgtatttattagcatttcagggaagtaaaaaattcacaagcattgttgtattgttttttactgtatacaaagagaacacctaatatatttattatcattaaagattaaataatttccagtgcttgtgaattttgtaggtattgctggtgcttcttacgttcctactgtgcaagctgctttgccacgtcttttaggtgccgctgctcctccagggactggtgctagtgataaccgtcgtaaatgtctgaaggtatttaaactatttgcttgtttctatgttatccttacagttttgtaggctggagtcagtgacctctttgtttttttaggtcctgaagttgtggcttgaaaggaaagttttccctgaatctcttctgcgtcgttatattgatgatattagagcttctggtgatgatgcaactggtgggttttccctgcgacgtccttctagatctgagcgtgctgtagatgatcctatcagggaaatggaagggatgcttgttgatgagtatggcaggtatgctaaacgattgtcttgcttagtagtgtactctccggattatatatgttgctgatgaaaaaataacaggtaaggtctgttgccattctgtagagggtttattaacttgtttgtcgttttttctgcagcaatgcaacgtttcagctgccagggtttttttcatctcataattttgaagatgatgaagaagatgacgatcttccaacatcacaaaaagaaaaaagcacatctgcgggggaacgtgtcagtgctttagacgacctggaaatacatgatacctcgagtgataaatgccatcgagttttggaggatgtcgatcatgaacttgaaatggaagatgtatcaggccagcggaaagatgtagcaccttcctctttctgtgagaataagacaaaggagcaatcactggatgttatggaacctgttgcagaaaaatcaaccgagttcaatcctcttccagaggattctcctccgctacctcaggaatcacctccccctctccctcctctaccaccttctcccccacctccatcccctcctctcccgccatcatctctgccaccaccgcctcccgcagcgctgttcccacctcttccaccacctccgtctcagcctcctccaccaccactttcacctccaccttcaccgccgcctccacctccaccgccttcacaatcattaacaactcaacactccatagctagccatcatcagataccatttcaaccaggatttcctcccccaacatatcctttatcgcatcaaacatacccaggatctatgcagcaagaccgctctagtattttcaccgtgagttctttgatttgttatgtttcattttactcatgattcctcactatacatatgcatcttttatcatttttgtttaaaccccctggacatcatgtgcagggtgatcaaattgtccaggggcctggaaattcttcacgtggaggtcttgttgagggcgctggaaaacccgaatattttgtgcagcagtcctccagtttttcaccagcaggagtgtgcagctccagggagccttcatcatttacttcctccagacaactagaatttgggaacagcgatgtacttttcaatcctgaagcttcttcacagaaccatcggtttcagccgagcacccctctgtcccaaagacctatggttaggttgccttcagcaccgtccagtcatttttcgtatccaagccatattcaatcacaatctcagcattcttacactcatccttaccctttcccacctcaacgtgatgatgcacggcgatacagaaatgaggaaccatggcggattccttcaagtggacatagtgcagaaaatcagaatggtgcctggatacatggaagaaattcacatccaggccttcctagagtcacagacagtatgtagatgcttaaatcctaatagaccctttacctgttaaggtttattaacttgcatgattgcttgtggagttgtaatcattgtgatacttctgttgactatgattgtctagcttgtatgttaatgccatggcttagttccttgaaattgatggtcttatttgcaattctacaggtttctttcggccacctccagaacgtccaccttcagggacaatgaactatcagccttctgctgctagtaacttacaagctgtccctgcaattccag

SEQ ID NO: 144204 - DNA, 766 bp, Arabidopsis thaliana landsberg
cgaaagtcacgacggcccaagacagagagctgaagctttagccgccttgtcatccgcattcaactcttcttcgtcatcaactaaatcgcctccaccaccaaggccagtggggacgagtcaggcttcacagagagcagcagcagtggctgctctttctcaagttcttgttgcggaaaataagaaatcacctgatacctctcctacaagaagatccactagctccaacccagcagatgacatccctctgagtaagtctttctccttgattccacgttctgaaacttcgataacacaattgactataaatatcttcatccacagcggaagcaaaagatgaagaagaggcttcagaggtagctggtcttgaagccaaggaagaagaggaagtttcacctgcagcagatgaaacagaagcaaagcaggaaacagaagagcaaggtgattctgaaatacaaccaagtggagcaactttcacctatgaacagctgagagctaaatctgagaacccagtgactggaatcgatttcaaacgcagagaggtgaattagttagatagttagctactaggagataactcactttactacattacctaactaacttgctgtttctttttgttgtgatcaatttactacaaggcttatctatctgaggaagagttccaaagtgtgtttgggatcgagaaagaagcattcaacaacttaccacgttggaagcaacatctgccccgaagaagttcgacttgttctagttatggttttaagtg

SEQ ID NO: 144205 - DNA, 462 bp, Arabidopsis thaliana landsberg
acattctctccctctctctctatcacataggagaggaaattaaaactctaacaacaaccaacaatggtggtcgctagaacattgttctcaatctcagcaactctaatcatttttctagcactctttctccatgtaaatgcgtaagttcaaagattcacaatgtgatctccgcttttttcctatctttcgaacagagtttcttatattgatgtgtattaaaatgcagagttcaagaaacaagggaaccgaaacatgagagctcaagaaatacatcaacggtagataagtgagttctcacaacagctttaagtgtagatttgatctcagccgttcagattctttatctatgataataaaacgttttgtttttgcatgttctgttttctcagtttatcagacggtgaatggcatgaacacgcagttaaagacccagaagaaatagcagcaatggtcgatatgtga

SEQ ID NO: 144206 - DNA, 6373 bp, Arabidopsis thaliana landsberg
cgagtcgtctcgtctagctctcacttttgttcgtctcttctgcgtcaaacatttccaccattttcgtttcttaaacctttcttcagctcttctcttcgtcaatcgtgggttctttcatcatctctgtaaattttctgggttacaatactttagggttttttcttgactcacatttccgataaaccctagttttttttttcagtgcgatagtggaattgaagtctcttcggtgagtttctttactaatggagaccgccgcttcgagcgtagctacaactcgtggcggttcccttcagaatccgtcgccgacggctccgtcaagaaaagagtggcgcgccgtttcggattcacaagacaccacagattatgtggtaacgtttattcttctgggttatgtttatgttcagaggaatgtgtagactgaatctgaaagttttgatttttcttgctactgttgcatcttttagtttgcatttcgtagtgttctcgttatagctcttttgtttttgtagatttcactgtaattgtttggtgtagagagtaaagtgatttgcttttggttgtttcctagttcatgtgttgactggcttagtcaaatttgttgcaggatttggaacagttaaagctgaacaggacagatgagagaacgatttatgaggttaatttcttctttcttgcaatgttgttacttagtttctgtactcattggagagtgagcccgacttcttaatggggtttgttgttgtgcagaatggaagagaccaggatggttattcacatagtgagatgttgcagcagcagattcttaatgtttctagaaagaaaggagaattacagcagttggagattgagcttcgagctcagatgattgcgagacatgagatcatggagatccagagcaactatgaatctcaattcacagagtatgctaatgctgctgctagaatgcaggttaggtttcatcctcctggtatattagcaggttttttatttatttatttcatcgagcattgtgttgcgtggaagttaaaggactgttgctgactttttaggagcaacttcatgagaatgagagatctattcgggaggcagagaggaagttagaagagaaagacagagagctacatgcgattaaactagataatgaagcggtctgtttgtttattcattactactagatttttttgtgatataaatttgaatgatttgttactctccttgttctgctactaggcttgggccaaagagggtatcctaagagaacaaaataaagaacttgccacattcaggtgctgttaattccttatctcttttctctttgtttagtctgtacgagtttacctattatactgcattaatctattattcttctatcttatattgggttctgctactttcgtttttgacaaatattatatcaggcctttgatttctacttgtataagacgtttcaggcatgaggttttagaaaatataacaggatacattttctctttctttaatatgcagaagagagcgtgatcactctgaagctgagaggtcccagaatatacataaaatatctgaacttcaggagcatattcaagagaaagagagtcagctcagtgaattgcaggaacaagttagttttcccttgtttttgtgacacgatcaaatttttttaaacatctcatgcttatggatctttcagttatatatcattgtcatttttgaaattctaatacactaaaacaagagtcgttaattttaatggcttgtagaataggattgctcaagaaactatcctgtacaaggatgagcaactaagagaagcacaaggttggattgctcgtgcccaagagattgatgctttacaatcatctacaaatcattcgttgcaggctgaattgcgagaacgtactgagcagtataaccagctctggcatggttgtcagaggcaggtcagttgccctgagtatcttccgattcctaattgattttccatgagacgcttctactctagtcttatgttgttccttgttattgagttcagtttgcagagatggagagattgcatgtgcacacagtgcaacagcttcagcaagagcttgctaatgtaagggaagctggtggttccaaaacaaactccggtggagcctcccagactattcagaacagcgggaaccaatttgatgctcatggaaacagcgcagaaagtgcaaacattagtgtccattcaaatggaaaaagcgcagataacatctcatcttttacttcaactgatgataaggctacccaggtacatgtttgtttctgtggattctcttgaatgatttccctctaattggcgttttgtgttggatttacaagatgatagcttatcacaatacaatgttagcttgtggtgagatgaatctgtacatttgctaatgcagttggcttatcagccgatttaattgttaaacattagatattgaaactgtcaagcaaaagtgaaataattggatattcccagcactccaaaaagtactgtgttgaaaattaagaaggccagtataaaagttctttgattttgtatttggaagtagttgtttcatcacttgtctattcaatctagtgctgattgttcgaaattctagatttgtcatgctccacttcatatcctaactgtaactacctttttcccgtaactatttgtagaacaaccgtgttgatgggatatcagcttccaatcttgcgacacatgggttccttcaagctggtcagatgacccctctgcattcatttgtcatgcatcaacaagagatttctcagcttgttcagcctcaggtcccttcacaacatattgaacaatcagtgttgctacagcaaaaggtgtgagcttaagaatgcagcttgtgtttcattttttatagttaatgaccattgtctttcattctctttttgtaggctcaggctgtaccagatagttcacagatgcctatgcagaatcatgtgcatccatctcaaggtgttcatggcttggtacaatcctttggtcaagggtacggagatattcaaactagccaagtagcacaatacggaactacgacaacaccatcctctgtgaatgaacaggtaggaggtgttcttattacttaatggggatataccgtggtctatacgataccttcttagaaaatacttcttaacaggcagtggaatctggcaatggagattataatggatctaatcagtcagagaataactttcaagacatttcttcacagttccgtgatgccctaaggcttgattctcattcccagaatcagaaacctgaggtatgcagtgcacatattacctagcaatttttcttggcttgtagagccttagttaagttggatatagagaaactgttctgaatgtgtgtgttttcaatttctatacccaggaactcaatggtcaggtttcacctgatgaacacagtggtgctaaatccattgtccctgaaactctagtctcatccggaaaacctgagaggaactcagagtgcgctctgctcaatgaaaggtcgcttttgacatgcatcctccgtactataccagctggtgggagaatcagaatcagttcaacggtgagcaaactaatagaaaaccacaatgagacttaaccattgaatttggaaaaagggctttcgtataatgtctgtttcatattgtgcaatacagcttccaaaccgtttgggcaaaatgctagcccctctacactggcatgattacaggaaaaagtacgggaagctggatgattttgttgctagccatcttgaggtctgtctcatcccaatttccaaactatttcatgtgtttctcaaaatattgaaatgctaaactggttttggcttgcagttattttcgatagaggatgactacattcaagttagagacggtgcacagaaaatggtagcagcatcagcagcagcagccaaagtggcagcagcagctgcagcttcgtcatccccaaactccatctatgtggctatgactcctatggctcagactcaagggttaaagaagaatgacaacagagttaggcagagctctgattttatggtgaagcagcaaagaaagctctgattttacaagtcaagcttttcaaagtaaaagcgtattagagtgaggctaaacaatctcctatcttgtttttcattttttggtgtatccccgaagctaagatatacattcataattacttttgccctttcaatagtatcaatgcttaaagtcgacaatgtttattttaacatgcttagagctggccataaaaattcagtaaagaaccagcaaaactcaagcgcctgtcatcatttacacttacatttcttgcctcctacgtcacctaattttaactaatctaaaccctaatcaaatttaagaacaagtcaattaaaaatcgaagggtgcagatgaattgcgagaaaccctagtcaaatttctcatatgaacagatatcgactagtagtgtttacagaaacaaactacaagatacggagacatataaattgcgacaaactctacacaaaacacatgggagggcttgttaggtttagggttttcaatgtttctggaagtgactggaagaaatcaaggaatagtttacaaattgaagaagaagaatggaatataattacctaggaagatcaaacctattcgtcttgccttgagaccaactgtgattaaatatcggtttgggtttagattttatgattaaacgggttaaatattggtttaagtttataaacagatttagattttacaattaaacgatgttaaatatcggtttgggtttaaaaaatatgattagggtttagtttttttatgataaaatgagtttaaatgacggtttgggtttataaaggagaattaggttttagattttgtaattaaacgtaattatatatcggtttggattataattatagctctaatttattacgtaatttaagtagaatttgatatgacatgtttttattggttaatgcaaaaggaggtgaataaaagggttcacccctaggggtgaacccaagtttcgttcttaaaattatagggataagatgtaatttttttaatgagtcaaattacttagcctcagtctattgattgataagttgtcttagaaagatggatatggacctattcaacaatcaaaatcaagctcgcatggcctcttgcatatttaatgatattgaattcggtttatgttgtataccatacatccctattaccttgttcaggtccgattcttgggaggtgctgagtgtgctagtgcaccgggtcccaattctttattcagttttttctttatattttagggtccaaaatatttaaataattacaaaataaggtctaaattttaaatatttaaaattttaagtaaaaaatttggaacttaaaaccgagtccattaatttattggaccggcctgagtaacaatatatagttatgttattaagtatatataggaccaccatgataaattaattttgtttatcaaatgtagtatagtagttttgtgcatatgtttaaatgttatccacaagtttcttgaaatgaagtttaacgacaaaatatatttttttcttaaacaaattattatctgtaaatccatatagaacgaaacagaaaatgattgtggtggctttaagaccacgttagtgtacattctcatcactcctcgtattagatgtaacaatcaatatcctacccgtgggattgtccttatcgatcataaatgaaaatgaaccatccatcgctacggtatcattttatacgtcaggaaaaaatggacatgatgaccttgtagagacaaaatcggcaggccatattattgaagtacggtagaaaaagaagacatacaaaaagttacaacaagaattgttacgttgctttctaacataatcattttaatccgttagatcatatagtcataccagaaagtaaagtttacatgtgttgaaagtcattttaaatttataaaatatagtcagatataattatataaaagttagtgtgaattaaagtatatatacaatttaacttatttaaaaaaaatcaatacatataaatccacatattgaattacgagaacatggtcactgaggctcatcataaaagtattcaaacattttattttcttacatccaatggattggacgtaattgacacaaaattttaaccttttgttttagggtttggtagcagcagagaaacgagatggattcaatatcccggtgtacgcaccaagcttgcaagatttcaaggaagtagttgacgccaacggctcatttgcaattgataagctggttgtatacaaaggagggagtccacttgtggtgagtgagccagacgatgcatcagag

SEQ ID NO: 144207 - DNA, 644 bp, Arabidopsis thaliana landsberg
acttacgggcgttgatctcaacactccaatatgtaatttgtttaccccatatgtccacagctcttaagtcttacctctttaatggattagatgataagtcttaaacaaatgttctttgcagatacttggagcagagagtggatggaaaccgattcctctcactgatcttgtctcaagcgcttctgtgagaaaagcttaccgcaaggcaactctttatgttcatcccgacaagcttcaacaacgtggcgcatccacacagcagaagtacatttgtgagaaagtttttgaccttctcaaggtttgtctccataaatcctcgatagaaaattaattccatttgattgagttacctccatctgcaaatcagtcatttaccggctttttctgattctccaggaagcatggaacaaatttggtgctgacgaacgataagtaagatggtgtaaaactttggatttttctttaccctattatcagaagtcaccctgcaaatcagaacctagcagcctaagaacctaagttaacaagtacaggatcaagctatggtatgggatgaagacagatctagagatgtaataactagttataaatatttataactatgtgtcatatatagaaaagtagctcattcatattcccagctg

SEQ ID NO: 144208 - DNA, 1297 bp, Arabidopsis thaliana landsberg
agagcttgacccaaatcgtttcttcttcatcaacgacgccatttacgtttctccacattctttcttcttcgtctctcactaaattcaattactcttcatcaccaaccttctgtactgtccccggaaacgatgcgatgagatgttccttgttaactccgacttcttaccgatttcattacccaaacccgtttcgatctcttgaatcgattcctcccctttcaaattcacgttatcgcatcgaatctggatctccctcttctttcaaggtaccgaaattttctcttcaccggagattgattgattgatgatacctatggcagaaggcagaagcgttcaacgttctgtatttacaaacttcgaatccataaactctcgtgtttgatagcttcttctcgtttctaatttatattttggattcattgcagttcagtgcgccgagcttgcagagacatagctctgtctcggttaaagcatttgatgatgtaagtattcaaaatccatttcagatttatttgcattctttgacatacttttggtttttgactaaccatgtctagcatcaaagtttatattgttctttcttttctttttgccttaggatacatttgatttctataccggtgacatatttgctgctacttatgctatttcgtcgagtgaaggcgaagagagcgatggggattatgctttgaatgtggttaccgaaactactgcacagaagctaggaaagtttccaagaggtcgcaaaaagcacaggcacgttttattttaaccatgactctactttttgttgaacccactagaatgtgtatgtaagtgaagtgtaggtatcaagtgaaaggaggctatgagtcatttgattactatcatagcagattgtttcagaatcattatgacactgctctgaagcatcatttgaccaatatatctgtttccattgatccacttggagttgggataaaccatctagaatgtgtgtgtagatgaagtttagtatcgagttaataaatttaggatctgggttttgttccctagagattctttctagttgttagtcttatgacagactgttctctactcttaagcatcatttaccaccatctctatgtttcgttttatccactagaatgtgtatgaaaggtgtagtaacaagtactttcatttgttttgacattgcctttttttgcaatatgcagaatcagatatgggattaatttggggcttcttgctttttttgtcactgctgcttctactgatggactcttttgcttggaagattgttagactacctttgcct

SEQ ID NO: 144209 - DNA, 814 bp, Arabidopsis thaliana landsberg
ttttcctttttgtgcttttgacaaccgcaggtcactagaatagatgaagatatggtgctatcacaggattcgtatattcttttttatgcacgagaaggaactcgctggttttctagtgtctatgaagagatgcagccattggttgaagcgagtttactaaattcgtccccaaagtctgtgcttgattcctctactaacggggagtgtttatcagagatcagttatgagaatggcgataaagcaagcaaaccctgcgattctgctggagtgtctaaccaacatgtcaagacgaaagaagattttgtttccctctctaatgatgatgtgtttctatcagcagagtcttctagtggcgaggagtctcctatgggagagcttttggacccgcttgatcctgatgattcttacagtccatgcactgagaaagaatcagattcttgtttagccattgaaagagctaccattcgtgatgatttttttcctctgctcctggatcaaaatcaagagtcgtcgacgtcgtctccaaaactgcaaggtacttctattctctgattacaggacagattgttgaaacttttgaaccgagttttatgttttattcgcatcaatgttgacttatggagttcggttccttacttggcggtgtatgtgtgtgtggtgattctgcagaaagaacttttgaaatgcagctcttgcaaatggaagaaaccacaaagagccaagaaccttggaagcagccattatcatcaataagcaatatcgcacattccatggaagcagaatttgtgtatggagaccttttgaagaaaccttc

SEQ ID NO: 144210 - DNA, 841 bp, Arabidopsis thaliana landsberg
tggctcaaaagacggttctgttcacattgtgaatatagtcaccggaaaggttcgtcctttactgtactgctgttaccaagctttcaatggattgttttatgatctatatcatttcaataagcaagttggtgcttctcatatctatttgacatatcatctaactttttcataatcataccaacaggttgtgagctccttgaattctcatacagattcagttgaatgtgtgaagttttcaccaagctccgcaaccatccctttggctgcaacaggtggaatggacaagaagcttataatctgggatctgcagcattccactcccaggttcatctgcgagcacgaggtataaacccttatagtttctctgagatagcatcaaaacagatattgaaactaaaacaactcctctcttcttcttttttcgattacaggaaggtgtgacatctctgacttggataggaacctccaagtacttagccactggctgtgccaatggtacagtgagcatttgggacagcttattaggcaactgcgtccatacctaccatggtcaccaagatgcggtccaggccatctcagtctctaccaacacggacttcattgtttcggtatctgtcgataacactgctagagtctttgagtcatctgagttccaaaacaaagtgacataggcaagtgaggagaatacttgcagatactatccagacatgttgctatctgtgttcgttgttgtggtcttaattctatgctttgtgggggaaaattttgacaagaaagttatcaatgtctaaattccatatgtacacggcttaatttattgataaatgtagtctctgtttgg

SEQ ID NO: 144211 - DNA, 2461 bp, Arabidopsis thaliana landsberg
cagatactctacttcgaaagatgttacccaaaatttgattgaagggtcgaatgttcccagtgagtgtacacctattcaccttaaccttgtggtaagcatagtttatttgggttaaatggaatggcaatgagggagaataaagactaaaatagtggttttttgacatgttaggctaggcatggaactcgttctccgaccaagaaacggttgcgggaattggaaagtttggctggtaggtttaaggaactggtaagagatgcagaagctaggaaattgccttcagacaaaattcctggatggttgggacaatggaaatctccttgggaaggaaaagtgaaaggtggggagctgatcaggcaaggggaggatgagttataccaactgggaattcgggttcgggaacggtttcctagtttgtttgaagaggattaccatcctgatgtctatacaataagagctacgcaggttggtggcttgtggatctttttatgtttctgtttctgctcagcaaaatttgagataatgtgaacactagaatttggttgcaagcattggcctgaaatgtttaaatctcttggtagattcctagggcatctgcaagtgctgtagcatttggaatggggttattcagtgagaaaggaaatctgggaccaggccgtaatagagcattcgctgtcactagtgaaaaccgtgctagtgatacaaagttgagattttttgaatgttgtcaaaactacaaggtatagttgtgatttaatgattctaaatattttttgttgttggctcatcctcgatatagtagtcactcagtttattcttttttgagcatttctttcctttacatggtcgatgattgcagagctatagaaaagctaaagagcctgctgtggataagctcaaggaacctgttctgaataagattacagcttccgttgcaaagagatatgatttaaaattcacgaaacaggacatttcttctctctggtttctgtgcaagcaggtgcttctttcccgcatctcgttttacccctcttagacacacctttcagggatcaattataatcaattttaaaatctacaggaagcatcattgcttaatgtaactaatcaaagttgtgaacttttcacgccatcagaggtacaagttactgtttatatatttaaatgcgctttaagtatcctgaagcttgtggatttaatgctataatgctagttatgtgtaacacaatcatctgtaggttgctttgctggaatggacagatgatttggaagtgtttctcctcaaaggttatggaaattccttgaattacaaaatgggagttccacttctagaagatgttttgcattcaatggaagaagctatcaaggcccgggaaggtaacctcaaactttaaccaggaaataatgaacgatttgcttgtcatcgtagacaccagatctaattatttttcctattcaattatcatgcagaaaagctcccacctggaagttacgaaaaagcaaggcttaggtttgcacatgccgaaacaatagttcccttttcttgtcttcttgggcttttccttgatggatctggttagtctatcaatttcacctctctcatactaccccacttgtgttttttgtgaacatatgattcctctcagtgcttgttcttaaaaaggtcttaaatgtcttacagagtttgagaaaatacagaaggagaaacctttggaactccctccacagcctcccaaaaccagggattttagaggcagcaccatggctccttttggtgggaacaacattcttgtcctatacagttgtcccgcagaatcctctcccaaatacttcgttcaggttctgcacaatgagcatcctattgcagtgccagtaagtttcatctaactactaaacgcaaactcaattttagctcgatcttagtggccattgaacttcagacataacttctagaattttaagaaatgacttgactcacttttctgttttgcccttcttccgtttcctaatatttctatacaaatttcagggttgtgatggaaaagatttctgtcctcttgaagatttcaaggtattttgcatctttccctctgaatttccctaccattttcattctatacctacccttgcatgaacttcttttatctttcttattacaggccaaagtggtaactcctcatctaaagcatgcttttgacaacctttgcaatgctgatctaaatgacctgaaacagaagcctgcatcaagtaagttatctatactgtcaagttggctgtttgggtcaagccacgataccgagctctagttactacacagctcttcttacatactggctgattacagtttgaacctgaaatcacacagagcattgttgtctgtttgtttgttttgtccccttgccacatttgtgttctagttagttcaatccgctaatctgaaatattttgattttgatctctg

SEQ ID NO: 144212 - DNA, 1982 bp, Arabidopsis thaliana landsberg
ccagtagctccacgtcacttgatcgtccagctgagatagatgtggaggattttgcgatgaagcatcacaagatggcattgttaaggggtcgaatcgaaattgagcgatgggaagctcattctcaccggtgaggcaatttttccattgggattgtttttcaatgttccagagattttgtttactcttgccatgtttctaatgttctctatgtcagggtttctcagtgtcgaatgaagaaaggtttgcttcttactggtgtcggtgataaggttaggattttttttagtatacaattcgattaggtattgtatgtgttatctaagtagcactggctaagttaatctgactactttgatcaggttatgcgcctctggtcattaaaaagctacaaatgcatggaagaatactcccttcctgatgcttcttccttgattgacttcgattttgatgagagtaaggtaaaccttctctaaaggtcatggatattacttaaactgggaatgagctaaaaatggatttaatgatcaatgatgatacagaaacctcagtcaagtcactgacatgaatttctgaaaccaccagtatagcagtataatctgtttccatgtcacagtttgcctcacctgttgtagctgaatatttccttttggctaaatcttgctattttctatagaaattggaagttgtatctctagcatgggagtattttgattctgttgttgttgttgttgttgagattgttggcttggttggtacccgcattagcatatggaggagaaatggacaaagaagcatttttccatctcgtgcaggcacctttcctaaaggcctttgtatgcggtatgtcagaagatactctcctgatatcaagttcctgagaacctatctgtttctatagaaagatcaactgatattccatgttactgacaaaagtcggtgtgatacttcaacatggctacctagcccctctgcccctgtaaggttgttggcttctctatccacactgataagttgtatgttttctttttcaaccagttacattgacccagaagctgtagttggatgcgaggatggaacagctcgtgtatttgatatgtacagtaagacatgttcacagatcattaggtaagctatgtattatgtgtctgttgtgttatggaacaacacagtgaaactggaaaagaacggtttttcattatcaaaattgtttacaatttcttttgagaaagctaaatcacaattttcctatcagattggttaataactatgtatgtaattgcaggactcagggtgggccaataacatgcttatctctaagcgataatcaactatttcttagtgggtcgtcactcgggagagtaacagtatctgaccctttgatggatcaaccagtggccactcttaaatccacgataactgcaggaggtaaactcaaactcaatgtcagattgcatctccagtgacatttcttaaagcaacctccattctctacaggtatacagacaatctgttttaaccaaggcactaatctcgccttcattggaacaactggtggatatgtttcatgctgggacctcaggtatgttaaaatagtcgtctaaggtttttttcaaagatgcaagttttaattcactatcttaagacgttataaccaactattatctaacaggaaaatggatagattgtgggaaaaccgagtgagtcctaatgtcgtgtactcaatacaacagctaaggaatgacacatcggttatggtagctggtggaataaacggtgtgctgcgtatgattgatcagaagagtggaagggttttatctagagttataatggacgataaattctccacaacatcaacaaggaacaaccaagtggtgatagagaaaagaagaggaaaaagagtttctcaagacatggagattgataaaatcgaaaggaaagttcggcctcaaatcagttgcatagcaatggggatgaagaagatg

SEQ ID NO: 144213 - DNA, 1732 bp, Arabidopsis thaliana landsberg
gtaatttccctggagcaaaagttgtgatctcatcaccaacctggggtacattgtttttactacaaacatttttgagtgatctggtttcatatttaaccgcctttatcaactgacaaaataccacatcaggtaatcacaagaatatcttcaatgatgccaaagttccgtggtccgaataccgctactatgatccaaaaacaattggtttggattttgagggaatgatagcagatataaaggtttgtttgtcctagaaggctatgttttagttgacattgctttatatatgcatcaacaaacaggatatcatttatgtgatgccaaagtgagtatttgtttgcagttatactgtctgtgtgataaaacgagtacttgtttaaagacaacgtgaaaccctgatggattataatggttaatcttgaatttctgttatgtaaaatgtacaggaagctccagaaggatccttcatcttgcttcacggatgtgctcacaacccaactggaattgacccaacaccagaacagtgggtaaaaattgctgatgtcattcaggaaaagaaccatatcccatttttcgatgttgcataccaggtatccccctattcctacatttccgaatatcgtgtttccgagagaagtaagcgaaaccatattatgtaacgctacatgcacctcttttccccggctttgctagtggaagccttgatgaagatgcagcatctgtgagattatttgctgagcggggaatggagttttttgttgctcagtcatatagtaaaaatttaggtttgtatgcagaaagaattggggcaatcaatgtcgtgtgctcctcagctgatgctgctacaaggtaaaacttactctaaattttcttatcatgagcctgttgcaagtgatcctggagtctcagtttctatctttaccgtcacgaaccatatctagctacaggttttatggaacctttaccagtaacactacttgctttcagggtcaagagccagttgaaaaggattgctcggcctatgtactcgaatccaccagttcatggggcgagaatcgtggccaatgtagtgggtgatgtaactatgttcagtgaatggaaagcagagatggaaatgatggcaggaagaataaagacggttagacaagagctgtatgatagcctcgtttcaaaagacaagagcgggaaggactggtccttcattctgaagcaaattggcatgttctctttcaccggcctaaacaaagctcaggtatgccaacaattttaatactacacagattccctttggccttgtttagacttgtggtttgaagtttgtgctgttttcttttggtaacgagcagagcgataacatgacggacaaatggcatgtgtatatgactaaagacgggaggatatcattggccggattatctctggccaaatgcgagtatcttgctgatgcgatcatcgactcataccataacgtaagctgagcttccatctcagtagatgacaataagaaacagttttatataccctttttagcttcttcttgatctttgattgaaaccagatggctaaattaataagctagcatcacactatgattgctagacaattttcaaggaaacttttgatttgatcgtgtttgacaggccttgttgtattgggagactcccatcgagttatagaagaacttgttacgattgtattttacataatttcacaactatacttgaccggaaga

SEQ ID NO: 144214 - DNA, 333 bp, Arabidopsis thaliana landsberg
gagacaacaaaaagagagaacaatgtcgtcgtcgagggagctacaatacttggagtacacatacagaaacaaccgtcccacgacgggtctcctcaactccatcttcatgaccaccgtcaacacggccgctcgttctctcgtctccgtcgcttccaccgcctctacaccagagattccttctaggcgatggtcggcttcggaccacctcaggttcatgtctatgatgatgacgtggcttaccctttggatccttagagttttcttggactatcttcctcttcctctcatctcttcttcttcttctgcttattcttattcttatcgtccctttag

SEQ ID NO: 144215 - DNA, 1812 bp, Arabidopsis thaliana landsberg; identical to SEQ ID NO: 36563

SEQ ID NO: 144216 - DNA, 1324 bp, Arabidopsis thaliana landsberg
atggttagtggtaagatattgaaacccgggaaagtcaacaaagcacatgggatttttagcgaacgtgaactgccgttgaaggcgattgtttcgaagtttggacctcaaagtaacaaacggcagttttggctcgacagtgtgagccgtcggatcatggagataactcatctaacggtaattgcatagtcttttagcgagagccgtccgatctaaaaatattaatcacccagagcataaatgggcccaaaaaaggccttttaaattttttttgaacataagccaattcaaaaatataatatcaacggatcactcaaattttgaaactaatcatctctctccttttttcaaacatacacagagaatggtggattcgaaaacccctgcgaaaaccaaattgttagattcgtcttcgatttctaatgtcagagtcgtccttagggttcgtccttttcttccccgggagatttcggacgagagttgtgacgggagatcgtgcgtttccgtaatcggcggcgatggaggagataccagcgaagtggcggtttacctcaaagatccagatagctggtaatcgtctttttgcttttcccttgttcaattttgattctttattactagaaatttgaatatggatttggtgattcggtgtaatttggagcagtcgtaacgaaagctatcagctggatgcgttttacgggagagaggatgataatgtgaagcatatattcgatagagaagtaagccctttgattcctgggatctttcatggtttcaatgctactgtgcttgcttatggagccaccggaagcggaaagacttttacgatgcaggtctgttaaaagctattaactttcacaatttagaatttacggttagaatcttaattggattctcttcggtctgtgcttccttgtaatggtttcagctctctttgcatttgattatcagggaatcgatgagctaccaggtctgatgccattgaccatgtccaccattctgtctatgtgcgagaagacaaggagtagggctgagatttcatattatgaagtttacatggacagatgttgggatcttctagaagttaaagacaacgagattgctgtttgggatgataaagatggacaagttcatcttaagggactttctagtgtccctgttaagtccatgtctgagtttcaagaggcgtatttgtgtggcgttcagaggaggaaagttgcacacactggtttaaatgatgtctctagtagaagccatggagtgcttgtgatctcagtaacctcacaagggcttgtcactggtaaaatcaatctgattgatcttgcag

SEQ ID NO: 144217 - DNA, 2070 bp, Arabidopsis thaliana landsberg
atgggtcttgaagttgggtccttatgcttcaaacttaaagacggaggcttgacatcaagaaccaacagtttcaagagagacgatactaataggcaccagaattctcctaagagtactatggagcggtcgttgagtttcaacagctgggaggttcctaaagagaccaagactgattcagattttgaggtcttggagacaaagaagtcaacgcctaacactttgaatggaagaaactgtgagagaatccaaatcaagaaacctacagttactccaccagagccatttgtgttcttctctcctagacctgtcaccgagcttgatgcagctgcaactacgttacaaaaggtgtacaagagttacaggaccagaaggaacttagcagattgtgcggtcgttgttgaggagctctggtgagttacttgattcatcttcgtctttttttttaatgtcttttaaagatgtttacactaaccctttgtattgcttgaaatgttgtaggtggaggactttggaaggtgcagctttggatttgagctctgtgtctttctttggagaagaaaaacatgagaccgctgtttcgaaatgggcacgagctagaaaacgagctgctaaggtctgacatcaatttatctctgtttacttataagtcaaggtgttattagtagagctcaatatctctctttcatataaaaaaccaacgtgggtctcactttcttaggttgggaaaggcttatctaaagatgaaaaggctcagaaattagctcttcagcattggcttgaagctgtaagtccccataacctaaatatctttgtaacttcatatcaaagacaagtaccctacttgacatccaaagctatcattgaatatactctaatgatccatctcttgaaattacagattgacccacgtcatcgttacggccacaacttgcacttctattatgatgtctggtcagcgagcaagagcacacaaccattcttttactggtaaggacttaaatccagaatccatcttaagatcttcctgtctttgaatgtgttctaaaactctgttttcactgatttgaaactaaaggttggatataggagacggcaaagatgtaaatcttgagaaacaccctagaagtgttctgcaaaaacaatgcatcagatacttaggaccggtgtgattttttatctgattcgactcgactatactaattagttagctctgccttgttgattactcattaacctctgtgtttctttgaaacctgcagatggagagagaagcatatgaagtgatagtagaagatgggagactaatgtataaacagggcatgactctgatcaattcaacagaggaagccaagtcgatttttgtacttaatactactagaaacttatacttagggattaaaaagaaaggtcttttccagcactctagtttcttatctggaggtgccacaaccgcagcagaaaggttagtcgcccgcgatgggatccttgaggtacttgaataagaaactacctgtctttgcttctcttaatatgttatgtaaactaaaatgtctaatttaccttctgtttcttcaggctatatggccatatagtggacattatctcccaacagaagacaacttcaaggagttcataagtttcttagaggagcacaatgttgatctcaccaatgttaaggtaaggaaataaatattatgagattagtatttgtgttattggcatcaagagaatgtttttattcacgagtgttgttgaactgaattgcagagatgttctgtgaatgaggaatattcgtcattcaaatcgactgcagatgaagaagaagaaaggaaggaagtctcagaagaagttgagataccttcagagaaagaagagagagcgagaccagtgtttgatcctgtaaagagactgtcttgtaaatggacaagtggatatggtccaagaattgggtgtgttagagattatccaatggagctacaagcacaagcactggagcaagtcagtctgtctcctagggtttcaccagctaattcttacggaccaattccatctccaaggcctagtcctaaa

SEQ ID NO: 144218 - DNA, 563 bp, Arabidopsis thaliana landsberg
gttgctgctggtgaaatcgaagtactccgtgaatctaattcaatgcaatggtcagcagaagattttgagtctagattacaggtaacaacatgtctcatatttctttcaaaaatttacagctttggcctgtgataatttcctattaagataactgctctgatattgataggaagcactgaagcagacttatgaaaaagctcttaaagcagcaaatgatttcggttatcaaaaagaaagtcctgagtaagtttttctcctcgtcataaaccaacagttactgtactatgttggcctaagctgctctgtagcttcctcgtgctcgttactattgtgaatccaaaggattggaataatattcggttttgatgtcagggcactacttcatggagcaacgattgcagcatttttgaacatagctcaagccatgacggaccaaggttgtgtctagcaaaatggccctgcatcttaagtaccggcaggagttctgtaaacgtaatgaagtaacattggactctctgtaacatattagatggaaatctatatcattatttagaaattacata

SEQ ID NO: 144219 - DNA, 1599 bp, Arabidopsis thaliana landsberg
ggtcctattgttggcacatttggcactccaaattcaagcactggaatgagtctatcaatgggtgaaagaagtggaccagtggcatctgttactggattggtaatcctacctgtgaaatgttttaagatattttgttcggttagatattttcattcaaaacgctttactgaattcctgctaagtttattcataattttttggttttagaatggagataatcgcagtctgccagatgtcaaaccacgaatcgctgatgatgcagagaaatcaaagacttggaagctgactgagatcagtgaacgttcccagcttcgtactctgcggcttcctgacaccctgctaccagcaagagtatgtatccaatctatttgaaacatgttgtcattttgttccaactaggatgcgttgcagaccttactttaaaagaatgatatagcaatcatttcccactattagagctaaaatacttccttttattatatttggaattctatgattaaatagacaattttcattactagtagttcaaatgaaaattatcttaaagtttcctttgcataaaacttatttctggagtcctttgtctgattctctcttcttatcttggtcatgatgtcatcttatttctcgatgcaggttgttaagttgatatatacaaattctggaggtgctatattggcattagcagaaaatgctgcacataaactatggaaatggcaaaagagtgagcggaatcttttgggaaaggtataccataaccgttaataccacatataatggtgtttttgaaactcaatagttatagcttcttgtatggtttttgtttgtttaggcaaacagcaatgtcccaccacagctttggcagccatctagtggagtattaatgacaaatgatacacgtgagggaaacaaagaggatgtagttccatgctttgcactctcaaaaaatgattcttatgtcatgtcagcctctggaggaaaaatttccttattcaacatgatgacttttaaggtccctctatgtcctactcacgtctattcatctgcttggctagttggcttctcaagctctgtgtttgctcacttatttatctttcttttttgcagacgatgacgacattcatggctcctcctccagcagcgacttcccttgccttccatcctcaagacaataatataattgctatcggaatggatgactcttctattcaaatctacaatgtcagagttgatgaggtatcctgactcaactgaaagtgttaaaaggattttttagtttgtcatagaaacaaatattctaaacagcttttggatggtaatgaatcatgcaggttaaaagtaaattgaaaggtcatcagaagagagtgactggtttagcattctcaaacgtgctaaatgttcttgtttcctctggtgctgattctcaggtatgcttatatgctgcatttgcattggctgtaatatattccccctccaattatgttataaaaaaagatcttgccactgctttcatctgccgtgttatcagtttcctaatatataaacggatctatctgtatagctttgtgtatggagcatggatggatggtataaacaagc

SEQ ID NO: 144220 - DNA, 449 bp, Arabidopsis thaliana landsberg
agcaatccctagctgatactttatccagtggaactcttggttccagttcatcggataatgtcgcgagctacatgggtcagatggccatggcaatggggcagttaggcaccctcgaaggattcatacgccaggtactttagaaatgtggatgttatcgagatataccatatcttttcatcgtcacaaagagataaatattttattttatatatgaatccgtctgttatggagttcatagggcatttcttggtggcaggctgataacttgaggctgcaaacactacaacaaatgcttcgagtattaacaacacgtcagtcagctcgtgctcttcttgctatacacgattattcatctcgattacgtgctcttagttccttgtggcttgcccggccaagagagtgaaacagaagaatagtgctctactcagcagtcagccctatacataatc

SEQ ID NO: 144221 - DNA, 388 bp, Arabidopsis thaliana landsberg
accaaatctctctcttcgtctctctctttttctatctctctttccttctctagatgatgcctcctaatgagcaagaatctagctttccgaaaacaccgagcgcaaaccgacacgaaactagtccggttcaagaaaaccggtttagctctccaagtcatgtaaacccatgctttgacgacgataacgaccacgacggtccgagtcaccaatcaagacaatcttctgttctacgtcaaatctttacgtcctataatcctcaaggtcgttaaattaatacactataaatatatctcaaattattatgtacagtaattttttctcacttttttctttaaattgtggatataatgcaagttgaggagttgacgtacagtttcaaatcacaaac

SEQ ID NO: 144222 - DNA, 1227 bp, Arabidopsis thaliana landsberg
atggaggaagtgacgagatctgtgttagcagaagaaatactgaagcgtttagatctggagaatctctgttccgtcgcatgcgtttccaccactctccgctccgccgttgtttccggcgttcttccttctcttacctccctcgatctctctgtaagtttccgattctcgtcaatttggagattttatttttctgaatagagatgaaattgatcgaattttcgtttctctgttaggttttctctccggacgatgaaactctgaatcacgtgctgcgtggttgtatcggactcagcagcttaactctgaattgtctccgccttaacgctgcttctgtgcgtggagttctcgggccacatctccgagaacttcacttgctcaggtgttcacttttatcctcccccgtcctcacttacattggcaccctctgaaacaaatctccggtacaattccttcttcccatgaactttttaatgaattatcatgcttttcgtcgatgtttgtttttgaaatagatgaaaagtaacattgatggtctgaatgtcactaattgaattgaatactgtgtctttcccaagcctttacttatttgggattgctttggcttttttgtcaattatattctttcttgatcagattttttcagtgtgatgcatgtagtttcgagctatatagttgaagttgtgataattgagtaatgagtgtttctgtttgggttcaatgacagggttcttactctggaaatggcagacctggattctcccgatgtttttcagtctaacttgacgcagatgcttaacgggtgtccttatctggaggtaatttgttaaagcttgctgaggcattggtccgacgaagcgagaagtgtgaaattgaattgggttttatattcttgtgatgcttgcagtctctgcaacttaatatccgaggtatcctagtagatgccaccgctttccagtctgttagattctccttgccagaaactctcaaagctctaaggttacagccacttcttgagtctgaggcaattcttctcatgaacagattcaaagtgactggaacttatttatctcagcctgattataatagtgccttgctatctccttcaccttcttttactttgcaaagcctgtctcttgtcctggacttgatatctgacaggcttatcatagctatcacaggttctcttcctcaacttgtcaaactggacctttgagatcgtcctgaaaa

SEQ ID NO: 144223 - DNA, 913 bp, Arabidopsis thaliana landsberg
atggctgctgacgtcagctctctcgtacggttactaagcggttacaaagatgatcgagcggtggttaaagatcctgccggagccaaatcctcggcggcgctgatgactcgtgaccttctaggaaacggcagaggaggaggaggcgatcggtctttagagcttgacctcgaccttcaagtccccaccggttatgaaaaacgcctcgacttgaaggttcgtgttgaattgatggatcctctttagtctttcctttagtggttttggctgatgagatcgtatcattgttgttttttttaacagtcagggaaagtgtatttgcaacgatgcaattcaacgagctcgtcgtcaataacaaacgcagaccaaaccaatcaaacagtaccaacgtttcaggatttgaattttcctcctccgactttgaacaattctcctttgttgaacctcttcgacgatacaacgccggaactgaagctacttccgtcgtctcgttgttctcgtccgaacactagtaatttacagagtgtatgcacactggacaaggtgaaatcagctctagagagggcagagagagatcctgctatgttcaagaaacgtcaatcaccggatgatacggtttacgatcattataggacggaggctgtagcgtcaccggtggttgctggatgtcctggttgtttatcgtacgtgttggtgatgatgaataacccgaaatgtccgaggtgtgataccattgttcctttgcctacaaatcctatgaagaagaagcctaagattgatctcaacatatcaatctgaatgttttggagtttatattggaacatttttgtaaagatagataacaattcagggggtttattttgtaaaacttaagaaagaagaaaaaattaatggtaaggaaggaagattagaagga

SEQ ID NO: 144224 - DNA, 4628 bp, Arabidopsis thaliana landsberg
aaaattctagcattcgattgaaccaaacttgacgtgtgaatgagtctggtttactacagtcaaattgataactcttttttttgtaagttccaactcttcaacgttttttattcatgtacccttgcattttgttgaaattttgcaatgtgaattttctgtcttctcttacggacaacaaaattttagtttttatcagtcgtctgaatcctgtgacagacaccgacgccgttaaccgtcgtcgctgtcgctgtgtctctctttctcactctgttccatagatctgagcttctatcaatattctcggatcgctatcagtcaaatcttaagaatttcgtcgctttagctcaattcgggtacgtgtttcaattttctcgatagacccttttgagattcttgccttttttgttttttctcctttagatcagatttcggtttcctgatttattagtttattaccattgatgaagttttctagattcgtctcctttgtttatggtcttgatagggtctttatgttctgaaggaataaaaaatcttgtctttggatggatgattattgtcttcaattgtatttgttgtttctaagaagaagttgtgtagttactgccaccaagtctgtgtgattgatcggatcattgttagtgtgtcagtgtttttatcttcaatttctttaattgttgcatttgctgattgattacttgaatttgttgattttcgcaagactttagattgtggaggaagttttaggatttgatctccatctcgtatccaagcatggttgctcctgtgcctccaggggcacctagacccaacagccagcaaaattccgggccacctaatttctacccgggttcacaagggaactcaaatgctttagccgacaatatgcagaacttgagcttgaatcgaccacctccgatgatgcctggctcaggtcctagaccacctcctccttttggtcagtcaccacagcctttccctcagcaatccccttcttatggagctccgcaacgtgggccttcacccatgtcccggcctggacctccagctggcatggcgagaccaggtggtccgcctcctgtatcacaaccagctgggtttcagtcaaatgtacccttgaacagacccactggtccaccttctcgtcagccatcatttgggtctagaccttcaatgcctggaggaccagtggcgcagcctgccgcctcttctagtggttttccagcttttggtccatcaggtagtgtagctgcaggtcctcctccaggatctcgcccaatggcatttggttcacctccacctgtcggatctggcatgtctatgcctccctcaggcatgattggtggtccagtcagtaatgggcatcaaatggttggttcagggggatttccgaggggaacccagttccccggtgctgctgttacaactccacaggcaccctatgtgcggcctccttcagcaccttacgctcggactcctccgcagccactaggttcacattctctttccggaaatccaccattaactccgtttactgctccttcaatgcccccaccagcaacctttcctggagcccctcatggcaggccagcggtatcaggcttgccttatggtccaccatcagcgcaggtatgtcgagatacggttatggtatatattcttgctatgtaacttttgtgaatcctatgtatggaatgatgaaaacatgtagatgtgtatttttattcattcagcagataggaccatactagttgaccgatctttggaatattttgaccgtgaaagatttgaactggcattggcaggattcttttatctgattaattaagcaacaattaatgtagcgctttagcttgtggctcccttttttattgttaagcaaaatcttttcacttgatgtatttcctttgtgtggcagattctgatggtcttcaaatttgaatgttagtaggttgccccacctctaggctttcctggtcaaatgcaaccaccaagatatgggatgggtcctttgccaaatcagtcgatgaccaacatacccactgccatgggccaacctggtgccactgttcctggaccctcaagaattgatcctaatcaaatcccaaggccaggttcaagctccagcccaactgtatttgaaactcgccagagtaatcaggctaatcctcccccggtatgtatacatgatcagatttcaattcggacattagtctgagatgccatatcttttgtttgggggttttgtcgaactgctatatcctttcctgattttctcttctattttttcaagcctgctactagtgattatgttgttcgagacaccggaaattgtagtccccgttacatgaggtgtaccatcaatcaggtagcaatgaagcatgaattattctatagtcggatgtgtttccgttcaatattttctcattgtattccttgattcttaggaacttgatacctttttccctttttcgtaatagatcccatgtacagttgatcttctatctacatctggaatgcaactggcgttgatggtccaaccgctggcgctttctcatccatctgaagagcctatacaagtaagccttgtctgacaaaacaaagcatgtgggcattcggtttctatgctattcctattagtatttgcatttaccatttggtcttattgatcgcataaacgagtatctttgacttacacgttttcatttacatcttactatactatggtgcaggttgtggactttggtgagggtgggcctgttcgatgttcacgctgtaagggttacataaatcctttcatgaagttcattgaccaaggaaggaagttcatctgtaatttctgtggtaaatgttactgttttcagttatgcaagctacaaaatctgaagttatagctatgtaactgcaatagtatgtatcaagttatgaaataattgaatattccaagctagaagcgtacactaacatttttgtgcttaaccttcccgtatttaaagatttcttctgtcaatctggatttcacctaattgtggaaggtggtgatatgattttgtttaagagagatgcttatatattgttattgttgtattctcttgggagttcgttgatgtgggaagctttgtgatccatttcctcatcaactttcttttgcacaggatacactgatgagactccccgtgactatcactgtaatctgggtccagatggtagacgtagggatgttgatgaaagacctgagctgtgtaggggaaccgttgagtttgttgctacaaaagaatacatggttagtttgtgagactttctgcttataaatgtaaaattcttttgttttgttgcttcataagatgccaatttattttatgtggtctggaatctaccattgtatttgacaagtgttctgtcctctgattttgtgttttcccgaaaattttaacctattactactgtggtcaacggtttctctatacatactgtactgttgatctattgaactaccacctagattacctttctagctaagatattaatattaacgtcgttttgggagaagttgatgatcagacatgtcgggaatggatggaaatttaaggtcattatcttttctggtaggtacgggatccaatgccagcagtatattttttcctcattgatgtctcaatgaatgcgatacaaacaggtgctactgccgctgcttgcaatgcaatccagcaagtactttcagaccttcctgtaagttttttcgccatttccaactttccaaaacattcagttatatccaccctgttctgaatatctatttggtttacacgtgtctgaagacttttttactattttggtggtatttgaaattaagtaacagtccctgtccaaaccttttgaggtttttagtgatagtttaaatttgcttgttacatgcatcacccctttgcatactaaggtgttcatatctgaataatttagagagtagcttctgctgcatatctcttagcgtgtgtaccttgtccttatctttagtgagactgtgaacttttgttatggtatggttatgttaccaatggctttataattcttattttgtatcgccattagacaattaattttttttctgtattcgttttcaggaaggtcctaggacatttgttgggattgctacatttgactcaacaatccacttctataatttgaaacgtgcactgcagcaggtgatttgtttgcactagttttttttcttcttttgtaattgttggatggaaaaaataaaaaacgagatctacaagatgtttgatgctcattgtgcagccattgatgctcattgtccctgatgtacaagatgtctatacacctttagaaacagatgttgtagttcagctatctgaggtcagttctgggtcatttgttttctatttgggcacttcctgattagtttttcccttgtttgtcaatgtgtcgtataagctggctactattattaagattggttatcgtaatttctttctcatactttttgtatttattttatattgatgggagttcagtgccgtcaacacctagagcttttgctggatagtatcccaacgatgtttcaggaaagtaaaattcctgaatctgcttttggtgcagcagttaag

SEQ ID NO: 144225 - DNA, 3260 bp, Arabidopsis thaliana landsberg
cgaacttctccctcctcctctcactttcaccatggattccgtctccggttacgccgccggagcaggtcagcctcgagtcggtgggaaaattgttcgaccacgacgcaccgctgttgtcaggacgccgtatgagcgccccgttcagagatcccgagatcctcctcagcaaaaccctagttggatctccaggctcgtttacaaacccgccagcgtaatagcttccggcgccggaaaattcatttcttccgtcgtcttctccgactcttcctcatcttcggaggaggacgaggattcatcttcaggtttgtaccatttatttcagtttagataggattaatttgaatttttggtttattgtctggtcgaatctgaaagctaccgtttcgtttgaaatgtgaagtttgacttaaagctttcccattttctctttcctttaatatgtgggacttaagagcagttaagcattgttgtactctatttagttaggttacttctaagctataaacttcatactaattctaaagctctaatttttattcatataatgtagttctgggattgagaataccaaccagctttgttgtgtcttattcttttaatgtatggatttttatatgttttcttctttgtttgcagatattgatggtgatgaggatgttgagaagaacaatcccgattttactgaagaggtactaaccaccttgttcgttttggtgattgctatgccactgtagtcctatgataattgtttgaagtaaagttcgtgaagctaacacgttttcaactgagagttttttttataaaagcataatttcagtttttgtgcttgtgtgaataggaccttctgagtgcccagcaaccaagcattcaacgactcagttctaagcgtgtaattgagcagcttctcttgcaagaaacatttgcaaggtatttctctgcctggctttttggacatcataagtagcagcctcctcgactattcttattatttacacctcatagcttaaagaatctttctgagacgtgtgtagttaccaaatctaagctgatcttgtatcctgcttattcattcatgtgtatgttgtttcagggaagagggtgataggttaatagatatcatcaaggctagggttgtagatcatcccagcgtcccctctgctattgagacgagtcatgatgactatggattgacaagcggtatgttactgatggtagactgtgcaagtagaccggattagtctatgtgataacgtcttcttttctattttatttctagacgtgaatgtgggtgaaatgtccaatacagctgtcatggaagcaagaaaatggttggaggagaagaaatcaggatcaagttcaaagtataaagtaagttctggaaacttgcttcttaactgttctaattgctgcagcctgcaggtatcaacttttttgtgatatcttgtctccgtgctctaagccattattattatagaaggagacatcttctgtttgggtaaaatgatttgattgttatatgccaatccatgtgatcagcaacttaaagctctcttgcaaaagtaggttgttcagaattctgcgtgtggccatctggtgacgttaatcctgaaatgtcctgattgggaaatacctttttgtccgcttaaaatgcaaaagatccatattgttgctcttcttttgactatgaagaccatttacttacatgattttggtcaacttctgatagcttcgcttcacagtattctttttccattgtgctttaaatgatgatcaccatctcagccattagtttaaatctccaggcaactgaagatggtgctggatcgcctgtggacgtggccaagtcttatatgcgagctcgtctgccatggggatctccagctgcgaataatttagattttcgatcaccatcatcagcaagagtgcaagggacaccccttccttatagcgctggaaacttttcctcatccaaggttagaattttaagttctccagcagtgcatacttttcttttggtcaaatgttgtttgaaagtctgaagtcgtttcatcttggtttatgagataaaattctctgcttaacttctattgtttatgttagataaccacgaggaatttgtgggacactatttccagctattcctaaagaaaagttgcataccgttatatgtattttcaatggctctctcaaatttacccttattcattctgacattggttaccaaatgcagctgaaaaggaagtccggttctaatcagtcatggaatattcaagatgaaattcgcaaagtcagagctaaagcaaccgaggaaatgcttaaaagtcccagtagtgtagcctctttggaacctaaatacagcccctatgttttagcgactgatatgctcaaaggaaatgcttcgtctttgaatgctgatggaggtgttttttttctttctttattcacacgtggaagaagtttttcagtaagacatgagttgaaactgaaattaactcttcttttctgttctttcagctgtacggaatgaacaaagcagagctctaccaaattcagccatacctacctctgagcacaatcaggtatcaagcactctttacactatgtgtctctcattaccaagaaaaaacttgcagttccaatctttcttgttttggtgtccttgtgtgttttacttgagtgaagactacggaagctaatcaagccgtcaaagaaacaggagttttacacactagatctcgttagtttctcccttaatccttaatttgtatacactctctcatcttcgctttttatactctgtctcatggatttaatgtgttctgattaggtggagttggtttggaggagacatttatctccacacaaggagtcaagccatctgaagatacgaataccgctcctcaaaggttctttttattgtgcttatccttccaacacagattgtaccttgtttctttttgacagatatgttttttagtatatcaatcttctgaagtttttcaactgtatgcgacagtggaactgctgtagatgacttcaatgatcaagatggcgattttatccaacctacttctactatcggaaacaccacaaatggtatacattggatgttgaattcctttggttctgatttttagttgggttctcttaatttacttgcgctcctattgatgcagctgtcttggctcttggggcaactttggaacctactgggaactcttgcatccctaaagatgtgtttaaacatcaaaaaaagctga

SEQ ID NO: 144226 - DNA, 531 bp, Arabidopsis thaliana landsberg
atgtcgacctcaccatatgaaaaattgagcgaacaggagaagaagcagatgattaaagagatccaggagcaggcctatgaggcgttgctatacgcatttggcgtggaaaagaaggtacatttcgaaattatggtattgagaatttaaaattttacattcgattcgtagctaattaattgttctttctctgaaaatgttttcttaaaatgcttatagatgatcagtgatgatgtgaagaacctattgaacatcaaacggaagtctgcagaggaaaagaggaagatagcgtacgaagcaactctgcttgccgccacattcagtcattccttggcaaaagaccgcgatggtgtgttagctacgttgaagaatcaactccatataactgatgactttcacagggaatgccagaatcgtgtcaggaacaacattttagtcgtccaattgactggagaagcatccggctcgaattatgtaggcgaaacagggtggacgactctcaggcgtatcagcaacaccatcttccgcttttaa

SEQ ID NO: 144227 - DNA, 1881 bp, Arabidopsis thaliana landsberg
  unsure (1)..(1881): unsure at all n locations
attttatcatcatggaccagataatgttaatgaatttgcccgtgtcttacctagcaatctttactcttttcttcaaaggcttcgtctcctcgttaccttcgggatatatcaatggtttcaaccaatggtcacggacatggactaactagcaatctcaactatcgattttatgaccggtcttgtccgcgtcttcaaacgattgttaagtccggagtttggagagcttttaaagatgattctcgaatcgctgcatctcttcttcgactacatattcacgattgttttgtcaaggtaagtttatttttgtttgcttaataatattgtaagttacgtgacattttctttttataatatacgcatgcatatatcagattgtggattatatatcactcacactagtcaaacatactctataggtatattaaaaataatcatttaaattctacagaattttataacaatttntgtattatttagtagtaaaaaaatacatattagagtagatgtcctagactacagggtctatatatgtgtatcaaatatataatatttcctttatgttgtagggatgtgatggatctatacttctaaacgattcagaggatttcaaaggagagaagaacgctcagccaaaccgaaactcagtccgtggattcgaagtcattgaagacattaaatctgatatcgaaagttcttgtcccttaacagtttcatgcgctgacatagttgctctcgcggctagagaagctgtcgtcctcgtacgtgtgatcttaaaacccaaattcattaataatctgaaatgtcaaaatattaatgaaaaaacaaaacataatcgatcggttacttagttatgacttctcatgccatgcagactggaggaccgttttggcccgtgcctttgggacgaagggactcattaacggcgagtgagcaagcggcgaatacaaatctgccatctccgtttgaggcgttggagaatataacagccaagttcgtgacccttggactcgacctcaaggacgttgttgtcctctcaggtttggtcacttcaactaacgataaattatagagataaaaataataatatcgattgactattgtgttaattaaccaaaataataaaaacaaacgtagcaaaatcgattattataaacaaacttagatagagtaaagtacttcattaggcaagtatatacatgaacttatgctacgatatgactatacgtgtatgtaggagcacatactataggatttgctcaatgtttcgtgatcaagcatagactcttcaatttcaagggctcaggccagcctgacccaaacctagccgcttcctcagcacttctctctaagctaaaggacacgtgtcctaacgtggactcctcagactctaagctcgctgctcttgacgcagctagctcagtcaagtttgacaatgcttactacgtgaacttaatgaacaacataggactgttggattctgatcaaaccctaatgacagatcctacggctgccgccttggtgaagtcgtacagcgagaatccgtacttgttctcgagggatttcgcagtttcaatggttaaaatggggaatatcggagttatgaccggaagtgatggagtaattcgaggaaaatgtggatttccaggttaagttatatatagactcttcacaaaatccaaatcagtctattatatatctagagctaatctagctttaatgaggaatcaaataaaccaaagtctatgaataaaatatgttttatatatatggtgtaaaagcgtccttatgtatcaatatatatatatggatcacataaacaaaaatacttggacttgtatgtgtgttacgtttgtgtgtaatggaaaatgtatttgtctttgt

SEQ ID NO: 144228 - DNA, 703 bp, Arabidopsis thaliana landsberg
aggagattctaggcagtgagaatgtagagggagaagttgaaccaccaccagagagatcattttgggcgaaatatgtgagtaatacgataaagatcttttgatgattccttctttattttaggtcttgatgtaactttcatatgatacgcagtggatgtatttgataccgctgggactcgtagtgatgaatgccgtgacacaagcatcaaacatggctgaagaacctgcgggtggacaggcaggaggtgcacaagtgcaaccagctgccaggagaagatgattccacttttacttctcccaaagcaatgaaaggtagaccacgccgcaattactatgcacaaatttctcttttacctagcagtctttaaatcttatgatcctaggagaatacatttatatatttgtttggctatcttcgcagctgtggatttatattatttggttgtaacttataagtcacgtggaattaaatgaattcggagtttgcatggaaatatcaacaaggtttaggaagctgtctttgaagtgcgatataagatcaaatctgatttttagcttatgttgttgtagctgcagctggttagagatgatgattcaacagatcttcatgtaaaccatcttgccatcatttggttttatgtaacctttaattttaatcctcgatcggtgtgtttttgtactcaccaatcgagaaatcaaaaat

SEQ ID NO: 144229 - DNA, 3703 bp, Arabidopsis thaliana landsberg
atggttaagaggaagaagaggaaacccaccggaaaacgtgaaaccagtgacattattgaccctcctgctaaagttgaagcagaaggtcttgggcccaatgcatgtgatagctgccagagatctcaaaattctcatgaaaggctgaatgagaggccctgtgaagagaatggtgatgaacatttgcctctggtaaagcgagccatagttcgaatgagtagagctttttatgctgatgaaaaggtcaatgcctcttcacaggtggaagagagatcgtcgaaagacaccctactaagtgcagctttgcagacaagcccttctgtgaatcatgaaaatggtattggttctggtcatgatacttctgcagccgaagaatttaacagctttgagttgtctgctaagctttcaggtgttatggttgatgtagtgccttctcatatggagaaaccttcagacagaatgtctccttctgtggcctgtgttcagactgtaggagatagacaaacggctgtgaatttccatgagaacgagtttaccatgacactagatgatgaagtaactcgagcacaatctaaccaacttagcagtttggtagaaacagaagctcgtgttcctgaagtagttcagggatgttctgaggaatcgcaaactgggaactgtctaattagtgagactgatcctattgatatacaatgctcacatcaaagtgagaaacatgaaacccctttgaatcctgatatcgttgattcatctgcaaataagtcccccggtttatgctcgagtttggatatgacaacaacagaggtacctgctcaatctcctcaccaacacaaaatccaggagtatgattctagtgaccattcattggtcattgttggagattctcttaatggaaaatgtgagaaaattgattactgtatgactcaggttgttcagtcccaagccttagaaccgccgcctccattgttctgttcagtggtcaattatcaggaggttgaaaacctgcaggagactgaaaatactctttggaatgaaaaccaaggaagtcccggtaaagaacttgatagtgacaaacaagctcacatgatacagaatccagtactctctgctactgaaaatgaaatgatcgtagatgatgcggaacctcagtatgaaactgtatatagtcactgtgcggatgctgtggagaacagagagctggaaaagaggtgagtttactgattttgtctctactcctatactaacctctgattctatgttgtttccttttttgattttccttattagaaaaacttttctaattacaatcatgtgttcaatttctaaccacattggaatattttatgcatggagtcctcataggcagattgatgtagaacatgactaggaatctatctattcactttttgacataaaattccatttctttgttatttctttctttctttataatttgcattttccttttacagttgaagattcccagttcctatttaaattttctcttgctttgaaagtctatgtagaggatatgcatattgagtttaagcaaaacatcaattagattaagtttcttcagactttatcttggtcaagtttttccaattcacggaactggttgactaacagtatggtatgtctgtgtgcattggcagttgtgaggttgatgagcagaaggagcagatgcaagccaccaattctatctcagtatctgagaacttttcacgtgaaaaattgaattcatctcctgcaaggggtactccaaattgcaactcagtatgccgaatttctaccgcagaaagtgaaaatgctatgcagaacaacagttattacagcaccaatgttcagtatggtgagaacaaatcattaaatgttgacactgtcaaagaagaaagcaaagttgaaacaggcacaactcaggtgaagaaggttgttagttctgatgtgcaatgcactgttgagtcttttgagactgcacttgactcattggtgaggacaaaggagaccattggccgagcaactcgcttggctatggacttggcgaaatttggcgtttcggcaaaggtatgaaacgttctctctgcttgtgatcttgtcttatctgtttgtggatgccacatgttaattagaggtggaatccaatcggagacaaatttcttcttatagattgttaaaacattgtacctggatctgtcccatgctatatacctatttgcatttatcaaatagttaattgcgagaacatgtcaaattgtcaataccaactttatgtattactacgaattagagaaacaccttatatatattgttttgtctactgattttaggatgctgtaggcatccagccactcttttcaagcaaaggactagggcaatccttattatcttatcttaccgttttaatgtggaaagggactttttgcacggtgcttttgtgtaatttataaaacactattttgcagacttttgtctaatgttgttaatgatgctctaagaatctctatgtctaaaattaggcgatggaaattctggcccacactttggaaagtgagtcaaatttacaaaggagggtggatttatttttccttgtggattctattgctcagtgctccaaaggtttgaatggtgagtatgctgtttttgcttagttgcatcattgatgttctcaatggcgagttaactttgtgaatactacctttctattcaggtgatgctggtggtgtttatctttcatccattcaggctatgctacctcgcctattaactgctgctgtcccagctggagctaccacacaagaaaaccgaaaacagtgcttgaaggtatgcgattttagttagatattctttttcttatgaatactaactctcaccctttctgctatttataggttttgaagctttggcttgaaagacggatcctgcctgaatctattgttcgtcaccatataagagaacttgattcacatagtatagttcctgcttgcctctattctcggcgctcagctcgaacagaaaggtcgttggatgatcctgtgagagatatggaggatatgctggtggatgaatatggaaggttagatttttcgttttttgtgtaatctatatatgtacccctgtctctagattcgttaaaactaattcatctttacttatcagtaactcaactctccagctccctggattttgcatgcccgcattgcttaaggatgaggagggagggagtgactcggagggagggtgtgactcggagggaggcagtgactcggatggaggggatttcgagtctgtcacccctgaacatgagtccagaatccttgaagaaaatgtctcgtcatccacggctgaaaggcatacgcttatattggaagatgttgatggtgagcttgaaatggaagatgtggctccgccttggggaactgaaaactgcacacacactgatcaagctgataatacaaaggtttccaattgtcagcttggacagcagcatcggcccgtctttggcacttcacatcagcatatgtccttgtcatctccaccactgccatcttcctcgccaccaccgccaccagctcccccttcacagcagggggagtgtgccatgcctgattcctacttgaatgggtttgaaaatggaggatatcgcaacgtgcatgtacgtttgtttgttgtaaaatcgttttacaagaaagatgatgatatatcttga

SEQ ID NO: 144230 - DNA, 936 bp, Arabidopsis thaliana landsberg
gtcaggggtttcaaagctcttaagcagactgtgaagatctattatcgtctaggtaaatacaaagaaatgatggaagcctatacagagatgcttacatatatcaagtcagcagtcaccaggaattacagcgaaaaatgtataaacaatatcatggatttcgtctctggatctgctagccagaacactggcctgctgcaagagttctatcagaccactttgaaagcccttgaagaggctaagaatgaggtttagaagctattcattcgttttgtataagctactgattccttctcaatcgtttggtgttgtgaacatatttttttctttcacagagactctggttcaagacaaatcttaaactctgcaacatctggtttgacattggtgaatacagacggatgactaaggtataatgttgtttaatcaaatcttttgactgacgctgattatgtttagtgatcctagtatggacaataacatctattattgcttgccagattctgaaggaactccataagtcttgtcaaaaggaagatggaactgatgatcagaagaaaggaagtcagctgcttgaggtttatgcaattgaaattcagatttacactgaaacgaaggacaacaaaaagcttaaggtaaatgtcataagctacatggtttcttacaattttgagattctgcaattttattgctgcatactttcttctggcttttgtgactgagactcaacaacactcttgaatggatgcagcaactataccataaggcacttgccatcaagtctgccatacctcatcctaggatcatgggtataatccgcgagtgtggtggaaaaatgcacatggcagaacgtcagtgggaagaagcagcgacagacttctttgaggcttttaaaaattacgatgaagctggcaaccaaagacgtatacagtgcctgaa

SEQ ID NO: 144231 - DNA, 573 bp, Arabidopsis thaliana landsberg
gatcatcgccgtttgcgttagcttgtttgcttttttcatcgccattctcttcaaaaaggatttgtcttgtgtgtggtttgagttctcacaatgaagggtgagtgtgaattagagtgagggaggaggtttcatagacttatggttgggggtatttattgaggactagagcgagtggaaaatctttttatttattttaaaatgaatatacggattacagaattatgaaaaatgtacatatacgagtttatacaccaccacaacatgtgtatacagagagagagggggatggtaatatcgaggcgttgaggagattatgatgtgtttgttgtcttgaatatgaatttgcgtgtttgctacgggtagccatttgttgtgcatttagatgataaaaaatatttaatttgttgcagaattgatagaatgtagaaactcgaaagcgaccgcttgggtcatctggtttggctcgaagagagaatctgatgaattaaattttcttataaaaacggaaaaagaaaatggcggtgtgagtttggattgtaatatagatattaaccgtttcgaaaaatgtgaaag

SEQ ID NO: 144232 - DNA, 865 bp, Arabidopsis thaliana landsberg
gtgggactggaaaaaggtatagagatgttagatatattcatcagctgtgagatgcgttcttcgatcctcgacgactttaacttctacgaagagcgacagatagctatccaagacagaaaagccagacaacgtgctgttcttgaatcgctcgcactttctgcaacctctgctccaacatattctctccacgacgattttgtaagggaaatgtccaagcactttgcagaggctttggccttgcaacacagacccaaatagacctcttctcttttaggacttgggattggctgaggtttaattatggtttttggattttgtacatttgataacgtacttaaggagcataggttgtaagataaaattcaaggttctaaaagtcggtatctacaccttcttgactatttgaaagtttagttttcgaccaaataagttgttatgattagcatgtcaaatgaataatggaaaatgaaatagcataaatttactcatttgcggagagatatcagatttgagtgggaagttgactcattacaacaaatgtccgaacaaagaaacacacttgaaagataagttttgaaacaaaagggacaaaaacaaaagcaccaaccaacttcataagaaaagattacatccctaatgtgacatgtctaggcaaggtcaagacaaaggagacggccatcaaagcgacggctagagcaacgactgcgtgaccatcctttgctgaagctgatcctcccttatccgtggacgtagctggagttgccggagactttcctgctggtgccaccggtgttgttgtggcattgtttgtgaatacggctgcgtctggcgagctaggtgaaatccctagaagctctgttcattt

SEQ ID NO: 144233 - DNA, 362 bp, Arabidopsis thaliana landsberg
gatatttactgaaacatgccagaaactgaagatcatgaagggttctgattctattggcttaggtaagttttccaacatctttccccctaatctgaatacaaactcaatggctcatttcattgttgatttattctgtggcagctccaggtgcagtggagaaatcgaagaacaaagagcgggtttgaaacgaagatgctcaagacaaaaaaaaaacactatgcacagttccaatgtttaagttttatttactgatgtgtttgaaaactctttagtctttttactaatttgcgttgtaagactttggattctcttatttgtgtgtgcttgttcaaaacaaatacattcttatgtgtgtgtttcta

SEQ ID NO: 144234 - DNA, 1181 bp, Arabidopsis thaliana landsberg
tttccggtgataatcattgacttcagttttcgtgttgattctttgttttctaatcatagattgctgcgaattcgcgtcaatttagctgcgctttctcgatcttttgtacttcggaagctgcaacgttgtagaatcggcggatccaagtcggtaattactcagcttctggtaagtgttcactgaccgatcgatgtgattttgaattttttgtaaccagaagatatatttctggcttcagtcttcaaatttatccaacgcaattttctagttctaatgcttgttttgtggctctggaattgaaaatcctttgtaatctgagaaagttctggagtgttcttcagatttagttttaaatagttgcgattaattcctaaatgcaggtcgtaagactagtttagatctgaattctaaacagttatagttcatctagtatcagatttttgttaaattagagtttgatgtactggaattagaagggatcattgcatgctaatctttgatatgtgttgtagactgattgaatgattttatctgtcttaggttgtgatgttaatgtgagctgcccaattttgtgatggtggattgaagcggttgaatttttctacttcagattgcttttgtgtttgatatgttactcataatgagattatagccttgaaattatggaggagattcggttatcgccgctgagacagacaagtgttaagtcttcactgtcagggaggtctactccaaggggtacacctagagtgtattctggtaggactccgcgtagaggtcatggtggaggaggagcgtttcagtggtttcgtagtagccggttggtttattggctgcttttgattacgctttggacgtatcttggattttatgttcagtctaggtgggcacatgataatgaaagcaaagttgagtttttacggtttggaggcagaccgagaaaggatgagttatatatggagaagattaaaggactggatgttgttgctaatgagaattctgaggctttggttaatattactggtaaagatgatgctggttcgaataagaggatggatgttagtctgatcaagaaagatgatggggtttctcgacggagcttgagttccaagcagaagacgagaaaaactgtccggacttctcgtagtaagatccgtgttagcagaaggtgattaaagacg

SEQ ID NO: 144235 - DNA, 889 bp, Arabidopsis thaliana landsberg
gaagattatccatcgccatgggacaagtctttaacaagctccgaggtttgtaaaattgttttcagtttctcacattggttcatttataatcagttttatggtcaagtaattgtgcatatgtaataaaattgcttcttttgttatgtataatatgtatatggcaatgttaaattgcaggtaaagagtggagacataagcaggtacaagcgatatgtgatcgtgttttcgatcggttcaagatgcaaaccggaagagccaaccttacgtttgaagagttatacatcgctgttcttctcgtttacaagtaaaatctttggttccataacatttttttagtgttaatttacagatttagaaacttttatgtttaatctctcacattttttgtcttgttgtgtaatgttgtcagtgacataaacaagagattgcctggtcctcatttcgatccaccttctaaggatctagtcaatagcattatgacggtactttcacttccttgaaacgcttttaaaacgcaaacgctgaattacttcttttgcgtttgtggttatttgtgtaaagaaaaagtcaaaatgcaatttttaaagcagaaacggatgttcttttggcgattgcgtttagctttaaacgtttagtattaaccactgtttgtaacactacacttgaaatcatctggactctgattttggaagaacaggttgaaaaatcagataatgttactatttgtttttggtctaggcaacttgagtggtcataatggttgtgtgatgttcttgtaacaggactgtgatatcaacttggatggagaacttgatagggaagagtttgtgaagtttattgagcagattacggctgagacgtttaacgtggttagtcagggtgtgatcat

SEQ ID NO: 144236 - DNA, 1056 bp, Arabidopsis thaliana landsberg
gagaagcatcatgacactgcagctcagttgttctgttgtctgtacaaaaaggctccacctcccggtcttctgtttctgtcacagaaagaaatgtttggcgttgtagcgcttctaggttcagttgcctccacgtcgctaagcaggtgacattgattttatagccagagtctttctgatcaaattcatagtgtctacacttggggcaaatcttcaatttcctaagttatttggtatgacagggttttgtctgaatatttggggaaagacacaatgctttctttggtgtgcaaatcatcacagtttggacccaaaagcgatgagtatcgcaagcttcaatctgaagcagctagcctcggacgatctatcaccaatcggtttcttgttatttgtcttgatgcaactaggtattttggtactcttcctttgatatttggatttcgtgttaatcttttgcttaaccagatatgttctggttcaaaacatgcagaccttggaggaacggacttgtgaggaatgatcctcagaagagattagccatggataacccttacctgccgaatggagatcctatacccggtttcaaaggctacgctgtgaacatgatagatttagcttcagaggagctggatatacaatcaagctcgggttacgggcttagagagacactattctatggagtcttcacagagttgcaggtatatgagaccgcagagcaagttaaagcagctcttcctcacatcaatggtggagacgctgtgtctttagatggttttatcgcaaaagataacggattcatatattccgggtgcaggtacttgaccttttcttgatccttgtatccgttttagttcttgaatttaaactgtaatattccttgcatctgtatttactgctgatgatatgatttatggtttttggatcagcataccggaatttcatttcccgattacactaaaggaggatgaagaagtgaagctgagaaaaatggaagcagcaagagatagagtgagaatggcagcgaagaagatagaggaggagaagtgttcaatgcgtaag

SEQ ID NO: 144237 - DNA, 1439 bp, Arabidopsis thaliana landsberg
ccatcatggttcaatggattgtaaaggtgaattttaactttctgttcaaatgcatttagttacatatacattgatctctgaatgttaaagctcagaaatatgtatcagtagcagaagattatgaagtaaatgaatatttggagatcctgttcctggttttaagaatgttttagcctaaggaaatctatagcttactttggaatcttttaaggtttatgtatcagtcagctatgatattctttgttgctgattgtctgctccctgattacaagcagcaatgttctgacatggggcttcagcaagagacattgtttctaggagttggtctgttggatcgattcctgagcaaaggatcattcaaaagcgaaaggactctaatactagtcgggattgcgagtcttactctggccaccagaattgaagaaaatcaaccttacaacaggtaccaaccatattccatcttcatgattctgacttccaatgttcattagaaaagtgttctgagtaggaaaaagattaggaccattacaagaaactgagtattacgcttaaccaaatcaaggactaataatggtctaatacaaacccttatggttcaatgaattggcatttcatgtgggtatcgaatattggattatgtttctcaaaaacactctttactggaaagaaccttccacaatacacaggaatagttcaattttcttcaactgctcacctgatacttgctctttttaactagcatccggaaaaggaacttcaccattcagaacctaagatatagccggcatgaagtggtggcaatggagtggctggttcaagaagtcctcaacttcaaatgcttcacacccacaatcttcaacttcttgtggtaaaacctctctgactatatattttcatgttccaagacacattatccacacagaaagatacatatgactatcatttatacatgtcaggttctacttaaaagctgctcgagccaatccagaagttgaaaggaaagccaaatccttggctgttacctcactatccgaccaaactcaactctgtttttggccctcaactgtagcagctgcactcgtggttctcgcctgcatcgaacacaacaaaatctctgcataccaacgagtcataaaggtatcatcagtcccttcaataacactttaataccttttagtatcgagaatatacaagaatcttcacaatcccaaaacctctctttctctccaggtccatgttagaacaacagataacgagttgcctgaatgcgttaaggtgttttcagtaacactctcattatatacaaatctcatttttaccactaaacgtaaggtaagtgactgttttcacatttttgttccctatacaacagagtctggactggttgcttgggcagtaagcaatcaaaaagaacaaaaaccctaaaaccaggacacagt

SEQ ID NO: 144238 - DNA, 875 bp, Arabidopsis thaliana landsberg
cacatgcggtcttctcttctcttctcatcttccctttttatgattttttttccccattttcctctgcgtttgattatctgagagagagagagagaagaaacttgttctaacaaaatcaacaacaacttatagaagaccaaaaaaagattcataggatcttttgcttgacaatgaaagaaggaaaggatgggtttgttcgagcagatcagattgatctaaaaagcttagacgagcaactagagagacacttaagcagagctttgactttagagaagaacaagaagaaagatgaagaagacacaaccgccgtcgccatcggtggctctgcttcttcttcccctgtcactctaaacggcggcggatttgttggcaagaggaaacagagacttgagtgggagatcgatccttctaaacttatcatcaagactgttcttgctcgtggcacttttggtaccgttcatcgtggtatctacgacggtcaagatgttgccggttagtcactttcccgtcgttctagcttccttctctcatcgaaacctttccctttcattttatattattagtttgtaactgtgaaataatgctaaagtcttcaagtttagtttaaagtctcgaatttaagaatggattactacatttgtacttgaaatgtcggatccgaaacaggctttgtacttgaatagtttagttctgtgttcgtgttttttgaccatgaaacttgttagattgaaaaaaagtttggatttttaagattaaagttgctgaattgttttggatttgaagagtttttttctttagagggtagaagcaaatcttgtgatctccgtgaagccgacacgggttttgaaatcaaaagtgtttcttcagctacttga

SEQ ID NO: 144239 - DNA, 1667 bp, Arabidopsis thaliana landsberg
  unsure (1)..(1667): unsure at all n locations
aaagccatacacgtaagattgatcatggctggcttaagctttttcgttttagctcactgacttacatgaagcgggggtagtgataggtgtcaacttgtaacattatagtcttccctttagaatcatctcttctacaagacgtttcagtattcttattcttcttactctgcatcgtcctattaggtttccatagagtttgggtttcataatcaggttctgttcacatttttaagttgtctgacaaatttattcaacatggtcatgaaatctaaatgcctattttctttatatatatatttgatggctttgttagaccatctgttttattactagcataattactccttaattcttgtcaagtttttgaccgatatctaagcatacacaacagaaggacctctcacaatgtatgatccattcgaccaaaccatagaaactggaaggtcattgtcagagattgtaatggtgagaccttgaatttcatcagtttagaaaccaaagacatttcagtggcccatattatatgcccatacggcccagcccattaagaaacaattggagcaatcggagaaaaaagagccagagataagctaaaannnnnnnnnnnnnnnnnnnnnnnnnnnnnnnnnnnntgacttcttcggcggcgatcagatctgacatctacgacagagaagaacgcaagcagttaatcttccttctttcgattcttcttcttcttcattctcttgttcactgtgttcgaattctgtcttctttctcttgattgctcagtcgtgtgtgcaggcaataccaagcacatattcgtggcctgaatgcttacgagcggcataagaagttcttgaaagactacggtactacacgtctttcaatctccttgtaaatgtctttggatttgttagctcgataattaggttttaataatggacaaaaagtttgggaaatagggtaaataagtggctttctatttatccaaaatccatattgtcccaaatcaaaactggttgatgaacagtcttctcctctgagctaggaaggaggctacagtcagccttacatgtcttattttgttggtttccattagaaagagtattcttttaccctggagttagctactatttgaggagctgttggtgttcttgtttaagattttgtagtttcattctttgttttgcaactttacagttcgattttatgggaaggataagcctgcagaagttaagttaccggttaaaactgatcaggacacactacgagaaggatacaggtatggtgcaattgtcaatatgtttttgtgttttggaaagtttgaagttttaagatgcatgctttgttgatgaatttacaagtcttattgttgaatcttactttgaattcgccctattactacatcgcctttgtatgtttttacttaattttgggcttgtcttgcaaggtttatacgttctgaagaagatgatttggatccttcttgggagcaaagactggtgaaacgatactatgataagctttttaaagagtatccttcaaaacatagtgctgcttcagatacactaacatccgttagattactttaagttatgggattgtggataagtgcatgtctgttctccttgactgtttgaagatactgtatagctgacatgtcaaggtacaagactggtaag

SEQ ID NO: 144240 - DNA, 1106 bp, Arabidopsis thaliana landsberg
agtctcgctcaaatgttgatcttaaggtaatacgatataatatgcttttggaggttgtgatcgcgtgtttcggactaatcttcatagttcaaggcataacaggacaaatggagaaatataagcgtgacagctttatggggttcaaggaagaaggctaaacttgcgcttaagaggactccaccaggtactaaacaggatgataacaacacagctcttaccattgtggctttgactaatgatgatgaacgtgcaaaaccaacttcccccggaggttctggtggtggatcaccacgcacttgtgcttctaagagatcaattacaaggtttggttccctgacttatgcaccacataacgattttcttgagttcataaagatttgatcttgcgctattgtctgtttttgtagtttggataagatcatctttgaggcaattaccaacttgagggaactacgcggttctgacagaacatcaatctttctgtatatagaggtatttctaccattgggattacatgtttggttggggtttgttgcatacttacttagtagctgttaaatttcaggagaatttcaagactccaccgaatatgaaaaggcatgtcgcagtacgattaaagcatttatcatcgaatggaacattagttaaggtaaacacacaacttttgattcaagattcatgattactaacacttcattactctcagaattttcaaaaatacttacttggtgatttctcactttcagataaagcacaagtacaggttttcttctaattttattcccgcaggtgcaagacagaaggctcctcaactctttctggaaggaaacaacaagaaagacccaacaaaacccgaggagaacggtgccaacagtctcactaaattccgagtagacggtgaattatatatgataaaaggaatgacagctcaagaagctgcagaggctgcagcaagagcagttgcagaggcagaatttgctatcacagaggctgaacaagcagcaaaagaggcagaaagagcagaagcagaagctgaagctgctcagatatttgcaaaggcagccatgaaagctttgaagttcaggatccgtaatcatccttggtga

SEQ ID NO: 144241 - DNA, 1656 bp, Arabidopsis thaliana landsberg
atgcggaaaatccggttaccggacctatccaagccctggagagtaaagaactggagaagatcgagatcagagaaatcttcatctcctaagtattggggacaatcatgccagttttcttgttcatcaacgtcatcgcttctcgtcaagaagggtctagcgtcaattcctagatcagaagccaacacaaccaccgaaaaatcttcagccatcaccggaatattcctcctcctcacggattctctcgtgtcctttttgtttagaccagggattagaggatttatactaacctgcgggtgagtacacagtgtttaacgtgcgactatacacgtggctaaatctaacgagtctaatgaccttttgaacactagagaaaactacgtcgttttattaatcgtctctctcgtttctcagctacattctcagcggtgcgtctccgatccggcgagattcgattcgatttctgctgacaagtcaaactctttgcccagaaatagctaagaaggtaagcgtcttttgttacccaattcgagaaagtcgaatttttttttgatttcattgagataagtgatttaacagagcttttttgtcaggtctagaggtgaaaaaatggcaacttcgcgtttacagttggaaggagatgactctgtacatctacacattactcacgccaaccttaaaagcttctctgcggacgctcgtttctctccgcaagtgagtctcgttttacattcagtactgattccaactgtttttcaatgtagtgctatctataaaggcttttttgtttgaattttgttctgtagatgagtgtagaagctgtgaaagaaaagctatggaagaaatgtggtacatctgttaattccatggctttagagctctacgatgactctggctcaaaggttgcagttctcagtgatgattttagacctcttggtttcttctctccttttgatgggtaacttttgtttctcttcatatctcgtagagattgcaaaaggttggctaatttagagaacttggagccagtttgactaaatagatctctgttcactgtaatcttgatagatggcattcaattacatgacatggcttcttgttttatcatttcatctgattgttcttttctgctgctttcaataggtttcggttacacatcatagatcttgacccctcctcggtcacaactggaggctggcttgaagatacgtcactggttgagaagtataacatctcagaggaggattatgctaaacgaactggtaaattctctactacctgtaatcggtgtctcaaaggagacaagtttttctatcaagtgactttgaatatatgttggattcgtttgatggttgtatgttcttgtgttcaaattccagacagttttaggaaattcaaagaaaagagagtttctcaaaatccggttgctgctgaggctaaggtatgacaaacggatatatcaatataagccaaacttgtatgttgcttcttgttaaactttcagcgaaactgaagtttttagcttagtcactgcggagaagtatttggggtaagactaagtctttcaagaatacaaatgttcttatgtttcttcttccaattttatcctttcaacagacgaaagagaactatatggaagatctctgcgcaaatatcaag

SEQ ID NO: 144242 - DNA, 3756 bp, Arabidopsis thaliana landsberg
  unsure (1)..(3756): unsure at all n locations
ctagttctgcttattctccaaagctaattggtcattgttgatcagaacagaattaccactctcatcctctgattcattcacatttgtcttcctccgcggtgaccttccctgttctattcctcctcctcctcctccagagtttctccgatcatctttagagaccaagtcctcagcttcaagcatatgaatgatatgacccatttttggcctcttttgagcattaggatcaacacatcttaaagctaccaaaagggtacgcttcaatgaccttaacgacggtttatcaaccatcctcggatccaaaactccttccgcatctcgattcgtcaccaatctcttcaaccattccacaagattcacttctcccggagcccggctataatccacaggacttctccctgaaataatctccataacaagaacaccgagctttaaacatcgctcctctcattcaacatcccggtctcgcgtattcaggagccacatacccaaacgtacccatcacacgagtagtcacatagctcatctccgaacccaagagcttagctaacccaaagtcagaaactttcgagttccattgcttgtcaagcaagatattactcgatttaatatctcggtgaacaactttaggctcaagaccttcgtgtaaatacattaaccctttggctgttccaagaacaatgttcatcctaatctcccaagtaagaggactcttaaaccccaaaccaccaccatgaatccattgttctaaattcccattatcaacatactcgtaaactaacatgctatgagctgcttcaacgcaataaccaagcaatctcaccagattcttgtgtcttacgcgtccaatagcttcgacttcgactttaaattctttctcagcttgtcctctgttgttgagcagattctttatagccaccattgatttatcctcaagaacacctctatacacaatcccataacctccttgtccaatcacattctcgtcagcaaatccattagtagaaacctcaagctctctcaacgtataccaatgtccccaacctaaatgagaaacctcaggacccgacaacataagtaaaccctgatcacccgacccggacccagacccggaaccagtccaacctcctcgttccgggtacgcaatccgatgatctttaccaatttcgatgtgaattttgttatcgtcttctctttgttggttttggtgtggctccggtgttgggtcgggttgaattggaggtcgaatctcttgaatctccttggaaacaacgggaacaatcgtatggttagatttagaagaagactcaagagatttgttcttgttgcttcgtcggtaaatgaaccagagagagatgagaacgagtaaaagaacgatcgcggctccaacgcaaacgccgagaacaacccataaacgtaaaccaaaaatggaagtgtgtctcgagagctgattgttgactgagtgagaatccgccattgcagctcactgactcttcttcttcttcttcttcttcttcctctgactctctctttttgcttttgttctgcttcacatataataatcatcacaggaggtttttctgaagtagagacaagaaaagagatgtcgaaaagacaaacgtaccctcgaagaggcaagctggctttgatgggacttgcactcatcattatttttagtatatatttnnnnnnnnnnnnnnnnnnnnnnnnatgagcaattattaaaggagggttttatcgttattaaaggtatagtcaggggtaatattgtcaattgaatcgtgttctgaacaagttttttttttgcgcgtggtctttggttgtgatttacacaaatctatctatcaaatcaaatcgaagaaggagagaagaacagagaaaaagaggtaatgagtaaaatctatgagcttttgctttatcttcgaatctaagatcaggaattgatcagggtttttacccaatttcgataattgtcttcttcgctggattgatttttgttctggaattgtttatcgtgtgtagttgaatcaaatatggctgggagagctacgatccctgctcgcaactctgccctcatcgcaatgatcgccgatgaggtaaattcgttaccaaaaaactcatctttttatatgttgatgaaggatttgaggttccattagtttgattctttagataattttgatttttcatttggatcttctgtgttgagttttgaatctctgagatgtgatctgaactaaatcaatgcgttgtttgtatagatttatttatccgtaaactgcttgactttttggatttgtttgtggaatttttaatctttttggtagtgattcaagccttagaatagctttgtccgtagttttgtgtatttcttgatttgggatcagaccaaatctgcagatgatctgatctgctattactgaattttgatttcagcacgaatcaggaaactaaggagtagaaatcttcctagaaactgtattaacattgaataacaagaggtttaggttttttaatgttagtcttcacaactgttctggcttaacaattggatttactccattgtattctatcagaaaatcatgtctagtctcttattttagacttaacttgcattttcttccttgtacaacgacttgttactggcagacacttaattggccaatggtggcagaattgtttggaactatccgttgatataaccctttagcaatcttcaatgccacttacaagacttaaattttgtgtacaggacactgttgttggatttttgatggctggagttggtaatgttgacataaggaggaagacaaattacctcatcgtggattcaagtatgtttttctaactcaatatgatcttgaggaaagataatcttttcaatcatgaatcaagttatgtcacttatctcaaagtggtatccttttgacaaaatcaagttagttgaagtttttcatctaatcaatttcgtgtggaattgttaggagataactctcttaacttctatttctgtagaatttgtataaattacccatctagtcttctaagttaattgatntttcttttcttttgggtntgnctttcagagacaactgtgagacacattgatgatgctttcagggattctcagcaggggatgatatcgctatcattcttttaagccaatatgttagtgtcttcttccaaatccagtttacggtggaatgttactcatcttaactgctatgtctgtactgtcttgtttaagtcgtaatcaaaggattcatgacttgtactcctccactttattgagccccttatgtttaatgccattattgactatcttacttgcttccacgcacccttttcatcatggatcaaagtcaccattatgtagggtagttttgctatctttttcccagcaattagtatattattggatccaactgtgtcagaaacataaggttaggctactttgtatcagccttttgacacatatcatttgtaaacatgaaatagaatgaggcctatctctatgtgctctatactgcaaagtctatttctttctacaatgtcaaaaatgtaatgagaaagtttcatgcttgtagatcgccaatatgatccggttcttggtggatagctacaacaagccagttcctgcaatcttggagatcccttccaaggaccatccctatgatcctgctcatgattcagttctctctcgtgtcaagtacctcttttctgcagaatctgtgtcacagcgttaaacatatgcat

SEQ ID NO: 144243 - DNA, 932 bp, Arabidopsis thaliana landsberg
cattatgacttccgctgccaaattggtgaaagtaagtctaagtgtccttgttactctcctttggaactagtagttatcttggcttgtttattcgacctatgatttttcggggtctgtacatgaatcttgttttatgtttcattccacagccagtttccttggagcttgggggtaaaagccctatcattgtctttgatgatgtcgatattgataaaggtgggtacttttggaaccttaagaaaactatgctatatatttgtattctaaaatgctggtttaatttgtgactaatattttgctctaaacagctgtggaatggactatgtttggttgtttctggacgaatgggcagatttgtagtgccacatctcgacttcttgtgcatgtaagtgagcctataatctacagtacctctgattttaaattctgcaccgaactgttcatgatatgtgttatccgttaacacatataaaacaagttatgtgttatccgttaacacatataaaacaagttatgtgttatccgttaacacaattatatgttgtaaaattaaaggttacctttggaaattaagttataattatgtaggctactctagtcataaaacaagtagaatatataacttatcttttacatgaaaccaccgatgcaaaggtacagagtttcagtatatgtttatctgtaagactggtcatcagcaattcggatagattgataagtatcagttgtcgtaggaccttgggaacccttgataaaagtaggatagcgaagctttactatacttcttgtgtactgttgttttcatgaaagaatctggtgaaatgtcaggaaaggattgctgacgagtttttggacaagctggtaaagtggaccaagaacattaagatttcagatccttttaagaaggctgtaggcttggtcctgttcttaga

SEQ ID NO: 144244 - DNA, 747 bp, Arabidopsis thaliana landsberg
atggacaatcctgagtgtgatcagtcaagaagtgagccatttgatgctctgagtgatatagaactgaaagaaagagaggaaggtgaaactttatatgcagaactagtatcaagaactagcgacattgctgtttctaagaagctttgtgaggaccctcacgacattgattgtcatgtacatgacatccatgtagtgactgatgaagataacaaggggcaactgaatgttccttctgaccatgccactcaggatctgaaactggacagatcacagagtgtttcagatacaagttatgcatttccacaaggaaaaagtaacatgtctaccaatatgcgaagaaattcaatgtcagctattgactatgaaagactgaaaatagagagtgaagttgggttgctgagaggacggttgagagctgtacaaaagggaagagagaagatcagtttctcttctaaagaacagagcaaatcgcaggtggtgcgtcgtggagataaaacaagccggttttgggaggctagaagatctggacctctcgactcttctagcccttcatccacaatggtgagtttcatcgttctttgatttgatatgagggtcgaaaaattgccaaaagtactctctttgtttcatagttcttggtagttaaatcttccatggttctttgcttaccaagtggctgaatcttgtatggtttcaaatggtgtttttgcaggtaaaggctatgtctatgccactggacctgcatag

SEQ ID NO: 144245 - DNA, 773 bp, Arabidopsis thaliana landsberg
cggccatggccatgtctgccgtatattgcggaaccaagagatcttacttcgacgataattcttctccgccctcttctaagaggttccgatgtttttcgccttccaattctccaatctggtcctctcctccttcctcatcgctcgatcagcttcactctgcgtttcctcatattgaactcacggtaggtcttccttctattcaatccacacagatctagctttaccttgttcgcatcttgtactagaaatctcactgactaggcatttgttgacctcaaattacgcatctgtctccgatatctctcttcttcttcttcttcaccgcctgtaaattgagcatcgaaaattcacgtctcggttgcacaggttctttatgcgattggttgtaagtaaattttgtacagtatctagggtttaactagatttgcaagtctttctcaggttctcgtcaaggcactagaagataatggaagtgattttaatgctgctatgaagagcttatactctttcgcatcttctgaggagaagaaagctgaagaattggccgcaggaggtgctgctactcaggaaactgatgccgtttgtggtggaaaccccccgaccagtggtgatgactgggttgaattgttagtcagggaagtgttacaatcgtctggtacagatgatgcaaaagtacgtgcagcaagagtccttgaggccttagagaagatgttaagtgcacgtgctcgtgaagaagctggaaacaaattccaagaggtaaataaagcattgca

SEQ ID NO: 144246 - DNA, 1100 bp, Arabidopsis thaliana landsberg
tatgagtttccagatacaattatggtttttaccaagaagcagatccatttcctgtgtagtaggaacaaggcttctctacttgaagttgtgaaaaaacctgcacatgatgagttgaagcttgatgttatcatgcatgttaagcctaagggtgatgatggaacagggctgatggatgccatatttcgtgccatccgtgatctatcccggggtgatggaaatgattcacaagttgttggacacattgctcgtgaagcccctgaaggtaagcttctggagacatggactgagaggctaaagaatgcaaatttccagttcgtagatataactggggggctgtctgatctatttgctgttaaagacgatactgaggtcatgagtgtgaagaaagctgcgtatctagcctacagtgtgatgaaaaatgttgttgttccaaatcttgagagtgccattgatgaggagaaagacgtcacccactctgccctgatggatctcactgagaaagcgatacttgagccaactaaggccagtgtgaaactgaagccagagaatgttgacatatgctaccctccgatatttcaaagcggaggcaagtttgatctcaaaccaagtgctgcaagcaatgatgaactgctcacttatgatccagcgagtatcataatatgtgctgttggtgctaggtataatagttattgctcaaatgttgccaggacctacctaatagatgcaacttctctccagagcaaggcatatgaggttcttctcaaggcacatgaggctgctattgatgctttgaggtcaggaagaaagataaacactgtctatcaagctgccctttctgttgttgaaaagaatgcccctgagttcgttgacaagctaactaaatctgctgggactggtatcggtctggaattccgagagtcaggattaaatataaatgcaaagaatgataaagtattgagaccgaagatggcatttaatgtgtctcttggtttccagaacttggaatgtgagtcagaaagccgcagcaagaacaagaaattctcacttttgctagctgacacagttctcgtcacagatcagaaaccggagcttttaacaaa

SEQ ID NO: 144247 - DNA, 1117 bp, Arabidopsis thaliana landsberg
taaagctctttcttctctcgtccttctctttcctcaacgtttctcgtcgacggtgtctctgtctggaaaatccccactgttcatatcggcgactctgttagtaagtgttaattacaaaaccagtccttttattttcctatttttgttaaattcttctcttaattaatattaatggtgtgatcttactttagttttcagacataagtacggatacgatctctacatcttcagaaacaaagatgcattcaatgtctgcaactttactcaagccactcttcttactaaacctaattccacttccttcacggtacgcatttcttaattcgttacaaaacttgtgaatttcttttatttggggaaattgctagaaagtatgagaattcatctagggtttctcagaaatttcataaagttgtgatcttttacaagctccctttttgttctctctgttcttgagattgacaaaaagctcctcttcccctgcttttcctctgtttttttgtttgctcaattaataatttccgtggaattgataataatagaatcttaaatccgattctttgttctgacaacagaattgaaaaatgattaaacacaaaacgtctcatgttcagggctcaatgataatcaataagaagcatcttgacaattaatacttctttcttttacatagtacttaaactttactctactgatctacatttgaactttatgattcttgttttctcagtggtatccatcaagaacaggctcttactacttttccttcacaaacaacacatctcttcccaaaacatgccaactcaaccagaagctcacagtccaagtcatcctcgccgcggcatcaccgccatcgcaaccaccagcaactgcccgtgttccggtttcggaaggaggagtgatctcatctccttcttcttacccttggccattaggtcctagagaaggttcagctttctctccgggaccatccccatcagagatcacgtcagtgacagtccctggtaaagacggagttccattcatcaacagtaatccggcagttcctcttcctaccggagatgtcgactctacttccattaaccctttaccaacttccactaattcagctcatcag

SEQ ID NO: 144248 - DNA, 2982 bp, Arabidopsis thaliana landsberg
atgtgtcgtcatggtggggctaacaactggctctaaccgtctttttggataactttagccatctcgttgcgacaaagagacacagattcggctctaaccgaacctaactcacgtactgtagttgtcagtcgaacctaaagcaatacggtttagtttcggttcaatttaatgtcattcgactcgattactcggtttagttattagacctgtgaaactcgagaggcttcttcgcttgaatcgtcgtgaacaaggacaacaaacgcaggtattgatggaaccagaggagtcagagagtcccatgttgatccataaggatgttaaaaagggctgaaatttgtgatcaggtccaggtccattaaaaaatatcgggctaaaattgggctggcctgttacagagcttttatttttttcttcttcttttacgttaagcgacgtcgtatcttgtaaacaacaaaacacgagtactgttttttcttcttctttctccttcaatctcttcctcaaatcactctttttggggttcgttttgtttgtgttgtaagcatccctgttgtgcatttcgtttatccaggtttgtattgcttacctaaacaagttcaagttttcgattttggtttctaggtgtttaccagtttcgccattttgtggtttattgtttggataatttgatttctttggattttgctgatacccatttgtgtgtatagaaatttgattaatctggatactaaatttcgtttggagaaacactgaaccaaaggaatgcgaaatcttttgatgatgattgaatagttttagtgcctgctaatactttagaacagagtcaattttttaaggtcatgttatagaatctgagtctacttgtcatttgctttggaacaggtgaattcttgcaaagccttgagcagctttcagatgataaagactttggtctctccttatagtgtatgtactctacctccaccactctttgagtcttattcttgtttagttcaatccacgtgatccagttttaattttatttaattcctcctatgcgtctgttaaagtcaactattttattctttatgtagggatttggatctcagaagttgaagtttgacagatcttctgagaaagtgaagacgagagcagtaagaatggagctcacaatcactcaacctgatgattggcatcttcatctccgtgacggtgatcttcttcatgctgttgttccccacaggtcttataaacatcctgcaatctttcttttctttccttgctttactttgttttgcagccacttttttgtttgctattggtgtttcttgtggaaccattgtttgttatgtatgaattcctcaatcacaatcttgtgctggcgttgatgcttgtgctgtacatgatggttaatggtgtatgtaattatgtgcagtgcgagtaattttaagagagcgattgtgatgccgaatctgaagcctcctgtcacctccactgcagctgccattatttaccggaaatttatcatgaaagctttgccatctgagagtagctttgatccacttatgacactttatttgactgacaaaactctacctgaagagatcaggcttgcaagtaagtacctgtgctttctccatcttgttgcaaactaatcagatacattttcatctttctgattgagattctacttgctaatgttcagtttatgcatatatgatcttgttattaggggaaagtggtgtggtttatgcggtgaagctgtaccctgccggagcaacaaccaactctcaagatggtgtcacggatctctttggaaaatgcttaccggtactagaagagatggtcaaacaaaacatgcctttgctggtaaataaatcatacaccacatagacttgtatttttgtctttgtcttgtctgaggaatgttttgattaggttcatggggaggtcacagatccgagtatcgatgtctttgaccgcgagaaaatcttcattgagacagttctgcagcctctaatccaacgccttccgcagctgaaagtagtgatggaacacatcacaaccatggatgctgtgaattttgttgaatcttgcaaagaaggttttgttactatcttattttcatttcttgtcttttggtttttgttaatctgcatagctcataacattttgttgattatagggtctgtgggtgcaacagtcacaccacaacatctccttctcaacaggaacgcccttttccaaggtggattacaacctcacaactactgtcttcccgttctcaaaagagaaatacatagtatgttcttcactttccttttgaacattaatatttcattttttcagcagctttcggaagatcattgcttttacttcattgtacaggagaagccattgtcaaagctgtaactagtggaagcaagaagttcttcctcggcacagatagtgctccacatgaacggagtagaaaagaatcatcctgcggatgtgctggtatttacagcgctcccattgccttgtccctatacgccaaggtctttgatgaggtaaactgtgtaacttcaaacagtttactttcccggtttgtgattccttatgttcataactttaacttctttaacattcaggcgggtgcgctggacaagttggaagctttcaccagtttcaatggacctgatttctatggccttccgagaaactcgtcaaagatcacactgaagaaatctccttggaaggttccagacgttttcaacttcccattcggagagatcgtccctatgtttgctggagaaacccttcaatggcaaccgttgaaataatgtggtgatttgaagttgtcaaattttttctcccaaatcagtgaactcgtgtaccttttggattgaattttcttacggctgagttatgccctgcattttttgaggaataaaagcaagatactgaccaataatgtttattttgtgtttgaatctgtctattttctctatattgaatctaaat

SEQ ID NO: 144249 - DNA, 2001 bp, Arabidopsis thaliana landsberg
  unsure (1)..(2001): unsure at all n locations
tggatcgctgataatctccgagcaactggtggtacgtatcaaacatgcaccatggtgatacctttcgtagccaagacgcaagggttttacactgtgacgtgtcacccaaaaaacgtcgagcatatccttaagacacggttcgacaactatccgaaaggtccgatgtggcgcgctgcattccacgatctgttaggacaaggaatcttcaacagcgacggtgagacgtggcttatgcaacgtaagactgcagcgcttgagttcactactagaactcttagacaagccatggctcggtgggttaacgggactatcaagaaccggttatggcttatattagaccgtgcggttcaaaataacaaaccggttgatcttcaagatttgtttttgaggttaacttttgacaacatttgtggtctgacttttggtaaagacccggagacgctctctctggatctaccagataatcccttctctgtcgcttttgacaccgcgacagaggctactctaaagagacttctctacaccggtttcttgtggaggattcagaaagctatggggattggatcagaagataagctcaagaagagtcttgaagtcgttgagacttacatgaacgatgcaatagacgctcggaaaaactctccctccgatgatcttttgtcacgtttcttgaagaaacgtgacgttaacggtaacgttcttccaacagatgttcttcagcgtatcgcgcttaactttgttctcgcgggccgtgacacttcttcggtggccttgagctggttcttctggctcgtcatgaataaccgggaggtggaaacgaagatcgttaacgagttgtcgatggttctgaaggagacacgtggcaatgatcaggagaaatggacggaggagccgttagagttcgacgaggcagataggctcgtttacctcaaggctgctttggctgaaacgctgcgtttatacccttctgtgcctcaggtgataaattaaaatcttttatttttctctctttaattatttgcattctttttttgttgacggctaactatttgcattcatggaaacattaactataacgcttttggctaggcgagaattacatagaaaacgtaaaaattcagaaagaattagatattgcacaaatattgatttatgtctaaacatgtatatcaacttttatagaaacacctgaaataaatcttttatgactagttgacgaattccattgttttttcttttaagctgaatattacagatttctttttctgctagctctagtatcaaatgactgttacaaacttacaatcataatttgagtatttaatttgtgttatttttaccaaaataaaaaagggaagaattgacgcaaaattactcatcatgtattcataataaagagctgtgtgtaacgtatagtaacgtttcaaatgaccaggatttcaaatacgtcgtagacgatgacgttttgccggacgggactttcgtgccaagaggctcgacggtgacctactcgatttactcgatcggacgtatgaaaacaatttggggcgaagattgtctcgagttccgtccggaacggtggctgacagccgacggtgaacggtttgagactcccaaagatggttacaagttcgtagcgtcaacgccggaccaaggacttgcttgggaaaggacttggcttataatcagatcgatgtcggtggttcagccgttctcctccgttaccgggtttttccggttcccggtcaccgcgttgagcaaaagatngntctgacgcttttcatgaagaacggtttacgtgtttatttgcaacctcgtggtgaagtgcttgcatgattcacattaagggtattatcgtaaatatgtttgtcatttgaagtttaaattgttttaagaacaacctactttattctatgttttctccacctacaaaatacttattatgatatatatgcactttttgtgcctttgtttgtttgagtttgtttaactctttttgaa

SEQ ID NO: 144250 - DNA, 1607 bp, Arabidopsis thaliana landsberg
gcaaggatggttttgtgcctctcttttccaccctgcttcacggtgtgtaagatgtagacatacttttcgtttcattgttttctgtttctgagtctcaggtccccctcaacttctcattctcattcactgtttttctctttctgagattcttggacatgaatgattataatgctctgcaacactactgccttatcttttgtctttagtatactgttctagtgtcagtaattagaaatttggtacccatcattattttcagcatttgttctttttactgcttgggtctcgttgtgtgctaaacaacatcaaatttgaaatactctccaacatcaatatcgaaacatgtaatcttatgctggttttatattctcggttaagtggttcacatttcttacatttcctgtcttttggctgtaatttaatttctgtttatatatgattttgctctctatcacaatgttaaggaaagctctatggcttcccctgcaggaatatagctcagcttgccaaggttaagattgcaactagaaatggccagtggcaggacctccacataccacataggtaatttttattaatcctgagggatcccattggacacagttcaggatggacatgttggatagtcttgggatctttctctgtttgtaacctttaactatatatggttacatttcaaatgtaacaaagcaatggttacatgatcgaatatgaactactccaattcggacatttgtttctactcttgcagcatcaggtccattgtatgtctgaatctgcccagcttttcgggaggattaaatccttggggcacaccaaatcccaggaaacaacgtgatgtaggttttacgaactcttgacattgcctgagtgctacataagtttctgatacatactggattgcgtatttatcttcgcctggtaaaataatatgcatttttctttgttgtgacacaaacagagaggcttgactccaccatttgtagatgatggcctcattgaggttgttgggtttagaaatgcttggcatggtcttgttctgctcgctcccaatggacatgggacacgacttgcccaggtaagaattgtacaagttggaaatgataacgatacacacaaataaagaggtgatgattgagtgcatacaaatgataacttctgtgattaggcaaatcgtattcgcttcgaatttcacaaaggtgcaaccgaccatacattcatgaggatggatggggagccctggaaacagccactgccactggatgatgaaactgtgatggtagagatttcacaccttggccaagtgaacatgcttgcaactcatgactgccggtccagaagtgtgtttgacccttcaacaccccgccatcaggatggtgcagaagattatgatgataatgaagacgactcagtggctgaaggcgaagaatttagaaagtttggtgctgcggataccttcaagattcctgatgaggttgatatttctcaacttagttagacaattaaccattttcattgttgattctatgcattcttcctccggactccaatttttttattcactctttcataaaggagccaactagcagcaactggtttagattggt

SEQ ID NO: 144251 - DNA, 666 bp, Arabidopsis thaliana landsberg
ctattttgattttcacctctcttttgtggttttgttgaagatccacacaaaaaagcttccaccatttttttttctgagcttccatttttaagctattttcttgattttttgggtttcactggaagaagaaggataagaaaaaatggcaggtgatggcgtagaaaatgcaaagccaccgcagaaacaggaagatcttcagcctcatccggtgaaggatcaactttacggtatcacttactgcctcacaagtcctcctccttggcgtaagttcttctcacatttttccctaatcattatcaaaatttgtgaaaacgactaaagattttttctaaactaacctcttgttcggatcagcggagacaatacttctggggtttcaacactacttagtgatgcttggaacaactgttctcattccaacaatgttagtttcaaagattgatgcaagaaacgtaagtcttttgctgaaatttgttacaagaacataagactctctggtcttataaaaattcttgtcttttgtgtcaaatgcaggaagataaggtaaagttgattcagacgttgctctttgtgtctggaatcaacacgttatttcaaagcttctttgggactcgtcttcctgctgtcattggagcttcttactcttatgtgccaactacaatgtcg

SEQ ID NO: 144252 - DNA, 997 bp, Arabidopsis thaliana landsberg
  unsure (1)..(997): unsure at all n locations
atttataacgatgcaatactcactaaagaaacagaaacagagataattttttcgaaagaaattgatgagaagaatgattccaacatcgttttcaagtaagtttcaaggagtactaagtatgaatgcgttgagatgttatgtatcagagtttatctcaaccttcttcttcgtcctcgcagcgntggttctgtcatgtcttcaagtaattactctgtttcttgatgagtttgatccttttttgcaataagaagaaattgttaaccagtgttttttcttatcagggaaattgatggctggtgatgtgtctggtccgtttggtgttttaataccggcgattgctaatgcgttggcgttatcatcgtcagtttacatctcttggaacgtctctggtggtcatgtgaatccagcggttacgtttgcgatggctgttgctggtcggattagcgttccaaccgctatgttttattggacttctcagatgattgcctctgttatggcttgccttgttcttaaagtaaccgtcatggaacaggtaatcaaacatatttactttttgtctgattttgtgtgcttcgttttgtttggttattctgattagtgtgtttgaatttatcagcacgtaccgatttataagattgctggagaaatgactggatttggagcatctgttcttgaaggtgttttagctttcgtcttggtttatactgtgttcacggctagcgatcccagacgtgggctacctttagcagtgggacctatatttatagggtttgttgcgggagccaatgttctagccgctggtccattctctggaggttcaatgaatcctgcgtgtgcctttgggtcggcgatggtttacggaagctttaagaaccaagctgtgtattgggttgggcctctgcttggaggagccacagctgctttagtgtatgataacgtggtggtccttgtagaagatgatcgtggttcatctactggtgatgccattggtgtgtaa

SEQ ID NO: 144253 - DNA, 1044 bp, Arabidopsis thaliana landsberg
atttggtgaattgattggttattgttgtgagaaagaacatagaactcttgtttatgagttcatgcttcgtggaagcttagagaatcaacttttcagaagtagggctcattctctttctctatgttttcttattcagacaaatatttttttggaactaaacttatgacaagtgtttctaagcgactttggattaatatttcaggatactctgcctcgcttccatggtcaacaagaatgaagatcgctcatggagctgcaacaggacttcaatttctacacgaagctgaaaatcctgttatctatcgggatttcaaagcctccaatatcttgttagattccgtaagtaacaaaaaatccaacccgatttttactcttaaagtctctacagtcaaagtttttacagtcaaatttcttacagcaaaagcgtttacaaccgaaattaacagtcgttaccaatcggccccttattttccaatttataattcctaaagttctaaagaagctcctataccaaatcttgttttcaggattacacggcgaaactctctgacttcgggttagccaaagacggaccagaaggagacgacactcatgtgtcaactcgagtgatgggcacacaaggctacgcagctcctgaatacatcatgaccggtcatttaacagcaagaagtgacgtatacagctttggagttgtgttgctagagcttttgaccggacggagatcagtagacaaaaagagatcatcgagggaacaaaaccttgtggactgggctcgtccaatgctcaatgacccacgtaaactatctcgaatcatggacccgagacttgaaggtcagtactcagagacaggagcaagaaaagcagcaacattggcttaccaatgcttaagccatcgacccaagaaccggccatgtatgagtgccgtcgtctctatactcaatgatcttaaagactataatgatattcctatggggactttcacatacacggtgccaaacactccggacaataaagaagatgatggtcgtgttggtaataagccac

SEQ ID NO: 144254 - DNA, 2255 bp, Arabidopsis thaliana landsberg
atgtttaggatagttttgcatgcgtgttgcatatttgcgttaatttcaggtgatttggagctgttgacgagctatctggaagaagcggacctgatcatgacaaaccactcgacccagaggttgagtaggagcttcaagacctcaagagaccactcgaccaccaggtcgagtagaggacatcactacttcacttcaccactcgaccccgtggtcgagtgccctcgtctccatcactcgatcacttcactcgaccatgaggtcgagtgtcttcacctccatcaccagacaaccactcgacctcttcactctacctagaggtcgagtatcgccatcacaccactcgactgcatactcgatgacaagctttagagccttcttcattccgcactcaaccagacactcgagcacaaggaagaaaagaagactccagctattcactcgacctctcactcgaccacctgggtcgagtacagttcttaacccgtccaaatagttcgtcgttttgagtattagagtttcgggatatttggctataagtagcatgtacttctcattttcgcaggacaagaagttttttacctagttttatttccgcagaccttgtgttctagactttttgtaatccggatttctatttatctattcagtattcagtatttagtttctgttcttgattttcgtttactgttgttcattctgttatcatactgatgttacactgctgttatcatgtcttcaacctgttcaacgtttatgctttctgttatgatgtctgggtagtgaataggtttctgaggatgggttagagtagtatagaattctcagtatgctaggtgattgagtattgattgatagatcccttctggattagttgttcttaatgcctattgctttctgatcaactggaatttgaccccagacatttccgcgcccaaaaggtgttcgatgaaatgtttgaaccactaattccagagattcgtgaccctgtaccaaggtattggttgcagggagcgttttggctttaacttgttgatttgtaatgcctgttaggttagctctcgtcaatggtgattgagtatgggactaggttaacttgagggtctctgttgcggtggcacttagatttggttaatgaacttgttgtctagggttaatttattgagcatgtcaatcacctgtaaactgagaaaacgaaactactcaattaccccatcctcgggaattctttatctgattgaattctttgtttactctactgttgtttactgcatcttgttatctgtcgcttaatttctgcagttctttctagttacttgacctcatactcgaccacctagttgtctggcaacagactgtgcagtcgagtatctgtgtttcatttcctgcctgtcactcgacctcacccagtgctctgcaaagagctgtgttggtcgagtgttttactgtttctgtttgattttctgttttctgcatgttcacttaggactgctggaacacaccaaaacctgttatgcttggcttgacttagtgacttctgatcacatcttgattgttagcatcacacccatttggattgacaacctaaaatactacaatgacatgattggtgttttaggataattgactaaaaacctattatcaatttggcgccgttaccaattgggtgtttgtttgttacatttaagatttcagacttgcttagatcaagttctttttcaattttctttttagttactaactgtgtgtttttcttgttgtcttcttgatccaggtacacctctgctgtatgcgaactcgatcaacaggcaaccagaacctccttttcaacgacaacatcaaccgcacagcccgcgaaatcagaaaaaggagaaccacagtcaaccctgtacctcagcaaccactcgttatggctgaagaacagaatcaacaaaatggccctgccaacattggtgctggagatgcaccacgtgatcaccgtcagaggaaggaaatcgcacctcctgctatccagaataacaacttcgagattaagagtggtctcatctcgatgattcaggggaacaaattccatggtttgccaatggaggatccactcgaccaccttgatgaattcgataggctctgcaacctaacgaagattaatggtgtacatgaagacggattcaagctccgtttgttcccattttccttgggtgacaaagcacatatctgggagaagaatttgccccatgactcaatcaccacctgggatgatt

SEQ ID NO: 144255 - DNA, 2881 bp, Arabidopsis thaliana landsberg
  unsure (1)..(2881): unsure at all n locations
tttcgaaattttggactgaaccgaacgtacccgatcaaaaacgactagttggtacattgctcataatttttctagatatagtaattgtttgcatatccctcttcactcacacaaacattcattacacacaaattaagaagaagaaaaagatggataacatggagttatgtgaagcaaacaacgttcctctaacgcccataactttcttgaagagagcttcagagtgttatcccaatcgaacatcaataatttacggacaaactcgtttcacttggccacaaacctatgaccgttgttgtcgtctagccgcttctctcatctctcttaacatcgccaagaacgatgtggtatgtcacattattggagttcaatatttataaatttaagcccatctggataaaactatagttgtgataacaagatttattatgtttatttgtttaatcatattgtaccactatctttcactatccttacctcaatttttcgctgaagaggtttaagatttgttagagatagtccgttttgtgtagggtataattaaacagattaacattcatttatacaaagtatgagacatgcatgtgactaacattgtgtatttaggtatcagttatggctccaaacacacccgccttgtatgaaatgcactttgccgttcccatggctggagctgtacttaaccctatcaacactcgtctagacgcaacatccattgccgcaatcctccgccacgccaagcccaagatcttattcctagaccgcagttttgaggccttggctagagaaagcctccatttattatcatctgaagactcaaacctaaacttgccggtcatatttatccacgagaacgattttcctaaaagggcttcattcgaggagttagactacgagtgtctcatccagaggggagagcctacgccctcgatggtggcacgcatgttccgtattcaagacgagcatgatccaatctccttaaactacacatcgggtaccactgccgacccaaaaggtgttgtgattagccaccgaggagcatatttgtgcacattaagcgcgattattggttgggaaatggggacctgccctgtctacctttggactctgcctatgtttcattgcaatggatggacgtttacatggggaaccgcggcgcgtgggggtaccagtgtgtgtatgaggcacgtgactgccccggagatctataaaaacatagaaatgcataacgtgacacatatgtgttgtgttcctacggttttcaacattcttctgaaaggaaattcacttgacctgtcacctagatctgggccggtccatgtgcttaccggaggttcaccgcctcccgctgctcttgtcaagaaagttcaacggttggggtttcaagtgatgcatgcctatgggcagaccgaggccactggtccgattttgttttgtgagtggcaagatgagtggaataggtaataatcatttgtactatttattctcatgtatnnnnnnnnnnnnnnnnnnnnnnnnntcatttaccaaaatttaaaaggtcttattactcaattgaaacagattaccagagaatcaacagatggaattaaaagccaggcaagggataagcatcttaggcctagatgacgttgacgtgaagaacacgaaaacgcaaaagagtgtcccacgcgacgggataacgatgggagaaattgtcctcaaaggaaatatagttatgaaagggtatttaaagaaccctaaagcaacatctaaggtgtttaaacacggatggctcaacactggagacataggtgtgattcatcctgatgggcacatggagatcaaagatcgatccaaagacattatcatctcgggaggtgagaacataagtagtattgaggtcgagagagttctttacgagcaccagaaagtgctcgaggccgcggttgtggccatgcctcaccctttgtggggtgaaacgccgtgtgcctttgttgttttaaaccaaggtgaaaccaatcaaagagatcgtgaaaaggaatcggtgacgaaagaaggagatttgattaagtattgccgtgagaatatgccgcattttatgtgtccgaggaaagtagtgttcttggaagaactgccaaagaatagtaacggaaagatacttaagcctaagttgagagacatcgctaaggcattggtggtcagggaggacgatgctggctccaagaaagttcatcaacgcagtatcgaacacgttagttcgaggctttagcgttacatattcatcgatgtgttttatgtatatgcgtatgtttggattgatatgtttcttagtttgcatgtatggattgttaaatttacgctaataattaaaatgaagttattcaacaaatattgcatcttttatttgtctaaaaaaatggtaagacaaaaaagagaaaaaattccacgtggattcaacaaaataaaattgaagaagataatctcaaaattcttaaggctcaggactcgccacttggataacattcatatctcttcactttcactagaacacagctcctgaagctgaagaagtaaaaaaaaaaacattgcgacaacataacaaaaacaaaagaacacaacatgagtgacactaaaacggtgcgttttggtcttcttggatgcatcagattcgcatcaaagttcgtcagaacagtaacagaatcctcagacgccgtcattatcgccatcagcgatccatcactcgaaaccgcaaaaaccttcgccaccgggaacaatttatcgccggagaccgtcacgatatacggaagctacgaggagcttttaaacgatgcaaacgtcgacgccgtttacttgacgatgccggtgacgcaacgagcgaaatgggcggtgacggcggcag

SEQ ID NO: 144256 - DNA, 949 bp, Arabidopsis thaliana landsberg
gatggcgaatgctttgaacatgtcaaactatgccaatagagacagcttgctcggaccagatatcaagccggatgattccatgagcagagttactggcatggataaccaaggaattgttggatatcaacgacaagttatgagaggtaaaacctctcttatcctagtaaacgtaatgcagatgttgatttctgtatttgttttttcctattgaatgttttattttcctgtgagtagaacaagacgaaggacttgagcaattggagggaacagtcatgagcacaaaacacattgctctggctgttagtgaagagcttgacttgcagactaggcttattgtatgtcactagcttttcattttttcgcctttgatttgaattttcggatactaacacatttggattttcctttatgcaggatgacttagattaccatgtggatgttactgactctcgcttaagggtaatatatgcttcaactcttaaatatttcaacaaactaattactttggtgaatcccaagctttagttgatccatactttcattaggagtaacactgatgtaatggtgatctgttttcggtttgctcaaccaagaaccacattatgcttaagctaatggctaattaaagacattgatctgttatcttattacagagagtgcagaagagccttgctgtcatgaacaagaatatgagaagtggttgctcttgcatgtcaatgctcttgtcagtgctggggatcgtcggtcttgctgttgtaatatggatgttggttaagtatatgtaataccaacatcagacaacttataagttcctctgtaggtccactggcctctactctctatgtgaatggttgcaatgtatttcctcattccacatttgtggctgagcttttcatttctcttctgttaccaaaaccctttaagtaatatataatgtgtgcagttatca

SEQ ID NO: 144257 - DNA, 654 bp, Arabidopsis thaliana landsberg; identical to SEQ ID NO: 38807

SEQ ID NO: 144258 - DNA, 771 bp, Arabidopsis thaliana landsberg
atgaggttaaccttacattacaatgaaaagaaagttcctgtcaagttacgacctgatcttggataccttgtgaaaccattttcaatgagcatcgaggaattcttagctacagaatctcgattacctggaatgtttgagtatagtcgaaggttagctgctttctctacttaaacttgaggttgatgcataagaaactttgacttttactttctgcacaaaaggttttcagaaagatcatgttcacttcacttactgatttcctaacctgggtggttctcttcacttttggtaggtgtacttttgacgatcatgttaaagattcaagaacggagaatgggaaagacaaatttcttagcatctgcgagagtataacactaaaggtgcttagcaactcaaatctacaccttgtatctgtggatttaccagttgcaaactcactcgaagatgcaactggtctgcgattaagattcagcagcaaaatcttgagcagtgagatccctcttttgattaccatcacagtcgaaggcaaatgcaccgaagttctgaatttaacagtcaagatcaattgcgaagaaacggtttttggtttaaacctgttgaacaggatagctaatttcatggttgagccgtcttcttcagccacttgatcatcaaaactgaggatcttttttttgtcaccttgtgaaaatgttaccaatccttttttttataacattattttgatacatttattaaaatataaattataaaaacaatgagatttcacacaca

SEQ ID NO: 144259 - DNA, 3287 bp, Arabidopsis thaliana landsberg
gatccttttaatgtatcgcagaccatcctcagctatggcctcctgtttttccttttaggtatcttcgtagctcttcaccgtaaataatcccgacccatctagaggacggagccgccggcgaggaaattcaggcagattagatcggcgatttggccttgttttcaacgaagatcgtcttgttagggtttcgtccgcatctatggattctctgtcaaatggggtattgatatgaatttcggctttcgtgatgacggaatctatctggttaaacgatcaatcttctcctcggtcgatgataccttcagcaaaaccagtggctaatgtccatcgccagaggtcaggactagcttattgacttgagtttgaattatggattcttgtagtagaacctttttgatgcctttgaattatagaaactaggaactactttgttcatgtttaggagatccagcgttagatcacgtaattggaaggcttatttaggagatcgtttaaaattcggatgctaatttctgaattttgttttacgatggctatacaaacagtttgaagtgatagatctcatgtaatatagagttttggaaccgtaatcttgttcacaaggacaattatgcggcttttgatgaatctgtgctagtttcagcagttaagacaagtagacaacagaatggcttggaagtgtatcttacttgcagcctataatttcatgttttgcggtgcccagactaattctgtcagctgctgatctggctggatcactcataatatggtttgagtgtgattattcaggtgtaggagtgtcttcaagttactagtccagagggaaatttcaccaaacacaaagtttgttccaagaaaacggtggggtgaaagccgatgtgatgctgattcgtcgtgtggaaccactagcgaaccagtgagagatcagggacttaatcttatttcttggtacctttcgttcgtcacttcttcgcttctctttttgatgtgatccctgcctcctttcgggcatctgaatgtaaactgcattccctacatgtagggttgaggcagagtcattgcagcatttatctgctaaatactgtcctcttgtacctcctccaaggtcaacgattgcagcagcttttagttcagatggaagaactcttgcttctacacagtaagtatcatgagtcgtatttgttggaattttttttttgtttgctaatgagtttttttttgtatttttaatcttgtagtggtgaccacacctgtaaaaattattgattgtgagacaggaaaatgcttaaaaatattgactggccatcgaaggacaccctgggtggtgagttagagaatgctatctcttttctcttaacttcattgactctttgatttatcatggttactaggtagcactaacttgaccagaaccgtctctagattagtcaatcttttctcatgaaaatgatttctggtggctatctttgtcattggtgtcaattttgttatattttttgtttaggtgtaacatgttagtcaatacttgcaatgaattaagttgattttggtatgattaaatagataatttcctttgcgttatatctactgctttaatatctaatgttattaagttctctacaggtcagatttcacccgcgccactcagaaatagttgctagtggaagtttagatcatgaggtgcgcttatggaatgcaaaaactggggagtgtatcagaactcatgatttctgtaagcgccaagcaatattcttttgtctttttcctcttctactttttcatataattaactccgtccctcttcctccttcactaaacagatcgacctattgcttccattgctttccacgctggaggtgaattacttgctgttgcatctggtcataaggtatcttattccctttgaatctctcatgaaacgctagctagttgcaggtggcttatcctctcagaataaagtatctgatctaacggtctcttaaagtttgactaatgcactttttttttccttttgaagttgcacatatggcattataataagggaggggatgactcggcaccagcaattgtgttgaagacaaggcggtccctgagagctgtacactttcatccacatggggttcctcttctcttgactgctgaggtgagctacatattgaggattgagttaatgttctgccactttgtgggcttactctattaactataaatggcaggtgactgacattgattcatcagattccgcaatgacaagatcaacatctccaggttatttgcgatatccgccccctgctattttcttcaccaacacacaaagtggcagtcgtaccagtttggcagccgaactgccacttgtgccattaccgtatttgctcttgccttcatattctgcggatgatccaagaatactatattctagtggtactactggtccaaggaatgcacaaacaaggtttcagagtaatcaaagttctgtagaacatggcagcagaacaatttcgccttctcctcttcccatggctacgtctgctgatctttctggttcctatcatgtcccagacaactctgctagtaatacatttgctacccaagcaggagctagaaattctactactgcagttgatgccatggatgtagatgaagctcaacctgttggaagaaatagagttcccagtcaagtttcaagtcaaccagatttactggagtttggacaacttcagcagttatttcactttagagacagaggttcctgggagctaccttttctacaagggtggttgatggctcaaagccaagctggtgctaattcagtggctcttcctactggtagtagtggtcacgtcaactcaactccttatatgggttcttcttcagcatctcattcatccacagccagtctagaggctggagtagcgtcattagaaattcctggtggtgttaacttatatggggtttctgcaagaggtgactcccgggaccgaattctacagtaccgcttcgcaggatctggtttagcagaaggtcgttcctctcgtaacactcaacatgaaggagctgatgctcaacctgtggtaaacagaatcccttctgaactggctagttcaattgctgctgcagagttgccttgtactgtcaaactgagagtgtggtcacatgacatcaaagacccatgttcaatactgaagtctgacaaatgtcgattaacaatacatcatgctgttctttgcaggtaaaatttctccttatatcggtgtacgatcttaacatgatcgctaatgcttttataa

SEQ ID NO: 144260 - DNA, 1736 bp, Arabidopsis thaliana landsberg
agagaaaaaaacaaaaaacatttccatatctctctctctctctctctcgcctgcttcaagaaatggatcggcaaagttccgatgacatcatgaaatttctcgacggcatggctagctccgacgatgttctttttggcttcctcgacgaaggaaaccagtcactggaggatttctccgtaaacctcaacgccggcgaagatgacggcgacgaagacgacaataataacaattctgaagataacaaagctttttggcaggaacacgaacaacttcttcaggtaattttttctcaaatataaaatctattatcaaaacaaaattatttgtcatttttagccaaataatttggtgtctaaatttgttatattattttgaattgtgtaggggacactgtataggacaagttccattgagacaaagattagacaagctacaaaagaagcgttgaaacaagttaaatctaagggtctttattgtgtttgccggcgaccagtggacggcggttgccggagttgcttacgtggcgaaatctctagacacctaagagatgtcgccggctacgattgcgtcatctctaaatctaaatggagaagttgtcaagacatccctgcaggtacaaactaactagctcatatatttttatattcattattattaaaagactggttctgaaatattcagccatcgttatcatttctcaaatggaagataattatttttaaattggacaaatattattatgtccacaagaacacgaaagacttttttagacccattcttttatttgttacttgtggatcaagcaatatcagattttgtcatcacatttaagtcatgattttatctagcacctaaatgattttttgttcttgttctctctacctatatatgtgaatgtttggactaactcatattttattttaattaatatcaggggaacacgaatttatagagattgtggaccgatcgggttcaaagaaaaagccagatgcgagtggtgattgagttatcatttagggcagagtttgagattgcaaaaggcagtgaagagtacaaaaagactaatcagtcgattgccctgaggtttacgtcgggaaaaccgagaggcttcgatctctgataaagatattgtgcatcgcgggcaaagaaatgcttgagagacaagaaaatgcatatggctccttggagaaaacacaagtacatgcaagccaagtggcttggcacatgtgatcgatctagctccttggaagcttcggtttccgaggccatggagccagaaaattgggtgccggtggcgaagcctagggtttctatgttgaactatgatggtctcttaggtggtttctctgccggtccggccactgtagcggtcgtgtgatatttttgtactatgtttttttgatgacttgtaattattaagtgattagggtgagtcatgagtgttaattatggtttctgatttgaacttagcaagaaatggtctcagcggctgtgattcgagcctctacattgtgtagtaagggacgaagatgctgttttgtgtcattggtgctggaagaaattagacatttgtgatttttttttatattgactgtatacgagtgattaacattaaaatttaacagaaataatatacattttgagtttcgagttatctgaaagttttatacataactaaagtaaaaaaagaaaaattgatttgtaagaaaaaaaaaacaataagagcaatacgaaaa

SEQ ID NO: 144261 - DNA, 1120 bp, Arabidopsis thaliana landsberg
atgggttttatacggccaccggcggtgagaagcggcgattatatagaaagcattttcggcgaatattccgccgggaaaacaaaacctagccggaaacttaactcggccaagttcgtgacggcactgacgtgtcttcagttcgcatttgccgtctacgccaccggacttctctactacatgagtccttccattgacttaagggccaagccagacttcacttgggccactaaatgggcccataacatgcgtagttacattgttacccctcacgtcgtaagccattaccaagactctgcctcttttctcaaatcggagaattttccggtgatggtttctccagcggaagtttgcgagtacgagaagattgatttctcgcagaaaaaatcaaacgacgagaaaatgatcaagatgaagcgagagttatacgacgacgttttgggttaccagaggaagaatcttgggtcagagagtttagaagagttgatgaagatgaagtcaaaatgggctttaaatgggcctaataagcccaaagtaacagtaatactaaatcacttcaagaggaaaacactttgtgctcagcttgattctcttctccaccaaacgctaccgtttcaccatgtctgggttttggccttcgggagtcctaacgaagcttctctccggcgaatcgccggaagttacaacgattctcgaatcagcttcatcagctcaaactacgatttcaaatactatggaagattccagatcgcgcttcaaacagaagcatatctggtttatatcctcgacgatgatatgattcctgggaagaaaatgcttcagatgctctcacacgtcgccggaactgagaaatacgaaaactctgttttgggaagtatcggaaggattttacctttccggcaaaaggatttcacgtttccgagctataggaagtttagatctaaggaagctggcctttacttgcctgatccagcttatgacatcaccttagatcggattcttcaggttgatttcttatcaagctcgtggttcttatcggcggagctcgtgaaagcgttgttcatcgaaaaaccattcacattctctaccggtgaagatcttcatctcaggttagtttcgtaaa

SEQ ID NO: 144262 - DNA, 885 bp, Arabidopsis thaliana landsberg
ctcaattatctccttcaacgccacaagatcctaaggcctctcacggatctctcttaagatcaatcgccgcggctcatgacgcagtcgcctgttcaaccgcctccgccgctcccagctcagccgcattccgccgccggaggtgtaataagaggcgatgtacaggttaggtgcgcaggctgtcgcgtgattctgagggtgaaaaccggcgttgtggagttctcgtgtccgacttgtcaacttccccaaatgttgccgccggagcttctttctagggcacggccgcagtttccgcagtctccacaacaaccaccacagccgattcagacgcttccgccaccgattcaacagcagcttaagcctcttaatctacctaggcctccggttccggcacatggaatcgatccgacgaagatgcaattgccttgcgctaactgtcaggctatcctcaatgtgcctcatggactcactcggttctcgtgtcctcagtgccatgtcgagctcgctgttgatgtctccaagcttaatcggtctttaactgcttctcaatctcattctaatcctcctactcctgctgctcccacagtcccgcctccgcctcctcccgaagaagtcaatgaggaagctattgaagtggagagagaagaagatgaaggtggaacggctggagaaacgtttatggattatgtgagtgcctcatcttgacgatcatcttttttctgtctgttcaatgtttttgatgatactaatttgtttctttgtgaagcgtcccccaaaactttcgatcggacctcctcatcctgatccaattgtggaaacatcatctctatctgcagtgcaacccccagagcctacttatgatctcaaaatcaaggaagagcttgaaag

SEQ ID NO: 144263 - DNA, 691 bp, Arabidopsis thaliana landsberg
atctttcccaaagcacaatctatcatataaccacaaaaatggttagtcagaaagagaccgtgtgtgtaaccggcgcttcgggtttcatcggttcatggctagtgatgcgattactagaacgtggttactttgttcgtgccaccgtccgagatcccggtacgtatctatatgttcttacaaactcatttctcctaagattatgtatattaatataacgtttatttacgggtttttttggattgtcaaggtaatttgaagaaagtacaacatcttcttgatttgccaaacgccaagacgcagctcactttatggaaggctgatttatccgaggaaggaagctacgacgatgccataaacggatgtgacggtgttttccacgtggcaacacccatggattttgaatcaaaagatcctgaggtgagtttttctatattatgaacttcttttggtttttgcatcaacctagcttaacttgacttttgtatttgcgaatcagaacgaagtgataaagccgacagtgaatggaatgttggggataatgaaagcatgtgttaaggcaaagaccgtacgaagattcgtatttacttcatctgccggaaccgttaatgtagaagaacatcagaagaatgtctatgatgaaaatgattggagtgatcttgagtttatcatgtccaaaaagatgacaggatgg

SEQ ID NO: 144264 - DNA, 2510 bp, Arabidopsis thaliana landsberg
tttaacattgtggaagaagtaaagagagtttcaaatgcgtctgttgtgcttcctaagaacgtcaatgctatgaacgctgcaagtatggtctttttttagttgttttagttgatgagttaaatgaattgtgaatgtgatgaactggtttagcttagcatttatcagtgaatctgcagttttaccggttatgttgtcttcgaaattactaccggagatggaaactgtatgacaatgccaagagagagcagttgcttcaaggtgttcagagtttgcctataccaatgcaaatcgaaaggcttaaggttagttgtgtaatgtatttttgttgtgatttgtttgctggtttttgaaatggtatctgtttttacaggcgaggatggatatgattgcagcagcttgtgaaaatgcataaagagtattagctgatactcgttatgcttacggatttggcactcgtcaaggcccgtctatgcttcctactatggataaaggtcaagctgcatagattcaggatcatgagaaaatgctacgatatgctgtaaatgacggtaaaggtaagaaggtcttagaatttattgagtcatttgatagtgtacgaaactgcagttttctgttttgctgaattccttctcatgttcttttacaatggttgtttctaggaacacaactgcctccagaccagagacagataaccactgcacttccaccacatctggcagatgtgctaattatcaatgatgcaggtaacgatttcattgatctgtctggtagaagtaaacccaatgcttgaatcttctttattttgttactactaccaatggtattctcacgttgttaatggctccaaaaattctctttcattaggtaagattgcattacctgggcaatcaaacaacattaacaatcaaggaatgatgcaggttaaactagtttattctctctagttgtgatgattattacttttgatagtatcattgtctttcgaggttcatgtctttgtgtgtttttaggtttccgggactcaatttgtgggaagatcagctgcatctccatctggtcctaattttgataacacaacatctcccttaccatattccaattctcctcgcgctacgggtatggttaatgtcccttcgcctcagcatcaaatccagcaacaacagtttcaacagcagcagcaaaggtcaaaattaatgcagttgcctcaacatcagcagcagcaactacttgcacaacaacaacaacagctcaggcaatcttctatgcagggattgggtcaagtaggctttgacattttgcagacgtagcaattgactgttttttcctaccatactgctttattgagcaacatgctaattctttgtgtagagtcagataccagcacttcatgatatgcatgggcaagctcagcaaaagtttcagacggtaagataaatagaactacaacatagttaggggatagatgtgtgaagtgaaaaggatcagacactaccttggtcaattatttgtatcattatgcagtagttatggccataagtgaagatgactagacgtatttatacaagtttacatataccaagtgaatgattcatactcttgaaaagttatcctagatcttgggacttggcagaagcttttatataaaagtaactgtgacagttcgtagtttcaaacagtagaatcaaatgaaattatgaaacaagcttttgtcttttaagtgtgagttttatcttatttttcagtcacatgggcaacatcaaatgccatattcccagccaatgggcgcgcaccaacaattccaagctagacagctctcaggtggacatattcagcatagcatgtctcaaggacagctcaatccagcgatgaaccgtcacttaaaccagttttcaggtggagccaatagtgcattgtttacttctgcacaaggctccccaagtagccaaatggtcagtcacctctatttaacctcttgaattgatgattcgaaacaattactaatcatattttctacgtactttttcttttaattctagataccaaacatgtcatctatgcaatctcagacacttgttcctaggatgcaggttagctcaaaaactcctctactcattatgtttcccaaatctgaacgatgaacattgtcttaatctgatgatctctttggatttttattgttgtcagcaatttggagtttcgggtaccaatccccaaagaagccattcgtctcaaatgttgggtgaccagagtaagtaaacaaatctcttctaaaacatgttttcttacatcaaaatcgattccctgactatttcatttgtcctatctttacagtgtttaacaccagcggaatgatgcaaacacagcaaacacaaattcagcaatcgcaacagcagcagcagcagcagcagcaacaacaaggaggctatggaaatatgcagacgaatcagcagagtctacagcctaataacatgatgcagaatgctcaacaaaggcaccaaaatcctcaataa

SEQ ID NO: 144265 - DNA, 1149 bp, Arabidopsis thaliana landsberg
ttgctcgctgactcccacgtgtgacccaactcactctcgacccagccgggtacacgggtcgtctcacgcttctcatctccggcctcacagagcttctcacgctcgatctcgccgagaacaacttctacggcctaatcccatcctccatctcctccctcaccagcctcaagaccttgatcctccgatccaactcgttttccgggtcattacccgactcagtaactcgactcaactcactcgaatccattgacatatctcacaactctctcaccgggccgcttccaaaaacaatgaactcgctttcaaatctccgacaactcgatcttagctacaacaagctcaccggagccatcccaaagcttccgaaaaacctcatcgatttagctttaaaggcgaatactttatcaggacccatctcaaaagactcattcaccgagtcaactcagctcgaaatcgtcgaaatcgctgagaactcattcaccggaacactcggagcttggttcttcctacttgaatcaatccaacaagtcgatctagcgaacaacactctcacaggcatcgaagtcctccctccaaacctcgccggagaaaacaacctcgtagctgtagagctaggattcaaccaaatcagaggaaacgctccggcgagtttcgcggcgtatccaagactttcttcactgtctatgagatacaacgtgcttcacggtgttataccgtcggaatacgaacggagcaagacattaagacggctttacttagacgggaacttcttgacgggaaaacctccggcgagatttgtgagaacagacgcagaagtaatgggaagtttggggaataattgtctacagggatgtccagggaaagctaagatgtgtgctccatcgcagaaaccattttacatttgtaagcaagcttatggtggaaaaccaaagtcttagttttgtcggtgtcggtgactttttgtgtcagtgattttgtaaaataatgcttttagtcatgagtttactctatagtcttggagaaatactaatatctatattcatcgagatcttcgtatgtacacaaataaatttacaaaaattggaacggaacttatagtatttattttgttgtattgtgtgtttttatatatttattgagatttaaatt

SEQ ID NO: 144266 - DNA, 1385 bp, Arabidopsis thaliana landsberg
ttctccggtggtaaacttctcatgcaaagcgacctcgacatagcttcctcttccctctctactcacataagtgaccttgacctcctcctcagatccggtgtcctccaccaacaaaacgccatcgttttatcactcccaccaccaacatcagataaagatgacattgccttcttcatcagagacctcttcactcgtctccaaatcgggggagctgagttcaaaaagaaatctctagaatctcttcttcaacttctcaccgataacgaaaaatccgcaagaatcatagctaaagaaggtaacgttggttacttagtaactcttcttgatctccatcaccatcctctaatccgtgagcacgcactcgccgccgtctcgctgttaacttcatcgagcgccgactcgagaaagacggtgttcgaacaaggcggattaggtccattactacgattgctagaaaccggatctccaccgtgaaaaacaagagcagcaatagcgattgaagctataaccgccgatccagcaaccgcttgggctatctcagctaacggaggcgtatccgtattaattgaagcttgtagatcaggatctaaacaagtacaagaacacatcgctggttctataagcaacatcgccgccgttgaagaaatcagaacgacattagctgaagaaggagctataccggttcttatccaactcttaatctccggttcatcatcggttacaagagaaaaccgcgaatttcatctccttgatctcatcttccggtgagtattacagagatttgattgttagagaaagagtagcattacagattctgattcatttagttcaagaatcatcaaatcccgatacgatcgaaccctgtttgcgtgctctctctcagatctctgccatggaaacaggttctagggttgtatcttcatcaacaatgttcataatccgattaggtgaattgtaaaacacggaaacgtaatccttcaacagatctcaacttctcttttatcgaatttaacaatcagcgacggtaacaaacgagccgtcgctgattgtttaagctcgttgattcggttaatggaatcccgaaaccggcggggtacaagaagcggcgacggaggcggcgaagtcgttgttgaccgttagatcaaatcggaaggagttgatgagagatgagaagagtgtgattcgattggtgcaaatgttggatccgaggaatgagaggatgcctaataaagagcttccggtgatcgttgtgacggcgattttatcaggtggaagttatgcggcgaggaagaagttgattggtttaggagctgatcgttatcttcaatctctggaggatatggaagtttccggtgctaagaaagcggttcagagactcgccgccg

SEQ ID NO: 144267 - DNA, 1020 bp, Arabidopsis thaliana landsberg
  unsure (1)..(1020): unsure at all n locations
ggtcatgaagtagatgcatttggaattggaaccaacttagtgacttgctatgcgcaagctgcgttaggttgtgttttcaaacttgtggaaataaacaatcagcctcggatcaaactttctgaagatgttactaaggtttgaattcttgactcatttccccattgagaatgttgcttcaaactttctgtgttcttctttatataaactccctcgcttttctttttttgcgtcttcaggtatcgattccatgtaaaaagcgtacttacagattgttcggaaaagagggttaccctcttgttgatataatgactggagagaacgaaccacctccaaaggtaagagacaaaggcattaggctttcttgaaagctttcaagcttttttatttgccttctgatttttttctggatcctaaggtcggtgaaaggttactttgccgtcatccattcaatgaatcaaaaagggcttatgtggttccacaacgcgttgaagagcttctgaaatgttattggcgtggcaatgcaggttaaaacagagctctcaattcttacaggtatttgacatatgcttatgactcattataattttcttttactgtcatgaagatgaagctagggaagagctagagccattgaaagagctnnnnnnnnnnnnnnnnnnnnnnnnnnnnnnnnnnnnnnccgatcatatgagaagattaaaccctactccttataaggtataataatccaacaaaacacctgagaaaatctgtttacttacacttaatctgtttgtattaagcgctttctgcttctgagagaaacctaattgtttactttgcaggttagtgtcagcgccaagttgtatgacttcatccacttcctctggctcaacgaagctcctgtcggtgaactgcattgagaatttacaaatatgggttgtctggtttgttgagtgtgtgtgtataaccatagtatcagctttgccactgatctcactgttttcacaacaccatcaaaaaattatactcaccaataat

SEQ ID NO: 144268 - DNA, 704 bp, Arabidopsis thaliana landsberg
agcttctcggtaaagtccctgtttacggaatctgtatgggtcattagttgcttggtcaagctttggggggtaggaccgtcaagatgaagtttggtcatcatggaggaaaccacccagttcgtaacaacagaactggtcaggtggagatcagtgctcaggtaccaatacccaacctcaaaatgttccatttaattccaagcatactaccaactaaggatttgaactttcacattcaaagttcggataattatctgataaaacgactgtgctaggaacattgttacaagcttgacaaaatctaaatatggtgtatcattgtctttttttctgtaattcttggcagaatcacaactatgcggttgatccagcttcacttcccggaggcgtagaagtaacacatgtcaatctcaatgatggaagctgtgcgggtctatctttcccggaaatgaatgttatgtcactccagtaccaccctgaagcctcccctggacctcacgactctgataacggtaactgtcctctttattccagtcacttggtgaaagacacttatgcttcagtcgtactgaaaaaccagaagattaatgtgattatttttttgcttatgaatgcagcatttagagagttcatagagcttatgaagagatcgaaacaaagctcctgatcaatgagaagtactctttgtttttgtacgttggggttgt

SEQ ID NO: 144269 - DNA, 2002 bp, Arabidopsis thaliana landsberg
atgtttctcgttaagtgtgttatcgcggcggggcaagaacacgctctatgtatgaattatgaggaagcatttggagaagaagaggaggagtatacagtgagaagctcagtgaagaacgcactttacgcattggtggagatgattgagagattcgatgtgaatagtagcggctataaaggtagaagagagatgggtacagttttagattcagaggagattgctcattttagaaaattcttgacgtttctggaagaaattgaacagttctacgactgcattggaggaatcattgggtaccaattcttaattctccttttagtatagaaattagatgagagatgccttgaaagttttgattattgattttgaatatattcactgctgagacatggatgattgtgtgtcagatatcaggttatggttcttgagcttcttcatcagtcatctaagagacgtaatactaaccgatcacaacttgttgaagaatcattgggttgccagtatttagaaatgcatactcctagtgttcttgatctcactcaggaggaagattatgcttcacaggcggctctgtggggaattgaggttaggtttgtgttattggttttgaaattaagcaaagttgttgtgtatggtttctggattataagttgttgtacatattagggattgccagacctaggtgaaatatatcccctaggaggtgctgcagacagactaggtttgattgattcagaaactggagaatgccttcctgcagcaatgcttgctcactgtggacgaactttgttggagggacttattagagatcttcaggtacatgtgcactcatttcttggtgactctgggtgggtttgtctacatttaaatgtatgaaaggaaactttgaggtacgaaactgtatttgttcatgtcattagaaaatgttatttatccttttttcccggaattggctaggctagagagttcctttacttcaaactttatggaaagcaatgtgtcacacctgttgccattatgacaagtgctgcaaagaacaaccatgagcatgtaagttcgctttgtgaaaggcttaaatggtttggcagaggtcaatcaaatttccgactctttgaacaggtatcagggaacatatattttcttttgatttctgttacctttttctggaacaactgtatcttgagtattgtactcacagttaatagaatggtttttgttcgctagcctctcgtcccagctgtcagtgctgaagatggtcaatggatagtatcaaagccctttgttccagttagtaaacctggtggtcatggtgtaatttggaaattggcttatgacaaaggtgtctttaactggttttacgatcatggaagaaaaggagcaaccgttcggcaagttaggttagtcacttgtacccttgtgagttgttcattataataaatcagaactatctgaattttgtgtatataattgtgatattacagtaacgttgtggctgctacagatgttaccctcttggcccttgctgggattggcttacggtataataaggtatgcttgttcttatgtttataactgacacactgcaaatagattcaaaacattaaatgtatcacttatagagataaagaagagagcatctggtgttgattgcaaatggtctcatgttagttgggcttgaagaacatgttctatatcatgatggataagttcctttagaagtatgaggtgtggcagttaactatctactgatatatatggctatgctttccaaactagcttactagttgagaacatatattaaccatgtattcatctctcaactacttcaagaaataggaataccctttttggacttgcgaacaattgattcccactaaacttgatttattaatcctaatttgacagaaacttgggtttgcatcctgtaaaaggaatgctggagcaaccgaagggattaatgttttgatggagaagaagaatttcgatgggaagtgggaatatg

SEQ ID NO: 144270 - DNA, 486 bp, Arabidopsis thaliana landsberg
cagggctacaaatgaagaaggcgctcaccacaagacatcctccaatagatgtttattgtatctgtagggaagtgacagaggtaatggagaaattgcatgccgcggatgctgaaaccatccctcttgccagcaatatacaaatggtcaacatggtgaataactacgtaagttttaccacatgtgaatcttgagcctttttttctacttcaacataattgttccgataaacataagatttggttggatgtttctaacaggtcattatgtcctacgggcttcttcacgatgattatgaatacggagccataactgagagttgccgaaaggatgtgctgctcttattgcgggagttatttccgaggaaaatatatttgtgggaaaattaattccatcaacaagtcagtctaattaacaaaggactagaaatcgtaagtttctttcggtgctaaacacatgggccaaaccttagagccaacatccgggtta

SEQ ID NO: 144271 - DNA, 597 bp, Arabidopsis thaliana landsberg
attcgtaagacttgatcaacttgcaagcaaaagagatggtgcaaaaggtggaagcaaggggtggtgagatgggagatgtatgggatgatggtgcttacgacggtgttagaaaagtatacgtagggcaaggcgaagatggtatagccttcgtcaagtttgagtatgtcaatggttctgaagaggttgttggagatgaacgtgggaagaagactttgctaggagctgaggaggtatactaatatatctatcgatctatgcatgttgagatttgtttattggtttcttcattgagaattctctttgcagtttgaggttgatccggatgactacatcgtatacgtggaaggttatcatgagaaagtttttggggtaacaacaaaagaaatcatctccactcttactttcaagacttataaaggcaaaacttctccgccgtttggaatcgtctcggggacaaagtttgtcctccaaggtggcaaaatcgttgggtttcacggacgttctaccgatgctttgcactcacttggagcctatatatcttcgccctcagctccgaaattgcgtggaaagtggataaaggtcgtagtaatatcttag

SEQ ID NO: 144272 - DNA, 1184 bp, Arabidopsis thaliana landsberg; identical to SEQ ID NO: 24761

SEQ ID NO: 144273 - DNA, 1057 bp, Arabidopsis thaliana landsberg
attgttgcgtgtttggttatctcttctttcttctctctcacctaaatcaagggatttgttctgatcaactttgaacagaatttacaacaaatccctagaaaaatctgaccccatccttcttcctctggaagatttaagatacttgttgataaggatattcggaagaagcttttgaaattttgtggcaaaggtctcatttgatccgacttttctggtaatttttttccctttattgtttgtttttccaacagatctgaacatttttgttacgattaatcaaatttctgtgttcttaaattggatttggggaaattttgagtagcgagatagatcttatcaaagctgggttaaatcgaatttttgtttatagaaaagctgggtttagatcgaaatgaatcatttttgattatatagaagctgtgttttattggaatttgatcaattttgattgtatcgaagctacgttaaatcgaaatgattgattatattgaagctgggtttgatcgaattgaatcggttatttgattatcatgttatgaattgaagacaaccttaaaaaatgagtcttctggtgtcagatgataaattgtttttgttgtttgtttagttgaaggtgaaatagatacaaaaaaaatgggctcagaggaaaacaacagcacaagctttccaccaacagagcctaagctctgtgataacggatgtggattcttcgggtcaccatccaacatgaatctctgctcgaaatgttacagaagcttaagagccgaggaagatcaaaccgcggtagcgaaagctgcggtgaagaactcgttaaagcttccatcttgcagtatcattgcacctggacaaaaacatcctctggaaattaaaccagctcatttggaaaccgttgttgtatccgccgagccgtcttcggtgcctgtatccacggaacaggacgaggctgagccgtcgagacctgttagaccgaacaacaggtgtttcagctgtaacaagaaggttggtgtaatggggtttaagtgcaaatgcggtagcacgttttgcgggagtcataggt

SEQ ID NO: 144274 - DNA, 3650 bp, Arabidopsis thaliana landsberg
  unsure (1)..(3650): unsure at all n locations
tatgaggattgcgtcacacgtcttcctcaacgccaaactcaaatgcgaagttctctactctaaactttcttaaacgaatataatatacttttcacaaaaccaagttttgccaaaaaaaaatgtattttattttaaattaaatttagtcggtgcgaaaagactaatgaataaacaagtcaacttaagtaaattaatggtctctgtatcgaatcttaaaatttagattttaccaaaatgtttttgtaaaccaacgaaattcaatctttctctctgtgccttttttcctcttttctcgttcccctctacttcatttagggtttatcatcctctaccaatccgccgattctatacatacacttttcatatatatacatacatcgtctccactctcgttggctcatttttcattcaccgccacgaagcaagaggagattcgtattagccaccatgtctttgagacctaacgctaagactgaggttcgccggaaccgctacaaagtggcggtggatgctgaggaaggaagacggaggagagaggacaacatggtcgagatccgtaagagtaagcgtgaagaaagcttacagaagaagcgtcgtgaaggccttcaagctaatcagctacctcaattcgctccttcttctgttcctgcttcatcaactgttgagaagaaggtaatattactagcgatctggaaccggtttcctaagaatttgtattgtgtttagatcgattcgattttgattttggttttggttttggctagttggagagtttgcctgctatggttggtggtgtttggtcagatgatagaagtttacagcttgaagcgactactcagttccggaaattgctttctattgagcgtagtcctccgattgaagaagtgattgatgctggtgttgtgcctcggtttgtggaatttctcactagagaggattatccacagcttcaggtttggtggattcgttatgtatctgtcatattttgctagaattgtcttctgatactaattactttgtgtgtgtgtgtgtgatttcagtttgaggctgcttgggcattgacaaacattgcttctgggacttcagagaatacaaaggtggtcattgaacatggtgctgttccgatttttgttcaactattggcttctcagagtgatgatgtccgtgagcaggtaagatatgtgtttatggttctttctcatgactcaatatactgtcaattttgtttgttttcgggaacaagcatgttctaaagctagtttgtttcttaatcttttcatgtgtaagcctgtgtgggcattagggaatgttgctggtgattctccacggtgcagagatcttgtccttggtcaaggagctttgataccattactctctcagttgaatgagcatgctaaactctcgatgctgagaaatgctacttggaccctctctaatttctgcaggggcaagccacagcctccctttgaccaggtttgtctctcattcctatcttaatctctgcccaaagatgaaggagtttttctttttaattcttgtgatctcttaataacaggttcgtccagcactcccagcccttgaacgcctgattcattcgactgatgaggaagtgttaacggatgcatgttgggctctctcttacctttccgatggcacaaatgacaaaatccaatctgtcattgaggcaggtgttgttcctcgactcgtcgagcttctccagtgagtttcaaatcccatgatttcaccgtgcttttgtataatgaatgttatgtgttaatgaatattatcaattttattttgctgtaggcatcaatcaccatctgtgcttattcctgcccttcgtagtattggtaacattgtcactggagatgatctgcagacacaggtatgtttgttcttttatagtgtcattcattcatattattcaggatacatggtccaatactgatgggaagaatgaaatacactggcttagaacgctgaatctgagtttgttgataatgacatttagttgtcaaaagttacttgtcaaattcttcctagatgaatctctagaatgggaactgtcaattcttcccagattttatttccccccctgcatgttttttaccctagttatgcaatacctaacattccttttgaatagttagactaatttaaggcagtatgtataatactcttaagaatctcacacatgtaccattcctcacttattttgctttcttttttggttggttctacagtgtgtaattagtcatggtgcacttcttagccttttgagccttctgactcacaatcataagaagagcatcaaaaaggaagcttgctggacaatctcaaatatcactgctggaaacagggaccagattcaggtgaacttttgctaaagattgttgtttctgctcagcttatcagtttctcataaactaatcactaatgttggaagacatgtttcagaagcctttttgttgtttgaagaaagatgttctgtgtgtttatgttctctaatattgttgtggtattgcaggctgtgtgtgaagctggtttgatttgccctcttgtcaatctgcttcaaaatgcggagtttgatataaagaaagnnnnnnnnnnnnnnnnnnnnnnnnncacttcaggtggttctcctgaccaaatcaagtaagattatccgatataaactccatgatctgttgatctcaactcctttagaatctttgttggttatttttcaaacagtcaattaagttattccgttgtgtgttttaggtacatggtggaacagggagtcgtgaaaccactgtgtgatcttttggtgtgccctgatccaaggattatcactgtgtgtctggaaggattggagaacattttgaaagttggggaagctgaaaaggtcacaggaaataccggggatgtaaacttttatgcacagctgatcgatgatgctgagggattagaaaagattgagaatctgcagagtcatgacaacagcgaaatctatgagaaggcagtgaagattcttgaaacgtactggttggaagaggaagatgaaactttaccacctggtgatccctctgcacaaggcttccagtttggaggaggtaatgatgcagccgtaccaccaggtggattcaacttccagtgaaggtaaaaaaaactcactacttgggactaatttatctaagcatctgaggttagactagcaaacagagtaaatctgcctgtgtgtctaccttgtgtgaatctgtgagtctggttttgcttgcacaggagctgaacatgacgatttgaagagtcgaaggagcttaaagagtttgggggcactggttaaaaagggtatgattagagagtctggtcttctgtgtaaaagtcagatggggtgccttacttagtctggcctggtccggtcagatccagtggttggtgggtttgagtcatggaataagcttgttgggggggagttgggtaggagtcatcaagggatatttatttttgggaaagggtttataagtttttaaagtgtgatctgatgagaatgtgtctctctgggtttttgttacatttgtactacacaacactgcaaagtcaaacataaaaaagttggtcaaactttatttggtcttattggtgacataaaagcccaattggttcgtctc

SEQ ID NO: 144275 - DNA, 335 bp, Arabidopsis thaliana landsberg
aagattatcaatggcgtctccatcatcgtcaccgacaacaagaatctggttccgtacagtgatcttaatcgctttaatggtggttctcttctacgttggccgtcctctctactggaagatctctgccacaatccacgatatccgccacaacaaacaatccgtcagagaaggtaaaacacacactctctatctctcgatggctttcttgaactttcccgatgagatcggtgttttttttggatataggtatatcgcagatcgtacacgaagcgcagagatcagtgggatggtatcacgacgaatcggattcagggtttcgagaaggtcacaacaag

SEQ ID NO: 144276 - DNA, 1263 bp, Arabidopsis thaliana landsberg
catgtttgacatgacgtgcgttggataatagcttgtagtgttaaaatacctcatttgacctttcgacattcatacgcaatcgactcattccacggatctgcttactcattgattctcgataaattgttcttctcccacagacaccagattctaccaatcatttgctcgaaaaggtaaaatctttctctacaatttcggttgaatcttttgataactcgatatatctcttgtaaagactcttgcttgaatcttctgatctttttttctttatcaggaatcatgggtcttaaagctggaacctttgtgcttctcttgttgggtttgatcttggtctctgacgctagatctttcgttgactccaccatctcaggtaagatattagacaaaatttagaattcatggttgattctagaggcttgctctttaggggtaaagtttgatacttttgatgaaatagtttgttcttatggctggagatgatgaggtagttttatatttcaacacacaagttcccccaaaactaaaagaatggctcagactcagataatcttatttgagtagaagttttaagacttttcagctttacttttgtccgtgtagagaaagtttccaacaaggaagacgtttgcactctgtgtgaggaatatgttactgatgctctcagctaccttgagaaaaatgtcacacaagcggagatcatcgaagatcttcatgatcggtgttcccaattgcgcggatattcgcagcaggttctctcattttgctgatgctgaaccttacactctctatatttttgctttagactgtttgttttgttaatatatcaaatgtgctgaataaatagtatgtttttgaattgatgcagtgcataagtttggtggattactatgttcctcttttcttcttacaactagagtcgtttcaacctcattatttctgcaagaggatgaatctttgtggcaaagttgtagctcttgtcgaagaagctcgtcaggacagttgcggtgtatgccacaggactgtttcagagattctcatcaaactacaagatcctgacacacaggttagtgataactacaagatcatgactttatctctcttctgtcagtgtatttgtcatttatgcattcagtctcatagactcatagcacctaattaagtcataagagtacccacaatcacagtccaaactgatatgccctcgtgtagttgtgtttgcgttgttattatgttcaacgattacgccaactgataaaagtgttt

SEQ ID NO: 144277 - DNA, 489 bp, Arabidopsis thaliana landsberg
cagagctagctttatcagcattagaaacagctctattaaactcagtcactaaacccataagctcattgagatcaccaatcgcaccatacatctccccgtagtcaatccctccctttctccaagcgtaattccacatataatcccaaccaacagaccaagctctgcttataaaccctaaccctaatccacgatcgatttcatcagccattgctcgtacacgagacgaacccaatgcgtctccacgtgaagcgcgtaggtttgcgacgcggaggaggagtgatcgtgagattgagattagggttttgtattgtgtgaaggaaaatgggaaagtgaaggcgtttacgaatttgggtgatggagatgagattgtgagaatgaggaatagaacggtgaagagcttaatcgtcgccggagaagttttaatcccggccattgattccggtaacgactgtttgacttttagtcaatatctttgtcgagagagaaaag

SEQ ID NO: 144278 - DNA, 318 bp, Arabidopsis thaliana landsberg
acacaaagcacatcaacggattcgctgctcatctagaccacgaccttgcttatgaaatttccagtaattatacaaacataaccattttatcttcttctctctttgtgcttcacaagatttgactcttttctcttttcttgattattcctcaagaacaccctgaagttgtgtctgtcttcccaaacaaagctttaaagcttcacacgactcgatcatgggactttttgggtttggaacataactcttacgttccttcctcttccatttggagaaaggctaggttcggagaagataccattattgcaaatctcgatacag

SEQ ID NO: 144279 - DNA, 883 bp, Arabidopsis thaliana landsberg
atgattgagagctggaagggtctgaaacttctttcaagggcggaatttcacgttggtgcccatgtgtcaaagttcctacgtctgcagatggtttcttctggagcagataaaataaatcgatttgctttgttatttggtactctagacggcagttttggttgcattgcgccactcgatgaggtcacattccggaggttacagtctctccagaaaaagctagtggatgctgttcctcatgttgcgggtctgaacccactcgctttccgtcaattccgctcaagtgggaaggctcgacgatctgggcctgacagcatagttgactgcgagttactatgccagtaagttttcttccgcattctatatgttcaaacggtagtaacagacatatgacaaaatggacctcaaagtagagagagcacataggataataaactcgaaaatcacacgatagaaggatcatagatgcatatcctcatggttttgaaaacattttgcagttacgagatgcttccattggaggaacagcttgaacttgctcaccagattgggacaacccgatattcgattctcaaggatttagttgatctctctgtcggaaccagcttcttgtgaaagatcaaagaaaaaggcagatcgtaatgcgttgttcacccgccgacaaaaataggcagagtcgcttaatatgttgtaaaaaatgctgtaacagtagacaatcgtatgaactttgatgtttagtggcatttagattatgttaagattcttctccactctctatttgtttcatgtctacattgaatctgaatcctcataaaatttggacagttaatttcaacttttgtttcatttttgagtattttttaatctatcttatgttaatttctaa

SEQ ID NO: 144280 - DNA, 1421 bp, Arabidopsis thaliana landsberg
ttgatccacaattctatctttacgtcataataataacaaaaaattcgtaaaaagatgagttttgttaattacttctcttattataatcaaagttttgatttttattttccaataagtcgccgggaaaagtaaaataaaaagccgtcacgtctccgataaataatagagtatcgttagataggtagcttcaacgtaaggaatctaaattggttcagctcaaaaaacgaaaacgatgggttccatcgaagaagaagcaagacctctcatcgaagaaggtttaattttacaggtttgttcaatttcaattaatcacttaggttagcgaattttgattttcctcaattccaaaatcttgactttggattgatcttatgcattttctttctgggtttattgagatcttttctgggcaatcactgttttatctaattgatgattccaatgtttgaattttgcaagtagatatagatcaaactttcgagctttgatacagttataatttagttagctaatcaaaaatgttttgtgaatttgttttaagtaggaagtgaaattgtatgctgaagatggttcagtggactttaatggaaacccaccattgaaggagaaaacaggaaactggaaagcttgtccttttattcttggtaatgaatgttgtgagaggctagcttactatggtattgctgggaatttaatcacttacctcaccactaagcttcaccaaggaaatgtttctgctgctacaaacgttaccacatggcaagggacttgttatctcactcctctcattggagctgttctggctgatgcttactggggacgttactggaccatcgcttgtttctccgggatttatttcatcgtaagcattgcttctctgtgtaatgtttggtttggtttgtttgctcctgattactgataggtttttgtatttgtttaggggatgtctgcgttaactctttcagcttcagttccggcattgaagccagcggaatgtattggtgacttttgtccatctgcaacgccagctcagtatgcgatgttctttggtgggctttacctgatcgctcttggaactggaggtatcaaaccgtgtgtctcatccttcggtgccgatcagtttgatgacacggactctcgggaacgagttagaaaagcttcgttctttaactggttttacttctccatcaatattggagcacttgtgtcatctagtcttctagtttggattcaagagaatcgggggtggggtttagggtttgggataccaacagtgttcatgggactagccattgcaagtttcttctttggcacacctctttataggtttcagaaacctggaggaagccctataactcggatttcccaagtcgtggttgcttcgttccggaaatcgtctgtcaaagtccctaaagcgccac

SEQ ID NO: 144281 - DNA, 1194 bp, Arabidopsis thaliana landsberg
cgctctcaagctctcctctgggtctttctttgaatcgtgaaaggtatcgtttttaaatctctctaaacttgtctgattctttctctggatccgtttccgtctcaaaatttgtcaagggaactacattgactattcgatttgcttaacacaagcagttctcattttagagttaacgaaagtagcaatcggttttcgattttgtaaactttaatcgccagttacagttactgaaactatgtactgagagatttagggttcggtttctaatcaagggttttgaacagctgggttttgtaattttgtttctcgtttatctgaaatccgagttcttgaggctctatgtgttgggattagactcttacgagattgttataattgggcttcgattatttttgtgatgtaaattctggtgggagatgtttaagcaatctctaaacccttttttctgcagttatatcttataatcagtttctgcttactgcagtttgatctctagtaaaccattttttctcactattttgtatcaatgagggaaccaccaaataatccccatctattgattgaatgattcttcttgtttagtttagattcgtcacaaagaaacaaaaccttgataattggtctaggtttctgatcactggttagccaaactgtagtctggttttagtttgtcactctgctaaaaaaagttggaatgaaatttgtgatgctaggaaatgggaagagagaagagccctggcttgaagatcctctgggtatggactatcggcactgctgctagtatgattctctttctgtcattctttgaatttgtgcctgtatatatatatatatataccggtttatgtactctatagagattgaaatcatgattcatgagatcatatgtatgtgttgtactgaccagtcttgtactcgtcttgcagtattggtgacaagtgttgtccgcacaagaatgcaggatatgcaaacaatgatgaaccagaaccaggaacaagcaccgaaagaaaaccagaacggaggtgcaggtgattcttccgtcttaatggatgaaacagttttgcctgagtcggatcgagagattgcagaaaagctttaaagaaagaagagcctggttctattgttgtcttccttttcttctcttcctttttcagctctccatgaaggtgatgaaacatgttttaatggttttgg

SEQ ID NO: 144282 - DNA, 1693 bp, Arabidopsis thaliana landsberg
cccactttcatctttttcatgttcgtagttgttcctctggttatcctcatcaacgggacccttgaaaccgtgtagccatgtaagcctttgtctttgtctctttctcttgcttcagcaagttcacgtctgctctatttctaattttgttctaagattcaattctccttttttctatgcgagaaatttaagattggttctctagctctacctctttaaatttgttactatgtgtcggtgtccatcattcatcaaattttttccttttttatccatttgagttgatgtaatgatgttgcttcgcttcatactggtcagagttagtctaatcttcattttagcacaacttgacaacttcatatggttatgacttatttttacttgggtctttcaaaggttaagtattttagtcttattttgggatgatgcagcttgcttaatgattagagtcttaaagctgtgctctttcttcatcgatttgagcaagtgatcttggaaggctcttgagttctgaattccttgtaagcaatcatggcagggaaaagagaaaactttgtgaggttagtgctgcatccttttgttttaatacaaagatctgaagtttgaatgtgagaaacgtattgatttggcaatggttgtttctgatttgtttccttatgaaagtatagtgtgattgtactgaactatagcttgttggtgcatagtaatctgaaagtggtgttgttcataccttttatagggtggatgatttggactataggttaccatcatcatctgtagccttccaacagaactacgccttcaatttcagtggacaacttcatcctattcatgcaagcaatgaaacttctagatccttcaagaaaggtatccagaagggttccaaagggcttaagtcgatcggacgttcacttggtttcggtgtttatcgagcagtgttcccagaagaccttaaagtatctgaaaagaagatatttgatcctcaggataaattccttttgtattgcaataaattattcgttgcgtcatgtattctttcagtgtttgtggacccttttttcttctatcttcctgtgattaatgctgagtccaagtgcctgggtattgacagaaaactggctatcacagcaagtacattgcggacttttatcgatgtgttttatctcgctcacatggctctccagcttaggactgcttatattgcactttcatcacgggtctttgggcgaggtgaactcgtgattgatcctgcacagatagcaaagagatatctacaacgttggtttattattgactttctctcagtacttcctgcccctcaggttggttaatataagttttgatcatttcagtaaattgtgtgttggaaaacatcattgcttaatttgttgaaagggtgcagtagccagtagttggtgatcagacatctctgtcaagcgctttctagttctagatttacagtactcattttgtgtatgtgcagattgtagtttggaggttcttgcaaagttcaaatgggtcggatgtattggctacaaagcaggccttgcttttcattgttttggtccagtatataccgcgattcctacgtgtcttacccttgacgtcagaattgaaaaggacagcaggtgtctttgctgaaacggcttgggctggtgccgcttattatctgctcttatatatgcttgcaagtcat

SEQ ID NO: 144283 - DNA, 1170 bp, Arabidopsis thaliana landsberg
aaaacgttaaaaataccaaaatttagaaatccaataaaagtgtgaaaaaaagccgcaaagggtcgttgttgtttgtcgcctctcaatggcagcttcttcaactaatgctcgtctcaccaaccctcctcgtctactctccaaaccccgactttcacctacctccgtcgccaatctccgttttccagccgccgatttctccactcgcttctttgccgattcttcgtccccgcggctaaggagtgtaccgtttccggtggtattttccgatcaaaggcgccggcgaagcatggaacctagcaatgtctatgttagtgattcttcctttagttcagttttcttttgttgttttctgttccgtttttattggagaaggataggtaatgatgaatttgcagatttatcgcttcaaataaatttggtattagttttggatgaagactttgatgtttcgtgtacaacattggtttagctatttagaatcgatcttcagaatttttgtttagttctgagaagtagttggatttttaattgattgtggaatttatcctgttttgtgatctcaggtggcttcaaattccacggaaatggagatcggaagtcatgatatcgtgaagaatccgagcttgatctgtgctccagtgatggcggattcaatagacaagatggtggattgaaacgagtaaagcccatgaattgggtgcagacttggttgaaattcgattagattggctaaaggacttcaatcctcttgaggatctaaaaaccattattaagaaatctcctctacccactttattcacctacaggtttgtgtgttcaagcttgagactttttaaatgtttgatatcgaacttcttgtgctttattgtgtcgagctttcaataagttacgagctacttattgggctgcagtatgagtaatgttgttttttgtataatgtctgctctttagaccaaaatgggaaggtggtcagtatgaaggtgatgaaaatgagagacgggatgtgcttcgtctggccatggagttgggagctgattatattgatgttgaacttcaggtgaccatcgtaatatattttggatattttagaagatgtttttgatgctaattagtttctcctactttatatttgtatgttaaggtggcaagtgagttcatcaaatctattga

SEQ ID NO: 144284 - DNA, 681 bp, Arabidopsis thaliana landsberg
ccccaattcccaatggttccctcagtcatatggtaagctttcatatatttaattcagatccgttactatgaccagcatgctgcttctttcacacaaatccatgaagtaaatttctaagaatgtctttgttactgtcattaggtgaatgtttcatctatggacctgggagttgtgccggagtcaacaacgagtgacgcaacagtatcaaacccaagatcgcccaaagcggtaacagaccaaccaccttaccctccagctcagatgctcagtccaagggacagagaagctagagtcctgagatacagagagaagaagaagatgaggaaatttgagaagacgataagatatgcttcaaggaaagcgtatgcagagaaaagaccacggatcaagggccggtttgcaaagaagaaagatgtcgatgaagaggcaaaccaagctttctccacaatgataacatttgacaccggatatggaattgttccatcattctgatgctgctatggcaaaactagactgcatgcttgtaaattacttctgttttgaaattcctgcaagttattaccacggttttatgcatatagggtctgtagtttactagttttgcctaactagtacgagttaattagatatacactcatacttagctgctgtaagttaatacaaattttgcccacttggtag

SEQ ID NO: 144285 - DNA, 184 bp, Arabidopsis thaliana landsberg
catagtccccgagtggtctccagggtactcagagcagttccctagtgaagaaaatggtattggaggaggaagtacaacgtctagctacttgcagaatcaccatgaaatactgaactggagacggctttcacaaaccgggtatgtaactcgcaaatccgactctctcaacaataagttcacataa

SEQ ID NO: 144286 - DNA, 915 bp, Arabidopsis thaliana landsberg
ctaactctcactcttagtacaaatattttcaagaatggtttctccttctttttcaaccaagcttgtcttctttgcttgctttgttctgttcacattctcacacaaactcgtgacaggagaatccgacaaagttgagctcaatctttactacgaatcactttgtcccggttgtcagagtttcatcgtcgatgaactagtcaaagtctttgactccgatctcgatacaatcaccgatgtcaagctcgttccattcggtaacgccaaagtctccaataatctgaccgtcatttgccaggttctgttcaattttctcacccttcttgttcctatttatatcatcaaagatcatcatcacttgtatatgtttattttaaactctatctctaataaaatttatcgtttggtaaatttctgtagcatggtgaagaggaatgcaaactcaacgctcttgaagcttgcgtcattaacactttgcctaacccggtatgcattttatctcttaatgttttggtgcattcaggtaaaatgatagttaattacaattttaatttgataaaaatgtgatggttttttggaacgcagaaatcgcagtacaagttcatacgatgcgttgaaaacaatacggataactgggaatcatcatgtttaaagggctatggaaatgagaaagccatcaatgattgttacaatagtgatctctctaagaaggtataggtttatgtgaataataataatacattcataaaaagataaacatacattgtataattatataaccttataattaccattattttttttgtcctaatttaccagctcatacttggatatgcaaaacaaaccttgagtcttaagccgaaacatgaattcgtccatgggtcacaatcaacagcaaaccactcttaccgtatatat

SEQ ID NO: 144287 - DNA, 1060 bp, Arabidopsis thaliana landsberg
agttagctttgatcatccaccctaaggctggtgtacaagaacaacctatcgaagcacgacctttacgctctgtctcttcgaagaaaccatcttttcaacctgaaaaatacggacacaaaagttacctggagaagaatggacctgcgtctaatgatcccgcacaaaggtttctattcatttggaacttcgtgacatttaaattgcctttagcataatggatgtttttgaggaagattcctaagcagcttgtcacgggctttaagctaacaatttttcttccatgtagtgctacaaaaaggaaaagacgattttggacgctggcagaagtagagatgcttagggtatgtaacttgcacatttctctctatcctacgtatatttcatgctgcagtcatcttggtttttcgtaatttggagcttacacattcaacggctctttttaaaggtttatgcctgttttagttttatcagctttataaaaacagccagggtagctggtcttatcatctcctaagaggcggtatttcattttcagtcgtaatgcaattgttttgtagactagacttcataaataagagcttatcctccaaatcattgtgaaattatatttgagatatttaacattgtttgtggctgtccaaattaaatattttgctatgtagtgcacaatggtgataaatgtggatttgtctaacttcgtcctgtcctttaggttggtgtgcagaaattccctggcgagaggaatattccatggcgcaaaatcttgcaatttggtcgggatgtgtttcatgatgaacgggctccaagcgacctcaaggacaagtggaagacgttaaacaaaattccttctgacacggggaaatgggtaagcctttcaactgaaagacaaccgaattactatgtgtctgaagttagttctgaatgacctatcggacttagcaagcattagagcttagaagagtagtagatagggctttgcagattttgtacaaccttgcttgctcctagtttgctaaatgtatatggagcaaaactgatcttaccttttaacactaaattc

SEQ ID NO: 144288 - DNA, 2307 bp, Arabidopsis thaliana landsberg
gcgacagtgacggcggcgaaaagcggcggtgttggccgcaaaaacgatgcaaaaccagctatggtcattaccgctaacgatttatcaaaatgggaaaattttcctaaaggacttaaggttcttcttctcctcaacggctgtgacagcgacggagatggctcctcagccgccgagactcgatcagagctcgaatcaatggattatatcggtaagccactaattttcctctgtttcttactttaaaggttatttaatcagtggttatgcataaatatttaatcataagttatgtgagtgagactatactagtttaatattagagttgctttagctcttacatgtcccgtgacaattctaaattggatcgccttctattatatttgcataaatacacacagacatactcagctttagattggtcaatagcctatgaatagaactataccattatttgtgtatatatatagggggaaaaataatattaatatgtaaaatgcaacgcttttagttgatacgtacataagtagtaaaagcttgtgcagttatgttttggacttttgttagtttatatttatgaaccaggatccaaattatctcgaaactgtttatggatttctgtgtgttttgactatcaaacacataatgttaagattatagattcaatttttgcttttttggaactttcttgcagttactacattcaccgatgaaactgaagcactctctgcggttgtcaagaacccggagagcttccacattgccatcgtcgaggtgaatatgagcgctgagagtgagagtttcaagtttcttgaggctgccaaagacgttcttcctactataagtttgtgaaccttttacaagtaccctttttattttttcacaaatctttacaatacgaaaagattgttaaaatgtggattcttttatgtctttacagtgatttcaaccgatcattgcatcactactacaatgaaatgcatagcggtaagtgattgcgacttgcatttgcgtagatgtataagaatgttggttatgtgatgatgagaattgataagtgtttttcagcttggtgcagttgagttcctacaaaaaccgctctcaccggagaaattaaagaacatttggcagcatgttgttcataaggtttagttagttttttcgcgtctttaattcctcggtaatataatcataatctaagaaagttgttgttacatttttatgttgctaggcattcaatgatggtggaagtaatgtttcgatatcacttaagccagtgaaagaatccgttgtctcgatgcttcatcttgagaccgacatgacaatcgaggagaaagatccagcgccatcaacaccgcaattgaaacaagattcacggttactagacggtgattgccaagagaacataaatttctcgatggaaaatgtaaattcctcgaccgagaaagataacatggaagatcatcaagacatcggtgaatctaaatcagtcgacactacaaaccgcaaattagatgacgacaaagtggttgtcaaagaagagagagaagacagtgaaaaagaagaagaaggtgaaaccggagatctcataagcgagaagacagattcagttgatattcataagaaagaagatgggactaaaccgattaataaatcatccgggatcaagaacgtgtctggtaacaaaactagtcgaaagaaggtaatgttgtgtttctcttgacgctccttagtgctaaaagattcaggctctcgttatcattgttactgccttcttttttacaggtggattggacaccagagctgcacaagaagtttgtgcaagcagttgagcaactcggcgttgatcaagcgataccttcacggattcttgagttgatgaaagtaggcaccttaacaagacacaatgtagctagtcaccttcaggtacttagatcccaagggtcgaatgtttcgcaagatttctgaattcttgtaaaatgttacacaatcttttgaaaatatgagcagaaatttcggcagcataggaagaatattcttccaaaggatgatcataaccatagatggatacaatctagagagaaccatagaccaagtcaacgtaattataacggttttcaacagcaacaccgtcccgtgatggcttatcccgtttggggtcttcccggtgtttatccgccgggagcgattccacctttgtggccgccgccgctgcagtccattggtcaaccacctccgtggcattggaaaccaccttatccaacggtaacatctttttacaagtcaaagattctagctaaaataaaataa

SEQ ID NO: 144289 - DNA, 905 bp, Arabidopsis thaliana landsberg
gtactgtaagtcagggaatatgtcatctagaatctgcgctatggccaaaccaaatgatgctgagactctttcatcatcagtagatatgtcacttagcccgcgagttcagtccttaaaaccttccaagactatggttataaccgatcttgcagccactcttgttcaatccggtgttccggttattagactagctgcgggagaacccgatttcgacactcccaaagtcgtagctgaggttaatacatttctcctactggttttgccatgttctgtctctctctgtggtttgttctgaatcgattgtttcgtataggctgggatcaacgcgattcgagaaggttttactaggtatacgttaaatgcaggtattacagaactcagagaagcaatatgtcgaaagctaaaaggtataaagaaacgcttttgctttgtaaatcagttatgtcgaaacggagtcaaattgtttgtattctggttgttttcagaggagaatggattgtcttatgcgcctgatcagatcttggttagtaatggagctaaacaaagtctcttacaagcagtgcttgcagtttgttctcctggagatgaagtaattaaaaccgtgtctttcgagcttttgttgaattctttcgatgtgattttgtttgtaacaatgaattgtatttcactaggttataattcctgcaccgtattgggtgagttacacagaacaggcgagattggctgatgcaacgcccgtggttattcctaccaagatttctaacaattttttgttggatccaaaggatcttgagtctaaattgactgaaaaatctagactttttattctttgctctccttccaaccctactggatctgactaccccaagagtcttgctcgaagagattgcccggattatcgctaa

SEQ ID NO: 144290 - DNA, 367 bp, Arabidopsis thaliana landsberg
gcatttgggtgggcatacatgtacagctcccacaacacatgggaccatatctacgtctactggatcagttctttcgtaggagcattatctgctgcattgcttttccgttctatcttcccgccacctcggccccagaagaagaaacaaaagaaagcctgaggaaaataaaacaattgggagaacaccggtcagattcttcaccggtttgggctgtagaaagattcacaaagctgttccattctaaaataaggagaccaacaacaacaaaaagtcaaaagtctccttgtcattgtttagatccacacgcttattttacagatttgtgcgacgtaacttttctcttttatgttcataaatcattcagact

SEQ ID NO: 144291 - DNA, 2698 bp, Arabidopsis thaliana landsberg
atgcttcctccttcacgaagagaattcaaagatatttatgttgtctttgagctcatggaatcggatcttcatcaagttattaaagccaatgatgatttgactagagagcattaccagtttttcctgtatcagttattgcgtgcactgaagtacattcacacaggtagtctttttcttttggtctctctttatccggcatctagcaatagtcttttcatcttcaaatctctctgtgtgtatatatcgctctctctgtagatgaaaatcttggacacttgcaaaatgtagtgtatgtcagatttgtcttttaggactttacattctacagtactatctcatacattgatgcactgaattggattcttgcgggttccattgtctggctaaatgtttgccttttgaagtttgccccaatatatctgaactttaactcagctgtcgagtttggtttgttgtattatattatcttatgaatcttggctgttgcagctaatgtctaccaccgagacctgaaaccaaagaacatattggcttttgcaaactgtaaacttaagatttgtgattttggattggcaagggttgcattcaatgatacccccacaacaatcttctggactgtacgtttgacaagatggctctctaagagtcttttccttctcttaaactgaagttggtctaaatattattcactacgttgcaggacctgatactcttctacattattttctactgaatttacaggactatgttgctaccagatggtatagagctccagagctttgtggatctttttactctaaggtgttcatttgttctctatataacatcttttaattggtgtgttgccgcgatataacttttgatggatttggctttgtagtatacacccgcaattgacatctggagtataggctgcatttttgcggaggtgttgatgggtaaaccacttttccctggaaagaatgtggttcaccagctggatcttatgactgatctgctagggacaccttccctggacaccatctcacgggtattgattttcttgctaaacgaagtccattgagtttctacacatcttaagcaaggaccagtagtgatgagtaccctgcttttatgatgttatacaggtgaggaatgagaaggcaaggaggtacttaacaagcatgaggaaaaagccacccattccgtttgcacagaaattcccaaatgcagatcctttgtctctgaagttgttggagaggcttcttgcttttgatccaaaagaccggccaactgctgaagaggtgcttttcaacttccatattgactaactatctcaaatcttgaattctcggcttcctgattgttttctctctctaataatagagtatcatgcatttggggtttctattggagtgaatcactaaactactcttgtatacttgaatcaggcacttgctgatccatattttaagggattggcaaaagtggaaagggagccttcatgtcaacccatcacgaagatggaatttgagttcgagagaagaaaggtcactaaagaggatataagagagctaatttctagggagatacttgagtaccaccctcagctgcttaaagatcatatgaacggggctgataaagccagttttctctacccaaggtcgtaatttttgttgattacattcttgagctagcattgcatatcacacccagtccctgacattgatgtatactgtgcagtgctgttgatcaatttagaagacaatttgcgcatcttgaagaaaacagtggtaaaaccggccctgtggcacctctagaaaggaaacatgcctctcttcccaggtatatcctcattttttctgtaaagtctgttgtcacttgatctggtttcggtgatctcatctgtttttgacccccgttatgcaactgctatactagttgtatattaatatacattgacatggcaaggataaaaaagatggaatcataagaccgtgactatctgtttcttgtgttgaacactaatttctataaaaatatgtccttctgactctgtgtttgcatgctttcagatcaacggtcatacactcaaccgcagtagcacgaggaggacaaccaaaacttatgaataacacaaacacattgaaccctgaaactactcaaaacattccttttaatcatgcaacaatacaagcacaacaaagaaacctctcaggtacttttaatcactcatcctgaatccaacagcaatgtgtccaaactgacctctataaactgtaaaacatctatctacacgcagcagccaaaccaagcacattcatgggcccggttgcacctttcgacaatggcagaatcagcagagatgcatatgacccgagatcattcatccggagcactaatctccccttttcacaacaatctgctgcaacagtcgccatgggaaagcagcaagagagaagaacaactatggagcctgagaagcaggcaagacaaatatctcagtataatagatatgcaccagatgtagccatcaacatagacaacaacccgtttatcatggctagaacgggaatgaacaaagccgaaaacatcagtgaccggatcataatcgacacaaatctgttacaggcaactgccggaataggagtcgcagcggcagctgcagcagctgctcctggtggttctgctcaccggaaagttggagctgttcggtacg

SEQ ID NO: 144292 - DNA, 572 bp, Arabidopsis thaliana landsberg
ttttcgatagttgcccgaattgctctggtgaaacctgagaaagcttgaggtgtggaggatgttattttgagggctgctcagatgggacagatagttgagaaggtaaaaaaattcagtcacttttcaatgtcatagttcagaattcttacacatcatatggtttctactcaagtgccgctggtactacacgagtgttatgcatcaaagagttcgtgaactatactctgtttgctttacaggtttctgaggaacggcttataacactgttggaacaaataaacagccaaactaccaagcaaacgaaagtcacggtaaggtcacacaatcctcaaaaacacaagttattaaagcaaagtccttgctcttatcttaaccatcgatatcattgagtgtaaattgatctcggatatttatcttcactcgtgtagtaccaacggcgccgtggggtggacgacgattaggaaggaagaagaatattatgatgtgctttgtatatctatggagatctcactgttgtgttagtgagttcacttaagatctacttaaatgtttctgttcaatatgtttattgg

SEQ ID NO: 144293 - DNA, 1762 bp, Arabidopsis thaliana landsberg
aggtctcattgggatttagggtttaagaaatcttctgagaaaacagagagacagaaaaatggtgatgatgaagaagatgaagggaagccaaagctttagacaaagacttcttctttcaacactttcttcaacacctatctcgattgatgagattcgtgccgacgaaacgattcctggtctccgacctcacgaggttaatcttctccgcctcttagaaattgtcaccgacgacgccgtcgttgatattaacgagaccggtaagtaacctttcacctgattttagggttcatgacttcagatttactgattttaggaatgatattgagctgaagctaaagtttcaccaatttagggcttcaaattttgtatctttcagctaggtttcgattccaatcatgtttgtgtttctgaaagcaaaacttgtagaagaagaaaatgatttttaaaaattcgaattggtttgttagttttttagtatgttgcgaatttggcagggactcgattaaagtacaagcctggaactatagtgggagggaagaatttggttcacagctgctcgctgagtcgatccattggctattatcttgagccattgcttttgttgggattgtttggaaagaagcctctttcgattaggctcaaaggtatgtaccttctactgtaaaactgctttcaaaagcatgtggatatttgatgatcgagtgagcaagtattttaactcttgcaggaattacaaatgatccaagagacgctagcgttgacacattccgttccactaccttgaatatcataaagcgttttggagtccctgcagaagatttggagctgaaaatcgaagcccgtggagtagctccgaatggaggtggagaagttctcttaacagttccaaatattaagactctaagtgtatgtagtacttgttctcttttcttcttccgcattgcaaggttcaaatggatttcttatctgttatattattgcttcaggcggttcattgggtagaagaaggaatggtgaagaagatacgtggtacaactttctctacaagagtgactagtgactttgaacattccatgagattcgcagctcgtggtatctttaacaatctcttgcctgatgttcacattttccaagatcacagagctggcgctcaggctggaaagtaagaagcttaactaaaaccaaaagcatgagatacttgattgattaaagctcacctttttaaaaaaacctacgtgattgcagatctcctggatacggaatatcattggcagcagaaacaactacaggatgtttcatctctgcagatacaacagtgtcttgtgaaagaccagacgaaactggagagctcgatgtagagaagaaagagagatcgccagcagaagacacaggagttgaagtagcttcatggcttcttcaagagattgaaaaaggtggagttgttgattcaacacaccaggtacgttttaaaatttgaaaacattaaccatagacaccaagatcgatcagactttaagtgggtgtgttgttgattctctgaggttttttacagggattgttgtttctactgtgtgcgttatctgaacaagacgtgtcaaaggttcgagttggaacattatctccatatgcagtggagacgttgaggaacattaaggagtttctgggagttaagtttgccatcaaacctgatccattgactgggactgttatactcaagtgcactggaagtggcttaattaacctctccagaaagctctcttga

SEQ ID NO: 144294 - DNA, 549 bp, Arabidopsis thaliana landsberg
  unsure (1)..(549): unsure at all n locations
gttgctcgatcactttcgccttttcgggtttcggcttatccatggnaagaacaagaacaagaccaagaacaagaacagagagatgtacaagaacagaggaaagggaccttgtcttctattccatctacatcttcatcagcttgcgtgtcttgcaagtcatcttcctcaaagaaatggagactaaaggactttcttctgttccgaagtgcatccgaaggaagagcaaggcacaacaaagattcggtaaagacgtttacaagtttgtttaggaagcaagaagacaccaagaactcgagttcacgaggaagagggtcatcatcggtctccgcccatgaattccattacatgtctaagaaagcagaaacgaaagatttgaagaagaagactttcttgccttacatgcaaataggacgattcgccttctaaattagttcttccaaagccagaagtaaaaagatttatttgtttgttcaattatgttctatgaaggaccaagtctcttcttctctcttgtgtggttgccctgtgctccccagtttgtagaattta

SEQ ID NO: 144295 - DNA, 1785 bp, Arabidopsis thaliana landsberg; identical to SEQ ID NO: 63337

SEQ ID NO: 144296 - DNA, 2158 bp, Arabidopsis thaliana landsberg
tgccgtcatcggcacggaccgcgttccgatgcctaaacagagtcctctaacaaatcgcattttcaggtatatcttcttaacactgatttggtctcttagttcgttttattctccgttctgaaattgttttggttttgcgaattttgtttggaatgaaagatctccggtagaactaagctgttgcgtggagacgatgctcccttaccacactgccactgcttccgctttgctcaattcaatgctctcagtttcacgccgtggttggatcgttgatggtactttactctcttctcattgcttattattctctatattgtttagtttcttgatgatagaataaagtttacatgcttagttatctggtaaatgaaatgcacaaacaaaaatgcttaaagacaaatgtgtttcattttttcgataggtctcttgattgaattgaattgaattgttaccgagtttgatttgatttgagtgtttagtgtagtctttcgtgtgcatgttttagtggagagcttgctaagaagaaacctctttgttgttgaagatgtcaatcatagtaggattattgattagacaaaatgtctgcattcttaagtttgttgcataatagtggtaaactggtaatgatcatatgcttgtggatctccccacattacggttgttgttgttatgggctaggtttagagttgctctgttctacatagaaagttaaaacaagatcttaactttatttagtgtagtgaatgtggattttttatgtgttcatttattcaattaattctaaacttctctggcatctctcagttttcattatgtgtgcattgttgattgggaggtagctctattaggctttttctttcctgaactcaaatttttttggatcctgagttttgagtttctcgtgcaattgtgttattgaactttccttatgcatggtttgtcccagtattaagttcttaggtatatgcccttaagattttggtttttacgaacagaagtcattttttacagatctttttggcatctagaatactccacctctaaataattggacagtctaggaaaacatactactctaatagaaaaatcctttagcagagtctgtcctgtgtcatctttttgtacatatctttacccagttaaatccaatgtcttgaatccattgagaaaaaaacaattttttttgctttgtagggctagacgagactagatgaagatccatcaacaaaagtgatgtgagtcaatcaatttatcttctggtcttggagttgggtctttttactggatttgccatcatggttatagagtttttctatatggatacataagcgatcgtttcttagaaagatgggtcatttgtagttgattctctgcgatagtgtggtctttgttaatgcggtcaaatatgcttgagatattgacatactgctatattttctgaatatcttggactagaacacttgtcatcagcataagaatcacactgatacaaaaaattggtattcactcagattgcaatgatgatgtatgatgaattactgggagaggtcagcgatgcatgcagtctaagacaaggtggtgctgaaatgagacttttcttttgggtttcttgaacttgatcttagggcagtttgccattagaagtgataataattgagttacgtctctaggcaattttcttttgtttttgttttagctcgataaatgagtcgaaagtttctaatgtagtgtctgtatcgtttgttttctggtgttgtagatggatgactcttgttctcaccattgcagtaagcaggaagattttcttaagagttctaagaccccttttgttgattcttaaaccatatctgcaaatgttttaactattttactttataaatataaaagtgaatcagttttcatgggttcttacatcgaatcgccttctattgtggctcgtatgcatatggaattggaactattttctgattcttttaaaattgaagggagattatgttccaaaattgaatacagcaagcagctagattttgactttcatactattatgtatttaaatcggaaaccagaattatggtttgaagaacaagaagaagaagaagaaataacaccacaaaggagccagaagtcaaagcctgaacatcacacgtggccagcgtag

SEQ ID NO: 144297 - DNA, 833 bp, Arabidopsis thaliana landsberg
ggagataatcacgggtgctggtcatacaagtgctattgattggtgggcactgggtataatctgccactatctttaccttattttgatcacaaactgttattaatatgctcatctccttttatgtgtgtttgttgtaggtatcttgttgtatgagatgctttatggtcgcacacctttcaggggtaagaataggcaaaagacatttgccaacatcttgcacaaagatctcactttccccagcagtatccctgtgagctaccttgtaacaacaacctgtgtgtctttcccaaagtaaaaaaaatactaatctaaccatatgtgtttgtgcaggtgagtcttgtaggtagacagttgatcaacacgttgttaaatagagatccgagcagtcggttaggatccaaaggtggggcaaatgagataaagcagcatgctttctttcgcgggatcaattggcctctcatacgaggcatggtaggactaataatcgttatttttatatcaatcagccttttccgtgtttgttgttggctgatataatagagtgattgcatacagagtcctccaccactggatgcaccgttgagcataatcgaaaaagatccgaatgccaaagatataaagtgggaagatgatggagtgcttgtgaattctacggacttggacattgacctcttctaatcctattcttcctctctctgcctttgattctcaaattatgcaaaactcttcttctcaataaaagccaaggtgttgttgtacttgtagttgcttaaatataaacggctcttttcatgtttttccatttcttctaatcaacaacaataaacatacaa

SEQ ID NO: 144298 - DNA, 2524 bp, Arabidopsis thaliana landsberg
ctacttcttcttcttctgtgctaagcctttcctctcgacttgatacttttctccagtaaggtacgtttccgatccttaatcgagctctagtatcattgatttggctatgttaatgaagatgagggtttagggttcttatacagacaccaatgtatctcgtgctagatctgatttgaagttatgagagaaaaactctttgattgacatctgattttggtttatctccttctggatcagcttatttttattgtagcttctctgattttcgatgggtacttatattttttttttcaatttgggatttttcatgattctgtagggtttgcaaagatgaagcttgatactagtgggttcgagacttccatgcctatgattggatttggctcgagcagtgatatgcttgatgagctttcttctgtaccctcgtttgatctaccccgtactaaagaggtgacttttttgtttttgtttgtgattcgaagcagtgtgagtgaattttcaatgttgtttgattacgaaactggttttatttgttggtttcagtttgatggatttcagaaaaaagctaaagacatgttgaagcatgcaaaaggaacaaccactctcgcttttatcttcaaaggtggtgttatggtcgctgctgattctcgggctagcatgggaggatatatctgtatgttctcttttatcactttacttttagttttgtttgcagactttgacgatgtttagctgtgagctctcttaagaattcctccaaaaatatgcatcctttcgatatagttgactttggtagaaacactagtacaatgaagattaagttagcttgttgttggttttggttttgtgctggagtgtcaaacaaatttctagttttcattctgttggccattaattgtgaaccagtagaggaaagaaaacgttgtgtgatttttgttaatgttttaaatctgtttaccacattcagcctcacaatctgtgaagaagattattgaaatcaatccttatatgctcggtacaatggctggaggagctgctgattgccaattctggcacagaaatcttggaattaaggtacctaactagaaatctttttggccgtgtctgaactgataacttggatctttgattaatctttctctctgtggttatcgggaatcttgctgccttgttatatagtgatttttttctatatttctaaaagcagcagattcatttaccttatcaaatgctttaagttttagttctgtctatattaaagaatgacaaagattttgcttgtttgatgttgaccctaagatcatacaagcctctttgaatgctaagcatgcaatttcagttgagcatgtggtggctttagatcccctttttttctaatcaaacattctgtagcaagaaagttcagctttttttcctctgtacttagatagcaaataaataaagaacttagtttgttgaatgcgatgtgaaattttggcatgttaataccattgtagacttcttcattttatcaccaacatcttgtttgttgattttatggctgatctcttaatttatttgtctatccaagtgccgtctacatgagctgcaaacaagagggaatctctgtttccggagcttcgaaacttcttgccaacatgctctattcataccgtggaatgggactttctgttggtacaatgattgctggatgggacgaaactgtcagtaaaaccaacttcatatcttcaacactgttattttcttcccacgcaaaaggaaattttgaaatgctaaatccttttacttcttgtataatagggtcccggactatactatgtcgacaacgaaggaggacggctcaagggagacaggttttcagtcggttctggttcaccatatgcttacggtgtgctggacagcgggtaagtcatttcccaaacaacatcttcatcgcttttgtcccaatctcaaaggctaaaaaccaaaatctaatgatgttagttaagcaaccgtttcatatttatgattttacttgcatcatcaggtacaaatatgatatgtcagttgaagaagcttccgagttagcgaggagatcaatctaccatgcgacattccgtgatggagccagtggtggagttgctagcggttagtaatctgaatgcatctgtggttcaaatgtaatatttaactttcaagattctgatttagctcataagtttgttctcttctcatatgaccagtgtaccacgttggtcccgaaggatggacgaaactatcaggagatgatgttggggagctacactaccattactaccccgtggcaccagctaccgcagaacaagtcatggaggaagcaacagccgaataaaaatcctgtttagttttctaatcgttcactccctttcttgttgttgcattttgtggtagtatatactgagttgtctctagctgaagctttggtattctattttactgatctgaaatgttgctcgcggattattctctataagattctctttttctgcaatcacattcttctctt

SEQ ID NO: 144299 - DNA, 1091 bp, Arabidopsis thaliana landsberg; identical to SEQ ID NO: 10610
  unsure (1)..(1091): unsure at all n locations

SEQ ID NO: 144300 - DNA, 1594 bp, Arabidopsis thaliana landsberg
cgtatgtaggaacgagacggtggtgttaatctatggttatggaggtttgcttgactttttgaggttggcttgacttttgaagttttgatctgaagaaaagaggtttcgttgtaattggtttatacatcatgtctgggtcgagtatgtataagacgaagctttgtattctgttcaataagactggtgattgttcgaggccgaattgtacttttgctcatggaaatgctgagcttcgtcgtcctggcgaatcttcttttacaggtaatgttttcgtttatgcatttgaataggctatttattctggtttaagtttgttaatggtggaaggattgatgaatttatgagtgcttctttttattagagtaaaatagaaaagtttttatttaattaagtctcttttgcttagactttgcaagatttttatattatactttgatgattctgtgaagtatttttcttctgaagttttgtggttcaatgcatttgctttgtgagtattattccatattttatgagattgtgtaaaacgtttcagcctacagtgttctgtttgataaacacatggtaatggtatcagtattatactttgctttggatttggttttctccatatcaacttttactgactagttttgtcctgcggaatcattctggaatatgcagaaagatagctactcacaggcttagtattattttttatccgggaatggaatctactggtctttctggctgcaatttatattggttttcttattggagtggaatctgctgggtttttttgtggtgaaatttatcttggttttcttattgctcttgaaagcacattctttatgaagaaaatctatcatgggttttgcggggtacttattcttcgacaactatggttttcagactcccgagatttggttgcaagcaatgcttgttattaggatttatcaatgcctgttgttattacttctggcattttcatacttccagttatgtatgtggagcacgtggtattttctgtgattatttatatcttcaatggtctttcaagcggtttcttggatcaagaaatatgcagtttatgggggtttgattgtcagtatatcaaatttggtggattttgattgtgtaattaaatggaacttcaagattggttcttattttctctcgtccaacataatctgaagccttctcaacctatgatttatcaatgagattcagtgactccacttatttagtgcccaattgtggtttctttccaactgctggtaagaagaggacattatattgtggtctctttgaactgggaagtaatcaccattacgtttttctttatgttactagtagttgtctgtgatcttatccaagtgtggttgactggcatgattctgattgtttgaaatggagttcacatctgtagcacaagtatgctttactgcaaagtctgtttcgtctactgcaggaagacgtcacaatatggatagtgacttaagagatagacgtcacaatatggatagtgacttaagagatagacttggtagacagttttctccagagcggagaccttccttagacagaagtggaagacgggtacaaaggtttagtg

SEQ ID NO: 144301 - DNA, 1428 bp, Arabidopsis thaliana landsberg
ggccgagagtttctgagactgccaaagacctgtgaggaagatgctcgaacctgaccccaaaaatcggctttttgctgcacaagtactcggtatgtttcctagtgtgtttctaaaatctgttacttatggaacatatataccatgacacttctatctgcagaacattcttggatacaaaatgcgaagaaggctccaaatgtttcactcggcgagacggtgaaagcaagactcaaacagttttctgttatgaacaagctcaagaaaagagcgctacgggtattctgtctagcattgcagctgcttcatgaccttatttctgttggatttgaagaaataatgcgaaacttcttttttcacttcctttcaggtgatagccgaacacttatcagtggaggaagtagctggcatcaaggaagcatttgagatgatggacagtaaaaagacgggaaagataaacctcgaggagcttaaatttggacttcataaactcggacagcagcagatacctgatactgatctacagattctgatggaagctgtaagaaaaaacttaaaactttggagtttgtgttccaacagatatttgaaagccttttttttttatctggtgtgcaggctgatgttgatggggatgggactttaaattatggggagtttgtaactgtcacagtgcatcttaagaaaatggcgaacgacgaacacttgcataaggcttttagcttttttgaccagaatcagagcgattacatagagattgaggagctgcgtgaggctttaaatgatgaggtggatactaacagtgaagaagttgttgcagctattatgcaagatgttgacacagacaaggtaaccacaaaatatgagattagaaatagacacttttcactgcaaatgcgtcttcactcaataatgttatgtgacgataatatggggacacaaatgattcagtgtagtagcataagacttgggtatgtttgtctgaatctttctcctcggaaggctatatgtgggaatatgataggagttcaccaagtgcacatgccatatcagcattttaatgcgtgattgagattatgtgtaacctggttcattgagaatagatgagattatgtgtttgatcttatcagtatatctcagaattgtgcatccttagttctcaagtcttgaacaggcaacttgatggcaaaattggtttggaaatacatagcagtttacaagtcttctcttgattttttttatcgtcttggtgattaggacggacgaataagctatgaagagtttgcggcaatgatgaaagctggaacagattggaggaaagcgtcgaggcagtattcccgggaaagattcaacagtttgagcctcaagttaatgagagaaggttcattgcatctacacgacgcactcactggacaatctattgcagtttga

SEQ ID NO: 144302 - DNA, 595 bp, Arabidopsis thaliana landsberg
gtgtgagtcagagaataatgattcgagcggttctcctgttccttgtcttcgtcgttgagacgagagtacaagcgcagctagtgccgccggtgaggcaagatggtttcgtttacccaccgggtcatcgtttcgacccggatactatactaattgaggcgtattttgacccggtttgcccggacagtagagactcttggccgccactgaagcaagctcttcatcactatggatctcgcgttgcccttctcctccatctccttcctttaccgtcagtgatctaaaattctctctttgccttcattctttgctctgagcttaattcatgtattgatcaatcgacaagtggcttaagaaaggtctggactttaaaatatgtttcactgtctgttttatgatttgttccatggaaatgtgaatgattcctttgtgttatgtcggattattcgttcttgtattgaatcttttttcttggattttggaaattgcagctaccatgacaatgcctatgtaacatcacgggccttacacattgtgaataccgtacacgccaatgctaccttcagtttgctggaagggttcttcaagcatcaggttt

SEQ ID NO: 144303 - DNA, 654 bp, Arabidopsis thaliana landsberg
agtggtttagattccttgcatgcatgcatgtgtgctcaatacaagtaacttcttagtgatttaaataaaatgttaaatatatatctttttgttttaggtgtatgcaccgaaactagggggttcggtaagaggaccagggggtttgggaaagtgttcaacgaacacattccaagtcagaggtcaatgtttaaatgaccctatctgctctctctatatcaaccggaatggacccgatggctgggtcccggagtccattgagatctactcagaaggttcaaagtccgttaaattcgatttcagcaagagcgtccctcaactaaacacttggtacggccacaacaactgcaacaccacaggcagaccatcgtctcccgatctgcctccaccgcattttccgccagagtttccaccggagacacctaccaccccaccgccgcctccaccaaggccgtctgctgcttcaaggcttggaaatggtgagagtgttttccttgcgtttgccattgcgactgcgattgccgcaatggtgcgttggagttactagcatggtacttgaagagcatgttgttgggttgtatgaggctttttctttccgtcgaatgtttttatttgctttcgttttgcttcagccttttccttgttgtagaaaacata

SEQ ID NO: 144304 - DNA, 1938 bp, Arabidopsis thaliana landsberg
gaaatcgacctgccagtgatgctaaaccatcagaatctcgtaaggacatagaagcagaaggttttactagcgacgttgggatcacgaagagtgtaaaggccaagaaagctgctttggaaactggcggtgatgaatctggtaatacagaaattggtgttgaatgctccagagaacagaatctttctgacgttcatgctaatggtactggaaaacaggaagagaaagctggtcatcatttccgaattgtgcttaaaagctctgcaactactgatccttctgtcctcggaggaagagatgttccacacaatgaggctaataaggaggaggaggtacgtcttagattggctaaaactataccaatatgaagcttacctttgaattattcttgattagatcgatattattatattgcagcggtttatcttgcaacaaatattgaatttctttcaaactaatttgatctcatgctctcctagaaaaggcttaaaattggagctataaggagttgttggatgtataatttgcggtaggaatagggaagcttaactagcaagaagtgccttgtagactgtaacaactgtttgaattgacatagggtaaatttggttttgggaaaattggtttgtttttgaacttttgttgaaaggattttaattttgcttaagataactgtggggaagcaactgataattacttattttacagagacaaggcacaatagctgatgctccagaagataatgcagctgattcttctgaaagttcccagaagccttctcttggttccatggttggtaaaacacgagaaggtgaagagaaaaattgtgatgatgttagtaggaaaatcagtacgaggaagaacaaattccaaaaagaaacagctgatactggtgccagtggagctctaggcctgcagactctagaccatatggattctaaagtgtcagggagctctgcgtctcagatctctggaggttctgaacttaacaaaatgacaccgagcagttcacttcctgatgatcacaaaccgcagtctgttgaaatggtatcagagggaataagtagtggcaatagagacagagctatcgaattaaaacgagaactggtggtttcagaaactgaaaaagatattcaggaaacaaagcctggatctgttttatttcaagagccatcaaagccttgcagacctattccgcatacggtttcaggaaactggtaggcctaagatggtagtatgcattggaaaaacatcgtcaagttcagccactgaaaagtcccctaagccctcaacttccaggaattctattcctggcttgaagcaacaaccaggtgatgatgataatgatgctaataccaatgatgaggactgtgtttccagtgatgtgatccgagagagagatggggatgatgaaccttcggagaaagctccgaaacatcctaaattttctattacctctaagaaatcgatgcagcataaccgtacttcccattcttcagtttccaagacaagagagtcttcctcttcttcaaagacatcttcagcaactcggattaatggtggttcttctgaggctcctagtaaacattcgctttcaggaaccttcccgaaaaatgaaaagcctggacaatcaatattccagtcatcaactaagaaccctgtgcagtctataatttcccttgctccaaatctgagcgatgaagaggtgtgtgagtcagaattcgatctctttctcatttgtcttccctattcttctactgtttgacatgttttgtttgttccatttatgaccagcttgcgttaagactgcaccatcaactcaatagttctcctcgagttcctcgtgtcccccgcatgagacagcctggtagcttgcccctgtctccaaccgcccctagttttaagcgcacttctagttctggtagcaaggatcacacaacg

SEQ ID NO: 144305 - DNA, 821 bp, Arabidopsis thaliana landsberg
acattgaggtttagagattacaaacattaccatgtacttacaaatatgcagcgagcaaagagtgattgttgaagacaaagtagaggaccaagttgttcaaaatgttgtgactatccaggtataattcttttttttttttttttgcgttggtttatatacgaggcatgtccgttcgcatcatctgaatgaaaatgcaccatatgttgtccatatttggcatttgcattaggctgcggtatccggtcattgtagcatggttctttgatcctcttttgcttctccttttaaaatttgcagggtttgacttcttctggatatttgctggctgttggagatgacaatcaaatgtatgagcttcaccctgatggcaataggtaattcttttgttgagctctaatgttgaaatcgattatcactatacttacattgttaaatctaatgtaaaatgtatgttttcaattacagttttgactttttcaaaggtctggttcgaagaaaaatatgatccaaagattttcttgctggtgaaagtagatgttgtgcgttgttttagtaccatggacacaactattatcagttccaatttttcaatgtactgtggatagtcctttattccccttgtatccaatttctggtcattttaacccgataagaggttcttgaggctacacgtacaagagattactagatgggacatcttaagtttcaactttattttgctttacctctatgtaacaacacagtactttgttgcataatctctgacgtgttaactcttgaagtgaaacatacgacatctgattatctaaagagtttcgaga

SEQ ID NO: 144306 - DNA, 1120 bp, Arabidopsis thaliana landsberg
caggccatattagcttctactttcccgggtcagcgacaatattcacaggagacctgatatatagcttatcctgtggtaccctttcagaaggtacccctgagcaggtaacatcaatttcaaaaagcaatatttcaaccttctcgacccttgcactgttatgattattttcttgtggcaaaaattgtgccaagtgatttgtggttttctaaatcatgtttctttttcaaccttcatatctttttactgttatggttactttcttgtggcaaactgtgctgagtcaaatggtatagactttatggagagatcacttgggacttgggagtactctaataaccgtacattgtagtttctttcacagaagcaaacttattgtgctctgtcctttttaacgagaaaaccttttttgccttatgactcagatgctttcatcactccaaaagatcgtgtctctaccagacgatacaaatatatactgcggccgtgaaaacacagcagtaagttccacgcacataaatactcttaattcacattgttcaactctcttttatatctcctccatgatacagggcaatctcaagtttgctctatccgtagaaccaaagaatgaaactcttcagtcctatgcaactcgagtcgcccatcttcgcagccaggggctcccatcggtaaaacctcttatctcttccctatctcctctttctctctaaacctctttctagatttcatttacttacggatttgttgtctgtagattccaacgactgtcaaggttgagaaagcgtgtaacccattcctcagaatatcgagcaaagatatccgaaaatctttaagcattccagactcagcaaccgaagctgaagcattgcgtcgtatacagagagccagagatcgtttctgaaaacttgggtatattttcttatttgtatagaaaaatttgcaagtcaatcatcagctgcaaagatcaatattttatatgttttgggctttcttcagttatcatttgaagttgtgtattcaacacaaaaaaatctaaatatttagtttaaactcaattattaaattatgagattttcaagtgtaatgaatgcttcaacatacatacacaagtgtatagata

SEQ ID NO: 144307 - DNA, 481 bp, Arabidopsis thaliana landsberg
agttgattgcaaaatttaaaatcgaaaaaagctaaaaggggtaatttcgtcataaatttgaattttttctttcactgccagctctgctttagagcttctctacttcttcttcttcttctttttcaagttcgcttaagagatcgatcggagatttcggagtagagaaaaatgtcaggattcgtcgggattttggtatcggatccatggttacagaaccaattcacgcaagtggagcttcggagtttgaaatctcacgtacgtacgtcagatccattgaaattgaagaaaatctccataagctttttgatatttcgtttgtttctcattgaaattttcgatctgattctgtcaatttccaaattctatagttcacgagcatgaagagagagagcgggaagctaacagtatcagacctcgcgtcaaggatggggaaatcaatagtagttggagatcagaatctaagcaacgaagaacgagcgac

SEQ ID NO: 144308 - DNA, 778 bp, Arabidopsis thaliana landsberg
catctgtgtctaaaatacgcaggtttcattctattaataagctccttttcctagttcaaattgactgtcctccaactgaatcttaaattgataaaacattatgtgtaatttatgaaggtgattgccgactttgttggggcaatcaatgaagaatggctatggcactgtagtgatcaagggcagactttaatgggagaaatcataaattgcttcccttcgatgcctcaaacaacttctgcgattgctctctggttggtaaaattggataccttgattgctccctatgtcgaaaaagctccacctgaaagggatcaaccgttgtgcaggaccagaaatacaagtatgatcctacttttctaaactcatctatcagaactcagccttcttgcttttgcttgttctcgcttacgacttttcaagactgatcgtttttgaagtttcagatttcacgtcatttgccaattgtcttgatgatttcacgtcacttgaacttgataatgtttttgggtggttttagtttctcacttgtgtgtattactccattgcaggtagacgagcgtctaagcggtagttgtagctattatctggacatcaaggacggcgatagaataggggaagaagattgtatagaggaagaatgtttagttcctgcattcagtttgagataatttgagattggaaaattctacaatccaagtgactttgagataatatgtacagacaatttagatagtagcatggatcacattcagttttgggtgtgattcgcaaaaacttt

SEQ ID NO: 144309 - DNA, 276 bp, Arabidopsis thaliana landsberg
gagcatatggatacagcttcatcccttaatgatggcttacgtgtcttgttgcagccatattactcattcgggttcggtggacaactctgtcattgtcttctctgcgttcaggccgcaactcaaaatccaatagcttggcgaagcgaaaaatcaagttttttgttcatcttcttgttgttgttgttgagcctttagtttctcgagctgcttccgaagataagcttgtttgagtttctcccgacgatttgttgcttgctcttgtctcctttgctttaa

SEQ ID NO: 144310 - DNA, 852 bp, Arabidopsis thaliana landsberg
atggtggttaaagtattgaagaggattgctcagagtggtagtatcgtaattatgtcgattcatcaacctagtcatcgtgttctcggtttgcttgaccggttaatcttcttgtcacgtggccacaccgtgtatagtggatctccggcgagtcttccacgttttttcaccgaattcgggagtccgataccggagaacgagaatcgaacggagtttgcgttagatctcatccgtgagcttgaaggatccgccggaggaacgagaggattaatcgaattccacaaaaaatggcaagagatgaagaaacagagcaatcgtcaaccaccgttgactccaccgtcatcaccgtacccaaatctaacactaaaagaagcattcgccgcgagtatcagcagaggaaagctagtttccggcggtgaatccgtcgctaacggcggagcaaccaccaacaccacaaccctagccgttcctgcattcgcgaatccaatgtggatcgaaatcaaaactctctcgaaacgatcaatgctcaattcacgaagacaaccagagctattcggaatcagaatcgcctctgttgttatcaccggattcattctcgccaccgtgttttggcgattagataattcgcctaaaggagttcaagagcggttagggttcttcgccttcgcgatgtcgtcaatgttctacacatgcgccgatgcgttaccagtttttctccaggaacgttatatcttcatgagagaaactgcttacaacgcttaccggagatcctcatacgttctctctcacgccatcgtgtcattcccgtcgctcatcttcctctcagtagctttcgcggcgacgacgtattgggca

SEQ ID NO: 144311 - DNA, 1110 bp, Arabidopsis thaliana landsberg
atggtttctgacaatgatgaagaaaataaccattcggcttctgaccacgatgaagaaaatagtcattcagcttctgaccatgatgaagaaaaaagccattcgtccgaggattccgatttcgatgaacaagctgatagcaaaaagcttcaccatgatgtggctgagatagtactaggaagtggagaaacacaccatgagcaatcggacatgatggaaggagaaacttctgataagggaaaacttgatgaagtcagtgatagtgattcatctttatcagagaaagaagaaaagatacgtgatatcagtgaagatgaagcaattttgatttcagaacaagtagttgatcttcatgaagaattaggtgcgtcttcactgccttcttttggagaattagaaatcaatatggctagaggggtggaggatgattatcaccatgatgaagctcgtgctgaagaatctttcattactgcgcatccgtcacttgacgagtcagccatacatgttctttgtggtttgggggacggtgatcacgaggaacctgtttacgattcgagtcctccctcaggcagtagattcccatcattttcttccgtatcgtctgattacaaaccagatctacctgaaaagaatggggaagaaatagaagaaaatgaagagaaagaacgtgaagtttattctgaaagcataggtcctgaggaaattcattctacttctaatgagactgaaacaaggacaagcgaagtaggagagaatagcatgcatgttacaggagaggcaagccttgtcatgagagagcatttgacaccactggaagaatcacctgatgtggtgcatgacatagctgaaacttcagtaaacaagtcagtagttgaagagataatgtacgaggaagaggaagctcaaaaacaaaaagatgaagtcagtcctcaaacattcaatgctgacatcccaatagatagttatgccagtttatcttctggagcagttgagtatgttgagacgcattcatttaatgacgaagatgttgcacagttggaacaagaaccagttcactcattagttcatgatgctgaggaagaaactcacaacgaccaaacaatggatattgaa

SEQ ID NO: 144312 - DNA, 1332 bp, Arabidopsis thaliana landsberg
accctaaggaaacttcggcaagctccagagaaacgagagttccgtaatcattttctcttgttgttcctgatcgcgtagctcaagcgaaaaaaatggcgtcgttcgacgaagcacctcccggaaaccccaaagccggtgaaaagatcttcagaaccaagtgcgctcagtgtcacaccgtcgagaaaggtgccggtcacaaacaaggtctgttcctctgattctctcttagatccacaatattctgtatcatcatcgtttgattttatttggttacgctttgttcgaatctggatctaccacatgcgtttcgttttctcgtattgatcttcgtttgtgtttgtttaggatccgtatgtgtttattttgaattttggaattttgttatgaattcaggaccgaatttgaatggattgtttggaagacaatctggaacaactccaggatattcttactctgctgctaacaaaagcatggctgtgaattgggaggagaagactctttacgattacttgttgaatcctaagaaggtatttgattgctctttaatctttaatggacttcgatcatagagtctggtgattaaggttcttgattgttcataagctaatttgtggattagtggtctttagttttagaatatttgttgcaaaaggaattatgagtctttataccttcttaagtattgttaggttgatctagaaacacaatttgtttgttcatttcggtttggtgcaaaaatctccatatttgtgaaattggacatcatctttcaaaatggtacactaataagtgcaacatctcaatgttgtgccatttgttttctattgcatgttcaagaatatcaagcaattagcaacatttgttttggttaatacttgagtctttccttcactcttgtctattgtctctttattgagctgatttgtggaattttccacaaatcttatgattcatctttcactctttaagctggtgcatcataacctgtgtgtgcatcatcatctcaacagtgttccaatttattatattgcatattctagaatatcgaaacataatattgtctgtcaagaaaatgctgtttggctaatactgactcctttcttcacacttttgggtcgcttgtttctttttgagcaattatgaagagataagatctcaatttgattgaattggtgtggaatttctttgcttgttacagtacatccctggaacaaaaatggtgtttcctggactgaaaaaaccgcaagatcgtgccgatctcatcccttatttgaaggaaggtactgctaaaacaggatcgtccagatatatgaagctggcatttttttttct

SEQ ID NO: 144313 - DNA, 1354 bp, Arabidopsis thaliana landsberg
ttttttttcattttgttctgagggggcttttgtgttgacggtggtgggaacaaaggaacatcgtatccattctgtccgggaaacacagcaatgttcatttccgacaaatctcgtcctactgatttctacaaagacgatcatcacaattcctccaccaccagcaccacacgcgatatgatgatcgatgtactcaccactaccaacgaatcagtagatctacaatctcaccaccaccacaatcacaatcaccacaatcatcatctccaccaatctcagccacaacaacagattctcctcggagaaagcagtggagaagatcacgaagttaaagcaccgaagaaacgtgcagagacatgggttcaagacgaaactcgtagcttaatcatgttccgtagaggtaaggatggtttattcaatacatccaaatctaattaacatctctggaacagatttcgtctaagatgagagaaaaagggtttgatcgatctccgactatgtgtactgataagtggaggaatctgttgaaagagtttaagaaagctaagcatcatgatagaggaaatggatcggcgaagatgtcgtattacaaagagattgaagatattcttagagagaggagcaagaaagtgacaccaccacagtataataagagccctaatacaccacctacatcagccaaagttgattcctttatgcaatttactgataaaggtataaactttggcatgaattgtagatttcttgatttggattcagagaacgtaactgtgattatggtttttgttgctactatttgggaaaattcttatctgtatcttaggctgagaagatacaacattttagagtaggtttcttaatgtggtttttcagtttatctttaaagaagatgatagttttggtaaatgaatctgcttatgtggattttgtgcttttaattttcttttgtttaagtggtaactttatctttcattgtaggttttgatgatacgagcatttcttttggatccgttgaaggtacttatctatcactattagtttgtttattatagtatcttgctatgtatacaaagagacgagcttttgtttgtctactgcctcttaaagttgtcttttaagttggtctaaaacatctccctgagtgagcaatagtagaggtatgaacttgcttagtgaagtgaacatttggcactgaaacaaatagtaaacatgactgtgccgtggaattcacaggatgtttctgtgttagatggtttagttttgtttctagagggtgtgtgtgtgtgtatgtttgaaaagtgtatatatatctatgtttcagctaatggcaggccagccttaaaccttgaaaggcgtc

SEQ ID NO: 144314 - DNA, 1222 bp, Arabidopsis thaliana landsberg
ttggcaaacacaattactcttggatcggccatggctactactgttcatctcagctcattctccctcttcatccaatccagaggaagaagagacaactccatatcttccgtcaagagtctcaaaaaacgcacaggtttgtctccctcttctgccctcacctcacaaggtggcagagacatgattccaccacacggaaaaagcaatgatcacaactctgcttttgatttcaagttgtatatgatccgcaaagccgaatctgtaaatgcggctctcgacgtttctgtaccgctccgagaacccctcacggtccaggaagccgtgcggtactcattgctagcgggcggaaaacgtgtgaggcctctgctctgcattgctgtctgcgagcttgtgggaggcgacgaggctactgccatgtcagctgcttgcgcggttgagatgatccacacaagctctcttattcatgacgatcttccgtgcatggacaatgccgacctccgcagaggcaagcccaccaaccacaaggtatgttgttaaatcatataaaggctcaaagaaatgctcactagatttgaatcgttcattgattttagtaaatattcactcgtgttggaccaatttttgctcaaacaaggtatatggagaagacatggcggttttggcaggtgatgcactccttgcattggcgtttgagcacatgacggttgtgtcgagtgggttggtcgctcccgagaggatgatccgggcagtggttgagctggcaagggccatagggacaaaagggttagtggcagggcaagtggttgacctaagcagcgaaagattgaatccacacgacgttggattggagcgtctagagttcatccacctccacaaaacggcggcgttgttggaggcagcagcggttataggtgccataatgggaggtggaacagaggaagaaatcgacaaacttagaaagtatgcgagatgtattggactattgtttcaggttgttgatgatattcttgacgtaacaaaatctacagaggaattgggaaagactgcaggaaaagacgtaatggctggaaagctgacgtatccaaggctgataggtttggagagatcaaaggaagttgcagagaaactgaggagagaagcagaggaacaacttctagggtttgatccaagtaaggcggcgcctctggtggctcttgctagctacatttcttgcagaaacgactga

SEQ ID NO: 144315 - DNA, 1222 bp, Arabidopsis thaliana landsberg
atggcagcgattctggcctctggtatcctgtatgctggtggtaggaacgttactataagactgctctctaagaccaaacatgacaaagtcactgctgttatcggccttgcagtcttcagccagttttggtattggtacccactgatctatttcattagtttggccttctcaccaaccgccttcatcggtttgaactatgaccttaaggtcccaaagtttgagttcatgtcacatgcaaacccgtctttatttgagtacccaaaacccaccacggttcctacagccaataccgccgttaaacttccaaccgctgttctctcatcttcagttaaagccaaagctagggctaagaaacaagcagagcaaaaagctattgctgagaaaacatctggccctgaaaagcctgtcaatgaaagtggatctggaaaaggaaaagcatcaactgagaaggaaggagactctatgcaggtaatgttgtcatatctagcctcttctaatagcctctgttattgattacctgattagtcctttaatcgctagaattctaaggtttattttgttttacaatcacacacgttagacattttgaatttcaaagttggtgaattctaaaggaatgtttaatctgggtgtttattgtgtgtttggaccatctgtgatttgatagtcttgtctccacgaactgtcaggtcgatagcccagcagcggtcgagaagaaagcacctgagcctgagccagcgtttgagattttagtgaacccagctcgagtagtcccagctcaagagaaatacataaagttacttgatgacagcagatatgtaccagtgaagctagcaccgtcaggtttcgttcttctcaaagacttgcgtgaacacgagccagaggttctctctctgaccgacgcaccaacttcaacagcttctcctgcaactggtacagcagcggctgcacaaggaaccacggcctcagctatggccgtagatgatgagccacaacctccacaagcctttgaatacgcttcatgattttatttcattttaaaattagtgggaatttgttgttggttttattggtttctgttgaaagacaaaaggcagagagaaaaacagatctttgaactttgagataactgcttcttgtcatttgcaactggtttcatgttcaactacgatcttgtattaggtacttctctttttaagtattatctaaataattaagtgtc

SEQ ID NO: 144316 - DNA, 490 bp, Arabidopsis thaliana landsberg
ctctaactcaaaaaacaatctcagatattaaataaagtgttaatcaaccggagaactctccgacaaaacctcgccgacgattttccgacgatgaaagatgggctttttcgggagactgttcgggagtaaaaaaaagtctgataaagctgcttcgtcgagagataaacggaggtggagcttcaccaccagatcttcaaattccagcaagagagctccggcggtgacgtcggcttcggtggttgagcaaaatggtttggatgctgacaaacatgcgatagctgtggctgctgcgacagccgcggtggcggaagcagctcttactgctgctcatgcggcagctgaagtcgtgagactaacaagcggaaacggcgggagaaacgtggggggcggtggaaactcgtcggtgtttcaaataggaagaagtaaccgtcggtgggctcaggagaatatcgcggcgatgaagattcaatccgcttttcgtggttatctg

SEQ ID NO: 144317 - DNA, 991 bp, Arabidopsis thaliana landsberg
tggacatgaggcaaggaacatgagtactgtgaatgcaacaaagtcactttctggttatgataaagctgaggaagaagagacaataagccatgttctgagttgttgtcctgaatgtgttactagctttgacagagaagccaaatcccttaaagctaatcaagacaagctcttgccttcttggctccaatctcatgatgcagacagttcttcacagaaggtacaacatttgaaattaagtacacagaaaaatgatggattcagcgatacatcaaaggtctaattcttgtgttttgattgtgttgtaggatgagttaatgggattgaagagaaaatggaacaggttttgtgaaactctacataatcagacaggacaattgagtatgatgggcaactatccctatggcttgccttatggatcatcacatgagtcttcgaaatcaacttctttgattgattcattaggtttgaagccgaatcagcgagccacaaactcgattgctaaattcagacgtcagaattcttgcaccattgagtttgatttgggtggaaacgaacatgagaagggtgagtcgatcaatgaagctgaagatgacaagggaaatgagacggtcactcttgatttggggcgttctctgtttcgatcagattccgtaacagatacgagactgaagctcagcgctttggtcaaagctttggaggagagtattccaaggcaaactgtgacaatgcgtcttatcgctgagagtttaatggattgcgtgtcaaagaagaaagacagttggattataatcgagggcagggacacaaccgcgaagaggagagtagctcgtactgtatctgaatctgttttcggatctttcgagtctctggttcatattgaccttaagaagaaaggaaacgagtcaaaggccagcccggcaacgctacttgcttatgaattgaagaaccctgagaaggttgtgttcttgattgaagacattgatttggcagg

SEQ ID NO: 144318 - DNA, 1260 bp, Arabidopsis thaliana landsberg; identical to SEQ ID NO: 67526

SEQ ID NO: 144319 - DNA, 1755 bp, Arabidopsis thaliana landsberg
tcttcttcttcgtcggagtcggagcagagaaaggttttggagatcgagaccaaactccgattgaaagaggatgcattcttttggttacagagcgaatgctctactcacattcgccgtcacgattctagctttcatttgcgcgattgcttccttctctgataacttcagtaaccaaaatccctctgctcagatccaggtatgcctaattgttaattgcagagatctcttattgtatcatggatctatgtgtgcatgttttacttcaagttgttttagatccttaattttgctggattctggcgttgtagttggaaaattgtaatggttagagggaattttaaggattgttctggaagtttgttctttgagtttgaagaaacttttgtggagcctgatttttttaatgattgttctgtggtttgcagatattgaatatcaattggtttcagaagcaacctcatggaaatgatgaggtaaggtttcatactcttgcctcttcttacggctttctgtgtcttcactgtaagtttctatgatttgagccaccaaaatatatgctctggtgtgctgagttatgtttatctggtcacgcttagtgggtaaaattatgcttattttagcataaactttaatgagattaggttttgtatcacaccgatctttagttgtttagtaagatgacagaaattcttggtaaaacactctaaatcgtcttctttagtgaagttttccttagagtagcataaattttggcttttttcttgatggttgaataaggtggcacttgttggtatgagactttattgagagtcatattaagcttagcgttcattgaatttgatggccataggggtttagatgcaactgtttctttgaacattgtagaaatatataaagattttacattagcctactcttgaaagtcaaattgtcgaatttgattatattatactctagaggtgatattagttaatgagtttatactcggttatttacagcttattcatataccagttaacgtgtctcatatattctaacttcttagcatttaacgtgtttgcaggtcagcttgacactgaacataacagctgacttgcagtcactatttacttggaacacaaagcaggtatagcatttgacaatacaccaatccatctcttttgctataacctgaagttttcccaatgttgttgtataccactttgtatggtcggataaacataaaaccaacactaacgaaaacatttgcaggtatttgcttttgtagcagcagagtatgaaacctccaagaacgccctgaatcaggtataaatctatgttgcttcaaacgctttaattttatatagcctactgctctcgtcagagctaagaactagttaagggttatgtggctttagtgttactcgcttcttcatgcctgtcatatagattgggaccccttttgttaatataccattaacatttgacatttttcttaaggtttcactatgggatgccataataccagagaaagagcatgccaaattctggatacaaatctcaaacaagtaccgtttcatagatcaggtacataaagcactttctgtgatcccctcttgaaataccagtccttcatgtaattctgaaggtatctgatttttgtgaatgggattcattctagggacataacctccgagggaaggactttaacttgacattgcactggcatgtcatgcccaagacaggcaagatgtttgctgacaaaatagttatgtc

SEQ ID NO: 144320 - DNA, 553 bp, Arabidopsis thaliana landsberg
atgtcccaacaatctgatcagaaaaaagtagacgaagaagaagaaattaagtcacttgaacaatggcgttggtccgaaatgcaaggccttgagcttctccctcataacaccaacaacaactcacgaagctccagagaaacagagctccagagaaactcaccggaaatggataatgacggtggtgctcctcctcctccgccgacactagtggtggaagagcctaagaaagcagagattcgtggagttgcttttaaagagctattcagattcgccgacggattagattatgtattgatgggaattggctctgttggtgcttttgtccatggctgctctttacctctgtttcttcgattcttcgccgatcttgttaattcctttggttctaattctaataacgttgacaagatgatggaagaagttctcaaggtactaactttatttctttctcttcatcttcaatctttgaaaacactaacttgtttttggttattgcagtatgcgctttactttttagtggttggtgctgcaatctaggcaacctcttgggcag

SEQ ID NO: 144321 - DNA, 2315 bp, Arabidopsis thaliana landsberg
gtcatctctaacaggtcggacgagagagagagagagagagagagagaggaagaggaaggatagatttatttgggagtaagattattaccgcatcggcgttccaaaaggcagacgaactcggagagaaagagagagacagatagcgatagcgagacatggtttctcattgatttttgtttgacaatcctttcttttctttttttttgttctttcgaaaaacgaaaattttcgttggttccctccgatttggcctgctggtgaagatatggccggagctaaagattcgggttgcgatgatgatctccgaattgctggtggatgtgaccctggaaaacgcgggaacccggaggattcctcgtctcctgtcgaagtctcgtgctcgatttgcctcgaatcggtgctcgatgatggtaccagatccaaggctaagctccaatgtggtcaccaattccatttgggtatttcattcccttcctccatctcttaccattttgcgtttcctccatcacagtttgatgatccgatggctttttgcttgtacaagcttttgtgcaattatctgatggtagatttggacgataattgaatgaatttgagaatatagatggattcctaatcccttgctttgtttacaagcttagattgctccagttggtagatcctagaaatgatgtctgtatgactgtatccagttctgacaaatgtgtctagtaacatgtgaatcggtttcttctctttcgtagatagagaatgaggtttgctagttctattatctggctgctgaatttgttgctattttcggctttccctttagcagcttgttttttggtttcttgcagattgcattggatcagcatttaacatgaaaggagccatgcaatgccctaactgtcgcaatgtcgaaaagggtcagtggttgtatgcaaacggttctactcgcccctttccagagttttccatggaagattggatccctgaagaagacttgtacggtttaagctatccggaaatggtaaaagctcactactttgtgcaacgatatgctttcttttcgtgtacatgagaactgtgcttttatcatataacctccttatgagagatcgcttatcctgacatttttacggggtttgcagcaatatcgggtccattggtgcccgtttggtgaactctctcaagcagcagcttctttcgagtaagcctacaacacctttaccatggatggtttttgctattatctctcttttctaaggcttttgatccttcaaacgcgaaagctagaattgacttttgctctgtgtttcagggaactggaacctgcaaccactacatgtaagttagacgctgattgttctgtatataatcatttcattttgtctagcaatccgtttataatgtcaaaacccatatttcttccttagatcatactgagttccatggacatcacgccgctgctgtgaatcattcgtatcttgcatatgttggacctggcccagccgctaccccgagaactagcgacaataacagcactgatgatcatccctggaacagccactctaacgatcactttcaccagcttcctgttgccccccagtatcatcaccattccccatcgttttcactacccgctgctcatgtggttgatggtgaagttgactcttcagcagcacgaggcctaccttatgcgcatccatttctttttagtcaccggttagcttctcaaactccctattgctctcaacttcttgcagagtgttttacaatattcttttggaattgggcattgtaggtctaatcaaaggtcctcaccagcaattaacagttaccaaggaagcagcacccaaatgcgtgaacagcatcatgcttataatcatcagaggcaacaacatcatgccaatggtcccactctcgcatcacctctcatctccatgacaagaaggggattaccgccgccgccacctcccccaccaatgccagatcagaacgttggattcttcatttatccaggtggacaccatgaaccagaaaccgatcaaattcatgcatgggagagagattggttcccacatttccctgtcccatcgaatcatcgcacgatccctagcttgtggcatagacacttctgagagaagttgtgtcagaactctacagtcgcctgggagaattctatcaggcttaatgatcaatgtataaaagaaaactggggacttgtttgatcgatcaaaacttgtttatgatgtaactataactggtttccaatgtacattgtgagctttccaagaacaattgttataattaattaaacacaagttatcgac

SEQ ID NO: 144322 - DNA, 1196 bp, Arabidopsis thaliana landsberg
aaccccgacgaactttgtgagggataaaaaatggcgaatttactttaaacatcaatctttttctcctctgctgataaggtactggctttccctcctaagaattctcaaacccatcatctccctttctctgctttcatcaatggaggaagaaagatacgcaaaagctcaactatcacctttgctaccgacactgtcacttacaatggcactacaagtaagctcataaaccctaaatctctaatctttctgtctaattaccaataaattctatttctttagattccaatttgtattaattgtcaccattagataagctaaacccttttcatagactaggattcgtctagttagagaagctttttttattgaagatagaaattttgtgtttaggtgcggaagtaaaaagctctgttgaggatccaatggaagttgagattgctgaaggttacactatggctcagttttgtgacaagattattgatctcttcttgaatgagaaacctaaagttaaacaatggaagacgtatttggttttaagagatgaatggaacaagtacagtgttaatttctataagcgttgcagaatccgagctgataccgaaactgatcctatattgaagcagaaactggtatctttggaaagtaaagtcaagaaggtatttatagtgttgtattttgtgtttattagtgaactcaggttagtttattgttgttgttgtgtacttataggagtgagtattgttgcagatagataaggaaatggagaaacacaatgaccttttgaaggagattcaagaaaacccaacagacataaacgcaatcgctgccaagagacgcagagactttacgggagagtttttccgctatgttactttgttatcagaaactcttgatggcttggaagaccgagatggtacttaaaacattaatcatgttgcttacttattgattcccacagtttcatgattgttttgttatttttgagcagctgttgcgaggcttgcaactagatgtttatctgctgtgagtgcttatgacaacacgttggagagtgttgaaactctagatactgctcaagcaaagtttgaagatattttaaactttccatccgtggattctgcttgcgaaaagatcagaagtttaaccaaggcaaaggagcttgattcctcattgatcttattgaacaacagtgcata

SEQ ID NO: 144323 - DNA, 2735 bp, Arabidopsis thaliana landsberg
aacaagaaaatggccgcacacaaaaccagtgagtatccaccgttgatttcaatgctgatcatgttcatcatcgtcctagaatcaacgattatcaatgcaagagaattacgaccgtccgatcacggtctcgagtactactacgaaccaggcgagtcatcagaaatgacgtcattcttcggaccaccttcttcaaatgatctaacgtcgatatcatcaccgtctagctcgatattgccgagtgcggtgaagtctccaatgaagacgctatcaaaagatcaggatgatgatcgcgtgatgaatcacgtgctggttgtgggcagcttggtgtgtggactctccggcgtggctttgatggtcgcttctgctctcatttattttctcggttaccctaaaacgcaaaattcctctgttaattgtgatcacattcataataataccaagtagaatcgttccttttttttggggttttctctataattttctcaattgtatcaagaacaataaagatgttatcatgtattattgtaagaaaacagatactaataatcttttggttggttattgattatgtttggtgtgttcggttcaggaaaatgatttgaactggttcggtttgggaacattttgtcaattcggttcggttattgctaataattagttaattttaaaagcttaaaagaaaaatctaattaattaattaagaagtctgagagcgtcagttggaggagtccaaaataggagaagaaggaagcttggcctttgaggagattcaaaggatcgtgttgcttactgtatttaaaaaccctagagttcatcatcatcttcctctcattattgattgctctaatcaggttccgacgagactaataatcctttctcagatcgataacaatgtctcactctgctgtttctcaggttagatcctcgcaacatttccttatttttttagtcaacgattggattttatatcttcttgattatagtgattatagctggagattttcgaatcctctgttttgtttaggggtttgatttgggtcttaatgttccatttgtctgttttcggagaaaacgagggaatttttaaaaactttattgatttgaggttttattgatctttaatctgggtttaggcttgtctttaattcgattaacgatcttgtcttagtgatcctgtatttgagtttcatttgttatcagaaaggagttttaatctgatggagtttaaatttcttctatacaggctggtgctgtctcagtttcaattggaaacgaacgttctcttagaagatccgtcttcaaggtgatgcatctaatctctcatataagtataaagattcgagctttgagctgtgttcatactcagagtcatggattctgattgtcttctacatgatggctagtggtttggttggttgagtttgatcttgaaccatcggttgctttgtgttgtaccacttcttcattctgcagcagaacaatagcataagcttcaacaacaagtcatggtcatcttccttagcattgaaccagaaaacagcaagcataagagatgggaaacggtacacgaacacgacaatttgtatgtcggttcaacaaacaagtagttccaaggttactgtctctcctatagagttggaagaccctaaagatcctcctttgaacttgtacaaacccaaggagtcgtacaccgctaagattgtctctgtggagcgagtcgttggcccgaaagcccctggagaaacttgtcatattgttatcgatcatgatggtaaccttccttactgggaaggacagagttacggtgtgattcctcccgtaagtcatgtccctcgtgctgttacgttgtcttcaaattgttaccaccattcttaatctcttaaatctattaatgaactggaccttgtgcgtgtagggtgagaacccgaagaaaccgggagcgccacacaatgtgcgcctttactcaattgcatcaacaaggtacggagatttctttgacggtaaaacagcgagtttatgtgtacgtagagctgtttattacgatcccgagactggaaaagaagatccttcaaagaacggagtctgcagcaatttcctatgtgattcaaagcccggtgacaagattcaaatcaccggtatgtaaactaattacccaaccaactgatctcatacttaaagaccccttggactaagttttttttaactcaatatacatttcgaaaccaggtccatctgggaaggtaatgctattacccgagagtgatccaaacgcgacacacataatgatagccacgggaacaggagtggctccatacagaggctacttacgtcgaatgttcatggaaaacgtcccaaacaagacatttagcggcttagcttggctcttcttaggcgtggccaacaccgatagccttctctatgacgatgagtttaccaagtacttaaaggaccacccagacaactttaggttcgacaaggcattgagcagagaggagaagaacaagaaaggtggaaagatgtatgtgcaggacaagattgaagaatatagtgatgagatcttcaagcttttggacaatggagctcatatatacttctgtgggcttaaaggaatgatgcctgggattcaagatacactaaagagagttgccgaagagagaggtgagagctgggacttgaagctttctcagctcaggaagaacaagcagtggcacgttgaagtctattgagctctttat

SEQ ID NO: 144324 - DNA, 884 bp, Arabidopsis thaliana landsberg
aaaaaaacaaaaaaaaaactttgaatccgtttgttgcttcttcgcaacgttctctctcaaactcgcagaggtaaagcttcttctgatcctcctcttagccccagttttgatttcgcattccttctgtgatttcgtttctagtagatctgtaatttcatgattatcaaattcacaatgcggatctgagatttcgtggataattctaggtagatctagtttccggagatatatcgtgaattgcttttggttgaatatcaagatacatgtagctagtatgtatagattcgcattttgtttcaagaatttctcaataggctctaaattttgcagtaacagattcgataatgggaggaggatttagagttttgcatttggtgaggccattcttggcttttcttccagaagtgcaaagtgctgacaggaagattccatttagagagaaagtgatctacactgtcatctccctcttcattttccttgtttgtagtcagcttcctctctatgggatccattctaccaccggtgctgatccgttctattggatgcgtgtcattctcgcatcgaatcgtggaacggtgatggagcttggtattactcctattgtcacatctggattagtgatgcaactcttagcagggtcaaagattattgaggttgacaacaatgttcgtgaggatcgtgctctcttgtaagtgtttcccttttggtaattttcttgatcaagtcgagaatcgttgtctcatgtgttgtttgtgttgtaggaatggtgctcagaagcttcttgggattctgattgctattggtgaggctcttgcatatgttctttcgaaaatgtatggtcctattggtcaacttggtgttggaaatgctattgtgatcatcct

SEQ ID NO: 144325 - DNA, 774 bp, Arabidopsis thaliana landsberg
agaactgtctatatgagcattgttctattggatcaacattcacacctgatcttcaaggaagttttttggctacagcatctttctactacaccgccaaggtataatcccatgacgtcaagattatatgtatgaatttgtgggggagaaattgtttgaacattaatgtcttatatattttcctgtatgaaattaatctgaatcagttctttgagttggaagaaaagggttggttgtctgaattgattccagctgggaagagatattgtggagaagaatggtcgaaactgatattggaatacccaacaactgatgaagaatatttgcgtggctattgtttctcagcagcatatactatatcaatgcttcatgatagtcttggtattgctcttgatgatgaaaggtaaaatttactgcacaaattcaagaacattgtaagattaatcaaatgtgggtttttttggacaaagatataaacaaaaactatacgtttgtttttgtttgcagtatcacgtatgcaagtaaagcaggagaaaaacacataccactagattgggcattgggggcttttatactagatgttgtaacacccaattctgattacaatggtaaatctagaaaatatcttggcttttaagtaacgtagccaaatacaaaatatgaaatcatagttttgtattttacgttaaactgttgttgaaagtaactatcatgtcgtcgttcctttccatgaaataagttagctaagccccttctaggtgtgtatctttccctgca

SEQ ID NO: 144326 - DNA, 556 bp, Arabidopsis thaliana landsberg
attttagctgtgctaaagaactcaccagactctatgaacatgtcgagtttgaaggagtttgttgaccccaacatgatggatttatacccgcatgactgtttgttcaaggtaaactaagaaacaaatgcttaattagtagttggaaaaatgtagtaaccatatgatttatttcattgtaaatgaatttttgtggacagattgctacgttggcaaagcaatgtgtggatgatgatccgattctaagaccaaacatgaagcaagtggttatatcgctctcgcagatactcctgtcttccattgaatgggaagccactcttgctggaaacagccaagtctttagtggtctagtccaaggaagataaaaacaataaaaacttagaaccctttctttattttcaatttatgaatgtcgccattgcctagaagaagcttagtttgtctaaaccaaaagatcgttcgcagtctaactaagtagatagttacagagacaaatctctatatgattattcttttggagaatcaaatgaagagatgtatgagtttatatgcttaagat

SEQ ID NO: 144327 - DNA, 570 bp, Arabidopsis thaliana landsberg
cgacccgactaaagaaatgggatcgtctgcgaatacagagacggcgatgataatcgccacaccggcgtcgaaccataataatccggcaaccaacggcggagatgcgaatcagaatcatacttctggtgcgatactcgctctcacgaattcagaatcggatgcttcgaagaagagaagaatgggggtgcttccgctcgaggttggtactcgcgtgatgtgtcaatggagagacggaaaataccatccggtgaaggttatcgagcgccgaaagaattataatggtggtcacaatgattacgagtactacgttcattacacagagtgtatgtcgtttcctcctttctctatctgaaatttgtgaatctagggtttatagattggagctgacatttcgaagaattgaattagagggctttgcaattcaagttgttttgagtatcacaactcttgtgaaactgcagttaatagaagattggatgaatggattaagcttgaacagcttgaccttgattcagtagagtgtgctttagatgaaaaagttgaagacaaggtattagccatttttctcaa

SEQ ID NO: 144328 - DNA, 735 bp, Arabidopsis thaliana landsberg
atggcttctattgcgttaggcgaagaattttatttgggcgggtatgaaactataataatattagtggtttatataaatacttgataaaatccaaggtcctaaacaagaataattttaaaatttgttgtgccacatgtcatatttctaatggcaggattattggagcggtcttgatcatagcgggactttacttcgtattgtacggtaagagcgaagagaggaaatttgcagcgcttgagaaggcagcgatccagtcctccgcggagcatggtattgaacgtgcacctgtttctcgcaactccatcaagtcgtccatcacaacaccactactccatcagtcaacggacaatgtttgactactttggacaaatcactctccagctaataattacaaatgccattacccaattaaaagggaacaatggtgtgccgttgtgttttatgacttttgtgtctgctttttttcttagtgttttctcttcttttttttttctaaaaaattattaattacctaagaaaggtttttgaagaaaggaaaaaaaaatggtggatgagacatcattgttcatgaggatgatgatgatgatgatagtgatgaagaagactatgtgggagctttggattgagacttttctatatataatatctggctgatatattagtgccattttttcttacatttcttgtggggtttttctttcctttatcatcaatagaatgttataatttgcattt

SEQ ID NO: 144329 - DNA, 1273 bp, Arabidopsis thaliana landsberg
atgagccataaagcattgcttaatggagtaaaactcaatttaacagagtggaataaattaaacaaaataagacgtgaaggagcagaagcaagcatatcaacaaaaacgcctttgaaacgcaaacgctacaaaattgcgtctggcgttacagtagattgagatttgaacgtgaaattctccgagtccagaaacattcctctccttccgtcgtcgtcaagaagatcaatttcattgaaatcgaaagagtgtgcttgaatcacagcttatgcagacgctacaccagtcccaacttctccagaatccggccgaggcggcgaacaatcagtctgaatcggacgcgccgccgaaacaggtggctcaggccatggaacgactcaatcaagcggctagggttatcgccgatatccgcctcggcgctgaccgtatccttgaagctatgttcgtggcttcgcaacctcgtcacacagacatgcctcttcagctctttctcagagaagacgcctccatgcgtcaacatcttcaggatcttcgcttaataggtgctgaaccaaaactgaatcattttcattagtattgattgattctctagattagggcttttaaggatcgatcaatgtttattgcttggttcagggaagaaattggaagaatctggagtgttaactgaatcacttaggtcaagaagtaactcttggggtcttcacatgcctttggtttgtccagatggtgcagtcgttgcttatgcttggaaaagacagcttgctggccaagctggtgcttctgctgttgatagaaccaggtatcagattcgttgctaatcattttaaagcatacttagggtttaggttcgagtctgcatattagggctgttagtgaagcttggtggtaccaacttggagtttcatcagctaaccaattctactgaatctcatgcattctccattttctcgcgttgtgtataatgactgtaggttagctctcaaggccttcacggatcagaaaagacgattcttccctcatattgatgatggattaaagatggaaccaagctcaaaaaaacatcgtgcctcccatttgctattagaaaatggaagagaggagccggttgattacaaaacattgccagatatacaatcgcgtttagagaagctggttccgagtgtgaaggtgtctacttatggacgattgaactggcttaaaagagctaactctttacctgggtcaggtagtgatgatcctacagaagcatcgaaacctattttccagagttcta

SEQ ID NO: 144330 - DNA, 608 bp, Arabidopsis thaliana landsberg; identical to SEQ ID NO: 6765

SEQ ID NO: 144331 - DNA, 1942 bp, Arabidopsis thaliana landsberg
ctttcaaactctctctcacaagccatgcaagacgcggagagaaccaccaatgatccggtagacagaattgagaaagtgacatggagagatctgcaagacggatctttcaccgcagaactcaagaggcttatctgctttgcggctcctatggctgccgtggttatcattcagttcatgatacagataatctcaatggtgatggtgggtcacctcggtagactctccctcgctagcgcttccttcgcagtctccttctgtaacgtcactggcttcagcttcattgtttgttttccttttccttctttcctctaaattgacgcacttatctctgttactagctaccagaaccatggaaattgcatcctctcctcactttcttgttactttttgatgatagataggattgtcatgtgccttagatactttgagtggtcaagcttatggagctaagctatatcggaaagtaggtgttcaggcttacacagctatgttctgtcttactttagtatgtctccctctcactctcatatggttaaacatggaaacgcttcttgtattctttggccaagatccttctattgctcacgaagccggcagatatgctgcttgcctcatcccatgactgtttgcttacgctgttctacagcctctcactcgctacttccaaaaccagagcatgattacacctctcctcatcacctcttgttttgtgttctgtctccatgttcctctctgctggcttttggtttataagtcagggcttggtaatcttggaggagccttagctctcagtttttcgaactgtctttataccattatccttggatctttaatgtgcttctcctctgcctgttctgagacacgcgcgccgctctccatggagatatttgacggcattggagagttcttcagatatgctcttccttctgcggctatgatttggtacttcatttttctcggtgccttttcacttctcaatgccttcacattttggttaaaaactctttcttgggttgcagcctggagtggtggtcatatgaactcataatattactctctggtctcttacccaacccacagctggagacttctgtgctctctgtctggtacttctccttgcatttttccatttcttgtcacaatcttaaattagccaaagcataatgttatgcatacgatggacagtctccaaacaactgcgaccgtctattcgatacatcttgcaatcgcagctgcagcaaggttagagattcagtcacctactttgcatgcagtacataagagctgaagcatacactagttgtttcatgtccataagcaagtattttcttgtgcagcacaagaatctcaaatgagttaggtgctggaaactctcgagcagcacatattgtggtctacgcagcaatgtctcttgcagtagtggatgcattgatggtgggtacgtctctattagctggtaagaatctgttgggccaagttttcagcagtgacaagaataccatcgactatgttgcaaagatggctccactggtctctatttctctcatactggacagtttacaaggggttctctcaggttcgagaactgttcctatttcttttctcaaacatatactagtgtcgaatattatgttatgcactttttagtcaaagataactaaaggtgaactcttttctgccattcctaaccctcatttgttggtttgcaggtgttgcaagcggatgcgggtggcagcatataggggcttacataaactttggagctttctatctctgggggatacccattgctgcatctttagccttctgggttcatctgaaaggtgttggcctttggattggaataatagccggtgccgttctgcaaactcttctgctggctcttgtcacaggctgcataaactgggaaaaccaggtctttttcccttttcttttgttcttt

SEQ ID NO: 144332 - DNA, 500 bp, Arabidopsis thaliana landsberg
acagcaggaggtgtagctttgagactctttgatttcgacagctcgattgtttacacacccgatcaaaacaacgatcctctaaaagacaaagaatctgaagatttcgtggtaagtatataataacgaatgctgatattttctttattcatatactgaaagttttcttgtttacaagggtttggagacaaatattctgagaaacttacatgagaaggacgtaatggaaactccggtgcaagttgctgcttataagcaagaagagaactggacggatcctggtttaggtggtgtgtctagctctgggagaggaggtcgaccaccacgaggacgtggccggcctcgtgcccgtggcaatggcaagaaaccggcagtttctgttaaaccaccacgaggtgcagcaaactcaaatggcgaaaccatgttgagaccgagagcacaaccacgtgggggtagaaagaatgggcggcgtagtggcaccaaaggccgaaagagaccaacgc

SEQ ID NO: 144333 - DNA, 1242 bp, Arabidopsis thaliana landsberg
cgatgatattttgcaacactctctactcttcttcttctccatcatatctctcgccgttaacttcaaaaccgtcgcgattctcaaagaatctcagacctcgagctcaattccagtccatggaagaccacgacgatcacctccgccgaaaatttatggagttcccgtacgtgtcacccacgcggaagcagctcatggttgatctcatgtcgacggtggagaatcgcctccaatcacaactccttccctgtaacctccctccagatgtacgaaacttcaataaccctaacggttccgccgaagcatctcttcatatcagatccggcgacaaatcttctccggtactttcgacgattaactctgtttttcagttatgagatcgaaattgactgttttgcatgcttgttttagagctcaattgcttgattttaagtagaaacagacttcaatttcgatgtaaatcataaccctaaaaaaaaactttttagagaatcttaaagtttgttttgttttgcagattgattttgttataggaagttggatacattgcaagatcccaacaggagtatctttgaatataacaagcatctctggattcttaaactcatcaacaaaagctccaaactttgtggtcgaactaatacagagcagttccaagtcgcttgtgctaatccttgacctcccacatcgtaaagatcttgttcttaacccggattatctcaaggagtattaccaagacactgctcttgattctcatcgacaatctctccttaagctacctgaagttaacccttatgtgtctccttctctctttgtccgttctgctttctctcctactgcttcgatgcttaagattgatgcggaggaagaggataagttggaggagatattgagagatcatgttagtccagctgctaaggaggttctcgaggtttggttggagcggtgtgtgaaggaagaagaagagaagattgtggttggggaagaagagagaatggagttggagagaagagataaaagctttagaaggaagagcatagaggaagatttggatttgcagtttccgagaatgtttggtgaagaagtttcctcccgtgttgtacacgctattaaagaagctttcggtgttctctagattatgtaactatatatatacatcagctaatgttcattgtactaaacatttactttcatcaatgtcacaagaacgcaagatgaccatcaaacaagtcctgttttctccta

SEQ ID NO: 144334 - DNA, 2917 bp, Arabidopsis thaliana landsberg
  unsure (1)..(2917): unsure at all n locations
caagtttcaacttggatagagacaatgggaatcattgaaaacggaactatctcgggtaacttgcctagcaaggaggcgtttgtggttcactatcctggctatccatcatctatttcccgagccgtggagactctcgggggaatccaaggaatcacaaccgtaaagccttttcctaagactcttgtttctttgcctgctagttattactaggaatccctaatttgtatgctgattatccatatagctattttgtagcgttgtttgggtttcttttgcttggtgcattccatgatttagcaaattggtcacatttctaaaatgttcgacaagtaaaacataaacttgattagtagcaaacttgtacacaagtgttggacggtttaatcactttgaaagttttttttttttggtaggcaagagaatcaacgtcaaataagcttgagctgcatttccgccctgaagacccttctgcacatcctgcctatggagaacgacgtcattgtaatggttttctgttaaaaatttcgaaggaggatgttaagaaagattctctgcctgaaagtcaacctgttatttccactagcgatgcatgcttaccagaagtgcgcccagctctatgtgcggatattgtagctcgtgtgtctgaatcgtattgctttgatggtaagaatacttttctccaatttctggggtcttgtcttatacagtgagccttggcttaaaatgatacttattcatgtgggtattgcgaaggcatggtcgactaccagcatgtaattcctattcacgctgatattgcacagcagaagaagagaaaatggatggaggtgaagtcgcttgcaggtgatttgtctccattcatttggttttcattatattgcaaatctttagctgtaataacataaattaaaatgaatcctctcgagtatcatgcangaaaaaatgatctaatggacatggctgatgaagatgtaatgatgttattgccacagttcttttcacccaaagataggccagacaacctggtgtaagattaacttttttatttttcccctacaaaacaacctataactaagaatgaaggagaacatagttgattataattttagaagttctattgttaattctactttcgttgtttgattcacaggctgagacttccagtaacatcaagcccaaaaaagaaagatgaggaactaactcagaatctttatgaggtaaaaacaagaaatgaaaccatttgacgtttctggataaacttaaatcagactgttggaaaaaattgactcaaacatataatctacagatatggcaagcttttttctttttctgtaactagtaaaatggaattcttaattactgcaagtctgtaacggtaaggtttgagacttgaaagaggtggattctgcttaggttttcttacaggaatgtcggtagtttgcaaatgttttttctaaagcctgtagttgcagagttaatgattctgaagcatgtaaaagctcgcagttcacacttttaaaacattgagggaactgctgttctgtttatttatattgatcgttaaagattccatgacagtttacttgtggttgttacttctccatttgctaattgatctactgatgatgcagattgatgttggcccagtgtttgcaattgatttcagcgtcaaagatatcctttttcttatatgctagttcttcttctaatattctttgacattttcttatctggcgagtagaaagagctgtatttgcttggtctgtccttagctttcaatacagatcccaaagaaactgaagtgggaagactttgtttctcgcagctccaaccactggcaatggcaggtagcagtgtctgcattgtttgaggagcggcctatatggacaagggattctgttgttcaacgactacttgataaaggtcttaaatgtacacatcatatgttaaacaggtgatatagctttctaatacggggttcttatactgaggtgtttttagtactatattgatcaatttggtctgttctctgtaggtttctgctcagagctgcatattatttctccagtggtccgtttcttaggttctggattaaaagaggctatgatccacggaatgatcctgagtctcgtgtgtaagttatcttttaagacattgatttgtatattcttattgtatggtttgtgacattttttaggtgaaatggtaatacacacagatgggtgcataatgactagttttcacttatatctccattgaataattgtgtttcagatatcagagaatggaattcagggttcctcctgaattacgaggttattgtgataccaatgcaactaacaagtaagtcttcttctatttctgtggttaactcttcctgcatgactgacacagcctcctggagatttaagcctgaattctctctatagcattctatgatacttgttgtaggattgtataatagattaagcatgatttattttgcagctgaaccattggatttatgcaggaaaaagtctgatttatatgttttttcttttctttgctacagctcaaagccaagctggaacgacatttgtgcttttaagttatttccttttaaatgccaaacgtttctgcagttgtttgaacttgacgacgagtacatccagcgagagataagaaagcctcccaagcaaactacttgtagtgtgagttctcagcttagttttttcatgaaatcaatacccatgaatcatggtcttttgcctgttgaattaaagcttaagctcagacaaagtgacgcatctacgccaataaataaactttggcaagtactcttcaagcttatgatctgattcgtttcttgtttgcagcataaatcaggatggttttcagaagccatgcttgatactttgagactccgtgtagctgtgag

SEQ ID NO: 144335 - DNA, 879 bp, Arabidopsis thaliana landsberg
atgaaaagtgaagcattcatcaaagaagaatttaacgaaagctgcaatttcgacgtggatgatgctatcacaaagcttgagaagcttggacttgtatctcgtgtgagtcccttgctatacctctcttctaatcagaatgttcctctgaatatgttcagttaagtaaatattgtgagggctggtcaggattcagaagacaagtatagatgcgtggaaatgaaggaagcaaacgagataatggggacaactacggaagagatggtactcaaggcaagacaaggtggagaatatgaagacgaggatacaacagcgacagagcctcaaatgaatcctcaagatgaacttacagcaaaggaggaacgttttcaatctcggtatgatgagtttgagaccttgtggatgtaacaaagatttgatgtcattcaagacccatagatttaatattgtaaaaagacacaaaaaagagagtacaaaaacagtcgaatagacctgtccagcacatatcacatcaaatgaattcttccttaattattgcgtaaacatataatgattatattatataaaacataagacaggattaaagttttgcgtaggtaggtaggcagatagaaggcaagcgttctgtttagagaggaacgctgtgcaagacgactgtctcaacagtgagacctggtccgaaaccaaacaagacaccccactccaacccttctcctgtcgtggccacaccatccttagctgacttcctcctcatctcgtctagtatgaagagaacgcacgcgctcgacatgtttccatactcgctcaacacgtgacgtgtcgccctcatcttctctttctttagtcctagctttatctccacctgttctaggatcgctggac

SEQ ID NO: 144336 - DNA, 512 bp, Arabidopsis thaliana landsberg
tatctggaattctggatgctacagggaacttttcaccggtgaagaaccttacgccgacttgcactatggagcgatcataggtgaaacccttgatccataattcttgtgtgcgggcttgtatgctttattttctattctaaccaaaaattgaaatcaggtggtatagttagtaatacgctacggccgcagattcccgacttttgtgacatggactggaaattgctgatggagagatgttggtctgcagaaccatcagagaggccaagcttcactgagatcgtgaacgaactacggaccatggctacaaagcttccttccaaagaacaaggctcaacacagggaccacaatcttaagactaactgtttcatatgaattgaaccatgttcaaatctataaccatacaagatgttacatgcaaataggtaatgctagtctataaatcatctactacttcttgcatttttttcgctgcgtcaacatataaacacacatcgcctcagaatctccgcaa

SEQ ID NO: 144337 - DNA, 728 bp, Arabidopsis thaliana landsberg
atgatcactaacttgatgaacaagttaaaagcccaaacctatctctggatcagaaagaaagagaagctaatcagagtctcagagagagatttgggcttaaaaagacataacaggcccaataactcaattaagcccaattcggataacacccctgcgcacaagatgatgcgtgaaaagataagtcgacggctcttctccgataagattccggtgagaaacgagcaggtcctgtcttcttatgaactcaatttcttcatttctgattctataaaacatccttaaaaacatgtctaccacattgttgagaacaattcagctaaaccagttctcacttctcggaactagcttgttaagaaggagaaggagtaacaacttctccgtgaggtcttgtggaagccaaacaacgacgacccatgaagctaaacagtcttctccaacaagggttgctccaaaaaaccacaaaagcaaccaacttgatgagattctgagagattacgaagctgtaattgggatagagactcatgttcagctctctacattgacaaaagccttttgtagttgctctaacaattacggttcttatccaaacacaagtatttgtcctgtttgtatgggtttgcctggtgctttgcctgttttgaattccaaagttgttgaatttggtgttagattgggtttagctttgaattgtgatttgtctcttaagtctaaattcgataggaagcagt

SEQ ID NO: 144338 - DNA, 1192 bp, Arabidopsis thaliana landsberg
cgtggcaaatagcgaaacaatgattgagctataacaaaggcgaaacttgagcggcactaattgaaaatcactccttgtttttttgaagaaaaagtaagatgtagggctgagaattcgtctatgtgatccaacggttttaaaatgatccttgttccttcctctcctatttatctgaaggacgaagtccccacgctgcacataaccggggcacttaacgtatagatcataaacaaagaagaagaaaaaaaataagaaaagaagaagaagatgtcgtggcaaacttacgttgatgagcatttgatgtgtgatgttggcgatggtcaaggacaccaccttactgctgccgctatcgttggtcatgacggtagcgtttgggctcagagcgccaacttccctcaggtatttgatttcattgcgtctgatctcaatgtgatttagatcctgatagtgttgctatccgatatgatatgtgtttttacaatgtgatttagatcatgcatcatgttttgattagattctatcaatgtttgtcatgggatatatatatagtgtattttgtgtgtgtgtgtttctttttatatgttttgcatagatttgaaaacaaatgatgcatgttgtctcatggtaatcgactaatcgtgatttggtctttcatatagttcaagggacaggagttcagtgatattatgaaagatttcgacgaaccgggtcacttggcacccacgggattattcatggcaggagcaaagtacatggtgatccaaggtgagcccggggctgtaatccgtggcaagaaggtaacctaatcagtagcttcatgatcagatatgcaaataccatgttgaagagggttctaattcaatatatgcttctttcaattagggagcaggaggcataacgataaagaaaacaggacagtcatgtgtgtttgggatctatgaagagccagtgacaccaggacagtgcaacatggtcgtcgagaggttgggtgattacctcctcgaacagggtctctagaatcttcttacaatgttccaccacctacatttttttataaggccattgtttctcctatttttttcctttgggtgatttgcatctctttctctaattgatattataagttttgggctaatggaccttcctggtttctccccatagcaaacttttaagaaagctgaagcctaaaagg

SEQ ID NO: 144339 - DNA, 556 bp, Arabidopsis thaliana landsberg
ggtcgatacagatactcctctcttccatcaacacagtggtgtaagtgtgttctttataactctgtattatgtttctgtgatttcgattccaattttggttctttttgttgaatgcagaacaagagtgttgatgatacttatggaattgccagcatgtctttactttttaggttatatcttcaaagtcttgattttttaacttttttctgctaaagaacttgaaagttgttgaatttgaattttgttatagacaatggattgatgaaagagatgaatgatcttggtcttccggtttcctttcgaacaaacaagcaggtaccttttcttatcaacattcatgggttttagttagtttattacattctctgagaattcaacaacttgtgtagtggaagaacacaactagaggctatcaaaagaaaggattcaaggatcgattacacgaagaggttaatgttattctcaaagaagaagacactctgaatttggtgtctgctttgaatgaggaggttgagagtccgtgttttgaggaagattgtgtacaagtaattgaagt

SEQ ID NO: 144340 - DNA, 1370 bp, Arabidopsis thaliana landsberg
atgacgtcaacttctcagtcatcatctcaaaaacggaagcttaagaaaaatctatacctaccacttcgaactaactctcctctctcgcttactggaatttggggattagcttgggaaacttcgccggagattcatacgtcgtcgtcgtctttagtatctgtatcgtcaatggcgttgctgaagtctttcatcgatgttggctcagactcgcacttccctatccagaatctcccttatggtgtcttcaaaccggaatcgaactcaactcctcgtcctgccgtcgctatcggcgatttggttctggacctctccgctatctctgaagctgggcttttcgatggtctgatccttaaggacgcagattgctttcttcaggttcgtttttccgattcctataaactcggattactatgtagtagtaccctgggaatgtttccgtaaatgatttcgaatttgctatttgaacctgatctctgaagtttgctccatggtttattggatagatcaatcccgtttagctcgaaaaaaatccattgttctactcaattgctcgttgcttcgattcattatctgttacagtttgagttttctgttcacgattttgaacttttgcaactatgattattgctttatgatctgacggtatagtgtattgcttacacttagtgatgaggaaaatgaggttgtgtttattttctggtgtgtttcttttgatgttaatattgtttagtttctgtgctctgtttgcagcctaatttgaataagttcttggccatgggacggcctgcgtggaaggaagcgcgttctacgctgcaaagaatcttgtcatgtatgctctgtttgatcctattgatttatttggatttttatggagttttgttatttggcttcaaggttttggttttggtatgttttcatgcagctaatgaacctatcttgcgagacaataatgttttgaggagaaaatcattccatcaaatggttagtagtgtgaaattgttttttgcttaaactagggaaattgtttgtatatctgttacttacgtttattgctgtttgatgcaaatttgcagagtaaagtgaaaatgattgttcctatggtgattggggactaatacagacttctttgcatctatgcatcacgcgaagaactgcggacttatgttccgtgggcctgagaatgcgataaacccaaattggtgcgtttatgttacttttgagctgagagtttcttcatgaaatggtcaagtcgaaaggatgactctgtattaacatgacattaccatatttttcaggtttcgtcttcccattgcatatcatggacgggcatcatctattgtcatctctgggactgacattattcgaccaag

SEQ ID NO: 144341 - DNA, 2064 bp, Arabidopsis thaliana landsberg
  unsure (1)..(2064): unsure at all n locations
gcacctgtctagcgttgacgacaccaaaattgaaaatttggcatcatttgcgaaacagagagagatccattcaattccaaaaggattctcttttgggaaaaccctaaatcgacccaccaaatttggagactgtgattgagcatgagcgtcagaagttgatgaacaaagtcgacgaaatcgaggatttcagattcgaggatctcgaaatggagacggagaaagataaggaaaggatgatgacgccgacgacgagaatgtcttattcatcttcgtcgtctccgtctccatcttcggcttcatcatctgctgcgtcctctctcgctgccaaggcaattcgagcatcttctgcgcatagagactcttctctttcttctgcttactcgtctccttcttctgctcctgttcccactcctcccaaggtttcatcttttgttcttctctctttctggtgtcgcttaattgttcataatgattcatgggtttactctgtttttgcttcaattgaaatgttccaaatgattcatgggtttactctgtttttgcctcaattgaatcgtttgaataggaggtgaataaggcttatgagtatacttctatgaagagtttgaatgaaccaaaacgaggcttttggggaagtttagctagtaaagctaaggcttttttggatgaggatgatcctaatcagttgcctcaaagtcctaagagaatggagcagagcataccttctgcgacaacttcaggaactaaggttaaagactaggtttttatagttgcatttgctcttccaattgttttgtggggttgcgttcttatggagtagaaatccatttccatgtttcaggaagctggtcagactggtaggaaaagcgagaatccttcattacagagaagattagatgcgatcacttcatcgttgaattacattggtggcaccattggtactgttgttgaggttagtttcttactctttatgcacccgtatatggcacactataggagacatatattagttatgtttttttctttaggttatgcgagttctcacattagttgtgtatacagaggcatatgcattcttgtgtgtatcggtgcatcttctgcactgtactaaatgagagtttgttgggttgagattgttgtttgtctgtgattattcttaggagggtattacagctgtggagaatcgtactgcaggcatcattcaagaaacccgtaaaaagattaaaaaaaagccaagtcttacaaggaaccagcagaatcctgagatacaagctgatttggagattcaactaaaggcatctcgcgacgtaaggtggctgctctgtatcatttattggttcacagcagcaaatttatatctgcttatttccgctgctgttatctcttcagtgaatgattatagaataatcgtttttagtattgatactgagcctcctttgaattaatctcaacaggttgcaatggccatggctgccaaggcaaagcttttacttcgggagctgaagatggtaaagtctgatctggcttttgcgaagcaacgatgcgcacagctggaagaagaaaataaggttctgagggagaaccgtagtggcgacagtcagacagatgacgatgatctggtattttactctttacaaagccattaatgttaacatttctttatgtacatttctgatctttggttgtgtgttttctctcatctataggtgcgacttcaactggaaacactgttagctgagaaagcacggttggctcatgaaaactcaatatacacccgcgaaaacctctatctgagaggagtcgtcgaatatcaccagctaacaatgcaagatgtggtctactttgatgagaagactgaagaagtaacggaggtatatcccattaatgtgtcttcaatgtcttcttcatcagataactcttacaatccaaatccaagtttgttggagctctaatgaaacaccacaacaactatcaggttctgctgttcttggtgtgaatcagacaagaagacancatcgtgcctgtaattgctctgtactttgagaaatatatatactctgtact

SEQ ID NO: 144342 - DNA, 299 bp, Arabidopsis thaliana landsberg
atgatcactacattactccgtcgctctctccttgacgcatcaaagcaagcgacatccattaatggaattctatgtcaccaacttgctccagcgaaatattttagggttccggcagtgggaggcctgagagatttcagcaagatgacatttgaaaagaagaaaacatcggaagaagaggaaggatccggtgacggcgtcaaggttaatgatcaaggtaacaaagaggaacaattaatagttagttattggggcgtgaagccaatgaaaatcaccaaagaagatggaactgaatggaaatg

SEQ ID NO: 144343 - DNA, 1206 bp, Arabidopsis thaliana landsberg
attcaaaatccggaaatctgatgatgcattccgtttcacggctcgcgaggaggttctgtgcaacgctcgctactgctacggcggagattagcggcgaggctgctgcttctgttccgacgaaggcgaaaaagcatcggtcaatatacaagaaactctcaagccttggcacgaggggaggagggaaaatggaggaaacgctaaatcagttcgtcatggaaggcgtacctgtcaaaaaacacgacctcattcgctacgcaaaggatcttcgcaagtttcgtcaacctcaacgcgctctcgaggtttgtctcctctttcctttggaattgattttagccaccattgttagagggttattgtataggaagcttaaatgtgtatagtgtttgagtttttctgaattatgtgtagatctttgagtggatggaaagaaaggaaatagcgtttactggcagcgatcacgcgattcgtttgaatctaattgcaaagagtaaaggcttagaggcggctgagacctacttcaacagtttagacgattctattaagaatcagtccacttatggttccttattgaactgttactgtgtggaaaaggaggaagttaaagcaaaggctcattttgaaaatatggttgatctcaatcatgtgagtaattctttgccgtttaataacctgatggctatgtatatggggctaggtcaaccagagaaggtgcctgcattggttgttgcgatgaaagagaagagtattactccttgtgatattacttactccatgtggatacaaagctgtggaagtttaaaggatttagatggagtagagaaggttcttgatgaaatgaaagcagaaggtgaaggtattttctcttggaatacatttgctaatcttgcagcaatttatattaaagtcggtctctacggtaaagcagaagaggcgttgaaatctctggagaacaatatgaatcctgacgtacgtgattgttatcattttctcattaacttgtatactggaattgcaaatgcttctgaggtttatcgagtttgggatttgcttaagaaaagataccctaatgtcaacaattcaagctatcttacaatgcttcgagcactgagtaaactcgatgacattgatggagtcaagaaagtctttgcagaatgggaatcgacatgctggacttacgatatgcggatgccgaatcgcagcgattag

SEQ ID NO: 144344 - DNA, 613 bp, Arabidopsis thaliana landsberg
acgtttcggaaacactaccccacatttcattcgctgtatcaagccaaataacatccagtcttccggggtgtatgagcaagggcttgttttacagcagctaagatgttgtggggtcctagaagtggttcgaatttcacggtctggatttcctacaagaatgtctcatcagaaattttcccgaaggtgacaatgccattcatcattagtagttgtgcaagggaccgtacaagcgtttcttcataagttttaatcacattgatcatattgcagatatggttttcttctggtggagaacattgctgatagagatcctctaagtgtttcagttgcgattctccatcagtttaatatcttgccggagatgtatcaagttggctacacaaagttgtttttcagaactggccaggtataatagcttgtcggctggtgtcaaagacttttattttataaggggcaggaataagagtctcatgtgcattgcagattggggttcttgaggacacaaggaaccgtactctccacggcattttacgtgttcaaagttcttttagaggataccaagcacgctgtctcctgaaggaacttaaaaggggaatttctattctccaatcat

SEQ ID NO: 144345 - DNA, 1065 bp, Arabidopsis thaliana landsberg
atggaggaacttaggaacaaagcagagagtaaagatgaagaagctaagaagagtccagggcttggaaggacagaatcagctgaaaagaacagaatatctactgcatcgtctgagcaagatctcgatacattcctgctgggagatctagaagacagtgacgaagctcctggtgagacaccttgacttgatgtagcttcccaagttttagctatgacttaaatcctgattttgtctgtataatcgtaaaacttgcagatgatggtgatggtgatgatggaggaagcctgggtgatgatgactttgacaagattggcaactctgtaagtgaaaacgtttgattattctctcagttctttaaaacatacaacaacagaacatcttggtttaatccaaatctgccttcatgtgtttgcaggatgttgaggaagagaaagaatcaaatgcagcaaaaaattagaaatattattaagttttgttacatacccaattgttgggaagtaaatgaggatggtatatgatctgtttcatcatcagtgattcagtgtatagcttttgatgcaaaagatgaagacacattttattcattcgaattcgcaaattataaaaaaacagactttgattacaaaattatcctaaaaagcgaaactttgacataaatattagtcgctggagaggttaaagtttgctaatggcagtaacatatcttctccggcgttacaagccggcgacaatatcatcagttttgtctttctcgacgaaatgttttgtgggcgaacatcatcactctctgttccaacggaagctcctccggttccaaagaagatcccattcgcaatctcatctcatgggatcacaagacaagatcctttccattggatgaagaatacggacgacaccgatttcgtcgacttcctcaagcgtgagaactcatactctcaagctttcatggctgacacagaaaccctgaggcgtgatttagtctccgagatgaaaactcgtattccagaagagattttcactcctcctgagcgttggggacaatggttcatctctctaatcttgtaa

SEQ ID NO: 144346 - DNA, 3551 bp, Arabidopsis thaliana landsberg
atgactgcaaagagccatccagcagcaatgcgatttgttcctgatcagcacccgagagaaggcgaattggatgaagataatttgtcttctgatttgtcagaaagggaaccctcaaggtaatcatcaatagagtagaatatcctttcagtttatgctgtcattctaattgcctttgtggtctccatagatgtcttatactgaaaggaaatggggagctttcacttcttgatttggttgatggacgagagagggaacttacagactcagttgaactattttgggtgacatgtggtcaatcggaagagaagacaaatcttgtcgaggaagtatcttggctagattatggacaccgaggaatgcaggtaattcctctgcttcaaagctgcatgtaaggctcactattcttcttcttcttctaggaatggtcttccagcggtcgatattctttttcacgtcataggagttgcctctgcccgtgaagtgtctggcgagtaactcctctgtttgatccctgtcttttgtaacttttgatttgtttaacgctgagattctatattatttgtttggtatccttctctaggggatgatccttttatgcaagaggatttcctgcaggtatgcatgctagtagagtccattttcaccgccattggtggcttatctttttgttctgatttttattgtctgtaacattattgtttgacgacattgacattcaaacacatccctcttataaatttctaattttttcattgtttcaaatgcatttttattatgttccattcttcagctggatccagagttggaatttgatcgtgaggtgtatcccttgggacttttaccaaacgtgggcgtcgttgttggagtttctcagagaatgtcattttcggcaagcgcagagtttccgtgttttgagcctacaccccaggctcagactatactacattgcctgctccgtcacctccttcaggtattgttggtcctggcttctcttttcttaagttagaatgatcccttctttcttcctgtattcatttctcctttgcaatttttttcatctctcagaatcttattctgttggtctcttattttggacagagagataaaaatgaagaggcgttactcttagcacaattatcggcagagaaaccccacttctcccattgtctggagtggcttcttttttactgtttttgatgcagagatttctaggtatccaattcctatcaatctttataacgtatctctgttctttgtaatttatacttaaccttcttgtcttgcttcacctaattgattttttgtactgaacatgtggcttccaaatttcaaggccaaatccaaacaggaaccagatttcaggacctggacatcttaaaaagttatcccttttgagaaaagcctgtgatttaataaaaaatttccccgagtactatgatgtggttgtgaatgtagccagaaaaaccgatgcccgtcactgggctgatttattttctgctgctgggatatcaacaacgtatgtttctctatctctgtgtttggcttttgtttcttgtaacgtgtatgaaactagttttgtttactgtactagacacgtgagcagttagccgttgctaagatagcaaacttcaccaatcttgcctgctctttttgttgagtaaactgtattctgtgctacgaaacttgatattctcttttgggttctagattgtttgaggactgcttccagcgaagatggtatcgaactgcagcttgctatatccttgtaagactcagaagcccttaaccctcgagtatgtttagttgaatagatgttgcatcaatccatctgcagtggtctgtttgttactaggcaagtagcagagccgtgtgtcatttgattataagctcatgggaccaaaaaagcgcatggagttactattatagaacactgaagaaatctattaggttatgtttcaaatcgtacactaagtatagaaatggtgcaggtgattgcaaaactagaaggtgttgctgtcagtcagtactgtgctttacggctattgcaggtaatttcggctgtagcatgttgaatttatatctttcgagtcctttcttgtcaattttgttctttctgttcttaagaaagtttatttttatatttgcgggcgacacttgacgagtccctctatgatcttgctggagagctagtatgtatttgatgttcttgttgtttgtttaaaatgggcaattcaaagcttaaatcctaactaatgatgttattctatgacaattatgctgttaggtgaggttcttactaagatctggaagagacattgagcaggcgccaacagaatcagattcattatcgcctaagcttctcggttttcttatttttggctccagccacaagaaatcatcactcgataagaggtggaaactacaactctgattgtagtttttgattttctagagtgatacaactgtcttctgatcaatatttatttgtaaaacgtgaccctaaatgtagctcctcgttcaaagagcaaagtcctcatgttgcttctgtaaagagcatacttgaaagtcatgccagttacttgatgtctggtaaagaactttcaaagcttgttgcattcgtcaaaggcacccagtttgatattgtggtacgtatacaatttgtaccattcaccttttcatgcttggaaccaataaggtatatagtcattcactaacaataccaaaattccaggattttcttcaacgagaaagatatggttgtgcgcagctgcagaattttgctgcagggcttgaactgattgggcaaaaggttagaatcaaccccccttgtggtttctttgatgttcaaaactcgttatttttccctctcattctgctgcttgaaacaatttgataactaaaacatagatccctatcgcatcgtaaaagtctgcatatttgagtaaacttatcttacatcgaagtctaactattgaaatccctcagctgcaaatgagtgagctacagaaccggttagatgcagagtttctattggctcagatgtgctccgtcaaattcaaagaatggatagttgttcttgccactcttttacaacggtctgaggtaaaaatcttttagatttccaccgtaatcacgactttaaagcattcacagtgatataaccagattgtttcattattttgtcacaacacaggttctttatgatattttccggtatgatctacggttgtggaaagcatatagcgtgacattagaggtaacaaactcttgtttccataacaatcgatatcgatttcatcacgtgcgggtctcctctttaaaacatgttctttgtttcagtctcacttggctttcgctcagtaccatgacttacttcagattttataggcaaaactctcagcgacctcacgagaagaaagcaatagaggttccatctcttgataaatcattttatttttgaagctttttcacatcaaacattttctgcctgagttttcacgttcgtgtagataaacataatttgagaagaaataagaaatacatcacctcac

SEQ ID NO: 144347 - DNA, 2202 bp, Arabidopsis thaliana landsberg
acgattcatacgaattctgtatcgcaaaaacatcaaatctcgaaattgagctccttttctggaactagggattgctttccactccttgcgctaagtctacttggtttctgattcgtacaatttgatgaaatgcgagtgctcagcgagattgcggagtcaccgttcgtgatttctcggctaagccctgattcgacggccaccggagggtttatcggcggatgggtcgggaagtgtcatgggtttcttcataacacggttttggttttagcatctattctattcgtcgcttacttagcgtacgaggcgaagaagagcttgtccaagttgtctaatcggagatcttacattatgattgcctattatggttttctttggcttgttagcttgctcaatcttgcttggtgttgccttcaggtttgttaaagttctcttctttacttcgattcatttcacaagtaactcatacctatgttgcgtgtaaagagatcagaacttagattgaagaagaatgctttttagagtgttttaggctctgtaaatgtagaaactttgcgatcttatcaacattgtttttattctacactggtgattagaaagcttttgtattttgtgtaagctattagtgttgatttcttggttagatgctgcttaacaggaaatgttttacctgatttagtcttactccagatttcgttttgaatttacttttcatgagtttaggcatgggaatgcactccggggaaagaagttatttggaatttgttaactttgttcacaacatctggaatgttgtttctggaagtaagcttggtagcctttctcttccaaggaaactatgcaagcggtgctgaagcattaacacgaactttcctcatctcggggcttgtcattggtctcgatttgcttctcaaggtagatttgtgttcataactgttagatacactttctgatatatagatagatatacttccttgaggtatattgacatgatcttagttctgcattagatcatgtgtccactacagttgatatatgcaaacttgtattgtctggttactcaactacagtcagtttaatttcttcacggttttcattcttcctttcaggcaatttatctgtttggctttggagtaccattgtttatcgacaacaatgaacatatacataagttcaaatggggcttatgggtcatccacaagctcttactaactggcatttatgggatgatattcttcatgtacaactccaaatggagagagagattaccaggtgaatacatcgaccactcatatcctccttatggttgcataagccaatagctgttcactggcttctattactcatcccatatgtttttattttccggtttgacagcaagacctgcattctacaagtatataactgtcatgctcgccttaaatgggctctccctatttgcatgtgctcttacggcaaacggtgctcattttggattatggtaagccctttagataaaagccttacaatcaaaagagtaacatcgtctaagtcagattcttgcttctaacattaggaaatacaaattgaaaattcttgcaggttgtatgggatcacaagtgtttgttaccacgccttctatgttcctcttttgtatgttacttttcttgcagactttttccaggtaaatccctcaaattaacatttgtctctccctctctctctctctctagtctctatacataatatctatgtacccacaaacatgcaataaatcaccaccttcatcactatagcagcatcaccatcaccttctttataactatagtaccatcaccatcgccatcactattaccatagtaccatcaccattaccatagtaccatcttcatcaccacatgatttggtgctaaaattcacttgtgtttgcttcaggaggaagatctgaatttggagaatgtctactattcagaaatgaaagatgctggattcttcgacgctgattgggaataacaggagtcctagtgtcttgtcagtctgtagatacaaggtgaataggatatctaaaaaatcttttccttgtagggcatactcttgacttgtgtgctaataccaaaactatggagacaccttgtatattatgatgtaacatacttgtgtctctcgtatacatttggcatttcgatcttggaaagaaaataagaaacacttattgtaaataacatt

SEQ ID NO: 144348 - DNA, 1181 bp, Arabidopsis thaliana landsberg
tttactctctcctttctgttaccgtcgaaaaaatcgagctaatgtccggtgataaccagatccgaatcggactcttaagctgcacaaacaaagtccgcaaactctctagagctataaatctctctccaaacgctactatatccgccatagccaccacaagctccatcgaagaagcaaaatcatttgctaaatccaacaatttccctccgaatacaaagatccacagctcctacgagtcacttctagaagatcccgacgtcgacgccgtctatttccctatccccactcgcctccacgtcgagtgggctacactcgccgctattaagggtaaacatatactccttgataagcctgttgctttaaacgtagctgagtttgatcagatcgttgaagcttgtgaggttaatggtgttcaatttatggatggaactcagtggatgcataaccctagaacggttaagattaaggaatttgtgaatgatttagagagttttggtcagattaaatctgtaagtgtttaagtacttaaattagtaacttaatcatgtttattgaaattttgagtatagaacgatggtcttatgcttatgcaggtgtatagttgtttctcatttgctgcgagtgatgatttcttaaaacatgatattcgtgtaaagcctggtcttgatggacttggagctctcggtgatgctggatggtatacgatccaagcgattcttcttgttaacaactttaaacttccaaagaccgttactgctttgtcctgttctgttttaaacgatgcggggattgttctttcttgtggtgcgttgtttgattgggaagatggggtcaatgcaacgatttactgttctttcttggcgaatttgacgatggagataactgcgattggtacgaaaggtagccttcgggttcatgattttgttataccgtatatggaaaccgaggctgtgtttactacaagtggtggaggttgtgttagtgaacataaagttatgactgtgcttccacaagagacgtgtatggttatggagtttgctcggttggttggagaaattaaaaacagaggagctaaaccgggctggttttggatgaggtttagccggaatacgcagttgcttgttgatgctgtgaaagagtcgattgataataaccttgaaccggtgtatctctccggccgg

SEQ ID NO: 144349 - DNA, 3946 bp, Arabidopsis thaliana landsberg
atgagttttcttggagcagggagactcgcgggaaaagaagctgcctactttttccaagaatccaaacacgccgttaatcgtctcgccgagaaatctccggccactggcaaaaagcttccatcttctccgccggatccaccggaaattcaacctgacgttcttccggagattctacgccattctcttccttccaaaatatatggtcgtcctcctgatccttcgtctctctcccaattctccaaatgggctcttgaatctgacccgaacgcaacagtttctatatcccctgatgtcttgaatcctctcagaggttatgtgtctctgccacaagtcactttcggccgtagaaggttcaaattagggttttatactctgtttcacttgatgagtatttcaaaattttggatttgttgttaatttgtgtcgatttttattgcagatgggatttaccggaatctgagaattcggttttggcgtcaacagctaatgaattgaggagagacagatacggcactcctgtaaatcttgagaaattgaaagctgctggtgaagggcttcaacatagtatgatcacttctcttcttttgtttatctgcaaatcaaatctttttgaacgtggataattggatttatggatacagttacctacagaggaacatgactagatttgggttgtttgctagagatagaaggattgctatctttacgtgttctgttttcacttccttgcttttgttaatgttgatcatgtaaattgcttgcccaaacttgtctattttaccttgttagggactgcaatggcagtaattctgaaaggtttcagcttactagagaaaactttggtttgtttggttatgaaagccaagattttccgtggctgagggttcatgagtgtctaatgtaacaactgctttctggttgtctctttttgactctgatgacaaataatctaagtatctctctcacagcctagaaattgttgataatattgcttagattgagattctgttattgtcttttgtcttttaatgttaattgatgtcgtgaagtgttcggaaagtttgcctaatctcgagccctctgatttttctggtttctgcagttggaaaagcatttgcagccgctactattatcatctttggttcagccactttggtttttggaacggcagcctcgaaacttgacatgcgtaatgtaagattgcatatgtttccattttcttacttaaatcatttagattagcatttctaagcattattgactgatcttgaatgccatcatcgccttacttggttttattgtatgattttcgttctgttaggctgatgacataagaacgaaaggcaaagatctttttcagccaaaactggagtcgatgaaggaacaagtagagcccttaagaacttgggtaatgttttacaaagatacttgcatcttctcaactgaagtggatcataatcattaatagactaacccgaaaagaccataaatttcaggctgaaaacatgtcgaagaagtggcatattgagaatgaaggtggtaatactatcaaggagaaaccaatcttgaaggagctttcgaaaattctgggacctaaatcttaaaaggccaagacctttggttaatgtgtaaccatgtggatagagaaagtcaaagaagaagttctatatgtttgtaagattcaataagatcttaggtaaattatcatattgtgctgtaagaactaagaagtttcaatgttgctgtataaaggttgtatcgagtgatttaagttttgtataataaagtttttatgagtttcaatatcaatgtttcctattgtgtaagcaaaataaaatgtttcacttctgattggacatggattggtgggttaaatatacagaataggaagttacagtcaaaattgtgaacgttataataagtaagggttgtttatgtaaattttggcttcagtagagttctcttcttctttttgtaattaggtctcttagacggtgaggttaacgatgagtaatcaaagaaagagatcaaacgatgaaagagaagaagaggacgacgaagatgcggaaggtatcggcgagtgggagagagcttatgttgacgaccgatcctgggaggagttgcaagaggatgagtctggacttttacggccaattgataacagtgccatttaccatgctcagtatcgccgccgtcttcgtatgctctccgccgctgctgctggtactcgtatccaaaagggacttattcgatatctctacatcgtcattgacttctctcgggtaaatatttttctttgcaatccgccgctgctgctgctgattttgtgatttttagcttcaatgccgtttcctttgagtttgatggcgtgaaattgagcttatgttgctttcatcagagcttatataaaagagaaactatgcactttgggtcactgataagtaactttaatgtaatcgtcgttctagttttggagatctctgctctttagtcttctcaataggttctataattggctctgtattgtttgcaatgataatcttactctaagtgggtttgtagagcttaaggatgtgatccttattcagattctttattgaaggcaacattatgatttgggttcaaatttctctagttccaaggtatgcaaagtcttacactttggactgttttgtcgtgtctaggcagctgcggaaatggatttcagaccaagccggatggctataatggccaaacatgtcgaagctttcattagagagttctttgaccagaatcctctgagtcaaattgggttggtctctataaaaaatggagttgcgcatacattaacagatcttggtggtagtcctgagactcacatcaaagcgttgatggggaagttggaagctttgggtgactcctctttgcagaacgctctggaacttgtacatgagcatctcaaccaggttccatcttatggtcaccgcgaggttctgatattgtactcagctttatgcacatgtgatccaggcgatatcatggagaccattcaaaaatgcaagaaatccaaattaagatgttctgtaattgggctctctgcagaaatgttcatatgtaaacacctctgccaggaaactggcggattgtattcagttgcagtggacgaggtgagtttagctaccttctacttacacttggacctttgaaaaacttgttttgtatggtataacattgtgctttgtgtgtatttgtcttttcacgcaggtgcatctaaaggatcttctgcttgaacatgcgcctccacctccggcaatagcagaatttgcaattgcaaatttgatcaagatgggtttcccacaaagagctgctgagggttcaatggcgatttgttcgtgtcataaggaagttaagattggagctggttacatgtgcccaagatgcaaagctcgggtatgtgacctccctacggaatgcactatctgcggtctaacacttgtttcttcgccgcatttggcgagatcataccatcatctcttcccgattgctccatttgatgaggtgcctgcactttcaagtctgaatgataatcggagaaaattgggaaagagttgttttggttgccaacagagcctaattggtgcaggtaactacttgaacaccattttatagagtcttaatactgttggttgaataaccatttggtcactagaccagtagttgaacttaagatacggttcacccttgtcatagtatatacaaaggaaccgatccattcactcaaatataaaggctcattggtgcttttgttttttgcttagggaataaacccgtcccatgcgtaacatgtcgtaaatgcaagcactatttctgtctggactgtgacatatacatccacgagagcttacacaactgtcctggctgtgagagcattcaccgtcccaaatcagtttctttgatggaagaatga

SEQ ID NO: 144350 - DNA, 382 bp, Arabidopsis thaliana landsberg
cttgtctctggcttgagaacagagaaaacccctttcttcgatctcagcttaaatcactcgacgaagaagaaatcagaaaagagtcagagaaaaaaaaaatcaaggaagatgagtagcattggaactgggtacgatctctccgtcaccactttctctcccgatggccgtgttttccagatcgagtacgccgctaaagctgtcgacaacagtgggttagttggttttatcttcttcgatcttcgcctttagtagatcggatttagcttctgaaaactttgagattttggttatcgacacgaattagggtttcttaaaagtctttcccttttttttccttcgcaggactgttgttggaatcaagtgcaaagatgggattgttatg

SEQ ID NO: 144351 - DNA, 1174 bp, Arabidopsis thaliana landsberg
ttttctttctgtactttgaaccaagacaaggtggtggagaggagaagaagaaaacaaccaacaagagacatgtcttgtaataataatggcttagctttcttccctgaaaatttcagtctccaaaaccatcaccaagaagaagaagatcaccctcaacttcttcaagacttccatggtacatcatctcaattaacacctttgttcaaaatttctaatcctttttttttctacttctcaagatcttctctgtttttagggtttctaggtaaaagatctccaatgaacaacgtgcaagggttttgtaatctagatatgaacggagatgaagaatattcagacgatggatctaagatgggagagaagaagaggagattgaacatggaacaattgaaggcactagagaaggactttgagcttggtaataaacttgaatcagatcgaaaattagagctagctcgtgccttgggattgcaacctagacaaattgctatatggttccaaaacagaagagctcgatccaaaaccaagcagcttgagaaagactatgacatgcttaagcgtcaattcgaaagtctcagagatgagaacgaagttcttcaaactcaaaatcaaaagcttcaagctcaggtaaaagcagaaacttcataacacaaaagtactctgtttcttttttaatcttaaatactctgttttttaaatcatatatttcataaaatatgaatcttttttagttgaattttataaaaacaatgctcttttttgttttttattgatgttattcttttagtttcgaattcataatttggaatatatttgttttaggtcaaaacataatttggaatcattttgcaattttacgttctttcttaaatagtttgtgtaaattatgcaggtaatggcattgaaaagcagagaaccaatagaatcaatcaatctgaacaaagaaacagaaggatcatgtagtgacagaagtgagaacatttctggtgacatcaggccaccggagatcgatagccaattcgccctaggccatccaccgacaactacaacgatgcagttttttcagaattcatcgtcagaacagagaatggtgaaagaagagaacagtatcagtaacatgttctgtggaattgatgaccagtctgggttctggccatggcttgaccagcagcct

SEQ ID NO: 144352 - DNA, 509 bp, Arabidopsis thaliana landsberg
tgaggctaaagtaataaaattaatggcaacttcagggtttaagcatttggtggttgtgaagtttaaggaagatacaaaggttgatgagatcttgaagggcttggagaatcttgtttctcagattgatactgtcaaatcctttgaatggtttgtgatcatttgttttgttttctttttttcaataatttaagtatgttctggatcttttgattaatgaccgtacgatttggttattattaggggagaagataaagagagtcacgatatgcttagacaaggattcactcatgcattttcgatgacctttgagaacaaagatggttacgtcgccttcacaagccatcctcttcatgttgaattctcagccgctttcaccgccgtcatcgacaagatcgttctcctcgatttccccgtcgccgctgtcaaatcttccgttgttgcaacaccatgaatcttgtgatggttacatatcgtcatatgactcatatcgaacttgtttgttaatttaa

SEQ ID NO: 144353 - DNA, 5680 bp, Arabidopsis thaliana landsberg
attcacaagaaaacacttggataaaggcccaaagcagtttctgattcacatgtctaaagggcttagggtacgctcgatgagtgtcgatctccatagacttccacatgtaaaggtcacagttgaatttaccctaatcaaccctaaatatcctagttgtctagatcaagatcaattcgagatatataaagtctctcactgcgacggcttattgttatgcgtctgcgtcaccaaggaggacaatacttggctcgcggtatggaacccgtgtactggtcaaacaaggtggattcaacccatgacttatatgacaactatactctcggatcctaccaaaataatagctacaatatattggcacacactggttttggctacgaccacgaattccaaatttatgaaattaactccaattcatggaggattattgatgccactttggacttcaaattagggtatattggtcgtggcgtgtctttgaagggaaagacttactggattgctagtggtgaagaagagaaacggcttggcaaattcttaatcagttttgattatacgacagaaagatttgaacgtctatgtcttccgaataagtatccttgttatgcaactctggctctatccgttgttagagaagagaaactttccatgttatcgcaacgcggaattaaatcaaaggcagaaatatgggtgacaaataagattggtgagacacaagtggtgtcgtggagcatggtcttagctttggatttgcagcctaaacgttgtattggggaaagcggaagtttcttggtcgacgagaagaagagagtggtcgtgtgttgtgataatattagagaccaaggaaaaaccacggtacacatttttggagaggacaacaaagtgaaacaagtgggttttgaagtcggatcatctctgtaatgtatgttttattatgttccaagtttgactcaaatctaccaaggtatcacaggcaaaagaaaaagggacgaatgatcatagtgtttggtgtggatcttggagcaactatcagatttttcaattatgataagttttcttctcaatttcaattaatcgcttctttatgccataatttagaggcaattgctgtaatatttctaaattttttaggcattctttactttgtacttctccttttaattatataggtagatttgatgataattagaagattaagacttcaaaaatggagattatgtgaaattgagaaaagcatcacacaaagaaaatggtttttggtggaacaattgggatatttgcataacatgaattttgattccggtttactatacattatttgtttcttgattccggtttagtatatcctagtacttacttaaatcaataatccgggcatggttaaaattaatcagacgttgaatcaatgagactccccgtcaccgtcaaagccactaagccgtcgtttctcgtcatttggatccgatactcctccgccgcgtcgtcgccgacagtctccttgaatccagtaaacctctctcccgcacacgcttacatgtatatgcgactttattatccattggaatcattttgagtgtgttttttttgtcttggggttcaatactgtagagtggacgattacagcaaactctcgcaggatctgtggaagtgaaaggaaaatctctgcactccggtaagttctcgacggtgaagctaaatccggagatcgccggagctggtaggttcttcgagtttcgatccagattcatccctgcgtcgattgaatttgctcaggaatcgcctctttgcacgacgctgttgaaagatgagctcaaaatccgaaccgttgagcatttgttatcagctcttgaggcgaagggagttgataattgcaggattcaaatcgagagcgaaagttccgatgatcgagaagtcgaggtttgttacctgaatacatacattttgagtaatcataggtcgaatcaatgtctcgtattgtctattttgactggatttgtatgctatagagattgtcaacatcttgctgtgcagtgtagctcttagttttatagacttggtacactggaggagatgatgagtgtaggcaacactaaccaagtgacaggtccctatttttgatggatcagctaaagaatgggtcgatgcgatacaaggagttggcataaacgcggctcaaaaccatgatggtgaaagtgtagagaagatggtcgcacatgtgaacaagcctgtgtatgtttgcaagaacgatacttttgttgctgcatttccggctctagagactcggatcacttgtggtatcgacttcccacaggttcagtctaatggcattttgacttattttctgcttgtacataaattgttattgacttggtctgttgtgtatgatgatgaactttacaggtgcctgctataggctgccaatggttttcttggagacctatccatgagtcttcttttgcaaaggatatcgcatcatcaagaaccttctgtgtctatgaagaggttagttagatccattgttgttgcttaggagctttggaatcagtaaactggtgttcgttcttcaaccatctgtgtctgagggttttgtttgcaggtggagcgtatgcgtgaagcagggctcattaaaggaggttctctggataacgccatagtttgtaggtaaataatcttgcatattgatgactaaagggacacaatattcaactgaaactgtctctaatgcagcgctgagcatggatggatgaatcctcctctgcggtttgatgatgaagcatgtcgacataagattcttgacctaatcggtgacctctcccttgtttcacggggcggaaatggaggactccccgtggctcacatagtcgcatataaggtaaataatactagcttaacatcttatagtttgcacaaaaaagaaaaaaaaaaaacatcttatagttttctcgagaaaagaaaacaatagtattatctttcaaatgcaggcgggtcatgcactgcacactgacttagcacgtcaccttaccatggactgaagagtatgtgctcgttgtcaaccatatcccgcaaaagccttgatcgtttctgtttctttttggattcgttatccaaagatggtaccaatgtgggatttttgtttgttcaatggaagatcattactcttgtgaatacagtaaaatttgtaacattaaactattttaggtactaatcatagggacattttaaccgatcaaactgttccaaaaccaaattgaattgaaacttaagttgtagttcaataatagttttactctgtaccaatttaacatattgaaactgaaaataaaagaaaatggaacagaactaataaaaataataaaataatttaaaacgaaaaagaatttgacttggatacatttttcacattaggaaaaggtaaattcctctccttttttatttttatttttttactcgtatttataattgttgtacattataacgtattaggatacgtattaagagagaagaaccctaattacttacgagagaggagaaccctaattttcaattgtggtcgaaaattggaagaatgaggaggaggaggtgcgatcttcaaccgaagagaacgagaatgtgcgatcttcaaccgaagagaacgagtatgtgcgatcttccaccgaagctggtaggggagaagatcctcacgaggattccgataacatctctgagagcggtgcgatccacttgcaaattatggaacgctttaaccaaagatcgggttctgggtaaagcagcggcgcagtttttggggtttatgacgatggattcaaaggtctgttcagttagattccatctccgtcgcagcaaggaggaagaagaagacacgatggatctatctataaagcaggtagatttgcttaatcaagtcgagatatctagagtgtatcactgcgacggcttgttgttatgcgtggctaaggacaactcgagggtcgtggtttggaacccttatttggggcaaacaagatggatcagacccagaacagaatccaacataggagacagctatgctcttggatacgacatcaaccgtaaccacaaaatcttgaggatggtgcagacaagaaacgtttccgtttacaggtacgaaatctacgacttgcgctctaattcatggagggttctcgaggtcactcccaacggggaaatggaccctaatcatcccctctacggcgtttctgtgaagggaaatacctacttttttgcgcatgaggatagcagcagtggtgaaattgatgaagatggcgacataatcgatcttgaagatttcttactctgttttgattttacaacagagacatttggtctgcgtctgcctcttccgtttcactctactatcgatgcgactgtgaccctctcttgtgttagagaccagcagctcgcggtgctatatcataatgagggtcttcacagtgatgatcggtttaccacagttgagttttgggttactactagtattgagcccaactctgtgtcctggagcaagtttttgacagtggatatgagaccattggcactcactggtgttcggtttgacaatgatatgggtgccaccttcttcattgacgaggatgagaaagtcgctgtggttttcgatctagacggatacctaagcaccgagagcgctcgttaccacaccgcttttatcagtggaaaggatggattctttaaacctgtgactctaggagtagctcccaatgtcggggaaccttgtcccagaaccgggcatattccgactacatatcgtcccccgcttgtctgctcgtctacttaccttccgagtttagtgcaagtcaaccaacagcgcaaaaggaaagaaagacatgtttagttttctgttccttgcagttctcaagactgctagtcaattctcagttacatttccatgttatctttctcctcttttagtttctcttctcaaacttactcttgtcatggtttaagtttcttacttttcgtcagtgagatggttaggtaccttatttgtttcttgcattgtcgtctgctagtaaatttatcaaagcattgttctagtcacttgttcacttgcaccatccttaagcaaagcatgacatggtttcatgtactgttagcccaattatggagtacatatctcatataagttagtctgtttctgcgtttacttctaagttagtcccaattatggagtacatatctcatacatatcttatatatacgaaaagtgatatctgatctcatctcatgtatgttgtgtttcttacaccattatgaatactatctggcctttacaggttcgtcctgtagtgaaagaagtactagacacattttgggtaggtgcttagctaggaaccaaataaaaactgaaagaccctcggcaatttttgtcgctaggcatgcttaaataaccatagctttctgctttccacatttcacaaattaagtaaaagtggaggaacaagtcgaatttttatgatagaaacaatgggaagatggcaaggaacattttgcattggcaaatattattacagggaggcactattcgaacacagcagattttctcattcaggctagtctacgtcagcttctcggaatcctttttctctacgattttgatgaaattgcggacaattgtcttgccctcagttgttataatactctccggatg

SEQ ID NO: 144354 - DNA, 346 bp, Arabidopsis thaliana landsberg
gcgtcaccagatagcttgtgcaccttacacattataggaacctttccctctaaatttttacctctgatgtggtatacattactattttgttgtagatgaattgtgcgcatttggagaactgcttacatgaagcaagagaagaagcccagacccatctttgtgctgctgatcgtagagcttctcagtatactgcacttcgtgcatcagctgtgaagatgcgaggtctctttgaaagattccggagctctgtctgtgctggtagtgggattgctaattttgctgactccttgcgaactttggctcaagctttagccaagtaagttcccatctgtacgcttcccaaaaa

SEQ ID NO: 144355 - DNA, 1733 bp, Arabidopsis thaliana landsberg
cttgctatttcagaccagctcttcttcttctgttagttcttttggttcatgccgagtcacgcggtcggttctttccaaagattcttatgccgacagaggaagctaacccggctgaccaagacgaagatggtgtcggtacaagatgggcggttctcgtcgctggttcttctggatatggaaactacagacaccaggtacacatagtgtccaacgaattgattatattattcgtgattcaaatttaatagcaatccgttattgtaaatatatactttgccttaagattctttttttttggcttagatattaatgtgacatgcaaaattttgtttaattattttcttcaaaatatgaaattaattcaagactaagatcctatgtatggtgaatttctccatttctcaatctagttgtcatttaagaaaaagttcaaaagtttttataaattcgatatctattaaaagtgttttgttgctttgtgttaaaggctgacgtgtgtcacgcatatcaaatactaagaaaaggaggtttaaaggaagaaaacatagtcgttttgatgtatgatgatatcgcaaaccacccacttaatcctcgtccgggtactctcatcaaccatcctgacggtgacgatgtttacgccggagtccctaaggtatatttatttatctagctttcctcataattatgcatgaactaatttacccttaatccgaccaataagtctgtatctaggtttggattcttctcttaagtaatatcaatgttctagatgtgacctatgttttggtccaaatagcgtctaaccaggttttagagctttattttaaattgttataacgagaaatttttctctatagtatctcatttaaatgatattttcttctttgtcaatggcacttaggttgttaatttattaaaaaattatatattattggatctatcgtgtaagagatggtgactttaggcactacacaacaattatagtgatagcgactgtagagacattgctatggtaaaccaaactttatgtgtggacctttcattggtatcgctcctagatttcttatagccactagttgttttccctttttaatagtttgttcggttatttacgttttgaaatatctttttcaggactatactggtagtagcgttacggctgcaaacttctacgctgtactcctaggcgaccagaaggctgttaaaggtggaagcggtaaggtcatcgctagcaagcccaacgatcacattttcgtatattatgcggatcatggtggtcccggagttcttggtaatttcatcgatcatttgtgttgtttccgattagataacttcttccaatgtaatgcttgtaatcgatttcttacaacggtgtaatttttgttttcattggtcagggatgccaaatacgcctcacatatatgcagctgattttattgaaacgcttaagaagaagcatgcttccggaacatacaaagagatggtgaaatttagtttaacagtttaatttgttttagtgttttattttgttcaaaggaatgttactatcagtatacttgtgataatgtaatgcaggttatatacgtagaagcgtgtgaaagtgggagtattttcgaagggataatgccaaaggacttgaacatttacgtaacaacggcttcaaatgcacaagagagtcgatgtggaacatattgtcctggcatgaatccgtcacccccatctgaatatatcac

SEQ ID NO: 144356 - DNA, 1271 bp, Arabidopsis thaliana landsberg
agtgatagtcacaatctgaagtacatgggtattgatggtcttggtcgattgataaaaataagcccagacattgctgagcagcaccaacttgctgtgatagattgtttggaggtgagctgaagcaagagaatttttttttattttttgtcatgtgagctaattgtttgttttcttgcctgatgttcgtttcgttgctactgttcaacaggatccagatgatacactaaagaggaagacttttgaattgttgtacaaaatgaccaagtcgtctaatgtagaagtgattgtcgaccgaatgattgattacatgattagtatcaacgacaatcattacaaaactgagatagcatctcgttgtgttgagttggccgaacaatttgctccaagcaatcaatggttcatccaggtagcaagccaacctcccttgtaactgtggcctgacaataaacttatatactctttgtttctgacagaagtttaactgtttctgtactgcagatcatgaataaagtcttcgagcatgcaggagatctggtaaatattaaagtggcacataatctgatgcgtttgattgctgaaggatttggagaggacgatgatgatgcagacagcaagctcagattatcagctgtatgttgttcattccagtttctgttggttctgcattaatgtgcaaagaaatcggtagcttttgttttggtgatatatgaactcatttttagcagataattgagttaatatctgaaattgcaatcttaaagttagtattgagtaacttcagtcacctttcttacttcctggtcttgttttgttggcttagatagtgtgatgttattggcttatgagtgtgtttttcttgatgcaggtggaatcgtacttgcagcttattagcgaaccaaaacttccatccctgtttcttcaggttgattttgttctctgatctctccacataccatttttttccgcaacgaatttttgtttcttactattgggtttaaacttcaggtcatttcttgggttttgggagaatatggcacagctgatgggaaatattctgcctcctatattagtggaaagctgtgcgatgtggcagatgcatactcaagtgatgaaactgtaaaggtatctcttcagcttttaaatattattcaccgtgaaaacctttacctgcttagctgttctggtcttttagttctgtgtatgctgtagtttcttgtaacactcgacttgtcttttacatctccatacttaagttgcattcggacaacatg

SEQ ID NO: 144357 - DNA, 1814 bp, Arabidopsis thaliana landsberg
tagagagaacagctcgagatgctttcgatagcttttgcgggggacactgacaaaggaatgctctatgtgttgaatgtatgcaataaaatgaggaagctggagataagggacagtccttttgggaacgctgcgcttcttgctgacgtgggtaggtacgaaacaatgcgatccctttggatgtcgtcttgtgaagtaacactcggtggctgcaagaggctcgcgcagaattcgccacggcttaacgtagagatcatcaacgagaatgagaataatgggatggaacagaatgaagaagatgaaagagagaaggttgataaactttacctctaccgaacagtggttgggactagaaaagatgcaccaccatatgttaggattctttagtctctttgcaccttcatgtgttttcaaacttttctttgtactagtttttgccttttatcaaacttggaacaaatacaaatgtcgcattttattattaccgtaattcagccattgaaaacataaatttaggtaaaataccaatcccgttttccaaataatacaaattacaatgacatccacaagaaacctacttgtctaatccatgctctggatgagtgcactctcaaacaaagaggtaaacattaacagacattgacacacgatagtacacaagacatagagtgttatggcatatgtcttcgattagacacataatgctgcaagtaaacgacgagatccacagagactggcggcattctcagaagcagcattcctccaacaaacagcaacagcaaagagcagcaagactgcaattcgcaacccacaaaaaaaaggattccgtaatcgcaatttgtaagcaacatgattaggctacttgaggtcaatcacaaatctcttactaaaagaaaagctgcagatgatataacattttatctacaaactttatactaaatattctggggttaagaatgtaaaataaaagccattaggtagttcttaagagagtcactagatccattgaaaagtaaaagatcctgtccaacagataaacataaaaatgtgtctatacatggatagctctaaactcatcataaaaagacaagaaccttccttagaagatcagcaaagcactcagagaactaaatctaaggattaatacgaatctcttgctctaaaatttcgataattggccaccaaacaaaatgataaagaagtcaagtcagggttctcaacggaactcttgagtttcacattatggcttatccataaatcaactcaaaggaatctggttctgatcaggatcatagtattcccaaattccataaaccaaaacactagttcaatgaaccctgagcattaatcagtgatccaacataaaagctaacaagattgaccaaaaaaaacacagagaatcgaatcagtgcactcacaacaatgaaagtaaacgaaaattaaaaggcggcaagtggtagagaaagaaacgaaccagccacggatgaaagagaagcaaccagagtcagaatcttggtaatggtgatgatcatgatggcagtggtcgtaattttgcggcggaggaggaggtggtggtccgtgatgctgatgaggataacctcctccggcgaagtagccttgataaccgccttcgtaaggacgtgaagacggtggtggatatcctccgtaaggctgaggtggaggatatccttcgtgatgcgacggaggagaaggatatcccggcggtggcggtgctgatggataacccggaggtggatagtgagattggtatcctaattcgtccgatcaaaaacaggatcttagtacttttagaatag

SEQ ID NO: 144358 - DNA, 2293 bp, Arabidopsis thaliana landsberg
agaaattatttcaagatctacttctcatcatcgttcttttcttatctcttcttgtccaacttcttctgaatcaagacaagagaaaagcaaccatagatggcacagtgagtgtgctgtatctttttctctgatgtcaaccgtttcaagattcttatagtaagagaaattatattgacaatctttaatcgtaatgaaattaatctgcagtcttcatagaacatatcttactgagatgtcaaaaggtagagctagctttcctaaaggctttctctttggaactgcttcatcttcttatcaggtgaatcagttcgaatcaagacctataaaaaaacattacaagatcaaaatgatatttacttttaagttttgtttttttctttgtattagtacgaaggagcagtgaatgaaggtgcgagaggacaaagcgtgtgggatcatttctccaacaggtttcctcacagaatcagtgattctagcgacggaaacgttgccgttgatttctaccatcgttacaaggtacttttcttctcttcttgttctgttttttttttcgatttcttacttgtcaaggtaatttagttacaagacttgaagatctgtgattgatttcttgtacaggaagatattaagagaatgaaggatataaacatggattcgtttcggctttccattgcttggccacaattgtcttggccacgagttctaccttgtaagtatatcatcagtttcgaaaccttattttaacgacaatcgatcgccgtttcaaaatcgatactaatctttgaaaacaaaaacagatggcaaaagggatagaggagttagtgaagaaggaattaagttttacaatgatgttattgatgaactcttagccaatgaaatcactcctcttgttactatctttcattgggacataccacaggatcttgaagatgaatacggcggttttctaagcgagcagattatgtaagcaaaattcatttatttgaaatttgaacaagttgtggagatatttatgttaggtgatgtgtatatgcagagatgacttcagagactatgcgagtctttgcttcgagagatttggggacagagtgagtctgtggtgcacaatgaatgagccgtgggtctacagtgtcgcgggctatgacacaggaaggaaagcgccaggacggtgctccaagtatgttaatggcgctagtgttgctggaatgtcgggatacgaggcatatattgtgagccataacatgcttgtagcgcacgcagaaccagtggaagtgtttagaaaatgtgaccatgtaagttaaaaaatttcccttaatagataatatttgtcattttccaatactatgttctgttgtattgatatgatttgaatacaatgcagattaagaaaggacaaattgggattgcgcataatccactttggtacgagccatatgatccgagtgatccagatgatgtcgaaggatgtaatcgagctatggacttcatgcttggttggtaagtcatgactaaaagtcaagtaaataatcttcattacgaatctacatataaatagatgggtcaattagctttgaggcacaagttcacaaaaccgtttttgattgtcttcttgtggcgatatgttggcaggcatcagcatccgactgcttgtggagactatccagaaacgatgaagaaatcagttggagatagattaccgagttttacaccagaacaatctaagaaacttataggctcttgcgattacgttggtataaactactatagctcgcttttcgtgaagagtatcaaacacgtggatcctacgcaacctacttggagaactgaccaaggcgttgattggatgagtatgtctttttttggtgattatgatttatgaataataatgatggaaactttgtgactaacttttggctcatactaaaacactttgcagaaaccaacatagatgggaaacaaatagcaaaacaaggaggatcagagtggagtttcacatatccaacaggactcagaaacattttgaagtatgtgaaaaaaacttatggcaatcctcccattctcataactgaaaacggtaaaacaaacttaagtttctctgtttctgtgtctctgtttactctgtttatatgtttctgtttctctcaagacctcatgcaacattttctataataatctcagggtatggtgaagtagcggaacagagtcagagtctttatatgtacaatccttcaatcgacacagagagattggagtacattgaaggacatatccacgctattcatcaagccatcca

SEQ ID NO: 144359 - DNA, 4710 bp, Arabidopsis thaliana landsberg
ggaccattcgatcgaaaacaaggacatagtactgtggtacacactagggttccatcacgtaccttgtcaagaagattatccggttatgccaaccgttgcggctagctttgaacttaaaccagccaatttctttgaatccaatccgattcttgggtctgctcctttcttcgaaaaagacttaccggtctgtagaccatttgcttcatcttgaccggttctgttctgactaatactctaatagtatacaagtagagaagatcaaatatccggtgtagccaaacacttgttgaagtttatttgccggtttttgcaataataacaaaacgtccaatatctgtatccccgacgtaacataataccaaaaatcttcagtttcttcagagagaagttgttcgtgttcgagttattgtagagccagcatacgggcagttgctttgttgagtttgcttctcttaacgaagcagagaaggcgttggaaacgaagaagggtgaaactttttacagtcgtaagattattcttgacgtggctgagatggctccagaccctttccgactcaagtacaaccttgtaaagaagctttgttaccaagactttcaacaagaaagaccggaaagacagcagataaaatccctgttctgcggtaagaagactatcatctcttctgacgactgatagaagctcctttggtgttttttagttgtgatatctattccagttacgaagaccttcaatgcaagtatgcaactgtgctttgttacttcgttttttcttttcttcttgttaagtttttgtcttaattaaattaaaatatgcttaatttttagttatttacctaaataattaaaatatgcgaattgaactgatttggtaaataaataattaaaatcacaatcaatacatagtatgattcatgtggacatgtggttggacaggttggtgaacctaattatgctttaatttctcaacactttgttcaataattggttgtgtttttttttttaatgaattttggggtcaaattcatttcaactgattgaatcaattctcatgaattccatcttgtcaagcgtccttcctgctcccgaagatcctgttctcagtgtatactctaaaggcttttcatcgatttcacttatatctttcttgttgatttcttatatacttcttttgataaacatttattatatacttcttcgaccaaatgtgtatttatgttaatctttttctaatatatatatttatgattatggaaacaggtaatttttgcttgtagagatgatcctagtccggtttagttgaatttgagcgcaggtacctatcgaactgaggtaattttcagatcttcataatcttgatttaagttaattagcccttttgcgagttcaaagttttgattagattagtcttctccctgttcctttttttttttttttttttttttgctgcgaaggaaggaaagcctcttgttcttgatgttgtgagaagagcagagcaacagttagccaacgacctgtaagttaatcaatatttatatcataatgcaacttttgtgtatatatgaagaaaaaagattcacattttgaaatacaaaatattttttataaattaaaaaaagatattctcgttttaatcctaattttgagaacataaatatagtaaatgtaaacacgaacgcaaccgtgaacaaaatgtaattttccaaatcttttttctgtgtttgtaaatcattagtctatgctttctctgctttacggtttaccttaaggtctagggacaaggaatatcttcccctcaatggacttcctgaatttaataaattaagtaccaagctcatcttaggtgatgataggtaatgtattcactgctattttctttcatcttttttcttatgttattattattaattttgctataattttttttctggacagtcctgcattgaaagagaatagagttgttacaacccaatgtttgtctggtactggttctttgagagttggagctgagtttctagcagcacacaacaaagaagtaaattgttctctacttagctttcccaatggtcattagaattcggtaaaattaaataccgatttaattgtatactacatacaacaattctacaatatagtatatactaacaaattttgtaataaattttcctagcatacaaacatttgctacttacattgcaacatatttgtcactaatttcgtttctctttgtttcagagtgtcattttcgttccaaacccaacgtgggggaaccatccccgtatttttactttggcgggtttgtctgtcgagtatttccgttactatgatccgaagagccgaggactcgatttcaaaggtagttttataactatgtccataaactctctgtctttcacattgaattgttgcactttatcttaattttgtttgattgacccaatcacaccaaatttcaccaaatgtttttttaatatgacccagttgatgttaattcctaagtacatatatataccaatcatgatttcaaataatgacttaataaatatcaaaataggcctgctcgaggatcttggcgctgcacctcctggagctattagtggtactttaagcttgtgcgcataacccccacaggagttgacccaacattcgaacaatgggaacagattcgacgactagtgagttcgaaaagcttattacccttctttgatagtgcatatcaggtaagtcataaaagtaccttcttttggttgctttgttctacaacaaatgagactctgttatagtgtttttctttaagcgtcgtcaggtaagccataaaagtaacataactcatcttcccctaacactttcagggttttgctagtggtagccttgacgcagatgcacaagcggttcgtatgtttgtagccgatggaggtgaatgtttgatagctcaaagttatgccaaaaatatgggcctttatggggagcgtattggctctcttacgatcgtaagtaaccataacatcttggcatcaattgctttccttttgttttgcctaagcatttagatctaatgaaggatattttagcgttacatatgcattttccaaacatattatatgagaaaataaactgaaaatgatgtatattgaaaatctacattattcttctaaattctttacatacgcaaacgcagaaatggatcagtttccaatagtctacgccatattatataatcttcatgggtctaatgtgaaggtatgcacatcagaagatgtcgctaagaaagttgagaaccaagtgctacttgttgtgaggcctatgtatcttacaccacctattcatggtgcatctattgttgccacaattctaaaaaacaggtaatgtattataaactataagaaaaaagctataattgaaatttttatatagattttggttatgctcaaagtttatgtgtatacatcttggtagtgatatgtacaatgactggaccattgagctgaaaggaatggctgaccgcataattagcatgcgtcaacagttatatgcagctctagaagctagaggttccatttagtgtcttttctttccttcatttttttgttaaatctttcttctcagatatgaatcatgcatatataagttttgttcaggaacattttaaaaaaagttttggtcaggaacacctggtgattggagtcacattattaaacatattgggatgtttacttttaccggattgagtgaggagcaagttcgcttgatggccaaagaatatcacatttacatgacttatgatgggtaagggaaatatctagtcttttcaaatgattatagtactactactaatccttaggctactagttaacacttaacatgattattagaagcaaggagatacatatttaggacttttgtttagatgtttatgtttttttttcatatgagaccatgaccgctctttcaaacaagtttttcgtttgttaattgtaagcgcaaacgtttatctatttcataattgtgagttaaaaaagtagattttttctcaattagtgcaaacgcataaatcgtgtttgatatgcgaactaattaaaatgaatactggcatttaacttatttcattccaaatttatttttaaacttttcaaagaatgtaattctttttccatttactttcagattatgctagatgctttatttattttgtcttctagtctagttaaagaatataattcgttttccatatactttctgattaggtcattcccatttgggactaaaatagtggtcatgtaaaccactaggaaaaaagagtctagtgggtgcatgactactatttgaagtcccaaatgagaatgacacaaagcatttaagatcattactcatatcataaattgagttatatttctttgtctgttttcatgaaaaaacttagcttcaaaatgaaaattatgtatttgcaggaggataagcatggcaagtctaagttcgaagacagtgcctcaactcgctgatgctatacatgctgttgttactcgcatcgcctaactaaatttgtgattctgttcttttgttgttttatgaacacaattggagaataaaactgcgttcttggtttacatttaataagatagcacaaagaagcatattatggatgatattgtttctagttggtagtcaaacctaccaaaatgaggattgggacctttaaaccaacacagtttttac

SEQ ID NO: 144360 - DNA, 1574 bp, Arabidopsis thaliana landsberg
atggaggaggaatcgcgagatatactgatgacgacgttgattgaatctggggtttcgattcccggagatttcacttccgttagcgaatttactccggaggcgttagtatcgatttgtgctcagctgctcaatctcattgacccatcggcgtcgttttccgatgagctccctgattctctccccgaaaggtttaggatctgcaccgatatcgctcattctgtgaagaatctaggctacatcaacgatatgagttattataaggtaccatttcatataatccctctttggatcgcaaccagaatcgaatttccattggttgatagagcgaattgttttgggttaaaggaaataactttagtgtttaatagttctcaaggaacaagcttttatagttcctgagagctgtgatagtcctttggtcttcgttagaatgttctgaagtttactttacgttctggcttgtgtggcttttcttatttgtgtgaaaatcatgctgaaacagattgtatgtgttgcttgcggcagtttctgcatccatctgaagatgattcttataggttggttaggtttctggttgagaggctttcggagattagtgaaggaagaaaaactttgtcggctggtgatatagctagcaggccaaagatggagactttcagagatatttcagatgacatgatggtgaatgaagacaaggatgagactttcgatatgcatatacagaaggttgaagctgtcttaaaagatctcacaatgactagtgaaaaatctcattcatctgactctctcgcaaaaaatacctcagccaatgttgacttctcctcccaaaagacagatgatcctgttactgatgtacgttctgatctttctttgagagattcatctagatgtgaagaaaattcttatgaagacccgtttgaggtactatttcttctacttattgtgaccttatctcttttctctgtacatgagcatcagagcatatgtttgaacatttacataggaatagtgattttaaaccagttttataaatgttgaaggcgtataaaccttttatcatttttttatggtttgtagacaaattatgagactgttgagttacagaatcaacatgatgtactcttggaggaactggaatctggatcttcacagctatgcagtcttgaaagcgagctggagttgttgcagatggctgcggagaggttattggatgacaaaaagccgggtgggtcatatctcgaacagcttaatcaacaactagtggtcaaaaggtgtaatatcatggatcttaaaaagcaatggtatgaacaatattatatttatttcaagttgaaagcatccatgcattcagtttcatggacaacatcaggacatgatggaagagttatgtatcgcatgataactaagtatatcatgtcttccttcagggacgatgtaaggctgactctggaaactaaaaagctacttctcttggaccaacttcatgtggaggagccagaggctaaagagaaattccataagttgagaaagactgaactggatttacaatctctctcatcagaaattcaaaagag

SEQ ID NO: 144361 - DNA, 453 bp, Arabidopsis thaliana landsberg
gagggacgactagattgcctgccaacataagcacaaacgcaggaaggattccttctagtgaatctgtcatcgactgtgagcatgcctctgtaaatgatgaagtcaacatgtcttcggtaagagagatgcaaatttatgaaagcgtattgtgcagttatgctatttagtctgaactcacgaattttttttatcttgtgcagagagtgtctagatcaaaggctccagctcctccaccagaagagccaaaattcacatgcccaatctgcatgtgtccctttacggaggagatgtcaaccaagtgcggtcacatcttctgcaagggatgtataaagatggcaatatctcgccagggcaaatgccctacttgtaggaaaaaggttactgcaaaagagctgattcgagttttccttccaaccactagatgagtggtccggcaacatcactagccaccct

SEQ ID NO: 144362 - DNA, 840 bp, Arabidopsis thaliana landsberg
gtatatcacactgcgtggcgtgaactgtgtgaagcgatggtaaaagcagggtctctggatgaggtcatatatgtacatgagacctacttgttatcgattcagcggcaatgctttgtggttcaagaaaagctggtaatggaccatgaaggcattaagcgacctcttaaaatgcatagtatatatttgaagttgtaggcttctaaaaacctagtgtttggtggtttttgtatagtgggcaatcatcgcaagtcggatcaacatgattctcggtttagctctagaattctactcaatacaacagacactgagcagcggtggagcagtttcagccatcaaggctagatgcgaaatggaaatagaccgtatagagaaacaatttgaggactgtattgctttccttctcagagtaagtaaatcgaaaactgtgtacttgttgtattgtgaagctatatataattgattaatgcttaatgggggatggaacttgcaggtattatcttcgaagctgaatgtgggacacttccctcatttggctgatttggtgaccagaatcaattacaattatcactacatgtcagatactggaagcttgatgactacttctggagcagagaccaactcatccagaccttggactgccaaatctgatgtatgaatggaccgggaaattatcgcaatgttggattgtcgcaacactatcacacgtaattgttcaagcctcatgcttttcttgtgtctggtatctaatttcctgattatgtaatttctgtttataaaagttcactgttttgaattagacattgtacaaaactgctatcaaggtttaaaaaaaaaaaaaca

SEQ ID NO: 144363 - DNA, 972 bp, Arabidopsis thaliana landsberg
ttcggaaagctgatggtatctgaggggcaagatctctctttgctttactttcctgtaataatgtcttagtttccatttatagatttttaacaagatactacatcacttttccacttgccagggaatatatcaagtggctaaatggaatgggactaaggtttctgtaaagatacttgataaggatctctacaaggattctgacactatgtaagattactcttctcttcagtgagtaatatgtctatgttagctaacaggtcaagaaggagtttgaatttcttcttgagtgaagctatagatcgttgaaatcatctttgttatgttcatagtgatgatgatatgagctgtaacattattcaatcatagttcttatagaatcttctatgttggaattatgcatttccagtaatattttctggaatccacttcattccctctgtgttaatccttgtttttcttttcatatattacgtttgttctgcaatcttctcatctgacttttattatgtacccacagaaatgccttcaaacacgaacttactttattcgagaaggtacgtcatcctaatgttgtgcaatttgttggagctgttactcaaaatgtccccatgatgattgtgtccgagtatcatcctaaagtaagcttctccctctttttacaccttaaaagatttttccctcattaagcaatatttggatggtaggaactaatgttgtccacttggtggtaacttgcagggggaccttgggagctatcttcaaaaaaaaggtcgtctttctccagccaaagttctaagatttgccctcgatatagccaggcatgtgacttttttggcaagattgtattcaacttacaactacattttttttaataatcttgtgaacgaatcatttggctcttctcaggggaatgaattatctcacgagtgtaaaccagaaccagtaatccactgtgatctaaaacccaagtaa

SEQ ID NO: 144364 - DNA, 509 bp, Arabidopsis thaliana landsberg
gggtgcatggcagctttggatgcagagcattacttacaagagattggatctcagcaaggtaagagtgattgaggaaattgttggaaggctcaggtcattgagttattgttgattgatccctgattcagttagacattgatggaccagaatgagacttgatctttatcttagaacaagttaagatacattgatttgtttattccttaatattgcagttggaattgagtccgggtattgttcaaagttgtagctctaatggtaaaactagctacgacaaaagtcctcttaaaatatgagttttagatgatgccttaacattcatatattcagtgaacatgatttatccaataatgtattatgtattcttataaattagtataatataaaaatgggtttccagaaatctttaagacatttctgatcttgaagccgagtcatttccagagcttctagaggcttttgaaatgatcacagatttttcagaggaaacggctttggtgaagctttaa

SEQ ID NO: 144365 - DNA, 391 bp, Arabidopsis thaliana landsberg
tattgagacagagagacttaatgtacttctcttcttttttgatgaatgcgcgcagttggagggagaaagcgagaaattcaggttcaagaagctggaggagctaagcaagaacattgatctaaccaaaccttacgtgttggacgagcagagtcgctgggatttggctattcaaagttctaaaaaaatcactttttagagtattttcattgttcttttatgattctagtaatatatataatttataaaataaaaagtaagaagatatgtgtttgaactagatgttgcaaagaaaatgtaacaaagttacgatggcactacattatcgacgtgattggcagaattgtaatagtaatgtaaagaaactatgtttgttccggagcattttcgtaca

SEQ ID NO: 144366 - DNA, 324 bp, Arabidopsis thaliana landsberg
ttatctgattcgtaaccattgatgaaatgcgagttctcgacgaaattgcagagtcaccatttctgatttcaccgctaaaccctaattcgacagccaatggatatagatgggtcgataagtgccatggattcttacataacacggttctcgttgcggcttctctcttcttcgtcgcttacttagcttacgaagcgaagaagagtctgtctaaactctcgaatcggagatcttatatcatgattgcttattatggttgtctttggcttgttagcttgctcaatcttgcttggtgctgtctccaggtttgttaataaaatatcacaa

SEQ ID NO: 144367 - DNA, 498 bp, Arabidopsis thaliana landsberg
gcataaaaaacagatgcgaaattattatttaatactccatttcctggattatctcatgatacataaggatttccttaatttgtaattataaaactcttaagaatatttttaccaacccattacatagaacaatcataataaatcacaagttctctcatcaaacataattttagcaagaagaagtcttccaaatctcttggagctctctggcaaactcatcttgtctgccaacgaccatagtgatatgatctttgtgctcaataaccttaactcgtgcccgaggaattcgctgtttaacgttgtagctacactcgacagggatgagttcgtcgtctcctccgtggaagatggtcacgttgcactttagtttatctcgtacgatgtctagatacgtatcgagtttgcttcctgtcccacatataatgttatgtagagtatgccatgctgcgttgtgtgtgtgacacatgaaaccttcaattaaaaagtttacagtcctgg

SEQ ID NO: 144368 - DNA, 823 bp, Arabidopsis thaliana landsberg
ctgagaccgtcatctacagaatattttactacataaacagatcaggtactggttgcattactcttagagagctgaagcgtgggaatcttattactgccatgcaacaagttgatgaagaagacgacatcaataaagttattaggtgactttgttttctttttcattatttcttaaacaatacgttaaaaagattaagattttagttttatttgtataataaagaccactttaagttgtttaagaattcaagctcagcattagtaaggtgtgtagcattgtgagtaatatgggtagtgcataggtcttcgaattgtttcttagacataagcactacccataaaactcataaagaggaagaagtgtattggtagttcatattgtgatactgtggcaagacatcatgcatgatttgaccattcaatatgaccttttctttacttttcaggtacttctcctatgagcatttctacgtgatatactgcagattttgggaactcgatggcgaccatgatttccttattgataaggaaaatctcatcaaatatggtaatcatgcccttacctacaggattgtcgacagaatattttcacaggttggctccagttgtcaaaatgttaatgaacacttttctcgaaacttaattgttatcttatggagtgtgtttccttctttcttaattgaaattacggctgtggctcactcaggttcctaggaaatttacaagcaaagttgaggggaagatgagttatgaagattttgcatactttattctcgctgaggaggataagtcatctgagcctagtcttgagtattggtacatgt

SEQ ID NO: 144369 - DNA, 617 bp, Arabidopsis thaliana landsberg; identical to SEQ ID NO: 39113

SEQ ID NO: 144370 - DNA, 756 bp, Arabidopsis thaliana landsberg
  unsure (1)..(756): unsure at all n locations
gaagaaaccgtgatttgctcaaatcaccaaaataatactctcttcaatctccatcttcccgttatctccgccacgtgtttctctctttttgtctcctttcttcttctccctaatcttaatctcagaaaccaacaacatcagtagtcagtacccccacacacacagagagaccctttttcgattctccactttctcataaaggaacgatttttcgagatgtgggtcagtgttgatttctctcctcttggcttatgagtttcgaattcgaatctcaaactaaaaagctttttgaaacaagcaacaaatgttactgacacctaagatgtttagttcttggcttcgacaagatgtgaagaagatcctcaaacgcaaagacagtgatgctggtgaacgaggtaaatttcaaaacttttactttcaatttcgatttcgacttctatgattgataaccgtttcctttgaaacatctcttgttccttttaggattgattatccaatcttatcatagcaaacccgcattttttttaaattagggttttatcaccaaagagttgattttgattatgtaacaatggtttctctaattcaggaaaagcattggaggacttgagagcatcgttattcaacagattccgttcnccggaaactccaaagagacagcaacaacatcaacatcgtatctgtggcccaactgttgctcttactttcaatttcgttgttgctattagcattatcttcatgaacaaatgggtactt

SEQ ID NO: 144371 - DNA, 206 bp, Arabidopsis thaliana landsberg
cacaggctatctattaccaaaggaatgttaatcttattaatttttctcctcaaagagtagaggagattatgaagatagttggtgaggcaagaaccattccaaacctttctcgcccggtcgaatcgcttggatcagataaaaaagatgatgatgaagaagaatatttggatgctaatgatgaagaatggtatgatgattacgcatag

SEQ ID NO: 144372 - DNA, 2136 bp, Arabidopsis thaliana landsberg
tcggtatcggtttcgctaatcaggtccgtcattaaaaaaccttaattttaattacgttggtttagtttacaaataaccatccataatgtgtttctatcaaaattgatttttttttgtcgaacagaaaactaacaaaaataaaattgtctttaatactactatagaagttattaatgtattgaaagttatatttataaccgttataaatgtaccttggttttggaaaaaaagttatggactaagccaactactttcattaaacataatcataaaatagttaggtcaacttgactttatcaattttcttttgcttttctactacaacgatcattatattccacgttatagagtatatgatattacaattattgaattttgttattgatttgtttttctgctagtatccacaattccacatggtctgttcattagactgtgatgatgtctctttctctccatttccattgttttaattaattaaaaaaatatattgtttttgacgtcatattatatattttttagttaggaaaaaggtcatattcggacctatcttcgagttataacgcaatgacaaaattgaccgtgtttaacttccatatttacgttcatatctctatttgatctcgaacaatcagaatcttcactcacttaaaaaagtcagattaggacacgtatctacttaaacctgctaactacgtaactaaccctagttaatatcactatttacaggctgtgcacgtgtactctctgagatggctccatacaaatacagaggagctttaaacattggtttccagctctcaattacaatcggaatcctcgtcgccgaagtgctaaactacttcttcgccaagatcaaaggcggttggggatggcggctcagtctcggaggcgcggtggttcctgccttgatcataaccatcggctccctcgtcctccctgacactcccaattcaatgatcgagcgtggccaacacgaagaagccaaaaccaagctcagacgaatccgtggtgtcgatgacgtcagccaagagtttgacgatttggtcgccgctagtaaagagtcgcagtcgatagagcacccgtggagaaacctcctccgccgcaaataccgaccacatctcactatggccgttatgattccgttctttcaacagctaaccggaatcaatgtgattatgttttacgctccggttttgttcaacaccattggtttcacgaccgatgcttctctcatgtccgctgtggtcactggctcggttaacgtggccgctacgcttgtttctatctacggtgttgacagatggggacgtcggtttctctttcttgaaggtggtacacaaatgcttatatgccaggtaaggaacaattactacttttatttatctctaagatctatataaacatatactaataaagatgtgttggttcactctctgtgtaattgtaggctgtggttgcagcttgcataggggccaagtttggggtagacgggacccctggtgagctaccaaagtggtatgctatagtggttgtaacgttcatttgcatctatgtggcgggttttgcgtggtcgtggggcccactagggtggttagtaccgagtgaaatcttcccgttggagataaggtcggcggcgcagagtatcaccgtgtccgtgaacatgatcttcacgttcattatcgcgcaaatcttcttgacgatgctttgtcatttgaagtttgggttatccttgttttcgcctttttcgtggtggtgatgtcgctctttgtatacattttcttgccggagacgaaaggtattccgattgaggagatgggtcaagtgtggaggtcacactggtattggtcaaggtttgtagcggatggtgagtatgggaatgcgcttgagatgggcaagaacagtaaccaagctggaacgaagcatgtttgatttatcattgtttttaatgagagttttaagaaagaaagaaaaaagatttgtaatttctaatgtcgtaaaggaaaaagtgtattagcctagatatatattggtgtttatataattcaataccacatggagaaattatgcatatgattcttcgttaattgtctgtaattgttatactctttacttaaaccaagtgtttcctctttg

SEQ ID NO: 144373 - DNA, 650 bp, Arabidopsis thaliana landsberg
gatgtaaggagagggctgaactctattcgacggatttgtgcagactatagaatcaatggagtttttggtccacttgttgagttggttgattgcgatgaaaagtttttcactgcagttgaagtcactgctggaaacaggtatgcaggaaacctactgagtttacctcacacctacaattactgtgaatctactttttatcttatgatctactcttgtcatctcttgttctacgaccagcctgtttaacgtggtagttgagaatgatgatatttcaaccaagataattagacacctgaattctctcaagggtggacgtgtgaccttcctacctctgaatcggataaaggcgcctcgcgtcaactatccaaaagattctgatgcaatacctctgctcaaaaagttaaagttcgattcaaagtttgaaccagcattgggtcaggtgttccttttgttccctgtccaccacttttatgcccatcaatttattgtcactttctgagctttttatgtggctttctattctcatgtatgacactttatattgtaatgtgtcttgatgtaggtttttggtagaacagtagtatgccgtgatctgaatgtggcaacaagagttgctaagaatgatgacctcgattgtataactatggaag

SEQ ID NO: 144374 - DNA, 1469 bp, Arabidopsis thaliana landsberg
  unsure (1)..(1469): unsure at all n locations
ttcatacacatatatagatagtgtcttcattttccaaccatgaccggtagagaaatcctccacaagatgaaggaatgcgtcaaggtaatcgattctttcttctctccatgtcgcttgaacaatcgcttccaattcgatagtttcgagaatatggccagtaaattcgagtagatcgattcgaaattggatttgatagtagagcgtagcgaaaaatctatgtgaagctgtaacgtcagatctagatatacttgttggaatttgtgataccacaaatttaatttaggttattgatccccgatacgatactagatattaggtttcaacattggctgttgattctgtctctgttgtaatttgaaatttcggctctgtgagcaggagaaagttgggcttggtgcatctgcttcatctgcagattcagggaaaggtaagagcaagatgttgaagcagatcacacatggttttcatttggtgaaagggaaagcttttcacgagatggaagattatgtggttgccaaattcaaggaagttgatgataatgagcttggtctgtttgctatcttcgatggccatcttagccacgagattccggactacttgtgctcccatttgtttgagaacatcttgaaagaggtaattgagttttacccggaagtgtttttttttttaacttgagaatatgaacttgatgttgtccttgtttttaattgtgnnnnnnnnnnnnnnnnnngaacctgagaaagcgataaagaaagcttactatataacggatacaacgattctagacaaggcagatgatttgggaaaaggaggttctactgctgtgactgcgatattgatcaattgccagaagctggtggttgctaatgttggtgactctcgagctgttatttgccaaaatggtgttgcgaagccactctcagttgatcatgagccgaacatggagaaggatgaaatcgagaacagaggaggattcgtttctaactttcctggtatctaatcaattacatttctacatatataatctgatcatatatgtcgcatatgtttgattttgatttgttttgaaccacttcaggggatgttcctcgagttgatggtcaactggctgtggcaagggcatttggtgataagagtttaaagatgcatttgagttcagaaccatatgttacggtggagataattgatgatgatgcagaatttcttatcctagcaagtgatggactatggaaggttttgatctatcaatatctattttcaacaacttacttgtatggtcgctgattatttaaaatctcataggtcatgtcaaaccaagaagccgttgactcaatcaagggaataaaagatgcgaaggctgcagcaaagcaccttgcagaggaggctgttgcaaggaaaagctcagacgatatctcagtcgtcgtcgtgaaatttcagtgacattagctttcggttagtcttttcttctt

SEQ ID NO: 144375 - DNA, 736 bp, Arabidopsis thaliana landsberg
cttgctcgaacaaaaaaattctctccgcgattcttacaaaggtacgccaaaagcgatttcgaacattaacttcgtcttgattagatctttctgtgtaaaatttcattcaatttatgatcagttgttgctcacgaaagatttcgactttgcatttgaattctctgttattcaaaggaatctgaattttgggttttcccgatcgctcttaaatttttcagtttcatgttgaaatgttgaatctttgattgaaagtttcaatctttcattttggttcctctcagtgttcatattagagtaagttagttatatctgctaaagttagattcagatcagtgttctgtagtaaaattgatgcaagttattgtcaacaacctgagacattttttatacttatatgagatatgtttctgcttgcagcacaagtgagctagctttgagaaagattcaatttttgagccttaagattgtgatgggagttgtgtctatttcaagttcagctgcaagatctccactcgggttgggcaacgatcttttgacacatcggtcttcacttaaaaagccatccattgttgcttttaaagccgatgattccagcaattcagctttgatcattcctcctcgtgaacaagttttgattcctgctgaaaagcataatgagaagaagagagaagtaaaaaggaaaaagccttgtaaaaccccgaaaaaaccgctttccttggaacataattcggctcct

SEQ ID NO: 144376 - DNA, 1337 bp, Arabidopsis thaliana landsberg
ttttagctgggatattatctatgctgagtacgtgatggctgctggatatcaccatcgctccatcgtttggcaggtaaaattcttatacaagctttatatactatcttttatttggctagtaggttgtgataaatattcaattacttttattccctaacatagatagctgaagattattctcattgcgagttcctaattcgcctcccaggatattgtccaagtaagcaacatttctaattacagtttctagtaatcttttcttttattttttcctagtgcattctgcttactgccttaactttatttccttgttatctcgtagtgcctgcttttcgtgatgtcatcgatgtaccgttagttgtgaggagacttcacaaatctcgcaaggaggtctgtcaacaacatttcattgatcttatattcagtggtacaactaatccaaataacatctaatgcccttctttatcaggtgaggaaagaactcggcattgctgaagatgtgaatgttgttatactcaattttggtggacaggtatggctgtctgttcttatatttgatagtttcatggttttgttttaatttctcaaaactaatgctctgattttacctttaatgtgcatttgcgttgtttctcattgatcatgcctttttctcatgggcagccctcagggtggaacttgaaggaaacatcactaccgactgggtggctgtgtctggtatctcttaacagttatcttgcgtctgtttaatgtctagttactctcaagttgaggattttatgctgtttattaaacttatcaatatgttgttcaggtttgtggcgcatctgagaccctggagcttccaccaaattttataaagcttgctaaggatgcttatacgcctgatattatagcggcatctgactgtatgcttggtaagtaacctgattaagaaatagtcaatgaatttagatggctagtgcgtttctataatatatgcttccatggtttcagggaaaattggttatggcactgtcagtgaagccctatcctacaaggtgccgtttgtctttgtacgcagagattatttcaatgaggaaccttttctgagaaatatgcttgaggttcagctaaatcctctttttatattggttttcttgtcctttattacctgttctttcaatccaaaaatgtggatcgtatgttaagattttctggtcaaatttctttggcagttttatcaatgtggtgttgagatgatcaggagagacctattaatgggccaatggacgccatatcttgaacgtgcagttagcttgaaaccttgctatgagggtggcatcaatggtggtgag

SEQ ID NO: 144377 - DNA, 816 bp, Arabidopsis thaliana landsberg
gagagcgacagagagagataacgagagagagagagatggagaagatgagaggacatgtattagcagtgccatttccaagccaaggacacatcaccccgattcgccaattctgcaaacgacttcactccaaaggtttcaaaaccactcacactctcaccacttttatcttcaacacaatccacctcgacccatctagtcctatctccatagccacaatctccgatggctatgaccagggagggttctcatcagccggttctgtcccggagtacctacaaaacttcaaaaccttcggctccaaaaccgtcgctgatatcatccgcaaacaccagagtactgataaccctattacttgtatcgtctatgattctttcatgccttgggcgcttgaccttgcaatggattttggtctagctgcggctcctttcttcacgcagtcttgcgccgttaactatatcaattatctttcttacataaacaatggtagcttgacacttcccatcaaggatttgcctcttcttgagctccaagatttgcctactttcgtcactcctactggttcacaccttgcttactttgagatggtgcttcaacagttcaccaacttcgacaaagctgatttcgtactcgttaattccttccatgacctcgaccttcatgttagttcatttcctaactactctgtttttgccctagttactctgttctttttgacctagctaccctgtttttcccttagctactctgttttatcacctaatgactatttttctgttctctgatttccgtctacaggaagaggagttgttgtcgaaa

SEQ ID NO: 144378 - DNA, 1579 bp, Arabidopsis thaliana landsberg
cagagttgaatcagttctacaatgatctctgtctctcgattcttgtcgcctcaattctacgcaattccaaggttttatccgacaaaacccaatcttttaagtctctcctttgttcatttctgtaatcgtggcgaccaaactcaatctcaattgtttcaggagcttcgtgaaaatgtctgcttcagcgactcaaacggccggagaagtttcaatggggatcaagcctccttcacaccctacttacgatttgaaagctgttatcaaactagccctagctgaagatgctggtcatacaggttctctcttcaccttctaaagtttcgatttttaatttgtgaaattgagttggtcaaaaatatatgatttgagtgaaggagatgtaacgtgtatggctacgataccgtttgatatggaagtggaagcttatttcttggccaaggaagatggtattgttgctggagttgctcttgctgacatgatttttgaacatgttgatccctccttgaaggtgtttccatcatcttacttgaagtcttttgatttgttttgtatgtgtcttttagcttgaagtgatttagtttctaatatctcaggttgaatggatgcgaaaggatggagattatgttcataaaggattgaagtttgggaaagtatcagggaatgcacataagattgttgttgctgaaagagttttgctcaactttatgcagaggatgagtggaattgcaacccttaccaaggtcttttttttgtgtctctatagattctctctagtgattggtgtggttgcattcatattaacttagtgagcttatatcttataatgacaaggctttgttggcttagtacatggtttatagtaactcaacagtatccattccttatttcgttctatagtacagtgttagtagtgaactttgtccagctgatgagtctgtttcctgcagttaatggcagatgctgcatcccctgcatgtatactggagacaagaaaaactgctcctggtttgcggttggtagataaatgggcggtacgttccacactactgttatacctatttcaaacccaacctttgagagttgagacacatttgttgctatatttgtctcatctttggaatattaggattatgatacacctcaagttttcttgcttagcttaggtactgattggtggagggaggaatcataggatggggttatttgatatggtgatgataaaagataaccatatctcagctgcaggcggtatagtaaacgccgtcaaatccgtagacgaatatctaaagcaaaagaatctcgaaatggatgtagaggtaactaatctaaagctttcaaaccgttttgtggctgcaagttaaatggcaaacaagttgtaatcactatatatctttacttaaaggtggagacgaggacgcttgaggaagtgaaggaagtgttagagtatgctagtggatccgagactcggttgacgagaataatgctggataatatggttgtgcccttagagaatggagatgtcgatgtcacaatgcttaaagatgcggtagagctaatcaacgggagattcgagacagag

SEQ ID NO: 144379 - DNA, 351 bp, Arabidopsis thaliana landsberg
ctcgcagtttatgttgtcgacatggttttgttgcccggtgagatgttcggagagcacaagctttcgccgattgctcctgcccctaaatctaaatccggtggggttaccgatgactccggctccactaagaaggcagcgtcaccgtcggataagtcaggctccggtgagaagaaagtcggactagggtttggtcttggacttattgtcttatgtttgaaatttctcttttgaaaatttaatagcaaagatttgttttgctttctattgattttatcctgcgatgtgaggtataaatatgaaatttgttgattaagttccgtgaaataaaatgtgagatttttaataacatac

SEQ ID NO: 144380 - DNA, 2980 bp, Arabidopsis thaliana landsberg
  unsure (1)..(2980): unsure at all n locations
agatcgagcaaagatgtgaggaacataacgtcagtttcgagcagtctcttgcctgcttttgggactttcatcgaagatgataatccttcttccaaacctttcatcgttcttcactttgatcgtcgttacaggttcatttctcactaactaaacaacgaagaaatgttttttggttatcaaacaataaatagtgatttacagatttcataacttttctgtttctattagtccataaattaatgatcaaatgattcgttcattaattttcatatttttacgtcttaaaattgttatttcttattaatattcatatatcttaatttttttttaatctttccatataaaaattaatggtaggttgtgggaattgtttttggtgatattggttgggtattcggcgtgggcatctttgttcgagttggctttcgagaaagctgccgaaggagcgttattgaccattgatctcgtcgttgacttcttcttcgccgttgatatcatcctcaccttttttgtttcctacttggataatactacttacctcaatgtcaccgaccacaagctcatcgccaaacggtaacaaatcaatttgtttttatatgttaaaaaaaataacataagtaaaatgaataagttagaattgaattatatatgttgtgcattattataggtacttaaagagcgtggcttttgtgatggacgtagcatcaacgttacccattcaattcatttataaaactattaccggagatgtcggacgaggccaagctttcggcttccttaatttactccgcctctggcgtctccgtcgtgtagccgaactctttaaaaggttttttctttactactttctgtataatatgcaatattgaaatccacttatcatatagtacatatgtgtgtgtgtattttacacttcctttctttctttttttaacagactagagaaagacgcacatttcaactatttcgtgatccgagtcatcaaacttctatgtgtaagttttacttatattgaattatctatatgtggtccatacaatcactaaattggctatgtcaatctatgacttttattcaaattgtgaaatttgattcaggtaacgatattttggatacatttggcgggttgcattttatactggatagcctaccattatccaaggcctacggatacatggataggatcgcaagttgaggattttaaggaaagaagtgtatggttagggtacacttactcaatgtactggtccattgtcacactcactaccgtgggttacggtgatttgcatgcagttaatagccgtgagaagacattcaacatgttctacatgcttttcaacattggcctcacttcttatatcatcggtatcatgaccaatctagttgtccatggcgctcttcgtacattcgccatggtatataatcattcattgcttaaacccgaaaagattgtttactcattcatttactgtaccagtcgtacaataatcattcttctgctgaacagaggagtgcgatcaatgatatattgcgatacacaagcaagaacaggttaccggatacaatgagggaacagatgcttgcacatatgcagctcaagttcaagaccgcggagttaaggcaagaagaggttcttcaagacttacctaaggccataagatcaagcattaaccaacatctattccgctccatcatcgaagaagcttatctttttaaaggattccccgaaggcctcctcgtccagctggtgatcgtccatcaacaattccattttcttttgttccttgttaaacaaggcagtggtaattcattcttctatgctgttgttgtaggtttcgcaaatacaagcagaatattttccgccgaaaatggagataatcttgcagaatgagattccaacggatttctacgtaattgtatctggaggagtggtatgatatatctatatatcctctacatactcattcatttatcccgaaaagattgtttactcattcatttatccagaaaagattgtttactcattcttatttatatttgacttcaactgattaaaagaaaatttgcaattttaggatataattgcttccaagggtgtgagtgaacaggtaaaactctgaacaaatttcagttataagaaaaacacatttcatacacttaaaagattgagatagagtatgaagagttggttgataaatggtgaaggtattagcgaagttaggtcccggaagtatggcaggagagataggagtagtgttcaacattcctcagcctttcacagtgaggacacgtcgactttcacaagttatcagaattggtcatcataagttcaaagaaatggtgcagtctgataatgacgtcgacgccaaaatgatcattgccaatttcatgacagtaagtttacattcacaaaacggtagtaacatcaatatagtgtttatattgtaacactaataattaatgtttctttctttaatttcagtatcttaagggattgaatgatgagttaaaaaaagaaattccttttcttagagatttattagatgacgcagatgctcaggttcaggtatatataccttcttataacaaataatgcatagtcctctcgtcaaaattgtcaagtgagtttgagatgaaaacgcattttttggtgacaggaaacagttcagtcagaggaaacaccacaaagtaacgatgaggaaatagttacggtctcaagacatgaaaatggacagagtaagaagacatttttttttgttgaagacagagtaaaatgaacatgtttttttgtatgtatagagaccctttttttaacaatgacatttgattgcagtagaagagagaagaagagagggagttccaaaaagagtgataannnnnnnnnnnnnnnnncctaatcaagataacaaaaacaatggtgattccaacggtagacttatcattttacctgactctatccaacttctattcgacttagctg

SEQ ID NO: 144381 - DNA, 1643 bp, Arabidopsis thaliana landsberg
gagtctctcccagatctctctctctctctcagtctctctctaaacgcataatcttacaataaaatggtgaaactcgcgacggcgcgtgagattagaacgtacggccctcggcttgggaggagcagagccgagtacatcaacgcaggtctatacttgtttgcaaccgtggtgctcatcggcggtttcacagcgacaggattctcatgggaaccaagatccggcctcgtccttattctcttagctctcgttcttataaccgccgtgaatgttcatgatcttgtggctcatctagctggaatcgattaccggtaaatgatctcaagaagcttgcttaatttagtaacattattattagtaatcttaatagttaaatttaccataatttgtaagctcaaatgtgtctacgtgtgatatatataactttatattcaccaatgtgggggattaagaaaaacgttttagtaataagcttattgtttatgtgatttaaggttaaggttaatggagtatgatttgcaactggggctagtggaatttgcagtccctctggttcagatagcgggttcggtagtgtttttcttgggaatctttttcgtcttccatcaggtataacactttttttttgttgttgacattataacacttttattgttgtaacaaagtttcctggttcatcaaatttcacatatatgctttacgtattagtctatgagagataagagaactaaattggttatgtctcggtgatatcacattaatttataacaattataacaagtgtttgaagataaagctaagtacttgtggcatattaatatgaatatatgatattgtccataatgttagttgtggacttgtggtccatgtaaacataagtaatagagtaaaatgttgtgactaacaacttttgatgtgtgtctgactaattatatgtagtcacattccgctgtattttttttctggagtatttaggctgagacaaaacgtggatacagtggaagagagcatcatgcattaaacttgctgatagcgggtccgttactttggttgataggatcgattcacaactcatgccaaatctacgagagagcggatagtcatgttcaaattctacagcagtgtgtttacattcctttcttggttggatcccttctattcttggtttccgcagttctcaatagcctcgacatatccgggtcatctcgtagtggattgaagcttcttgtaagtacttggaaaccaaatttatcgcataaaaagtggttttcaaaatccgcttcttacggtaaataatgaattttcagggggaaagatggatttggcttgggatttccggggctacatgtttgaatgtgggaggattgctgaacgttgttaaggtttttaacttcgtccagatctctgggctccgcctcgagaaactacggggtggagctcaagaccgacttcttgaagggagagaaggatatctccctcttgttgctgaagaagaaagaataaggaaaatggaagctgatcacgaagcttctagtagagccaaaccccgggcacacacaacctccaaagccggagagggagctacagagaccgtggtggtatcatctccgacaccatacaaggatgttctcgttggacagatctga

SEQ ID NO: 144382 - DNA, 1061 bp, Arabidopsis thaliana landsberg
gcaaaacctaaactttcgtcttctcaacaaaatctgcagttccttgctcctttctcagtccaaattctctgatttttgattttttcgattcaatgggtttcaccaaagatcagttgcttgatcgacttcaggtttccattttcacctttaaactcaattacatcattttcatttcgcattgcttttgttggaatttgtcagataagattagataaatcattagcagagaacggaaaatgttacttcgttttatgcttgattctatttgaagaagttatgtgtattaatggatttggatgtgtatctatggattccaagttatgtgtatagtcgtcttgaactcagaagtttttcaatgtctacttttagattttaacccttaggtcaagaattttggtgttacacgttttgttagtgtcaatgtcaaaaaaatgtggcaatgtgaattgatgattaaggatttgtatcaatctttcaggaacttgagattgattattccaagtatgaacatccgcctgtactaaccgtcgaagaacaggtgaatataccttaaaatgttttagttttttaaaacttaagtgtatgatgtttaaagatggatttataaggctttgttttgtgtatttaaatcttcaggccaagtatgttagcagtagtaagggtgcactgagtaagaatctcttcttgaaggtagtctttcaaagcggtacaccattaaaggcattatcaagttagagtattagttgattgttaatggtgcatatgcctctattttgtttttgcaggacaagaaacatcggtattatattgtttcagcgatggtggatacgaaagttgacatgaaaggtaacatatgttttctccttttttcgtttgtggatattggcatagaaaaagtctctgggctttgtgaagtttgaatgtttttttttttggatgttaatgtgtgttccctgtgacttctaatttaaacagttttatctcagagacttggtcttggaaaaggagggattagaatggctccagaagaagcacttggtgagcttttgcaggtatttttc

SEQ ID NO: 144383 - DNA, 1636 bp, Arabidopsis thaliana landsberg
  unsure (1)..(1636): unsure at all n locations
acacaatttactgcgctgtcaggaataatggctcgtcattatgctctcagagatggctattcagagcaggtagtggattgttcaagtgtgtctgtgtatggttatgagcataagttgctcttgtgtcagcttctttgcttcatagatttaagctactatcctactgtggtatatatttattacatgtgctccattattatatgacaattgtgttcctgggatgcagatagcagaagctttgctggaaattacacttcctagattttctggagacgtcatcccaaaaacagatgcaggaatggttttggcaataggtgataggtaaattgaaagcctaaagttttgttgtctctcccatttctttctacgccaaacggttcgtcctgtgaacacaaaaccttgtatctggattgcgcggagctaaattgtatatgcttctgatatgataatttttgttcgaatttgtgatcctatatactaacacctatgcttgtccctatgactgtagattggatagccttgttggtttatttgctgctggttgccagccaagttcaacaaatgacccttttggccttagaagaatatcatatggcttagtaagtttatagatattctgatctgaaaatgagctattatgatatgtcattttatggttgcatgaggttatggatgccaagtaatcctttgtatgccacaggttcagattttggtcgagaaggataaaaatgtcaacttcaaacgtgttctagaacttgcagccagtgtacaaccgacgaaggttgaggcaaacactgtagaagatgtgagaatcaattgagtggcatcaaatcttgttatcaccatctgaaattgttcgtgacataattaactcttttatttgtttctaggtgtatcaatttgttactcgnnnnnnnnnnnnnnnnnnggttcgtgcaacttttgtgatgtttatctttttcgatttcccagctcttaaaatatcttacgggtccagttcttgaaacaacgttttatccttttttacaggttgacaacggagtaagccctgaagtagttaggtctgtcctagcagagcgtggaaacaatccttgtctggcagcacggactgcatacaaggttagtgacttgtgatatgatccaatagcagttagctagggaattaggtaatagttgagaagcctttgggcatcattctcctagtgaatgttgctgtgtcatagtgatattgctccaaagaagctaacatcgctggtgcttgccttgcagacggaaaagctaagcaaaggtgagatgtttccgaagatagtggaagcatattctcgtcccacacgcattgtccgtgggaaagatgttggtgttggagttgaggtacttgaggtttctgtctgatcaaagagcatttgtgaaaacttgcagcttctaacattgaatgatgcaatcaggtggatgagaatgcatttgagactccccaagagagaacgttgtggagtacttacacctctatcaaagatcgaattcacactggtaactcactttcttccctgctgtattctatcaaacaagctcgcttccaaattcgtctcactaaccttccaaatttcaggcattgaaatcgaggagttcaccgagatag

SEQ ID NO: 144384 - DNA, 1224 bp, Arabidopsis thaliana landsberg
gaattttgcaacgatgggacaaggtaaagaagttaagacgagaccagatcctcaagttgagattcaggttttattacattactctgctgttctttgttgattatccgagttgtaatctctctgtttcttgatgagctaagtcacttgttgttaatcaggaaagaggagaaatattcttcttttatagaccaaaggttaacaaagaagaagctcacagtgtggacgatgttcaaaggctatacatagtgatgcgtcctgagtctggtgagaatcccaccgaagagaaacaagaccctctttcaggtaaagaaggctccgataaagattccggtgacggagaggcgagtggtagctcctccggcgccaagaaccaaggtgaaggaggacacggcgtcgaggtacgtagaagaagaattaaaaacactacggattgagctcttattacaggattaataatatgggtctttttttttgtagaaagtgaacatcgaaaaacagcttctgctacgattcattgtgatgggtaagaaaagtcttcctgatccgagcaagaagtcgcaacctttttggggtttcgtggaaatggtgacgaccaatgttgaagatgttaaaaatgctctcaaaggaggtaagaatttcgtgaattgtaaaaggatttggtgaattttgtgatatatatttgttttctttgcagaggagtatgagacgaagactcgaggacatagacacaaacctccggcgagacgtgtcggagaaggaatatacagaattctccgacataaacctaatccgacaagaaagcaccacacacatcttgtctacaaactcgaattcccatcggtttcgcagaccagagaacacgagccacaagagtcgctgaacattgagccagaaggatccttcttgatccaaatacgaaatccagagcaaggaggaggaggtaggtcagggtttggtgggctacagagaaagagaaaggcccagtttccggtccatattcaggctcatttaggtcatacccggtttgggccagccgacccacctgatttcctgaattttgaaggatgtgagttgttactgatctctgcttccgacgatatagaggaagagttagggatggagttggagcctgagggtgacggtgaagaatcgacatgcgatcttttgaagactttcggggacgatgttgaagctactccgttgcttcgtggtacatgggagtaa

SEQ ID NO: 144385 - DNA, 515 bp, Arabidopsis thaliana landsberg
tgttcctctcttctctctcgatttcgaagtttccagcaatttagggttctttctcgattggagaattcgtatgttgttatcatgttctcttcattgttgtgctttctttgttaaattctagatttggaatcgaaattctagactaatgtttaggaaacggaacttagttctagaatcatttcgtcgattcgatagcggtaacgtagaaaccctaatttcatgggtcttgtgtagtcgcacctcaaagccgtctctgttctgtactagtgttaaacctgctagattaaactgggaagtttcttctcaagtaattctcaagaagaagctagaaacagctcttaaagatcaccgtgtagatgatgcttgggacgtgtttaaagatttcaaacgcctctatggatttccagagagtgtaatcatgaacagatttgttactgtgttgtcttactcgtctgatgctggttggctttgtaaggctagtgatcttactcgtttggctttgaagcaaaatccag

SEQ ID NO: 144386 - DNA, 2430 bp, Arabidopsis thaliana landsberg
atgcggtggctttgcgtgggtcctacagagaatacagcaagcaagaattactgtttagttgtctctttggttggtttggtgattaaagaagaaaagaacccaaagttttgcaattgcattgaccttacagctcacagagactctcagacttggctttcctatcaaagctcttttacatttgcattcaagcttaagcaacgtcaattccaactacaacaaccgcattactttcacttgcaaacaaaacacgaatccaaaacttccatttttgttcacaaatctcagcttcttctgattcaaaaagttttgagctttattgatccaatgttggttcaggatcgtgcggcgccttctcctgccaagccgccgaaatctcagatcagagaactaccaactcatcaacagatccgacgacgattcagtgaacccaaaaacttagatttctcgacttggttctctgagaatctctctagaattgctgtcttctctctcttaatcgtcaccatagtagctttcttcttcctctacaacaccaccgacactgcttctctcctttgtttccagtctcagtcaactcaatttcttcaatctctctctcgccctcaaatcaaatggaattcgatcccagtcgtccctgataaaacctccccgtacgctaatttccagacagagaaatggattgttgtgtcggttaccaagtacccaactgaggagctcaagagcttggtgaagattcgtggatggcaggttctagctattggaaactcggcgacacccaaggattggagtcttaaaggttccatctttttgtctctcgatgctcaagctgaattgggttatcgagttttagatcacttgccttatgattctttcgtaaggaagagtgttggttacttgttcgcgatccagcacggtgcgaagaagatctatgatgctgatgatcgtggtgaagtgattgatggagatctaggcaagcattttgatgttgagttagttggtctagattctaagcaagaaccgattttgcaatatagtcatgagaaccccaataggactgtggttaatccttatattcatttcgggcaacgttccgtttggcctagaggtttgccattagagaatgtaggtgagatcaatcatgaggagtattacactgaggtttttggtggtaagcagtttatacagcaagggatttctaacggtttaccggatgttgattcggtgttttacttcactaggaagacgactttagaagcttttgatattaggttcgatgagcattctcctaaagttgctttacctcaaggtgtgatggtgccggttaattcgtttaacactctttaccattcgtcagcctttgggggttaatgcttcctgtttcggttagttccatggcttctgatgtgctgagaggttactggggacaaaggcttttgtgggagcttggtggttatgttgctgtttatccacctacagctcaccggtttgatagaatcgaggcttacccttttgtagaggagaaggatcttcatgttaatgttggtcgtttgatcaagttcttacttgcttggagatcagagaagcatagtttctttgagacggtccttgatttgagctttgctatggctgaagaagggttttggacagaacaggatttgaaattcacagctgcttggcttcaggatttgattgctgttgggtaccaacaaccgagattgatgtcgctggaattggatcgcccgcgagcaagtatcggtcatggagatagaaaagagtttgttccaaggaagttaccttcggttcatctcggggttgaggagactggcacagtgagcactgaaatagggaacttgattaggtggaggaagaattttgggaatgttgtgctggttatgttttgtaacggtcccgttgaacgtaccgcactcgagtggaggttactttatggccggatattcaaaactgttgtgatactttcttctcagaagaactcagatctctatgtagaagaagccaaactcgatcacatttacaagtatgaatattctcaagattactatgtatatgttgtttaaagttcatgcttctaacggtaagtttgtatgtatatttcaggcatctaccaaagatatttgatcgatacagcagcgcagaaggatttttgtttgttgaagatgatacagttctcaattactggaatctacttcaagctgacaaatctaagatttggactacagacaaggtacaacattttcatcaatattttcagcttctctttgttctactatcttgatatgtgtatctgacaaggaaacttcttgttgtaaactggtgatttaggtatcaaagtcttggacatcagtgaaaccgaccgggaactctgattggttttctgtacaagcagagttagtgaagaaaactgtaagtaca

SEQ ID NO: 144387 - DNA, 1101 bp, Arabidopsis thaliana landsberg
atggcggaactgttgttggtggaaactcgaatcccacagcaaaagcactacgaatccaaaccattcccggcggtgatatcaccaccgtctgcttcgattccaattcctgctctgtctctcccactattcactcaaactatcaaaactcagaaacactatctcgattctctcttgcacgaatccggagcagtgctattcagaggttttccggtgaattccgccgatgatttcaacgacgtcgttgaagctttcggtttcgatgagcttccttacgtcggaggcgctgctcctcgcactagcgtcgtcggtcgtgtcttcactgctaatgaatctcctcctgatcagaagattccttttcaccacgagatggctcaggtattgatcaaaatcagatttgggtttatgtgaatttgattttttacatctaaagttttgagctttattgaatttgattgatggtgtttgttaggttcgtgagtttccatcaaagttgttcttttactgtgagattgagcctaagtgtggtggagagactccaattgtgttgagtcatgttgtgtatgagagaatgaaagataaacatccagagtttgttcagagattagaggaacatggtttgctttatgttagggttttaggtgaagatgatgatccttcatctcccattggacgtggttggaaatctacattcttaacccatgacaagaaccttgctgagcaaaggtacttcatcatcacttgtagattctcacagtgtatgttcgttgagggggcttcttgataacattgatgaaacttgctttgatagggcggttgatttgggaatgaaactggaatggacagaggatggtggagccaagacggtaatgggtccgattccggctatcaaatatgacgagtcgagaagccgtaaagtatggtttaacagcatggtagctgcttatacgggatgggaggataagcgaaatgatccaagaaaggctgtgacttttggggatggaaagcctttacctgcggatatagtccatgattgtcttaggattcttgaagaggaatgtgttgctgttccgtggcagagacgagatgttttgcttatagata

SEQ ID NO: 144388 - DNA, 3556 bp, Arabidopsis thaliana landsberg
tttcttttggttctctctctcacttgtgaagaagctcctcaagaagaaccctaaaaaaatgattcttctttgattttgtgtatttttacctgttcttgttggtgtttgtttgcttagttctgaagcaaaagctagggtttttcttcttcttcttgaaaatgccattgaaagaagatgattgttgtttattcgctgaagaatacgatggtccaccattatcatacaatatcccttgtgctgttcctattaacgtcgagaaaatcccagtcgccgccgttgtttctccggttcgtatttccgataacatgtctttccctgtgattcaaccgattttatcagtagagagtaaaaagtttctgatagattcggtttctcctacttctgttatagctaattgtggatctaatcagcttgaattggtttctgattcaatcactgtttctcctacttcggttattgaacatactgaggaagaagaagaagaagaaggtggtgatggtgaggattgtgaattgagtagctctggagagttattgttgaggtcttgttcagtgaaagagagtttagacttgaatgagtcgtcttcgaatccgttagtaccggattgggaatcgaatgagtcagttttaagtatggattacccgtcgtctcgtgttactggagattgtgttagtgagactaatggtgatggtaagaagcaaccagttgttactttcttgggtattgcttctgatgatggatttgaggaagaggagagttgtagtaaccagaggcgggttcgggttgtaccggttaagaaacagccgcagacgaaaggtaagaagggttcttgttatcggtgttttaaagggagtaggtttacggagaaggaagtgtgtttagtttgtgatgctaagtattgtagtagctgtgtgcttagagctatgggttctatgcccgaaggaaggaaatgtgttacttgtattggctttcctattgatgaatcgaagcgagggagtttagggaaatgctctaggatgcttaagaggttgcttaatgatttggaggttaaacagattatgaagactgagaggttttgtgaagctaatcagttaccagctgagtatgtgtatgttaatggacaacctctttaccctgaagagcttgttacacttcagacttgtcctaatcctcctaagaagctgaaacctggggactattggtatgataaagtgtctggtctttggggaaaggtgagtcatatttactgttcttttgagttttgtgtcttagtttctattgtttcttatatatatatatgatgttggggttctacaggaaggagagaagccttatcagataattagtcctcatctgaatgttggaggtcctattagtccggaagctagcaacggaaacactcaagttttcataaacggtcgggagattacaaaagtggagctacgaatgctgcagttggcaggagttcaatgtgcgggtaacccacatttttgggttaacgaggatggatcgtatcaagaagaaggacagaagaataccaagggatacatatggggcaaggttcgttgttttcgtctgaaatttatattccattcgattgtgttttcccctttgatttaaagattgcaaactttttgctgctttgcaggctgggactaagttactttgtgctgtattgtcacttcctgtaccgtcaaaatctaccgcgaatgcttctggggaacaactctatagcgcaaatagcagaagcattctggaccatcttgagcataggactttgcaaaaaattcttttggttggaaacagtggttctggaactagcacaatattcaagcaggtatgagtctctttgctgtatgttgtactgctcgttagcgtaagccttaaaatctacacaactgaattactttctcgtttaggcaaagatcctttataaggacgtaccattcttggaagatgagcgtgaaaacataaaggtgattatccagaccaatgtgtatggttatctcggtatgcttcttgagggccgggagcggtttgaagaagaagctcttgctctcaggaacacgaagcagtgtgtccttgaaaatatacctgcagatgaaggtgcatagatatttcaactcctactcattcttgaatttcagtttcctgagagaaatttgtttatggaccagatcaatcatgaatttatatacatgtatcccatttgagtcttaacttgatttatgtgtatgagcaggagatgcgaaaagcaacgacaaaaccgtcaccatgtactccattggcccgaggcttaaagcattttctgattggctattaaagactatggctgctggaaatcttggggtcattttccctgcagcctctcgtgagtatgcgccattagttgaggagttatggagggatgcagctatccaagctacatacaagcgaagaagtgagctaggactccttcccagtgtcgctaattacttcttggagcgggtaaataagtgcttcactatctcttgtgctctcaattttccattgcattgttcgttaatcgttacagcaagttattaatcttgaagctactttcccgttcttcaggctattgacgtgttgacaccagactacgagccatcggatttggatatattatatgcagaaggagtcacttcatccagtggtctagcttgtctcgatttctcatttccacagactgcatctgaagagaatcttgatccttctgatcaccatgattccttgctcaggtaagttctgattctcctttttgttttgtattattcaagtcagttcaaaaacatttaaagacatcttcttgtatgctttcaggtaccagttaattagagtaccctcgagaggcctcggggaaaactgcaagtggatagatatgtttgaagacgtcggaatggttgtgtttgttgtttccatgagtgactatgaccaggtgtcagaagatggaaccaacaagatgttactcacaaagaaactctttgaaagcattatcactcatcccatctttgagaacatggacttcctcttgattctcaacaagtacgatctcttggaagaaaaagtagaacgcgttcctttggcacgctgcgagtggttccaagacttcaatcccgtggtcagtcgtcaccgaggttcgaacaacggtaaccccactttgggtcagcttgccttccacttcatggcggttaagtttaagcggttttactcttccttgaccgggaaaaagctgtttgtttcttcaagcaagagtttggacccaaacagtgtcgattcatcgctcaagttagctatggagatattgaaatggagcgaggagagaacaaacatctgcatgagtgaatactctatgtatagcactgagccaagttccttctcaaattgatgtttttcacagtcaacaaaagagtctaatgtatatggtaacaactttcttgtgtatagattgccacgtagattgtattaacagagtactcaagcatcaatttacaaaccaatctcggtgtactaaaacagttacaatttaaccgattcttct

SEQ ID NO: 144389 - DNA, 1316 bp, Arabidopsis thaliana landsberg
attggttggatctatggttccgtgacggaagatattcttactgggttcaagatgcatgcccggggttggatatcgatctactgcaatcctccacgccctgcgttcaagggatctgcaccaatcaatctttctgatcgtttgaaccaagttcttcgatgggctttgggatctatcgagattcttcttagcagacattgtcctatctggtatggttaccatggaaggttgagacttttggagaggatcgcttatatcaacaccatcgtctatcctattacatccatccctcttattgcgtattgtattcttcccgctttttgtctcatcaccgacagattcatcatacccgaggtttgtaaaactgaccacactgctatttactatttgaatcccattttgtgaatgcatttttttgtcatcatcattggtgcagataagcaactactcgagtatttggatcattctactcttcatctcaattgctgcgactggaatcctggagctgagatggagcggtgtgagcattgaggattggtggaggaacgagcagttctgggtcattggtggcacatccgcccatctttttgctgtcttccaaggtctacttaaggttcttgctggtatcgacaccaacttcaccgttacatctaaagccacagacgaagatggggattttgcagaactctacatcttcaaatggacagctcttctcattccaccaaccaccgtcctacttgtgaacctcataggcattgtggctggtgtctcttatgctgtaaacagtggctaccagtcgtggggtccgcttttcgggaagctcttcttcgccttatgggttattgcccatctctaccctttcttgaaaggtctgttgggaagacaaaaccgaacaccaaccatcgtcattgtctggtctgttcttctcgcctccatcttctcgttgctttgggtcaggatcaatccctttgtggacgccaatcccaatgccaacaacttcaatggcaaaggaggtgtcttttagaccctatttatatacttgtgtgtgcatatatcaaaaacgcgcaatgggaattccaaatcatctaaacccatcaaaccccagtgaaccgggcagttaaggtgattccatgtccaagattagctttctccgacaagtcagcgaaggagaaattgttcgtaacactattgtaatgattttccagtggggaagaagatgtggacccaaatgatacatagtctacagaaagaatttgttattctttcttatatttattttatttaaagcttgttagactcacacttatgtaatgttggaa

SEQ ID NO: 144390 - DNA, 633 bp, Arabidopsis thaliana landsberg
catgtcctcctggcatcacttcccggcgattttttctgacaataatgatccgacggctatatatgatggtggcggcggcggatacggaggtggatgttactcgatgaatcattgtttcgcatctggatcaaagcaggagcagttgtttccaccggtgatgatgatgactagtctaaatcaagattccggtattggatcgtcgtcgtcacctagcaagagatttaacggcggcggcgttggagattgttcgacttctatggcggcgacgccgttaatgcagaaccaaggtgggatttaccaattgcctggtttgaattggtattcttgaaaacaatttacgatgaagaatttttaaaatttgtgtatatatatacggtttgagtgattagggggcattgggggatttatttacggttgattattattgtagtgttatagaactaaggagattaaattaaatagattggaggagaggtataaggtaacatatagaaattatacaacaatagtttaaatattcttttcttttctttttcatgttattatttttactaatgtataggtgatgattacacttagatgtttgtagcttgtataaattaatgcatgcatatatataaaaatatattaaca

SEQ ID NO: 144391 - DNA, 1642 bp, Arabidopsis thaliana landsberg
tcacaaataacaaaacgaaaatgaagttttggtcacgaccattaacgtttcttataattattatctatctcataattcaacaagtcaactcatcaccaccgtcattatctataccggagcattttctccgatgcctcgacactcaaccatccgaccacggcagtcccaactcaagaaccgccgtgatcccaacaaactcatctttctcaacaaacctaatgaacggcgtcagaaacctccggttcgcttctgtctccacaagaaaaccagaagccataatcgccgccgtcaccgaaactcacataagagcaacaatctcttgctgcaaactcctaaacctagagctaagaatccgaagcggaggccacgactacgaaggcttctcatacacttctccggtacctttcgtaatcttagacatgtacaacttgaacaaaatcgatatcaacatgaaagacgaaaccgtttggatccaatccggggcttcactaggccagctttactacaacattgcaagtaaaagcaaagtccacgcttttcccgccggagtttgtcctaaagtcggcgccgaggacatttcagcggcggaggattcggtaacctcatgagaaaatacggtttatccattgatcatatcatcgacgctcaaatcatggacgccaacggtaaagtgtaccgtaaccgtcaagctatgggagaagacgtgttttgggctattcgcggcggaggcggcggaagctacggagtcattcttgcctggaagataaaactcgttagggttccggagaaagtcacagtttttaaactagaaagaacggttagagaaggtgccgttgatttagtccataaatggcaacaagtagctccggttatcgacagagatttatttatccggttagagattaaaccgataaaccggaaaatctctaaaggtaagacaattaaagtctcattcatcggaatgtttcttggtttaccggagagacttttaaacataacgaaacagagtttccctgagctacatttaacgaaagaagattgtatggtcaagaaatggatcgaatctagtgttttctgggcgaattatccagaaaaagcaccgatagagttacttctcaaaagagtatcaaccaacgaatactactggaaacgtacttcagattttgttcaagcaccaatctcaaaacagggtcttgcaaagatttttcagactatgatcgatcattcgccacttccacgacgagtttggatgcaatggaatccatggggagggaaaatggctgagatagcgtctgatgcgactgcgtttgtgcatagaggtggtaatgttttcatgattgagcatttcatgaattggtatagacctggagatgagcttgaagagaagttcttggcgattgcaagaagttttaaagaagctatggctccgtttgtttcgaagaatccgagagaagctttctttaattatagagatgttgatatcggaattactacgccggggtataatgcgacgtatgaaggagctaagatttatggggatagttatttcaaagggaattatttgagattggttaagattaaagcccggttcgaccggactaattttttccggtctcagcaagggattccggttcttgcttag

SEQ ID NO: 144392 - DNA, 1280 bp, Arabidopsis thaliana landsberg
gcttactgattacagtttcagttccaaagatgagaactttgagctcccaattatactccaatggtggtctcacttggttccagaagaagaatcagagctctctgttcatcaagcatctcagagtctctaaaccatcgagggttcagctcatatctgctgttcaattccgtccgtgcatcgatattcataaggtatgaaatcaatttcaccgattagaaaatcctcactggctgttgagtgcagtgaattcatttatggatctatctctgtgtgatgtgattttcgatagggaaaagtgaaacagatagttggatccacacttagtgacttgaaagaggatggttcagttctcgttacgaattttgaatcggataagtctgcggaagagtatgcacagatgtacaaagaagatgggcttacgggtggtcatgtgataatgcttggagcagaccctttaagccaagctgcagctattggagcattacatgcttatcctggtatgtgtttagttgaatgtcacatggtgtttgttttatattgtttgaatttgaaatgtaaagttttgatgtgttatatatgatacaagatgatgaattctagacggtttgcaagttggaggtggaatcaattctgagaattgcatgagttatattgaggagggagcaagccatgtcattgtcacttcggtatagctgtcatctagcttgattgaatatgttatcatagtaagtatagctgatgataattatgttttcgttttgtatttcagtatgtatttaacaatggaaagattgatcttgaaagactcaaagatattgtgagcactgttgggaaacaaagactgatattggaccttagctgcagaaagaaggtgattctctgactagtttcatcttcagtttaatgttattggtcatgaaaagaagatcggcatttgaggtatttatatggttattttgttgcgcaggatggaagatacgcaattgttactgatagatggcagaagttcagcgacgtcatccttgacgagaaatcattggagtttcttggaggattttcagatgagtttctggtgcatggcgtagacgttgaaggaaagaagtaagctttaaatatctcaacgctgtgattttagtgtcttagagtaaattcgttttgcattgaaaatacagtatttagtcagtatgtactgatcagtggtgttaacacttcttctctcaaaggctagggatcgatgaagagcttgtagcattgcttggcaactactctccggtgagtaa

SEQ ID NO: 144393 - DNA, 2328 bp, Arabidopsis thaliana landsberg
  unsure (1)..(2328): unsure at all n locations
atgctcaaataacataaaatgtcttgaagaccagcactcaggtacatgtactccaaccgaagctttcgttgaatttggtgtgacagataaggaatctcgactcgaggtgctcaagtgtgggttaagattggtatatgcatctgatgaaccccagaagacaaactcagatatggatctttcattatcatcatctgattcaactccgacaaggaacggcagtccaacactactacatctagtggaagtgtatctaccaataccattggagaagaagattccaatatcttacatgaagcacaatctcaaaatgggagaggactttgacatccagaattaatcaactgagtcgtcgtctttccactctcttttgtgtttggctatgtcttataaaaccctccataatgtatttctctatgtacaacacgatttagatttgcgaggacgtacgtaccctactttatcactgcattgaacgagaccaatccagttacagagcaaatgctggggctgggagggtaatgatgacgttgacagttttgcccatgtcgattgctgtaatttacaattgagtgatctgatcctccaatttgctcttgttcagggttttagggatttcgcttaaatttatcgcaattcctaaattgcactcgtcaccactttcactctctctctctctccttatggccaccgtcgcgcttcttcgatctctccgccgccgtgaggtccacgcagcttccgtctctgcgtttaaatttgtaagaattggtccttaaagatcgttcctttcgtgcgcatattgttagcttgaaattgaggtttgatctcgccttgtcatattccagagttctgctagcgccggcgggaggacgacggagctccgactacacggagttagagatatcatcgccgttgcgtctggtaaaggcggagttggaaagtcttcaacagctggtacattttggaaccttcctcagttttatgtctctcctaaacagtggtcttcggaatttgaaattgataatgtgagataatctgtgaaatttgtgaatgatgtagtaaacttagctgttgcattggccaacaaatgtgaactgaagattggattgcttgatgcggatgtatatggaccatctgttcctatcatgatgaatatcaatcaaaagcctcaagttaaccaaggtaagatacatagatagatgcctcttgcattttagattaggcgtttcatgtatctatttgcatcatttgaagtacttctgtttttgaagatatgaagatgattccagttgagaactatggagttaaatgcatgtcaatgggacttcttgttgaaaaagatgcaccacttgtctggagaggtcctatggtgtgttaatttgttacatccttccttctagagtttatgtgaccacaaaaagatttcgttcggtaatcaagctttgtcgtattgctacaggtaatgagtgctcttgctaagatgacaaaaggagttgattggggagatcttgatattctcgttgttgatatgcctcctggaaccggtgatgctcaaatctccatatcccaaaacctgaaactctcaggtatatatacatatctcgttttgtttttatgatagaaacatattgtgtagttatcagaatgtggctttgttgtttctaggtgctgtaattgtatcaactccacaggatgttgcgcttgctgatgctaatagaggaatctccatgttcgacaaagttagagtacctgtatggtcatcttctttgtgatagttgactgcttcgaagcatatattttgctgtagcttcttaacctttctgcatttatatactagattttgggccttgtagagaacatgagttgcttcgtttgtcctcgctgtaatgagccttctttcatatttgggaaagaaggagcaccccgcactgctgcaaagaagggtttgaaacttatcggtgaggtaaataatcaaagccagaaccctctgttttntgcgattttgaatgctttgaagacccttatccgtggccttacataaaataatactatttggttgtctatatagattccactggaaatgtcgatcagagaaggttctgatgaaggtgttcctgtagttgtttcttcaccgggttctatagtgtcaaaagcttatcaagatctagctcaaaacgtggtgaaaggactcaaggagctaagagataatccagataatgagattcagatgaagctaaatgttcctcattctagccactcatcatagaacaaacacttatatatgaccaaagttttgtcttgctgcctcactttctcatatttttgtaccaa

SEQ ID NO: 144394 - DNA, 700 bp, Arabidopsis thaliana landsberg
tggtggtatagaagcaaaaagatggttatgctgtaaaaggtttagttaaccttgggaacacaatgtttctttaattctgtaatgcagaaccttctctctttggatcaatttacgtgagcacttctttaaagaggatctatctgttagcgggcctctcgtttcttccctgaaggaactatttgctgaatcaaattcagaggcaagcgtttttaggaatgagataaatccaggagaccttttcttttctgtctgttctcaggctccccaatttaggggatatcagcggcatgacagtcatgagttgctaagatgtttgttggatggtttgagcattgaagaatcgagcctgaggaagaagcttggtgtttctgatagtaatgacagttctacatatcagaaacctactctcatagattctgtatttggaggtgaaatatcgagcactgtttcttgtttagaatgcggacatttctcaaaagtgtatgaaccctttatggatctctctttacccgttccgtccatgaaacttcctcctaaaaagcaacaaatcctttctcaggcaaaggaggtccttaagaatggggcagtcagcaaagattcagaagttgtgtccgctaaacctgcatcggatcacaattccacagttccactctttccatcggatcacaagattcaaagcaggtctctgaaatcacaatag

SEQ ID NO: 144395 - DNA, 2495 bp, Arabidopsis thaliana landsberg
atgatcaaagcagacaaagtgttcgatgaaatgcctgagagaaccacaactaaacttcttatagttcgatgtcggaggaagactactacgaggtgttcgcttctatgcctgagaaaaacgtgacttagggctaggtaaaagggggagtatttatggtttcttccaacgcctagataagtggttatttgaaaataatcagattaaacgaggctattagcatctttttttcagggtgtggtagaagagaattctgagatggtattagcttgctgtttgatgggaacttttttgttgaagccagagaggagccctgagaaaaatatggttgcatgaactgctatatatatgattgaagcttgtttcagagatgggtttggtttgttttctgataattgagacaagttgaggttttagttaattaaagcacttttgctgtcatgtttaaagccggtgggaagatttttgggttcgtttcttccatgcctctagagtctgagcatgaccaaatatttgaagcttatgaaccttttttagaagaaagatgtggtttccttgttaaattttaccaaatggattttctaggaaaaggagtcgtctctaaatttgtggagttgttcttagtgttagctaaataaggacaatatcaactgtaccgttatagtatctgtgtttgtcagcagtggagagcatgaggaggcgcttcgttggtttaataagatgtatgctttaggaaaaaagtttcatccaaagctctgtgctctcagtagtgtgtgtttgtcacaacatctgctttggctgcattgatctaacttctatgaactgcagaattgtgaagatgagcatggcgtgtaacttgttagttcaaaattcacttacatattctcctagaacaaatcgattatgaactgtaagtacttaattaattctctgtatttcacttactctgatcaagtggcataaacgttaagacaatcattatgttctaggatcggacttcacaaattggggtacttgattttctctacttgtgatgtcaatctttttattagaatttcctcctatcactacttaaacgaaatctgatttgcattcaattattctaatcattattttaaacttcttactttgttaaagtatgtacatagattgtttactttttcatcccataattgaaaaatattcatactatattgtttgcagaaattacaattcaaaataacagtgaagctgaagatgttgaccctcattgcttccaactacaagaaacctattaagaagaaagaaaaacctattaagagctccacatttataaagttctattagagacggtggataggccatggctactactgttcatctcagctcattctccctcttcatccaatccagaggaagaagagacaactccatatcttccgtcaagagtctcaaaaaacgcacaggtttgtctccctcttctgccctcacctcacaaggtggcagagacatgattccaccagagggaaaatgcaatgatcacaactctgcttttgatttcaagttgtatatgatccgcaaagccgaatctgtaaatgcggctctcgacgtttctgtaccgctccgagaacccctcacggtccaggaagccgtgcggtactcattgctagcgggcggaaaacgtgtgaggcctctgctctgcattgctgtctgcgagcttgtgggaggcgacgaggctactgccatgtcagctgcttgcgcggtcgagatgatccacacaagctctctcattcatgacgatcttccgtgcatggacaatgccgacctccgtagaggcaagcccaccaatcataaggtatgttattaaatcatataaaggctcagagataatgttgaactagtgttaaatcagtgtttgatctaacaaggtatttggagaagacatggcggttttggccggtgatgcgcttcttgctttggcgtttgagcacatgacggttgtgtcgagtgggttggtcgcttccgagaggatgatccgggcagtggttgagctggcaagggccatacggacaaaagggttagtggcacggcaagtggttgacctaagcagcgaaagattgaatccagacgacgttggattggagcgtctagagttcatccacctccacaaaacggccgccttgttggaggcagcgccggttttaggagccataatgggaggtggaacagaggaagagatcgaaaagctaagaaagtatgcgagatgtattgggctgttgtttcaggtggttgatgatattcttgacgtaacggaatctactgaggaattgggcaagacagccggaaaagatgcaatggacgggaagctgacatatccgaaactaatgggtcttgagaaatctaaagactttgcagataagttgttgagcgatgctcacgaacagcttcatgggtttgattcgagtagagttaaacctttactagctttggctaattacattgccaaaagacagaattag

SEQ ID NO: 144396 - DNA, 2003 bp, Arabidopsis thaliana landsberg
atgattcctgatattacatttggatcacgcacccgtgttgctttggacattggctgtggtgtggcgagctttggtgcgtttttgatgcagcgtaacacgacaaccttgtctgtagcaccaaaagatgttcatgagaatcagatacagtttgcattggagcgtggtgttcctgcgatggtggctgtctttgccacacggaggttgttgtatccaagccagtcttttgagatgattcattgttccagatgcagaattaattggacacgcgatggttaatttctggctttttgcttctcctctaatgttatttgagctttagcatagtaagtgactacagcattttgtttctatgaattacacagatgggatacttcttcttgaagttaatagaatgcttagagcaggaggctactttgtttgggctgcacaacccgtttacaaacatgaggataacttgcaagagcagtggaaaggtttgtatattattcaacaaaataatttgtctgctatggagtttaactaaaatatgggtgttgcttctgcgctttgattatctttttcagaaatgttagaccttacgaatcgaatctgttgggagcttatcaagaaagagggatatattgctgtgtggaggaagcctctaaacaacagctgctatgtcagtcgcgaagctggaacaaaacctcctttgtgcagacctgatgatgatcctgatgatgtttggtacatatatgcatctgaaaatctagtttctttttaatagttttgagccttcttgcatagacattatatgatagaaccaccaaattctcagcttttcaattaaaactttctaaaaatctcaactttgtggttatggtttcctgttccaggtatgtagatatgaaaccgtgcatcacccgattacctgataatggctatggggctattgtctccacatgagcctgcacgtcttcatgatccgccagagaggctacaaagcattcaaatggatgcgtacatatcccgaaaggaaattatgaaggcagagtctagattttggttagaagtagtagagagttatgtgcgggttttccgctggaaggagttcaaactgaggaatgttctggacatgagagctggttttggagggtaaccatcaatcacaccctttttttgtttctgccttaccaaagtttatttgatctagtatttcttgattttggtaggtttgcagcagcattaaacgatctggggcttgactgttgggttatgaacattgttcccgttagcggattcaacaccttgccagttatttatgaccgtggacttgtaggggctatgcacgactggtacagactgataaccttctgctcttttgcttctaatcccacataactttaacttacacaagatcacatttaaagcttttttcacttacttcctctaggtgtgagccatttgacacctacccaagaacctatgatctgatacatgctgcatttctcttctctgttgagaaaaagaggtaaaaagatttaaacttcgtttttctttttatcctgaatccaaaaataaaggtcaggaacttgattggggtaatgaattgtggaacataggtgcaacataacaaacattatgctggagatggaccggatgttgagaccaggaggacatgtttacataagggattcactgtctttgatggaccaacttcagcaagtggctaaagccatcggttggactgctggtgttcatgataccggggaaggaccccacgcaagcgttaggattctcatctgcgataaacggatatgaggaaaagaaaaagaaaagatacgaaatcgaatgtgatgataagtctgctcaaagcgacagttcttcttagtgataaattgataattgtattattgtttatttgtttgttgatttgattgttgtagaatgaagagtgttaatacacttgagctactttaacacatgagtaacaaaaagattcattttctcagacaaaaaaaaacaga

SEQ ID NO: 144397 - DNA, 365 bp, Arabidopsis thaliana landsberg
tgaatttgcgcatggacgaggattctccaatcctggcggtagaacttgacgtggatgaattggctaaaggccacaaggcgtcataatgaagaacctttcttgtaccacattttcattcactgtgtcgatgtttcacttataaactccaatttagttgtcattggaggtgtttgtggcaaatgttggcccgttggtacttaagcttaatacgtcggatgctgttgagtgttgacttgaggaaaaggttcttcataagcttcatcctctctataataaacaaccatttttatagagaatccaccccatggttttaaaccgaaccggggaagactgtaccgttaatattaatatgaaattgatttctg

SEQ ID NO: 144398 - DNA, 616 bp, Arabidopsis thaliana landsberg
atgaatggtgaacgcacttttacgttttattttttcgttgtaaagattgagtctcctctccttttaggctatcagtttggcgagttacttgatggtagatatgaagtcattgctactcatggaaaaggtgtcttctctactgtggttcgtgctaaagacttgaaagctggaccagctgaacctgaagaggtggcaataaaaattatccgtaacaatgagacgatgtaggtggtgcattctctaggccccaactaatttttcgaattcatatgttttatcatctttatgcttttgtatctgattactgaatcacattttgtttaggcataaagctggaaagattgaggttcaaatattgaagaagctggcaggcgctgaccgagaagacaggcgccactgtgttcgatttctttcaagctttaagtaccgtaatcacctttgcttggtgtttgagtcgctccatttgaatcttcgtgaggtcttgaagaagtttggttgcaacattggtctccgactctatggtgttagggcttattcaaagcagctattcattgctcttaaacatttaaagaattgtggggtacttcagtgtgatataaaccctgcccccatgctg

SEQ ID NO: 144399 - DNA, 677 bp, Arabidopsis thaliana landsberg
attttcattaaacacttttcaaaaacaaatcataatctgttcgaagatgagccaatacagccaaaaccaatcttcaggtttgttgttcttacaaattaagcatcatatgttgtcaatctcgtcataatgatcatgtatttctaaagtcttatggtaataaaacttatgggcgccaaatcatatatgtgtaattaggagcttatcctacgccgccagtgtctaccggcccttatatgacaccgccaccgctcggttacccgacgagcgacatcagtcatgccacggtggctccggtggagacaaagtccaagggtgatggattcttgaaaggctggttagtcttcttgatactactttttgtttaatttctattataaccggggccgcacgtagaggtgtagtccaagggtgatggattctagtcttctttttactatcaaaccggatcggttattgtgtgttgaaatatagattaattttctttgctttaattttctaaatgcagtcttgcggccatgtgttgctgttgtgtcctcgacgcctgcttctgagtttgagaaattcgattgtttatttgatgtttcatgcaaattatttatcattgtattttgctttacccaaattatattttgggatttgtatgacatttggaacttctaatatttcttaattcattt

SEQ ID NO: 144400 - DNA, 1690 bp, Arabidopsis thaliana landsberg
  unsure (1)..(1690): unsure at all n locations
tttccctatttntgttatcagggatatcaaaggtgctattctccttgttgatgcttctggggttgtcaagcttgctgatttcggcatggctaaacacgtgagttctatatcctgtctagtattattgctgcttattgtcttttaagtgatgagtcgaatgtgaatatcatgctctttgtttagtttccgttttataataataaagttgctatttatattcttcagcttactggacaaagagctgatctctcgttaaagggaagcccgtactggatggcaccagaggtggtcattgttctatgatctttgaaataaactagactctataaaccctatatatatatatatatatatatatatatatatatatatactaatatatacgtttactcacacagctcatgcaagctgtgatgcaaaaagatagcaacccagatctggcttttgctgttgatatatggagtttaggatgtacaatcattgagatgttcactgggaagcctccttggagtgagtttgaaggggtaagcatacacatatgccttctactaaagagagttttttgtttcttctgatatctaaaaagttctttgtatcaactttgccttatcataggctgcagctatgttcaaggtcatgagagatagcccaccgatacctgaatcaatgtcacctgagggtaaagacttcctgagattatgcttccagagaaacccagctgagcgaccaaccgcatctatgttgctagaacaccggttcctaaagaactctttgcaaccaacctcaccaagcaacagtgatgtctctcaattatttaatgggatgaacataacggtaagcaaaacctcaatacaagcgtgaatctctctcatggaccgccctatgtcataaataacaaaatatcccccccctgcaaattgacaggaaccaagcagtagaagggagaagccaaatttcaaactagaccaggtcccgcgagctagaaacatgacatcctcagagaggtaatcaatcattcatcacagttacattggcataaagttttgttttttgaacctgaaacatgtttgtgaaacctgtgttcttgtttttgcctctctgttgtttgtttgtgtgtgcttggctttctacagcttcttcacacgtacttctttttctccagtgaaagtgggcaacagcagcagcaacaacagtaccggtctcccgatctaacaggaaccgtgaaccgtctgtctcctcgttccactctggaggctatcccaagcccgtgtccttcccaacgacctaagcccagcagcagtgacaggagaagaacgggcgtcacttcagatcacctttgatttgcagctcgagaggttaaccaatagaagctacttctatacgtattcttgtacacgtaagtgtatgtcaatgtacgtatttagagtttggggtcgcgtgggggaatacaattgggatgaaatgaaaatcctatgggtggtagatgaagaatattgtgtctgtaaaattataattcaatgttgaatcgatagaagaagcttttttctttcttcctctttgttttttttttttttgcttgagagagttgtgtataaattattttaacgacgtcttgtgtacctttggtttcgggtctgtatccacttttagatttagatccatttcaaacaaaattaatctctgattaaaa

SEQ ID NO: 144401 - DNA, 2879 bp, Arabidopsis thaliana landsberg
atgactttgttaacagccatatctccttatgctaattggctccaaggaaatgctgatatcaggcttcaggttggccattgtcctcttgttgtgttgtctttacattgtaagatagttaaattgatctgccatgtcctcaaattctgactaaattcatttacgcataacctatctgctgagcaggtcggaggtacagtagaccatccagtgcttgatgggtctgcttcattccacagggcgtctatctcttcacctgtgcttcgtaaaccgctcacaaactttggtggaaccttacatgttaaatcaaacaggttgtgcatcacctcactggaaagcagggtaagtagaaagggaaagctggttgttaaaggaaatcttccccttagatcaaatgaagcatctgctggtgatggaatagagctcaaatgtgaagttctagaagtacgagcaaagaattttttaaggtatactctgcaatatcaacgctgctgtcaatcattttaagcttttagtacataattttgatttatctttcttactttaactattgatatatcttgatgggtacatactttatcgtggatcagttttgttaattttatatatctagaccgcatgctgagatactgtatcgtctaggtttcttccattttgctcttctagactcatgttactgagcttattactttttctgattccgtgagagatcgtgttgccatatcagttgtcaggttgatactcagctgcaaattactggatcaatgttgcagccaactatatcaggaaatattaaattaagccaaggagaagcttatctgcctcatgataagggtggcggagctgcccctttaaatagattggcagccaatcagtatagtattccaggtgctgctattaatcaagcagtttcttcacgatattttgctcgattttttggcactgaacgggcttcttcagggatgaaattctctcagtcgactggtaacttacatgtttactagcaaaatttctacgtttttttctattttagtatttggactttgtatgtaaacacttttgtaatgatcttgctttgttttgcctgcaacaggtaaatcaaattccgttgaaaaggagattgaagaagtgaaaataaaaccaaatatggatatccgtctgagtgatatgaaacttgttttaggaccagagctgaggataatgtaccctttaattcttaattttgctgttagtggtgagcttgaacttgatggcatggctcatccaaaatttatcaaaccaaagggtgtcctaacattcgagaacggagatgtcaatcttgtggctactcaggttttgcctaaatctctgttttgattttatgtggtgaactcattcattccataatttcttgcaaagccaacatgtcctcgagtaaccaacatctattttgttttctaaacacaggtacgtctgaagagggagcatctcaacgttgcaaagtttgagcctgaacatggactagatcctctgctagatttagccttagttggttcagaatggcaatttagggttcaaagtcgtgccagtaattggcaggacaaacttgtcgtgacttcaactcgttctgttgaacaggatgctctttcaccttcggaggtaagtttgaagttaaaatgtagctgtactttggaaattgttgtgttttcttcttgatggaaatttctgtttaataatctccctttcgcaggctgcaaaggtgtttgagagccaattagcagaatccatattagaaggagatggacaacttgctttcaaaaaacttgcaaccgcaacacttggaaccataatgccaaggatagaaggaaaaggagagtttggtcaggcgagatggaggttggtgtatgctccccagaccccaagtttactctctgttgatccaactgtggatcctctcaagtctctggcgagcaacatatcatttgaaacggaagttgaagtgcagctcggaaaacgtcttcaggtcagccataaacattgaaatcttctttcttcaccatatggctattttttttttcaaaacctaaccaaaataagcactccacggttcttgctgtctgttatctacaggcctctgtggtaagacagatgaaagattctgagatggcaatgcaatggacacttatttaccagctcacgagccgcttgcgtgtccttctgcaatctgcaccttccaaacgtttgctttttgaatactctgctacatcacaagactaaatccttttgtcttcctctgtcggattcatatggatataagccgtttgttgcaaaggaagtgcattttggaatagcatggttttggtgactaccgacaagaaaaattattttattatttggtcagtctttctttgtgcacttcttctggccttttagtggttaaaaatgtaaaaattacattgtaaatgccttttgttagggaatgcatataaaatgttttgccacttcattgactgattggtgcaacaagaaagtaatgaaatttattatatccaacaatggacatggatggctcttctggatacttcagttaaactggaatgtcttacaaacacttgcccaagcagaacaaagacaacatccaaagatatacactgaacagactaaagcttatgacttactaagaacctaattaacaccaaatgctacaacggcttattggtttcatctaactatcattagctgcctctgcaagcttggcggaaaatctaagcttcttgatattcaatcttctttcctcaacacataacgctttccattcatcactcaactctcttctttttccagttccaaggttcatcagcttctcaagctgcaacttcttttgataaccacttaaaccttgc

SEQ ID NO: 144402 - DNA, 970 bp, Arabidopsis thaliana landsberg
gtgtgagaggaacaatagaaaggtacaagaaagcttgctccgacgccgttaaccctccgaccatcaccgaagctaatactcaggttagcttttaattaatacacctagctagctagttcgttaattacttaatttcttcttcttttagttatctgacctttttttcacctcttgtaacaatgatgggatcgaaattgatgaagtactatcagcaagaggcgtctaaactccggagacagattcgggacattcagaatttgaacagacacattcttggtgaatctcttggttccttgaactttaaggaactcaagaaccttgaaagtaggcttgagaaaggaatcagtcgtgtccgatccaagaaggtacaatcactaactctccatcaatctccttatcattgaatatatatccatctgattcttgcccgttatatttggtttttctctccagcacgagatgttagttgcagagattgaatacatgcaaaaaagggtaaaagttaaacctatcttccttcacaagtaacttaccccctactttattagcaacttctctttctgatgatcatctttttttattttctgttgtcgcttgcattgtaggaaatcgagctgcaaaacgataacatgtatctccgctccaaggttttatacataactctttttggcatttttgatcatcatttttttccggtagacaatctcttgatgtgcaaattctaaatatctctgcagattactgaaagaacaggtctacagcaacaagaatcgagtgtgatacatcaagggacagtttacgagtcgggtgttacttcttctcaccagtcggggcagtataaccggaattatattgcggttaaccttcttgaaccgaatcagaattcctccaaccaagaccaaccacctctgcaacttgtttgattcagtctaacataagcttctttcctcagcctgagatcgatcttatg

SEQ ID NO: 144403 - DNA, 318 bp, Arabidopsis thaliana landsberg
cagatattaacgaatgtaaagagcgttcggtatgtcaatgtagcggttgcagatgcaagaactcctggggtggattcaaatgcagttgttctggtgaccggctttacataaacgatcaagatacttgtataggtaaaatattatcaatcaagatttaagagtactcaaattccaccccacgtatctaatatacattgatgattgtttgttacagagagatatggatccaaaacagcatggtggctcacactcttgatactagctattgtcgcagtagccggtttagctggttatatattctacaaataccggttcagg

SEQ ID NO: 144404 - DNA, 4455 bp, Arabidopsis thaliana landsberg
  unsure (1)..(4455): unsure at all n locations
atgctttcttggccaaaaccggctgtctggccatctcttccacaagatgcttcctcggaggtgcttgaaaaagaaaaggtataatatacatatgctgcgtgaatgtgttatctatctgatagcattgttattgaagccaatcatgcttttagattcgagctaagagttagctgtacttgcatggcctctagtggacactgacataataccagggtattgtttgtaaatgtattatatgcgagatttagggctgcgtaactatatttaccatctgtttcgtttttcttttataatacttatctcctttttttggtaaaagactattcttcaagcaacttcaaggaccaagcactttggtattcaacggaaagccttacctcttgaaccatctgtccttctacgtgtggctaacagaagaagggcttctctttcaaccggaaatattcctgaaatgtttgatgggcgcccaagttttactgaagggtaatgaaatttgtaaaattcttttctttagcccttcttgttttcaaatttgttagtactttaatctcatatatcttcgaagtttccaggaagtattgcaaatcatcaccttctgttataaggaactaaaatgatatctttataaatttcgacagatcaggtttagaagcgtctccgagaacaccttcatcacttaaagtacaagcacctcccatgtcaagaacaaattcttcaccaggaaattttgagagtcccctagataggcctatgaggcttgctgaaatttttgttgcagctgagcacgctctacgacttaccatttcagatcatgatttgttgaagacattgtcatctattcaggatttcgaggtagcctgctaataccatttacataaggacaatgaagcttctgattttatgctgctctttattctagcttctcatgtatataaattttgttgtggcagaataaatatcttaacctaaccaaaggtgctgcnnnnnnnnnnnnnnnnnnnnnnnnnnnnnnnnnnnnagtcgttctcgatggggaaattgcagctgtctgcttcaagcacggaaaatatgatttggctgcaaactcttatgaaaaagtttgtgccctttatgcgggtgaaggatggcaagatttactggcagaagtcttgcctaatttagcacagtgtcaaaagattcttgatgatcaagctgggtacatgtcatcttgtgttagactactttcgttggataaaggattattctcgtccaaggagcggcaagcttttcagtctgaggttgttactcttgcacacagtgaaatgaagaacccagttcccttagatgtgtcatcattgatcacattttctggaaatactggccctccacttcagttgtgtgatggagaccctgggaatctatctgttactgtgtggagtggctttcctgatgatatcacccttgattcgcttagtcttaccttggtagccaccaacaacactgacgaaggcggccaggtttgcctccattagacatgacttttctcgttcttttcttcaattaatttcacgttcttaagaactttgtatatggactggctttcaggctttaaagagttccgctgcaactgtgctaaaccccggaaggaatactatcacttttgctctgcctccacaaaaacccggttcctatgtcttgggagttgttactggccagattgggcgcttgagattcaggtctcatagcttttcgaagggtggtcctgcagatagtgacgacttcatgagttatgagaagccaaccagacctatcctgaaggtagaaaatcattaattacatgcatgagtagtgatactcttgtggacacttgtttccttcgttgatacggtatacattttgttcttaggtttccaaaccaagagctctggttgatcttgctgcagctgtatcttctgctctgctaataaatgaagcccagtggattggtatcatagtacgtcctattgcttactcacttaaaggcgcgatcttgcacattgatactggtccagggctaaagattgaagactcgtatggaattgagatggagagatacatggacgcagattgtgatactggtgcatcaaaagctgaggtttttgttgaagatagtcctgtctcttcaaaacgggattcagaggtgcttaatctttgcgatggtaaaatagtgttctcagattgggctagcaatgtgagttctattctttgggtccctgttcgtgccttgagtgagaagcttgctagagggtcatcatcaggtttgcagcaaacaatgattttttgattattatgacatgtttgtgtcacatccactggccaatgatcatatttcttttgcgttaacagtcactccgctgaaacaagatattttagagggaatgagaactgtagctttgaaacttgaatttggggttcatcataaccagatatttgagaggtatttcttccttgttgtggcaaatcttgattatcgtttttccacatcaatcagaggtttgacctgactcaaacagttcttttcctaatcatatgtctcctgattttgttatgtgagcagaaccatagctgcacattttaccgatccctttgatgtgaccacaagggtggcaaacaaatgcaatgatggcactttggtcttgcaggtaatcaactttagctcctaaaaatttaagaatcttatccttaacctctctgttccctcaatcttattcacatccacccaagattgtcaatgaactcatttctatctacaggttatgttacactccctcgtcaaggcgaacttgatagttcttgatgtttggcttgatcttcaagatggatttattcatggacaaaatgatggaagaccgacttcaacgttctttccgcttgtcgtgtctccaggatctagagcagcagtcgtgttcagtatatgcctagacaagagtatgtcatcaggtattcctatccaacggttaatatgactcagatttttactttatatcttactttcagccatctgaagctatttattatttcagaacaaaacctattctagtatagatttggccagaaagctcgataggcttaggaagatccacttgatataaagtgtcaaacccctgaaccctgtcttgttctattcttccatacctcgtttcggtaggcttatctagtttgctcaaatcttagtttctgtgaactataaactataaagcatacaagtatcagtatcaggatgcgttatgtcgaattatgcaagtatttgggtgattgccttttacgtgtggctataaagcatacaatgcatatgaaaacagagaaatagaagttttattaactacaaactaactaattgttcgtacgacagaagggaaagatttgcagctaccagaaagcattctgaatatcaaatatggaatccatggggatagagcagctggagcacacaggccagtggatgcagatcactctgaaactgatactgaagggagagatttggtgttcaagagtgctattgttttgcagcgtccagtacttgatccttgcctcacagttggattcctcccacttccttctgatgggcttagggtcgggaaacttatcaccatgcagtggagagtggaaaggcttaaagaactcaaagaaagtgaagccgtggaacaacaacatgtaagtgatgtccatatcgagctactcgatatagcttcttcctatctattgaaactatatattactttaaaatatcggcatgttcatcaaaatttgttgttttatttacacaaggatgaggtgttatatgaagtcaatgcaaattcggagaattggatgatcgctggtaggaagagaggccatgtctctctctcagaggagcaaggtaagtaatcttttcttcttctcatttgttttagtgcaagaaacaacaaatgatgataatgttcttaattttgttggctggttccaataaatactacaggttcaagagtagtaatctcgatactatgtgtcccgttagttgcgggttatgtccgtcctcctcaactcgggttgccaaacgtagaagaagcaaatgtaagcagcaatccatcgggtcctcacttagtatgtgtcttgcctccacttctcagttcttcctactgcttacctgtcaagtaatagaatctcactctatattttttccaagaaaacattttttctgtatttttattttgtttgcgatcaaagaaatatcagagtatgggatcatcaatgatgagagtgatttttcttttgtgacgattttatttccgacttatggatctcatctcgcaaacctagactaactcgaagtcgactacactgactaaacacgcaagtgaagcggcttaccaacataaacgtactacaaatgtatttccttcttccaaaaagcattgctggcaatataaacgtactacagatgtattaccaatataa

SEQ ID NO: 144405 - DNA, 935 bp, Arabidopsis thaliana landsberg
ctgatctaacaatggcgacgaacaacatcgtacgtttgatcgctccaagccgatccgtctcctctagattcctcgagccagtgtcacggtttctaagctccggtacacctcctccgccgcaagctccatctccgaatcaggatctgaaccgggacgtgaagccagatcagaatcttcaacagaatctgcagatgcagaaggaagaagaagaggaaggagaaggaggtggaggtggagagtttgtgaacgaagatactggtgagattggagggcctagaggtcctgaaccgactcggtacggcgattgggaacaacgtggtcgatgctctgatttctgagaggattcatgtatccctgtgttttagcttgttcttatatatttctgggaaaaatggaaataaattcgttttatgtgtttatgtatttgcaaaataatggagaaaatggaagaaaatgtagtagaacttcaaattcgttgcctttatttggatcatcattctctggtgatcttgttattccagtattagttaataagttcttcctcaggtggttaaatgtgcatctatacatctctatctaaaaaatttgggacactttaatacaggtttagtgatgatttagaattaaggaaacaacaagagatgagtttaactaacctgagagttcagagttcaggtttgacattacccggtggttacatgagttttggtccaagtttaggcatggctgcatgggtcaataagttgaattttaaggtatttctgttgttcaacaacattgcaatgtgcacttctgtgataactgtaatggctctaatatgggcacaactgggtgatgcacttctgacaaagaaagcttttcgactagctttaccacttctgttaacagctgttgtatcaatgatgatggcatctgtggctggacttactcttgtg

SEQ ID NO: 144406 - DNA, 2070 bp, Arabidopsis thaliana landsberg
gtgtggtgttgttttatcgacactccactttacacttcacaagtcacaacacttataacaaaagtgatcacagaggccagagttgagagtttgacaccgtcatcaatggcagaaccggaggtgattcactcatggtctgcaccaagatctctcagcaccagcctcatgtactcctttgctcaggtactatacccaactttttcctatcttcttgacaaattttccaagtgttaactctaaagattatgatcatccaaaaccaaaactcaattctgctttgctcgttttgtctccactgagaaaaaattgagtacgtgttagctccaaagagtaaagactatgatttatctaataaataacttggaaagtttggaagaacaaaaaaaacatgagatcctagaaagaatgaatcactatggagatgatttagtgttcctttctttgagattgatgttgtatctatatatcagagacttgacactgaagttgtcgacgagccgttgtatgcatcatttcttaaagctacaggttttgataggccatacagagacgaagttctctccaagatggtatgtaactgatttgcacttcagtagttagtctttcttcgagtacacgagtttaattttccctcttgtaatttaaataggagtgcaatggagagaaagttgtgaaagatgtcatatatggatcaggatctaagaagtaccggtattgtaaggtaaaaatcctctctgattgtttgttttggacgcttcaaagttcatattaccaaactttctttgttgtgttgttctgtttttccctctgaacagcatatctcgaagcagcggcttttcggtttgccaagtgaactgatgagtagaggaaagcatttcatattaatacgaaatcctcttaacatattggttagctttctcatcaaagactggttctctgcagatttttagccaatgtttcatctaaagttcttctgtgtttattcgttttgcagccttcctttgagaaggtacaccctccatcatttctcgaattaggcttgggggaattagtgtcgatatacagtgatctctgtcagatgggaacaccaccagcagtcatcgatgcggatgagcttcagcgagatcccgaggttttgtttctgtaatatttaaaacagtaaaagtttcacaaagatgtctttttctcttacatattattccaaccatatccatgcagactacacttcgcggtctttgtgatgatttggagattccatttcaagcctctatgcttaagtatggtcctctcctatgagacacttaaagtttgttttatatcaaagcattaagtttcacttttgtttgttatgttctcttgaagatggaaggctggtcctataccagaagatggagtatgggcaccatggtggtacaagagtgttcacgaatcaacgggtttctcatctccaaagaagtatcctcgggtaaggctcttgtttcttgtgtggttaataattctgaattcagtctaagatgtgtttggtattgttcttttccttcagacatttcctttgtcgcattacgatttgctggagcgaagtctaccgctttacaacattctcaggagccacgtgaagcacagttcctccctcttgagtagtcccttgcctcctcctagtctcccagttcctgaaaatgcaaaacttcttgcatgggtcggtgacgagattttgcctcgtgaaatggcaaaggtgtgcttgaaatgtggaagaaaacttaacagctcactgtttgttgatttgcattttgaacactgattatgttctatttcttcttatttttgtaaggtttctgtttttgactcggttgttcaaggcggtgactctgtatgggaaggacttcggatttacaagggaaagatattcaagcttgaggaacatctagatcggtaagaacagttatatccagaaaccaagaagcaaataacagagttttctaagcaatcctgttttatatgttggaatcttgggttaggttgtttgattcaccaaaggctctggctttcgataatgttccagcgcgtgaagag

SEQ ID NO: 144407 - DNA, 522 bp, Arabidopsis thaliana landsberg
aatattgctgagccaatgcgggatatcagaagagctctcctggaagcagatgtgagtggtgttttattctgtttcatttaggttcttgtgaagaatgtggtataaaagtaattttgttaacaggtgagtctcccagttgttagaaggtttgttcagtctgttagtgaccaagccgttggaatgggtgtcattcgtggagtcaaaccagatcagcaattggtcaaggtaattagcaataaaaccggttcttgtttttgtttcattagcataatggttttgatatttgattcactctatgatgatcattttggtatcaatagtactcaagtgtggcttatcatggctttattgcagattgtacatgatgagctagtgaaattgatgggtggagaagtatctgagttacagtttgctaaatcaggtcctacagtaatattgttggctgggctacaaggagttggaaagacaacggtttgtgctaaactagcttgttacctaaagaagcaggtatgaattcagtgg

SEQ ID NO: 144408 - DNA, 1695 bp, Arabidopsis thaliana landsberg; identical to SEQ ID NO: 27877

SEQ ID NO: 144409 - DNA, 860 bp, Arabidopsis thaliana landsberg
ctgaaattaggaggccattcgtagatgacccttacagtccgagatttgaaagacctccaagttacagtgagggaagacctcgtgcttatgaacctcttcctggatcaaagcgtccatatgctgcactggtctgacttattgttttctccgaccagtttgtcttcttaattttgtttctttagactatgattgtttactctaacgagtgttcattattcaggatgaccttcctccccgttatgctgatgttgatgttcgtcattcaagaccccgtctggactatgatgttggcccatctcaatatggggaatcttacggggaccggtatgttctctttttatggatagcttcagttatttttggtagcaattttctgtgccaagtgtattattttcttacttccatgtttggtctaggattcctaggtctagtctaggatatggaagcagccgaaattctatgtcaaatcatgactcgcggggcccatacagcagtcgtcagggaatggattatggaggaggtttgattcagaacttggcttaacagagagcaatacttcgtcgagatacacttactgccttcaatggctataatttcataatgttgctttcttcaggttcttatagtggcagcgatgtaggaggtatgtactcgtcaagctatggtggcgacttacccagaagagatgtaagtggcttcacactttccccttttttatatttattttggaaagtcaagttgtgtaacattttagtattggatttacagggaggaggtagctcgtattcttcaatttactccagccgtggcttgggtggtagtagttactctggtggtggtccaggatcatactactgaat

SEQ ID NO: 144410 - DNA, 283 bp, Arabidopsis thaliana landsberg
tgaaggaactgaccaaaatttactaatcaaaccaattatagaaacctttgttttttcagctctaacaacaacactaaaaaccatgaaaagtaagcagtttatattaaggttgtttctagctttccatgaaattaaaattgccaaaaaagtgaatttgaccaataaacactaagctaaaagcctaaacttacgcagtaggaccctcgctttcctcacagttcatgccgaagccgcacaaacagaaaaagttgcaattaaaaaatttggggcaaaaaagcgatga

SEQ ID NO: 144411 - DNA, 771 bp, Arabidopsis thaliana landsberg
gaagaaactcttttaaatgccatgaatgaagagcttcccaagatacaagaacaagtttattacggccagatagaatcccatactaaggttttggacaagttgctttcggaaagtggtcttagccgttataatccacaggtagggagttttactggcagcatattttgtaatttgcttatgtgtttgtttattactaattccaagaagtgtctgcctctcgtaattgcattgtttgtagattattagtggaggaaagaacaaaccaaggtttgtgtcgctagcttcatctaccaggaaaggggaatctatgttgaatgatgttaactacttgcattctcctgaaagtaagtaaccatgcatttatatagtcaacagcgtctttcccacatcccaaatgtgttatcttcttatgcaaaatcacttgatatatatcttctcttatgacaattccagcttcagaggatgtgaagtatgtgactcatctccttgctgctgatgttgcaacgaagaaaggaatgaaattgttacatgaaggagtccgttacctggttagttgatgaattaatagctttctatctcgttctttacacacccttttcctcgaccctcagttggatccacacatgttattgatgctcttgtatattcatttagattggaggttccaaaagtgctcgtcttggagtcttatttagtagcagccagaatgctgacccacatagccttctatttataaagtttttcgaaaaaactgcttcatcgtttaggtac

SEQ ID NO: 144412 - DNA, 542 bp, Arabidopsis thaliana landsberg
accaaataaatgttggtactcatcatacatatataactaactcacctttttggtgtgtagataaatatatctaactaaccccattacatattccagtcatttgcttataaattataaccgtgacacttaccaattcagtcacttaaccaaacatgtatgaaaaggggttgataaaaaaagaagaccacatgtttcaagaggagaagagaaagacaaactatggagcaattggcttggctcgcttcatttcttgtttctttgcattccaattcatgaaaatcgcaacaacacaaccttcaacaacaacaacatcatccattgccgttatcgatagcccaatgtcctcccataaactatctgataggagagaaatatggagagttatcccaccatctacctattgtctcaaaatcgaatctttcataaaattcgccacttctccaaacgccgagaagtacgaatcccgtccttttgaatccggtggatacaactggtaagtagtattttatcctacattttgcatatgtctttgcataacaaat

SEQ ID NO: 144413 - DNA, 1471 bp, Arabidopsis thaliana landsberg
  unsure (1)..(1471): unsure at all n locations
aatgtaatccaatagttaatccttaaatttcctggtgacatcagtaacttattcgacaccgaagctcgtcatccttcatatgaacatggcactccacgtttacgaggatatcatgagaatgacagagaatctaagtgagaagtatatcattgggcacggagcatcaagcactgtatacaaatgtgttttgaagaattgtaaaccggttgcgattaagcggctttactctcacaacccacagtcaatgaaacagtttgaaacagaactcgagatgctaagtagcatcaagcacagaaatcttgtgagcctacaagcttattccctctctcacttggggagtcttctgttctatgactatttggaaaatggtagcctctgggatcttcttcatggtaagtctcatcgccaaacatagaaaattatttgaatcttctgtgacataacaacttgcttgtgtgttttgtaaaggccctacgaagaaaaagactcttgattgggacacacggcttaagaaagcatatggtgcagcacaaggtttagcttatctacaccatgactgtagtccaaggatcattcacagagacgtgaagtcgtccaacattctcttggacaaagacttagaggctcgtttgacagattttggaatagcgaaaagcttgtgtgtgtcaaagtcacatacttcaacttacgtgatgggcacgataggttacatagaccccgagtatgctcgcacttcacggctcactgagaaatccgatgtctacagttatggaatagtccttcttgagttgttaacccgaaggaaagccgttgatgacgaatccaatctccaccatctggtttgttctttcttgcctatctctctcagctgctctgtttannnnnnnnnnnnnnnnnnnttttcattgattcacttacatcagataatgtcaaagacggggaacaatgaagtgatggaaatggcagatccagacatcacatcgacgtgtaaagatctcaggtgtggtgaagaaagttttccaactggcactcctatgcaccaaaagacagccgaatgatcgacccacaatgcaccaggtgactcgtgttctcggcagttttatgctatcggaacaaccacctgctgcgactgacacgtcagcgacgctggctggttcgtgctacgtcgatgagtatgcaaatctcaagactcctcattctgtcaattgctcttccatgagtgcttctgatgctcaactgtttcttcggtttggacaagttatttctcagaacagtgagtagtttttcgttaggaggagaatctttaaaacggtatcttttcgttgcgttaagctgttagaaaaattaatgtctcatgtaaagtattatgcactgccttattattagtattagacaagtgtgtggtgtgaatatgtcttcagactggcacttagacttcctataagttcttgcctatctaagtttttctaaa

SEQ ID NO: 144414 - DNA, 1120 bp, Arabidopsis thaliana landsberg
cgagccgcacgtgtgctttccttttttctccttccccgttctctagccgattctctctgtctagggctcctccgtcttcttcttctcataccttcacataccacagaacctctcttctctctctattgattctctacgaagaggaaagtgtttttgaaccatcttgatcggaaacggcgtttcgaaactggaggtcgaagacgaaaaaaactcttatctcatcgctccggtgtaccgaattcgagaggtttttgttaggtttcgtagttattgattgattttgatggaagatagtgtggcggatgatgttataaagaggttactaggagcgaaatacgggaagacgacgaagcaggttcagttgacggaggctgagattaaacatctttgttctaccgctaagcagatctttctcactcaacctaatcttcttgaactcgaggctcctattaagatttgtggtattcattcatcaattttgttctctcctcttcaaattttcttttctacgaggatttgcgtagattatgtttgattatccatagaactagagattgattagctaaccagagttgtttaaatttagataaattcgtatgaatgatatttgtagaaatgcatatgaatctgttgtttacttgatcagttatcattagtgagatactaaaagaagttagaaatgatcatttgtctccatatcagagattcagagctgatagtgtattgttctgtgcatcttgtgtatcattttgatgtataatggtatcagaaagttgctaatgtgtttactaatacataagtttgttctgcttcattttatagcaaccagtagtagcatatgcttgtgtggcttgtgtttctagtgaaatagcacttctataatgggggttggtttcatgtttttaataggagatactcatggtcagttctcagatcttttgagattgttcgagtatggtggctacccaccagctgcaaactatttgtttcttggggattatgtagatcgtggaaagcagagtgtagagaccatatgccttcttcttgcctacaagatcaaatacaaagagaatttctttcttctacgtgggaaccatgagtgtgcttctataaaccggat

SEQ ID NO: 144415 - DNA, 1292 bp, Arabidopsis thaliana landsberg
gacataaaacttgctgacgtgacacccatacctttgtgtctgtatgtattatataaacgctatagaactaagagaagaagtatctaagtagcatcaaagcattctaaaagaagtttcaaagaagaagtgaaaatggaaaccactgcttttaacacaacatcacgaattggaaactggtcatcggctatttctccacctctacaaacatgtggatctttcaagtgccaattaccaacacgaagaggtgttattgtagctgatcttcgaaactcaaacttccgatggtaagcaatcaacgacgagaatcgccttctctatctgattttagattatgaataaatattaaatctgagtattaacttcttgctcaaggaggaaagcaacgacaacaagcagaggaaatgttgcagcagaggcagttaaaattcctacgtcagtaccagtaagagtggcgcgtgagctagctcaagcaggataccgctatctcgacgtgaggacaccagacgaattcagcatcggacatccgactagagccatcaacgtaccttacatgtacagagtcggatcaggttttcatcaccgaccttaaggttcctcttatgagaaagagtgaaaatgaaaaacaacttaaaactaacaccaagccataaccgttgcaggaatggttaagaacccgagttttctaagacaggtctcgtcccacttcaggaaacacgatgaaatcataatcgtaagtttcagttttgacattcagagactaaataaacccctatgaagacaatcccttgtttcacaaaatctctgatgcacgtaataaactacttctgcagggttgtgagagcggtcaaatgtcatttatggcctcaactgatcttctcactgctgtatgtgtgtaatatcacttcaatttatatagccgttatccggtttaggacaagcgggtttaatgtcgccacatgtacagggcttcacggcgatcacagacattgctggaggatacgtcgcttggacagagaatgagctgccggtagaagagtgaaaacaatcatagccatatcacctcctgtaattatcaataaattctgtagatgttctcaacgcaagtgattctgtatcaatcatcattattattctctaaaaaatagtttaactgtcaaatctatattgggtgaaaagctttaccgaacttcgaacaccacaaagtttacggaccaattaaggacggggatgcctacacacgtttagttttcgccgttttaaaattttaatacttaaactaatttttaaaagta

SEQ ID NO: 144416 - DNA, 580 bp, Arabidopsis thaliana landsberg
ccccagctggtggagttggtcggtgatagcaaggtacatactactcactcattgtctagattcctgttggttaagtgcaacattaaaaggacagattttttaattaaagatttaactttgttataacttttgggattaacaggatgtggaagagctaatgagtttaccacctgagaagatcttattgagatggatgaattttcagttaagaaaaactgaatacaagaaaaccgtcacaaacttctcttctgatgttaaggtatccaaaagtctctgatatcaagttatgagttctctagtggttggtttgaccaaatgtttctagtgatagactctttttatgtggcttatgacatggttttttgtaggatgcggaagcttacactaatctattaaatgtcctggcaccagagcacaagaatccatcacatttagcagttaaaagctcatttgagagagcaaaacttgttctcgaacatgcagacaaaatgggatgcaggagatacttgacggcgaaagatattgttgagggttctccaaatcttaatcttgcttttgtagcacatatattccagcacag

SEQ ID NO: 144417 - DNA, 2522 bp, Arabidopsis thaliana landsberg
atgaaaatttccgcttatatatcctcagctacaaaaactgatttatctcatgttgaataatctatcttctgtactcgattccgtgagatctgcagatgagacttctcgtcctcttgatgatatcataccatctttgcgcaaaacccgtaaactagcaggcatgtcttttctttcttttttcttttaaatatccctcagtttattgctaacttgacattggcgcagcgaagttttcttaccatggcttttcttattgtttatcattttccagaactattggatatgcctctcatgtctataacttcagcttgggaaagcggggagttatttagatgcaatttcacaagaacagaggtacaatctttttaaatcgtttgacctcgtgtcctactacctgatatatggattaaggctatttcttatggtgattattggatctttgattattggttatggtgattctgaaagcttttggaatgtacttggttacaggtacaagatttcatcaaagctatatttacagattcgccgctgagaaaagaatgcttatggaggatagacgaggttaaccagtagattggaaatgataaaacttaaaaagaaaactcaagacttgtgagaagaagcaagtgaaagcctattttggcaaaagagccatgaggtattttaatgtcagcagcttgtaacatcgacgacgcactcttgtctaagaatatatatgtaaagagagttttagctgatgagtttaaaactttaggtttaaaagcgtgttccagattttgttgtacatttgggctttagattcaacaagtaaaacgctctgggtaacaacaattttccggtacaaattctccaaatattgcattttccagttagctaaaaacttgaaaacccttaactaagaaactaatataaaaaaaaataaaaataaaaaagaagaaactgataggatattgaaaaccgtaacacatgaaaacactaaatatttctatgaaattattgatacaatgattttcaatgaaattaaacttttgatatacttattcaaatataatgtatgatgtgtttagatgctaatattatattaaaaactatttcataaactaatattaagttatgaacactaggaaaatattttggtctcataaaccaacaaaattacattaagaaatagagttaagagacattggtatttttccttttttttttttgtcgacattggtatttttccttatgttggccacatgtttaaaatgttaacaaaatcacataacggtcataattaagggccagaaaaggaaaaatttcattagaagatcttattagatttagtgatctatcaagaacttgagatgacgtcatatatttctatttaataacaccacacatctatctatctctaccttctctcttactttcaagtttccattctcacgctcattgtctttcctctagctctctttctttctttcttcttccccatctttaggtttcttgcgtacaacgttacaaattctttttacaatttcccatgtcttccagagaatcgaagagaatggatgaatctgatgatcctagggtttcagagtcgagtgaattctcaaacttcgagatgttgatacaagtcgctgtcatggtttacgatcatgagtacggtactcatgacgaacacaagtcaaagaccattgacgaagatacagagacagaagcaagaatctttggagatacaatacctagaaagaacagaactcaccgatcatcttcttcttctaacaagacgataacaccatggacgcgtgtgatcgaacaacagagatcatctgaactacaaaaccctaacccggaatctgaaccttcttcttcctcttgcgttacccacttcaagaaacgtcgccacatggacaaagaagagagtactcgccagagactcaaaatcgatagtcctttagaggtgaaaaccaatacaaacatcaccaccggaatggcttttgaaagtaatgaagagagaagagaacagctacaatccaaaattgatctcaacgagaaaactctataagactgatctcgctagtcttcaagcacgtctctcagtaccttttaaacaagtgaaaagtccagactttttaacagaggaagaaacaagaatcataaaggaacaagctttgaagattcgtaaagaaggtttaagtgttgattttgtggatcctttgttgaataagtatgttcttgatctgaggaagtggaagatgagtggaaactggtattatgtctttgttaatggttggaacgatgtggttactgctaataggttcaaagttgatgacttttttcctctctggtcttttcggtctggaagaggtaaactctgttttgctcttgtccctcctacggcgagccacgacggcgcctctacttcgggagaatcttgccacgaaaaccctcttcctgatgacgattccggccactgtggtggtgaatgtagcaacggatgctcttctttcggtgattctccgtctctctga

SEQ ID NO: 144418 - DNA, 4793 bp, Arabidopsis thaliana landsberg
gggataaacgtgccatattcaacatgattataacccaacttgttttctggtcatggaactggaaggctccaacaaatttggcggtactcacagaaaacaaggaggagatggaacaagaccccaaatttttcagatttcgtcaagctttagaaaataaaggtttctttgttgccgtagaacaccctgagacactcatcaaccaagaaactgccgttgaagacccgccagatgactccccaataccttactatcaatatgcaagtgacaacactcttaagttggcttactggagcaaagaagatgatgaagctttcagatctaaacatgaagaagtttgaggttaagaacgcccctgacaacaatcgaacctctttttccttggcgcagacaaatcttaagttgtatcatcttttttttttggcttttacagtattgcgtttgtgctattttaagactgtcgctttgaaatacaattcttaagtcatccatcacacttcttgattgtggatttgacatgagcactcttagagtgtgtaggtacgttctgaaagacttctcttttacattgatcaactaagatttcagaaaatggctgcttttgtctcaagtgttttgtatgtttggattctgtctccataaccaaaagctgttgtaagaggattgtttcgttatcagttgtttgaaatgagtgatgtttaaggcaccatagttgtgcttctctctgagtttaattgtttatcagttgctacataattgtcatctttatggtagattgtatatcataagcctcatgctctattcttccttgcatatatttgcatgatgtactctacgtcacctgctttctgcagattggatctatcatctctggaaagttttggtacgcgtatttagtgggatgatacattgatacccatctctattttcattattggcctactttaggcaaacaacagatttgctctgtaggaatgatgcaatcatttacgtttgctttttatttatttatagattcctgcatttggagcatacaaagcttctggtcttagtaagggattattgtcacacggttcagaggtgatcaaaattgtaagttgcatgcacttggatagtaccatcagaataaaatgaaaacttcggttctcattatacatgagaaattcaaaaacgtatcaaccgaaccggattaaaatcaacgattaatgtataaccggactcgagtcgattcaatttgaaatgaaaggataactcattagacacagagacgagctttttagtttgagctctctctctcactatgtctctctcgcaaacgaatttcctcagttcttcattactctcatcgagccatgacctgcgaattccttattctagagcggtactttcttatccccgtatccaaacacaccggattctctgtgctgcgaagcgaatcgggaagcggagatatccttctgagaggaggaagctgaggacagagcagaaggaagctgtggctaaggttaagaacaagcttgaaggagtttggcgtctctctaagctcggagttcctgttggagatgaccctggaaaggactttctcgggatttcagaaggtttgcttcaagccatcgctaaagttatcgagtttccggtgagttctccggtggaaagttcgaaactttatcttatggctatgatgaaattggattttttgataaattgggttttgtttcaggttgcttcaatgctgccagaagacgcattttcagtgattaggaaatcttttgacgctaggaaggtaggtttcagtttgattccacatattatgttgtattgtagtttcaagtgagtgaagttttcatcttttgtttagattctgaaagaagccaagtttgtttacactgtggatttggatgtgaagacgctccttgagttagagcctcgtgctcatgatttcattttccggttagagcctaagattgggcttattgaacatgtgcctaccgagaagagtgtttcaggggacttgatcagtgtggtgaatgactgtaaaaggatcaacagtgagacagcatccggagaatatgaacctcagattatcaatggctctggagatccacaccatcatggaggaggacgaagcaaaccgaaaattgcagttgttggtggtggtccatcgggtttgtttgctgctcttgtacttgcagagttcggtgcagatgtgacattgattgaaagagggcaagcagtagaagaaaggggacgtgatataggcgctttggtagttcgcaagattttggatatggagagtaatttctgctttggcgaggtttaaaaaccttctcttcactcttttgctagttttctttgttattgtcaaagtcatattttagcacttatgcatcgcagggtggtgcaggtacttggagtgatggaaagcttgttactcgaataggaaaaaatagtgccaccgttctagcggttagtattttgagactgccaaatgttaaattgaagcacttcatgtttgagtacaaaaggaaaaattgtgaccactgcgttaattgtttacaggtgttgaaaacgttggttcgctttggggctcctgagaatatattgatcaacggaaagcctcatctaggaacagataagctagttccattactccgtaatttcagacattatcttcaaagtgcgggagtaagtttagaatgagagattgatctatgtctctctattactttttaatgcttttttttttttttccttctcctctgagcattctctttgattccatttccatatacttaattaggtgactatcaagtttggaactcgggtagatgatcttctggtagaggattctcgtgttgttggagtcagggtttcggattcaacaaaccaattgcagactacctcccagaatttaaaggttgatgcagttgttcttgcagttggtcattcagcacgtgacacatatgagatgcttcattctcgtaatgtcgaattgattccaaaagattttgctgtaagttccttgtacatatttcttgagtgtgttgttttataaaatatccattttgaatcaatatatttggatacttttatcttccctggcttggtattatcatttgatttctatcgatttgtgtggatcaggttggtttgcgtattgagcatcctcaggagctaattaacagtatacaggtttgttcgattatcttaatactataatcttcaatatatcagactttgttgtaccttatcgttattcaagtcttgacttgtatataaaacacctatgttcttgtgatggtctttctttccagtactcggatttggctaatgaagttcttaaagggcgaggtaaagtaccagtggcggattataaggttgttcagtatgtgaatgataagaccgaggatctctcgcagtcttcatcgaaacgcagttgctactccttctgcatgtgtcctggtggtcaggtacagttaccttaaagagtgtcttgctgtttttttttccattttgatttgtcacgaataagcctgtttccatgtattttcaggttgttctcaccagcacaaacccaaccgaactctgcatcaatggcatgtcattttctcgccgttcatccaaatgggccaatgctgcactcgtcgttacagtctcagcaaaagattttgatgttctcaatcttaaaggacccttagctggaattgagtttcaggtatcaatctgaaagtggattactattagtactcatgagttaaattcaatatttctcctttgatttgtttatctctagagagaatttgaaagaagagcagccataatgggtggtggcgattttacagttcctgtacaaagggttactgattttctgcaaaacaagctatctggttagtaacattttccttaatacttagttctcacttttatggttcaaattttgtttgttggttcgttttgtggtgattatggatactcttgtgctgttaaatagaaacacctttacctccatcaagctatagattaggagtgaagtctgcaaatctgcatgaactgtttcctgctcatatcacagaggctctgcgagagtctatctctatgtttgaaaaggaggttggttagacattttctcatcactacatatggtaaacaaacctgtagcttctgtttttctctaaacttttgaattttcagttaccgggattcatctcagaggaagcactcctccacggcgtagaggtatgttatatatcttccttgtcctgaatcagtctactcttcagaccagagataacaacatgtttcaactttgtttaaccagacaagaacaagctcccctgttcggatacctcgaagcaatgagacgtacgagagtacgagcttaaaaggtctatacccagttggtgaaggagctggttatgctggtggaattgtaagtgctgcagtggatggtatgttttcgggttttgctgttgcgaaaagctttgatctctttgatggaaccatagagtcagttattggaaaggctcaaggtgctggacttgtaaagtactgatgatgataatgatgaggatgatgaagaagacagtcatagctttcatccatctttgtttgttcggcttttgtcgaggtaaaagaacatcaagggggactgctccagaatccagttttgttgtgccatagctcaaggacttatacagaaaaggcccaaatcagaagcgggaaggaatcatcatcagcagccagaagagaattttgccttagttatgtaactaacccaaacagtagtactgaagaaa

SEQ ID NO: 144419 - DNA, 734 bp, Arabidopsis thaliana landsberg
gataataatgttgagtgcatctgcaaataagctatcaagattaaaggaacaagcagaggaatatgcagctttgattatggaagagttagatcctgaaagacttggctacatagaggttggttttaatacacactgtacaaatctttgaatctttttccaccatcacatgctttgtttccgtgcttgcatgatgtgagtattatattattgcaaaatattttcaatactttcgttacacaaacggaataaagtatgtaaaaccgccgcccataaataggaattcaataattcttttatataatgtatgacctcacatgttataagaaaaaaggagccaatttcttttaccatagcattaaattatttcatgtttgctttttttctactcttatctcattttgctgacacctagaatagttgtccattataaagtatagattcagtagctcaaatatagtataaaaactttttttttttctatttcatcaactcaatggtaggtgaagtagttacaatagactatttcaattgctagctagaagatagagtttgaaaagaaaaaaaaacatgtgactgctacatcttgaatgttatatttatctatagaagttaaatgattcatcaaggcaaatatttcatacattttaatgctcttttattttcttcttccgtagctatggcaactagagactttgcttctacaaaaagacacatacctcaattacagacaagca

SEQ ID NO: 144420 - DNA, 333 bp, Arabidopsis thaliana landsberg
ctttctctctcattctctttttagcttttcttagtatatagtacacgttcgaagaagaccgttcgtgtgcaaaaacatgaggtgtagagcacttaacattcgtagaagaaagagagtaatggttaatgtgagctcaaggaagctcatgacccgtctacggcgaatggttgctccggagacgagtttttccggcgaggttgacggtgctacactttatcgactcacggctgatcacattttcttacttcaagcaagaatccaacttcttcgtcgtatttcttctgtttgtggtctctagatcgaagatacacgtggctaaaaaaagacgaagaa

SEQ ID NO: 144421 - DNA, 935 bp, Arabidopsis thaliana landsberg
cacacttgtcgtctcttctctctctcgcagctcttctctattttcagcaatcgcctataatattaggtaaagcttccttctttttgtttaccgttttcgttttcttttcttctcgaatctgtctttgtcttatcacatcccctgaagtgttatactttttttttttttgggtccgattcataatatctgttttgtcttttttttggatctatgttctaaatcaagtagtagtagtaatgaagtaactattcctaaagaaattaaaggataagacttttttgtttttcttcttgagggtttgtgtgatcttgcttttactccagaatcttttatagatctatcttttagatacattcaagaatggtcaaagttatggattttgatccaatcttatatttctctctgaatccaaggatccaatttatactctctgtatcacacacttctatgtatatgtttgtgattgattgcttctggctaaaactttataaagttttgacatttatatgaacgttcctgccttttgcttttggtcttctttgcttgctcttatgcaagtatacttaaaagcactatgtgacacatagttgtgtggtgtgttatactcctaaaccagtttcaattttctggtcttgttctctcttaggtaaagctaaaagggtctgattcgtttgttttttcactgaagaatttggaaggaagtgattccgttgtgaaacagaaaagaagtatgggtactcacattgatatcaacaacttaggcggcgatacttctagagggaatgagtcaaagccattggcgaggcagtcttcgttatattccttaacgtttgatgagcttcagagcacattatgtgagccggggaaagattttgggtctatgaatatggatgagttactcaagaacatatggactgctgaggatactcaagcct

SEQ ID NO: 144422 - DNA, 856 bp, Arabidopsis thaliana landsberg
atatgtgaaccgggcgttgtttcttcttcacttcacttgtgggctatctcacccaaatactgctgccacatatatcaatgtggctatgatggaaaaagaagtagggaatgatcatctagctctaaggtacctgcatgaagctctaaagagcaataaaagattgctaggagctgaccatattcaggttcctcccttatctatcttgcctcaatttgcgcgcattcttaaactaatcatgctttctgtgttttactttgccagactgcggcaagctatcatgcaatagcagtggctctctctttcatggaagcacattcattgagtgtgcaacatgaacaaactacacttcagatacttactgcaaaacttggagcagatgaccttcgtacacaggtgattgatttgcttctggttcattcgcatacaaatctcagacgaatattaatttcttactagcaaagcaacaaagtgaacgttttgaactctgagacatacatgtttgttttctccatttgtctctcacaggatgctgctgcatggctcgaatattttgaatcaagagccatagagcagcaggaagcaggccgaaatggaatcccaaagcctgatgcttccatcgcgagcaaaggccacgttaggtactaagatggaaactcctagaacacataaaggatatggtaattatttcattggcaccaaagtccgaccttctcgggcaggggatcacatctcctgtactatatcagttctcatccatacactaacggaaacgttactcacacgaaacatccgcgtgccagggtaatccctaaactataatatcctcgctttcctcaggtcactcattatggattaa

SEQ ID NO: 144423 - DNA, 949 bp, Arabidopsis thaliana landsberg
aatgaaaaaggtctaaactttactcttacatgcgccattgaactaacagggctaatggctgcagctcctttactgctccaactacgatttccacagttgcagagatattacatccttcgaattcaagttttgggtattgatcgtgagaattcaaggaacatcttttcttcggtcagtatgtggcactctaagttagtgttcgtctctcggatcaaattttcgaattactcttgcttagtttctctgattacttgtgtagatgtgattacccaataagctgaaaacaaaaggcgtgattttgtgattactctggcgtaataatgcctcagtatgggtcaacgggtcaacactgcgagttcacggcggcgtcttacttctcgtggccgacttcaagcaggctaagcaacgccgcggaggaaagagctaactatttctcaaacttgcagaaagaggaggatgatgatgatgaggtttctcctgaaccagtctccacagagcctaaaggacaacaagccactactttgcttgagctcatgaccatcagagcgtttcatagtaaaatcctgcgccgcttcagccttggtactgcggttgggtttcggatcagccgtggtgttctaacgaatgttccagcgatacttgtctttgttgctaggaaagtccataggcaatggctaaatccaatgcagtgccttccttctgcccttgaggtggagttatcttgtgttctatacccttctacacatagcctttcagaaattttatcggagcatatatgataagcgatgtgttcatttcataatagggtcctggaggggtatggtgcgatgtagatgttgtggaattccaatactacggtgctcctgctgcaacaccaaaggaacaagtttataatgaacttgtagatggtttgagaggaagtgatccctgcattggctctggttctcag

SEQ ID NO: 144424 - DNA, 485 bp, Arabidopsis thaliana landsberg
aaatctctgatgcacgtaataaactacttctgcagggttgtgagagcggtcaaatgtcatttatggcctcaactgatcttctcactgctgtatgtgtgtaatatcacttcaatttatatagccgttatccggtttaggacaagcgggtttaatgtcgccacatgtacagggcttcacggcgatcacagacattgctggaggatacgtcgcttggacagagaatgagctgccggtagaagagtgaaaacaatcatagccatatcacctcctgtaattatcaataaattctgtagatgttctcaacgcaagtgattctgtatcaatcatcattattattctctaaaaaatagtttaactgtcaaatctatattgggtgaaaagctttaccgaacttcgaacaccacaaagtttacggaccaattaaggacggggatgcctacacacgtttagttttcgccgttttaaaattttaatacttaaactaa

SEQ ID NO: 144425 - DNA, 665 bp, Arabidopsis thaliana landsberg
tcagccgcaaatccaagtcgacgaatacgacgattttagttattcggccggaaaggttgataatttcgtgtgattaatctatggagttggaatttgaatcaaagtacgagattaaccgtacggcggagttcattattagcaaaagcttcaccagaattgctttacaggtaccaaaccttttctccagtttctgaatgaagaagtttgattttgtttcttagcttcaaattgttacttcaatgaatatttgatgataaagcttagtttttttctttcatagttcccggatgagttgttaaaagattcgactaaggtcgtgagtgctcttaagagcaaaactcgtttgcttactggcagagaagtcaggttctttgtaatggctgacacaacttatggtagttgctgtattgatgaagttggagctttgcatattgattctgaatgtgttgttcattacggtcaaacatgtctaagcccgtgagtcataaacccttttcttcatctatgtaattgctttaaattcccttgttgaaacaatgtcttattgtgaggttctatgttttcacaggacatcagttcttccagcattcttcgtttttgggaaagcttcgataaacgtctccagctgtgttaagcatttgatagattatgcgtcaaagagcgat

SEQ ID NO: 144426 - DNA, 917 bp, Arabidopsis thaliana landsberg
aatttatttgcaataacttgggtgaaacctcctaccgccggtaaaagcggtcttctccgagcagacggaggagatggaaacctcccgttcccgaaggtccttatcgacggtccatacggtgctcccgcacaagactacaagaaatacgacgtggtactcctcgtaggtctcggcattggagccacgcctatgatcagtatccttaaggacatcatcaacaacatgaaaggtcctgaccgcgacagcgacattgagaacaataacagtaacaacaatagtaaagggtttaagacaaggaaagcttatttctactgggtgactagggaacaaggatcattcgagtggttcaagggaataatggacgagatttcggagttagacgaggaaggaatcatcgagcttcacaattattgcacgagtgtgtacgaggaaggtgatgcaagagtggctctcattgccatgcttcagtcgttgcaacacgctaagaacggtgtggatgttgtgtcgggtacacgtgtcaagtcccacttcgctaaacctaactggagacaagtctacaagaagatcgctgttcaacatcccggcaaaagaataggtaactaatctcgaccgttaatctcgttatgtacgtgatgttgtataataattaataaagtgatgaatttagactaaatactaatatgaattttgattgcaggagtcttctactgtggaatgccaggaatgataaaggaattaaaaaatctagctttggatttttctcgaaagacaactaccaagtttgacttccacaaagagaacttctagattaattatatacgttgtagaaaaataaaacaagaaacaactatacaaataaatatttattttaaattcttttcattttatgtaaaattatctgagttatctttttttgt

SEQ ID NO: 144427 - DNA, 492 bp, Arabidopsis thaliana landsberg
tgacagaaactaattgatgtatacatgaagaagatagaggagctctacaaacagaaagaaaaggtaacagttttgtgtcaatgtttctagtctacttttgtatctgatccatcttgtggattgattagccattaattactacacacatatatgaatccacaggaattgatgaaggtgtgaccataatggttgttaggggaggagacgtaattcaacaatctggtaaaatcccgcaatttccaatgccttcgtttcttttactatttgccctgatgtttccttggggtacaacaagcatgtcttttgggaattgagagcaactttgtttaaattttcggttgcaacatttttagaagaagcctctgatattttgtttcttttattaaaggatccctctttgtacagcaaaactcttgttaattttggttcatcaccccaattatcaaatcttatttttggcttattgtgtttggaactgaaaatttaaaagta

SEQ ID NO: 144428 - DNA, 2715 bp, Arabidopsis thaliana landsberg
  unsure (1)..(2715): unsure at all n locations
gttacctcggagttagctcctagttttgttgaggacattggggcagataaagaagtggagttcagttttaagaagccaaatggtttcaatctctgtggaagttactccatttgtggcatggcaaagccggatacttctgttgatcttcttgttcacttgcctaaagtaagtatttattgctcatttcgtaagttttaaatcgtgtcttacaggttatgtaattatataattgttcttgcaggaatgtttttatgagaaggattacatgaatcatagataccatgccaaaagatgtctatatctttgtgttattgaaaagcatttgttgtcgtcatcgtccattgagaaggttgtatggtcaaccttacataacgaagctaggaagccagtccttgttgttttcccaggtgtgctcttgtttttgggttagagaaatagtactttttatgttgacaattatatttacgttgagaatgtgtgtgtttgcagctaagaaacttgatcagtttcctggattttccataaggttaatcccttccgcaacatcactgtttagtgttgccaaattgagtattagcagaaacaacgtccgttctgtaactgcaggtaatgatgtttatatcaagaatgttgaactcttcttggataaatatattgaggcatcattgtattgacattctgatttgtcttgatgataaagatggtgtccctgagcccacgccaacttacaactcaagcatattggaggacatgtttctggaggaaaattctgagtttctcaagaaaaccttctctgagtggaaggagttgagcgatgctttgattttgctgaaggtatggatagttaacaagtattgttacctgtgtatattgggatccttaaacgtctctggttgtgtgcagatatgggcaagacaaaggagctcgatatacgtccacgattgcttgaacggatttctaatctctgtgatactttcatatcttgcaacccattccaaaattaacaaggcactaagtgcattagatatattcagagtgacattggatttcataggtatgttagtacagcntacatctatttgttgcatttgaagtatttgattctgcaatatgaataaccaaaatatgtcaatcctgtttggcagccacttctaaattatggcagagaggtttgtatcttccgcctcagagtgaaattcgtgtctcgaagaaggtgtgtagtctacttgcttttctgtctgtttcatttttatttttgcgtatcagtatgactatgcactggtactactggattcgtctgctggtgtatactgttattgtagtataaaacattagacataaggcatcttctgataatccaaagactacatatagaagtcttgataatgtttgaaaaaccatatgtaggcactagatttttcgtgtatgatagtcttgataatgtttgaaaaaccatatgtaggcaataagttttcttatagtactcgagctaattgacaaatattttagcaagtattctatcaaagaaattttcatgtgcgcatacaggtgtcctgttctctgcatacttttgttaactgattatcaatgattaaaattcaggagaagatgcagttcagagagttgttccctgttgttatatgcgattcatctacgtttgtgaacttggctttccggatgaccagtgttggattcctggaggtacatgaagctggagaaaaactcttaattcaatgtttttcgattatccgatatttcatccaaggctgtggttgtgttagtgactttttcatggaatttgtttgttggtcagcacagcttcaagatgaggcttctttgacgcttaagtgtatggagaaactcagagatgggggattcgaggagatttttatgactaagattgactatcctgttaagtatgaccactgcataaggtaagcttcacttctcacttctcctgattgatatgtattgtattgtcaaggatagaagtggctggttatgttcttacttttgtcaaaccgttatggaagtggctggttatttcttactttcgtcaaaccgttttatgcatgtggaagtatgatactaaaaaatttagataggaatatttttgtcacaggttcaagatagtattttttctgagctagtttgttcccttgtcagctagctatcctgacatataagttctcttaggttacagctaaaggggaaaacagcagtgtctctgtcagggttttgtttggacaaggaatgttggagactctatgagcagaaagtgcatagcctgcttttagaaggactaggtgacagagctaaatcaatccgtgtagtttggagaaataccaatcaagattggcatgtagagagtgtaagttttttccgatgatgaattttacttttcattgcaacgaagtgggctcttttctaatactcttaactgccattgaaccagggcttgtcagttcttgacagagaacctcttttcattggcatatctgtcagctccactgaaaaggcttatagaacagttgatattgggccagatgctgaaaacaagatagaggtatatccaaaatttctgaataattgctgtctcattgggtggtactaagtaatatattggtctaggcacttagattccggaagttttggggtgagaagtctgatctaaggaggtttaaagatggaagaatatctgaaagcacaggtgtg

SEQ ID NO: 144429 - DNA, 1582 bp, Arabidopsis thaliana landsberg
  unsure (1)..(1582): unsure at all n locations
gttccatttcgctgtgtaagaaaagaaaaacgaaactttcggttgtgcgaaatcttaagatcaaagatggcatcgttttgcagatcagcgttaatggcaggttccagaaacttagtatcaagatccagaaccgtaactcaaaagtccctcaatcttaaacccacaactacttcatctcctttcgcttcaatgtctcaatccatccctcgcgcttcgaggtaactacttcacctttcagctgattcaagaagtttaactcattttctcttatgctcaactttggaaaaaggaaatttagagaaaatattcagctcgttttaatcagaaacattttatgtgaagggttctctctgctttgggaagtgttgaaacgatgattccacttcacagtgccgttgcttcagctcgtctccggtcaagcatcgctgctgattcctcttgttggagcttgctttctcagggtatcttttttcctctatttttttgctgttttcttgcaaattatccttatatttgttgtctttttggtgggttgattctgttttctgctttatctgttgtgcatttggaaagtttttgagaataagattgaaacaggagatcaatttcttagtaagcttgaatctctcttatgaaatgggatcacaactcttaaaaagatagcaagtattagatgatattcttgaatagcagcataattgtggcaagagatttttcattagtctacactcgttggattcaaagtttttttttttagctcaaacaatactgattagatgtgaaactggatgatatctgtgaaagatatgttttttaagtgtaccaaagattgtggcttcactagatatagtttcgactgggacaaagcctgataaagatcaaaactttgaagaaaggaactgttacttctcttatacaatcatgtcttcttgagatatatgtctagttggtcttagattatttagttgctccttttgatttttctaaaactttgcttctttctctgacttgtggttcttctacttaatgcgataggacttgcaacgcctttgtgaccccggtctgctggatcgatataaggcggaaataatcaatatattacaatgaatgaacaagaatagtgtttttttttctagttcgnnnnnnnnnnnnnnnnnnnnnntgtgtggttcacaaggacttcttgtttcaaacttcttgcaatctatctattcgatatttggatccacacattttggggcctttttccttcactaaagtcagcatttgctttcttttgttcatgcacattgtaacgaggaacctctgcatttttcaatttctgaatcttgttcactgatcctcttcccatttctctcatctctttagaactgggagttcctcggtgacaccatcattagctttggtcttggtcttgaagcgtccatgggttgatacttgatattgtactgtttaagactacttgtgacgttgccagcttcttagaccggttcatccggttataggatacaggttgtttcccaattttatgttatcgtttagactttagatcttttttgagcatggaaggggatttagcatc

SEQ ID NO: 144430 - DNA, 520 bp, Arabidopsis thaliana landsberg
cagtctgaaagacgatatcatgcgtttgtatcagcctgttcatttactggtaggaactcctgggagaattctggatcttacgaagaaaggtgtctgtgttttaaaagattgttcggtgcttgttatggatgaggtaaatgttgaatgcttactttgtatttttttttctttgaaatttctttctatctatcttttttcactatttgcaacctgtagcaaaattgttcatgttactcccaatttaatttaattatggatcattcatcaggctgacaagcttttgtctcaagagttccaaccttcagtggaacatttgattagctttcttccagaaagtcgtcagattttgatgttctcagccaccttccctgtcactgtcaaggattttaaggataggtttctgacgaatccttacgtcatcaatctcatggatgaacttacgaaaaagggaattacccaattctatgctttcgttgaagaaagacagaaaattcattgcttgaatacactattctccgag

SEQ ID NO: 144431 - DNA, 921 bp, Arabidopsis thaliana landsberg
aatttgtttcaacctaagtatgctgtggagagctgtacggggctctatctggggatccgttcttctttttactttcccgattcgctttttcgcctctataccaagggaaagactggttcgttatcttattcactttgattgaatgtgcaaagatttggtactgatcctaaagatttatgagaatttagtagtttcagtaacctttgattgttttgatccttaaggttaggtaaactttagtagtttcagtaacctttgatttgttatgaataaatggaaaattgaggattttcagttgtttttatagttacccttttgaggagtcataataatggttacattttgattgagctagatcttttaatgtataatttaacaaaaaggaagaagatattttgtatttccagcttgagcagagtatttatgatttgaggtatgagctagagagtcttgaatggaatagaaaagagatagagaagaatctccgggaagcaataaaagaatatcgaatcatggaacacgacttagatgaactagaagatgaacatgatgaagccatttccaaaatagaaaagctagaggccgaggcacaaaaactggtttagtagacatgttgcataaccacatatacatatgttctaaacatttggattttggcagctacaagaactaaaggaggaaaatcttcaactgatggaagttaatggaaaagactataggagcaagaagggcaaagttaaaccaagtgaagaaccaagcgaaatccgtagcatacataagcctaagaatatcccttatgcatcaaagggaaaagccgagtttacatcggttaaatcacctctttacccgtttgcgaaatcgacaataacaaaagacgaaaaattgacgccaagagtcctcggtttagagaagaacattgcg

SEQ ID NO: 144432 - DNA, 439 bp, Arabidopsis thaliana landsberg
gaagatcataaagatcaaaaggagagaggtattaaaaaatgatgtgtagtcgaggccattggagacctgcagaagacgagaagctaagagaactcgtcgaacaatttggtcctcataattggaacgccatagctcagaagctctctggtcgatctggtaaaactgactttatattaaagtcatttctttaatttcttacaaagcatatataaactagggtttaatatatttatataacaatatataaaacaggtttgattggatcttttggtttcaggtaagagttgtagattgagatggtttaatcaattggatcctaggattaaccgaaaccctttcacggaggaagaagaagaaaggcttttagcgtctcatcggatccatgggaacagatggtccgtgatcgctagattttatcccggtcgaaccgataacgctg

SEQ ID NO: 144433 - DNA, 2564 bp, Arabidopsis thaliana landsberg
aaccccccccgagttaagtgattactgatatttcatcccctgttgtggttgacaatgccggaaaacttctctctgccctatttaatgaagcggctgttcgaggtgacttgctcgacatactaatcacttccagcgaccaatttcctgaggtttgtatcttgtttggaaattgatactatctacggcctctctctttatgttctgtttttgtgcatcacacagcttcttaaacttgatttgcttatcataaattaacggtttagtggcgattttgttccataactcagttgtgtttttcgcaatgtacagcttgctgaagctcgccaagcagttttagtcatcagggaaaagctggattcctcgatagcttcatttcgcaagaagctcgctattcgaaatttggaatttcttcaagtgtcggggatcacacatttgatagaggtattctctcgagaaactcgtaatttttagatgatgctgtcttccgcaagagtgcagctttcttgatttttttataaattgcacctaaatggatacccaataagtattgttgcgtatggggatgagaataagtttcaagaaggtactttgtgttggtttacttttggggctttactgttctcactttctttctcgtgcacatatccattaaaagttattcactgctctagaacctaatatcttctttggtaccaagtataacatatgtgcatatgatactctcatctttgaaagttgtggacctttatttctgatctgaaactaaggctttgtacagctgcccgttgattccaaggtccctatgaattgggtgaaagtaaatagcaccaagaagactattcgatatcatcccccagaaatagtagctggcttggatgagctagctctagcaactgaacatcttgccattgtgaaccgagcttcgtgggatagtttcctcaagagtttcagtagatactacacagattttaaggctgccgttcaagctcttgctgcactggactgtttgcactccctttcaactctatctagaaacaaggtgtaacgaaggaacaaaccacaataaatgttcttgtactcactgcttttcaatttgtaactctggcttccaattttttccctctgcagaactatgtccgtcccgagtttgtggatgactgtgaaccaattgagataaacatacagtctggtcgtcatcctgtatgcatcttgctctcgcttctatttctttttctttctatttttaaataagttggaatgattttgttcatttcgttttaaaaatttgccaggtactggagactatattacaagataacttcgtcccaaatgacacaattttgcatgcagaaggggaatattgccaaattatcaccggacctaacatgggaggaaagagctgctacatccgtcaagttgctttaatttccataatggctcaggtaacataaacattaacagtagaaaaaatctcttgcatatgttgaaatgctaaatgattcaagatattcccattggttttccaggttggttcctttgtaccagcgtcattcgccaagctgcacgtgcttgatggtgttttcactcggatgggtgcttcagacagtatccagcatggcagaagtacctttctagaagaattaagtgaagcgtcacacataatcagaacctgctcttctcgttcgcttgttatattagatgagcttggaagaggcactagcacacacgacggtgtagccattgcctatgcaacattacagcatctcctagcagaaaagagatgtttggttctttttgtcacgcattaccctgaaatagctgagatcagtaacggattcccaggttctgttgggacataccatgtctcgtatctgacattgcagaaggataaaggcagttatgatcatgatgatgtgacctacctatataagcttgtgcgtggtctttgcagcaggagctttggttttaaggttgctcagcttgcccaggtatactccctccctcttttctcatacgcaagtttataccaacatacagaatgattagaggtaggccaccctagaggccttaaagaacgcattaatcactgaaatatggctgtttttggtccaatcatttatgaagctgactcacatatatacttgactgtagatacctccatcatgtatacgtcgagccatttcaatggctgcaaaattggaagctgaggtacgtgcaagagagagaaatacacgcatgggagaaccagaaggacatgaagaaccgagaggcgcagaagaatctatttcggctctaggtgacttgtttgcagacctgaaatttgctctctctgaagaggacccttggaaagcattcgagtttttaaagcatgcttggaagattgctggcaaaatcagactaaaaccaacttgttcattttgatttaatcttaacattatagcaactgcaaggtcttgatcatctgttagttgcgtactaacttatgtgtattagtataacaagaaaagagaattagagagatggattctaatccggtgttgcagtacatcttttctccacccgca

SEQ ID NO: 144434 - DNA, 399 bp, Arabidopsis thaliana landsberg
tttcaattttcggggttaaatttttttagggttttcatctggaatcatgtcgcatgcgtattgtacggattgtaaaaaggagacggagttggttgtcgatcactcagccgcagataccctttgctccgagtgtggtttggttttggaatctcactccattgatgagacctctgagtggcgtaccttcgctaatgaatcttccaacagcgatcccaatcgtgtcggtggtccaaccaacccgcttctcgctgatagtgctttaaccactgttatcgctaagcccaatggttcatctggtgatttcttgtcttcttctctcgggaggtggcagaatcgtaactccaattccgatcgtggtttgattcaagcttttaaaaccattgctaccatgtctgaaag

SEQ ID NO: 144435 - DNA, 3361 bp, Arabidopsis thaliana landsberg
cttcttcttctctccttctttccgaaatgtcaaaatcctccgatccaaccatttcttattcttctctattttctcttaacgacaaaaaaaaacttgaaaaatctcactttcgttatccattcccaatttcgaccaagagtgttctcaatgacagtctagcatgcaaataagattcatttaacaaacaattgtatgcatttagtataattttatccaaaaaatttattttcaaaattgtgtctttgagctctgtttgtgtagcagagttcaaaaatggtgggtagtattgttggcagtaacatggctgcgactgatgcgaggtttctaagctcgaattttggcaacagtttcagcatcaacaccagaattcacagattccatgatcgctcccaaatcgtaatccctagggctcaatcttcttcttctccgtctccatctccaccctccgacaagaagaagaccaaaacccgacccggaaccacaaccactaaggagagcgaagagacggttgcgaagaagctcgacgttgctccgccttcgcctcaatcaccaccgtctccgcctacactgaagttggacgatgtgaatcctgtgggattaggacgacgatcgcggcagatcttcgacgaggtgtggcggaaattctctggattaggtcagatgtcgaggacaacccgacccgatgagcaagagactcttgatagtctactcattagagaaggacctatgtgtgagtttgctgttcccggcgctcaaaacgttaccgttttagtcgtcggagctactagtagaatcggtcgtatcgttgtccgtaaactcatgctccgtggctacaccgtcaaggttcaaaaaatgctgatttttataatataaagtagtattggtgtgtttatgcaaatgctttagagttttaagagatttgaggttaccgtttaggcactggtgaggaaacaagatgaggaagtgatgagtatgttgccaaggtcagtggatattgttgttggagatgtgggtgaaccgtcaacgctcaaatccgctgttgaaagctgcagcaagatcatctactgtgcgactgctcggtctacgattactgcagaccttacgcgggttgatcacttgggtgtttataacctcaccaaggcttttcaggtatagtaagatttgtccatgactcaaccgtggttaatttggtttcttgttttgttgagcagagagtagtttattcatgtgtgtcgttttgagtatttgcaggattacaataacagactagcgcaattaagggcgggtaaaagcagcaaaagcaagcttctattagctaagttcaagtcagctgagtcacttgatggttgggaaattcgtcaaggaacttactttcaggacacaaccgcttccaaatatgatggtgggatggatgctaagtttgagttcactgaaactgagagagctgagttttcaggtacacattatctttccggagaatatggcaattgcaaaagttttttcctttgatgtatattttgaggtatagtggtttaatcagttttcaaatgcaggttatgttttcacccgaggaggatatgttgagttgtcgaagaaactttcacttccattgggtaccactcttgacaggtattgcgcgatttcgtatcaacttactctcagcttgttctgtgaaatgattcaatgatagaaacttagagaaaggagtattaaatgaaatttctaacacctcctgaaacccatttagccttatagcttcttttatatgcttatgcttttatatcaataggtacgaaggcttagttctttctgttggtgggaatggaagatcctatgttgtaatccttgaagctggtccatcatcagatatgtctcagagcaaacagtatttcgctaggatcagtaccaaagcagggttttgtcgggtatataaagcatcatcggtcttactcattagtctgaccccttttccgttatttttttggctaaaactttggttccttgggcaggtaagggtgccattttcagcttttcgaccggtcaacccagaagatccaccgctagatccatttcttgttcacacattgacaatacgctttgagcctaaaagacaggtttgcttactcttttcaaagcttcagcagttggttttgcggattgatctgtgtgatcattaaccgaaaactttcattcgttggtgtctgagttagcaatctcttggggtttttcctctttcagaggcctgttgatggacttgctggtgcgcaacaaaatttgagtagttttatccttgtatttgagtacataaaagctttgcctgtaagtactcccaacttaatgtctacttactgaagattatcacctgaaagaacggaaaaaaaaaacagatacatcatcagcttcctgcatttttgtctgcaggcgggtcaagaaacagactttattctggtatcgtgtactggttcgggagtagaagccaacagaagggagcaagtgttgaaagctaagagggtaagtccattttgtcttacacatcataataactcttgaatctttcgaggctatggattgtcagggcttttgtgccagtaggttccatcttttcacatctctatctccttctctcttgatgtccgctaaatttgttaggctggtgaagattctttaaggagatcaggccttggatacacaatcattcgtcctggtcccttgaaggtaatgttctttgagctccagccatattgtatatatatggctctgaatacatattttctgatataggaggaaccaggcgggcaacgagctctgatatttgatcaaggaaacagaatttctcaggttatttcaatcacgaaaaacaaactcaagccacctagcaaaagttctctgatggagccacttataacttcccaatgcgctattttctttcaatttcagggcattagttgcgcggatgtggctgatatatgtgtcaaggcactgcacgattcaaccgccagaaacaaaagctttgatgtgagttgcagtttatagagaaacaactgagaaagaatcaatctttgacccttttcaagaaccaaaactaagaaagattcaatctttgatctataaagaagaaatcacatcatggatctctcaaatttcttccatttggtttttacaggtttgccatgaatacgttgctgagcaaggaatagaactctatgagctggtaaaagagtaaacaatcacttgcaataagagtcacatctacatcattacatcatctgatagtgtttgtctctttcaggtggctcatttgccagacaaggcgaacaactatctgactccggctttatctgtacttgagaagaacacatga

SEQ ID NO: 144436 - DNA, 1865 bp, Arabidopsis thaliana landsberg
  unsure (1)..(1865): unsure at all n locations
attgctttagaggcaggatttgggagaagtctctttgaaagactggctcttcttggacataagaaatacatgctaaacatccaataccggatgcattgttcgataagtagcttcccaaacaaagagttatatggaaagaagattttagatgctccaacggtcaggcaaagaaactacacgaagcaatatcttcctggagaaatgtatggaccctactctttcatcaacatagcatatggacgagaagaatatggggaaggagaaggacgtagtctgaaaaacaacgttgaggttgttgtggtcgcggctataatagccaaccttctccaaggtaaagaagtctatgaaaaagtttgtctctctttggttttggttcattgaagcagacttttttgtttatgaaatgcagtttcagagaaaacaaagacacgtataaacgttggtgttatttccccttacaaggctcaagtaattgcaatccaagaaaagattcaggaaacaagcataggtgatgcaggaggactcttctctttgaggattcggactgtggatgggtttcaaggtggcgaagaggatattataatagtttcaactgttaggtccaacggtgttggaagggttggattccttggaaaccgccgaagaacaaatgtattactcactcgagcaaggtatgttaggcatatctcatttctttggttactgaaaacgaatgtgtctttcaatttattatttttgttttctataggttctgcttatggatacttggaaatgaggcaactttgatgaatagcaagtctgtgtggaggaatctgatacaagacgcaaaggaacgtggctgtttccatagtgctggagaagacgagtcattagctcaggctattgctagtacgaatatcgagtttaggccactgaataactcaaaatggaaggtaatgactttgctttgagacttggctttgtgcatgtgaaacagcttcgcttcagaaacgtggctgtttccatagtgctggagaagatgagtcttttgtgttcttttagtttattcttcttctctgagacttggctttgtgcatgtgaaacagctttgcttcagcgacgaattcaagaaatatgtgggagaaattaagaacccggagacttacaggaagataaagaatttcttagaaaggttatcacagggttggcttaaggaagaagagacagagagagagaatctggtttcttcctctcagctgttaaaacaaagcaagatcgacgatgttcttaggatcatttgggcggtagacattcttaaggaagattttcactatgatcaagttctgaagatttgggatgttgtaccatcatatgatgctcctgaagcattaaaacgtctagacttaaaccgggcgggctatacaaaagatgagatagaaacatgcccagccagatgtatcagagggtgagtaaaacacaaacatgacatcctaacttgttgtaactagctaaagcatttgtacgtctaagtttttnnnnnnnnnnnnnnnnnnnnnnnnnnnnnnngagatggtctattgagtctacaaatggcatacctgaaaagagctcggtggtttgttcaagtgatgttatcaagacatttggatcactcaaccttgtgggagaaatgttgtcttcagtaccatccaagtaagttaatacttgtttggattactcaaccttgtacattaagaaagatcaacctctcatcgattctttttgtatgcaaacatcacaaatgggcgtgtagtgactctgtggaacctctggaagttgagaaggaagagcaggattttgaagtagatcgattaggggatctatttgcctataaactcactctgtga

SEQ ID NO: 144437 - DNA, 1532 bp, Arabidopsis thaliana landsberg
gcaacaatcccttttaaacacaagaaccaactcaatacgcatcacaaagaaccctaaattcctggaagatctcaaaaggaaaattcaaaaccaaagcttcaagcaatcatcaagcaaaggaaaagctcaaattttgggtcttttatatatttatttcttaaagttacaatctttttgattgtggtttcagtgtacgaacacgcaagaactcgcgtgaaaaaattgtatccaagcttcgtgaaaggagtctctctgtatttagtggcgttttgttctgttgttatttctgaaatattgaagcttttgatttgggtttcaagagagcagagatgtgtagtttgtcggcgaatatgttgttaccaacgaagctgaaaccagcttattcagacaaacggagtaacagtagcagcagcagctcactcttcttcaacaatagaagatccaagaagaagaatcaatcgattgttcccgtaaggatttgttctcttaatcattttgacatatctttgttttatgtgtctcagttatggatatatctatgcctctgtctttattgatggaacttgaaacttttgggatcggtgcaggttgcaaggttgtttggaccggcgattttcgaatcatccaaattgaaagtactcttcttaggggttgatgagaagaagcatccttcaaggctccctaggacttacacactcactcacagtgacattacagctaaactaacattagctatttctcaatccataaacaattctcaggtaaaaacacctctctctctggtcttaacatatctacatggctctgtttataggagtagaatatttatgtaattgatcatttggagcaactattagaggcttatgcatgattgttttaggctatgtatgtgtctatattcaattattcaccagaatctttaacactttagaggctgatatgtatagaaatgttgtgtatagttgcaaggatgggcaaataggctataccgggatgaagttgtggcagaatggaagaaagtgaaagggaaaatgtcgcttcacgttcattgtcacataagtggtggccatttccttttagatctctttgcaaagttttcggtacttcatcttttgcaaagaactaccagtggtaagttcccaatttcaaaagaaactttttcttattggttcatgtaaaacaaatgttgattactacgatatatgcaggtgttgaaagcttttgtgcatggagatgggaacttgttgaacaactatcctgagctacaagaagctcttgtttgggtatatttccattctaatgtcaacgagttcaacaaggtcgaatgttggggtccgctttgggaagctgtttcgcctgatggtcacaagactgagactcttcccgaggctcggtgcgcggacgagtgtagttgttgttttccgaccgttagctcgattccatggtctcatagtcttagtaatgaaggtgtaaatggttactctgggactcagactgaaggaattgctactccaaatccggagaaactctag

SEQ ID NO: 144438 - DNA, 772 bp, Arabidopsis thaliana landsberg
  unsure (1)..(772): unsure at all n locations
agtttttcccagttgcagatgtttcttacaatcttcagcagattgcttggaaaggcnaacagcaaatgccacctcaaaggcattacaattctgatcaagttgggaaatttggagcaaggagatcagggcctgggtttaacaagcatcatggtggtggtgggggttacagaggagctgattcgatggcgagaaatgggcataatttcaatggcgttaacagtgatcgtgttgagcatcgggaggaagctaagttggcaagtgatgttaaggcattgtctgttgcagaagagaagagaggtaatcaaattgtctttgttttggcttcaatgctttgcttgcttgtaaggaaagtaaacttgtttgttgtgaaatcctatctgcaattgtttctgagaaagttcattgtatgttgctgaacatgatgagagtggaagatttgggtttaatctgtggtttagtctctagactctctgctttagtgaaaatgtaagttttttgtttgtttgtgggatagatggtagcgagaaaccgaggagtgatagtaaagttgagaaaaaattggaagaatctgaaactcaagaggagatagtgaagaaccataagtgtaactcgggttctaaaggtactttggaagacctgacttctcggttttacacctgatattagactttgttgaaatgttctgattatgtgttacttcttgctttcagataacagtctcatttctgagcaaaagcaggaggagaacgataaagagtgtcaagcaagcatg

SEQ ID NO: 144439 - DNA, 1202 bp, Arabidopsis thaliana landsberg
  unsure (1)..(1202): unsure at all n locations
atccagagatgcagagtcatatagagaagagtctttataacggtcatgctttattcaaagtctcctattcagtatgccacttctcttatttcatcttttacaaatctggtctttggttttcctgcacatacctcctctatgttactctctcacttgtgcgcctattgcttttttactatgcgatctctcttatgaaacagattggttatttggatatatgggaagcagctacattgtctattaagaaagaaggctacagcatcaaacctactaatgaccctgtaattacagaaaagttctcctcttctactaatgtaagagtcttgccttatttgcccctttgtgttagaaatgtaatattggctgaattatgttaacatacatcccgaagaatgaactaatattgtgatctttctgattctgctcgtagattgtgattccctttgatcagcctgcggattttgtgattattggtaccgatggcgaggagcatctctgtcgagtagtggacaatgatgcaacagatcttagctggtaagtagaagtcgtctttctttggataaagtaaagtagatcaaaactccttcgtcgtttaaaacagattttcttctatgaaaatagatgaaagtgaaacgagacgctttttgtttttgtttctttctgatttcaaatgcatcaccaatagtctaaacttgaattagaataatctgctagtgttttctttttaaatgaagttgtttaatgtgttccaagtattcagttttgggtttcttgtattaagcagtcaatcttctgttttgtgtttgtatttggcagctcaagagatacaattgtgctcacccttagattatttcttaagaaggtaatgtttcagactaataaccatttatcttctttgataacatggttgattcgtttcctttctaacaaagcatcatagtcatactaatattagcgctttttgagagaagcagtggttgattgtttggttctctgatttggttgcagactctgcagagaaagaaggggaagaaaaaaggatttttgnnnnnnnnnnnnnnnnnnnnnnnaaatagtattgttggctcttttgtttcttctctggcctctccagctttagaatattagagatagtcttatgaacgattcagagttatttatgtaaggcttctgtagctgattaagaaaaaactattcaatca

SEQ ID NO: 144440 - DNA, 1799 bp, Arabidopsis thaliana landsberg
atggacgatttctcgatccccagtaattcagtaggtggcaatgatgtgacgctaccagcaccagctaaattcatctgtcaggggaacgcacgattgtcctatatgactcgcccccattgtactcaaggcaagaaaaaagaaaaaaccctagctcttgtgctacaagtaactctgagtactttaggttctaaacgatggttacttctgtgttggtttacacaggacggtaaagtgaaagcagcattgggtgcgagtggaggaatgtacatcatcgccggtacaacagaagtttacttaaatcatttcttcctcaacatggatcctctctcttccgttgttgctccaagaatctaccaccaggtttttgctattttttgtccttgtacccaagatagaaactttcttgttctttgctaattttacttttgtaacctcatttgtagctgataccgaacaaagcttcgtatgagaattggacgacagtgtatagtgaccatttcgagattcctgaaaaaataaaaattgtgttggagaagaaaggtcaagtcctaacgccgatcgccggagggacgatttctcagctcatagttgaagaatccgatggaaaatccggtggaattagtaagcttgtggcggttagtgatccaaggaaaggagggttcccttcaggatattgaaatttggatttgactttgttttcaattatatatcatcgaacttgtgatgtactagtatgaacctttatattcgatgaatacaatatgaaagtaataaagtttgtttgcgataatgttgttgatccagagatttttctttaatcataaattcataatagttagtatggtgaatattggaattaaactactaaaccttttgctcttgcattagtgggctcgttgtatgagtcggtgaccagtaaaagacaaaattaataaagatcttaatgtaaatgcgttggttgttatggacgacagctctattagcataattaattagcatgacttgatgatccttcgtcaagtgatagtcatgtacacgtctaagaccaaatgtgaaaattgtgataatcttgaaacctatatagtactatttcatattttatatacaatgttaattagctcggagttaggtccactaactaagtctaattactaaaataatacaatcttctaacttaacaactaatcatggtgcacatgcaaaattaaaattaaaaaaaaagatttggaggattaatactccaaagtccaaaccttggatactccgcctctagtcagtgacacgtcatataattagcagacgataatcggaagagatttgttacagtgtcactgtcggttgcttaatcagcaatctcattcaaatggaatcttaatacatgtaggaatctttttcttaagaatcatatttgacacgtcatcatttcttaaaaatcttttgattcctcctacttaagtagcactaatcaatccctcactaaactctagtcttaatcacactatatatatatagtactagtgtgatttgcccaacttgtcatcattatctctatctaataaatggcgttacaaaggcaactcctgaagagagctacttccgatatctatcaccgccgtgcgatctctctcctccgtactgatttctctacttctccttcgattgctgatgctccgccgcacattccgccgttcgttcaccagccacggccgtataaaggtccttccgccgatgaggttttacagaaacggaagaagtttctcggaccttctcttttccactactaccagaagcctgtacgt

SEQ ID NO: 144441 - DNA, 3405 bp, Arabidopsis thaliana landsberg
ttttctcattagtttctttctactccatttcttgattttgtggtgtttcgtctacaaatagaaagacgaaaacagaaattagggtcaaacaaacttggaccaagagtaactttttttgtggaaatttttgtactcggattattcatcatgccgttatgagatttctctgaaactgagctatttttcaggaatctgagtttcgatttcactgagatgttcgactcctactctctttatcccaccggaaaactatctccggtggttgattcgtacgtcaccgccgagctcgacggcgaagagatgagagacgactacgtgtttttagagtccggtttaaaagacaacaaatctcagtttatctcttacgcaaaacgcatcttagtcggagaagacgctgaatcagagagaatcgaagctttaaagcttcttaccgcttgttgcagttacgattccatcaactatgcttcgtcaatcatcaacggcgacgttggatcggtttcatatatcaacgatgtttgctccgatacaggactcttgccgttgcacacagcggctgagtctcacgcgccactgtgtgttgagatgcttctgaaacgacgcgctcgtactgacatgagtagcaaagacgaacgcgctttgattcctctggagatttctctctccaatgtcaggtaatcgtctctttgaatcataagcttgaacctaatgttgactaattttgtttctctgtgtcaattttgcagcgtagatgtgaaatggaaaccaactagtgaatcgattgaagactgatcgttttgcttggtgacaaggttaaacactaattcctttggtttgcttggagcctgattatggaatgtgtggtgagtcatttcttatgtatataggacttaaaggttgtgaaactactcgctgagaagacaaagaaagtggacgttgtggcttatgcatatgccaaggctggtgagatagttccgttgactgcattgttgattgtagcaagtgggaagatcacagaggcaactgtggcattacgggatgatgatgatgattctgtggcaaaacgggagagaaagacgatctatgaggcagttattcaagaggcgttgcgtagtaacagcttgacgcaaagtgtatgcagtgagaaaagaatggttctgcttagagagattgagcttcttcaggtctttggtgctgcagtttttagtgaatctgtgaataagcaaacttcaccacttatctccattatgcaggtgagacttggttactacattggtgttattgtgtgcactccacatgcggattattaagggatgttatgtgattcttgtaggcaggagatgaagctgttcttgagctgtttataaacaccaacttcgatgtcaacgagaaaaatatagaagggaatactgttcttcaatgtagcctgaaaggatcgtctgtgccacataaaccaggtatgatttctctctattagcttaatcatatatataagaaggtcgcatgatgattacttcacaacctgagaatagtacatttgtgtttccagaatcatgaacctacttattgcacacggtgctcgagttaaccaaaagaacaagttgggtttatctgcagttcactttgctgctgcaaatggcaatttatctgcacttgaggtataattcgcttgtttttttgcttctcatcctaagctgaaacaagattatgacatttcagatgaatttgagcctacagattctactagcggccaaccctgacttggttaacatgaagacggtaatcaaagagacgccactattcttcgctgtgaagaataatcatcttgactgcgtggagctgcttcttcgatgtggtgcaattacggagattcataacctacggtgaggcaatactcaaaaccatttgttttatcaaactcattgacatgtatccctttgtgacttaatccgatgtttcatacatgtgcagaaagcagagaccaatagagttaacatagtcacaagatatacgtttcctccttaacacaacaaatatcagttgttgtaagtatttgttcttctctatggccaaaagctttcaagaaatatgcttttcttctaacataaacaaccgtgaaatctgcagtcagcaaagaaacagaacttgcacagtcacagagtgcagcagtttcaccaaatgcaagtgatgaggaaactcttggatttctcgaagattctgttccaacatggctcaaaacatttgtaacctggcttcctctgtacctccgagatacatcagcgaactggaaaggggctggatatcccctgtcatccttcaaagccgattttcgtgctgtttttggaatggatctcgatcacacctctcttgatttccctaagcacatcgactttgtcaaatactttccaagactctgtcaaatgaaagtcgtccccataggtaaacttggagctgcaacacactgggtcatgctacccaccaaatctaagtgttctcagctcaaagaaagacctcctgagccactcattatcactaagaagagctctgttgcttctcccagcaaagctaaagccttatcagttcctccagattttaaagtcatacaaggagcaggtgactctagaaccttcaaagctccaccacaaccaaaagctcaacctcctcctcccttaacagcatcgtacaacaacaaccaacgtcaactaaaacacccggttcttgagacacttacaaagatcagaaacagcacttttgtcttctttctccgtgagtttgacttttatctagtaagcaatcaaatcccactccttactctttcatggtttttatatatctgtttctcacttggtgagtcatatgcatttggcagagctatgagacatttttaaaggaaggcatgtgtttctggtgcaacaagaacatgattcgatgggcaaacttcccttgcagacacaaactttggtgcagctcttgtaaacaacagattactcaatctacttcaggagagaagatccttgaggaagaccatcataagtgtgtggtctgtgatgcaaaagtggaacgtttcgtcttgtctccaccgtttgaatccggtcaccataggattttaagtgatcgccctaacaacgccgaattagccacttctttccttcagttcctcagcataaggaagtaatcatgtttcccactttgtcttcttattcactaaccactttcatctgttaataaaaacttcttctaacgttttgttttacgttactgtagctccatgaacaagatgatatatcgcgggatatagagaaaggaacttaccccaacaacttcaacttcgtgtcgtgataagtggattttactaaattcgtaaatacaaaagatgatggagatgaaagctcttctttaacaacattt

SEQ ID NO: 144442 - DNA, 1666 bp, Arabidopsis thaliana landsberg
atgggtcatattccagctgatctttctcgtcttccgcgtttgaaggtgcttgacttgggtcagaacaacttgtcaggcgaaatcccaccagaaatctctcagagctcgtctctcaactcattgtcacttgaccacaatcatctttcaggagtcatacctggatctttttctggtttatcaaacttgacaaagatggatctttctgttaataacttaaccggggagattccggctagcctcgcccttatttctagtaacctggtatacttcaacgtctcaagcaacaaccttaaaggagagattccagcttctttaggctcaagaatcaacaacacatcagaattttcaggcaacacagagctctgcgggaagccattgaacagaagatgtgaaagcagcacagcggaggggaagaagaagaaaaggaaaatgattctgatgatagttatggctgcaattggtgcattcctcttgtcactcttctgctgcttctacgtttacacactcttgaaatggaggaagaagctgaaacaacagtctacaacgggagagaagaaacgcagtcctggtagaacaagcgcaggaagtagagttcgtagcagcacaagcagatcaagcacagaaaacggagaaccaaagctagtgatgttcaataacaagatcactctagctgaaacaattgaagcaacacgacagttcgatgaagaaaacgttcttagcagaacccgatatggattgctatttaaagccaattacaatgacggaattgttctctctatccgccgcttacccaatggatcactcttaaatgagaacttgttcaaaaaggaagccgaagttcttggtaaagtcaagcaccgaaacatcacagtccttagaggttactacgcaggtccaccagatttaaggcttttggtatatgactacatgcccaatgggaacttatctaccctgctccaagaagcttcccaccaagatggccatgtcctaaactggccaatgcgccacctcatagctctcgggatcgcgcgcggactcggattcctccatcaatccaacatggtaagaactgtatagttttaatcacattctagattatacatcacttttaagtctttttaacatctcttattccaaataggttcatggtgatatcaagccacagaatgtactcttcgacgctgactttgaagcccatatatctgatttcgggcttgaccgtctcacaattcgatccccatcaagatcagccgtcacagcaaacaccattgggacactaggatatgtctctccagaagccacattgtccggggaaatcacaagagaatctgacatctacagcttcggcattgtcctactcgaaatcctaactggaaaaagaccagtaatgttcacacaagacgaggatatagtgaaatgggtaaagaaacagcttcagagaggtcaagttacagagctactagaaccaggactactcgaacttgacccggaatcatcagaatgggaagagttcttattaggaatcaaagtcggacttctttgtactgcaacagatcctctagaccgtccaacaatgtccgatgttgttttcatgcttgaaggctgtcgtgttggtcctgacgttccttcctccgccgacccaacctctcagccttcaccggcctaa

SEQ ID NO: 144443 - DNA, 431 bp, Arabidopsis thaliana landsberg
gactggcccaagcctttagcttttcttcactcgaaattcggtgagagcaggctacgtgcagtgtacaagaagtactcgaaggcagagaatggaggtgttgctatggtttctccggccaagtctctcttgagtgctgctgctgattggaagaagcctgtttcttcttagatgttttttttcatcagatctctctctgattcaaaattctagatttctcatcagatactcttttgtttttttgagttcaaacgtattaatgaattcttctcatcagtgtttttcttaatctctgattacttggatattagatttctactatatctttaacagatagatgatgtttgactgtaataaatcagatgcgtgcaattagtttccgacttattgtaaattgaatgatgataaatgaaatgcataaaatagttaatgtt

SEQ ID NO: 144444 - DNA, 406 bp, Arabidopsis thaliana landsberg
aaagtctggtccttaacgttcaattaggtcattttgaaaccctgtcttagaattaggaagggaagaaatggctgatcgaaactgtttgatttcgttcgaggatcttccttctcatttgatcttggaggtgttgacctctgggaggcttagtgcggttgatctacttagcttggaattgacttctaaggttttcggagggagccatggattctatcctttgaaattcagatcattagctgattatgcggcgtctcagctttgctctatgcaccctgtctacgtgggaatgggtttgactacacagaaagagctctttgccaattgtgagggaaactggaagcggctttttagtttcttgcagtcagttgagcaatcctcagatatggttgaagcctctcaaggcaaa

SEQ ID NO: 144445 - DNA, 1611 bp, Arabidopsis thaliana landsberg
ggttggagttgctactcggtcttcttggttctttaaacactaagcagcaacttgacggtgcagcagcgttgtacaaattagcaaataaatctatggcactttctccagttgatgctgcttctccttctccaacacagagggtgagtttcctttctgcttcagttctcctataggtaacgggtggaagtctcaatgcagtattctgtatgtctttttgggacaggtttatctcggagagcaatatgtaaataatgctcgctgtcctaatgtaacctttctagtcgaaggtaatcatatataaatccagaagttgtggaactctagttagcttcaaagtccttatgtaaaacagaaaaatcatactgcaggaaggacattctatgcacacagaatttgtctgctggcatcctcagatgcatttcgtgcaatgtttgatggtggttacagagtaagtgaactaaatattttggtttttcgataatgttcttgtggggtaaatgatattttgatgacaatgacgtatggatgtatgctggtctgctctctatcaaaggaatacaattatcttttggggaaattagacctgaattgtgtcacggtttgtgtttcgtttatatcacaggaaaaagacgctagagatattgagattccaaatatcaaatgggaggtgtttgagttaatgatgaggtatgatgaatgaacctctgcatgcttttgattgactcactcgagatattgaaatttcgaaaagtctgtgagaacttttcatatacacgtaattgactcccttggattatgattttcaggtttatatacactggatctgtcgacatagcaaatgagatatcaagagatgttctaagagcagcggatcagtatttcttggagggcatgaagcgactctgtgaatacacaattgctcaggtgagccagaattatatcacaatgtaaagtgatgatgtggtttgcgtagtacttaacgaaatctgacacggttactttgaatatgaaaggatattacgttggaaagtataggagacatgtacgagctatcagaagcattccatgcgatgtcgctgaggcaagcttgtatcatgttcatcctggagcatttcgataaactgagttcaatgccttggtaatataaacaagatgtcactctctctctccactaagatttgttttattgctattagtctgaaacaaaagtgaatggaaaatgcaggcagaacgagctggtgcagagaacaataccagagataagagagtacttttgtagagccctaacaaagtctactacaaacctgcaaagcttgaggttgtagaatgcggaagaagaagactgcacttaactagaggtaagtagacaaggaattatatagagagaaagagagagagagatcaagagccgccattagaggtctttatcgtcctgtactgggttgtcttagttatttgctgtgctttttggttcgttttggtcattttgtattgtattaattaatctcctctgatcacaatcggtcttgaatgaaatcgctaccctttgtatccaaaaataccattgtggtataacttccactattcaattcaaaatccactctccaacta

SEQ ID NO: 144446 - DNA, 5083 bp, Arabidopsis thaliana landsberg
ggacttactgttaaagatatggaagagcttcgcgatgatatcaagatgtatctggatttggatcgggcaactccaacacgtgtacaatattgggaggtatgttctacaactgagtctcattttgcatttgaggagattcacgcatttaaagttattatgcatgtatggaatttcgatccaaaaaatacatattctatggaccatcttgttgtacctttttgatggttgattagtattcttgcctctttttcatgttatattacctgctgcttacgagtaaatatttgggcttaataccattgaaattttccaggcgcttattgtggtatgcgattgggagttagctgaagctcgtaagagggatgcccttgatcgagctagagttagaggggaggagcctcctgcagaattgcttgctcaagagaggggactacacgctggtgttgaagctgatgtgagaaaacttctcgatgggaagacccacgcggagcttgtagaactgcagttggacatcgaatcgcagctgcgttctgggtctgcgaaagtagtagagtattgggaagcagttcttaaacgcctcgaaatatacaaggcaaaggtatttgctcgtggatgatcatggtgtgttagattttgaaaactgaggatttgtttttcgcatcttcactgactatattgatgttcaacaggcttgcttgaaggaaatacacgctgagatgctgagacgtcatctacatcgcctcgagcaactttcagagggtgaagatgatgtagaagttaatcctggcttaacacgtgtggtggaagaaaatgaggaggagataaatgatacgaatctttcagatgctgaagaagcattttctccagagcctgttgcggaggaagaagaagctgatgaggcagcagaagcggctggttcgttttcgccagagctcatgcacggtgatgatcgtgaagaagcaatcgatcccgaggaagacaagaagctactggtatatttaacagttcctacaattgaattttacacatgaattattgttgttggtgcttctactgacccaaaatatgactgcggctataacagcaaatgaaacggatgattgtgctggagaaacagaagaaacggcttaaagaagctatggactcaaaaccagcacctgtagaagataacttggagcttaaagcaatgaaagcaatgggagcaatggaagaaggtgatgccatatttggctctaatgctgaagtgaacctcgattccgaggtacccttatcactatttttctcttctctgcaacttttcagttttgtagaacaaaaataccataattttcatcttctaggtatactggtggcatgacaagtaccggccaagaaaaccgaagtatttcaatcgggttcacacaggttacgaatggaataagtataaccaaactcactatgaccacgataatccgcctccaaaaatcgttcaaggatacaagtttaacatcttctacccggatttagtagacaaaattaaggctcccatttacactatcgaaaaagatgggacaagtgctgaaacgtgtatgatccggttccatgctggtccaccttatgaagacattgtaagtactcgtaaccattatgtgggtttcatcatcacctctcgtgttatcattgtgctcaaatttatttttgtttgcttttcaggcgttccggattgtgaataaagaatgggagtattctcacaagaaaggtttcaaatgcacgtttgagcgtgggattctgcatttgtacttcaactttaaacgacataggtacaggcgataaccttatcggagtttggctggagaagacgaaagtggcacttgtaagactttggctgatgtttttaaaagccttgtttgtaagagaagggcgatatacatagtctaaatttggatttctctcaagttaatttctgaggtaagagctgtatttggatattttgttgaagctgatcatcaaacagaaccgaatagaaaatgattttcccacatgacaaactaacaatcgaaaatgtaatgatgataactaacaaaatgtgacgtaaataatttgaacaaatctggagttggtgtttctgcaagaactttttggtgaatgagtgttatatggaaaagttggtgtagagacatgaatgtgtgttttggttggggacgagagagacgaagagagagagagttaaggtgttgaagttgcttattaggttgagatctcaacatcaaaatgcttataaaaagattctgttggtaacttaagtagtggagtagaagatattatttattctgacttttcctttctttttcatcttccttttgatgtctctttttctccaaactctcctccactccaagacaaaaaaaaaacccttcttttgtattcgtattacttaaaatttgcatttcttttaataatctcgattctgaatattatatttatgtctaattttcgttactaacaaactaacataaccaaattttccgtatatatccaccatttaagtttaatgaagctttttgaaaatgaaaaactagtgcgtagagagtggagataaccactaaattaattgttcgtcgtcaacatcacaagtattgttaaatttgtaaacaattccctataaaactgagtgtgcgttatatttcattaatatattctgaaaataaaaatattaacaattccacgctctatatatatatatgataaaatcgctttcaaacttctacggtaacccgacattttctgtttttcctcaataaaagatttcttttttttccttttccgataaaattaattaggcaaccgtatcttaatctccgatctttccgcttctatcagattttcagatttgatgaactcaggttcgttcaatctttttctccaaacaatcttctttgctaccaaatttctggaatctagggttcgattatatctcttttagattatccattatttttgtaattcgttttagtttcgtttttatttccttttttagattaagaagagttcatattttagaataattaaaaaaaatggattctgcaagaagttggtttcacaagtttcaaccacgagataagcctcggaaaaaggatatgttctccggaagcacttacggcggtggcgtgacagaaaccaccgtccccgacggaggaaatgatacagaaacggcaacgaaacttccaccactaggcggtgacggagaagcactctcaaattcaacaaaacagaaagttgctgcagccaaacagtacattgagaatcattataaggaacagatgaagaacctcaacgagaggaaagagaggtacaaatattttagatatattcttgatgggtttatttatttagttatttaaatttggcagacgaacaacgttagagaagaagctagcggatgcagatgtatgtgaagaagaccaaaccaatcttatgaagtttcttgagaagaaagaaacagagtacatgagactccaaaggcataaaatgggtgctgatgacttcgaactcttaactatgatcggtaaaggtgcttttggagaggttcgagttgttagagagatcaacacaggtcatgtttttgctatgaagaaactcaagaaatcagaaatgcttcgcagaggccaggttacataatgtgacccacattgcattttcggttttacgaattttttttttttttttttgaaaatttctttgtaggtggagcatgtaagagcagagaggaatctattggcagaagtagatagtaactgtatagtgaagctttactgttcttttcaagacaatgagtatctttatctgataatggagtatttgcccggtggcgatatgatgactcttctgatgaggaaagacactttaagtgaagatgaagctaagttctatatcgccgaatctgttctcgctatagaatctatccataaccgcaactatatccacaggttggatcttataattaagtcgttatagatcacaaagaaaaatgtgtttaatttaatttgagatcttttgatgttgtttggtgcagagacataaagccggataacttgttgcttgatagatatggacatttaaggttatctgattttggactatgtaagccattggattgtagtgttattgacggagaagatttcacggtaggaaatgcgggtagcggaggaggttcagagagcgtatcaaccactcctaaacgctcgcagcaagaacagttggaacattggcagaagaatcgaagaatgcttgtatgtacttcttatctatcaaaagatctctaatttgaaatatttctttgattatgtgtctaacttgtagttggtgttggtgtatcacttaacaggcttactcaaccgttggtacaccagactacattgcacctgaagtcttgttaaagaaaggatacggcatggaatgtgactggtacgtgtacacacttgtctattttcaacttgttaacaaagaacaaaaaagtaagtccttagaatgtttttaaaaaatcctccaggtggtcactaggagctataatgtacgaaatgctggttgggtatccacccttttacgccgacgacccaatgtctacttgtagaaaggtttcaatacttaattttgtaaaaaattaatcatttgacttttgttttttttctaatgaactttatgtatttataagctagaatttatgaatgcaaaaaaacagatagtgaattggaaaacacatttgaagttccctgaagaatcaaggctatcacgaggggcaagagatcttattggtaagctcttgtgtagcgttaaccaacgactaggctctactggtgcctcccaaattaaggtatctttctccttttttcttctatagtaaaagttacaatatatagttaaaagttgaaaagatttaagcccacaaatgtcataagtcgagttgatccaaaccacaaaatgtcacatgcaggcacatccttggttcgaaggtgtacaatgggaaaagatttaccaaatggaagctgcgttcattcctgaggtcaacgacgatttggatactcaaaactttgagaagttcgatgag

SEQ ID NO: 144447 - DNA, 3731 bp, Arabidopsis thaliana landsberg
  unsure (1)..(3731): unsure at all n locations
gtatgcagatgaacttgaatttcaagaaaaagagattgaacattgctcacttcaagatatgttggatatggagctaaaggaattggataagagacttgaagaaaaggaggtactattctcaagtttagagtgctcttctttatagtctttcatctatttccttaagatagtatgtctataacttcaatttttcatgaaggctgaaatgaagcgcttttcaagtggtggtacatctgttctcaaacaacactatgagaaaaaagtttatgacctagaacaggaaaaaagagcactacaggtcagtattctgttgtttatactgtatttgagtggaactatgggcctatatttgactaaatcaaattgcatgcagagagaaatcgaaggtttgagacataatcttgctagcataccatctggtccaggagatggtgcccagaaactgaaggaagaatatgttcagaaactgaacacgcttgaaacacaggtaactcccgttttatttcttagttatactcgtctttcacatatcattttcctaatttattgtattttgtttctttttaggtttctgttctgaagaagaaacaagatgcacaggctcagcttatgagacaaaagcagaaaagtgacgatgccgcaataaaattgcaggatgaaatacacagaattaagtctcagaaggtgtttaattttttttgcagtaatctctattagagactctctacatataacctatgctaatctgattttatctacttttcaggtgcaattacagcaaaagattaagcaggagtcagagcagtttagggcttggaaggcttcaagagagaaggaagttatgcaggtatatttgacttttcagtttgtagccaattaagattcttcttaagcttacttgaatttattgattgattattatgctatctcttgctccacttctgaactacttagacaagtgtcattttctgtcattagtcacctgtagtatataaccagtatttgtatatacatttgacttgaaggtctcaaacttcaaactaattcttaagacatttggatttagttttcagaaatctatctcgtattgaaccattcattacatcgtattttaaatttgaccagctcaaaaaagagggaaggagaaatgagtatgagatgcacaaactcatggctctgaatcaaaaacagaagctggtgagcacatttttataaactttcagcccattggtaacgatcatttctattatcatggcttctcaaagtttgttttattaggttttgcaaagaaagacagaagaggcatctcaggtgacaaaaagactcaaagagcttttagataatcgaaaggcttcttcacgcgagacattgagtgaggatatttcgtataacattatttagtatgaccacctttgtttatatgtctactaactgtgtatcctattatatatgcaggtggtgttaatggccctggaactcaggtaacacccaccaaactctatgaaaccaatgttttgttttccaagttattgactaggtttagtgagtttggtgattcttctggttagtttgtaaatgcaactttttaataatttcaaatgtactccatttgcaggcattgatgcaagcaattgagcatgagattgaagtcactgttcgggttcacgaagtgcgttctgaatatgagaggcaaacggaagagtatgtctttcatcagtatttgtttcataacttattaaggcctgacaagaagtaattcttaaaaaaatgatttcttactaacctgtctcagatgacactgactataattcacgagggcaagaatggctaaggaagttgcaaggctaagagaagaaaacgagcttctcaagaatgccaagataaggtgcgtaatcaggactgacaaagattttgcataaaccaagaccattcataatgaaatatatcgtaaacaattagtgtcttctctgacaaaagcagcgttcatggtgacaccatgtctcctggtgcaagaaactcaaggatttttgctctggagaatatgcttgcgacctcttccagcactcttgtctccatggcatcacagttatctgaagcagaagaacgtgagcgtgtgtttggtggaagagggaggtggaaccaagttagaacattaggtgacgccaagagtatcatgaactatctattcaacttggcgtcaactgcgaggtaaaatctcaattagtgactggagatttttggtaatatgttgcttcttgaaggatcatcttcaaaatatgatgcaaaactcatcctacattcttctttctgtccattgtttaaatttgaaggtgtctagcccgagataaagaggcagactgcagagaaaaagatgtcctaataagagacctcaaagaaaaaatagtaaagtttagcagttatgtaagatacatggagatccagaaagcagacctcgtgcatcaagtgaaagcacaggttagtagaaaacatcttctactctttttgtataagacagtaaatgtctgaaatttagcatataaaaccattggcattccatattacagacctctgcaatgaagaaattgtcagcagatgagaacctaaagaacgagcatagtatgaaaaagcaggaaacccgaaactcgactatagttcttgaggacatggatacctctgattctgaagcgtcagaccnnnnnnnnnnnnnnnnnnnnnnnnatgatgaatggaaacctgaacatgaatcagagcgtgagtccgagcaggaatcggttataaagctaaataggaaacgaaacttcaaagtgggaagacggcgctcgagtgtggtcatgaggcgttcatatgaagagaatnnnnnnnnnnnnnnnnnnnnnnnagtgaaatctgacgtgtgttgttgcacttgcagcaagagctcctcttgcaagacaatgaagtgtcagtgtcgagctacaaagggatcttgtggtccgtcatgtggatgttcttccgtgaaatgctccaacagaaacgcagacggaaaggagaacaattccatctcggaatcagaggccttggaaaacggggagaactcgcaagaatctgatgaaaaggacaaaggccaacaacaacaagttcttgcttcacgtggagctatgctgctacagaacgctcttgctgacaagccagaggaggagacaaacgatgatggaggaacacgaagaagaagaaaacctctatcagacataggaaacacaacggtaaaaaactctctaaagtttccactgttttggtcatttcaacatatctgtgttcatgtagctaggaaacaacagctttctgatttaatgaaattttggtttcagggtaaatcgaatgtgccaaggccaagccaaagaaagaaatggaagaagactgtgcttcagcttgttcctgtaggtccaccagcactaccacccacacacacaaacacacacctgattccagaagctaattcagtgactgtggactcggacacagcgagaatgccagaaaacagtgactcaggagagtctaatagcatcaaactgaagctaccgagggcaatgaggtcagcgtcttcaaatggcagcaacttgctgagagaaagaaacgctgatcaaaacggaagtgaatcgggaggcaatagtggttttgtgcagagcaattcgggtagggcaagtggaagtagaacttcagatgaaaaggagaaccacactcgtcgggtctaa

SEQ ID NO: 144448 - DNA, 1613 bp, Arabidopsis thaliana landsberg
ggtgagactcactgttacccccagtgaagaaggtatcctcaaaattgtcggtgtaaggtgggagttgtctggttccatcgtaggtgtgcattacttccaatctgtgtctgtcaagacaaaagctgcgagaggaagaaggaaaaacaaacttacacccactgatgccttgaaatttttagtcatcaaggtgcaaaactttcctctatggtttaattttttaatgatttgttgcgacctcttatgttaagaaattttgattgtgcagagtctacccaggcttgagggttcaattgatcatctgcctgagaaattgtatgctggagatttacgttatcttgttttagagttaagaaataagtcagattccccaacaaaggtagttttctttttctgatcaacccttatcattcatgttctctaccgtattgccagttaattcattctgttctactattgtgtggatgttacttgtctatgagtttggtttggtatggtctggtttatcatactgatttttgcttgatgacccgataatgtgatgcgataaaccgagttattcttgtgctaacaaagtctgtctgtcctcgtagaatcttaaaatgaagattagccatccaagatttgtaagtcctggaaatcatgaagaagagctgacaaccgaatttccagattgcttaaagaagggcgatgaacataattttgttcagcgtgaaactaatagaacaagtagtgtatttgcatttccacaggtctgtggcaaaccttttcttcaagcctcaaagacgaatgtgcatgttagggtattctaacatggttttgaatgctgatctctttcaggatgtatcactgcaaggagacagatcattaaggtggcctctttggcttcgagctgccatcccaggaacaatatctttgtattttacgatatactatgaaatggaaaatgtatcaagcatgaaataccgcaccctaaggatgcattataatttgcaggtgatgaattttttggctgcatttgtttttttgttaagaatttgactatggtataggcagatttgcattggctaacaagtcttaaccatttctacgtcgtactctttcatctaggttttaccgtgtctacagacctcgttcaaaatcaccccatctccatcaagattgcaagattttcttgtgcgtatggatatcgtgaaccgtgcgaagtcagattgtttccaaattcaccagttgtcaacagttgggtgccggtggggtatctcattgcttcagcctgttgatacaatcttaccttccaaatctctactcgctgggcaagctttatcttgtttcttcatgataaagggtcgtttaaacttagaaagttcaataaatgcatttctagtagcctagtttggtcgttcccttttttaagtctgaaattagaattttgctcaaactttcaggattgcagaaaatccgggactgaagactaggaaaccacgttccttcctcccagccaaactgacgtaaaattgtatactcaggatgacgatgaaaagcttttcgatatcgttagctcacctttagcaagcttccatgaaagtgaaaggtcatgtcagggaccctcggttcag

SEQ ID NO: 144449 - DNA, 1265 bp, Arabidopsis thaliana landsberg
accattttgattaggctctctgtttctctttcttggttctaaaagatatccgtcactctttagtattatgggaatcggtgaagaaagcacaaagcctatttgggggagcgtgaccacacgtcttcaggctacgctctcaacggcaaaatcatgctctcctccgtgatcgttctattcgtcgccgttattatgatcctctgcttccacagctacgcccgttggttattccgtcgtcacaagcgtcgcattcgccgccgtattcgttctcacctccgcactctctccgccattacccgagaccaagctctcgaccaggctgttctcgacaagattccgatcttcgtttactcctccaagaatccaccaccaccagaagagaaggaggagtgctccgtctgcttgtcggagttcgagtaagaagacgaaggccgtcttcttcctaaatgtggccactcttttcacgtcgactgcatcgatattatggttccgttccagatccacttgcccgctttgcagagctccggttcaacccccgtttcaggtcattgaaaccggttcttcttcttcttcttcgccgttgacatttccgacgaagggttgcgagagagaaccgattgacctcgccggtatcattgtggatatttccagagaagttgaatttgaaggctcaaatccgggtctacccatcgaaaacggatcaaagtttccgggtagtcgggttttgtctttaaaaaggctatggagcatctgattgcgggcgggtaaatgggtttctatttttttcaaaaaacgcatgaactttgacacgtggaatttatatcagcacacgtggccgttactcctggggaccactgagcctgagcgtctacttctaattagtctaatcacattaatttgattacccgttcattattattagatttcgaagaaaaccattcggttgtacaatagtaagttaaagttattacaaatcgtattgaatcaggcaccactaaataattatttgattaaaaaaacaacacatgaatgattaaataatttaactaattaacatatcatatatagtataaggttggttgattatgcgatcagtccacccacgaaaggcactccggtttgtccaatccaaccttcaccaacaaggaaattggtgaccgtgaaattggaagcatcagttgcgttgatgacgtgataaccaggccaagtgactcggtttgtcgtgtcagaaccaggtccggtattattatattccgcgtagtaaagtg

SEQ ID NO: 144450 - DNA, 1458 bp, Arabidopsis thaliana landsberg
tttataaggacaaattacataaattgccacgaacggtaacaaagaaaaggaaacgaacctgggacgtttggagtcaggttcggagcgtatttcgccatctttcttcttctcccctaaattttatcttttagagagagaaaaaaagtgagagccgagaaagtgagggaaaattttcatttcaaaacaccttttcttcttcttcttcttcttcttcgtcttcttctccctttataaacacggcaattttctctgcatctcataatttcaccagaatctcagatggcgacgacatcggagatcaacaatgatctttcgttttccgttgtatcgattgttgaagatgttcttcaacaacatagtagccgatcaagcgacgtcggtttggtttccagaaaagttgaagaatcttgtgagtctcttgttgcttttgtattttcttagatccgttcttcaattctgggtttcaaagaaattagggacgaactttgtgatttttgttgacgaaatctaaagatagcttgagaaaattcgaattctggttcacgatgatattgaaattatcgatgtaggaattgttctggtcacggatttatgattgataattgttatgtagctttgagaagatatgaagctgctgggtggcttagagatatgatcggagtttccaatggtaaagattttccaggagagccttctgaagaagagtttaggcttggattgcgaagtgggatcgttctttgtaatgttcttaacaaagttaatcctggatcagtctcaaaggtaaaatatctgttgatgtcaaccttatgtgatccatgtggagaattaacatctcttttacaggtcgttgaagcgccggacgatgttgcagatggagctgcactttcagcttttcaatactttgaaaacataaggaattttttagtagctatagaggaaatggggttgccatcatttgaagcttcagatatggagaaggtagaaaaaacttaaggtttttaaggaaggatagagaggtgttggtttttatttgattgatttgttgaatatgtttttatcagggaggcaagtctataaggatagtgaactgcattcttgcccttaagtcttatagtgagtggaaactgaaaggtgaaaatggtccatggaggtatggatctaacatgaaacataactttggatcgagaaaactatttctgagaaaaagttcagagccatttgttagttctatatcgagaactcagtcgacggatatgttatcaactgatcaacctctgagttctgatgtaagtgaaaaattcctgcatagtggaaatgtttgtttctatggcatggattggggttgtctgatcaaagtgtttacttttcagggagattctagatccataaatgggcttgttcggtcattcattgcagacagaaagcactgaagatattccaaatgtaataaatctgctc

SEQ ID NO: 144451 - DNA, 3591 bp, Arabidopsis thaliana landsberg
gaattatctctgttcaaagcttttgttttgttcccaattctgaagttttgaatcaacaaatcttcaataaagttttctcctttcactatctttccatattcttcttcttagtaaaactttgcattaatggcttacccaaatttgtaagctctttgtttcctcccttcttcttattctcttcttcattctccaaatttgtttctaggtttcttcagtttgagcaatgaagaagtctaaaatcgataattcttcttcacagactcgattcgggcttgttcagttcttattagttgttctgcttttttacttcctctgcatgagcttcgagatcccatttatcttcagaaccgggtctgggtccgggtctgatgatgtttcatcttcttctgttgcggacgcactaccgagaccaatggatgctggtggaggcagcagggaagctaactgggctgccggagaagaagaagaagcagacccacatggacatgggaaggatccggggcgggtacagcttcggctaccgcagcggaaaacgagggaattaaaggccgcctctgagagtagccgcaaccagagctagctcgacaatggcggagctcagcgatgaatgctgaagccctcacaaaacacggaaccctgcgatttcaatgggtcgaaaaatgtgggacggactcgattcgggtttaatcaaacccgataaagctccggttaagacccggattgagaaatgtccggatatggtttcggtttctgagtcggagtttgtgaaccggagtcggatcttggttttgccgtgtgggttaacgttaggatctcacattaccgtcgttctacgccgcattgggctcacgttgagaaagatggtgataagacggcaatggtgagtcagttcatgatggagttacaaggattaaaagcggtggatggtgaagatccgcctcggatcctccattttaacccgaggattaaaggtgattggagtggaagaccagtgattgagcagaacacttgttatcgaatgcaatggggctcaggtttacgttgtgatggtcgtgaatctagtgatgatgaagaatatggtattgacttttgttagactagagttgactttaaactattgtttaatttgacctaatcttgatgaaaaaggtaaagactttaatttgtttttgtgatagttgatggagaggtgaaatgtgagaggtggaagagagatgatgatgatggtggtaataatggtgatgattttgatgaatcaaagaagacatggtggttgaataggttgatgggtcggaggaagaagatgataacacatgattgggattatccttttgctgaagggaagctttttgttcttacacttcgagctgggatggaaggttatcatattagtgttaatggaagacatatcacatcttttccttatagaacggtgagtgactgacaaaaacgcttaatagttcatctctagacttcaatgattgaatggttttatatttcaggggtttgttttggaggatgccactggattagcagtcaaaggaaacattgatgtgcattctgtatatgctgccttattaccttctacgaatcctagttttgcaccgcaaaagcatctcgagatgcaaagcatatggaaagctccttcgttacctcagaagcctgtagagttgttcattggaattctctctgctggtaatcattttgcagagagaatggcggtgaggaagtcatggatgcagcaaaagctggtcagatcatcgaaagttgttgcccggttctttgtggcattggtaagcacaactcttgaaagacaaaaatcacctaaatatagtcattggttaaacgtcatttgtttatgttaattcatcttgcagcatgcaagaaaggaagtcaatgtggatttaaagaaagaagctgagtactttggtgacattgtcatagtaccgtacatggatcattatgaccgtgttgtgctcaagacagttgccatctgcgaatatggggtaacttcttcgtccctcttttgttctccttaccttttattacttttctgattattcatccggaaaacttgtaggtgaacacagtggcggcaaagtacgttatgaaatgtgacgatgatacatttgtgcgtgtggatgctgtgatccaggaagcagaaaaggttaagggaagagagagcctttatattggaaacattaattttaaccataagccattgcgtaccgggaaatgggctgtgacattcgaggtatagattttgtggcagatctgaaactctattgagaaagaaacatgtgatgtttagactttatgttgattttttctgacttgtgaaaccaggaatggccagaagagtattatcctccatatgcgaatggtccggttacatcttgtcatatgatgtagctaagttcattgtcgatgattttgaacaaaagagattaagagtaagttattctttacgcagatatgagattttgaggattcatgtttctttttatgatatggtgttggttcttcttggtcattgcagttatttaagatggaagatgtgagcatgggaatgtgggtggagaagtttaacgaaactagaccagtggcagtggttcacagcctcaagttctgtcagtttggttgcatagaagactacttcaccgctcattatcagtcgcctcgccagatgatttgcatgtgggataagctgcagagacaggggaagccccaatgctgcaacatgagatgacataacattgttttttgacggattctgggatttttcgttagaaaggaaaatgaagaagcagatgggtgataatggagctaactgttttagatctctgtatattatagaaacaatatataatgtatctatatatatatatatatatatatataatataatgaagggttcttgagaagttgactgagaagtcaatagtttttgcagtgtttacaaactatataatccaggggtactgcaagtaatgagggaagaacataacttctcctgtaccttgagtagtctgcgtaaagcccatgagacaaaccgcaacggtctggtatctcttcaacatctttaccaagatgaggatttttaaatccttacaggtacgtgtttcatctgcattcttacattggaaattcttttatcaagatgctaaacaagtgtctggctaattctaacttggctagttgagagtataagttccttgattagcctggttctgagggaaataaagtgggaagctataaatagattcatacagttgctattagtagactgtttgcttaataatttttggaaacttgtgcttatgaacattaccgaagctgttagttagtgactggaataagcatctgacaggacgcacaaaacagagttgcagcacttgcttttcattttgtgattttcctgttcacttggcattggttcccacgtactccctatgctagactctcttcttatgtggtggattcgtttttcacaacagtaacctgatgtcaagacctttcctgattattcgccaaaataactcactgaaccggacaccaaattaccaatgggataaagctgcttcaggctga

SEQ ID NO: 144452 - DNA, 536 bp, Arabidopsis thaliana landsberg
tagcaacgacataagttcaatgtctcaaccatccaaggaaactaatgaaggaacgaaacgtaagtttattttatttactttttcataccttatggttttttaatttttgcttaaaagactttttgtttgaatgttcttacagaaaagtcatcatggaagttaaaactcatagttggtaccatatctcgctcaatccatagtacttttgtatacgaaaaacacctcgtttttaattcttcttaattatctaattccaggagtctcagcagctttgaccctgatgatcttaattgtggtcgtaataatagtgagaacaaagaatatgagaaatagtgagtggaatgatcagaacgttgaagcagttgcaatgttgaaacgatacagttatacaagagtcaagaagatgacaaactcatttgcgcatgttctcggtaaaggaggatttggaactgtctacaaaggaaagttagccgatagcggtcgggatgtcgcagttaagatcttgaaggtgtcagaggggaatggagaagagttca

SEQ ID NO: 144453 - DNA, 1722 bp, Arabidopsis thaliana landsberg
ctttatcagatcaagatcacctggaaaggttcatcgatttggttgagtgctctgtagatcttgacaagctagaaaatggagaatacatgatatcttcaaactgcgacaccaaattggcatctctgaaagatcagaaagaattgctggagcagcagattcacgaattgcacaaaaagacagcgatagaacttgatcttcaggtcgacaaggctcttaaacttgacaaagcagcgcaatttgggcatgtcttcaggatcgcgaagaaggaagagccaaagatcaggaagaagctgacgacacagtttatagtgctggagactcgcaaagacggagtgaagttcacaaacacaaagctaaaaaaactgggcgaccagtaccaaagtgttgtggatgattataggagctgtcaaaaggagctcgttgatcgtgtagttgagactgttaccagcttctctgaggtatgtttagttattcatattaagcattggactgttacagaattggttgtttaaaatcatagtaaactatatgtggaatttatatgtatattgtatggttataggtatttgaggacttagctgggttactttctgaaatggatgttttgttaagctttgctgatttggctgccagttgccctactccatactgtaggccagaaatcacctctttggttagtacaatctcaagttgattattttgttctgaaaatgaatagttttttctttccaagtttatgacataatgttgagagcacggttaataaattgtaggatgctggagatattgtactagaaggaagcagacatccatgtgtagaagctcaagattgggtgaatttcataccaaatgattgcagactcgtaagtattgaatgtggtaaataaactgagacgtctttgtttttcttgtttcccttttgacttgaacaaatacttgtttgccctttactgttctttgaaatcagatgagagggaagagttggtttcaaatagtaacagggcctaacatgggagggaagtccactttcatccgccaggtatgatgatttcctctagttcagttttgcttcatagacgtatgactaaagtcggtttccggccattataaatcccaggttggtgtgattgtgctgatggctcaagttggttcctttgttccttgtgataaagcatcaatttccataagagactgcatctttgcccgtgtaggagcaggcgattgccaagtgagtttaagtttagccctcaatgaacgaaaaactgctgatatcctgaacacccttattccaactttttttcctttggtgtgttagctgcgtggagtgtcaacttttatgcaagaaatgcttgaaaccgcatcgatattgaaaggcgctactgataagtcactgataattatcgatgaacttggtcgtggaacatcaacttatgatggttttggttagtttctctgcaatttctcttctttcatttggatgtttttagtaagttttctattatatattcatttttatggtcatatgtgagatttcagtgctcttgacatcatcgtggtgaatatatcaggtttagcttgggctatatgtgagcatctggttcaagtgaaaagagcaccaactctgtttgctactcacttccatgaacttaaagcattggctcaagcaaactctgaggtctctggtaacactgttggtgtggcaaacttccagatcagcgctca

SEQ ID NO: 144454 - DNA, 1921 bp, Arabidopsis thaliana landsberg
atctccctctctctctctctttttctctctcacacgtttcttttttgtctctctccctgattcatcgccgtagctgtgtgaccgaacattgctgcgagttcctcaaaacccaaatctttcttccacaaagactctgttttttctttcttcctttcttcaatggcgttatcgaaaaacagtaacagtaacagctttaacaagaagaaagtttcgtatatctcagtcccttctcagatcataaactctttatcatcttcctcattacaatctcttcttgtttctcccaagaaatcatcaagaagcaccaacagattcagcttctcttataggaaccctagaatctggttctttactctcttcctcgtctcactctttggaatgttgaaactcggtttcaacgttgacccaatctctctccctttctcacgttacccttgttcaacgacccaacaaccactaagcttcgacggagaacaaaacgctgcatcccatcttggtttggctcaagagccgattttgtctactgggtcatcgaattcgaatgcgattatacaattaaacggtggaaagaacgagactttgttaacggaaggtgatttctggaagcaacctgatgggttagggtttaagccctgtttgggatttacaagtcaatatagaaaagatagcaattcgattttgaagaacagatggaagtatttgcttgttgttgtctctggtgggatgaatcagcaaaggaatcagattgttgatgctgttgtgatcgctaggatccttggagcttctttagttgttcctgttttgcaggttaatgtcatttggggagacgaaaggtataaactttaaactcattataatctcttaaagaagaaagtaataagattgtgacattgttgatctaattgtttgttttgttgcaattttagtgaatttgcggatatattcgatttggagcatttcaaggatgttttagcagatgatgttcatatagtttcgtctttaccttctacacatgttatgacgagacctgttgaagagaagaggactccacttcatgcttctcctcaatggattcgtgctcattatcttaagcgagtaagatttcttaccaaaacaataccattttgaagtgtttctttgtttgactagattgagctaataatagtgttttatttcctctgtttttgcagattaacagagaaagagttttacttctccgtggactcgattcaagactctccaaagacctcccttcagatcttcagaaactccgatgcaaggttgctttccaagcgcttagattttctccgaggattcttgaactcggtaataaactagcttcaagaatgcgtaaccaaggacagtatctctcacttcatctaagaatggagaaagatgtttgggttagaactggttgtctccctggtttaactcccgagtacgatgaaatagtcaacagcgaaagagaacgacaccctgagcttcttaccggtagatcaaacatgacttatcacgagagaaaacttgccggtttatgccctttaactgctctagaagtcacaaggtattataccaactctatgaacaaatccttttgcttatgttttttcaagtaatactaacattttgttgtcattctacaggctgcttaaagcattagaagctccaaaggatgcgagaatctattgggcaggaggagagcctctaggaggaaaagaggttttggagccactaactaaagaattccctcagttctacaacaagcacgatcttgctttacctggcgagcttgaaccatttgccaacaaagcttcggttatggctgctatagactacattgtctgcgaaaagagcgatgttttcataccgtctcatggaggaaatatgggacacgcgttacaagggcaaagagcttacgctg

SEQ ID NO: 144455 - DNA, 547 bp, Arabidopsis thaliana landsberg
gtcttcggacacactctcagtcgcacgctctttcacgcgccttttcgatttcacattcggatccgatttgttcacccgccgaagatccaccggcatcttctctaaacggctctgtcgagaaggatcggcgctattattgctggaggacgattgggtgtttactttttactagtaaacggagtaatttcccaagcgaaaggtttcatttttgagctccacgttgaacgaactaagcggtttctcggagttctcttgcttcctctccacccaggttctcccttcataacttaatttacgttccttacgttttgggtctctgagcctctgttgcccacaaagtgttcgacgaaatgcctgtgtgaaaactcacaatactcatatcatgaaattgtcagcgcaatggagaaaacagacgaagagaggaagaaggctcagatgctggacgctcgggccagaaacattagccacaatgttcgctgcactgagtgtggaagtcagtccattgaagactcgcaggcagatatcgctattctccttagacaggtgt

SEQ ID NO: 144456 - DNA, 816 bp, Arabidopsis thaliana landsberg
aaaaacaaaacaaaacttaagttcatacatcatggccttaatagctaccaaaataagttcacgttcttgttttgtttctgcttatccaaacaattctccaacgtttctgatatccaaatttcccaatacggtcgattctttgtcgcctgcaaatactgctaaaagatcgatcttgagaaacgtccatgcttcagtttctaacccttcgaagcagtttcataataagacatccttagtatatatattctgcttactttttgttgctcatgctgttttcagaactaagaatgtgtttgttcttgtacgtaggaatattcacacgagttgaatatcaagaagatcaagaatatactaagtgcaaacgtagatgttccatccgagaacctggagatgatcgatgtcattcaaagtttaggcattgatctccattttcgacaagggatcgagcaaacccttcacatgatttacaaagaaggcctccaattcaacggtgatctccatgagatagcgcttcgctttcgattgctgagacaagagggtcactatgttcaagaaagtatgtgatgttatatatatatatttacttactatattgctcgtatgagatatgcgtatttactgttacaatttttataaaacatttaggtattttcaaaaacatcctagacaagaagggtggatttaaagacgtagtaaaaaatgacgtcaagggtctaacagaattgtttgaagcttctgagctccgtgtagaaggtgaagaaacactcgacggtgccagagaattcacatatagccgccttaatgaactttgctcag

SEQ ID NO: 144457 - DNA, 1618 bp, Arabidopsis thaliana landsberg
atgtcgaattcgagtgacaaaaacctagaagatgaaaaggtgcagcagcagcaattggaatcggatgacaaaatctcaaacacgaaccaacgaacagagccatctcaggaatgggagacaatggctcgagcttgggtctccgctttccccgacgccaaagccgttgtaagcgccggcgaagtcgagacttggatcggcaccaacttagattccttaccggcggatctccgtcacatgcctcgctccgagattgtagatcgtctcctctcaatccaacattacatgagaccaacaccatcatctgatcaaaacgaggtaacgtcactcattgattgataccatttttgtttctcaggatttggattgattttgtgtatgtgttgtgaatgatatatacagcaaaatgtggaagcagatcaacaacatccagctcgatttcagaggactgatcaatggttaccagtgtattcgtggttagagtcattggataatggagagttggtgaaatctaaggatatttctgaatggcttgatgcgaatcctgaggttaaacaagaactttcttctaggcattctcgttatcatttgactcattatgtcaagaaatgtcatctcaagattcttaaaaggaaggagaagaaggttagcttccaaagtctactgcttttgtctttatttagtttaatttgcaatgtcaataacttgttttggcattttgattagggattaatccggctgagcagagctactgcaatggaagttcacaaagagtttggcgagaaacaccatgctacgctttcgggtaacgctatttcctctatatccgagttcattagtaacatagtgtagctagatccccaaatgcaaaagttttttgctcttcatgttgaagatatgtttagttagagttcattctatagtgtaatagacatttagtgacactactctttggatgcaagtcgatcggtgaagttagataacattcgaaagtgtaatatatttggtgacaatctttaaaattattttaagtggatctataaagttagataacattcatgtgtatttcctttatgattgtctactcttaatgaggtatgttagtgatgtactgttgttcttaattttgggtacaaaatgtgtagctgatcccatgagcaacataccgaaagacagtgacctctaccgcacaaaacagaaagaagctaagcgcagatttgagatgtaagtcagaatttccaaacctcacttatgatatagcagagacttttataattctcattaatcatgtttctttacatcattttcagcttggttgagctcgagaagagactggctccgcattttgcaaagcctcgcataggaaacagatgaagaacttagctaccagaagctggcgtttagatgatctctgtaagtatgttctctgctttggtgctgtagaactgtttgtgaaattgtaaggtcatgtagctgtatccaaatattagatggagtctagtttggtgatgtaatttgtaatcttttccaatatcaacaataatattttatcgaaaaggaaaccaaatccagcattatgtagagagagagacactcttcaacaatatttgcctttcttacc

SEQ ID NO: 144458 - DNA, 314 bp, Arabidopsis thaliana landsberg
atcgtgagtgtttctcaactgtaaggtaaatgatcacgttttctctctgtagtctcacttttcgccccctctaattttagcgcagcctttgtcgcttggcatgcacaccagtgttcgtcaaagttcccaaatgaatgttctcaaagtaacaactttaatcgattaacttgctttttgttttgaagaattgatttcagggttgtttgatcatggaacgatggtccggcgttttgaagattccgttggatgctactactagcaactactacagggttgcagcatctctttgcctttcttcttccaaaactctaact

SEQ ID NO: 144459 - DNA, 2669 bp, Arabidopsis thaliana landsberg
  unsure (1)..(2669): unsure at all n locations
tatggcgaggatttttctacctctgctgatgagttgcgtccggattctggtgttagtcgcctggtaagtggctgtgtttcttagtctttgatggtgattttatattaacaacccttgttgattatgattgttgttttctagttggtcgaaaaattgtctgccaaagcccctgatggtccaacaaaggtcaaaattttgatggcaatcgctgaggagcataatgtcgtctgggaggcacaatctttcgtcgaatcagatccaaaagataccgagttgttggtaagttatcacgtttcagagtaaaggcatcagttgttttatctactcgctaatgttaaccataagttttactttgcttctgttttagaatggagcaaactcgtttcagccagcgagtagtatgaacatggattcatctataaactcgaacaaggaacagcctccaaacatccatgctccagctactgtcaatgctcatcatggatcaagtgaaagacatcattccccagagaactcttatgcaaatggtggaagatcttcaagccgtagtaataatgttacttctgggaaggctgatgactactatcattcgaaagcgagaccttctcgtaagcggttttcttctgctatttctgtattttttttatattatgagtcatttaacggagtttttatgtttgacaggatctaggcctgatgaaggagaatgtagaaatccaaatcatggctatgagaattcatcttcaagaaataagcagaaatgggaaccagaatttgttgattccacagacgctgcacgtgctgctgctgaagctgctgaaagagcaagtttcgctgctagagcagctgccgaactttcgaacaaagaaaggatgacgaggcaggattccacacagtcgcatatatcctctgcatctgtaaatctcagaaacgagccttcacatcgacgtgacagatcgaatgcacaaagagaaagtttttctgaagatcatgtttcgcctagacgaaatggtaggatgcagtatgaagatatggacagaacccggcaagacagatatgatagggcagaacagattcctcctgtagatcagccatcaggaagacattccgtggataactcgagaaataacggttcctttggtagagagaagcagccaagccaggatgagacggatataaatgttggttactcagaagatgttcacctcaggaagcagtcaagtcgggtttcatcacattcacattcaagcaattattctgatgagaatgaccttggctcagattttatgaagtcaccaagcatcgtggaggaaaacatatttgccactgaatatgatcaccaatctcagagcagctttaaagatatagattcccatgatnnnnnnnnnnnnnnnnnnnnnncagctactgataattatgatgactatagttcattttttgatcaacctaaatttgatgcggaagataatcattatcaagatgaaattgatcatggtgtaggattctcattgcttggcagcaaaacatctgcttcagctgcttcgtggagcttcaaaggagatcatagtaagtcccatggaaaacacagcagctcgagctcacaagttttccaagagaacccaagttcccgattatttgatgatgtctctacaagtcctccggcttcttaccatgagcctgaccnnnnnnnnnnnnnnnnnnnnnnnnnnnnnnnctcagaaagcgatggtgatcagcctatagacaaagtttctggagatgtacatgagagggggaatctgacatctgatcgatctcacaaatttaaagtctctgattctgctggacacgaagttttccctttagacacagaagaacacacagataattcaaggacacgggaagaatcagattcagactcagagcctcagcttggtctgaggcttggagctttggccggtggatttaggaacaaaaagacactcccaccctacagaatgagttcggcatcgtccaaggctgaaaaggaatatatccaaatcgatgattttggtcagtctagcagaaaagatctttacagtaagaaagcaagcaacaccgagacaagaccaagttttatgcctcctcatccatcttctagtgatgaagacgactcagacatgcaacatccaggaagaacagaaacaaaatcagattccttatatagtcattcccgtgtcaaccatgatgactcggaggaagaaaaactcccaacacggtcttcttcaagaattcaagagaggagtcataagccatcaacaggaataagggatcagaagagaacgaacttcaagatgccagtttcagcatcgtctgaagatgaggaagaagtcgaaagagaggctgcacgcatcaatgccaagccaaataaaacaaccgggtatgggttctctctaaggacaaagggccaatcgaaagctaatgagaaacattcattaccagtgacaacgaagaaaaccgacaaagagtctcatgatcagccatctccaaggacagtaacttccagccatgttccacaaactgtaaaatcacccgatccagacaccccatccagggagagggagagagctagtcatgttcaccccaacctcccagaatatgacgatatctttgcaaggctcggagcgcttcgtgctcccagtcgacgctga

SEQ ID NO: 144460 - DNA, 2341 bp, Arabidopsis thaliana landsberg
  unsure (1)..(2341): unsure at all n locations
atggctcgtattgtagcagctaatgatgatgattccatggagctaaacaccatctcctctatacacgattcaacattagggcaacttctgaagaacgttagtgacgtcagaaaaatggctattggagacgagactccagttcacgagtccttaaaccaagactacaacgatggttacatgcgtacagttccattcgttctctcattcgacaatctcacatacaacgtctctgttcatccaaaactagacttccgcaatctctttccacgtacgagaacagaggatccggagatagctcaaaccgcgaggccaaaaactaaaacccttctcaataatatctctggcgagactcgtgacggagagattcttgccgttctaggcgctagcgggtcaggcaaatccactttgatcgacgctttagcgaatcggatagcaaaaggaagcttgaagggcacggtaacgcttaacggagaagctcttcaatctcggatgctgaaagttatctcagcttatgtaatgcaagacgatcttctcttcccgatgcttactgtcgaagaaaccttaatgtttgcagctgagtttcgattaccaagaagcttacctaaatccaagaagaagcttcgagttcaagccctaatcgaccagttagggataagaaacgctgctaaaacaatcattggagacgaaggacaccgtggaatctccggtggagaaagaaggcgagtttcgatcggaatcgatatcatccacgacccgattgttctcttcctcgacgaacctacttctggtttagattccacaagtgctttcatggtggttaaagtattgaagagaatcgcagagagtggcagtatcgttataatgtcaatacatcagccaagtcacagagttctcagtttacttgatcgtcttatcttcttgtcacgtggacacaccgtctttagtggttctccggcgagtctaccaagctttttcgccgggttcggtaatccgataccggaaaacgagaatcaaacggagtttgcactcgatctaatcagagaactcgaaggatcagctggaggaacaagaggattagttgaattcaacaagaaatggcaagagatgaagaaacagagcaatcctcaaaccctaactccgccggcttctccaaacccaaatttaaccttgaaagaagcgatttccgccagcataagcagaggaaaactagtctccggcggcggcggtggttcctccgccataaaccacggtggcggaaccttagccgtccctgcattcgcgaatccgtgtctggatcgaaatcaaaactctcaccagacgctcaatcctcaactcccgacgacaaccggagctactcggaatgcgattagccaccgtaatcgtcaccggattcatcttagccaccgtattctggcgattggataattcaccaaaaggagttcaagagcggttagggttctctgcattcgcaatgtcatacatgttctacactagcgccgatgctcttcccgtgttcctccaggaacgttacatcttcatgagagaaactgcttacaacgcttacggangatcctcatacgttctctctcacgccatcgtctcattcccgtcgctcatcttcctctctgtagctttcgcggcgacgacgtattgggcagtgggcttagatggaggcctaacgggccttttgttctactgtctgatcattttagcctcgttctggtcaggaagctcctttgtcacgtttctatcaggtgtggttcctagtgtgatgttgggttacacaatcgtcgttgctattttggcttacttcttgttgttcagtggattcttcatcaacagaaaccgaatcccggattactggatttggtttcattacatgtcattggtgaagtacccgtatgaagcggttttacagaacgagttctctgatgcgaccaagtgttttgtgagaggagttcagattttcgacaacacgccattaggggaactaccggaagtgatgaagctgaagcttcttggtacagtgagcaagtccctcggggtaacgatatcgagcacgacttgtttaactactggttcagatattctgaggcagcaaggtgtggttcagctgagtaaatggaattgcttgttcatcacagttgcttttgggttcttttttaggattttgttctacttcactttgttactaggaagcaagaacaagcggaggtgaaaacaactagaagacccaaatcaaaacatacttgtattttctgtttgtaattccttgaattgtttaatgaaaatggtttcttttcatatatataaaaagaggtatgtctcctggattccctta

SEQ ID NO: 144461 - DNA, 1198 bp, Arabidopsis thaliana landsberg
tctcaatttctctcatgacgagtagtagtggaagcctcaaactagagatccacactgatgacaagacgccgggaaagtggagcgtaccgctcggcgatgatgttttccgaaggttcttgagcgggggaggaggctcggagatggctgtgttcggtgaggggtctctttttagcccgtttttgttcgggaagtactttgatccgtcagacgcctttccgttgtgggaatttgaagctgaggttttgctggcgagccttaggagcttaggacagtgtagagtcgattggtctcagacggatcaagcttatgtccttaaatccgatatccccggtacgtacgtctttcttacaccacaattctcttatttattttcattcggaaacgtttatttctgctttagtaaaaaataaaaatacaatagatcgaactttaaaaaagaaaactaaatcttcgttcaaatgatttgttatacatcataacgatcaaaactgaatatgtgaactgatgaatggttgatatagtacaaatatgaacagaacctaagtttctttaaaagtgaacgtgaaccaatctcaaaacgtaactcattcaaatttaggatttcatttgtcaattttactttaaatatcaaaatgatcgaaccacaacttgaattggacactagttataatgatggtaacgagaaagatgaaatggttcgcaaaattttcaaataataatgtatcttttaaaatggtataaaataaggaaaaaaaaaactgattaaatttttggtacttgtatattagtggtggggaaaatacagtgcaggtgtacgtggacattaacggaagagtgatggagattagtggccaatggaacagcaacaagaaagcggcgaccaacagtgactggagaagcggccggtggtgggaacatggctatgtccgccgtctcgagctccctagcgatgccgacgccaaatactctgaagctttcctctctaacaacgacgattactctttcttagagatccgaatccctaagataaattctaagaacaagttttaatctgatcatgtcgccttgacgagttttaactttagattcttttcgtaattttgttttctttagttaactattattatagatatgaaattctgtggtagagacacaatggatgaatgatatgttatatatacatactataaaatatatc

SEQ ID NO: 144462 - DNA, 1111 bp, Arabidopsis thaliana landsberg
atgggtattcgaaattcgccatccccttcatctccttcatcaggtaaaaatcatttttttaagctcttgagggttgtttatttatcaatcactgacttttcctttccatgtctcgaaattaagtaccttttgatgttttaatttttctaaccccgatctgattaattaactaaattgtgtgtctgtggtttttttaatgaatatgggtttcgtaaatggaagatcgatgttgacttgctaactgaagggttcatcagcactgtctagttatggttgcgtaaagaactagtttttaattttctatgttttttgtacttaagattttgagtttgctattggttctttaagccgaacttagtttttagggatcaaatgggtacttacatcaccgttctttatttgttcatcaacatgtttcttattgataaaagcaaaacttggtatgcttctagaagcttcttaagccaacaagattagtggttcaaatgcagaacattctagattgaatatctgatgcaaagggaaatgcttgatttggggatctagtgcctttgtttaagggttttctttatctgtatcaagattgtatctgaggtaaatggttattcatagcaataattagtcggattggtatgtttcagattcctttgtctcctatgcggagcaaagtactaggttgtacaataagatggaacaggatttacaagaaaacggacccgtgtttcttaaacaaggtgaaacgtctcagtcattgtcactttcagatctcttcacactgaaagatggaaagatagcacctgtccttaaggtagaatgttatatccttacttttactattgttagaatggaataatggtttgtataacgatagctaaatatcatgtatgattgtataaaatattcaggttgcgaatccccctgtgcgagctaatgtattacatctcagcacagaatactctgtcccagtctcgtgagtgtgtaacttgccccttctcaatctcaatgcaaatttaccctcttttcaaaatgttctactgctaaaaggtgtccttctatgttttattgcagggaagtcgtaaaaaatgtgttcagtccttacttcgaaaatagt

SEQ ID NO: 144463 - DNA, 662 bp, Arabidopsis thaliana landsberg
cgaatctctctctctctcttcaacccctcttctcaatctagggttagggtttcgattctgctagaggttttttttctcccaacttatacttctaagccctctcttcataagccttgttgactcttcttcttaatttgaagaacttcgtaggctaagcatgtcgtgattatcccaaatttctggtaaatttgatttctgctacttctactcgtcattttattctgaattcgtctttgcgttcgaattatttcaagcaattagcttcatcttcgtgtgaaatttcaatgttttaggatttgatttggtgtcataaagaacttatttttctcgtgattttgcatcttcttttaagtttttctgggctggtttcatggctcctttatcgtttcacgtgaatttcagtgtcgattcgattgggattttgagaatagttggggacgtttctgtattgcaaaagaatctgtgaatcttttttattcttctgatataattttccaaggagattaatcgttgtatcctactgctgtagcttatttgtttaagtttgatattatttcttcaaaacaatcttcacaaatttctcatgttcgttcttatgttaatttcaggtgtttattcaaactccattgttacaaagattttctttgataagtaaaagcatg

SEQ ID NO: 144464 - DNA, 2011 bp, Arabidopsis thaliana landsberg
gttaagctaaaaaaagtttgagtcttggttctgtttttggctctgtttctgttaacgtcaatacaaagtggttattggtgaggggacaggatgcttacccttgatatggctatatctacttactgtgtgtgctgctgggaggacattgcaccctctccctgttaaaggacccaaaactgtcaagcttcaacttcagacttcacgtccttataacatcgcacacagaggttccaatggagagatcccagaagaaactacagctgcatacttggtatactgttgatctttcttgatcaatctccttctctttgatgatttccgaagataagaagtaaaacattttttttttcttatgatagaaagcaattgaagaaggcacagacttcatagaaacagatatcttatcatccaaagatggtgtgctcatatgtttccatgattgtattctcgacgaaacaaccaatgttgcgagccacaaggagtttgcagatcgtaaaaggacatatgatgtccaaggattcaacattactggctttttcacttgtacgttacatcaattcttcttctgtttctaggtctgagtcaatgcatgctgctggattcggtctcaggatagagtcatttgctcaaaatatctctcgcacataatctcataacagctagagaagcatctaataaagcttcaagttggtttgtttgagtctgaatgatttgctaacaagtggttcctctttcattgcttgtagttgattttacacttaaagaactaaagcaactacgtataaagcagcgatatgcttttcgggatcagcaatacaacggtttgctcgcctttctttcctgtacttttggctgttggaagatataaagtaagaactgcataatacaggaaatctttaaccatgcccatatcttgcttgtatttcaggaatgtccctatcattacatttgaggaatttcttaccattgctcgggatgctccaagagttgttggaatatatcctgagattaaaaatccagttttaatgaaccagcatgtgagtcacaatcctaaaagcttgacttctactcttactgaaatcctttagagtgacttttaaaaagccacatataccatttggttcaatttgcagaaaatgatttctttttggctttcactcccactgcaggtgagtcattaacctttgcttctatcactgttatatatttgcaggtcaaatggcctggtggtaagaaatttgaggataaagttgtggagacacttaagaagtatgggtatggaggctcgtatttgtccaagaagtggttgaaaaaaccactatttattcagtcatttgccccaacttcactcgtgtacatatcaaacttgacagactcgccgaaagtccttctaatagacgatgttaccatgccaacgcaagacactaaccaggtcaatgctctgctcgtcgtattgtttatgattcctgaaagttcttttgcttctattaaaagtgactgattgatctttcttgcaaatctaagcagacatatgcagagactcacatcagatgcgtatttcgaatacatcaagcaatatgttgtgggtatcggaccatggaaggatacaattgttccggtaaacaacaactatgtgctagcccccacagatttggtcaaaagagctcacgcacacaatctgcaggtaggatttatttaagattcatccggtgactgagagtcagtaacacatgctaacttcctgaccatgttcttctgttacaaacacaggtgcatccctatacgtacaggaatgaactcgtatttcttacactataactttagccaagacccgtataaggagtacgactactggatcaatgagattggagttgatggactcttcactgatttcacaggcagcctccataactttcaagaatggacatctccattacctgatacctccaagtctccacgacagcttcttagtcaaattgcctcattggtcctcccttatgcaaaggcttga

SEQ ID NO: 144465 - DNA, 942 bp, Arabidopsis thaliana landsberg
atgatttcacggcctggtctcgatggtgagatagttactatcaaatccttgaaagtaagttcctttagccactttcatagtatgtctcattgaattattgttgttaatattgattcgacgaatgtttcatcgtgtttgcaggggattaatgatcagataatgtccgttgactacaaaagctcgaggatcgagattctaactgctgattctcaatcaactttaaagaatggtgttgtaactctagtcacgggtttagtgatcgggaacgatggaggaaggaggaaattttctcagagtttctttcttgtgtcgcggaatggaagctactttgtgctgaatgatacctttaggtatgtgtctgatgagtttgttgaaccagaagctaccaaggaggttgaggagagtcagtcaacaaatgctatcactggtaagtcgttttaccaatggtttcaagaatctgaaaatattcaccaccttgacattgttttgattcatgtggtaatggttttgattagcagagcctgcaaatgaaagtgtagaggcggttattgtccctactgaagctaaaactacggtgacgaagccagcaagtgccataccaaacggacatgcgaaagtccctgaggagaaagttgtgaatgaaaacagtagcttacctaaagctgctgaagcaaaacttcaagaggaggttcccaagaaatcgtttgcattaattgtaagtctcctcctttgtgcttagttttttatcgtataatatcctctaatctgttggtgtgatttcaaacttacaggttcaatctctggctcaaagcgctggtactttacaggttaaagcctcgccggtcaagcgtaaacctgtcgaaaaaccggttgctgctccggagcgcaaagctccttccccaattcgtaaacaggcttctgctgaaagcattaaaccacaag

SEQ ID NO: 144466 - DNA, 1391 bp, Arabidopsis thaliana landsberg
ctgctatttatgagtctgtagatgaacctgaggaagcattgaagctacttcagaagtctatgaaattgcttgaggataagccaggacagcagagcgccattgcaggtaatttgtccataccatgaatgttcctttagctggattgctatgcagtgtagttgaaattctgcgattttggtgttgaattgaaagtaaaatacttatttttgtattgtcaagcatgtaaggaaaaaccgcttatagtaactttactcgttttgctgctttgacctacctattttagagttagtcaagacgctaatctattattgtgtgttagtgatattgtcgaagaattctagacataagagatctgagtagttatctgagccgtagtttaggtaagtagattgtgatcgtacaagaaaatgaatataaatgtgagtctctagctatatcagcatgagattgtcaatcttctcgacaagcttcctttacattagttttggctttgtatgtaaatacttgcagggttagaggcacggatgggagttatgtattacacagtggggaggtacgaggacgcaagaaacgcgtttgagagcgctgtgacaaagctacgggcagcgggtgagaaatctgccttcttcggtgttgtattaaaccagatgggactagcctgcgttcagcttttcaagattgatgaagcgggtgagctgtttgaagaagcaagaggtattcttgaacaagaacgtggaccgtgtgatcaggacactctcggtgtttatagcaatctagctgctacctatgacgctatgggacggtaatgtcctaaagaaaactatctgacataacaaaactatatgattggttaaattagattagacatccttaatgaaacattaaagtctttctttgtgatggctatgtaatttgcaggatagaggatgcgattgagatattagagcaggttctgaagctgagagaggaaaagcttgggactgcgaatccggatttcgaagacgagaagaaacgtttggccgagcttttgaaggaagctgggcggtcgcggaactacaaagccaagtcgctccagaatctgattgatccaaatgcaagacctccgaagaaagagtcttctgctaagaaatggcccagcctcggtttcaagttctgaggaaaaaattatcatataaaataaatcatccacatatatattcaatattttattttattgttattgttatattttttatctgatctattttctgtatcataatctgaggttgatgaattaatttcatgtatagtgtttttatttgagtttggcgaaatactgccaagatggtgagctgtttgtttgagtttgaaatttctttaattcaatcacttttttcttcttctgataatta

SEQ ID NO: 144467 - DNA, 612 bp, Arabidopsis thaliana landsberg
atggatgctacatgtgtggtggtgtgggacatttcgctagggattgtaggcaaaacggcggtggaaacgttggaggtggtggaaacacttgttatacctgtggcggagttggccacattgcgaaagtttgcaccagcaagataccttctggtggtggtggtggtggtcgtgcttgttacgaatgtggaggaactggccatttggctcgtgactgtgatcggagaggaagtggaagcagcggaggtggcggtggcagtaacaagtgcttcatctgcggcaaggaaggtcactttgcgagggaatgtacttcggttgcttaacaaaaagatgcaaagaagaagagtaatgttcataaacctcttttgttttctattaaaatctacctaatgctcctttttggtgactataatgtgattgctaaagtcgtttaggatgtttaagaatggttgttttgggagtttttgatctctctatattactcttttgactggtttatgcaacctgttcactgcttttgttgatgccataagtttgagatcttgaatgatatgtgtgcttgcttatttacagtttcttgtctttccttgcaatgagtgtgattgtatgacttga

SEQ ID NO: 144468 - DNA, 409 bp, Arabidopsis thaliana landsberg
tgcatcacacaaatcaaaacgtatttattagcaacaaccaaatatcttaatattttttataagttaccaataaataccagctttcccataatacttaaaaaccctaaccttaaaaactcatttattagagcatttttgattttgtgctattacctactacccttggcttactactaacaacatcacacacaactcaaactcacagaagctcatctataaacgatttccctttaaatttctccattttgaatcccattttctccatccttaaccgttctgcttcgatctcaaccattttgagcccggcgtttccttaatccggcgcttcacttccaccacttccttttccatcctaaccaaatccgtttcttgagcctcaagctcttctctcttagccttcactaaacca

SEQ ID NO: 144469 - DNA, 3783 bp, Arabidopsis thaliana landsberg
aaatagactagaaagagaaagaaagagagagagagagagagagaaccagagattatcgaacacgaagcagaagacgattcgtggaagagacttggagagaatatttctcaatgtctcctctcccaatcttccatcgtcttcctcacgccacgttctcttcctttctcctctcactggttcgttccctccattgacgaatgttgcattttgcttgttacctacgactgcttttgattctctttctccatttgggtttcttccgattactttaatacttcttcaatttggacttgtcgtcaacattttcttgctaaagtatggattttttgttgttgggttactgttcagtttgactttgatttcagagaacccattctttgttgttcttgcgtgctacattgcttttagatctgattcactaaatccgttaaaaataccaaatctttatcgtgtttgtctttttgtcctctaagagcattaaaacttggtgtttttcttgtcctctagttctgggttctctaatcgttttctcttttacttgtcattgtagtctcaagctggaagttctaaaacatcagtggcattcctcaatgccttcaaatcagaagatatcattgctcgaattggactatggtggcagcttataagggctgttgtagttgtacctgtcttcaagttcctggtggttctatgtttggtcatgtctgtcatgttcttcgtcgaggttatgtacatgggaatcgttgttttgtatgtcaagctgttcaagaggaagccagagaaattttacaaatgggaagctatggaggatgatgttgagtgtggcagtgcaagctatcctatggttcttgtgcagatacctatgtacaatgaaaaagaggtagagactgaaccagcaactatttttccagtgattggtatgtggttgaacttatttggtgggatgttaatgtatgtggtaggtttgtgagcaatctattgcagctgcttgcaaaatctcatggccatcgaatcgtataataattcaagtgcttgatgattccacggatccagccagtaaggtccttgtttaacctctatagacacttgtccctttctcatctaaatccctctgttttagactcatgattgtgttgtgttaaagtgagttccttaacatttgattatgtggcaatgatggacggaaacaggagttggtgaaaaaggagtgtgacagatggtctaaagaaggtgtcaacataacgtttgagataagggacaacaggaacggatacaaagctggtgcgttgagagaaggaatgaggcatagctatgtgaagcagtgtgattatgttgctatctttgatgctgatttccagcctgatcctgacttcctccaccgcactgttccattcttaattcacaatcccaagttagcacttgtacaaggccggtgggagtttggtaaaattccttagttacctttcttttctttttccatcataagtttatagattgtacatgctttgagatttttctttgcaaacaatctcagtgaacgcgggtcaatgcatgatgacgagattacaggagatgtctctaagttaccactttacaatagagcagcaagttggatcttcaacatttgccttctttgggttcaacggtatagcattctcaattttcttttcttttctctccataaagctttttcttattctctgaaactattgcaggaactgctggcgtctggagaatctcagcattgaatgagtccgggggatggaatgaccagacaacagtagaagacatggatttagctgtacgagctacactgagaggctggaagtttctatatatcgatgatctcaaggtatgtatagaagattcctctcttttcttggaatcttggattgtgcatttgaatcattaatgcgttatctgtaggtaaaaagtgagttaccttgttccttcaaagctctgcgtagccagcagcatcgatggacttgcggccctgccaatcttttaaggaaaatggctggacaaataataagaagcgagaatgtttctctatggaagaagtggtatatgttgtacagcttcttcttcatgcgcaagatcgtggctcacatcctcacattctgcttctactgtgttatcttgccagcaactgtattgttcccagaagtcacagttccgaaatgggctgcattttatctcccttctttgatcactctcttaatcgcaattggtagactaagatcaatccaccttttggctttctgggttctatttgagaatgcaatgtccctgctaagagcaaaggctctggtcatgggcttgttcgaaacaggaagagtacaagaatgggttgtgacggagaagttaggtgatactctcaagacgaagctgattccacaagttcctaacgtcagattcagagagaggtaagttagacatttcgtattacgcctactttacttaaccgagtttgagcttaaaccattgtgttgcaatcagggtgcatttgctggagctattggttggagcgtacctgttattctgcggaatctacgacatcgtctatgggaagaacacactctatgtgtaccttctgtttcagtcagtggccttcttcgttgttggttttggatttgtaggaaaatatgttcctgcttcctcttacttagcataggatagatcatagtgtctcaatatgtttcagaaggttttttgtttgatgtcatattgagaacaatgcctatatactactctccatttgtattaacacttgagtatctgtaaccaacgaagctcagatgtgaccaatattatttttttaacagtataaaaccacttaacacttatttagtttgttgacctcgtggcttcatattgactacagaatgaaataggtaaactataaagtctacactatttatggctgaaatttatttgaatacatatccaccacttgtcttgttcttgaaacacacggtcgtggccatgtctgttctgcttccgatctatcctctccaatccttggccagaagcaagagattgtttccgattcgaaccagatcaaaaccggtttgtttagcactgaccaatgctcaaacaaacggtggtgaccaagaggagaaagtagtgattgttggcgccgggattggcggacttgccactgccgtttcactccacaggtaagtatgaattacaaaaattggttctttgaattttcttgaaactcaagagccactaaaccggattctttggttgactggttaggcttggaatccggtcggtggtgttggagcaggcagagtcgcttcgtactggtggaacatcgctgacgctattcaagaatgggtggcgcgttcttgatgccatctccgtcgggcctcaactccgaaagcagtttcttgaaatcgaagggtacagtttctttctgcccatatcaaaaagatgattcggtcttctaataatgttaggagttttgttatccagaaagtgagaaactttgttattggttttacctgagtgtgttggtatgatcagctgagcaggatggtagtgaagaaggaagatggaagagagcttcgttctttcaaattcaaagacgaagatcaaaggtagctacttcagctttctggttaggagcattccatttgattcatgcgtgtaaccaacaaagtatatgtcttatatagccaagaagttcgggccccggacccgcgagtactcttggaaacacttgaaagcaagcttcctccacaaaccattcggttttcctccaaactggaaagg

SEQ ID NO: 144470 - DNA, 1971 bp, Arabidopsis thaliana landsberg
  unsure (1)..(1971): unsure at all n locations
atcattttctcttcattcaacaaatctcacgggggaggacttaactcctccatgataacgccgcgagcgggaaatctcaccgaggtanagatttactccgttcaatcgtcacgagagccgacgccgagagcttctagctttaatcagacagatttctacgcaatgtttaacgcaagcaaagctccaagccctcgtcacggttacactaatagctacggcnngcgggggagctggtccaggtggagatgtttactcacttcagtcttctaaaggcgtgacgccgagaacgtcaaattttgatgaggaagttatgaagacggcgaaaaaagcaggaagaggaggcanaatatgagtggggaattatacaacaataataggggtatgaattttttaatatatatatatatatatattnattttttatttatttttttaaaaaaatatattttgcttctttataaatttaaatagatataagaatcgattcagatattattattattttccatcagtcaccggtgattataagtgggatattattaggtttaaaaaggtttaaaagttaagtaaagagttcatcaaataattttgcgtaattatttttttcttttaacaaaataataataatttagtatatcacttccaaaactcttaggtttttaaactgattatagttttggaaaacaaaatattaattttgtattttgaaatttaaatgtgattttttcattataatgtaatgttttaaaataaaattttctataatttatggtcagttccgtcgtacccaccgccgaacccaatgttcacggggtcaacgagtggagcaagtggagtcaagaaaaaggaaagtggtggcggaggaagcggtggcggagtaggagtaggaggacaaaacaaggagatgaacatgttcgtgtggagttcgagtgcttctccggtgtcggaagccaacgcgaagaatgctatgaccagaggttcttccaccgatgtatccaccgaccctaaagtttctattcctcctcacgacaacctcgctactaaaggtttattaatctccaacttatttcatatttttttttatcattacttgccacgcttctattttttttttaacttttaggaaaaatgtataaagctcaatatcggttctaagttttttttatagttttttcaaagtttcaaaacttatgaaaacttttaaactaattaaagtagatttttatttggttccgtacggctttctataagttagttttttggtcgaagaaaggtcataataaatttagtttagtattttctgtgatatttaattataattatattcatacttggtgatgacagcgatgcagaatctgatagagaacatgtcaccgggaagaaaagggcatgtggaaatggaccaagacggtaataacgggggaaagtcaccttacatgggcaaaaaaggtagcgacgtggaagacggcggtcccggtcctaggaaacagcagatgccgccggcgagtgtgatgacgagactaattctgataatggtttggagaaaactcattcgaaaccctaacacttactctagtctctttggccttgcttggtcccttgtctctttcaagtaagtactaataataatgtcacaatcatataacataacaatatatttgggcaattgcttgatgttgttgatcattttatgggacaggtggaatataaagatgccaacgataatgagtggatcgatttcgatattatctgatgctggtcttggaatggctatgtttagtcttggtatagttcccttcatatatatatttagttatagtctttggtgcttttttttttgctaattattgatacatataggtctatttatggcattgcaaccaaagattattgcgtgcggaaaatcagtagcagggtttgcgatggccgtaaggttcttgactggaccagccgtgatcgcagaaacctcaa

SEQ ID NO: 144471 - DNA, 814 bp, Arabidopsis thaliana landsberg
atgaaagttgtcggaagagaacaaagtatcgacgccggtcaaaggcgttacgacgtcgtaataaacaccagagaccttcgtttctcaacggaaggagggaagctcttttggctcttagatcttccctctcatccggatcaagcttcaaaatttgtatgctttattcgatttaatgtctttgatacacttgttcttgttgttgggtctgctgagccttgaagctgcggcgtcgttttcaccgggatcgcgctcgattctccgggacatcggcagtaacatcgccgatcagaaagacaacgctatcgaattgaacgctaccaactttgattcagttttccaagattcccccgccaaatatgccgttttagagttcttcgctcactggtcagttttctcattctctctctctctcgtaaaaaatctgaaaaaatttcgaactttaggctttttagcactggatcttacacggaatttgtttgcaagtgtccttcatattcgaacctgactttacgttatccaattctctgagatttatccggaaataacttaactttatgtataaatgcgaaaggcttgtatactgacattgacccataatttttgtttggctcaaggtgccctgcatgtagaaactacaaggtaacaacgccattcaatgtcttattattcaatgcttactcttgtcaatgttgtttatatccaatgggtgactctgctgcagccacattatgaaaaagttgcaaggctattcaatggagcagacgcagtatatcctggtgtcgttttgatgaccagagttgattgtgcgataaag

SEQ ID NO: 144472 - DNA, 1633 bp, Arabidopsis thaliana landsberg
acaaagaggcctgagtataaaaaaacaaatcggacgcttcgagtttttcttgaggaagaatccacacacacacagaagaagaatctcatcacgaattttagctatgggttggatctggattgacgattcatccgcctctaaagccggtgctgatctcaccgataaaccgctcggagattctgccgccgccgccgaaaattgctccacgaccacggtggtaagatctcagtgcaagacggaggaggtcgagcctggaaagttcgtcaggaaatgcgacaaaacagaagaaatcctccgccactgttttgggaagtgagtgtttcggatattttctcgcttttgatcataaccctaattaagcaaaagataagcttttagattttgaattacatgtggaaaacaaatctccagggtttatagatcaaatagatgaagtgtgtttgttttgagctctgagttaaatttttttgacgtttttgtggttatgtaaaagctaaaagccaatagttaaagattgactctaaatttgtgtttctgatgctaagcttactaatatgaattgcagaaagatagttgtgtttatgcactggaatggttacattgcttacttcttgtggtttgatgttgttttcttcgaaaggactctctatcactgaaccattatggtaaaaatgtttcattataaaagttcttatgattttatcatctttgtagtgttataactggcatgttttttttggttaagtaagtggagcaactgctggttagtcttttttgggttaagtaagtggagtactctcatataagaagaagatgcatagagtatcacatcacagtttctgtgtattcggcgagcttcatgtttgtttgtttgctacctgtgatatgagttattccatgttaaatgtaatgctttcctttggaagacaactcttgttttctttctcgccctttcatgtgtgattttgagattgagccattaaaatgttcaagcaccttgattgtttgttacctttcgcgcctctagacaatcactaaatcgatttacccttggttctgtatctgctttaggccctctgaagtcgttcaatccaacacaaagcacacagaagaggatgtgacagaccagatggtgggaagatccgctcttccgaatcagtttgaggataaaaacccgctaaacttcccgggactccgcagagatgtagacgccatcgaacgccatttcttgagcggaatgaagagtttctttgatgcggctgaagagatgacaagcagcttatttgatatcatgggagaccatcacccaagcaccaggagaggagggatacccattgaaaaccatcccaaggtagaggagcaccgcaatgacgaaactgcccctacacgaccacactcctctggcgagattgatctctcgggcttggccaaggacgtttgagaaaggtcgtctgcttcttcttcttcttctttttttttttcacaaaggtcgtcttgttctagcttttggcatatataatcttaaaaatgtaatgtgactttctaagaagcgtggggattgtagtctaatgttagcggcttgcacgtttttccaagtgggtgctaccactatctatcaatatcatcaagagac

SEQ ID NO: 144473 - DNA, 876 bp, Arabidopsis thaliana landsberg
ctctctttctctctttcatcttcaaactctacaaacccagaaaccaccacacagtaattaatgtcgctttctttcttcccatgtgatctttaactgacttttcttcttattctccatctctgaagttgtggggattcatcaagacttccttatctgtttcttttataaaacaagagagagataccacttttggtgttctttatttgcaactctttcaggcaaacactctttgtctcttttcttatcttattattgtttctattttttgttgataatactttcgatgttttttggctctctgttctttctagatcgtttggttttattgtctataatattcattttgacaatctatgtattgatatgagaacattacttcttagtctctttagtttttttttttgtttttgacccttaagcttgatttgttgtttttagcttctggtgatttgtttgatcaaagaaagcttataagtttttttttctttttcaggttaaagaaatcgataggctctgttcttgattgtggtggaagagacatgatgatgtttaacgagatgggaatgtatggaaacatggatttcttctcttcctccacatctctcgatgtgtgtccattaccacaagctgaacaagaacctgtagttgaagatgtcgactacaccgatgatgagatggatgtggatgagcttgagaagaggatgtggagagacaaaatgcgtttgaaacgtctcaaggagcaacagagtaagtgtaaagaaggcgtcgatggttcgaaacagaggcagtcgcaagagcaagctaggaggaagaaaatgtctagagcccaagatgggatcttgaagtatatgtagaaaatgatggaagtttgaaaag

SEQ ID NO: 144474 - DNA, 2470 bp, Arabidopsis thaliana landsberg
  unsure (1)..(2470): unsure at all n locations
attttaccccggttaactacattaaaccggtaaatcgaaccggaaagatcaacctgaaggaagcaagggttttagcaaatactctgacgatcctttgtaaccgaacaacaaacaaaaagcgtatatttttctctctatcaagattcaagccgtgagctagaagcttaaaaccctcttcttatagatttcaaagcaaccattttcgaactctgtttgattccactgtcgatttaatcatcttacctaatggccggaagggctgcgacgtcgtcggcgaaatgggcgagagagtttttgttcagaagggtttcgtctaatcctcttggagctacccgtaactgttcttcggttcctggagcttcttctgcaccgaaagtccctcatttttccaagagagtaagtagctttgatgaatttattgataaattaatcttatttttggtttattcgaatcatattggaatcttattccttaagataaggagttgcaactcttgttttgatctgaatatggcacattaattggtgtagtagagttagatcattgatgctatttcattttacaagagcaaagtgtttgactttgaaaatttatagggaaggatattgacaggagctaccattggtctggccatagctggaggagcttatgttagtactgcagatgaagcaaccttctggtactttacttaataagtgccctgaaacttagtctttttgttctctttgttagttgacattgctaaggctaccttgtagttactttgaggaagtcactttgttttttacctcttacctattttgtgtgttggacagtgggtggctattcaacgcaacaaaggttgtgaatcctttctttgctcttctggatgctgagtttgcgcataagctggctgtttcagctgcagctcgcgggtgggtacctagagaaaagaggcctgatccagcaatcttgggacttgaagtttggggaaggaaattctcaaacccaattgggcttgctgctggatttgacaaaaacgctgaggctactgagggactgctagggatgggatttggctttgttgaggtaggctctgtaactcctgttgcacaagaaggcaatcacgaaccacgtatcttgagactaagccaagaagggtgagaatctctaatctataaaagacctttaatgattgaagaagcaagatagtttaaactaaaagacttatattttggtcctcccagagctattatcaataggtgtggatttaatagcgaagggattgttgtcgttgcaaagcggttgggtgctcaacatggtaaaagaatgttggctgaaacatcagctacttcgtcatctccaagtgatgatgtaaaaccagggggaaaatctggacctggtattcttggggtcaaccttggaaagaacaagacgagtgaggatgctgctgctgactatgtccaaggagttcataacttatcccagtatgctgattacttggtacaaacttcttaccatgatatatcgaacatgaatttgatctaatccaccgtagacatctttgtgcctaattttcatttttctcttcaggtgatcaatgtctcatcacccaatactgcaggactgcgcatgcttcaaggaagaaacagttgaaggaccttgtaaataaggttcaagctgctcgggatgagatgcaatggggtgatgaaggtcctcctcctcttcttgtgaagattgctcctgatctgtccagaggagagcttgaagatattgcagcggtacgtagtactaaaaaagctaaaacacattctatagttttcaagtaattggttcttacaacattgtattggtttgtgtaggtggctcttgctctgcacttagatgggctggtaagttatcctcttatgaactaacttatgttacatcagtgtcaatcaatgaagcctccagtctgtttaacgtagtgtagtaaaagcgattaaagtgttagaatagtctcttttttcgattgtacgtatggtatgttgcaaatcataaaagctttcgatgatgatgatgatactgtctttgttggtcctatagatcatatcaaatacaacagtctcaaggcctgatgctgtaagcaacaaccccgtggcaacagaaacaggtggtttgagcgggaaaccgctctttgctctctccaccaacatgttgagagatatgtacactttgacacgagtaagttcttatcctaaaaaaaagatgatccactaatcgaccaatgaactaaaaccttttctgatgggtttttggatattttcatgttctcttccttagggaaagattccattgataggctgtggcggggttagtaggtaaacgtcgaacatacctctgatgctttaggttgtagaacaaaagaaacacangaaaatgacttaaggtgaatcttttgcgtttttagtggtgaggatgcttaccagaaaataagagctggagctactc

SEQ ID NO: 144475 - DNA, 1330 bp, Arabidopsis thaliana landsberg
ttctccggccctaataatggcttgcagagcaaaagaacttgtgtcgttaatcttgtataagatttgtaatcccaaaaggtatgtggctcaatactctttgatctattgtgtttgcaatctgaaaggccactgaaaatctctttggatttgagatttacttgtttcgtttcatcagtagatttgggtgtttaggtctgatcgttacgtttttgttttctttttgctgggcaatggttaatttcacggagggagtattttgatctgtataggtctgattacaaaattgaggaacatgtggaagaagtagaggatttgaaagcagaggcagaactctttaggtttgttcttttttttctccttgtatttatatgtgttggattctcacataaatcagcggtgtctatggcttgtaattctcacatacatgttaacaaaaaaaattctcattgggtgatcttgatctcaggttgtgctaaacttataagatataagtatgatcagctgagtatgattgtaacgtttttggcttctttttattttattttatatttatctttaggcctggttccaaaattgagaagcatgttgaagaactagaggatttgaaagcagaggcagaactctttaggtttgttctttttttctctcacataaatcaaaacaatctagggtttctaactttcttttcaaatggatattaaaataattatgcttgtggtctcaggttgaaagcaatctcaggaacagaggaactgaaagcagtggcagatgtcaagaggtttgttctttttccaatattacttacttggcttcagatataatgaatggagcctagggctttgtaaagtcttgtttcccttgggatattcacaaaaaacaaaaatctacgattgtccttcttttatatcaggttgagaacaatcttagaaaacaatagtggaacctcataggagtgttagggtgacatgttgaaagaagatctttctctatctttttcttccctcggatcttgtacgtctcatattgtctcgtctttctttcaaagacaacatacgctcttctactgtttgcaaggcatggggtgatattgctgcttctgttcgggttaaaagtcgtcgttgctggcttttgtaccatgatgcatttcaagacaagggcgtctcttacggattttttgacccagctgagaagaagaagacaaaggagatgaatctacccgagctatctaagtcttcaggtatcctttattccaaggatgggtggttactcatgaacgactctctttcactaattgccgacatgtactttttcaacccgtttacccgagagc

SEQ ID NO: 144476 - DNA, 352 bp, Arabidopsis thaliana landsberg
catttgttagagagataaactggagatttttagagagagaaagaaatagagagagcgatcagttcgtcgttgacgatcgatgtcgaagatgaagcatcttctacggaagctccacatcggcggaagtagtggcgtcggcggcggatttgctgaccatcacaggttagacgactcgactagacctatgatcgatcctagccctattcttagtactagcccttgccctgcatcgacttcttccggctcttcctctggttttggtaatgcttccacgacaatgccgagactggatacatttgagcctgttggccgtgatctgacggctgttgatggtgttgatttcaatttgatg

SEQ ID NO: 144477 - DNA, 432 bp, Arabidopsis thaliana landsberg
ataacatccgtcgcggcggtggcaccatctcctccaccgcgtcctcgtctcaaaatatcacctcctccgcttccaccgacagtggtgagaacaggtatcatcgacgagaatggtgccatgtctgattccttcgaaatcggcggattcgatccagattccatcgacgagcttaaatcagccaccggaaattcgtcggttgaggaaaaagaatcgccggaagtcggttttcagattgagaaactcaaattgtgtgacaagacgaagatagattacattccttgcttagacaacgaagaagagataaagagattgaacaatacagatcgaggagaaaattacgagagacattgtcctaaacagagcttagattgcttgattccacctccagatggttataagaaaccaatccaatggccacagagcagagacaag

SEQ ID NO: 144478 - DNA, 553 bp, Arabidopsis thaliana landsberg; identical to SEQ ID NO: 22470

SEQ ID NO: 144479 - DNA, 657 bp, Arabidopsis thaliana landsberg
  unsure (1)..(657): unsure at all n locations
nctctggcaaatctaacctaatggacgctattagcttcgtcctcggcgttcgtaccggtcaacttcgtggttctcagcttaaggatcttatctacgcttttgatgatcgagacaaggaacagagaggtcgtaaagcgtttgttcgactcgtttatcagatggacgatggagtagagcttcgtttcactcgttctattactagcgctggtgggagtgagtaccgtattgataacagggttgtgaatttggatgagtacaatgggaagctacgatctcttgggatacttgttaaggctcgtaatttcttggtctttcaggttgttgcttcgatttaattctatttttgtattgtttctacgaacgattctgtttgtttgatgtcaatttcgtgtttaattgttctggattgcaaaatgtagggtgatgttgaatctattgcttcgaagaatccaaaagaacttactggactcctcgaggagatttctggttccgaggagcttaagaaagagtatgaacaactagaagaaaagaaggccagcgctgaagaaaaagcagctcttatataccagaagaagaaaacaataggaaatgagaaagagttgaagaaagcacagaatgaagaagctgagaagcatcttaagctgcaggaaagaactg

SEQ ID NO: 144480 - DNA, 210 bp, Arabidopsis thaliana landsberg
ataaacgatgtttacttgggattaaggcaagggagggtatcgagagcgcagttttcgacattgctgacgtcaaccggagctctcatccatggaacaaccgaatccatctctgtcttatcttctttatctctccccataccaccagctttaatcgttttctctctgacgacggcgacgaggacgagaggaagcacaagttgtgacggtgag

SEQ ID NO: 144481 - DNA, 552 bp, Arabidopsis thaliana landsberg
caaaggttcaccaagcaaggaagccaagtggggagagctattgatttgtcgcgacttaacgggtatgatgatctccttatggagcttgaacggctgttcaacatggaagggcttctcagggatcctgaaaaaggatggaggatcttatatactgatagtgagaacgatatgatggtcgttggcgatgatccatggcagtaagttctttatacataccttctaaaggtcaatcacaacttcttttctcctaacttgaaattggctttctgctatggacagtgatttctgcaatgtggtgtggaagatacacttatacacgaaagaggaagtggagaatgcgaatgacgataacaagagttgtttagagcaagctgctctcatgatggaagcatcaaagtcatcttctgtgagccagcctgattcttctcctacaatcactagggtttgatacccataaagaagcttatttcctatattttaaagtgtgttttgctcacaaaagaacttcaactttatctttgtctttgaatccatttatgtgtttggttgtgt

SEQ ID NO: 144482 - DNA, 1133 bp, Arabidopsis thaliana landsberg
gataagtttccaggagttcaaaaacaagctactcgagcctggtttagttgaccacatagatgtttcaaacaaatcagtagcaaaagtctacgtgaggagcacaccgaaagaccaacaaacaactgacgttgtccatggtaatggtaacggtattcctgctaaaagaactggtggtcagtataagtactacttcaatatcggtagtgttgattcttttgaggagaaactcgaagaagctcaagaagcgttaggtgttgatcgtcatgaatatgttcctgtcacatacgtctctgaaatggtctggtatcaagagttcatgaggtttgcaccgactttgttgctcttgggtactctgatctatggtgcgagacggatgcaaggtggattgggtgtaggaggaactggcggtaagaatggtcgtggaattttcaatataggcaaagctacaataacgagagctgataaacattccaagaataaggttagagacttagagttttgcctttgtttttaatgatccgtttggaatttataaacttacttttgttgttttcttcgccagatttatttcaaggatgttgctggatgtgacgaggctaaacaagaaattatggagtttgtacatttccttaagaacccaaagaagtatgaagatttgggtgctaaaattccgaaaggtgcacttttagtcggtccgcctggaaccggaaagacccttttagcaaaagccacagcaggagaatctggtgtgccatttctgtctatttctggctcagatttcatggagatgtttgttggtgttgggccttcgagggtgagacatttgttccaagaggcgagacaagctgcaccgagcattatatttatcgatgagattgatgctattggtcgggcaagaggtcgtggaggtttaggcggaaatgatgagcgtgaaagcactctgaatcagttgctagttgaaatggatggttttggtacaaccgctggtgttgtggttcttgctggaaccaacagaccggatattttggataaagctttgttaaggcctggacgttttgatcgccagataactattgataaacctgatatcaaagggcgtgatcagattttcaagatttacttgaagaagatca

SEQ ID NO: 144483 - DNA, 1224 bp, Arabidopsis thaliana landsberg
ctctcattcaaacccaaataggaaacaaatacacaaaagtataataaaaagtctttctctcatctttcgccacgtagacatggacgtcgaacatcacaaatccggccacatcagtagaccaacggtggatattccaccgaggaagcttctttcctccgccaagtctccgtcgtcagtttcaagtccccttcgcgactataaagaacagaaagactattgttacgactctgactcggaagatccttacgccggagaccatttccgtatgtacgaattcaagatccgacggtgcacgcgtagccgtagccatgactggaccgactgtcctttctctcatcccggggaaaaggctcgtcgccgtgatcctcgcaggtttcactacaccggtgaagtatgccctgagtttagccgtcatggcgattgtagccgtggtgatgaatgcggtttcgctcacggtgttttcgagtgttggcttcatccgagtcgttaccgtacggaagcttgtaaagacggtaagcattgtaagaggaaagtctgtttctttgctcattctccacgtcagctgagagttcttccaccgtcgccggagaatcttatttccggtggttgcggtggatcaccgtcgtcatccccggcatcggttttaagcaataaaaataatcgatgttgcttgttttgttcccattctccgacgagtactctcttgaatttatcacgatcaccttcatcgtctccgcctttgtccccagctgataaagccgatgcattttcacggctgagcgccgtcgcaccagcgtactaaacgaactgattagttctttagattccttaagtctcacggaagcacttgcagcttcttcatcgtctcccgttaccatgcccatttccacggcgacgatgatcgcttcatcgaatctttgcagcaaccaccaccaccaccgtcttccgccgtggcttgatgtcggagacagagatctccaattacaacagagtagtcctctacgatttgctctttcaccttcttcaactccaagttacctccaaggccagcttcagccaccgccgtcaagtttctttagcgatgaattcacaccacgtggtggccggctaagcgatttcacggcggctgcagctgccgcgtcccaagctagggataagaatagctttgaagtcggttctagtggcgatcttgatctaggatgggtgaacgatcttttgacatga

SEQ ID NO: 144484 - DNA, 509 bp, Arabidopsis thaliana landsberg
atggaagcagcagtgccacgtctcgtcaattgcggaccggagccaattcgattctccgtctcctcccgccgctccttcgtctccgggattcctcaccgtaataaacgctctcgccagattctagccgtcgctactgatcctaaacctacacagactagtccacccaagtccaccaccgtaaacggatcttcttctccatcgtctgcgtcaaaagtagtcaacaacaatgtttccactgtacgatttctactcctacctctgccgattatgttatggttcaattgagcaatttcatagaaaatttctattggattgtgtaaaattataacctcgaattttggtttatggcaatggtacagagaattaacgatgtatcaaaagagattaaaagagtacgagctcaaatggaagaagatgaacagttatctgtgttgatgagagggcttcgtggccagaatttgaaggattcggtttttgctgatgataatattcagctaaggcttgttgag

SEQ ID NO: 144485 - DNA, 553 bp, Arabidopsis thaliana landsberg
tctgattagaaaaggctccggctttatcattctcagaccatcatcactaagcagtaagtaagcactataatcgcagaagatagataaaatggaagtagggtttctgggtttgggaatcatgggaaaagccatgtcaatgaatctattgaagaatggattcaaagtcactgtatggaacagaacactctccaaggtaatttttttttttttttgtctttgattgtgttttggtattatggtttgtctgatttagttttagttgttcagatctgataaagtcggaaactttttgagtaatttaatgcaattttgggaatttttgatgattgtgacagtgtgatgagcttgtggagcatggtgcatctgtatgtgagagtccagctgaagtaatcaagaaatgcaaatacactattgctatgctctctgatccttgtgctgctctttcggtatttgaaatccttttttgcttcttttgtgtgtgttttagcattggagatgaatgatatgaagtagttggtttgattaggttgttttcgataaaggcgggggtttt

SEQ ID NO: 144486 - DNA, 1122 bp, Arabidopsis thaliana landsberg
ttagaggagagccgtgttcaccaactagagaaccactattcagatactattggcaatcactacttggtatatgtaagatctatatctcattatactttaactctatgactatgcttgaactagatcttttactaggactcatatactcatttctgtgtctcacttttttaaaaaatccaatctcatatgtacagatcgatctaacttcggaacgcctttataaacaggctttggttatgaaacagatatgcaaattattccctttatcccgggtaaggacatccaactttaggttcttatctcttcaattattaaaatacaggtttcatagttaatgtatagagtctatgccaaaaagaagttggtaaacacatcttctttcttccagaggccatcttggaatttctcttcagactgctgtgttattgtacacatcttctaggatggttttactgaatctaactatgttcaggtgacagtagaggggcagaacaaagatgggtctagtgtacaatatgatcaaatctgcaatgctctcttaccacaaggtctcaacccactctctgttccgccaaaagagctcgcagcctcattagggtaacatgtccccgtctttttacagtaattttgctgtacagaaataatttaagatatatgtagactgtagatcaatctcctaagtgcatcttctactcctgcagatcattttactcataatcatctattatatttgatgaattaacattcccatggttggtggttggatcaggtacatggtgcagcttctgaatcttgttgtccataagctctcagtgcctgcacttcataacttgggtttcgcggtagatgccaactcattttcactcaattttatgctgaaaacagttgcctcagtaactaagtctgagaaaatcgcacatacatacacaaactccctgcatgcaatctttgcataggaaataaaattgagagataatttgttaatattgacaacatattacttttcatctggaaattgattgattgactacaaaaaaaaatctgtattgttttgtctcagggttcttgttcaagaatatgggagcgagattcttattggaactcttatccatcttctccaag

SEQ ID NO: 144487 - DNA, 1369 bp, Arabidopsis thaliana landsberg
gagagatcgaaatttcctcttctcaaaaaactcaaaatttgaagatgaaggacagagaggaatcatcatcgtcttcttcttcaatgacaacaaaaaaccctaatggaataatcaacaacggcgaacacgaacctcgagatatcaacatccgatcattctcttctgttccttcttctcctcgtaacgcttcttccaaatacgatttcgtcaaggttcgttttttctttcgatttgggtggtttttgattcttcttctttttcaaatttctgattttttttttttttttgttgacggcaacttttttaaggtcaaagtatggcttggagacaacgcagatcactactatgttctgtctcgattcttagtctgtagaatgttaactgttactaaggtttgttcaatttcgacatctaagtcttcttcagattctatgatttagcactgaataattctataataacattggttacaatatttgccaattttgactcagatcccaaatcatgaagctataaagatttctcttgaactcaagaagcttctaattgacaacagtcttcttgatgtgtatgcccatttcgtccttcttcttcttatcgattcaatttacataaccttgatcttgtttgtaacataatttgctttgtctctttttgcagctctcagtctgatttggaaaccaatttgtttaaggtacatatctttagatcctcgctaaaacttatcttggatgtcttatgaacattgaagtaatctgttactggttgaactttgcagctaatggagcgacgtggttatggacaagagctcattaatcgttataacatgatgacaaagtaaaacgctagtatatgatatttactagagggaaaatcttttctcaaaggtcatattttttgaatgttatacttttggttttgtagatttcatcatcaaagagtacctcttgtcatactcgtttgcggaacagcttgtgttggcaagtccactatagctacacaacttgctcagagacttaacttgccaaacgttttacaagtaacttgctcctaaacccttcttcatcagtttgttctcattttcttatgtttgtttattttaaaatgtggccttttgtgtacacagacagacatggtttatgagctgcttcgaacagcaactgagtacgtttttctcctttttagttatgtacattgttatcctctagtctaagagttacaatccgggctatagattagcgcataagcacgtttgtttatatttaatgtagtgctccgttgacatcaacccctgtatggactcgagaattcggctcatcagaagagttgattactgaattctgtagagaatgcagaattgttcggaaag

SEQ ID NO: 144488 - DNA, 1760 bp, Arabidopsis thaliana landsberg
aatgttgcctacatctgcaatgagctacacatttttaacctttgggatgatacgatctgctatggtttgctcttttggttatttctgattagattggactttgtggatatgttgtttcaggtggccaaggaacacggtgggataatgagatatattcaagtttcttgcctaggagcttctgtgtcatctccttcaagaatgctgagggcaaaagctgctgctgaggaagctgtcttgaacgcactgcctgaggtatacttacccggctttcggtacacataactctctctgttgtaattattatcatcgtaatattttattcaatattcatggtcctgcttctttttcagagaaaagaaagatcctttagatttttttgtgcagaactgggaaaaccgtatatgatgttattattaaattctaaaaccttataaattttgaaagcaaaagtgaacctgggatggttaatataaactttttgtcatcagcatgctgcttctagtcagttcatgatatatatgtgttttgtaggcaaccatcatgagacctgcaaccatgattggtacagaagacagaatcttgaacccctggtcaatgttcgttaaaaaatatggtttcctcccgctcataggtggtggaaccaccaagtacgtcttgaattctttgtgcaattcttttcactggttcatagcaacttgaaatgtagatttagttccgtccctaacgataactctactgcagattccagcctgtttatgtggttgatgttgctgctgcgattgttgctgctctaaaggatgatggctccagcatggggaaaacatatgaattgggtggtccagatgtctttaccactcacgagttggtaaattcttttaatccttcattctctgtgtcactatcctagctcagtgggtttgatttccaagtatgtcttgcaggcagagatcatgtatgatatgattcgtgaatggcctcggtatgtgaagcttccgtttccaattgccaaggtaaaagatcgaatcgtgcactgtccatggaagaaactccaaagaatttttgttttcctcttgaaatactgtaatactaatttcacatatgtcacaatctgttccaggcaatggcggctcctcgagacttcatggtgaacaaagtcccgttccccttaccctctcctcagatcttcaacctggatcaaatcaatgcacttacaaccgatacacttgtatctgacaacggttagtcattattcatagaagtgaaatgagttattttccttgagttaattgagtctcactttttattgtacaacaatggctatttcagccttgaagtttcaggatctggaccttgtcccccataaattgaagggatatccggtcgagtttcttatccaatatcgcaagggtggtcctaacttcggttctactgtcagtgaaaagataccaacagacttctacccttgatgctgcttctctgctcaaaggtcatttcctggactaattttttcatgcaagtgtcacaatgagattgcggaaaccagatttgctatgttgatgactttcatttacttctgtcaataataaacgggtcctcctctatgttgtgttcttgaaaaaaacacatcaacatcattataagttagagaggggacaatatgcttcttgatgtggttggtcccttaggatttatgcaatgtctggttcgtttcgaactccatgtactacttctcttgagtaaaactaaagccatatgctttc

SEQ ID NO: 144489 - DNA, 2147 bp, Arabidopsis thaliana landsberg
tcttctctatcgagtacaaaccgcaagtgaaacagagtaacagagacgcgtcgtcttcaacgatgctctcaacggtgacggcgacggcggtttctcgaccgattctgaaggtggaatgtacaatcaaaaggacgtttaaagtgacggcggagaagtttccgacgtttctgccgaccgatgtcgagaaaattaaagacacgtttgctctaaagctcgccgccagaatagagaggcttcctgtatctgtaagtggcttgagattccacgttttatcattctgaaatttcaaataatccaaggtctgatcctttcatgactgagaatttgagcttatatacaactacattttactgtcttagctgcaacttggccatgtcacaattcaagtttttgtgattctgtatttcttacattcaaagtttcaagtgagtagaaacatttaaagcaatgtaagaatcatgaacctgtagagattttgctcattgtcttgttaggtgagcttcagggaagatagtattatgagcagttgcgtgacaccgctgatgcggaacgagacaactcctgttgtgcttcttcacggatttgataggtactaatcaaaatgttttggtttgttgaattagtgtcttgagttttaaaactcttgtaaaacagttcttgtttagagtggagatacacttatccgttgcttgaagaagccggtttagaaacatgggcatttgatatccttggttggggtttttctgatttaggttttgtccctctcttatcatttactacttcctttccctttttgttttctgttattctccaaacttgccaatgtttttatactcttgcacacttctcttttcagacaaacttccaccttgtgatgtagcgtcgaaaagagagcacttttacaaggtttgtagacattttctttacttgtgtgcttagtttagttgttgagaattgatttggctctcttgtatgatccatagttttggaagtctcatattaaaaggcctgtggttttggttggtccgagcctcggtgctgctgtcgcaattgacattgcggtcaaccatccagaagcggtacttatagaattcttgaggagctttcattatttctcataaagaagtttttagtcaacatgtcagaagatattgactaggagaagaaactcatgaatattcaggttgagtccttggttttaatggacgcaagcgtttacgcagaaggtactggaaacttggcaacgttacctaaagcagcagcttatgctggggtaagttctcatcaagttctatacataaaagtccctttattgtattggaggatgatcctcttgagtaaaactcttcacaattctgttaacactatggttttttgggtatatgaatttgggattttaggtgtatcttctaaagagtattccattacggttatacgttaacttcatatgtttcaatggtatctcattggaaactagttgggactggacaaaggtaaacaagccttactaagtaattcttattggtaaacaagaaactagctctcatcagtctgatttttttcgtcaatctagattggtcgcttgcattgtctatatccttggtgggaagatgcaactgttagttttatgactagcggaggatacaacgtaacttctcttataaaaaaggtactttcatcttttctctaaatcacttttcatttatgtagatttcggagtaaggtgaaatcaagaagagattctgtctgcaggtttcacagaagacattgatactatggggagaggatgaccaaatcattagcaacaagctcgcttgggttagttagatttttctatctctatttagactattatcatgtttcaaatggtctctcaagtcctagatcatatcttcttcaatgcagagactgcacggagaattatcgaatgcacgtgtcaaacaaatatctaactgtggacatcttccccatgtcgaaaagccggctgctgtcactaaacttatagcagagtttgttagagagacttgccggtgtaaagaggttgaaagtatatcttagacccttgggggccattattgaagctgtgtttcataccaataccaaaatcttacttgttaaatcgtatatagttgatacttcacttcttt

SEQ ID NO: 144490 - DNA, 913 bp, Arabidopsis thaliana landsberg
caaggtttttgaaatttctatcttccatttccatctgatgaatctctgacgatgtctttgagaactcaagcatcgtcatggcctggtcttctacttcgccggaaccctagatcttcattttctcgtcagatatctactctcgattcctcaacatcaacatttcccagaagaatctccggttactactcctcctccttctttcccgtaaatcaaacgccatggatctcatctcagaggtaccgtttcttctcctcaagcacaatgtcaccatcggaagctgatagagtagtgagagaacttatagcagaggttgagaaagagaagcagcgtgagagagaggagagacaaagacaaggacttgattacaaagacattgatgccgaagacgaagaagattacttagggattgagccgtttatcgagaagcttaagaagcagaatttgaaagatgatggtgaattaaataggcgtgaagagtcttctgattcggatagtgaatatgatgagattgatttggatgaagagaggaagaaagaagatatctttaataagaagtttcagagacataaggagcttcttcagactcttaccaagtcaggtatatgaacatttgtttatggcttagaaatggtttatggtttgtttctgattagttctaagttgttgtgttattgtttggcagagacacttgatgaggcatttagatggatgaacaaattagacaaatttgaggagaagcatttcaagcttagacctgagtatagggttattggtgagctgatgaatcgtttgaaggtagctgaagggaaagagaagtttgttctgcagcagaaattgaacacagctatcaggttggttgagtggaaagaggcaattgatccaaacaaccctgctaattatggagttattgaac

SEQ ID NO: 144491 - DNA, 1456 bp, Arabidopsis thaliana landsberg
aagcacattgagatactcttgatcctatgaattatctgatgatgattatgatcagtgatcagaacatatatagaatcttggagctttcttgattagtttatgatttttagggagttgatatgtttggcaaaagaattggatttctcaaattcaaagcggatattttcgacaaggaaactggtcaaaaggtatctaatcatcttcaaaattagtatcatctcgctcgttgtggtcattgtatatgttagttttgcttgccatatgtaagctaaaacgtcattaggttccaggtattgtatttgcacgaggaccagctgtagctgtgcttattctcttggagtcagatggtgaaacttatgcggttctcactgaacaggtatctctattaatgttctgtgttgttctattttataacaaagatcatattatacgggtcgttttggaaggttcgggttcctactgggaagattgttctggagttacctgctggaatgttggatgatgataaaggtgactttgttggtactgcagttcgcgaggtacttgacaactttgtgaaagaatttgaatgtttaagatgaaaatagtatagaagttgttgagtttaaatattgtgactgcaaatgaaatggcctgcaatatgctttggacttttttgttgttttaccaaaggaacctagaattgtagacaagttgaagcaccagagtctgacaaactttctggacttgtgttttgcgcaagttacatgacttttgcttcgtggatatatcaggtcgaaaaggagattggtataaaactgaaaaaagaagatatggttgatctcacggctttccttgatccatctactggttaccggatcttcccttctcctgtaagtccttattttacttgatccgaatgctgttcttgcgatacaactctcatattagtctatgtaacaggctgcagaaactcagtaactttctttatcgcatagtcgtagaacgtgtttggaatctgatgaattgtttctcttggtatctctggttcagggaggctgtgatgaagagatgagcgtgtttctttacagaggacaagtcgaaaaggaaacaattagacagttgcaaggcaaagagacaggacttcgtgaacacggtgagttcatcaaagtccgactcatcccatatagagagctctggcgcaaaacagctgacgctaaggttcttatgagcattggtctctatgaaatggctcagcgagagggtcttgtgtccagccagagactgaaacccaactcttgatctcctacaattctctgaaatatacaataactggattcagtcaaccagatgagatagattgagattagacgttcttatgttgtaaaaggagtttttagataaatgttatcgctttataactccgtaccatgacaacttgggaacttatctttaaaacaaaagattttgcaaaccc

SEQ ID NO: 144492 - DNA, 2018 bp, Arabidopsis thaliana landsberg
ccacaaccccatatctctttgtctgaaaaaactcttttgcatatataaataaatataagccatatcttttgaaactgtactgctgcacaagtgtagaggcagtggcacaacatctttaagaaagagagagagaaagagtcatttattcatttcctcgcttaaaaatcttgagcacccagacagaattcttctttcttctttctggggttgagaaaaatgagtgaaagagatgatggattggggctaagtttgagcttgagtttaggttttaatcaaaaggacccgtcctcgaggttaaatccaatgcctctggcttcttatgcatcttcatcacacatgcagcatatgcagcagagcaattataaccatcctcaaaagattcagaacacttggattaacatgtttcagtcatcaggtatttacctccttttactaatccagattcatgtctaagattataggtttctttgttttagatccgatctttttattacactttatcctataatagataaaattttcttgatatgtttggggatttttaatcatttggcgtgattaacgtaacgtgcagagagaaactcggacatgagatcgtttctccggggaatagacgtaaacagagctccatcgacggtggtggttgacgtggaggatgaaggcgccggagtttcgtctccgaacagcaccgtctcaagcgtgatgagcgggaagaggagcgagcgagagctaatggctgcggcagctgcagttggaggaggaggtagagtagaagataatgagattgagagagcttcttgctcgctcggcggtggtagcgacgatgaagacggtagcgggaacggagatgactgttcgaggaagaaactccgattgtctaaagaacaagctttggttcttgaagaaacttttaaagaacatagtacactcaatccggtcagtggcatttccgtagttttcttcaataggttgactttttatatgtttttcattgactttttttgttgttgttggatgcagaagcaaaagatggctttggctaagcaattgaatctgaggacgagacaagttgaagtgtggttccaaaaccgaagggcaaggtataaatttttattctattttaaggggttactttcgtaaattttatatagtccaacaaataaaacattagtagttattgctatgatggtgatatgtgtaatggtccattttatgacccataagattatcctaaaggattttaatgggtctctcatgtcttaaattaggaggtttggtttaagctattcagttttcccggtttaagaattaaaaccgccaatgttgtttttgagtcaaattttggttaaagtgttttcagttttccggttcaagaacaataaccgccagtttcgaatacaagaaacaaatgtacttcgggttttctctttcccggatagttaaaccggatatcggattttaatgttttggactgtttgtgtgtgtgtttataggacgaagctgaagcaaacggaagtagactgtgaatatcttaagagatgttgcgagaatctaacggatgagaatcggagattgcaaaaggaagtgagtgagcttagggctttaaagctttctccacacttatacatgcacatgaaacctcccactactctcacaatgtgtccttcttgcgagcgagtcgctgttacgtcatcttcgtcatcggtggctcctcctgtgatgaattcatcgtctccgatgggtccgatgagtccgtgggctgccatgcctctacggcaacgacctgctgctggttctcattagagtttaattagtctaaagataataggtttggtgatttgtttttattatatcgttgaacggacttggaagttcttttcaagagttggtcccatgctcttctttcctttgttttattcagtttctatttatagctgaattctggataatggaaaatctactaatattattgtccaattattagtttggggaaagataagaggttctatcattcttta

SEQ ID NO: 144493 - DNA, 1586 bp, Arabidopsis thaliana landsberg
cttttcagcagcctcttagtaatatggatggttggcttccacatcgtcaggtattccccaccctcctctaaatgcaatttcatcagacacatctactttccatacacatattaaaacagaaacatattacttatatatgggctttaatcttgtgacattgtagtttcctccgtcaggggattttgagcgtcctcgaagttctggtgctgcttttgctgatttccaggagaagtttccgttgcttaaccttccatttgatgataagctgcttcctcgatttccatttcagccgagaacaatgggaacttcgcatcaagacataatggccaatctttcgatgaggaaaagatttgaaggtactggtcattctatgcaagacctatttggcggaacaccaatgccgtttctacccaatatgaaaatccctcctatggatccacctgtcttcccccaacaagagaaggacttaccgcctttgggttaggatcagtttccatcagctctttcatctatcccagagaaccatcgaaaggtgctgaagaatataatgctaagaactggctctggaattgggcacgtccagaaaaagaaaacaaagagtagatgcatggtccgaggatgaactagattctctctggattgggattcgcagacatgggtatggaaactgggagacaattctcagagatccaaggctcaaattttcgaaatttaaaacaccagagtacttggcagctaggtgggaagaagagcaacgtaaattcttggatagtctttcatctctgccatctaaatcaagcaggactgataagtccaccaaatcttccttgtttcctggtcttccccaaggaataatgaatcgggccttacatggtaaatatgccactcctccaaggttccaatcccatctcacagacataaaactcggattcggcgatctagcatctccccttccgttatttgaaccatctgatcacctgggatttcgaagtgagcattttcctcccatggcaaatctgtgcactgacaatcttcccggggagccttctgctggaccatctgaacgagcagggacatcgacaaatattcccaacgagaagccttttccactcaactctcttggaatgggcaacttaggttcattgggtttggatagtttaagttccttaaacacactgagagcagaggaaaaacgggatgctattaagcgcgggaaactacccttgtttttagatatgccgttacctcagatgcttgattcaagcaacaacgtattcttgggaagatcagccaatccatctttccttcacccaaatcgagggttgaatccctccaatcccatggggagagacataatgggaattagctcttcagagaacaagctacctcattggttacggaatgttgtgactgttcctaccgtgaagtcacctgaaccacccactctacctccaactgtgtcagctatagctcaatcagtccgcgttttatatggtgaagactctacaaccattccaccgtttgtgataccagagccgccacctcctgctcccagagatccaagacacagtctgcgtaagaaaagg

SEQ ID NO: 144494 - DNA, 2163 bp, Arabidopsis thaliana landsberg
atattttggagttgcaaaaggtagcctttttaccagctgcaaatgggacacgcttggtgggagcaagctccctttttgttcgcctaccaatcaacctatcaccttttgcatttgaacttcctagtctctatctaccgtttctgaatatccttaaagatttgggacttaacgatgtgctttcagttgctgctgcaaaggatatcctctccaaattacaaaaactatgtggttatcggcgtttgaacccgaatgagcttcgcgctgtgatggaaattcttcattttctctgcgatgaaataaatacgacaaagccacctgaaataaatactatcaaatcagatgtgattgtcccagacgatggctgcaggcttgttcatgcactatcttgtgtgtatgttgattcctttgggtcacgctatgtgagatacatagacactgcaaggttaagacttgttcatccgcttcttccggagaggatctgtctagatttgggtgtgagaaagctttctgatgttgtcattgaggtatgcatggcatcagtttcttctgatcatgtctttctttttgttatatttgttatgtgtgaaacaatctcaaaatcattgcttctttacctaggaacttgaaaacgctgaacatattgaaaccttagacaacatagggtcaatatcactcaaggctgtcagaaggaagttgcagagcgagacgtttcaagctgctttatggacggtgagccgtcaggccaccaccgtggatgacttatcttttgaggttatgcaacattctctacaatctgcggcagagaaaattggttttgtcagaaatatatatactcgatttcttctcctgccaaattccgtagacgttaccttcgtggctaaggaatccatgattcctgaatgggagaatgaatcgcatcatcgaacaatgtattttatcaatcgtcacagaacgtctatcctagtttctgaaccgccgggatacatttctttcctggatgtcatggcaacagtggtgagtgaggttttaggctttccaacttccctgcccataggatcattattttcatgtcctgaaggatctgaaactgaaattaccgcttacctgagactatgctcttattctcttactaacaccggcacagctgatagttctgttggccaagagataatgccacaagatgctgtacaagtacagcttcaccctctgagaccattctacaaaggggagatcgttgcttggaaaatcaaacaaggagacaagctaagatatggaagagtcccagaagatgttagaccttctgctggccaagccctttacagattaaaggttgaaatgacacctggagagactggtttattactttcatctcaggttttctccttccgaggcacttcaatcgaaaatgaaggtccctcgactttgccggaggtgctccccgcagtatctgataaaaaatctcaagaaatttcagaaagttccagaactaacaaaacaagttctagccaggtttgttacatttctcgtgaatcgttggatttaatcacgccccaatatttgtattatctataatctatgtgattctaagagacaaatgcatactgttcttccccaaaatgttttatcatcttgagatagttttgatcttgaatcgtgctctggggaagattgattggatttgttctttgtcacctgcagcctgtgaatgaaatgcagcttggtcgagtcacagcgaaagaattggttgaggcagtgcacgagatgctctctgcagcgggaatcaacatggaactggagaatcaatctctactacaaagaacattaacacttcaagaagaactcaaagactctaaagtcgcattcttacttgagcaggttcgatatacaattaaatcctccttacttaaaacacaaccatgatcataatgttgattagcaaaacatgtatgtctggttttcttgcaggagagagcagaggcttccatgaaggaagcagagacggcgaaatcacaatggctgtgtcagatatgtcagacgaaggaggtggaagttactattgtaccatgcggacatgtcttgtgtcggcattgttcaacatcagtctctagatgtcccttttgtcgtcttcaagtcaatagaaccatccgaatcttccgaccgtaa

SEQ ID NO: 144495 - DNA, 562 bp, Arabidopsis thaliana landsberg
gaaagagcaatctctctatactacaaacaccaaagtttaaaattaaacaaaatcttcaagaaacactttacgaatttctccaatggcttcacttcaattttcttctcagtttctgggctcaaacactaaaacacacagctctatcatttccatctctcgtagttactctccaactccattcactagattctcccgcaaggtcttttttctgttttgttttgtttttttcaattctgttcttttttttggaggaattcataatgattaacttaattttattggataattttcagaagtatgagtcatgttcgatgtctatgaatggttgtgatggagatttcaagttgccacttggtacagtggagacaaggactatgactgctgttttatctacggcagccgccactgaaaggctaatctccgccgcctctgaactcaaatctcaacctccgtcgttttcctccggcgtcggtcggttacaggtacatcactacatcatcatcctcctctgtttttttcttctaagacacaatccgatttgctgctgtatgtgaaagaatga

SEQ ID NO: 144496 - DNA, 699 bp, Arabidopsis thaliana landsberg
ttcagtcagagatttcgaaaccctagtcgatttcgagatccaactaactctgctccttatctcaggtaaaattctcgctcgagaactcaattgcttatccaaagttccaattgaagatgctttcctactgaatcttaggttaatgttttggatttggaatcttacccgaaatttctctgcagcttgttgaatttgcgaagtatgggagacgctagagacaacgaagcctacgaggaggagctcttggactatgaagaagaagacgagaaggtcccagattctggaaacaaagttaacggcgaagctgtgaaaaagtgagttttatggtttcctcgatctgtttcatgtatactactgtgtgtttaaatttgtcgattcttagattactacttgataacaagtagcagtatgtgtttaattagttgcttaacatataacaattgactgagttcttcattgctataattcctgaaacccacccaatattagactgtcgtgtgtttctcatattgtattttctctttgtgacagagggtacgtgggaatacacagttctggattcagagacttccttttgaaaccggagcttctcagagctattgttgactcaggatttgaacatccatctgaaggtaattaccaataaaaattcatttttgttgcctttcaccattctgttactgaatctgaatgatatgg

SEQ ID NO: 144497 - DNA, 1594 bp, Arabidopsis thaliana landsberg
acaatggtcgattctgattttgcaacttcatcttttaggatcctcatatggttgatttggtgagcgaacgatttgctggttctgacaagttcaaggttttgcaagaggattttgtcaagtgtcacatccgttctcacatgctctccattttagagactagaaggttatcacatccagattctgctcttgcaaaggtcactctagtttctcttttggtacattttattactaactcagcaccaggaaccacatctttctcaattcattatttacacaatggaattgtatgttaatgcaggttgtttccaatttacctttcaatataagtactgatgttgtgaagcttctacttcctatgggtgatatcttctcaaaagttgttctcttactccaggttaaccattcattacttgtttttagagtattatgatcccaaatgcttatatattcaattgtgacaaaaaacatttggctaatcttaggacgaggcagcattgcgattggttgaaccagcactgcgaacatctgaataccgtcccatcaacattttgatcaacttctattctggtacgtacttgttccattattgacattttaactctttatatgtattgcaattcgtcaatgtagttttgctcctttgtttcaagaaccggaatacaatttcagagttcctagggaaaacttcttccctcagcccaaggttttgattcttcaaactttcatcataactaaattttgataccattacagaaatatgattatgcttctttacaggttgatgctgctgtcgtaacattcaagctgaagcatccgagggactatcctgatgtttcctccaccaaaaatttcttctctttggtagctaaaacttgcttcagactatttcttagatttttaacaagaaaacatctgaatcgaattcctaagcaggtgaattctgcattcaatgggaagaggaaaatgttgagaaagtccctccagcacatatcatcatctcctgatatcgaaaaagcactaggagttgctggtcttccagccactgtgagtaatctctctcatgtcttatatgaggtcttgggtagcagcagtttacacgagaatcttagctcgttctaagatcatatcaattaccacaagtccataagaggaatttcctatcttgaaaccggcttcttagagaaacgattcttgtaaccttgagtcatatatatttgttctactaccttgctgcagtcaaggcctgaagagcttaccttggatgactttgtcaagttgcataacgtaatcgccagagaataagaccaacgagaaggaccatcagtatccatgttttgtcggctttagagttatacgaagccacctgaaaacagaacagtgacggcaacaagacgaggaagatacaacgttgcagtgcaagctgttgattgccgaaagacgaatgtgaccaatatccatacagtcaggaatcagggagtaagtagaatacagtcccaatctggtttgttattgttagaatttttctgtctatgagatgatctttgtaaattgttgattttgtaataccaaaccgacaaatagtctttacaatcac

SEQ ID NO: 144498 - DNA, 1493 bp, Arabidopsis thaliana landsberg
tatacttcttcataaggtttgtaagacccaccaaaatgagcgagcaagcaattaacaaatacatcgaaggcaagtatggggaactcggggttgatcggtatgctactactatcttacttctaggtgtagatatatttatatggctacaatgcttgttatgttttctgtctagttgcactagtcaatccttaatgcatgcgttaccaaatgctataattgactactctgctaagtatgataatcctaagaattggtttagagtccacactccacagacttctcccaacacctcttttggttctctttggattctgagactgtcgcactaacttttaaaaaatcgaattgtagtgtgtggcatgacacagctattccatttaagcaagttgttgaggagtttgaagtttggttagctgagcatgacttgtgggataaagatacagattggggtctgaacgatgcagcttttgtaacctggtgagaattaatgataagagatggggctgcttatgtaaatctttgagtttctcattactgatttcctttgggatactgattatgttaatgttatcagtggaaactgggatataaagacaaagattcctgagcaatgcgtagtttcaaacatcaatcttccgccatattttatggagtggatcaatctcaaagacgtctacttgaatttctatggccgtgaggtaaattggagatatcactatgcatcatcatcttattgtatgttattgtaaactcattaatagtagatgacatgacaggcaagaggaatggtgtcaatgatgaggcagtgtggaataaaactcatgggaagccaccatctgggcattgatgacacaaagaacatcacgagggtggtgcaacggatgctctcagaaggtgcagttctcaagctcacagctcgaaggagcaaatccaatatgagaaacgtcgagtttctcttcaagaacaggatcaagtaaagctctcaaggaaaaatgacaaacccaacaagctccatgatccataaattagttacttagtcaagtcttttgagtattaagatgataactcttagaagacaatgtggttacgcctaaatgtgatgtggtgagaaggttttgtagattcacatgtttcagagctatgatatttagattacgaagacataagaggcccatgaattggcccaaaaatgcttggtagcaactttttgtaggaaaatctgagaatctcgaaaataaataagaggcccatgaattggcccaatatcggctgtaatagactgtgtgctggttcatcggaaagtcaaacagcaacttcgttcattttgtcagactcgctgactgaagaggactctcgtgtgcttgagtttgtactattgacaaacagaaattcatcatgggcttgggtttgtaatattgacaaactcgcattttatattcgtgtttcatttggaccagattacaccgatgatcccgaatcagagacaaaacctt

SEQ ID NO: 144499 - DNA, 2236 bp, Arabidopsis thaliana landsberg
cacgaaaatggcgtctcttggccaaatcaccctgccacgcgcgccgtcggcggagattggcctcttacgccgtcgattggagcggccgatcatcagaacccggatcggattcaacggccggattgcgagcgtattgactaacgcaggggaccaagcggtgtcggtaaaagcgagtgtgagccagaaggtgattgaagaggaagccaaagttattgtgggtacctacgcgcgagctccagtggttctctcgagtgggaaaggttgtaaattgttcgaccctgaaggaaaagagtatctggattgtgcatctggaatcgctgtgaatgctcttggtcatggagatcctgattggcttcgagctgtcactgagcaagctggtgttcttgcccatgtcagcaatgtttattacacgatccctcaggtatttattcgttactgtatttttgcattactgattctgttgatggctgacgaaagcttaaaacttttgttgtttttatcctctgtgtgattgagctatggcctatggaaacatgctagggaatgttggattagtcttctacttataatagcgagattattctatgacaagtacttgcactttgaaatttcatcaaattggattgtttctacgccttccctatagaaatttttatgacaagtatctgacctcattgtaaactcttagtgtacatatgctcctcaatgcccaattcctcgaaaaaaggaacctttatgctcatatctacttcatatgggttgttaaaatctgaaatgtttgaacttctctgcagatagagctcgcaaaacgcttggtggcgagttcttttgcagaccgtgtattcttttgtaactcgggaacggaagccaatgaagcagccattaagttttcaagaaaattccagagattcacccatccagaagacaaagaagtcgcgacaggtttcatcgcctttacaaacagcttccatggaagaaccttaggagctcttgccttgacaagcaaagaacaatacagaactcctttcgaacccatcatgcctggtgtaaccttcttagaatatggtaacattcaagcagccacagaccttatccgctcaggtaaaatagctgcagtttttgtggaaccaattcaaggagaaggcgggatttactctgctacaaaagagtttctgcaatctctgcgctctgcttgtgatgccgctggatctcttctcgtcttcgatgaggtaatatactctaccgtccatccaaaattttattttctttctttgtttctgttttttgattggtcttgcctcaactgggttcattgtcccaggttcaatgtggtttgggtcgaacgggtctcatgtgggcttatgaagccttcggtgtgactcctgacataatgacggttgcaaagcctctagctggtggtttacctattggagcggtgctggtgactgaaaaggttgcagagaccataaactacggagatcatggaagtacatttgcaggcagccctcttgtgtgcagtgcagccattgcagttatggataaagtatcgaaaccctctttcttgtccagtgtctcaaataaaggtcgatactttagagacctgttggtgaaaaaacttggaggaaactcgcacgtgaaggaagtgagaggcgaagggcttatcataggagtggagctcgatgtgccggcaagctcactggttgatgcttgccgagattcgggtcttctgatcttgacagcggggaaaggaaatgtcgtcaggattgttcctccgttggttatatcagaggaggaaatcgaacgtgcggttgagatcatgtctcaaaatttgactgcgcttgattgaagttcttggaagagaaatgatgtggtgttgaagaagagctaatgttttatattcgatcttgtcttaaattagcctcaagtgtaccggtaaagatgctctgcacaattgaaaagaaataaaatttgacacaaaacttgatgaactaattgttcaatctaaatacttgtataatttccatggttggttcgatgacgtctctaacgcgattgtttccgtcttgcgttatagcatgctggttatgagctgcgtgaggaatcagagcacatagatgataacggtgatagaaatattggtagagtatccaacgaaccagcattggaaagacgtgaatccaatttatcggcagtgtatgcattggtcgccaccaagaatcttaggggtctaatttaa

SEQ ID NO: 144500 - DNA, 989 bp, Arabidopsis thaliana landsberg
tcttttgcaggacatgaaactccaaacctgaggtgctgtaacagagaatccctactgaatcagcttgtcttttgttgattgttagacagtcttttacttcagattctttgttataatgagttatagtttatatcaccttttatagtcactcgaaagatgtttcattcttgttgtaacttgtcatggatattgttcttcccttgataggaaacttgctgacaaggttgcagaagctggattctacgcggtggttcctgatttcttccatggagatccttataatcccgagaaccaggatcgtccgtttcctatttggatgaaagatcatgaactagttagtttattttccttattaaatgttccatcctcaatttttttctcaaaaacataaatgagtttttgttccccagcttgaaatagtcaaagtatcctaataatcccttattcttaatgccaaaatcctatcactccttattgttgattgcaaagctaaggttaagacagtgttttgtcctgttctgtgtcaatgtatctgaaaccagactatgtattttgtaggagaaagggtttgaggagtcaaagccaatagtggaggccttgaagaacaaaggcataactagtataggagcagcagggttctgttggggtggtgagtttggttttcttgttcccatcatcacccacagttttatgaaaatgttttccatgatctgtataataagtcaaccatgtatatatagttaacacaagactttttgtttcttattctttagcaaaagttgcggtggaactagctaaggaaaagcttgttgacgctactgttttgttacatcctgctcgcgttacggtggatgatatcaagggtatttagatctttgatatggccactccttacttgatagttctctctcatttgttgtgattatcactctcagtatatgattgaagcagaggtaaaaattccaattgctgtattaggagctgaaatc

SEQ ID NO: 144501 - DNA, 701 bp, Arabidopsis thaliana landsberg
aagaggaagcaaagagaagtagcgtcctctcttcaatttcaaccggcactttcttctcttcttcttcttcttcttcccaatcttcctcgtctctttacctacacctatatatatatatatattcatctccttccttcacacacatacctgcacagctacaataatctacttcccctctttcaataacggaattattagtaatctaatcggaagattcaagcgagaaatcgatttggttgtctgttgttaatttgttgggaaataaattgaaataggagattgattggatggtgagaaggcaagagtaggagaagaaggcggagaagggaatgcgtctggggaaatacgagctagggaggacgctcggcgagggtaatttcggtaaagttaaattcgctaaagatcccgtctccggtcattccttcgccgttaaaatcatcgacaagtctggtatcgccgatctcaacttctccttacaggttcccatctctctatcatcatttctaatttttttcttttctcttcttttactaaatttgtaatttgacagatccaattcttatgaatctgtgcagataaaaagagagatccggactctgaaaatgttgaaacatccccacattgttagaacacataaggtccgtatcttaaatttttgtgtataatcatctttggattatcgaaacgattatgtgattagg

SEQ ID NO: 144502 - DNA, 2048 bp, Arabidopsis thaliana landsberg
gattcgtgagactgtattccccactggggaatggagacagaaggtctacagctttacgttggttacttgaaaaaggtcattgcgttgagaggaaggatggaatatgaaaatgttgttgagctcatggagcaaggactcggacaggttaatttcgttgggtgcttaaccaatttgtttaaggatattgtcatggctattgaagaaaacgatgagatcttgaggggtctttgtggagaagatggtgttgcgtatgcgatttgtgaattgcaagaggaatgtgatttaagaggttcgttgatcttgaagaagtacatggactttagaaagttagctatattggcgtctgatattaacaattctcccaatctgaatattcttcccggtggtgcgtctgaaggaccagacccgagagaagttgagctgtatgtggaagagatactgtcactgatgcagttgggtgaggactataccgagttcatggtgtcaaaaatcaagtctttgacgtcggtagatcctgaattgttgccaacggctacaaaggcatttagaaataaaagttttagcaaagcgattcaggatgtgacgagatattatgttatactagaagggttctttatggttgagaatgtgaggaaagctattaggatcgatgagcatgtacctgacagccttaccacttcaatggtggacgatgtgttctacgtgttgcagagttgtctgaggagagcgatttcaacttcaaacataagttctgtgattgctgtgttgagctatgctggtagcttgttgggcaatgattaccatgaagctctacaacagaagattagagagcctaaccttggtgctaggttgttcttgggtggtataggtgtggaaaacaccggaactgagattgcatctgcatttgaacaatatggacgtgagctgcgagtacattctcaaactaaaacatgaaatcaaggagcaatgtattgaggttaggtctcagacttctgatactaggtgatttacttatctaggatactaaaggaacaactggctggtatctatgagactagaattctcttgcttactcttgcctgactctatatggatatatctcttcacttactctgtgttaaggtgttaacttagatagcgattttagaacagctatgttgtttgctagaggtaatgcaggctctgttcgtctcataaaatccatttaaattggcatttgagtaggggcaccaattctgtgaatggtcgttttgcactcttgaattttagacagtcggtctcactttctttatctcgtgtcctaatcacaggtatttcctgcaccagcagatcgagagaggataaaatcatgtctatccgagctaggcgagttaagcagcacgttcaagcagttactcaactcaggcatggaacagctagtagcaaccgtaacaccaagaatccgtccggttctagacaccgtagctaccataagctacgagttaacagaaaccgagtacgcagagaacgaggtgaacgacccgtgggtccaaagacttctccactcggtcgaaacaaacgccgcgtggctccaaccactgatgacatccaacaactacgactcgtttctgcatctcataattgatttcatagtcaagagactcgaagtcataatgatgcagaaacggtttagccagcttggtgggcttcagcttgatcgagacacaagggctttggttagccatttctcgggtatgactcaaagaacagtgagagataagtttgctcggttaactcagatggcgacgatactgaacttggaaaaggtctcagagattttggacttttggggagaaaactcaggacccatgacttggagactcacaccagctgaggttagacgggttttgggtctccgggtcgagttcaaacccgaatcaattgctgctctcaagttgtgatgttacttcttttgtttattatgtcatctacacaactcgaaccaattctttcgaaatctgattggttcctcaaatattttaattgaatgaaaacttaaattaaaaatc

SEQ ID NO: 144503 - DNA, 286 bp, Arabidopsis thaliana landsberg
gaagtactagctagtatatcagtcccatgcaccctcttaccaaaccacctcaccaaattttcaactctttttacgtccaaccaaagaatcttcccaaacctctctttattcgattctccaggcatataacaactctcaccatgccggagaaaactcgccgtacaaaggctctcgccgccacgctcttgacgacagtggtgtttctcacgtttccaatgataatcaacgcttcagattcatcaaccaatagaaaactcgaagaggatcctataaaatgacaccagtc

SEQ ID NO: 144504 - DNA, 763 bp, Arabidopsis thaliana landsberg
cgaaagacggcaaacacgaacgggtttacgtagaccgtctaacgctcctccgtccgacggagaaaaaacgagacggtgaagaagaagaagaagaagaagaagaagaagaacgactcaaagatctcatcgatcactctctccaagatctattcacgcatcgtcggaagaattttcgcttccgacgacgtttctctcgtctgattttgtctccgaacatcctacctaatcgtattcggtgctggatttgaatccggtgaactgaatctgacaatttcgttcccggaggtgtttaaaaatggccgggatcttgaataaattgcggaatctagatgcatatcctaagatcaatgaagatttttacagccgtacattatccggcggagttatcactctcctctcctccgttgttatgttccttctcttcttctccgagctccgtacgtattaacaacttcgcttccaattttgtgaatctccatatccagtttcgtaattttgaaattctttgattctgttgtttaggtctttatcttcatacagtcaccgagacgaagcttatagtagatacttcaaggggagagacgttacgcatcaacgtaatgttacttaatagtgattttgacttggtttgtgcttatatttgattagagatgtctgataagtttcattgatgatgcagtttgatattacgtttcctgctctagcatgttcgattcttagtgttgatgctatggatattagtggagagcttcatcttgacgtg

SEQ ID NO: 144505 - DNA, 283 bp, Arabidopsis thaliana landsberg
cttttcatctttacctgtctctgcccttaacctcacacagatatcgagtctcggcgattgaagtgaactctcatccttataatttcatccgaaaggtaaaattttgacagctctagtcgctaaaccattgttgtttaggtctccttggaactcttctgaatttgcttttagattagtttactctttttgagcctttgtttgtgtaatcttcgaatggattcatggttttgcgttaatgggttctgtttgttattacagattttggataaagtttgattttttg

SEQ ID NO: 144506 - DNA, 1156 bp, Arabidopsis thaliana landsberg
acatttagtacatgaagtttctgagaacaaagacaaagacaacacaacacactagttttttgcttttggaaagtatctcaaactaggtactttttgtttgtgttggtgaaggttactttcctggaaaataaacctcacgtaaaagggattatcaacaacataaagttcatgccttgggaaaatacatgctttgtcacagggggaagtgatcacgctgttgtactatggaacgagagtgatgatgaagaaaacaaatggaagtcgaaacctttacacagaaatctacattcagctgctgtaatgggagtggatgggatgaaaaacaagaatgttattttatcagtaggagcagacaagagaatatacggatttgatgttcaagttggtagagcagactacaagcatcaaatagactataaatgcatgagcgtcctcgctaatccttgtgacttcaatcttttcatggttcaatccgggtaagaagaacttatcaaatatggtttccattctttgcttgcggatttactaaagaagaatcccgacattgtaatgtcagggaacccgagaaacagcttcgactgtttgatatcaggttaagaaaaaccgaactccattcgtttgggtggaagcaagacagcagtgaatcacaatcagctctaataaaccagtcttggtctcctgatggtttatacatcacctctggctcagttgatccggtgatccatgtttttgacatcaggtaactctttcacagcatcaatggctctctgtttacacactatgtaagaagtgaaaattggattgtgattgtattgttgtttcacttgtgggtaggtacaatgctcgtaagccgacacaatcaataaaagcgcatcagaaacgagtgtttaaagcggaatggcattactctcaaccacttctcatctccatatcttctgatctcaacattggtctgcacaagatctcatgaaacttttgaagctctcacatgtctttgttcctcatttcttattatctgaggatacaggttcaggtggcgaatatttatcagccatcataccaattcttagttttaggtataaacatcattcccatgtattaaactctcaatttttataaaggattcgttaattaacattactgcagaaagaaagaa

SEQ ID NO: 144507 - DNA, 675 bp, Arabidopsis thaliana landsberg
gtccaattccagataacgcagcgtttcgaaacgcacctccagatgcttttgaaggtaacaaagacttatgtggtagtgttaacaccacacaaggcttgaagccatgttcaatcacatcctcaaagaaatcacacaaggatcgaaacctaatcatctacatactagttccgatcatcggagcaatcataatcctctccgtctgcgccggaatcttcatctgtttccgtaaacgaacaaaacaaatcgaggagcatacagattcagaatcaggaggagaaacattatcaatcttcagcttcgacggcaaagtccgataccaagagatcatcaaagcaacaggagaattcgatccaaaatacctaatcggaaccggaggacacggcaaagtctacaaagcaaagctaccaaacgcaatcatggcggtgaaaaagctaaacgaaacaacagactcatcaatctcaaatccatcaacaaaacaagagtttctcaacgaaatcagagcactaaccgagatccgtcaccggaacgtcgtgaaactcttcggattctgctcgcatcgccgcaacacgtttctggtttacgagtacatggagagaggaagcttgaggaaagttttggagaatgatgatgaagcgaagaagttagattggggaaagaggatcaacgttgtgaaag

SEQ ID NO: 144508 - DNA, 611 bp, Arabidopsis thaliana landsberg
tgcaagtctttcatctctatgcacaaatggcgaaagagaacagtagtcatagccttgcagaagcaaagagaaagagactcacttggattctttgtgtaagtggactttgcatattgtcttatgttcttggatcttggcaaaccaacactgtcccaacttcttcctctgaggcttactcaagaatgggatgtgatgaaacatcaacaaccactcgggctcagactactcagactcaaacaaatccttcttctgacgatacttcttcctctttgtcttcctcagaaccagttgagttagatttcgaaagccatcacaaactcgagctgaagattacgaatcaaaccgtaaagtactttgagccatgtgacatgtctttgagtgagtacactccatgtgaagatcgagagagaggaagaagatttgataggaacatgatgaagtacagagagagacattgtccttctaaagatgagcttctttattgtctgattcctcctccaccaaactacaagattccattcaagtggcctcaaagtagagattatgcttggtacgacaacattccacacaaggagcttagtattgagaaagctatccagaactggattcaa

SEQ ID NO: 144509 - DNA, 850 bp, Arabidopsis thaliana landsberg
cacaaagttaagttaaaatgtctcaaagtatgtcataagtgcagcaaaaaaccctgaatttgcgcagaaattacatgctgtgttgttagaaagtggtgcatcacctcccccagatttgtttatggatattaacccacataacttgagggggaagaaatttgcttcaagagccccgccaagaaagtagcaattctatggtttctggtattccatgctacccagaaaaggtactcttaagatacccaacattccacctgcccccttaatctatcttaagatatttaagtccttaattgtttccatctacactgaataggtagctgaacaactgagagaatctgaaaggaaccccacagccgagagttaccaacaatcagtggaggtcgatttgtcaatgaagaggaactttgatttggataatactggtaaagcttcttcatccgaaaatatggaggttggcactgctgatggggagtctgctgtttgtgatagtcatgaccaagggattaatccattgctcggagaagctgcaaagtgggaaattatgtgggaagatcttcagattggcgagcgcattggtattggtaaggtttgttatatcagatattggattcgctagaattatgcaactttattattataaactgaagtggtatccgtgagagacttttgctgaagcttgatatttactaatagttatctacccttatgcttgtggataagatctattacatccaactattcagttttgatacaccagacaagccccttgatctgatgtgctctttctctgtgcttttctgtcgcaggttcatatggagaagtttatcgtgcagagtggaatggaact

SEQ ID NO: 144510 - DNA, 440 bp, Arabidopsis thaliana landsberg
ggagaaaatacctattgaggaagtgttccagcagttgaaatgcagcagagaaggtttatctggagcagaaggagaaaacagactccagatctttggccccaacaaactcgaggagaagaaggtatagtttggttttaaccattatcaaagtcatcatacatgagctaagtcactaactatgtaatggtggtttcaataaataggaaagcaagttactcaagttcttgggttttatgtggaaccctctctcttgggtcatggaagcagctgcaatcatggctattgccttggctaatggcggtggaaagccaccggattggcaagattttgtcggtatcgtttgtcttttggttatcaattcaactatcagttttgtcgaagaaaacaatgctggaaatgctgctgctgctcttatggctggtcttgctcccaaaactaag

SEQ ID NO: 144511 - DNA, 738 bp, Arabidopsis thaliana landsberg
aaatccatgtgtagctgatggtttcgtgtaggctttcagatgcaaagaatgatagcaccaactccacagccatgtttggggcagacgatatacctagtgatggggacaaagtggaccaaggtgttgtactagctcaacaacaaagaaaggatgaaactagtaaaagtgatgagaatgcaaaacagtctgccacagatcaaaacaaggtgacatctaccgacaatgaaggagatgctggaaaatcttctgcttcacagcctgtagagaaagatgaaagtaatgatcagagcaaagaaaccaaagttatgcagcctgtatcagaccaaactaagccagcaattcaggaaccaaatcagcccaattttaatgtgtcccaagcatttgaggcattgacagggatggatgattcaacccaggtagctgtcaatagtgttttcggtgtgctcgaaaacatgatttctcagctggatgaagaaaaaaaagaaggaaatgaggtaagtgatgagaagaatctcaaggatgagaagaatctcaaggatgcgaagaatgtcacgaatgaggtagtgtctccatctgaagaggaaattccctacaagagagaaaccaaaagccttatgccctctgcaaaatcacgtgatcctgcatgcagtgtgagtgaaactgaaaaatgttctgacaatgataaggtaacaggggtagtgattgaaaaacaattgggcagagatgaatttgtgattg

SEQ ID NO: 144512 - DNA, 1552 bp, Arabidopsis thaliana landsberg
tcactttgtattatttgagtgtttttataaaaccttttttccatcttcctcctcaccttcccaagaagaagaaccccaaagaagaagaaaggttaataatgatggccagtgtcgagctgtttctgagggagactgagctgtgtcttggtcttcccggtggagatacagtggctccggtatccggaatcaagagagggttctcagagacggttgatctgaagctaaatcttaataatgagcctgcaaacaaggaaggatctacgactcatgacgtcgtgacttttgattccaaggagaagagtgcttgtcctaaagatccagccaaacctccggccaagtaattttactattttgtcctttatgatttattttccactcttctctactgctcttaatattaacatttttgtaaaggtgactgcaaaaaaaaacagaaatttcattaaagatatatatttttcttcgccaaaaccattttatcatatggtctacggtttttttctcttcttaaatcgtccaatgtcttaatatatttaattatgtttaacccatagtctcatgcaagtaaaatttatgtgacatcacgtcaaagctaactacagtctatatcttgtataacataaccgtttttccgttttaaaaaaaatatagggcacaagttgtgggatggccaccggtgagatcataccggaagaacgtgatggtttcctgccaaaaatcaagcggtggcccggaggcggcggcgttcgtgaaggtatcaatggacggagcaccgtacttgaggaaaatcgatttgaggatgtataaaagctacgatgagctttctaatgctttgtccaacatgttcagctcttttaccatgggtacgttttataagtatattccttatatatatatgtagatccttccatgcacatttagttactaattaattgttactatagaaagaaaaattaatcatcatgatgatagatcagtcccaaatgaattaccgttatcgagtatacaaatatttcataattgagtaacccgttaatagtagtttagaaactgtgaaaagaaaactatgtgataaaatccaattgcgaaaaatgtatatttcatttgttgcaccataaaagaaaaccaccaagtttaaattcaggatatcaagttcttatacctaagattattttaggcaaacatggaggagaagaaggaatgatagacttcatgaatgagaggaaattgatggatttggtgaatagctgggactatgttccctcttatgaagacaaagacggtgattggatgctcgtcggcgacgttccttggccgtacgtcttcttcttctcccttattaattaccatttaattagagctttattgtttcggttaaaattcgagctttatttttgtttatgtcatttatttgtttctaataaataaccatttgttttaatctttttatttattagaatgttcgtcgatacatgcaagcgtttacgtctcatgaaaggatcggatgccattggtctcggtatgtattttctaccaatgcacattatattca

SEQ ID NO: 144513 - DNA, 611 bp, Arabidopsis thaliana landsberg
ctcattatattcatttccatctttctaatttatctttccatttccgagccgttgagaattttttctgagagataatttaacaaatttcttcttcttcttttgtttctgaaccaccaaatctgcctttctcaattagctatgggcgtcgctgttctaaatccccaggattgcttgaaagatccattctctcacatgaaacaacatcgtaatcctagcgcatgtcccaacaggcagaagaagacggtctccaacaaccgtacacgccggagtcctcctcgtagtcaatcctccagatcttcttctcctcctgtagcgccgccgcttcctcctcctcgtgcggctgtctctgctatcgttccaaagggaacccttaagaagagtcttagcaataccgttgccgttagccaggtgagaatccttaagcgcggcgaagaaatccccaaggagacttcagatctggttgtggaaatgtcagatctgggatctactcgtcggattggaccagatccgggtttgattccgagtcacatccgtttatctggccgcaaatcgaaatcagcaccgttttacgccggtcctgtgaccatgacctctccgcctcctagcgatgt

SEQ ID NO: 144514 - DNA, 2293 bp, Arabidopsis thaliana landsberg
atgaaaaccctggatgttgaggtccgattcgtggacagatcgggtgaaagaaagagtatccgcttgttccacaccggtttgatgaaggaggaatcatcggagcgggtggagaaagggtggtcttggtcaagatacagaacaacgtagggtttcaggtcaccgttacgccagttgacattcttcaggtgcttggcagagacgacggtgacaaccaggtcgagtggctccgacgaagtcatgaatacggtgcgtttcaagacgagacggtggcttacgcggtggtcttagctaacgtgcgctcgtatctcaaatatctgtatcaaagtctcagctatcatcaactatcatcgttttatcacagagttttatgtctcaaaaaacctgctggctatataagaggcttttgacttttggagtttgactctttcttactagcgacagctggagttattcatgaacaggatagttatatccttatgtccaaacagatgcataaattctcaccaagcacaagataggcatttgaagagtggataacactttctcagtctttcttcttcttcttcgttgtgataggtcaggtcagggaacaacaatggcttcttctgcaacagcaccaaattcgctatctttcttctcatcttctctctttttatcctcctctcaccaaatccctaaaacctacatttccgtttcaaaactcggctccggcagagtctcgaagccgctttctgtctcttcccagctagcgactctaccgattctatcattcgaaggagagaaggtcggagagacgtatctagacctcaaagcggcgccggaggataccgcgcgtgccgttgtgcaccgagccatcgtgacggacctgaataacaagcggcgaggtactgcttccacactgactcgcggtgaagttcgtggtggtggaattaaaccttactcacagaagaaaactggccacgcgaggcgtggatctcagagaacaccgttacgtcccggtggaggtgtggtgtttgggccaagacctaaggattggtcaattaaaatcaataggaaggagaagaagctagcgatatctacggcgttatcgagtgcggcatctgcggaaggtggtgcgatagtggtggaggaatttggggagaagtttgagaagcccaagactaaagatttcttagctgcgatgcaaaggtggggattggatcccaaggagaaagctatgttcttgatgattgatgtggatgagaatgtggcgaaatcgagtaggaacattggaaccttgaggatgttgacgcctaggacactgaatctgtttgatattttgaacgctgataagcttgttctgactcctgcggctgtggagttcttgaatgcgaggtacggtgttgatgcggtggaggaagaagatgacgatgaagatgagacggaaggttagtgttttcttgaaaggaactggcttgttgtcgaaatttgatgttttgaatgttgtgtttgatcgtttttgtctggttttaatttcttgaagaggtagaaatatgatgtgttaatatggaaaagtaattatttgtttgtgttatgaagggtcagaggaagcttaagaatgagtagcacccgtagttccaattgcttcaagtgtggcttaattatgagtttaatcttgagtacatcttctcactctccttgatgaggtcttctctttcctttttgtgtcacaacaagagaaatgtgtatttacttttagagtttttcttaagagatcatcctcaatttcttgtcatactgattttgtgtccaactctcaatgaaggagtaaggagtgaaattagatatcatgagtaacgttgattgtgtgtgtatcagttaagattgagcaacaaagattgactttagtcatcaagttaacaagaaagagtggctattataagctttaagcgttgatgttcatcttggttttgaaaatcatgaatagtctcacacaaatctgttaacaacttgctaaaaaaaaggattagctagaaaacttaggaagtgtcaatagtgtatgttatttacagacagttgatgggtcttggtgggcttaagaagatagcccaatcttttgaagaaagagatatgagatgcaaaatccatgaactttaagggtcaatttctgaactagtaaaaaatgtggttaaaagtgtaagaaaacaagaatctttggaaacatgtgtaagaaagcaactaatttaactcccgccctctcttaccagttttctattttgccttctccgtccttaccgtgtgttctgaaaactga

SEQ ID NO: 144515 - DNA, 409 bp, Arabidopsis thaliana landsberg
agtctcccattgctcggcgctgtgctggagagcatgtgtttccaggtgaaagacgtccttgactccatgaacaaagatgcaggtgaaaagggttcccttaataacgggaaaggggagttcttgctcagagttgatggtggtgccacagctaacaaccttctgatgcagattcaggtatgacgatctctcctctcttctctgtatgaatcagattctgatgattgtgttgttcgaacattaatctcattctcttcttatctccttgaaaatgttgcaggctgatctgatgggaagtccggtggtgaggccagtggacatagagacaacagcactaggagcagcctatgcagctggattagctgtgggattctggaaggaagcagacatattcgagtcgggagagaaggcg

SEQ ID NO: 144516 - DNA, 1755 bp, Arabidopsis thaliana landsberg
gtatctcatttcaagaagattgaagacgaaggagaagctgagagagaacgacgaagcagattcaaaatcaactctctttcttcttcattcttttttcctgggtttttctgaatgtatcaccacgctttttccctaaaatttcactccttctctcctcactatgcgttatccctctccaatttctccacccaaagccctaatcctctcctcccgccattcgctagagtccctcatgtgaccagctctgtttgcctccgctgccggagcagcgccgctgatgtatctccggttatatacgccgatggctcctcctccatctgttctctcggggaaactggagatgtcgcggtggtcgagaaacctatagatgtctcaaccttgggtaatctctgcgtcgacattgttctcagtgttcacgaattgccccctccttctcgtggagaacgcaaggccctcatggacgaactctctatgtctcccccagataaggtttgggttctaaatcttgactttaactgcttcttagtgtttcaatggtgataatttcgaacattgtatgtataatttgttctgccttagttcggattgatcgaaagaacttcttagctcaatctctttgatgagaaaattgaatctttgttttctcgtttcagttgaattaaggttaaagtattgttgagtctgttgatgttaatagtgaagtatatgttccctgttttgcttatagaaatactgggaagcaggtggcaactgtaacatggctatagcagctgctagattggggcttcattgtgttgctattggtcacgttggggatgaaatctatggtgagtttcttcttgatgtgcttcatgaggaaggaataggtacggttgcattgaatggaggaacaaatgaaaaagataccagctcattctgtgaaactctcatttgctgggttcttgtggatcctttgcagaggcatgggttttgcaggtactgctttttgccacgccaaaacttgataatatctatggatggtagagctggtttatgtggggaaacggttgctaagggtatatagtgaatgcatcatctcattcatgaactgtgatggggatggtgatggggacctagaaatataacttttcatttgatagaacttttttggaaacaaaaaagtgtagataccagattttccatcggaatatttttcttgctgatagtgttcttaatgctatatgtctagaaagatatggctttcttgtttagagatcttgtttctaatattgagacaaacgctagtgggtgatattgtcatacttgcctccaatgcctagttctttgaatttgttgactcagggaatttctgtcccattttattcctaattcttttgtctatttgtgaaacaaatttctgatgggtaatattcttgtttactactataggaacttattctctctagttgtttctctttttttagtcgagctgatttcaaggaggaacctgctttcagttggatcactgacctatctgatgaagtaaagatggcaatcagacagtcaaaagttcttttctgcaatggttatgactttgacgatttcagccctagttttattatgtcaacgatagattacgctgccaaagttgggacagctatcttcttcgatcctggaccacggggaaagagtctgtccaagggaactcctgatgagcgtagagcacttgctcatttcttaagaatgagtgatgttcttcttctaacatctgaggag

SEQ ID NO: 144517 - DNA, 424 bp, Arabidopsis thaliana landsberg
agactgttgagaagaagattgctaggcattcagaatctggtaccgtcactaaaaggtgtttatttctctgttcttaacaccattcttctttatatgtttcttaacaccattcttctttatatgtgtttataatgaacttgctagcttactatattctctactatgattgtctggtaaacagggagattgtggtgcagttcaatgctgatgttgcagatgggatgcagtggaagttcactccaacacaaagagaggtttagactttatatctcaagaagaatgttgagacgaattagtgtgtttttacctgatatgtctttttggttttggtactttcttataggttagagtaaagccaggagaaagtgcactcgcattttacactgctgaaaacaaaagttcagctccaataaccggagtctag

SEQ ID NO: 144518 - DNA, 1384 bp, Arabidopsis thaliana landsberg
gaaaacaatgaatggtcattgctttcttccgagttttgtgaaggtctgtttccattggcattagctattgggaccaagatattacgttctgaatagaatgttgagtatagggttattttgacaattccaggaacccacataacaaacacccgcgaagccaaagcatttgctcttctatcggaggagggaattgctaaaggtattcgtagggtaactgctgtgactactgaatgtgcttttgatgcattgaatgcggcgtccttacttgaaagagaagtagaggatgcctccagagcggagggaagtgcattggaaaaggttttctccctctctttgtcaaactattgacaaaatgaagacgatgtcgttacttggattcacgtaaaacttattgtgtttgtatttgcacattcacagaaagtttctgctttgaaaagccgagtagatgcagcaattatcccagcagctaaaaaggcagatattaggactaagattgcttcgcttcaggttacagtcagcagctttgtctagatttccctgtaattttgtaatcaaagcaattctgaagtggcaattattgttttcctaacttcgcagaatgaagtaagaaaagctcagaagaaaatagcggaacaaaacctgaaaaaatctgtcaaattagcaacagaggcagctgagtccgcagcatcagatgggaagactttctgcataatccagctggatgtgggtcttgatgcagcagctgtgcgagaggccgtttcaaaagtcatggaaaagaaggtaatccgtattttcttacatcatcacttgtaccataacctgttcatagatagcaagaaagttaaattaacgtttccgtttgattaaccttgcagggtatgtcgataatggtgttcagcacagatgaaagcacaaacaaggcggttgtgtgtgcaggagtgccagaaaaatcagaccagtttaagccgttagacgtcactgaatggttgacaactgcattgggtcctctaaaaggaaggtgcgggaaagggaaaggtggtcttgcatcagggcaggtatgagtcctattctctttagtctacaatgtgatagtatcatctacaaagagatgttaaatcttcaacatgttgttttggttttagggaacgcatgcttctcaagtgcaggcggctttggatatggcttcatcatttgcatcaatgaagctcaactgatttggtcgggaggttacataatctgtgaggtcagaataacctctacttaatttgctttcattgtacaccgttttacacatgttttaagaatcagttaaaattactcagttcgtgtaatggaatttgtggtatcacactctttaagtcaaagtaaccaatggctgttataa

SEQ ID NO: 144519 - DNA, 1161 bp, Arabidopsis thaliana landsberg; identical to SEQ ID NO: 25916
  unsure (1)..(1161): unsure at all n locations

SEQ ID NO: 144520 - DNA, 997 bp, Arabidopsis thaliana landsberg
atcatctcaaccgacggtctcaacatctgtgacttcgaacataatcggcgattttgatgaaccaaatcgaagagagaagattaataagatagttttgaggaagaaatcacaattagagcttaaagcaagaataaatcacaatcacaagatgggaatttttcggacaacgtagtgataatcagtcaatcggagaaagaaggtgacccgagtgttataaccatcaattgtcctgacaaaacgggtttaggttgtgatctttttcgtatcctcctcttcttcggcctcaacattgtctgaggaggtaacaattccatctcatcattacactttgtgtggttttcaaaaatttcttatttttgagatctgctgtggtttgtgacttgaatgtgttcgatgaaattcctctgaaaagatgtatcaactaatggaaaatggtgttacttggtcttctaggtgattgggaaaccaaacacgagatggaatctgttgaaggtgagacttgttgaggcaagtgcttctttttcttaggcctttggtatctcaagatgttacctttctcatcttttcaacattcaggtttgtgcaagtctttaatgtggttgtgagaatgccgtgtggtagggtcatcatcttagagggtctattgcagggcttcactctccttcgcaactgttcctaatagatccttcaaaagagaaaccgtcatggaggatcctgaatgtcccagggaaaccacccaagttagcttggggacatagcacatgcgttgttggaggaactagagtattggtccttggtggtcacaatggtgaggaatggatactcaatgaattacatgaactctgcttggctagctggcaagactcggatctgtaaagactctttccttattcatttggtttgtggttatgtatctgtcacattccaaactcttatgacagaagcgtgtgtacatagtaaattagtgattgttgtacgctttagatattaatgtgat

SEQ ID NO: 144521 - DNA, 592 bp, Arabidopsis thaliana landsberg
ggtcattggagatttccggaggggaaggaaatgcaaggatatgcttacagcctaactcatccaggaacaccagcggtcttcttcgaccatatcttctcggattatcattccgagattgctgcacttctctctctcaggaacagacagaaactccactgtcggagtgaggtaaagtagtaatcaagaacttacaatctttatacaaaatttcgacgggtcttaaaaccagcctcctttgtcttccttgcttttgtgaattataaaggtgaatatagacaagagtgagagagatgtgtatgcggctataatagatgaaaaggttgcaatgaagatcggaccagggcattatgaaccaccaaacggatcgcaaaactggtctgtagccgttgaaggcagagactacaaggtgtgggaaacatcttaagaagaaggttcccaatttttatgtgtatctagtagtaaataaaattgttcctggaggatatattatttcagggaataagattacctggaaatgttatatttagagtggaattaaaaccagatctaagatttgtcccacttttttcaatgctgagagaatattcatatt

SEQ ID NO: 144522 - DNA, 1375 bp, Arabidopsis thaliana landsberg
  unsure (1)..(1375): unsure at all n locations
aaaaaaaagaactctttcgtcgactaatgtgatttattgttcaccggagtattaaagaagatgatgatcggagaaactcgcaggacttatcccactgttgaaatacctccatggccggtacttgaagagcttacaacgtcggagtttttttctccggtgatgaatagtccagattgtagcatgcttgaagctttggcggcgttgcagcgttatttgccgtctaacgaaccggatccggagtcagacccggatctattgggtccggattcaccaatcgatgcttactcatgcgaccatttccgtatgtacgatttcaaagtcaggaggtgtgctcgtggccggagtcatgattggacggagtgtccgtacgctcatcccggagaaaaagctcgccggagagatccgaggaagtaccattactctggtacggcttgtcctgattttcgtaaaggtggctgcaagaaaggtgactcttgtgagtttgctcatggtgttttcgagtgttggcttcatccagctcgttaccgtactcagccgtgtaaagacggtggtaactgtctccggaaaatttgtttctttgcnnnnnnnnnnnnnnnnnnnnngtttttacatactcggagccctgacagagttgattcttttgacgtttcgtctccgattcgtgctagagcatttcagctgtcgatttctccggtttctggttcgccaccgatgagtccaagagctgactcggagtcttctccgatgactcagtcactgagtcgatctctcgggtcttgttcgataaacgacgtcgttccttcgtttaggaatttacagtttaattcggtaaaatcatttcctcgtaacaatcctttattcggattcgggtcgccccgtggatcgatcttgggtcctgggtttcagtctctgcctacaacaccgacccgaccagggaatctggatatttgggagtatggtttggaggaagaacccgtaatggagcgtgtcgttgagtcgggtcgtgagctacgagaaaagatgcgcgagaaactgcacaaggagaattgcatggatcgagttgaccaggatccggatcagaatttgggtgaggctcctgatgtcgggtgggtatctgacctgctcatgtaaagaaaaaaatctgaccgtatttcgaagtctcattggcttttttggatatcttccaaggaaaagaggaagggatcttagtgtgttcatattattttattcactaatctcgtattttatctgctaataagaattaattatggattttggggcctgatttttctaagatgatcgttgtatagatgtgccttagggttttaattatgaaatagtattaatataatcgtgttttataagaatataatct

SEQ ID NO: 144523 - DNA, 3488 bp, Arabidopsis thaliana landsberg
gactcttctcttctctatccattctctgccgaactagtcgtcaatcgaaatcccaaagatcagcgatggtgactctaaacgcttcttctcctctcacgaccaagtcgttcctcccctaccgtcacgctcctagccgtccaatctctttctcccctgtcttcgccgttcattcgactgaccccaagaaatctacccaatcagcctccgcttcggttaaatggagtctagagagttggaagtcgaagaaagctttgcaattgccggattatcctgatcagaaggatgttgattcggttctacagacgctttcttcttttcctcctatagttttcgctggtgaggctaggaaactagaggataagcttggtcaagcggctatgggtcaagcctttatgcttcaaggtggtgattgtgctgagagtttcaaggaatttaacgctaataacattagagacacctttagggttcttcttcagatgggtgttgttctcatgttcggtggccagttaccagttatcaaggtcgattctttacctggagatttttctgtgtgatgaatctctagttagggatagtttatgattttgtgggttttaagttttcaggtgggaagaatggctggtcagtttgcgaagccgagatcagacccatttgaggagaaagatggtgtgaagctgccgagttacagaggagataacataaatggtgatgcttttgatgagaaatcgaggattcctgatcctcataggatggttagagcgtacacacagtctgtggctacgttgaatctcttgagagcatttgctactggaggttatgcagctatgcagagagttagccagtggaaccttgatttcacgcaacatagtgaacagggtgacaggtttataaacttctctccttgtttataatcttgtttgttatgatgttaaccaattgagaatacacttttcttaagtcagaaacggtttcttatttcttgatgttgttgtgacaaaacaggtaccgtgaattggctaatagagttgatgaggctttgggattcatgggtgcagctggacttactagtgctcacccgatcatgactactactgagttttggacatcccatgagtgtttgttattgccttatgagcaagcactcacaagagaggattcaacatctggactttactatgattgctctgcgcacatgctttgggttggagaacgaactcgccaacttgatggtgctcatgttgagtttctgaggggaatcgctaaccccctcggaatcaaggtatgtgatcatcaagtctcttggtttggttaattggaataggagtaagtttcatagctttgttcgtatagaaaaaaacactcacatgtagactcaagtactgttgttaactcaataggataccctgcaggtctcaattgcctggtattaaagatattggaaaaccattacaaagaggctacagcacatttttgtatgagaaaatgacagatgttgattgatgtactttgatgcaggtgagtgataaaatggtccctagtgaactggttaagctgatagagatactaaaccctcagaacaagcctgtaaggattacggttatagtgagaatgggagctgagaatatgcgggtcaagcttcctaatttgatcagagcagtccgtggagccggtcagattgtgacttgggttagtgatccaatgcacggaaacacaatcatggctcctggtgggctaaaaactcgttctttcgatgcaatcagggtaatcattcgaacttacttcttcatccaactctatgcataatcttgcttatgattcatgtagttacccattaaattatatggtgtatcaggcggaattgagagcgttcttcgacgtccatgatcaagaagggagtttccctggcggggttcatttagaaatgactggtcaaaacgtgacagaatgtgtcggagggtcacgcaccatcacttacaacgatctaagctcacgctaccacactcactgtgacccaagactcaacgcatctcagtctctggagcttgcattcatcattgcagagcgtctgcgaaagagaaggcttggttccgggaatcttccgtcatctattggagtctagagaacaagaaaatacttatccgagctaggatgtgtgtgtatagaggctgatctctacttattaagttgccaagttaaatgagcttgtgtactgttaaaagtaagatattgttgtttttgtgtgttgggttatgatattgtctgaaataagtggctgactttataaacccgtaaatctctacgtcacgcttgcaacaaaaattcgatatttgattcaatcacagaaaagtcctcccattaaggtgtaaatttttgactcaaataccacaaagcataaaccttttgacaaaccaaaagttgtatgaagaaaattggaaaactctgaatgccatttccacacgtggacactattcgtttagagaacacttaaacaaacgcaggaggcctggaaaaaagaaagataacgggactcgagagattgagattacggagccacccactttcatggagtctacactctcagctttctcaaccgtcaaggcaacagcgatggctcgaagtagtggtggtccttcattacctctcctcactatttctaaagcacttaaccgccactttaccggcgccagacacctccatcctttattgctcgctcgctgttctccctccgtgcgacgtcttggtgggtttcatggcagtcgatttacttcgtcgaattcagctttgagaagcttgggagctgctgttttgccggtaatccgacaccgtttagagtgtttgtcgagctcatcgccgtctttcaggagtatctcaagtggcggcggttctggatttggggggtataatggtggaagcggcggtggtggtggcggaggatcggagagtggtgattccaagtcaaaactgggtgctaatgcaagtgatggtgtctctgttccgtcgtcagatatcattattctcgatgttggagtaggttcttctctctctttctatatgattttggattcactccagtagtgtaatgttactaacatggatgttctgctctattgaaggggatgacatgtggagggtgttcagcaagtgtgaagaagatactggaaagccaagtaagtgtcaaagatctttactttacttgctcttcttactctcctggtctgcttctctcagcctaagaccaaattgatgtgttctgtctcaaagaatggttgcccttgcccgattatttatattaaaaatctctcttttcttgttttgttttttctttgctgtatagcctcaagtcgcttcagctagtgagaatctcaccaccgagacggctattgtgtggcctgtaccggaagctaaaagtgtacctgatcggcaaaagagtgtaggcgagacgcttgcaaaccatctgaccaattgcgggtttcagtctactcctcgag

SEQ ID NO: 144524 - DNA, 501 bp, Arabidopsis thaliana landsberg
cttccgagaatcctttccgaagcatattgaaggcgttagagaagcctgatggtggtgaattcggtaactactacagcttacctgctttgaacgatcccaggatcggtgagtttccttttatctctgatagatattataatattttgttagaagacgttgttatgatctcgttggtgagagttttatgagagaaatgttgtggtggatgcagataaactaccttattccattaggatacttcttgaatcggccatacgtaactgtgatgagttccaagttaagagcaaagatgttgagaagattcttgattgggagaatacttctcccaagcaggttgagattccgttcaagcctgctcgggttcttcttcaggtaaacgatgattggttgctattcacattcttgatgacattaatgatgtttctgatttcctgaaaaatgcttgaatgtgatatcgttttttctatttgtttttcaggactttgctggtgttcctgctgt

SEQ ID NO: 144525 - DNA, 279 bp, Arabidopsis thaliana landsberg
gggactacgatgttgagagtgagaggcaaaagggcgtcgaagagttttacagattacagcacatcaaccaaactgtcgactttgtaagattcttaaaaaagttattagggtttatgtgtataatgacacatcttattataacttatgtgatccaggtagtatatgtatacttttatttaattaataaataatataaataattgtatgttttgtaggtgaaaaagatgagggctgaatatggaaaattagataaaatggtgatgagcgtttgggaatgtt

SEQ ID NO: 144526 - DNA, 2003 bp, Arabidopsis thaliana landsberg
gactcgaaacttccctatgcatttgtcactcagattgcccaatctattcaggttgtttctaaactagttcacactgaccgagtctggagtttttcttctgctctgattttgttgttagttcttttgcttgtcatagagatgagcttaaatttaaggtcacctattagtcttaaaccaatcacactttcgacttattgtttttaactctttaggtttttttactcgagaagaggcctgtttatagcattgtactatgggatgtatatctgtaagactgtgcttttgtgacgaatgtactcttgcttcagttatgttctgttctgtttttgtaagtattggaataatttcttcagaaatctctacttacattggtcaacttcctgctttatcagtctcagctctcagactttcgggcttatgaaggacaagacatgtacactggtgaaaaaatcataccaattaaggttttatgacgctagatatccttatccctctctcttttgtccatgagtgatttgttggaaaaaaagaagttctagaagctgataagctatctttctttcttttttgtgccagcttgatctccgagttaaccatactctcatcaaggatcagttcttatgggtgagaatacttggtgattttgaacaatttcaactattgtttgtactctttttctcagtgcagcttgattgccgttttgcaggacctaaacaattttgagagtgatcctgaggaatttgcaagaaccttgtgcaaggatttaggtgttgaagaccctgaagttggagtaagataaccactcaattttttacatttcattatctgaactaatgaacctaagtttcaaacgtttgatacaagtgatttttggtttctccttctctctgaagcctgctgttgcctttgcaataagggaacaactttacgaggttaaaactttgattgtaactttaagctactctctctgtatttctgtatactctatatatgttttctattttgaacaagaatgccaaacttactgagttaccatgtcgttgtttttgcttgccagattgcaattcaaagtgtggcttcagctagggagagtagattaagcaagaaaggccgcagaggatctgatcatggttcagcgaggtatgttcacgttgcccctatttgtctatccaagttaccttgtggtaatattagagcctagctcaaaaaattctaaaataactttccatcttatatgtgcagcaaggcaagtggcctgtcaatggacttaatgaagttattcagttttaagtccagtgtagttcggtaagtgattttcttaccacttaatgcatacattttctctgttgcattgtcttcttaagatctgttggacgactgacttctagcggctagatcgtttataagataagttaactttgcgacacatcctgagcgtttttcttacacatactcttgaatgccacctcttcatgcattatatcatttgatagtagattatcccaatatttggagctggtccctactgagattgttctaatagtaatttctggtgatgttacatgttgttattgaacatagaaaaccgaatcactaggttgcaaattgtttgattacaaaataaactctgtggaaattgaagaagttctcttcctgcattgcttatcactaaatgggagtttttcaaaaaataagatttatggacacgaacaaatttgacttgcaagaccaagcaaaagctataacagaatccaaaaataacaaattttgtccatgatcttgacaggaaaaggaaagacttggatgtttatgaaccagttgtggatctgctaacaagtgaggaagttgatgcgcttgaagccagggaagagagacatgcaaggtgaagagtttcgtttacatgtataaatatttcttagggcaacactcaaaatatgttgtatcatgcttaacttgagttaatgatattaagaccatcttttatgagacacataatccttaag

SEQ ID NO: 144527 - DNA, 1603 bp, Arabidopsis thaliana landsberg
atgcttcagacgggtgagctgacgagctgtttgagacggaccggctggcgggatacttcggaggggagagctgacgagctgcttgagacgggtgagctgacgagctgcttgatacggaccggctggcgggatacttcggaggggagagctgacgagctgcttgagacgggtgagctgacgagctgcttgagacggaccggctggcgggatacttcggacgggtgagctgacgagctgctctgtgtctctgcgtgtccggcggaatccccctttgacaagacatgctattccgtatttatagccttctgcgtgtaggacactcctccaggattttgacgagcctaccctcttgacttaacattctgcttaggcctttgacttggatttgggccttgggccaagcaagcccaaatcttacccctaacagtagctgaaatggatcacaacgtacctaattccgatttctatatctagtgtacgtattgatattctttagcaatagttttggaaaatataatttgagtttagtgtactcgttggctttattacttttgaattttaataatagtctattttaaccataagtactagcatatactaaataacttgatctacacaataaaatacagaagattgattctcaaactatttctctctctctctctcacagagaatctccaatggcggctcccgtagtggtcgctcctgcgataaatcttcagcatatggacctacctgaaggaaatgaaggtaataaaaaacgattatattctcagaagcaagatataggggtagcgaatttggggtaataaagaaattgaaattgaaagtatcaagaaacattggtgagtttgggaattggaggaatgtatttaaaattagagtagatctgtgaatttgagatatcgaggtgtatttaaaattagagtagatctgtgaatttgggaaatcgaggctacaatctatggaattggtaacagtgtagaaatcttagaaaagttatgatctatggaatcttagaacagtgtagaaatcgtagtacagtgttacagatctatggaatcttagaacagtgtagaaatcgtagcacagtgttatagatctatggaatcttagaatagtctcctagatctatggaatttgtacaattaaggcaagatttaaaaatttcagaataaaacagttgcttataatatatatataaatctcatatgtttggttgctatttttgacagatgtagcagctgtgcttcaaacatcaacacagcgctggctcaacgctgctgagtggagcattctttataacaaccacaacctattcccagaatcaaactcatttaccatacctattgaagtagagggactttacagagttgacaaccgctttaatcaagacagcaatacgtggagaaacacaagtgctccctccacttgcaaaaatgctatcaacttctacaatgttaggatcgccactggcttgtacaggtttgatgatgatggggacattgtgatggacgctgaagttcaaggagggtgggtcctttgcagaaaaaccgtgaggaacagaggtgggggggtacttacttttgcacactacatgtgg

SEQ ID NO: 144528 - DNA, 2457 bp, Arabidopsis thaliana landsberg
caccattattcgcacatagctaagacctttaatggtttcctctctctctttatctctatctgtctttgtaatttgtttaccgactacaatggtcaaaatttctctactcctataaaaatgggtcgccttgtttttgatcaacggatttgattcatttttctttttacctttcttcctgctttcgtattcaatttgtagttgaccagttcaaaagtctttataccagaaaaaaaaatcgttttttattatattataagacttttcccctgaaattgttgttcctctgtttcgagcgttcgttatgagtactgtggagagtagcaaaccgaagatcatcaatggctcttgtggttatgttctagaagatgtaccgcatctctccgattaccttcctggtcttcctgtatgtttacctctctctttttttaatctgatttgattaaagcttttgcttttgagctttaactgttgcaaaaggttgaaactttgatctatgttgatagatatttatatatcaattttttcagctgaggactgtttagtttttttgtttggaatttgagatagatgaaatgaatttcccagattctgattagtataagatagcccagggtaaagaaaaaggggtcttttgtatttgggtctcaagaattatgaacctggatcaaaatctgtagcatggtttaagagtttttgtccttttaccatgttatttttgggatcgaatgatggttaagttttgattaatggtcaattttcttttggttttatgttattgtagacttatcctaatccattgcaagacaatccagcttactcagtggttaagtaagtcctttctcacagatgttttggtgactaaggttcctaattgtgtcctatggtgattcaatcattagcctgcagttgttacattagttttttttttttggaaattttcaggcaatactttgttgatgctgatgacagtgttcctcaaaaggtatatatttggttgggttctttctataatatcagggcatcctgagaatttggagctcatgttttgtcttactgactcttctttttgttgttttagatcgttgttcacaaggatggtccaagggggattcattttagacgagccgggccacgtcagaaggtttttcgtcgttttatcgaattgctttaaagtcctttttccatttcaatagggtctgttgttgacttagttctctgcaggtatacttcgaatctgatgaagtgcatgcttgcatagttacctgtggaggtctttgtcctggccttaataccgtgattagagaaatagtgagcagtctatcttatatgtatggagtgaagagaatactgggaatagatgtaagtttctgtgattgtaatctccttcttaccaaaacaaacacggtattcgtttgtttcattttcacatgcttgagactttttcagggtggatatagaggcttttatgctaagaatactgtctccttggactctaaagttgtaaatgatatccataagcgtggagggactatccttgggacctcacgaggtggtcacgataccacaaagatagttgacagcattcaagatcgaggaatcaatcaggttttgataaccatcacctctttacaccgtgttctgttccaagagtacatacaaactcgttcttgatgtagtttttttcatcgttcaggtttacattataggaggagatggaacacagcgaggagcatctgtcatatttgaggtaaatttcacttctaccttacaattctacaatttcagtgtttactgatcttttggtggtaaccatgtaggaaattagaagacgtggcctgaaagttgcagttattggaatcccgaaaacaatcgataatgacatacctgtatgtatctctttctactgctttgtctctatagaagagctgtatttcttatgtggagaaattgagaacttgacttttgtatttgtgcaggtgatagacaaatcttttgggtttgacactgctgtagaagaggctcaacgagctattaatgcagcacatgtggaagccgagagtatagagaatggtatcggagttgtcaagcttatgggtcgctacagcggtgagaattcactcttctacttcttctttgccttatcaagctctcttattagactatttcacaagtttgttcactgctttaacagggttcatagcgatgtatgccactctagcaagcagagatgtggactgctgtttgattccggagtcaccattttacctggaaggagaaggcgcactgtttgagtacatagagaaacgactcaaggagagcggtcacatggttcttgtgattgcagaaggtgcaggacaagatctaatgtcgaagagcatggaatctatgacactcaaagatgcatctggtaccaaacttcttaaagatgttggcctttggctgtcacaaagcatcaag

SEQ ID NO: 144529 - DNA, 1345 bp, Arabidopsis thaliana landsberg
gtaagcttttatagtctgcgcttctgtagctttgtggatgtactagaggaagaaagatatagtctgatggattctttacagattcttgctgaaaaaatcccagaagttttggattttacaaaagaattatcctcgttggagccggcaacaaaggtactccactttcacattttacatggatttctcctgaaattgataagaaaacttggaactgcgttaattgtcttgtctgaactttgatacagattcaactgaagtttctggccgaggagatgcaagctataaacaagggacttgagaaagtcgtacaggaactttccttgtccgaaaatgatggcccgatttcccataactttaacaaggtatcactgtcattgatcactagttgtctctgtaaggctttctaaagtggaacaaaatagaaggctcatagattgtaggggctttgatccctgatttttcagtgaaatgttctatacaacaactaataaggcatctagacagttgctaactaacaaattgtgttgacagtgcgactgcatagacaattaaagagttgataattgattcatttgattcttgtttgaccatttttatcaactgctgtttcccctcagatattgaaggagttccttcattatgcggaagcagaagtaaggtcattggcttcactttattcgggagtggtatgtcccagaagtctaatgtacagtagatattattgcatgctctattctatcgttggttgagaacttgctcagaataaataaattatgtattgcagggaagaaacgtggatggtttaattctctattttggtgaagaccctgccaagtgcccttttgaacaaggtatgtgtatccttctctgtagcttaatgtgaaaccatgtgttccaaaagttatctcaacctagcaagtggttgtaaattgcagtagtgtcgactcttctaaactttgtaagactgttcaatcgtgcacatgaagaaaacggaaaacaactcgaggcagaagctaagaagaatgctgctgaaaaggagaaaccaaaaacaggtggattagatacagaaatcaagaagcccttaaatgaagaagttaaggaggagaaaacaaaaacaagtggattaggtaaagaaatgagtgaccgactaaaggaaagaaccgctccttgaatgaccggctgtaccgttttctatatggaaatggtctaagaccgaacgggctttgagaagaaaaagcacccggtgaagccgtgcgtaaaactggctttagaccatggaacaacagggagtgggatgctaaagacaacaatattttatctctttaacggcaaagctaacttgtaa

SEQ ID NO: 144530 - DNA, 1135 bp, Arabidopsis thaliana landsberg
  unsure (1)..(1135): unsure at all n locations
tgcacacgaaacagagacaaaccaaaacgtgtgaccatctaacggctgtgcttggtgagcatggtgtgagttgtgagcttgaactagctgggcctgagttagagagtgtgcaacgattctcttcacttccacctttggctgctgatgagctgtttggcccagatgggtttgatattagcggctctagctctaacaaagcggttcttaccgttgataatcagttgagccctgcacatacgttgcttcagattcgttgtgttgatcaaaagggacttttctatgatatcctcaggacttcnnnnnnnnnnnnnnnnnacgtacgttaaaactgatctctctaacattaagagaacctaaccttacctctgctaagagaagttgggacttctatggttgaaagatttgtataactcaagtagttcttgtttctttatccagattgcatacggtaggttctcctccaaggttaaaggttataggaatttggagttgtttgttagaggcacagacgggaataaaatattggacccaaaacatcaagccaacttctgtgctcgacttaaggaggaaatggtgtgtcctttgcgagtgattatcgtgaaccgaggaccagatactgagctattagtagccaaccctgtggaactatccggaaaaggaagaccacgagttttctacgatgtcacacttgcgttgaaatcactaggaatctgcatcttctccgtaagtactgtataataatacattgtgttctctaagctttttgaacggttattttcggtttgttttaagattggcattgcgttttcttgtaggctgagattgggagacattcgactttagatcgacaatgggaagtttatagatttcttttggatgagagtcgtgaattcccattggctagcctccgtgcgagaaatcaagtagtagatagagtcacaaagacacttatgggttggtgaagcggatgagagtgagctttcatgaacgttatgctacactcaaggggacaaagaaacaaagtcttcttcgcttgcggcttcgggtcgatgaaaagagtgatgcaagggggttgtgattgctgttgtgtggagctaatagcgttgtaaagctttggaaattgtaaaaggattat

SEQ ID NO: 144531 - DNA, 524 bp, Arabidopsis thaliana landsberg
gtgttcatgtcttcatatctctaaccataagataaaactcaagatttctgaagaggacagctctggaattcatatacgttttgcctctccatctgattctcaggtttgtttcttgtcttaaaagaaacacaaaatgggtttatttgaatcttttaatcataaaaatacttaaagaaagaggatcaaatgttgatttagatctctaatgaaagtttgtgtaacgtataaacagcttatggaattggagcaaatctgcattttgaaacccgatgatgaggaagaaatggagtcaccatcaccatcgaaaacagaggaaaatttaggcgtggttcctctgtcttgcgcgtttacgagacaagaacattgcgtttccgagacgaaagagcgcgaagaatcgactagaagactaagcagctttattcttctttacctgatcgttatgtcggtacagattgtgggaggttttaaggcgaatagtcttgcggttatgactgatgctgcacatttgttgtcggatgtggcgg

SEQ ID NO: 144532 - DNA, 2444 bp, Arabidopsis thaliana landsberg
atggaaatggtgaaattcgggaaagcagcacttggtgcggtgaagatactctgtcaccatgcttttgctgtggtcgtcatcgaattgggcttattcatcgatttcttctgcttctccctcttttcgaagctctttggtcatttctacatccacaaccatcgtttagttcccatcattttgttaaaaccgtttccgcgtttgaagagtgaagaaaaagaaaacagatttgttgcttccatttttgagtcctttacaaaagctatggcgcacattacaagattttataaatggtgtgtttatattatctatggatttttcaattatttggttggtttaaccttcaaattagatgtttgtgtgattcttgtatgtatgcttatttataaataggatagaagtttattttatcctttgcacgaacaaagcaaagaaaaacacttctatcttttcattaaagttatactagtttttgatctactcttattggactgaactcaatcagttataacgttaataagtcgaaacggacattttaagctttacgcaacggtcatattatcggctccacgtaacaaagaccaaactctgaaaagaccaaactctgaatcttgtctttttatagtctgtaacgcttctcgtttttcgcatgaccttctccacgtttctcttttgttgcctcatctctttcttcttcaatttcttattgtgtttgctacataagcagctttgttgtgaggaaaaaaataaagagataaacaaaacacaaaaatggtggtgaaaaactcgatcaaattcaactctcacagtgagcgcaagtctttggaagagaccaaggttcctcctatctttggccttcctccagatgccttagacgacaagaaacctacctcggattttgcagtacctatcatcgactttgcaggcgtccacaagtcgcgtgaagccgttgtggagaagatcaaagccgctgcagagaattggggaattttccaggtgatcaaccatggtgttcctttaagtgttcttgaagagattcaaaatggagttgttaggtttcatgaggaagatccggaggttaagaaatcttacttctcgcttgacctcaccaaaacatttatctaccacaataatttcgaactttacagttcgtctgctggtaactggagagactctttcgtttgttacatggatcccgatccttcaaaccctgaagatctccctgtggcttgcaggtaattttgttttcattgagaagtcttaggaaatattgaagatatattattgattctaacatcattggctcagagatgctatgatcggatactcgaagcatgtgatgagtttaggtggcttgctctttgaacttctctcagaagctcttggtttgaactctgatactcttaagagtatgggttgcatgaagggtttgcatatgatctgccattattaccctccctgtccacaacctgaccaaaccttaggcacaagtaagcattccgacaacacttttatcactattcttcttcaggacaacatcggtggtcttcaaattcttcatcaagactgttgggttgatgtctcgcctcttcccggggcacttatcatcaacatcggagatttcttgcaggtaagctcactgatccatagttggacctaaaagtataagataacataaaacagaggttttagtgcgtgatgcattgatttactttctcacttaaggttttcttattcgggttgtgctgcacaacttgtgcagctaatgacgaacgacaagttcataagcgttgatcatagggtgcttacaaacagagttggaccgaggatttcaatcgcatgctttttcagctcgagtatgaatccaaattccacagtttacggaccaatcaaagagcttctctctgaagaaaaccctccaaaatacagagacttcactataccagagtactcaaagggatacattgagaaaggtctcgatggaacatcgcatctgtcacattacaggatttgagatctttaaaaaaacaaaatatatcctgtttgaagcaagatattcagatatgtctatgttccgtcctttccttatccatgtaaaagctagtactctgttcttgaggctgcaactgcaataacaaaagcattgtaccaaagataagaaacaaatggtgtgtgcgtgtgtatttgttgaaacatgtgtggtttatattggatctttagattcaaactttgtttacttactcttctcgaggctccgtggattcaacaatctttatcaagaaatttgatcgaattgtaactagtcagagcatcagattagtacctgtctaaggctttaatatattcccctagggtttcgtaatgattcaagaacaagcaaaaacgcactcgtcgaaacaattacatacctcgacgagactcagggtcaacacggttctccgatttga

SEQ ID NO: 144533 - DNA, 1185 bp, Arabidopsis thaliana landsberg
atgcgtctgcctccttgtagcaaaagcaacccttctatccgggatatacacaaacgtaaaagtgagctttatcatgcgctttgcaatatgctctctaacatcttggcgccactttccgatggtggcaaaagccagtggcctccttcagttgcagaacctgcactgacactctggtatgaggctgttggacgcatcagagtgcagctaatccagtggatggagaaacagagtaaacatcttggtgtacgtcaatctgatttagtatcacttttgtatgcctaccttgtgattacagtccttaacatgtataattggatgaataggttggctatccgcttgtgagtcttcttctctgtctcggtgacccgcttatatttcatcataatttaagctctcacatggaacaactgtacaagcttctgagagtaagtttgcctgtattcgtaatttaaattaagtaagaatgcatggaaccaattatcacgtcccaaaccctgatgtgcagttgtaactgcagcagcttattttttttcaagtatgttgagcacctgtgacttcattgttctttttcaagcttgttcttggtcattatagagaattttgcgccttatatgcaggataagaaccatcgctacatggcacttgattgtcttcaccgggtgttgaggttttatttgagtgtctatgcttcgtcccagccaccaaatcgtatatgggattacttggatagtgtgacatcacaattgctaacagttctgagaaaaggaatgctcactcaggatgtccagcaagataaactcgttgagttctgtgtgaccatagctgaacataaccttgactttgctatgaatcacatgttactagaactgttaaagcaagatagtccaagcgaagcaaagattattggtctccgtgctttacttgcccttgttatgtcgccttcaagccagtatgttgggttggagatatttaagggtaacccgttaacctgaattaggttgttagtaggtctcaataagcttttcctttcatacacttaacttttcttagtgttcacttaataggtcatgggataggccattacataccaaaggtgaaagcagcaattgagtcaattttaagatcctgccacaggacctacagtcaagctcttctaacatcatcgaggactacaatcggtaaact

SEQ ID NO: 144534 - DNA, 366 bp, Arabidopsis thaliana landsberg
ggctgtcttcttcttcttcttccccgacaaagccatgtcttctccttcactgcgattcgccaatacgcaacggtcttcacttcctcgacctatcagaagaagagaaacgcatcaagaccaagaaattcacattaagattcgcatcttccatgccggagtttgacgtggtaggctcttgtaacggcttgctctgtttgtctgattctctctacaacgattcactctacctttacaatccttttactacaaactccttagagcttcccgaatgttccaacaagtaccacgaccaagaacttgtcttcggttttggattccatgagatgacaaaggaatacaaagttttgaagatagtttacttcagag

SEQ ID NO: 144535 - DNA, 825 bp, Arabidopsis thaliana landsberg
aggtttgcattttcgcatatggacaaacaggatctggaaaaacttatacaatgatgggtaggccaggaaacccggatgaaaaaggactgattcctcgatgtttggagcaaatatttcaaacaaggcagtctcttcgatcacagggttggaagtatgagttgcaggtaacaaaccttataaagacttacaaatagatgatgcattcatatagtatttattggctggtctatatgttgtaggtgtctatgttagaaatatacaacgaaacgattagggatctcttgtcaacaaacaaggaagctgtgagagcagacaatggcgtttctccgcagaaatatgcaatcaaacatgatgctagtgggaatacacatgttgtggaacttactgttgtagatgttcgaagctcgaaacaggtttcgttcctcttagaccacgcagctcgaaacaggcaagtatctgttttgaagattcgcaatgattcctcttttaaagaaactggaagctgctaatgaattaactgtcttactttttttcaggtcagtagggaagaccgcaatgaacgagcaatcttctagaagccatttcgttttcacattgaagatctctggattcaacgaggtactaatcgggtttcttactgcaacaacaacatttgatagtccgctgtttgtttctgctaaaccaacactggggtttatcttttatttacagagcacagagcaacaagtacaaggtgtcttgaacctgattgatcttgcgggtagtgagcgtttgtcaaagagcggatcaactggcgatagactgaaagaaactcaagtaatgtct

SEQ ID NO: 144536 - DNA, 1365 bp, Arabidopsis thaliana landsberg; identical to SEQ ID NO: 30688

SEQ ID NO: 144537 - DNA, 477 bp, Arabidopsis thaliana landsberg
agttcattgtcatcctcagaagaaaatagagtagatagaatccgtaggctggagcaaaagcttctcggtaaagaaaaactcttgggtggaggagttggctttgataaaccagaagcaaaacccgctagagttgaaggaaagaagaaggagaaaaagaagaagtcaaagattcttgtgaaaggccaagccaaaaaggggacaaagatagaaatccctggatcatcaaagaggtaaagagcatacagcaatttttgctaatcaatgtagaatctctactcaaattgattgatttcgacaattatgattcacaggttaaaggtgaaggagaaggctctattaactggcgtcttagtcaagtatgcggctaaagttgcttcaacctcaaacaatgatgaatgatatcattaacaagtgatcaaattttgatataatctttcatcaactgctagtagtgagccatcttcgatttgtttttat

SEQ ID NO: 144538 - DNA, 2303 bp, Arabidopsis thaliana landsberg
actctggctacggatggttcctgccggctccttcacaatgtgcgttgggtatctatggcgagatctgtcctcttaccctacctgcggtggtctctactactggagtgctatgctcgctggccctcgttgggctcctcttgcctcttggatgactggctggtactcccttctctcacctttttcttaatttggaattggaagcaagagagcgtctctctctgactcattttcacaaatcttttttcaggttcaacatcgttggtcaggtgcaacattcattcaagcagacttgttttcattagatatatctctcattggggctaaaagtaaggttgtggtgtgtttgcagtgggcagtgacggccagcgttgacttctctctggcacagttgattcaggtgatcgtccttctctccaccggcggtagaaacggcggcggttataaaggatcagactttgttgtgattggtatccatggtgggatcctcttcatccacgctcttctcaacagcctccccatctccgtcttgtctttcattggacagcttgctgctctttggaatctcctcggtacccaatctctcttttgtctctgtgtttcatgtcatgtctcaacaacacacacaagtaaccatctcttatattcaggggttttggtgctcatgattctgattcctttggtttctacggaaagagcaaccactaagtttgtctttaccaatttcaacactgataatggccttggcatcaccagctacgcttacatattcgttttgggactccttatgagccagtacaccattacagggtatgatgcctctgcccacatggtgagtgtaatggattctgtttttaatgattgattagcttttcttgaggattgaacaaaaagtaaatttgcagacagaagagacagtcgacgcagacaagaacgggcccagaggaataatcagtgcaattggtatatcaattctgtttggatggggttatatattgggcataagctatgccgtcacagacataccttctcttctgagtgagaccaacaactctggtgggtatgccattgctgagatcttctacttagctttcaagaataggtttgggagcggtactggtggaatcgtgtgcttaggcgttgttgcggttgctgtgtttttctgtggcatgagctctgtcaccagcaattccaggtatatatatacattcatgtttggttaaaacatattctgtctgcatttaggacttgatcatatgtgtgtttggttaataaggatggcgtatgcgttttcgagagatggagcgatgccaatgtcgccgttatggcacaaagtgaacagcagagaggtccccattaatgcggtttggctctctgctctcatatcattttgtatggccctcaccgtaagtccccttctctctttctgtgtatctctcttttgtgtgttgggattgctgattgatgagatgaaactggcagtcactggggagcatagtggcgttccaagcaatggtgtcgatcgcaacgattggactgtacatagcatacgcaatcccgattatattgagagtgacgcttgcgcgcaacaccttcgtacctggaccattcagcctgggaaaatacggaatggtagtcgggtgggtggcagtcctgtgggttgtaaccatatcagtcctcttctccttacccgtggcatatcccataacagcagagacactcaactacactccggtggcagttgctggtttggtggccataaccctctcatattggcttttcagtgcccgccactggtttacgggtcccatctccaacattcttagctgaaacaacgtttcaggggttgatttatagtaaagccattgttagctagctgatatttacccttttatacattcaacaagcaacaacacatctgtcacatttttatttcatcgccaaaactttaaactttaaagcgaatggaataataatcaacacaaagtgttggcatgggcctcgacgaagcccatttaaggaaactacgtgacgagttaaaaaaagaaaagaaacgctagaaggaggggtcgaacctccgaccttgtggttaacagccacacgctctaaccaattgagctactccagctttttgataagtgattcgttatttatataaatataccgttcagaaaagaataaacatccgtttatgttctgtgcttacttttttatgctgtgtctttttcttctgtcagaagattaagcgtcagatagacatcgtggagttagcaacgagacgatcaaaattcttcaatccggagtag

SEQ ID NO: 144539 - DNA, 835 bp, Arabidopsis thaliana landsberg
gaggctagttgaagggtatcttcttagagctacccaaagaagtgacatatttgcccacattctcatttggcatttgcaagtaagtttaacctactagatttgcaagatcttaattttgctttgaaacctttatatagattgttgatgttcacttctatcttttataatgccagggtgaggatgtgcaggaaactccgaaggatggttctatcgataaggtttgcccataattatcattttctgcttataatttattggtgttagctcctatgtagagtctacatcttactactcctaggttattatatgtggctagaaaagctttcattgccttagtttgaggaaaacagtatcctacagttgcaaaatatggcctcctgcagaatacatctgtgaattctttgtttatgttattcttcacatgtgatagaacgcagaaaatatccttgattcagcctgttgaccgctggttataagcacaaaattccgagatcttgaaaatgggttttatgactgcttattgttctgtatcatagcataattttgttcttggaaagtatagtttggacaaaagatgtcgtgagacagagagtaggtcgttaaactatagatagcggtagaaactttgttgtatatcttttgactgatctgcttaaaacatctgagctcatctctttgtttctgtaatatttcagaatgcggcattccaagaaattttgccacaggttcggcagcatatcattgatggtttcagccccaacgccttggacatgttcactagagagtttgccttctttgacaaggttacttatatatctggggtattattccctct

SEQ ID NO: 144540 - DNA, 556 bp, Arabidopsis thaliana landsberg
tttttttctttgtgtccttcttcttgttcttgctctagttcgtgtctcttctttaactctctgtcactattataaatatcaaactctgacattttcttctgttcaaattctcctcgaaactcccccaaagaaacaaaatctttttctgagatctaagaagatgaaaacaagacgtgggaaacgtcctgaggtacacaagattaagattctctctcttttttattcttgtttctttaattctctgattacaaagattctgatgttttctcgtctttgatgtaaaacagaggttttggccatcaattgtgatgaataaatggttaaacagaaaacctaaagtttacgattttagcgaagacgaaattgatacagaacctgagagcgaagacgatggtaagtattgaaatttaggtcaaatttggtctataattccgtgttttttaatcttaattgttttgttgggtcccttttacagtatgttcggtcaaagacgtcccaaatgttcactgaaaaactgatgaagacagccataatggtcgtcgaggtagcgaagctg

SEQ ID NO: 144541 - DNA, 416 bp, Arabidopsis thaliana landsberg
atgagacgggataaggaactaaatctgagggcagaatctctagaggcagccaaccataagactaccactgttggttctagaattgaagtgctggaaaagaagctgcagagttgtataattgaaaagaatggattagagcttgaaacggaagaagctattcaagattctggtgatgttcaatccattttagtactcatttctttttcaacgctttctatgtgctcttaaaatatatcttccatgttccagaacggcaagatattaaaagcgagtttattgcaatggcatcaaccttatctaaagagatggaaatgatggaagcacagttgaaacggtggaaggacactgcacaagatgctctttacctgcgtgaacaagctcaatcgttgagagtttcgttaagtaacaaggtttga

SEQ ID NO: 144542 - DNA, 1836 bp, Arabidopsis thaliana landsberg
atggttatttttaaggaatggaaaaatcgagaaaaatggtatcgtgtcgcatcgaggacttattacgtatggcgagagagctcaaaccaaaagatcaccgcctcgactgattcatcttttctcctggtatgtattttggaaaattcgtctcttgctttttatttgatccagatcagaaaacgttgtgcagattgattctgggtttatcagtttcttaccaccatagtactctccatgttcttctcaattggaaaattcctttcctttttgtgtggcaatttacacatatctgatatcctcttcgtgttgctcccaattttgcaaatcttggcaggcttttcttggtctaagtgaatttggagttatgcttctgtcagcacttttaacttcagtgggaatcaatcttggcctctgttttctcttcttcactttgtattcaatattgagaaagcagcctagtaatgtcactgtatacggtccacgtcttgttaaaaaagatggcaagtctcagcagtcaaatgagttcaacctcgagaggcttttgcctactgctggttgggtcaaaagagcattggaacctaccaatgatgaaatcctctccaatcttggcttagatgctttggtcttcattcgtgtctttgtcttcaggttgattgattcattgagcatctgcttcaagtttgactttttttttgtgaaacttcaatgcttttttgtttggcagcataagagtgtttagctttgcatctgtggttgggatcttcatacttcttccagtgaattatatgggaacagagtttgaagagtttttcgacctcccaaagaagtctatggataacttcagtatctctaatgttaacgatggatcaaataagtaaagaactcgaagctatgcttaaacagtatcccgatttctacttgtccgtaaccgatctcttatgcttgtatgtgttttgcttcaggctgtggatccacttttgcgcaatatacatcttcacggcggttgtttgttctctactttactatgtaagacgccttttgtttagtccatccattctactttatatcgcctatatgggaacataaaataatgtttggactatctttgcaggagcacaagtacattttaacaaagcggattgctcatctttattcatccaagcctcagccacaagaatttacagttctggtcagtggcgtccctcttgtatccgggaacagtattagtgagacagtagaaaactttttcagggaatatcattcttcctcgtatctttctcatatagttgttcatcggacagacaagttgaaagttctcatggtaagcttctacctactaaggattctataaggccttaccttttgatatttctggatttcatatatctgttaatatttgcagaatgatgctgaaaagctgtacaagaagcttacacgagtaaaatccggaagcatatctcgccaaaagtctagcggggtgggtttctagggatgtttgggaataatgttgatgaggttgaccattaccaaaagaagctggattagttagaagatgacatgagattgaaacagtctttattaacaggagaggtgacaatttgtctttttgtgactacttgcattcttacaacatattcattcctttttctttgcgcaaacccttataagaagttccagctgcttttgacccctttaggacaagacatggggctacgatcgcaacaaacattcagcaaagaatagatccaacacactggctaactgatgcaaccccggagcccgaacatgttcattggccatttttcactgcatagattgtgagaagatggatctcca

SEQ ID NO: 144543 - DNA, 2097 bp, Arabidopsis thaliana landsberg
tctttctctcactaaaaccctcgtttctttcactcgcggtcgcttttcccgtcatcggaatcttcaaattcgactctcgcttcactacgatccatgtccggtgtcgtacgatcttctcccggttcttctcagccgccaccgccgccgccgcaccatccaccgtcatctccggttccggttacatctacgccggttataccacctatacgtcgtcacttagctttcgcctcaacaaaacctccgtttcatccttccgatgattaccatcgatttaacccttcttcgctcagtaataataacgacaggagcttcgttcatggttgtggtgttgtagatcgggaggaagatgctgtcgttgttagatctcctgtgagttttgggtgcttttgattcttcgatttagagattttccccagtgagattggtttagaaattcgaggatgttttggggatttcgattgctacttgttgcttctaagtctgattcaaaagcttcgcagcgttagattatcgtcgattcgtgtcaatttttgtcgtttgtttagcttcgcgatggtacattttgctcataacactgcgtttcaattacacccaattgacgcaaatcagacatcaatttctccaattgccatgccaaattggctctgattgttgcgtgaggtgttgaatgttcacatagtgttgagcattagcttattgatatcaaagtattggtgtatgaagcttgacattgtttgttaatgtataatgtttcaagtagatcccaatgttgtgaaagtttatgaggaatgatatagataatttgtgtgtggatgctttaaaaccttttggatgatatttctttgaccaacttcttttaagctaataacaacttgtttatatgcagtcacgaaagagaaaggcgacaatggatatggttgttgctccatctaataatggattcacgagttctggtttcactagcatacctagcagtccctgtcaaactcctagaaaagggggcagagtcaacatcaagtcaaaggccaaaggcaacaagtcaactcctcaaacacccatctcgacaaacgctggtaagaagaattgtattcttgactctctaccccttttggcctttctatatagttagatccttttatgaaatatctttcatgtctagagtaacaagtaagtccaagagctgattactttcctggtcaacttgcaggttctcctatcacacttactccatcaggaagttgtcgttatgacagttctttaggtaattaacaacttttcacatatatatttaatattcgatacatgttatagtgtatatgaagatgctgacataaaagctgttcaggtctccttacaaaaaagttcgtcaatctaattaaacaagccaaagatggaatgctggacctaaacaaagctgcagaaacattggaggtgcagaaacgacgtatatatgatattacaaacgttttggaggggatagatctcattgaaaagcctttcaagaatcgaatactttggaagtgaggatttttatgatatagtatgcttatgtattttgtactgaaagcatatcctgcttcattgggatattactgaaagcatttagctacatgtaaactcacttgatgatcaataaacttgattaggggagttgatgcgtgtcctggcgatgaagatgctgacgtatctgtattacaggtgtagtgaaacagcatacactcaaaagtcattgtgcatgtaaatcttaaaatatcatgtagttctcgcctttaagaaaatccaaaatccaaaccctagagattatcaaactatcataaacggcaaccttaattccatttcaaaccataattcgatgcaaaaggggaaaaaatcaaaactttaatttcatttcaatccaacccgaaacttacctctggagcttaatggatgtcagagaacttggatccggcggttgatgaggaagattcggtggtcagcgtcagcggaggttcgtcggcaatgttcgtcggcattgttcttcagcagagaaggagagaagaaaaagagaaaagaaggagaagcaagaaagaaataagaaagagagagaaagaaatataa

SEQ ID NO: 144544 - DNA, 6459 bp, Arabidopsis thaliana landsberg
atgggattttcaactcaaatgattgctagagcaattgaagaaaccgctggtgagtttatctatgatagtgttctttgagatatgcatttcagaattctgtcaatcaatcaaattctgttaataatttgcaggagcaaatatggaacttatgatgattcttgaaactctctttaactattcggtgagtttcgtatttgctcaatctgtcatgtgacgtatggttttctattttttcgcttgtggttaaaatctcttgacactccattctctgtttctttgtataggcaagcactgaagctagttcttcgaaatcgaaagttatcaatcattttattgctatggggtttcctgaggaacatgtgataaaagctatgcaagaacacggtaattctctttgttctttttttctaggacttggaaactttaatgaggttttatgatctttccttgataatgtacaggagatgaagatgtgggagagatcacgaatgcacttctaacttatgcggtaagtaaaccctaaaattaaattgcatattgcataagaatataagatgtcgtttaatagaatgttgttactgtttttctaggaggttgacaaattacgtgaatcagaggacatgaacatcaacattaatgatgatgatgatgataatctctattccttgtcatcagatgatgaagaggtatataaattgttttttccaagtttcagacctttgctatgctaacattcctgcagattctcttacttccaatgcattgccatgtcttacattttaagaagtaggttgtgtacgttgtattcttatctgttttggaaatgacaggatgaactaaacaactcctccaatgaagatagaatcttgcaagcgttgatcaaaatgggctatttgagggaagatgctgctatagctatagagagatgtggtaaaacgtttacatgaagataatatatctcttatctttctgtttaaatctgcaagaagtttacatgcattcctctcgcatagatccaattagctagcgtccttgcaaagtattcatgtttcttctcaaacgtttcaggagaagatgcaagtatggaagaggtggtagacttcatttgtgcagctcagatggcacggcagttcgatgagatttatgcagaacctgacaagaaagaggtaataactctaagtctcttgtagaacctaagacacccatcaaatttattattgaattatccttctgcaattcttgtcagtttgatgagacggctccggttgtctactttaaaattgtgttattgattaacttcgtcatatacttggattaagtagggctgtgatcaatcgatgagaattagttttttgctcatatgtttgaaggatttagtctatccagacctctagggttttcctgtaacctgtatgttgttaactttattcagaacttcaatttttgatttcgtaatccattccattgttctgtgccagatgcattatttggattgatgtaggcttgtagctattaactatagttttcaaattagaaaagctctttggattgtgaatttgtgatctttggcatctttttaccttggtcagtctgattgatgatggatgatatacatgtctctggatttcattgggcttacctattattgaccgcttctgtttttgattggactagagatgctttggtttaagatgggactttgatttcttgtcgtagttctactcggtgtttcactaacttactgatgttactaatactgttctgtttctaatcatctttgcatttatacaattcttcctcaagcctctttaaatgttttttgcctgtgttgattgggattcagcctttctgtcagactattgtatctatcatgtcacttaacatgtttttacttcagtatgctgctcttgttcttggtagacttcatttgtgttttgttactgtgtgtggctaaatagaagaacttaccaaaaacgcactgaaccttgactttttgactggtgcagcttatgaataacaacaaaaaaaggcgaacatacactgagacaccaagaaagccgaacacggaccagctcatctctctaccaaaagagatgattgggtttggtgtccctaatcatcccggacttatgatgcacagaccagtcccaattccggatattgctcgtggcccgcccttcttttactatgagaacgttgctatgacaccaaaaggtgtttgggccaagatctccagccacttgtacgacatcgttcctgaattcgtggattcaaagcatttttgtgccgctgcaagaaagagggggtatatccataatctgccaatccagaataggtttcagattcaacctccacaacacaataccatccaagaagcctttccattgaccaagcgatggtggcctagttgggatgggagaacgaagttgaattgtctgttgacttgtattgccagttctagactcacagaaaaaatacgcgaagctcttgagagatatgatggagagacacctctagatgttcaaaaatgggttatgtatgaatgcaaaaagtggaatttggtttgggtaggtaaaaacaagcttgccccgctggacgcagatgagatggaaaagcttttaggcttcccgagagatcatactcgaggaggaggtatcagcacaactgatcgctacaagtctttagggaactcgtttcaggtatgttacttatatcagttcagcttttggtttgaaaggtgtttggggttctaaactcagttgtgtttttatatgcaaggttgatactgttgcttatcacttgtctgtgcttaagcctctgttcccaaatggaatcaacgtcctgtcactcttcacgggcattggtggtggagaagttgcactccatcgactccaaattaagatgaatgttgttgtgtctgtggagatttcagatgcgaacagaaacatattgagaagcttttgggagcagacgaatcaaaagggtatcctgagagagtttaaagatgttcaaaagctagacgacaatacgattgagcggcttatggacgagtacggaggattcgacttagtcataggaggaagtccgtgtaacaatcttgccggaggcaatcgccatcatcgggtcggtcttggaggagagcactcgtcactcttcttcgactattgtaggattctcgaggctgttcgtcgcaaagcacgacatatgaggagatgaaggatttgaagacccaagttgttctgttttgtaaggcactttttcacatgaatcgaacttgtattttgcagattcttgttgttcctttctgctagctagatatactaatcctgcaagaatattttcagattttagtttggcaagtcgtgtaactaagtttcttcctctgcaagaatattttcgataagtttctctccagtagaagcaaactattaaaccaaatcgaaccatattaaaccgaaaccatcacatcattttttgttttgtaatttagatcgaaccatactaaacccgaaattatttcgactttttgttcttgggttcgagacgacgacaagagacaagctctgtctgtggtcgggaaatcgaaaccagagccttggactgtgtctctgctctgtggagtatccattttcgatttcttgaaggtgaatccagcgaatccttaatatcaagctccgagactgtgcaataaacaaaacagtagctagcagcagcagcaacacatgaactcgtgcaaatcccttatccgtgcctcaatctcttcctttccatttgttcctcttccaaaccctaatttctctatcaccttcatctccgttcgcgccttttctcctctctctgtccttcatccaaattcatcatgtactctctctcactctttcgtctgaagtttcaagcttttattttgaatttcgttatctggattcgtttgattttgatgttgatgagatttcgcgcctaacaggtattggaacagctcgacgcacatttcatggagctgtggctctttcaccggagagcttaacggaagagtctcccaaggatactgtgaaaggattgttaacaaccaatcgtggtgaggcctcaagcttgatgaagatggagcggaggtgtagcttaagcaatggtgagggtgattgtagaggatcttggtttccttacgaggataggttcaggtgtggtgaggtgcatcttagtagccgtgaggtgttggaggcggtgagtcctcatatgatggaagagaggacagataggttcaggcgtgtggtggagaatcgaagctactcggtgtgtcttgtggttgaaggtctctctgattttggaaacatctctgctgctttccgctcagctgatgcgttggggattcaatctgtacatgttgtttcctgtgacagctccaaaaggtgcccctttgaggttggcattttctgtttctttgttgattcataggatttgaggtgaaactagggattcttgcattttgaatttagacaatgtgcggtgacctgagatcataagctggtgattgaagtctgtagaacttttgattgcatcataagctaccaagatagatcatgacttggtagttatgtttcttggatcacaggatggggataagtgaggactcttaaatttccgtaaaacattgaatctacgctgattgtgagtcactactattacattttccttctgagtccaagattgatcataagttggctttcctttttcttagttcatacgagatagaatggagaattgttacggttttttgaactatgcagtgatacaagagtcataggtaatatctgaaaagattgatccattagttgttgactgaaatgtaaaaaaggtttgattgcattgtgtgaattcatttaccgtgctatgtgtgtgttaatgtatattatatatgtgtaggtataacggaaatcgccatgtgagtatgggagctgagaaatggctggacattgagttttgggacacacctaaagaatgtttcaaagttttgaagtctcgcggttacagaatagctacaactcatttgagaatggacacggtaaacctctaaagatttgtttgtatatatttgtcatcaccattatttatgaggcaaaatgaatgacattctcttggtggtaatatcttataggtttccatttacgatatggactggtcatgcccaacagcaatagttgttggaaacgagggcaggtaatgaatatcatctcttagtccaaacttgagggttcataatttcttaatggattgattggggaatatgcaggggaataagtgacgaagcgttggagttatcagatctgcgttgcagtattccgatgaatggaatggttgattcgtttaatgtctcagtggctgcagggattctgatgcaccacgcagtctctgatagaaccactcgtctggtaaacctattgacacaggtagacaatcatttacgttagtttccagttcagtttatgctttaattacattttatgggtttgaaacagggaagccatggagatctgtcggaagcagagaaagagatattgatggctgagttctcacttcgtcacagtagaagctcaatttgcatggcttacgagttcgctaaaggtaaacaacaacactctacctcctcctaattttgaaaccgttgtcttattctctcgctgttttgcgtgttataggcttcaaatgacgcctataaaaactctttcgaactcttcttttggtacgacgcttgcttcatgtacaactcttaaattctataaaagacatccttctgtcgaacgtattgccttttcaatcgagtgagtggtgttgatttcaccattcttttgcatcgacctcacgccatcaaagattaagttagaaatttcgcctttcaagaattggtcactcataactcttatgccaactattaatccatgaacaaacgtcgaaatgcatagaaactcgtgaacacatcgaacttatgatagaaacagttctagacatgatatttataagtttttttcccgtggcatcaaataagtggaaagcaagccctaaaatagatagataaatcctaatagaaaagaaagcctagcaaaagtaaaaaaaaaaagtcctgaataattgttattattttgttacttttggaacacataattaatcaattaacatatcactgtttgtagtctgtatcctttccttgttgctgctatcttctccacttgtccgtttcttagactgatgcgacttcacaaactcatcgattttcgccttcaactcgatgtccggtatcaacatatccgatgtcaaatgtgctcggttaaatggatcatgctgcagcaaaagtagaggatcatatacaaagccaaaatcttcagagaaagagagatgtgactgatcagtgatcatcattgtgttagataagcttacattgtcgctgagaagatgacgttgagtgatggg

SEQ ID NO: 144545 - DNA, 872 bp, Arabidopsis thaliana landsberg
aaaacccccgtgtctgagtcaattagacaagagctcttggagctttatggagtctcctatagattgcagcgagaaattgaattgcttgaaagttttgatcgtgttcgatgtatacactgtcaggtattttgtgtgagcatggtaaataccatttccacttcctcttcattgaatatttggcttactgatacgtttgcatattaataatgcagactgtcatagcaagaagaaaagacatgttggttatgtctaatgaaggtcctcttggtgcctacgtaaacccacatggctatgtccacgagataatgaccttttacaaagcaaatgacatagcgcttagaggtagacctgttaaaaaggacagctggtttcctgggtaagagttttcaattaatatttgtccttaaccagttttacatttgaaacagttgacctatttccttcactgtacttatcactcatttgatacctcagtagttaagaaatatagctcagtagctattatagatcccaagggtttccaagttgtatgatttgaaaactagctttggttcaaaacaagctaattgtttagagcattagcatataaagcagctggcgcagtttgttgtaagaaaatcgtttagaccaagtgttcatagacatatgctaacttgtttagagcattggttcatgtactttattaagcagacaaatctgtgatctttcaagtctgattgatgtcttaaatctgcaggtatgcttggacaattgcaaactgtgcgacgtgcgaaacccagcttggttggcatttcacagcgacaaacaagaagttgaagccatcgtctttttgggcagttcgtggctcacaggttgcagatgacatgcgctga

SEQ ID NO: 144546 - DNA, 211 bp, Arabidopsis thaliana landsberg
atctgacaaaatccctcctggttattcagagaagatgcaaagctcagccaaaaagcgggaaatgagcggacacaatatatttgcagacgggaagtcggaatatcgggattactatggtggtgcgaggagacctcctggtggcgagagcagcatttcattggtctaaaataagtcttaaaccacagacactctttttttttttttttttttt

SEQ ID NO: 144547 - DNA, 2048 bp, Arabidopsis thaliana landsberg
caaactcctgcatctcaaaatattgttggacataataccccttggatgtcgcctctccctttccgtaacgcttggcttgcttctcagcaaaccagtggatttgatgttggttcccgtttccccgtctatccaatcactgaccctgtaaaattgactcccatgaaagaatcatccatgactctttctggcgcaaaacatgttcagagtggaacttctagcaatgtttccaaagtgacaccaacacttgagcctactagtacagttgtagcacctgctcaacattctacaagggtaaaatcaaggaaacggaagaagatgccagtctctgtggagtctggtccaaacattttgaattcgttaaagcagacagaattagctgcctcacctcttgtgccttttacacctactccggctaatctgggttataatgctggcaccctgcccagtgttgtttctatgactgcagtccctatggacctggtatctacgttccccgggaagaaaataaaatcatctttcccatctccaatttttggtggtaaccttgtacctgaagtaaagcagagatctgtcttgtcagaggatactattgaaaaacttaaggaggctaagatgcatgcagaggatgcatctgctcttgctactgcagctgttagtcatagcgaatatgtatggaagcagatagagcaacaaagtcatgctggcctccagccagaaactcaagacagattagcttcggctgctgttgccatagctgctgcagctgcggtggcaaaagctgcagctgctgccgccaatgttgcagctaatgctgcattgcaggccaagttaatggctgaagaagcatcccttccaaatgcttctgatcagggactcccaaagtcatatgatagcatattaccaggtcagggtacccctgcttctatcttgaagggtgaaggtgcagtggtgaactccagttcggttcttattgctgcgagagaggcatctaagaagagggttgaagctgctacagcggccaccaagcgtgctgaaaatatggactccattgtaaaagcagcagaattggcatcagaggctgcttctcaagctggaatacttgtttcaatgggtcatcctccgttgctcaataagctggtggaggcgggtccaagtaattactggaggcaggctcaagaatctcagaaagtacagccctgtagaacggttgtcttagaaaaagaaactgtgtctactagtgagggaacttttgctggtcccaaaattgtgcagactgagtttggtggctctgtgaatacgacagatggtgtgtccggtccagttcctgcctctggaaagttaaagggacaggagggtgataaatatgcagacttggctaaaaacaatgatgtggtttttgaaccagaagttgggacaaaattttcaattgacgcccaacagactatcaaagcatcaaagaatgaggacattaaggagggttctaatgtaaaggtttgtgctacatttacactgtctataactaactgctcgtggttgattgtcatttttttttaacggagataaatttttttgaaggttttcaaagaagaacctggattaagaaccgcatggtactctgccaatgtattgagcttagaggatgataaagcttacgtgttgttcagtgacctatctgtagaacaaggtttttgtatttatcatcaatggttttctttaaatcttatttatcatcaatagatcttttactgctcaaattcttccaagtataagtaaataggttatgcaatcacccattttccattattatattatatgcatgtaaaattatttaaaaggatgcagaactgattgccgaagctcctacgaagaggctccattgctttattaattgattggttgatcgtttgatattatcttttatcaggaacagacaagcttaaggagtgggtagccctcaaaggggaaggtcatcacgcccctaaaataagacctgctcgttatgttaatgccttgccatatgaaggaaccaggaagagacgtagaggtgc

SEQ ID NO: 144548 - DNA, 4196 bp, Arabidopsis thaliana landsberg
  unsure (1)..(4196): unsure at all n locations
gggtatgagatagttaaacaacataatggtcgattaaagcattgtgttttcaccgtgaaatcgagtgtgcctgtgtattcggaaggcgtaaacgatgtgattaagttgcattcttttgggaatttagttaaaagacaggtttttctggatacctctaagagattctatttccaaggtagatggtctgaatcgtcagggaggagagtggagacttatgctggagtagatgtagcaagtgctgttgatgtaatcaacgatcttggattcgatactttgaccttcttgatggttactgttattattgtccctgcattcagaattctcaaagctagtccggtacaacaaaaagctacaagaagttgctttgtattctcggttataactacttggcgataacatttgtgtttttggtggtttcccagatacttggtttcttctttgctggtgttgtactcaaccaatttggtttgattagaaatctcacagatgttaaagttctttcagaatgggggattcttttcctggtgagcattttgcataattatgttcataggctttacgtgttgaatgagtagtaatgactgggcttatcctgattatctttggcagctctttgagatgggtctcgagctttcacttgctcgtctgaaagctcttgcaaaatttgcttttggcatgggactaactcaggtttggttctaaaagatgtttcttggtttgctttaaactccttacattccttcttatattttcacttctgtcagataagcatctcgagagtcatcaatgatctttacgacccgatttcgttaggaaactttatagaccatatcataattgccagatcattgtccgcaaagatgtcatacatcgtttgtttaacgttaccttactttgtactgtttttcattgacccttttcattgtttcaaaggttttgttatgcacggctgcattcactgcttttgaactcccaccaaatggagccatcggaacaaaaattcttgaattcctctttcattcaaggcctgacttggtaaattttttcacttggggtattatcatgattctcttatcgttttagtaccttttgtatcacgtatttcaaatttagcagacgcctcttttcccagtgtgatcatggtcttataactgtcaatctctgatgctttttgtaagggcttttttagagcttttaaatccttaatanntgatctatttacttntnnctgtcanaaaaacctttcctttaaggggggttttcccaaacattagaagcattgacgaggccgttgtcattggcgctgctctatcattgtcatcttcagcttttgttctacaggtattagcacagttgcaataacttttagtcatctatatctagaatgataatgaggagaggcaaacttgatcaagaatttagtatattcttattgacaatttcgaagtgtatagcttcttgcagagaaaggtgagctccctacaagatttggctcagcaaccttgggaattcttcttctacaggttctgcttatcctgtataatccctatcttctattctatgaatttttatcccatactccataagacatgaatatatgagtttgggaaaagaatctcctgctttgaaaattcatccaagatatgcaaaaatcttggcaaactcctgaagtagacaaacttttttcgcttactctccttgcattgcttgcaggatatagctgttgtgccattactagtcatccttccagtgttggaaagccaggtaacttggttatcggcttagcaccttcttgggcttttgtggactgtctgttataagaagctataaaagctgcattgaacttttattagtatcagttaaacctttgtttatatctgaatctctgtgtttttgaaaggatattggtggggaaagcatatggccaatgcttgcaaaagaaagtgcaaaggctcttggtgggttgggcatcctctctcttggaggaaagttctttctccgtagaatttttgaggtaacttatttcgtgtccttatagtttgacaaaaccctttcctttgaatcccccctttttagagagtgaatacaggacactgttttatttggtgcagtgcttaaatactaagcccaaaacaatattcaggttgttgcagaaacaagaagctcagaagcttttgtggccctttgccttctcacagttgctgggacttcacttgtgactcaatggcttggtttcagcgatacggttagaattaatacccctacaaaaataaaatttccatctattatccttactttaatgtcctaactcaattttactctgaagcttggagcttttctcgctggagcacttctagcagaaacaaatttccgaacacaaattgaagctgatattaggccatttagaggtttacttctcggtttgttctttgtaaccacaggaacttccattgacatggaggtaaactgttatactgcattgcataagaactcagttgtttccgctgaaaaatatgatacatttcatgctcatgctcttgtggttaaaatctcttgcaggttttgtttcgagaatggcctaatgtcctctcactcttgggtggtctgattgtgatcaaaacactaattataaccgcaatcggtccccgagttggcctcacaatacaagaaagcgtaagagttggctttcttctttcccagggaggagaatttgcatttgttgtgttctctctagccaacaggtttttctaactgccaatattattgctcaaacatctcctcattatttcattagtttcgacattttcctcactaattaggtggtcatgattgttacaatcatttgtgcaggctaggagtgcttccaaatgagctgaacaagctgctcattatcgtagttgttttgtctatggcattaacaccttatcttaaccaacttggaagaaaagctgccgattttcttgatgagagacttgatcccggagaggtaacttttaaattttctacttttgcatttatatgaaaaataaaatttgcattcatcttgaatctgttgacaattgtgcagaaaataggtgaagatgtgaacttcgatgttagtgaatcaattgtcatcattggatttggacaaatgggtcaggtaaaagtcatcatttgctttcctggaaaagttgtggtaagtggtttctcatcgagtcgatatgattttgcaggttctggccaattttttgtcaacgccattggtctcagatagtgatcttgtgggatggccttatattggttttgatctgaatcctgctgtagtgaaggtctgtaacagataactttgtttgttcctgacctgatcaaatttttggcattctaaactagttttttctttatggtggtggtttggtaggaatcaaggaaactcggtttcccgatattgtatggagacggatctcgaccatcggttttgcaatctgcaggggtttcatctcctaaagctatcatgataatgtataaaggcaagaagagaactactgaggctgttcaaagactccgtcttgccttccccggggttatttctctcttccttcttccttttgtcaataaaatcgtttgagacatcaagtttaagtgacaacaactgttcctttaacatattaccagagtccgatttacgcaagagctcaagatttaccgcatctccttgaactaaagaaagcaggagccacggatgcaattctcgaaaatgcggaggtaaacttcgaaaacggttctctttcttgatcacaccgaaattattatctttctgaacgagttttgtttgtttcggtttacagacaagtttacagctcggttcgaagctgttaacaggatttggagtaatgtctgacgacgtaagctttctaagtaaagttttcagagattcaatggagatacaagctcaagaagaaatcacannnnnnnnnnnnnnnnnnnnnnnnnnnnnaatgcaaatgaaagcatctgatataaacgtagtgtctgctgcaacacaaaaacaagtccagctcatgaagccaatgcaaatgaaagcttctgattcaaactcagattctgcagcagagattcttcaagaaacagctggtttgagtcagcctcctgagattgatgattcttctgtgaatatagataatggatttgttggtaaagctgataaagctcaagattaa

SEQ ID NO: 144549 - DNA, 850 bp, Arabidopsis thaliana landsberg
tcgggaaacaaagttctttcgatgaagaaatccaggaaatgggaagatctccatcagctgggactaattggatacctgagctttctcctattgccaatgtggttgtccgcaggtgttcaaagtaagtaagcattttgcagtatgagttttacagggcatataaggggttgtcttgtatgaaaaagtgtgtattgtgatgcgctatagtaagaggtttccaaagcaagtagctctaactagaaaggggtttacagaaagtttgatttttaattaaagaaaactacaatgagggtgtgtttagacatacttagactaaatgaatttattgttctgtctttatatttatttggctatgctattgatgcagaatactcggtgtttctgcaaacgagctacgagatagtttcaaacaagaggcatttgaatctctcaagcagccttctctatttccaaggaactttctagagtactgttgtttcagagcactttcactgtctgttggagtaacaggtcatctagccgataaaaagtttcggcgcttaacatttgacatgatggttgtctgggaagtcccagctgttgctagccaggctttactcagtgtaaggctcctttttctcatttcgtctgcaaaccttataagaaccttttcttgatcatctttttttgctttgaaataggtagaagaagatgcaacagtgagtttagaagccttctcacggatcgcaccagcagttccaataatagctgatgtgattatatgtgataatctgtttcaaatgcttacttcatcaacgggtggtcggcttcagttctctgtttatgacaagtatttacatggcctggagag

SEQ ID NO: 144550 - DNA, 720 bp, Arabidopsis thaliana landsberg
ctcatttctggggtttcacatttcatcttcaccagaatccatcacactctctgaaatctgaaaatgattagcacagtacttcgccgatctatccttggtacgtcaaggcgtactctcgccgcttcggtgacctccactaacgcagctctatttcataaccttgctccagccgccgccacagtctccgatctagcaaatggagctactaatgtcaagtctctcccttcgaattcgagcccgtttggtgttaaagtgagagactttcatgttaaatctgtaccgtcggagtttagatcgtcgattgtttcatctgcgggattcgcggctcaagagtatgctccttcttatgagaacgatggagggattggagattcggagagtgttggtagcagcggtggtggtgatgggcttgcgatagctgatcttggtatatctccggagattgttaaagctttgaagggtaggggtattgagaaactctttcctattcaggtatatatgatcttcttctctgttccatttggttatagagatcaattaaaagtttagattttttgaactgagtttttgatgtttgtgtttggttgaatagaaagctgtgttggagccagcgatggagggtcgtgatatgattggccgtgcaaggactggaacaggaaagacacttgcttttgggattcctattattgacaaaatcatcaaattcaacgctaaacatgg

SEQ ID NO: 144551 - DNA, 874 bp, Arabidopsis thaliana landsberg
agaaatcagcttcaagcttaagagagcttcgaaagcgaaagcgacgatttcttctccatcgtgagagcaaatctccagagccgttttctcttcttcttcttcctcctcgcgccgtctctgaaactccatcatcgtatcaatcaaattgcttcctcctccaaagtaagcttcttttcgattctcaaccaatcatagtagtagtgtgcttctctcttatcctctgttttctaagttttgtatcaatctccacatagcttttctcgttctattatcgtagaaactcttaaactatagattagatcactcacgattcaatcataatcaatctggatctgaatctaattacgcatcgtgattcaaaatttgtgtttttttgtgtgtgtgtgacagttgaaaaacaatggaattggattcggagaacaaattgttgaagacgggtttggttatagtggcgacacttgttatagccaaactcatcttctctttcttcacttctgattctaagaagaagcgtcttcctcctactcttaaagcttggcctccattggttggaagtcttatcaaattcttgaaaggacctattattatgcttagagaggaataccctaagcttggaagtgtgtttactgttaatcttgttcacaaaaagattacttttcttattggtcctgaagtctctgctcattttttcaaagcttctgaatctgatcttagtcagcaggaagtgtatcagttcaatgtccctacttttggtcctggagttgttttcgatgttgattattctgttcgtcaggagcagtttcggttcttcactgaggcacttagagttaacaagttgaagggttatgtggatatgatggttactgaagctgag

SEQ ID NO: 144552 - DNA, 1503 bp, Arabidopsis thaliana landsberg
acatacacgcaattgagaacagggaaaaagttatctacaaaggatcaagttcttgagtacattaaaatggagaaaatacgagaaaaacgagaagcaggaatcaagaggaataaagcaagtgtatgatcatgttcttgactagacttttgcaagttctttgttctgttatatataatgtttctttctcttgttgcagttaaaagccttacaagataaagagaccgcaagtgaaaggccgtcgtggcttccggatgaaaggaaagcagagttggagattggttatgttggtggaaacccttacaaggtataacagactagccatttgtgccttagtttgttattgagagtgagagatttgtttatggtttttatgtggtagatgaatgtgaacacatcaaatgattttaacaccaatccaaaggagacagtggtattagatgagaactctatggaatctgaagattcatcgggtgaagtatacgaaaccgggtgtaatgaaattgtaagatgcatgattttatttgaaagttttagtatcttgaaaagaggttgtagtatagctgatagatacaattttatggtttacaagacttatgcaattgaggaggatgaagaagatttttcagagagggaatatgtcgaaaatgtggagaatttctctaacataacctctactcctgtaagtgaatttgtttttacttttcttatgtttattcttgaacatgtattgctgtgagttttatgttttgtttatcgtagctacggtcacagccagaaagaatgcagaaattggagtctcgagcaaaaacacaatgtgtgtttgaaggtatgtggagaaaaggaatcaaagagtaattatacagccatatttgtttgttagtgatagacacacatagtttttgtctgtgcagatgaggatctgagtagtgacagtgacaacaaacttccagaagctgagacttcaaaagaaggaaatggtttgggagagggtcatgttgtatctaacctagtcgagtcttttgaaaagaaaacctcgcatggtgttatggttgagtgtgatgataaggcgagggagatccccggtttgactggatcattaactgttgaaatcaacctggactgtgaacctgcaagtgatagtttggtagagaagaattggaataaaagtgagagcgatgaaacaggaacaagaaacattgagatcattgacctagagagtgacgtgattcacataagtggctcatcaaaagctgttgaagtgactcaggaatcaggcgatacaagtaaagagcctctgaaagctcaggaagaacctgataacgactggagaagttcggtcttctttccagacagagaagccccttcacattctgtacttgtctttgaaagttctaatgctagaccatctgtagaagatcttagcaacaccattgagcttggtttaaccccgcaagagaagaacatcagtagctctaaaaagcggaagaagaatacggaaagatg

SEQ ID NO: 144553 - DNA, 388 bp, Arabidopsis thaliana landsberg
gtggtggacgacaatggtcagtcggtgttcaatgagcaagtgggacaaggccaaatcattgtgattccacaaggctttgcagtttcaaaaacggctggtgaaacgggtttcgagtggatatcattcaagacaaacgataacgcttacattaacacactgagcggccaaacatcgtacttgagagcagttccagtggatgtgatcaaagcgtcatatggagtgaacgaggaagaagccaagaggatcaagtttagtcagcaagagaccatgttgtctatgacaccaagctcttcttcttaagctctttaattgcttcctttaatgtttttttagattttccagtcactgaaataaataaagatgagactaataaccaacttttcacaaa

SEQ ID NO: 144554 - DNA, 1829 bp, Arabidopsis thaliana landsberg
atgattttgaaaataagcggccgaaacattctacacttcctccacacgcacaacaatagactcaaagcaaacgcaactcatatccaatcgcttttaaacgccaataatcgcgttacagtaacaactcgaaaaatggtaacactaatcgtggccaccaccgccgatccagcgtcgatcaaccctgcggcggcgattctcgccatgcccggttggaccgccggacctatcttaccgccggtaaagtttcaatcatcctccgccggtaaagtatcaacctttctctcgtctgattttgttcttgtcgaaattttcaggacataaagagttttagtaacaagcaaacgagagtgattcaacacgatagatctatagtaaaagaagacgatctcgatttacgttgggaagaagctaccggtgaagttgttgatgaagtcatcttcctcagccgtcacaccgccgtctcaaatcgtcctgctttaactgttcatccgattggtagtgcatcaaaatccaaacttttgattagggctttgttctttttacgattttctgaaagattcaaactttgtatttgggttttggttgttttatgttttcctgaaggatgttttggttgataagtgtaggagtgcttcatctaaaggatggagaatcaccgccgcaaggaggaaagcctggatgggcggcgttgccaagcactagaattggtccatggtttcgtcttttgaagaaaatggctgaagctcatggtttagttcctgagtttgaggtattttgctgtttactctctcttatgagttttgcttttgattggaattgaagtatggtttaaggtgagagagaatgtaaattgctttgtgtggatgcagataacattggaagctactcatcatggaccaataactaacaagccaacgatgtttttggagattggtgagtttccttccttggtcccttttatctgaattgattagctctctgctcgctctcttgaaattgccatttcgttgtgtatccgagtttcttagttcatctccagtgtagtttttgaggaattgaatctatagtctgagaatgaataacgtgtgtgtaggtagtaccgaggaatactggaagaggcaagacgcagctcaagtcatggctcttgtaagtgtaaaaaagttagttaattgaaatggtttcaggaggtagaaaaaggtcgttgttcttgtatcttgttgtttcctgtggatttaaagacttctctagggttgaaagtttggttctaataatcatcatgcttaacaacaacttttgaggctcatgactggccagtaacttttagtctatatctctaagtttgcttccatttagtaaggagcatttgtgttttgtgattcagttaatgtgggaaggtcttgggctaggaggcagtgaagaagtagggaagtggaaaaggtatatccattggggcttaatcattacctcgacataaagaaaaaccgaagtatcgatctaaacttagtgtggattgtttttgggtggacagtgaaaccggaaagaggaaagttcttttaggcattggaggtggacattatgctcctcgtcacatggatatagctttgtaagttgtcaagaactctgctttgtgcaagcacaacattgaacacgttctttatctcattgttttgattctgcattcatcaggaaagatgatatttgggtaggccatttgctttctggatactcattaccgatggaagatccaactcaaaccaaaacaacgcctggagagaattacattggtggaaattggagacaatcaattaaggcagcatttaagctactga

SEQ ID NO: 144555 - DNA, 186 bp, Arabidopsis thaliana landsberg
cctgatgagagtggatggtaagaagagagggagttgtggaggaggacgagttggtcacaaataacggcgtaaacggcgatctgcttacggagaatctccatctgctcctcagtcatcactctcccactatacgcaccgttttggatctctctatccatctcctctatttctttgcttttctccttt

SEQ ID NO: 144556 - DNA, 618 bp, Arabidopsis thaliana landsberg
gcagaaaaagacgccaagcagaaagcaagaacaaaggagttgaagaaactacgcaaagcccgagaaaagaaggctcaggtaacgttttgaatcagggtctatttttcaaacaaaactcggattagtagagacttgttatctaaccctccctgtgtttgcaggccgaagctgcgcaggcggagaaggagaagccaatttctaaagtggttagcttcacaaaccccaatttgtataatctgatctcagtctgatatttaaggagaagccatgtcaacatttgctttgtctttggtgtaaatcttgttgtaataggaggaagtgaggagagcaatggcagcacagagggaaaagagagcagccgctgcagaaagacggatggcatcacttaacattcaaagcagttcaagcacaagttaatttccaactttttagtgagttaggtaaaagaggagaaagtttgaaaaacaagaagtgagtatcatcattaaagtgcacaacattaccgactcaattattaggccacacacaaatttgtttttagaaggcccgtttagaccacaaaccgacttctcaatatttccatatatatatatatatatgcatgaagccttgttttca

SEQ ID NO: 144557 - DNA, 1737 bp, Arabidopsis thaliana landsberg
tgaacaatgacggatgcatttctaagcaattgccactccattgagccagttttacaagaatatcctaatcggtattttgcgcactgcttatccagagtttgctgaggaggactcgaggaattggatattggttcctctttgtgtcttgaaataaacatcttttagtcttttaaaccaaacttgtctatggctgctagttcaatctataaggtttccagctcccataaatctcatgtccttttaaccagcattgtgaatttatgatatcaactgtaattttctgtatgaatgatttagtttcttgatcggccttgtctttatgttgtctgtagatcgctttggtctttctatatctggtttcctgattttgtatgttgacatcaaacacccagtacataaaacactcagtgcattatctcttgctaggtttacacgtttggacttggattggtggagatgagtgtcttggttggacaaagttttggcgtaatctcaaggtaaagactagtctttgactatttatttctaaagacgaagtgtgaattcgagacccgtgctcatctgagaattgagatgttacttcaaagtttaaaaactggcctcgactgtcttaagctacaattgactagcgacaatctcaagtttgttgggtgcttgtttcagggtattgggaaattttgtggaaccggaggagagttccaaagtgattgggaactaagtgaggcttagaagcttatgattggttctctgaagtctgcaggttaggtttttcttttgcattctctctttgaaaggcacagtgtgtcgaagattcaccatttagtaaacatatactcgttttacgtttttttttttcgttttgttttttggttaaaatgatcttgaatgaaaagcgttgagctgaaaataaaacatgagcctaatgaaaatggaagattgaaaacttatagatcagaatcagatgtttagtggatattaaggcaataagtatatttttttaaaatcgtatgttcgggaaataaatagcaacgaagagcccaaactggttaaaccgtatattattaatagtgaaccgatctaatagaatattttagaaagtagaaagtgatttcagtaactagtgctttctacatgaattaaaagtagattataaccataagtaaacgtagattataagcataaatgtaatttaccagaaactgtatcgttccatgttgccaaaaatgtctatttcgttcaattgtttaaggctaaatgtaaaacaacgcttagtcttaactttctgattgtgaggataaaggttcgtacttctacctcaataaatacaacatatgttaccagttgtgctatcatttttttcagcgacagccaaaatcaccaccgcttctgctacgaacatgttaagccatccttttaaccgttgctgccaccactattacggccatcacaagaaaattcatgcaagtggaaacggtgatagtagcagctggtatgacacgttggtagcagtagcggtggtaatgccgatagcgtgagcggcaatggaagcattggtggtgtcagaagcagtcatcaacggggactttctatttttgtatcatgtctatttgacatagtagataggtcgaggattgaagtctggttagatgttttatatttttaaacacttgcaaatttttgtagatttgttggattaacattttattattgattcttgagagaatttgataagttaga

SEQ ID NO: 144558 - DNA, 914 bp, Arabidopsis thaliana landsberg
cccacagcacagagacacacacaaaaaacccataaaaaaatatggcaaatatctccagtattcacattctcttcctcgtgttcatcacaagtaacaacatcaaacacactctatttctgtttcttctctgtttcacttatatatgtcttatctttctcctttcattattacattcttcacctgttttgtctgtttttaaggagaatagctttcaatactgtttcttaagtttccttttctgatgatttctttttcttttgttcatcatcttagatcacaacatattgcaccattatttctcaaaattgtttcgtatttttgatgtttttgttttttttttaaactgcaggcggcattgctgttatggccacagacttcactctaaggaacaattgccctaccaccgtctgggccggaactctcgccggtcaaggacccaagctcggcgatggaggatttgaattgactccaggtgcttcccgacagctcacggctcctgcaggatggtcaggccggttctgggctcgtacaggctgcaactttgacgcctccggaaacggtagatgtgtaaccggagactgtggcggtctaagatgtaacggcggcggagttcctcccgtcactctggctgaattcactctagtaggcgatggcggcaaagatttctacgatgtgagcctcgtagatggttacaatgtcaagctggggataagaccatccggaggatccggagattgcaaatacgcaggctgtgtctctgacctcaacgcggcttgccccgacatgcttaaggtcatggatcagaacaatgtcgtggcctgcaaaagtgcctgtgagaggtttaatacggatcaatattgctgccgtggagctaacgataagccggaaacttgtcctcccacggattactcgag

SEQ ID NO: 144559 - DNA, 1264 bp, Arabidopsis thaliana landsberg
cattgtattaaagtattctagcccctctcaagctcaagcttaatcgaagaaactgcagctctgcactctggtgataaaagctcccagatcgcatgtgcgagtctgttcaaaagcttctcatctacagctgctgatattatgagcagtcatcagtcggctattgttccagctatatttatttccaggtaaaccattgtaactgcatactgttgaatctgatgcatgtgaggtattttgcataaggaacttgaaacctcaaaataactaatcagttttggaaaaagatcaagaaaattatggctgtaaattcatacctcccatgttcaactactgtccccgagtaaggtcacatggtatattttttctcttgtaaatatttggcagattttttgctaccatttttaaaacatttccctagactcagaaattccttatagaatcaaaattctttccttctatttgacaatacatgagaagcttacggtggctataaatttcagatttgaggatgaaaaacagatttcgagtctctttgaggaggtgtgggaagacatcacaagtggtgaaagggtcacactacagttgtttctgcaagaaattgtgaatcatatctgcgagagcatcacatcatcctcgtgggcaagcaagaagaaggcaacttttttatctttctcgtgccagttttctctcttcgttgtacttattgatattttgctgttttactcatagaagatttaaactttctttcagtctggtaaggcaatttgcaaactaactgaagtcttgggtgaatcattatcgccacaccacaagagattgctacaatgtcttgtcaatgaaattcctggacgtttatgggaggtgggacaagttctttcattccaattaatatttattttccttttccttgaaggttcagaaaaagttaattgagatactgtagcagcagattaattgaatttcgagagaattatctttgttgctcgactaagagctgcagctctgctttacttgtccctgtggatggatagagctggtgtgtgtataaatgcatttttgttgcactagtttttcaagtcaatacttctgattgcagggaaaggatgctcttttggatgccctaggtgctctttcagtcgcttgccacgaggcaataactaaggaggacccaacaactccgactaccatcttgagtcttatctgttctgcatgcaaaaagaaactcaagaaatatcgcgagtcagccttttcttgtctggagaag

SEQ ID NO: 144560 - DNA, 905 bp, Arabidopsis thaliana landsberg
gtgggaggatgcagttaaagattatgagttcttgagaagagaacttccaggagacagtgaagttgcagagtctctagagagagcgaaaacagtgctaatgaacagaagccaagaatctaaaagcctaggtttcaataatgaagttgaagcggtttcgactttggataagttcaagaaatccgtagcacttcccggtaagtctaatgagaaacttcaatttgtctcaaaaggttgagattttgcgtgtcttgctcaagttggaaacatttctcttcaggtgtctctgtatttcatttcaaatcatcatcaaaccgacaatgcgaagaaatttctccattcatcaacactttatgtcttcggtatccattagtacatttctttatggtaagaacaagaacacattccaaatatgctttttatatcacattttcttctaaacttatatgtataacctatgtttctcaatgtgttaactgagaaaatgaaatgttattaggtggatgtggaggagagcatggcgttggcgaaagcagagagtatcaggaaagttccgacatttaagatgtacaagaatggagataaagtgaaggagatggtttgtcctagccatcagtttctagaggactctataaagcatttcctcttatgattgaaaaagccctatcatcattctctgcttccctatgattcgatccgaatagcctatttaaaagactcagaaagcatttctatgtgaaagatgggaaagagctcttctgtcaaattcaacaaactattcattctttcttcttattcgattctaattcttctttatttattttttggagtttggctctgcttgctttggcatattacgtatgggtaaatgttcgcaatgattcaagaaatgcaagcttcattatcta

SEQ ID NO: 144561 - DNA, 1007 bp, Arabidopsis thaliana landsberg
gatccagttatagaacctttcctacgaaaactcaaagaaacaatggccatcaaatccatatttatcatcatcatcatcagcatcatcacatcaatatctgaactttatgctttggatccttcgtttcttcgtctttcgacctctctccaaagaagtagctttcctcaagattttcggtttggtgcagcttcgagtgcttatcaggtcaatttcattcttcttatttcatttaactggtttttctccttaactgtagtttagaatcaatttcatatagatttcgatttagtacagagtgaaggagcagccaacgttgatggaagagaaccaagcatatgggatacgtttactaaacaatatccaggttattctcttttttactagccttataggtgaaatatacaagaggcaagagctaacgtacttttgtatcttttgatatttaggtttgtatcttttatttcaatcccaacgttgtatttgatacaatcatacgtactcttactttcgacgttttatgttatacatacagctctttaacaaaagaaaaattaaaacttgttactgcagaaaagatttcagatggtagcaatggcgacgttgcagacgaattttattaccgtttcaaggtttgtttttaagcaaatccacaatatatatattttcctttaaaattttttttgtaacaatattatatcgatgacatttttgcttattggccaggaggacgtggcacatatgaaagaaatagggctggactcatttaggttttcgatttcttggtccagaatactacctcgtatgatttggttttagtcattaattaacatcgttgtgtttactcgttacgtggccattattttcagcaattgcttatgtttggttaattaaagtgacatcaatgacaaatattttggtccaaattaggaggtacggttgctggaggagtaaatcaggcaggaattaacttctccaatcatctcatcaatgaactcatttcaaatggt

SEQ ID NO: 144562 - DNA, 1147 bp, Arabidopsis thaliana landsberg
gttaaaaaacaagaaatcagacaactccttgtctcgagacacattacaaatcaaaaaaagaaaaaaaaccacgatggctcaaaatggttcgaatactactgtgaagctgatagggacatgggcaagcccattcgctataagggctcaagtggctctacacctcaagtcagtagagcacgagtatgtcgaagaaactgatgttctgaaagcaaagagcgatctccttattaaatccaaccctatacacaagaaagtccctgtcctcatccatggtgatgtatcaatctgtgaatctctcaacatcgtccaatacgtcgatgaatcttggccgtctgatctttccatcctcccaacacttccctcggaacgtgcctttgcccgtttttgggctcacttcgttgacggaaaggtaacaaaaaacttagatatattatttttaattagtgaatttgtttttagcaatgttgaattttggtcaatgaagaatcctgaaatcagaaccgaaacaattatgttaatatctgttaagttttaacttttaagggataattatcgaaaatgatggaactatgaaatatcccttcaacgaaaaagaaagaaaaaaagattagtgtaattatgtcaattttaagagattgatacttttttacatagtgagtagtttgattaacgttggtctacttcagccaaaacttatttttctaaaaaatggttgatgagaattaataagcataattttttattttttttaacaaaaatagtctaatatattaatgacgattgtaacagttgtttgaatcgatcgatgcggtggcgggagcaaaagacgacgccgccaggatgacattggcggggaatctgatggagaatctagcggcacttgaagaggcgttttcaaaagagtagcaaaggcggggacttttttggaggggggaacattgggtttgtcgatataactgttggggccatagtaggtccaatctctgtcattgaagctttttcaggtgttaagtttttgcgtccagacacaacaccgggcctgattcagtgggctgagaaattcagggcccatgaagctgtaaaaccttacatgcctaccgttgccgagttcatcgagtttgccaaaaagaaattcagtgtttagtga

SEQ ID NO: 144563 - DNA, 2517 bp, Arabidopsis thaliana landsberg
ctattacaagataaagtggacccaacaagcaatgttgagtttagctacaagtgtcttgtttattgctaggctagatcctataaagaggtgtgtaattacttgtttagaaaataacttggctgttttggtgcttttgcaaccaaagggcactttctgtggtgtggacaactccgctggtagcgacactgggcatgtctctcacaattccgcttgcgatggttgctgacatgatgatccatggtcgtcattattcagccatttacattcttggctctactcaggtaactaaaacttatattccatcaacaacagagaatgaataatttttcctgatgctcaagaattagcatttggtttattttgcaggtgtttgctggattcgtaatagctaacatatcggatttgttctcaaagaagcttggattgtagcacatatgattctttttttttggttgttttgtggtatttctgggtagaaaatgtatcctagaagattcttggttggaattgaaagctaaaagggaattttccctgtttaatggatgaaagataagaatgtgattaccaacgtttttgattcccatgtgcacgtctttggaaaaagaaagtgcaaaccagagagagttgttgtctgttgagcaaagatgagtgaaagaaaaaatcaaattcatgtttgaactagctcgtatacatgaaaccgaactaataaccttgttggcatagataaaatatttttttgatctttaaaactccatcaaccaataaccttacgttgacagatatgaaaaaaattctatgttaatgttgttttattattctaaattaaaagccagtaattgataattacgattattggttcagaacgaaccttctttctgagccagaaagtttagttcgccttgttctgtctgtgtttcttcctcttcccctgaaatcgaacgatttataaaatcgtcgtctggctttcgacgatctgctgacgaagaccatggcgccgattttcagatccacttcccttatcgctttttctctcttcttcttcttctgtgcttccactctttccgatctcatctgggtaatcaatcctctatctccacaaatcctctatagagcttgttgacatagagctttaattttcattcagtcgttgcttttcgtagctgcgatatctttttagcattaccctctaagtcttccctcgtagtttagtgatcttgatatcgttatctccaagttttggggtttgataataatttgtgcaacgttgatttcaatttgatctacttgtttgacgaatttactactttagctgcttatacatcccaaggatattattaaattcttgtctttgattgaattcagctgttcaattcattctttccttttcttatctgtttggttttttcaggtctgaggatagttacacgatcacgggtagagtgagggttccagcaagtaggtttcacaattcattctttgtcttttctctcgagaactcagtttttttttactcaatttttgctatgtttttggttttatcagtcaattatctgaaacctccgttcatggcactgttctaaggaaaaatacaattatctacaacttatttctattggtcaatactcaatagcagatttatagctgttatgcaacttccactatgggtgtgtttgctctgtgtaattagtatgtcttgtgatattgatgtatatttgtggcttagatagtttcagcaagtgagaagtaggtattagtaattccatgtatgaatttgctatgtagtatgccatctctataagtggtagactggctaaaagcagtgtttgcttaagaatattagcaaatacgttttgatatgtctcttgagtacttcatattattctaattacatgatacttcaaccaccgtctcgtatccattacgtaatagcctcactactcttttactgcaaactaatctaaaagttattatggcaggcaccgtgattggtcatgcagctaaattctcaaatatcaaagttatactcaacggtggacagcatgttactttcctcaggccggatggatactttaccttgtatcctactgttccttcttcaaacaatatgttcttctagttatttactcacgatatctactaattggtttcttactcatctttcaaatttgtcatctcacacatctgtagcttttggtataattttttttagataaagttgagaaaacttgacaccgtattttgttgtgagaacaatagtatcagtacttttgatcttcgttttcctttacttctctaatttcaaagccacaaagtgccagcggggactcatctgattgaagtttatgcactgggctacttcttctccccagtaagatcttttagttgcaatattctatgaactacatctattttgagaacttgcttctcatctgtcaatcaaatattttaaattaggtgcgagttgatgttagtgctcggcatcgtggcaaggttcaagcaacacttacagaaaccaga

SEQ ID NO: 144564 - DNA, 1289 bp, Arabidopsis thaliana landsberg
tagtcacaacaacaccaaccaataattaaacaaatggccaacaacaattccaactctcccaccggtccacactttctattcgtaacatttccagcccaaggtcacatcaacccatctctcgagctagccaaacgcctcgccggaacaatctctggtgctcgagtcaccttcgccgcctcaatctctgcctacaaccgccgcatgttctctacagaaaacgtccccgaaaccctaatcttcgctacctactccgatggccacgacgacggtttcaaatcctctgcttactccgacaaatctcgtcaagacgccactggaaacttcatgtctgagatgagacgacgtggcaaagagacactaaccgaactaatcgaagataaccggaaacaaaacaggccttttacttgcgtggtttacacgattctcctcactttggtcgctgagctagcgcgtgagtttcatcttccttctgctgttctttgggccaaccagtaacagtattctccatttttttccattacttcaatggctacgaacatgcaatctcagagatggctaataccccctctagttctattaaattaccttctctgccactgcttactgtccgggatattccttctttcattgtctcttccaatgtctacgcgtttcttctacccgcgtttcgagaacagattgattcactgaaggaagaaataaaccctaagatcctcatcaacactttccaagagcttgagccagaagccatgagctcggttccagataatttcaagattgtccctgtcggtccgttactaacgttgagaacggatttttcgagtcgcggtgaatacatagagtggttggatactaaagcggattcgtctgtgctttatgtttcgttcgggacgcttgccgtgttgagcaagaaacagcttgtggagctttgtaaagcgttgatacaaagtcggagaccattcttgtgggtgattacggataagtcgtacagaaataaagaagatgagcaagagaaggaagaagattgcataagtagtttcagagaagagctcgatgagataggaatggtggtttcatggtgtgatcagtttagggttttgaatcatagatcgataggttgtttcgtgacgcattgcgggtggaactctacgctggagagcttggtttcaggagttccggtggtggcgtttccgcaatggaatgatcagatgacgaacgcgaagcttttagaagattgttggaaaacaggtgtaagagtgatggagaagaaggaagaagaaagagttgtg

SEQ ID NO: 144565 - DNA, 1354 bp, Arabidopsis thaliana landsberg
gattcatcaaggaacagctcattaaagccatggcctcgaaaaaaatttctttttccttctgttgtgattgtcattgttgggataatcgtggcgtttacttatcagtcgaagttgaaaccacctccgccgaagctatgtggctcctccggtggtccaccgatcacagcgccgcggataaagcttcaagatgggaggtatttggcttacaaagagcatggacttccaatagagaaagctaaccgcaaaatcgtcttcatccatggatccgattgttgtagacacgatgccgttttcgccactctgctttctccggcaagttttacacaatcaagattatgcatgtctatatgcttctatcgttgatttgatagatagttgttatgtaataatactttgatcactatgttttaatcatttatttagttagtggcatgttaatttgtagcaagtagtgttgttaaaaatccttgtagtatagagaagtttagtgagaaagttatttgagagtgacgttttcggttttttattgggacctctaacagtgtgtcaatacattttataggatttagtagaggaactaggtgtatatatggtttcattcgacagaccgggctattgtgagagtgatccgcatccaagtcgtacaccgcgaagcttggtttcggatattgaagagctagctgatcagttgagtctaggatcgaaattttatgtgctcgggtactcgatgggaggacaagcagcatggggatgtcttaaatacattcctcataggttagccggagtaacactagttgctccagtggttaactattattggaagaacttacctttgaacgtttccactgaaggttttaactttcaacaaaagagagatcaattggcagttcgtgttgctcactatactccttggcttatctattggtggaacacacaaaaatggttccctggttcgagtattgcaaaccgagatcacagtctcttggcacagccggataaagatatcatttcgaagcttggttcttcgaggaaaccacattgggcagaggtaaggcagcaaggaatacatgagagtattagccgtgacatgatcgttggttttgggaactgggaatttgatcctttagacctcgagaatccgtttttgaataaggaaggctctgtgcatttgtggcaaggagatgaggacatgttagtacctgcgaagctgcagcgttaccttgctcatcagcttccatgggttcactatcatgaggttccgagaagtggccacttcttccactacactaaaggtgtggttgataacattgtaacgacgctcttaaccaccgatactgatacgattcgtcagtaa

SEQ ID NO: 144566 - DNA, 2187 bp, Arabidopsis thaliana landsberg
  unsure (1)..(2187): unsure at all n locations
tagtttcttgaagattatacatcaaacatagctctttcttcaatggatatgcccaaaccctcctgggagtttcatttattgaaacttaaaacatcacatgcggaagctgtgaccgtggctaggttcnnnnnnnnnnnnnnnnnnnnnnngtctcttatgtctcttttactcgcttgtactcgtaaaacatgtgatcccgaggcattccccacttttgtggctccgaagaaaaacaaagcgaagaacgtttgtttttctttggtagcttggttatggttcatagtaagacttatgttccacacttgtgttgaagtcatcaagtctatagtttttatatgtcgtgcgagtgacacctcagctcatataatgggaaaaccaggagctacacttagcgctaataagttcattcatcgaatcattagtttagatgatgtcaaaatggtgaagaacgccatgaatatggtacgtttgcttaattagttattttattttctatttcaagatgatttttatgtgttttttttctctgtttctattagactgtaaatgatgttctttttgggatggtacaagctggtctttctcgatatttgaaccaaagatatggtaaatcatttactcttgttcaatatcataattaaataacatttgtaacatattctgacattttttctcgaatttgtgaacagttcttgaaacatcttcaaagtcaagaaaaaatctaaacaatatcggtcttcatggtgttgttttctttaatctaaggccaaatagaaatattgaggtgccgaagaacatataccccaaacatataagtgcttcttattttatgttgtctttataaaaatagctagtaagaatctaacacataaatctatatgtaggatttggctaaaatgatggcaaaaggttcaaagtgtagatggggaaactcaataggttatgttctgattcctttggggatgaagccacaggatgatgtatttgaatatgttcgacaagccaaaactatcatggatcgtaaaaaacattccctcgaacctctattttcttatggattgctcaaagtaacaatggaggttttcggattaagggtacgtaagatactgaatcaaacatgattttaatattatttttttatatagtatgcgtgtctgatcgacatagatggatgtgtgggggtggaaaacagggactcaagactcttgtgaagagaatatttggtagcacaacaatgatattctcaaatgtggttggtccagacgaagaaattagcttttttggccatcgaatagcttacattgctgcaagtacctttggtgtcccacaggtactctcttacacataaacctgttctattcataatctattatagttggggaaccttgattgatgaaactaatttcgaatgtatttttctttctttaacaaaggcactcaatatctgtattcaaagctatgtggacaaacttataatcaacattggggttgatgtagacgtgattccagaccctcatcacctttgtgatctcatcattgaagctctccgcatgatgaattctgctgctccaaaaaaggtttttcatgcttcaaaggtttaaacgaaatgtttggcgtacaaaagaactgagcatggaattattttcaataccttgcctcctaccatctctttaatttttattggtctacgaccatctcatgatatatgagtttatcatctttctatgtactacactattactgtgtgagataatgagtttcggttcaatattttgtctttttcttgtactatgttctcgtctattttatatcgcagtccttatatgtgaaacacaacctctaacccaaaggccaaaagtgaagaaggcatgacctagcaaattacaaaatatgtatacattactaaatattacattcaacaaccagaagaaccctgataccgtgactggtaagtcagtaaacaacaacaacaagaacaacaacaaaaaagctaagttagggtttgggaccaaaagagacgtaaaagacaacaaaagcattgatcaacaagcggcgccgagtctctgaccgagataaacaaagtgccaggttagagacataagcgtcaatatattcaaccaagagggagtacgtgttgagcttgctcagcctctcactcagctgctccaatttccgccttagctcctg

SEQ ID NO: 144567 - DNA, 1131 bp, Arabidopsis thaliana landsberg
ttggtgaactactaaacaacactcacaccaaaaagacgacgatggtttcgtttcgcttccctttctcgttttctcagcccccgcgtgccaccacgtcattctccggattctccatttccgctgtcgctgtctccgtcaccgttggcgccgcagccgccggagctgcgatcgcggcgtcccggaatcccagccatccgattctagagtgggccttctcctctcaccgttcgtctctttcaccatggggatctataactctagcagacgaatccgttgtcgaacctaagaccggtttctcgtttcccgcttcaatcggagattcccggcgattactcggcgtcggcctgaggaagaagagcttactgggattgaagaacatcgatgtctacgccttcggtaactttttaatccatttccgaaactcatgttagttgaattgtccttgtccgtcattagcttgcaaattgtcggattggttggtctttaattggaattggtgaatagatttttagttgtcggaagtctaagtaacagatctcactttttgtcattacgaattgctatcaacagtttacggcattaaaggataggactggagtgaaaaagtagttggttttgatattttagcaatagaaaaaagttatgctttggaaccattcaattgattgattcagcttttctggcattggccaggcgtgtatgctgattgtgatgatgtgaagaaacttgtgggagacaagtacgcaaatcttccagcttcagagatcaggggaaacaagtcattcatggatgatctcatggaagccgatattaagatgacgataagactacagattgtctacggcaaactcaacatccgatccgtgcgtaatgctttccaagagtctgttggaaacagactcaagaagttcggtggctcagacaatgacgagttgcttcaaaggtactcacttacatttcagcttcgtcttgatcgttggacttcacatctgattctgtatttggctgcttaataagtttactttgatatcacttgcagcttcactagcctcttcaaagatgagtataagattccaagaaactccaccattgatttgacaaaagatccgggccatgtactcagcgttgcac

SEQ ID NO: 144568 - DNA, 332 bp, Arabidopsis thaliana landsberg
gtcatcctgctttgatcggacgtcaccgtccatttccagtgacccatcaagctgctgagagatggctagagcacatgcaaaatgctctggacgattcggttgacattgaccaggactcaaaaatcaaaatgatgaagttctttaggtaacaccatcttcttctcagagtcaaaagtcacatagttcgatgaaagtttgatcgggtgttttattcagcttaaaaccttaaaattctgtagatattaaccaaacagatttgattggcttactttttgatctggtttcaaaacaccacccgaattttttccctttgtggggctggggaaaaccga

SEQ ID NO: 144569 - DNA, 1681 bp, Arabidopsis thaliana landsberg
taacggaaagagacgacaatggcgggtcggttcttcgataacgtgatgcctgatttcgtgaaggagaaggaaagtgtatctggaggagatacgcttaggaatctgcttgctatgccgtattcgtctctctcgcagcagctcaagcggtccgctttggatctcaaagaaaccgtaagcgcaaatctactcttcttccttgtgattggttaggttactctgaaatggtcactaagttgtttttgttggtatctctcaggtggtgattgaaacttggggttttagtggacagactgttgaagacttcactctttactctggaactcttggagctgcgtttttactctttagagcttatcaggttactgggaactccaatgatctttccctctgcttggaaatcgttaaagcttgtgatactgcttctgcttcctcagggtatctccttcttcttctcccttgtctaatagcttagttctatagaagaaacaagttgatttgaattgttggttaactatgagacttttttggtagggatgttacttttctctgtggccgagctggtgtttgtggtcttggcgccgtttcagctaagctttctggtgaggaagatttgctcaattactatttgggacaatttcgtctggtgtgcttcttgtcagctttgttcttggtccagtttttgtttttgttggttgtgtgattgaattgaggattttttacagataagactatctagtgatcttcctaacgagcttttgtacggaagagttggttatctatgggcttgtctgtttattaacaagtacatcggcaaagaaacttcgtcttcagataccattgtaagtgcaattctttaggatgatagatctattgatgagtctccttttgtttcttaatgattagactcagtgtgcagcgccaagtagctcaggagattatcaaggaaggaagatcaatggctaagaaaggaagctcaccgcttatgtttgaatggtatggcaaaaggtactggggtgcagcacatgggcttgctggtattatgcacgtattgatggatgttcagctgaagcctgacgaggcagaagatgtgaagggaacccttaagtatatgatcaagaatcggtttccaagtggaaattaccctgctagtgaagaggataggaagaaagatgttcttgtgcattggtgtcatggagctccagggattgccctcacacttgtgaaggcggctgaggtgataatgccttttttgtcggaatatgtgtgtgtgtgtgtgtttaattactttccatacatcattgagatagagttgatctctgggaaatgaaaacaaaacacacaggtttttggggagagagagtttctggaagccggtgcagctgcagcagaggtggtttggaaccgtggattgctcaagcgggtggggatctgtcatggaataagtgggaacgcatatgtttttctcgcgctttacagagctacaggaaggagtgagtatctgtaccgtgcaaaagcctttgccagtttcctgcttgatagaggccccaagttactgtcaaaaggagaaatgcatggaggtgatagtccttattccttgtttgaaggcgttgcaggcatggcctatctcttccttgacatggtcgacccatctcaagccaggttcccaggttacgagctttaa

SEQ ID NO: 144570 - DNA, 984 bp, Arabidopsis thaliana landsberg
atgtattccatatcactagtagtaaacatgcaatgcatatcagcttatggatctatactctctcttcctttacgttccaatttattttcggtaagaaaactctctagctttccccacaagtcattttcaggtcagcatggaaagcttgttcgcatgaaggccacccctactcgggcctgtcatgatcaagaaagtaaacgcaagttcaagagattgccactttcaaaatggggtcaccatttcctctctgctcatcaagttgatgtctcggtgagtctatacacacacacacatttatatagtaaatgtaaaggatcgatgtaacgggtatgaacatatgatattattgttaggaaatgaatgcccttgcccaagagattgagagactaaagccggaagtaggggagatgctcatgttttcttcgaaaagcattgagtcgaccaagacgaggatccttttcatatatatgcttgtgagccttggtgtagcgtttcacttcgaagatgagattgagcagagtctagaagagggttttgaaaagatacaggagatgatagccggtgaagatgatttgtacacgatttccatcatgttttgggttttcaggacatacggttacaacatgtctaccggtaaaagttatctaccagtacatttttttgtaatcgattcatatgtattaacaagattctcctattgaccaatagatgttttcaagagattcaaaggggagaatgaaaagttttatggaatctataaccagtgatgtcaagggcatggtgagtttgtatgaagctgctcacttaaggacaacaagagaagatatcttggaggaagcgttaagcttcactacaagaaacttggagtcgttatctagagctggagcaagttctcctcatatcttaatgcgtatacaaaatgctctttgcatgccttaacattacaatgtctaaatgattttcgctagggaatacatttctttt

SEQ ID NO: 144571 - DNA, 2638 bp, Arabidopsis thaliana landsberg
ttcctttgctctcattcccacacagagaggtacaacaagactcgtcgctcttcgctttttcttctctctttctttctcttgccagtagtgtgatcttacgaagcttttagtagagaaaaagcatatacgctttgtctttcttaatcgactgataaggtactttttctggaattttgcttttcttcattcactttgtcttagtttcgacttgtttggttgattctacttgtcttgtttcagatttagattttgactagtgggtttgctttagttgttgtctacaggaacaatggtttggttcaatctgttttcaaaatcagagctttcgaattttaaacattaaaacggttggtttgtttttatgaatatggtgataggtgatgactaggttgatgatcgtagcgttttgttgcaaataataaaagtgattgttgacattgctatgttacaatgtttagtccttaggatcagatggaacaaatgggtggctactcaaaacaacaaggtccatttttagtttgattaagggatttggatctgagcttacttcatcaactttgtcggaatatacatttgctttgtgtggatttggaagttgtccctgaatggcgtccgaggatttgaatattgttgcggaatcaaagaaaggggaagagaatgttattgttgataattccaaggacatgaatagacctgagaatcttgacttatctactgagaaaactgatactgccaatgagaatggtccaaaagatgaagcttctaagctggtaaaggtataatgcttcttacaagactcgttttctgaactgagttttgttagtcttaacattctctcttctgtgtcattctctgtaggaagcagacctccctgagtctggtacttcagtgaagagtaaaacagctaaggataataaacctgttaagagaaagtcagggacgttttctcggagcccgagattcatgtctcagagctcttcatttccaactaaaggagcttatactgatattactagaaagagcattgatgccacaacatcaaagactagtcttaaacccgtcgttgctggtggatccaaaccaaaagccactccatcttcaagcagcggtgtttccgcaaagcgcaccagtttagtatctgcgcctctcaaaaagcaaactatggtaactactgaatctgttttgttagttgtttgaagctttcttgtcaacttactaatcttctttgtgttgtgtcagcctgtgaaaaccatttctaaggatgcagcttcaggccctacttccaagtgagtcacaatatttatcatttcaaatacgtaactgtggaatgacataagcgactaagaaaatatgtgaaagtgatgatctgaatagtcaactaaattgttctcccgcggcattttcagattaggagatgaaggttctaaatccatcaaagaagaaactgcggggaaggatgtcgaggaggctggatcaaccaccgctgtgtaagttctttctttaccttgtttttggcatgtttccgttagtttttaatgtgaaaatgtggctgtagattacagaagtaaaacatatgtaaaagtgtttgcatctgtaattttacagggtggcagataaagtatctaacccgttgaaagctgaaatggcaagcaaggacgacgaagacactcgttcaactaccactttgtatgcagtttcttcatgatcttccatgtttattaatgatatatgtatctctatatataatgcttggatgaccaacagaacttctacacctcgtgggcggagaagcacgtggtgcatcggcatctggattttcgatcaggacgctggaacgggctgaaaaacggaaggaggttgctgctaactctcattctctattcttacaacattggcattctaactgtttcaagtaagttttcgattcttcctagctcgcgtctcctttgtcgggtgtacctttcagctctatatgagactagaagagaagatccatgcaaaggaagtagagaagaccaatttgcaggcgaaatcaaggtaagctatataagactcttctataatgaaagaaaactcttattggtctgtgacatttgtcattttttgggttaaatggattgtgtttgtttaggagagccaggaagaagagatcaaaaggttgaggaagagcttgacgttcaaggctggtcccatgcccagtttctacaaagaacccccacctaaggttgaattgaagaaggtttgcttctttctcttcctatgtgatcaaacttgtgctacactatttttcttataccgtgctccatgaaaatgttgcagataccaactactcgtcctaagtctccaaagctaggacgcagaaagagtagcagtgatgcaacaggaggtgaagccgctcctcgcgtgacaaaaccaaaagactcatcatcatctacagtgaagaaaccaataacaaagtctcagccaaagcttgaaactcaagagaaatcagtgaaggccaaagaaaagaaaaaggaagtgaagaaagaagaagcagagaagagaggagaagaagagaaggctactgccgtggctgcgaaacctgaagagcagaaaccaaactccaataacatccaagtgaaggctgagataatggcga

SEQ ID NO: 144572 - DNA, 3297 bp, Arabidopsis thaliana landsberg
atgttgactccatattttgacaacgtgactggatacggagtggggttgggagccaatcataattcgtctgccatgtctggtttttttaataattccaattctctcagtgacagtgcggataactatgtctcttctgcacaagattgctacaatacaagtggtacatccttgtcagaccatacccccaattctgttcagaatttcgcgtttgagttctttcctaataaagaagaagctgtaaatgatgttgagagtggagtaagtgagtctcagtcggatggtgccagccggatgatttttgatagacatggaagagtggataatggatctttagaaaggaaacctcctattgatttttctagtgcaagagggatcagtttcaagtttgaaagtaatccttcagtttctcctgcctgtgtcaaacccaacaacagttttgacagtcatttagctgatagtgaccttgaccggcctaataattattcatgcagttttcaggataataaaactgttcatgtgaaggttaaaccagaggctgaatcagagaaagttgtctacagttcagttccaggggaatatagtgtcagggatgatgcttatctttctggagaaaccaatcgttggtggtctggtgcatcaagctctgcagtctcctatcaaacagatactgaaaaaggatactcatatatggcaccacaaacagctctacctagccaagacagtggcaagataagctccaatcatttttacgattcagatacatgtttgcaatatgttgtagaagatcccagcccagtgacacaaaacaatgagtataaagactttcaaattcaacaaggagaccgggaatatattcaaccaaggggcattgattctcaattctcaaatgccagctttgaatcagttcaaagccattcttcagaatgtatatccgatagtgatgatgattctgacgtctgcataatagaaccttttggtcaatctgcaatcccacatcgacctctagctatgaaaatgccggtagtttcttcagaatattctacagttggtcataattttaatcaatctggaggcctgaagcttcagtcaaataaagaaaatatgatctttcaagctgcattgcaggttagcagctgttagcctaataagggagtaggcgttttacccaattgccattttatatcttgttgattccattttcctctctcccagacaccaacagtccaacaccttagtttttactgattgtggatacatatttgatttataaccctgtccatgatgcatcgttatgctgctaaactacaatttatgacagttccatatttacctttgttcgtggttttaattcagactcattaggtctaatgacatggtctgatgtgacaggatctcactcagcctaattctgaagcaattctgcctgatggtgtcttgacagtcccgcttctgagacatcaggtatgtatgtaattattaaaattaaacacaagctgtagaaatgaaaggtatgtggtactgtattgatgtattgtatgcttaactaagatgatttggccccgaaaggagaaatggaaattttgaatctgttgatatcatttcccagcttgatggttgattgttttggccaatgagaatagttataattattattgttaagactgactgcatcttacttgaacagcgaatcgcattgtcatggatggcccagaaggagacaagtggcttcccctgttcgggtggaattcttgctgatgatcaggttattttgtcttctgttgtaatctaaatgtcaattataaacattcagcataaattttctcaaatttcctggtataattatcttttgcagggtcttgggaagacagtttccactatagctcttatactgaaggaaaggtctaaacctgcccaagcatgtgaagaaagtacgaagaaagaaatttttgacctagaaagcgagactggagaatgtgcgcctttaaaacccagtggaagaagcaagcattttgaacactctcaattgctttccaatgaaaacaaagttggtggagacagtgtgggtaaagtgacgggaaggccagctgctggaacgcttgttgtatgtcccactagtgttatgcggcagtgggctgatgaattacataagaaggtgactagtgaagcaaatctctctgttctggtataccatgggtctagcagaacaaaggatcctcatgagttggctaaatatgatgttgttgttaccacattttctattgtaagtatggaagtgccaaagcagcctcttgttgatgatgaggatgaagagaaggatggtgtacatgatggtggaactgcagctactggcttttgctcaaacaagaaaaggaaatatcctcccgattctaaaaaaaagggttcaaagaagaagaaagttgagtttctgtctggccctcttgcgaaagtatcatggtttagagttgttctagatgaggcacagagcattaaaaattacaaaacccaagttgcaagagcatgctggggccttcgtgctaaacggaggtggtgtttgtctggcactccaatccagaattcaatcgatgacctttacagctactttcgattcctcaaatatgatccttattcttcctacgtattgttctgtagcacgattaagaaccctataactaggaacccagtgaaaggatatcagaagctgcaggctatccttaaaacagtgatgcttcgccgaactaaaggtcagtctactggtattgaatctaattttctttgaatgttcatctgagggtttttatggtttctaactggtaaacgcatttaggttcacttcttgatgggaaaccccataatctctttacctccgaagtccattgagttgagaaaagtggatttcactgtggaggaacgtgatttctactccaaactagaggctgaatctcgtactcaattcagggtatggctgtggactcaatataccctcaaagaaatatgcaatataccatgaataaatggttgtagattatgcattttccattgtatttatctacattcccaaggccttagttttttttttattttctttttctttttcttttacttcaggaatatgcagaagctggaacagtgaagcaaaattatgtaaatatcttgttgatgctcttgcgccttcgccaagcttgtgatcaccctcttctcgtgaatggtgaatacagttttacctgggaatcttctgttggattagctaagaagcagattcagtcagacgcttcattggcaatttgtggtatctgcaat

SEQ ID NO: 144573 - DNA, 559 bp, Arabidopsis thaliana landsberg; identical to SEQ ID NO: 55523

SEQ ID NO: 144574 - DNA, 1300 bp, Arabidopsis thaliana landsberg
taagttgattaggtttccagacactctagatttggctccatatgtcagtggggcaagtgaaaaatcacatgactacaaactctatggagttattgttcacttgcatgtaatgaatgcagcattttctggccattatgtctgctatattagaaaccaaaataagtggtacaaggctgatgatagcacggtaagtttctcatatattatcaatggaatgttgtttgcgaattagtttataagtaagctcgattttttgttccctttttacttgagtttgttatttgatgaactttggaattaactaggagtatcttacttctatgacagcattttaggtttacaattttctgcttcttccttttcagtgatgagtttcttagtttgaaattttgaatggataagtattatataattttccccttccttttatatgctgaagttgttttctagaaaggatattctagctggttccattggggtttctatctttgttgtagtctgaagagtcgtaggattggttttgtgagagaaaatgttttggcttctactcattgactggtctcttctcgtcatcatccatatatctgcatcatacatttgaagaaaatttcaatgtttaattcctctgttgtgcattgattattgtcaggtagtaacttcggatgtggaaaggatcttgacaaagggagcgtatatgttgttctacgcaaggtaaataatattataatgcatctctcacactctttaaagttgtggattatgctcgatctggttacttatgatggtatatatcgaatgaattgactgcaggtgcactccaacgcctccaagattagcagtatgtaccaaaactgaagcatccaataaaaaaagcagagtgccactacctaaggctaatgagaaaagtaccatatcccggtctgtgtctacttcaagtcctgagttgtcttccaacacgcctggtggtggtcgatccggcaatatacagtcattttattctagtttccagaggctgcagaagattttagaagaagactcggcgagtgacagttcatctctctttgacagcaactcagatgaatgctcttgtagcacagacagtacaagcatggacgactttgctgatttcatttttggagatcatcagggacgggctcacggacagtctgagactccctcaccaacatcatcgtcttcctcatcttctccccccttcacaaggcgttcgccgctcagtcgttcttctccagaaacttacggaacctcaagacatcagttgcccttgggaggagaaaggtaa

SEQ ID NO: 144575 - DNA, 2182 bp, Arabidopsis thaliana landsberg
aaggcgcttgaattttgcgttttcagaatcttggtttctagggtttcacttaccttccctccgcgcccttgagctctctacctgagcttctccgggattcctaaagctgaaattcaaacacctccattttcatcctcaaggtttgctctctctctctccctctccatcgatccattagatagtgtgattactcctatttgtgtactgtcttcgatgattggcgtcaatcttactaccttctcgtttaaaacccagtaacttgcgattttgttgaactttttcctcaattttctttcgattaatcctctagaaacccgtagctaagcttagattagtgatttcaatcgcaagattcaatattgatcttgcccaagtgaattaaagtcgcaaaattgatttgtttttgtttttttagctttcttatgtaattttgctcaaagctatatgattttttgtctttgcagggagataaataaaactctattgagtagaaaatgagtgctgcagcacacaggactcctaaatcagggaggcaatctctgctatttcaagatttagcttctcctgtttcagcacgtagagggaaattctcgagtccgggacaggcagctgcggtatctgcactatggcgtgagaatttcggaggatctgatcttccaccacctccaatgtatactttggatgaccggtccgatttctctcctgagtctggtattgcagactactctgcgtctccagatgctaagtctgacagaagaacaccattccagagttctggaaagaatattgtaactcctggtaaaggaaagttggaagcaagcccttctttttctctactgaatgcacaacagagtcagcaagtttcagggagtccgagttggtggtcgcagtcaaaggcaggtagtagtaccgagcaggatgataaagggaaggatctcctgtagaaggggtggttcagccaggtgcattggtcactcttccgccgccaagagaagttgctaggccagaggttcagaggcagattatacctacaggaaaccttgatgaggaagagtgggtcactgtctatgggtaaggccatttaagctttattgctctcgtttttctcactttactgttgcaaatgttcttgatttgtcaacattctcgtgtctctgaaattctaggtacatggttgataacagttatattggtactgggtagtgttattaagtgccttaacttgtgtctgtctcccatgtttcaatcttagagaactgttcataataaatgctgttctttaccatcatgatgctcaaatatcagcctttgattgtgattttatgttttgatcattgtgaattctgactctttacatggataataactggtagtgttattaagtgacttatcttgtgtttatctcccatcttttcaatcttaagaactgatcataataactgccttcagattttctccaggtgatacaaatttagtactacgggagtttgaaaaatgtggtatggtcttgaaacatgttcctggtccaagaaatgccaactggatgcacatcctctaccaggttactgttcttcccttcaaacctgtttgatgcatgttgataagcattcatagttcttctagacgagtcatcatacatgatagtctaatcaaatcttttatataaaggaaacaacgaactgacaatggtctgtgtatttgatacagaaccggtctgatgcacataaggcgctgaacaaagcagggatgatgataaacggagttgtaatagtaggagtgaagccagtagacccaatacagaagcaagcgttaaacgagagactcaacaaccaaggattcatgcctttacctccaccatcatccactagaaacactgctcgacccctgtctcgtcctcagtacttgcaaaacggcagcgctttctctcctcaaccaagtggtggcgctatggcctctccgtcaaagtcaatggtctcaaagttctttgacttgatgttcggtgtttaaaagctacttcaatggcatttcccgaatgattcttctttacacatagtttgaagtttttgagagcagagtggctaagtaaatcttagagcgtggtcaaaattaaaaattgtaagaggtgtttcaaattgtcttttgtattgacgacggctaaaaatttggtataaatctgattatt

SEQ ID NO: 144576 - DNA, 994 bp, Arabidopsis thaliana landsberg
aggatcaatgtatcatggctctccattgctactctccattctcggtcctctcacagttcagaggtagagtgaatgttaatctattcaaagttcagttcttgagcttagtttcttagggttctcgcattgtataatttgagccaaagtgacaagtttgttgttgcaggatcgaagggcaatcgagtcatcatttgtgcaggtatttatgattatacatgtataagttagattaagaaattgtataagtgatcaagagttgtaagtaactttgtgattttttttggaattagtgatcaagagctttgtagtcatgcggatgataccaacaatcttctggatacagtttggtttttgttattgcagatttacttagtgcactgcttcttcgagctattggtcagaagctccagaagtcttatagaatgaatttgaggccacttggtgttcttaggtcatcgcaggatagaggtacacttaagttattcgactatgagaacttagtagtataacatatggattacaatatttttgggaatcgatgtttagtctgattccttgtatatttttgttgaagtttaactctgtgacaatttgtacaaaatcatatttctattttttgatcagaagggtattgctgatctctccttttttctgtttccctcagggatccttccttgtggagatattgctgctcttgtgtatctgtggaatcctttcacaatactttcttgtgttggcttatctacttctccaatagaaaatttggctgtcattgtgtctctttatggagcagtgtctcgtaagcagttgtgggaaagtgctcttggtatctatcttaaatgaaaaacctgctttcggtttgtagtacgctcatccctgtcgttcttcttctcaacaactgtcttctacccttgcaggacgagttcctctggctgcatttgggttaatcatggccacacatttgtctctttattcagcacctttagtgtttcca

SEQ ID NO: 144577 - DNA, 796 bp, Arabidopsis thaliana landsberg
atgtcaggaagatctgcattttccagaaccggaggtttccgacctgagaatctagggcaaaacgcagtatccttaatcggaagcataggcttctctgtactcgtaatcggagtcgtagttttcaccattatcgctgctacatatgaaccagaagatccactatttcacccatctgacaaaatcacaactttcctcacatccaattcaaacgctactcttaaatccgacgacagtattgtcaaaaccggtgaagatttcatggcggcgaaccaaaccgcgtttgctggattcatcaatatagctgatgttgaaacatctgagaatgactctgatggtaatcaattggattgtgataccaatatcccaattgattgcaaagatcctgaagtttttcacttgatgatgaaagctactatggagaagtttaaagacattcacttttataagtttggtaaacctgtgattgtggaaggtagtagtagttcttgtgatatggcttggcgttatagacctaaggatggtaaagcggctgcgttttataaggattataggaggtttgtgattgaaaagtctgggaattgtagtgttagtgtgatggggattggtgagtatcattcgggtgtgaatgcgaggaagcggaagaggcccgggtttcgaaattcgagtggtggtaaggttgatgatttcgcattgcctgtagttggtgaagcagtgaatgattcacttcctgttgttgagtctgaaaatgtgtttaaagaaggtcattacttggtttattctggtggaggagataggt

SEQ ID NO: 144578 - DNA, 512 bp, Arabidopsis thaliana landsberg
atgaaattttttattacccgacgaggtaaggatcggaagagccttgaactgggaagtcgacgacgccgccaacagagctctgacgaccaccgccgagtaagattcgcgcgtgtctgacacgatcacgcgctctaagttcactcagcaccactagctcgtctagaggaaaagccctttgtaaaggaagaatcttggtcggaccagctgcgtatttcgcataggccgaaggtaacggcgatgctgcaaaaccagtcacggccaaagccactgctagagccgccgccaacatcagggaacgaagggtacgcattcaagcagctcgtggagattatggttatattcccgatgaagacacacgttccagagagcgacacaaatgctcgattcttcgcatcgagcagagagagagacagaaagaactgtcagagagagagagagagagagagacgttctcaaatgttttagcggagatagtggggactaatgaaatttatatattccaaaattattga

SEQ ID NO: 144579 - DNA, 612 bp, Arabidopsis thaliana landsberg
gccacaagtccagttggaggcaatcttatggggtattgggactgctcttggggagcttcctccatatttcatctcaagggcaggtttgtatactgattctctctatatatttctctttgatttgtgatcgtccatgcatgtgcataggtctcggttgtttattgtgttgtttgctttttctatttttccagctagtatatctgggagcacagtggatggaatggaagaattagatggttcctccactgaagatagcggatttatggcaactcacctgaaccgtgttaagcgttggttattaacccattcacagcacttgaacttcttcactgtcttggttcttgcttcggttagtatgcatcctccaatttactttaccttctgcagtagcaaatggattatgaccgtatttactgtgtcatataatatcttttgctttctaggattcaatgatcaggaccttaccattactcactgcttcgatttgattgtaggttccaaatcctttgtttgacctcgctggaataatgtgtggacaatttgggcatttccgtttgggaattcttcctggcgaccctaatcggaaaggcgatcatcaaaactcatatacag

SEQ ID NO: 144580 - DNA, 349 bp, Arabidopsis thaliana landsberg
aaaaaagttcaatgttatgaacctgccacaatgaaatatctgggatatttccctgctctgtcgccaactgaggttagtagctgatgtccttgctgtgaagggaatatgtttttttataattttataagaatggtcctactttactcaaagtcaaaggtttctctgaaggctatagccaccttatcttgagatatgatttacacttttgtgtttccaggtcgaggagcgagtaacactatcaaggaaggctcaaaagacatgggctcaaagtagcttcaagcttagaaggcagttcttgcggattcttcttaagtacattattgaacaccaagagcttatatgcgagtaa

SEQ ID NO: 144581 - DNA, 547 bp, Arabidopsis thaliana landsberg
atggtgtctgctatccaggagaatgcagacaggacctggcttaaaaaacatgctgaatcaatggaactcgaattggacgatgaagaaagtgaagaggaaagagtggacaatgtcaggcagagaaaagcgacctcagcacgacttaataagctgaaggaggtttttcactgctactcagaaaaaaagttctcctgaatcatgaaatattactttcccttaagaaaatcgtattacgaattatatgttgatgtctggttcaatccgcaggaacttagcacgctcttatcacatccgatgcagcccaagaaattttcaggccgttactttgctggggtaaattttgttcctctcatctttcttttttttggtcacagcctccatatcttgcatttaaaaaaaaaaatctttagccattctagctctcttccaaacaaaaggtgctgctgcacaggagacttatcaatatcctttgtcccaggttggtgtgtcgactctaatgcagaatcagtttgtaaagttaaagaagcaaaaacaagcacatatgcaa

SEQ ID NO: 144582 - DNA, 1264 bp, Arabidopsis thaliana landsberg
atgtgtctccttcgtcatttgctacccatttgggttcttcttggtttcttcttcttctccactgctactaaatcacaagaatcttccgttgtctacgtttctggtgcttcccccgaaatccccatttctcaggcttctccacgaatgggagctcaatccccaggtacttattagtttcccctttccaaattttctccatgttgcccctaagaacaaaaatatcaatatttggtgattgggtcttactagttcttgaaattgtcgaaatgtgtttgctcatactttcataaaggaattgaatttagttgaattgatactgtttcccaattaaaactgaaaactttccgataattaagcaaataaattgaattttatcccttatttaaatttaactttgctcaggacctcccattgttaaagtggtgcttcgccaggacttgaacaagaagattctaattgctcttatagtctcatcatctctgctctgtgtcacagtcatgttccttgtgtatctcttgctatggaggtacaggaatatgaagaacagcttcaccggtatcaaacgcaaatccggtattcaattctatctctttatatttttgtaatttccttggttttgttatggcttattttggtgctttggttatctgaagattcggtgaagagtgtaaccacgaaaccgattgtacacaagattgattctgtgaggaaaggaaccatccctgtttatgaatatcaattgctggaatctgcaacaaacaagtttagtgatagtaatgtgttgagccgaggtggtcgtggatgcctttacagagcatgtctcgatgaaaaatcctcagtcactgtgaagaaacttgatggcggtggggagacagacattgaaaaacagtttgaggtttgacccctaagatgattatacagaatcgcaccatctcattcgataaaccataactcggttttttgctttctcttgttgattttctaatgcagactgaagtagattggttggctaagatcaggcatcagaacatagtttccttattggggttttgcgtatatcggcaaacgagttgtattgtgtatgagttgatgcagaatggatctttggagagtcagttacatggtaaggggatatgatccatgtttgttccatcttttgtcatctgattttgattttgttgtgcttttgaatgctctaagggcctagtcaaggttcaggtttaacttggcagctcaggatgaagatagcagttgatatagcgag

SEQ ID NO: 144583 - DNA, 1028 bp, Arabidopsis thaliana landsberg; identical to SEQ ID NO: 56613

SEQ ID NO: 144584 - DNA, 1327 bp, Arabidopsis thaliana landsberg
atattattctttattgtctcccgatgcttgctcttcaacttgcggttgtgttgtccgagtcacgcctaaatggtggtagtggctcttatgtaaagctgccacacgacttcacaagaacgtattcccgagttattattgatcacgacgaggtggccttatgcacatatcctctactgagtaccattcttcttggtgtgtttgcagccgtcctaacagcttacttgttctggcttggaaggcagatactgaaacttgtcattaacaagcgtttacagaagagagtatacactttgatattctcggtctcgagtttccttccattaaggattgttatgctctgtttgtcggttctcacagcagcagacaagattatattcgaagccctttctttcttggccttcctctccctcttctgcttttgcgtggtatccatctgcttgcttgtctacttcccggtttcagattccatggccctgagaggtctaagagacacagatgatggggatacggctgtgaccgaagaacgcagtggtgctctgttacttgcaccaaactcttcacaaactgatgagggattgagcttaagaggtcggagagactcgggatcgtctacacaggagaggtatgtggaactcagcctatttctggaagctgagaactaaaatcgccaaaggctgtttctatttggcttttggcaatgtacagattcctggtgaaacaagcagagagagagggataaagagtttaagtatgagaatatgtttgcgcaaaaaaaggcataatttcagttttgtggcaaagacactttgactgtaaaggagggtttaagggggtttactcttgtgagggtttgttgtttgaaatgttttctgcttgatggatcataatttttgtacctttattatgtgatcaattttgatttagaaaaaaaaaaaaaacaatagccgtgaacatgagcatgactttaaaagataaatcagccttttaccctctattctttggactcatgaacatgagacttcataagaaaattagagaaattgtaccaagcaaaacagccatatagtgttctaaaattccatgtcaattcgacctagacaaatacacttatgacttcagaaaatttgacataattttaatatttaaccaagtttgtcaagaagatccgagaacatttaaaccatccaatctgataattggaagagaagacgattgtgtgaagaaggtgaaaacatttaacgttccactgatacatacatggtcatcgtttggctcggtagttgggcttataggtttagtgctcggcttacttgatgagactgagtaa

SEQ ID NO: 144585 - DNA, 165 bp, Arabidopsis thaliana landsberg
taccatgattcttctgttcttaggtttgatttcacggattgtgttctcttgatcctcgatcgccatttgcaggaagaagaagaaaaagagagtctttatcgagtcagcttccaacttttttctagagagaaagtgaagatttcttggagagaaggtaaaagagag

SEQ ID NO: 144586 - DNA, 1147 bp, Arabidopsis thaliana landsberg
tctaaaaacctctcctttggctgtgagagagccaacgagaagagaaaaagtatcttcctttgagaagtgcaagtccatggcagctctctgttgttgtcccaccaccatcatcgtctccgggaaggtttcttcacggattaaaaccgcaggtccattaccccgaatcaacccttttaagaatcagaaacgattgattacagagagaagaaacttgatcgttaaatcgatcattgaagacagagaagcaatcgatgttaaaaatgacaatttcaaggcagaggaagaactaacagaagataaagtagaagatacagatcggctaatgagtcgaggtatcaacgcagctatagttctcgccgccggtaccgttgcggttactaagcttttaaccattgatcatgactattggcaagtaagcttagggttttctttatctctcttgtgattgattggttcttctatttctgcaaagcttgctcctttatgggattatactgaaattgatatcacgattgttgttgttcttcttagggttggactctctacgagatacttaggtatgcacctgaacataattggtttgcgtatgaacaaattctcaaaacaaaccctgttttggcgaaaatggcgattagtggaattgtgtattctttaggagattggattgcacaagtaagaaactaaaaatactctaaaaagcttcttaatttgagttctctctgaccattttggctgtaactttatgcagtgttacgaaggaaaaccgctgtttgagtttgatcgaactcgtgttcttagatcaggtcttgttggattcacactccatggttcactgtctcactattactaccaattctgtgaggtaaaaatcaatctttgctctgtcaagatatgttgtattaacaacgggctgaaagctaaaatcttttctttgtacaaggctctctttcctttccaagaatggtgggtagtccctgcaaaagtcgcatttgatcaaaccgtatggtctgcaatttggaacagtatctactttacagttttagggctcttgcgtttccaatctccagctgacattttcagcgaaatcaagacaacatttttgccaatgctcactgtaattaactctccttgccctgtgtcttcgtga

SEQ ID NO: 144587 - DNA, 2042 bp, Arabidopsis thaliana landsberg
cgatggagaagacgatgacaccgagtcgaaatctcaaacgcgcgaaaggtatccagtgtagacagaatcaaggcggaatcgctattccgtcggatgcgagctgctcctgtgccggtgcgtgttcacgacgtgattatcagtggaaacgagaagactaaggaccatatcattgaagcggaagtgcgatgctgtgagagaggcgaccacgttgcaagagcttctcgaagcatctagggttgccaattcgaatctccgtgcgttagatatctttgattccgtcaacattacgcttgattctggtcctcctgagcttcctggtactaccaatgtggtaatcgaagtcgtcgagagcaaaaaccctctcaccggccaaattggtgcctatactagagcagaggtattaatttaacagtaaaaattcactgctatgtttaaattgtgttggtttattaggtattggtttctatagagttgaatttgtcatcttcatgaagctatttgtgttcttctattctgtgatgctcttgtaggctagatcatcaagcgttgaagcatctttgaagtataaaaacatttttggttatggagatatttgggacgggtctatagtttatggctgtgacaactctgctgaggttggtttggggatgtatttgccaaggttcagaggattgtctactccttttacttcccgtcttttcctttcgactcaagactggcttaagttttcatcgtataaagaacgatccctcggtctttctcttggtcttttctcaagcaagtatcacgagctgatctacacgattgcgtggcgtaatctgatcgatccatcacaagctgctgcagtatcaataaggagacaactgggacacagtctgctttctgcgttgaagtatacttttaggtttgatcagagaaactcaagcttgaggccaactaatggatatgctttcatctctacatctcaaattggtggtcttgctcctgatagccgaagcttacgcttcctgaagcaggttggtctcctcttctttcttgttgccaacatttagatgacctttattttaagtttggaaggttgtaagttcttacacagcaaattctgtggtttcagtcccttgttttcatacatatcttccctagtatgtctgaaatttatgctcactgtgagagggaataacaagaatctaagacatctgatagttttagcatctattttcatttgtttggtcaggaagttgatcttcggtatgctgttccgtttggattttacaatgctgctataaattttggtgtgtctgggggtgtctcctttccgtggggaagcggataccagaaccgtccttcatctataccagagagattcttcttgggtggcaattcttcgcctgtgtgctccttgagtgggccatctgcgctgtggggattcaagaccagaggagttggtcccagtgagccaaagaggaaaggtgatagtgaacgggattttgttggaggagatgcggcagtgactgcatttgcggatctctcatttgatttgccagtgagatggttaagagagagaggaatccacgggcatgtgtttgcctgtgcagggaatatggcgaagttatcagagaatgagtttagaaacttcactgctccaaagttcttggagacattcagaacttcagttggtgctggaatcgtcttaccaacaagcctattccgtatggaggtttggttctcatcactactctcccttatgcatttttatcgaatgaaagtgcaatgattaacaccaaaattatccatcttttttgttttgttatgagacagcttaattactgccacatattgaagaaacaggaacacgatcaagcgagatcaggggttttcttgacattctctgcttcgtcctgagaaatttttgctgaagaatcaaggtactccatatgatatggcctttcattattttctttttcttaaagcaaagtcccaatgtctggcagaatctttgatctattgttgaatcgagaagactataatctggaaacaaaagg

SEQ ID NO: 144588 - DNA, 481 bp, Arabidopsis thaliana landsberg
aggtgtttgaagcatacgttggactgctgttgctaagaaaaacagtaactggagttgttaatgaatggcaggtatatttttctcactctcgtggcattgttttcaacgggtctattcccggtataggccgacaaatcctgattcaatagagaataaagactaaaaaaataggaagtagagtaagaggaatgttgtcgctttcaggtgatggtttgtgggattcttctggtagtgatggcagttgggaacttcataaatacagtagagacactgatggcaaagtcaagagttaaggcaaagatgaagagaagtaaaagcagagcagagcttaattagacttcacaggtctctcatctgttcaaaatcttgctttttttgcagttcataaatttttgtcctttttgtttttaggccacggataaaataaaactgtgaccatcctttttctgtgtaaatggaagtggcagttgatatttgataa

SEQ ID NO: 144589 - DNA, 807 bp, Arabidopsis thaliana landsberg
cagagcagaaggctgatgaatctgcagcttcttgacgtcaagaagcatttccaactcaattcccctaccaacattcactctccgaatcctttcagccaatcacttatatctccacgcccattgtccgtgatcaagagagagtatgatggaggagagaaagggaaaggaagttctaaagaaggatctgatgatgatacaatgaatctaccagagaggtaggtttatatacaagagttctctgcaaggaaactgttttgtgtattttaagctgaagctttttggggtgttttaggttggaggatagcttgccagatagtccgtttgcatcgcccgctcatcatttgcttctgtttgctgattctgctgacaataacggatcggatctgtggtcgccttcttctgataatgatgataattctactccttctacactctccgactccttcaactctttcaactaccaaatgccaaggtccctagattcaaccacactttatgttttactccttctacacactttaatttctggtatcaagttgatggtatctaacattgcgttcatgaatcttctcaataggttaccggcgattggaatgttacccggtaggggtggaccaacctgtcgtgttgggatataaacaggtaaaaagagttaatggatggtgaaacacaaaataacaatcttgttaggttaatagtttgtttgttgtggttgttgtttttgttacaggaagtgaagtaagaaaagaaaaaaactgttaaaatacatagacccttaataaccaaaaaaatgcaaaggtttaaaaa

SEQ ID NO: 144590 - DNA, 1121 bp, Arabidopsis thaliana landsberg
ttacattggcctgtatctgcgagcatgtcaatctatcaaacaccattttgtttcttgtgcacgcatctgtcatctggagaaaaggatacagatcaagagaaaagaaacgatgatgtacgtgaaatccacagaagaacgcagtttcttcctcattctttaaatgccaatgagcttccaagaagcatctgtaatcatgagtacgttttatttctcagttgatccattcaactacatctcttaatttttttaacataacaagataaccttgtgtagaagaataatctggctgggagatctgaactatcggattaacttgtcgtatgagaagacacatgaacttattgcaagaaaggaatggcaaaggttggtagagtacgaccaggtacctttactgcagcattgttttggtttaatactaaattgtgaagttctaatgtttatgttttttaagttacatatgaatctatcaagattgaaattagatgtttattctctgatagctttcaagagaaatgacaaaagggaacctattcgagggatggtcagagggaactttagattttgcaccaacatataaatacgaaatcgattcagaaaattacatcggagatgacccggaatccgggaaacgtagaccggcctggtattgtcttcatacactgtgatacaacatttttacttgatatgataaaaaggcaaaaacgatgagtttggagtgactatgattgatcaggtgtgaccgcatcatttggaacggaaagggaatgaagctcttcaattacagaagaaacgagattaaactatcggatcaccggcctgtcacagccacgttcttggccgaggttgaggttttgtctccacggaaacttcaacatgcgcttacacttacatatgctgagattcaaggccttgacgcctaaacaaccacttccgtcagatcccatttgtgtatagtaatttaacgatttgtatgcccttcatgtataatagtgttcacgtacacagaaatattgtagatagaaatactgagtgaaaacaaagaccgtatctttgatgatataaacattggcaattgagttgagatgtaaactatagtgttagtgtatgcacaaatataagaa

SEQ ID NO: 144591 - DNA, 870 bp, Arabidopsis thaliana landsberg
cgccgaaatgagttatcttctgaagacgttaacgacgaaggagagactgatcgggttatcagagacaccattgatgaagttcttgttttacgatttggtcgttcctccgacgccgtttgtcttcagcatgatgaaatcgtattcaattcgtctatctttgaattcgatttctctaatttcgattaatcaaaacccctaaagttttcgaatttttcttttcagcttgcgaaatcggtgagagatgtttcgaaatttgctaaggtagctttggttgatgttgattcagaggatgttcaagtgtatgtgaagtattttgatatcacgttgtttccttcgacgatcttcttcttcaatgcgcatcatatgaaattggattctgggtaattaattaatctcttgttctagtagctgattaaagccggtttaggttgttttatgttaattctggtttggttatattgtagaactgcggatcatactaaatgggttggtgcatttcatataaaacaagactttattgatgttgttgaggtaacaagaacaattcagtttcattaattcctaaaagcttttaaagagttgttactaatttaaatactctgtttttgttattgtgttatgtataggccatatatcgaggagcaatgaaagggaagatgattgttcaatgtccaataccgccagagaggataccaaagtaccagctcttgtacaaggatgtgtagacactaaagtttgttgtgcttacaatgcaaaatctgtttctcatcttctgtgttggcaataatatttacatttgacattttgagatttacagttatgtttttgtacacagttgaagaatgagaataaatatgcagatttttcgat

SEQ ID NO: 144592 - DNA, 543 bp, Arabidopsis thaliana landsberg; identical to SEQ ID NO: 3475
  unsure (1)..(543): unsure at all n locations

SEQ ID NO: 144593 - DNA, 506 bp, Arabidopsis thaliana landsberg; identical to SEQ ID NO: 44485

SEQ ID NO: 144594 - DNA, 669 bp, Arabidopsis thaliana landsberg
  unsure (1)..(669): unsure at all n locations
actcgagacagttacaagttagaatctgctatgtttgcttggaaagaaaggattacagaacaagncagcaatggtaaatcccctgtaagagcatcgtggtcattcgctaaagatccgttgtctgaaattggtcgcaatgagtcactattgaaccgagcagaagcgcttagaactcagatcaaatccaaacaccctaatctccctcactcgtttcttgatgctacaaagatccaatatggcaaggtataaataaacaaaactaactacatctttcttagtccaatggtctgaaacatctttcttctctgtgttcaggacataggtcatgcggttctcgaagcatattcccgaacacttgcgaatctagctttccggattctttcaagaatgggagaaatcttgaaagaagattctttaagcaaccctaactctcctgcaccaccgagttgcttccctagctcccgtgacccttataggacacctgagagacctctgctttcgtcccgtgtaaggcattctttaaccgatgatatgaacaaagccgatgggacagagactggtttagattttttgtttgcagatgctaaggcaagttcagtgaatacaactccaagtagaagcagtagactctggtgtttgagtaaagtgccttctgatacttctccttga

SEQ ID NO: 144595 - DNA, 1873 bp, Arabidopsis thaliana landsberg
cagatcttccttcttcttcctcttcctcttcttcttccttaaaccctacaagcttctactctattgacaatttgattccgagtttacatcgataatggcggaccaaacctccgattcaacatctcccgtggctcctctctccgtatcttctcctactgctactgtaaactctctcaatttctctttaatcgctttaattttacgcttcatggacgcggacgtagtctcggagctctaggtttctgaattttaggttcaaaatgagattaatataatttggtttttgatctaatttatctagggtttcgagtttacatacggcatttcggacctagatctgtgttttgtcggcaacttcgaacatatcattttgttctgtattctcgattcgaattcaagtggtatagtatagaagaaggtttcgtttcttccgatttttgcctgaaattttactcttattactgtgtatttttatgtttttgttggaattgtctgaatttatcgttccacggatttaacaatttcagattctgattacattgatgttgagttgattcacatgcaaagctttttacctttggtggatcttgggctatcactgtgtagtatctctttagatttgaagtcagatttggatcgtgagccattactgtgtagtatatctttagttctgtgcaattaacaacaatctcacattggtcttaaagcatacttttcttgtttatatatatatatatatatatatatatatatatataacaggcttatgattttggtttgtacagcttaggagttataatatctgtttccctgtggaattgtttttaagtggttaaattgaaattgatgttgatcttggttgttctttctgctgcagaagaaagataataccaatcctgttgattcgaagctcacggtacgtcgctgtgttgttagatactattagtgtttttagtcaaatcttctgatcaagcggtttttctcaagtcttgatttcgttttatgtaggaattgaatgaatcaagggctgagttactaaacaggatccagaatctgaaacaggttttaacactttcattctcatctctgacattgtcatgttgttttagaacatctgttgtctttttaaaacaaaccaatctttatatcttatcgtcgcaggacttgcaaagttggagaggtaaattggacacttaagttaaagtctaccgtgaggtgagatccatttctagtcctctttatccattttgtggtatcaagcaagagaattgctgttttagccgggatcagttttgaactgttttgacattcgatgtatactcttccttggttttttacaggagctctctgggctaaagaagactctgaatcttgaagttgagcagcttcgtgaggtttgtatgtatattgagccagcagccacatgaatatttaaacggtttctattcatgatacatgtttgattcgttttgtctccataaaaactaggaattcaaagatctgaaaactaccttgaatcaacagcaagatgatgtttccgctagcctgaaaagcttatgcgtgagtctctcgtgatacactcttcttcctaaaagtattttcaatattataacccaaagaaaagaccggtttttagacttgcagaaactaatctatggttctcctccacgattatctgttttgtgctttgcagctacaagattcaaaagagcaaattgataagagaagtgaggtgacagaagagaaagtggaagctctatcgactgatgataatgccaaagaagcagaacattagataatatgaaattgtttggtcttatgatattctcgccactactgttaccactaccttgagaattgactagtatgctta

SEQ ID NO: 144596 - DNA, 3356 bp, Arabidopsis thaliana landsberg
atgggccaagaaagtgagagcccaaaagaggccgatcgttcgtttttgactcaatggccgctgacgttgacattgtacgccgcacccaacgaccgccaaacagcaaacaacaacactttcccctttctctctctaaacatggcgatgctttctactgcttccgtttcggggagcgtcgaccttcctcgaggaaccatgaaggttgactcgtctgcgtctccggaggtcgtatccgatctcccaccatcttccccaaagggctcacctgatcgccatgacccttccacttcttctccgagccccagtcgtggtggtgacaatcaggtatctgatgaattctctctgcttcgatctattcgtttccttggtttatgacctggatttcttcttacttattctcctctagtctgaagtcatatccaagagtgaagagtatcggcaattgtttcggcttccagctgacgaagtaagtattgcctctctcgtcttgaaattccatcaatgagagaagtactgactccaccattgcttccgaattgtgtagatccttgttcaagattttaactgtgcttgtcaggagagtattcttatgcaggttaggtacttttatctttctctctttgcgaatacttaccttatcttttaatcatctttactttttgttgcagggtcatatgtacctcttcatccattatatctgcttttactccaacatctttggttatgagaccaaggtgccgccattgttgctctcctccactcacttttgtttcttccctttttcctcttcaatattgatcggaactctctttgcagaaaattatcccatttgctgaaatatcttgtgttaaacgagccaagactgctggtatttttcctaatgccattgagattttagctggagggaagaaggtaccactagttccctctttactcgatattggttggtgcgtctgtcctgatctttgaaccgcattctctcccagtacttttttgcatcgtttctttcccgcgatgaagctttcaagcttatccatgatggatggttggaatatggtagtgctgtcaaatcagaaggcgagattctggtgaccgaaccgcaggtgggtgcaacacacactcttattttactgcttaatccttgtttccttatctgagtccaaaatccaggtaagcgatggagttgttaaaagggcacgcagttccatggatttggccaatgaactagatattccagtaaggtgcgtttatctcttccatatggtgttccatctttctgtttcttactgctttatcgctcactatacttccttctcagggatgaaactcttcatctttccagcagttccagtcttcctgtcattagtcagaatggcgttccaccttcatccgttcagcggcacgctgaaccagatgtagatgttgtggcggccaatactttcaactggaagcctgaagatacagatgcacctaaatgtagttaaactccttcctcgcttttaccttagttctttttggttggtttgggtagtgtggtagattatctttttcaagtcaactgtttaaggatgtgaatgctagtgttttcagtaaattcaacgggtttttttttttttgctggggtcaggtcaacctgttggtaaagagtattaaaaatgcagacgcttgggtttctcctaactcctttaaagttcctttaaagtggacaatcagttaacttcttactgtttctaggtatatgtcattatgtgtctatcttttagcttgttttctttgcaatataaattgtttgaaatttaaatggtcaatgggaaacggtctcttaatggttttgctaaataaggcctatcaggatggggtagcttagctttatgatcttgtcttttggtgctacttcacaagttgcactagttctcagtttgtcccaacgagcttgcactcagtatggagatcctatattactgaaccggttatttcgtttttgcatacatgatctctcatctatttcttttggttatcgtgatctcttttcttgttctcatttgtattcaccacacaaatttgtgttccttgcacgcagtgtcatctgactttacaaaggtagcagaggcaaagttttcggtaatgtctcgttctttgtcttatcagctagaggaaattatggaaccattctcattcaaatttatgagaatataagcattgactggatgcagaagtttcatatacctaaatagactttagtttatatttgcagattccagtagaagagttctttagattgtttttttcagatggtgctgtcagttttgttgaatctttccataaaaattgtggagacaaaggtaaagctataagtgatggaatcattttgctcctgtgtttagctgttttctctctctttctcggtgttcttttaaccagaagagatatttgtacttgcagagtttaggtgtacctcttggcaacctcatgaaaagcttggacacacccgcaatgtctcatttcaacatccgataaaaatttattttggtaatattttttctttcctatagataaacagtactagattacggtttatatcaaatatatatttttttggtgtaattatataaaatagattacggtttatatcaaatatatgtatgcatgactctggctttcgtttaaaggtgcaaagtttggtggctgccaggagtcacagaaatttcggatgtacagaaataggtacagaaattttgtaatgttttttggttttattctatatcgtcaaagcaaagctagtctgaactcatgcatgcttatcctctgttagctaatattgtaatttcctatgctagccatctggttattgaaacatcacaggagatcagcgatgtgccttatgcagattattttacggtagaggtaggggaaatttacatcaaatgctatcaatattttgttgtttgatgtgtgttacatgtgaaaaattttacctttggctgatcccagggagtctgggacttgaaaagagattgcagagactcggtagaaggttgtatattggatgtttatgtcaatgtggccttctctaaaagaacagtgtggaaaggtttgttaagcctaatttactcttctttatccttgatttttttcactcttgcctcctatcaatgaagaaatttcaattaatagttcaagagtgtttgctgcggattctcgttcttatagatttggaaatctttcagctttgttgaatttgatggttcttgaatctggcttgacgtctatgaatttttacagggaaaatagtgcagtctactttagaagaatgtagagaagcttatgcacattggataagaatggtacttgatcag

SEQ ID NO: 144597 - DNA, 468 bp, Arabidopsis thaliana landsberg
gtggtcagtgtcccgattcccgagaaaggattacggagagatcctcgaggagatagcattcaggtaaatgcgtgaaaaatctcctgtttcaagctttcttttgtgcatgtcagaatgcccttttgtggcacagttagccacaatactcggttcatgaaaaagctgaacctcttggtggaaaataaaaattgcagatggatacaaaagacatcctttttatttgtggtggtgcatttatcgatctggagaaaactgtttctgaaaggtaagtttctcaagtcttgtagattcagcaaaaatcttccatcctatccttttctctgtgttcgatagggcttgaatggcatgattatatttctcttgaccaggcagcatgatgcctctattggttttggtgcttccgttcgtacaaacatgagtacttctgggttaagtagtgctgctgtaacatcctccttgttggaatct

SEQ ID NO: 144598 - DNA, 1684 bp, Arabidopsis thaliana landsberg
gtcttctaaatcatttgggcgaaaagtccaaattaaatcaaaagatgttcaaagttgcaagagcgtcacagtatttggcgatcaccggtgctggtatcgaagacatcaagctttccaagaagtcatgggtgtttccatggcaatcttgcaccgtcttcgacgtttctccggtgaactatactttcaaggtccaagctatgagcgcagagaagcttccttttgttcttcctgccgtttttacgattggtcctcgcgttgatgacgatgacgcgctgattttgtatgctaggttgatttctcctcatgataaagattcaaatcatgtccatgagcttgttgaaggtgttattgaaggagagactcgtgttcttgctgcttccatgactatggaagagatctttaaaggtaacccccaaatttagggttttagatgttaagtttattggtgaatatgaggatgttaaggtagatttaatttatgtagatatttttcggatttgattggtgacataaagttgtagtaagactagggttttgtataatgatttggctaagtctctttaaataaatgtcagtttgattggttataactaagacatattttgtgaaagtttaggttaaaagagtttttgattttatgtatttgaagggacacaggagtttaagaaggaggtgtttgataaggttcaactagaataaaccagtttggtcttggatatacaatgccaatgtgaagcagcttgttgatgtgcctggacatgaatacttctcttacttgggtcagaagactcaaatgaaagcagcaaatcaggcgaggatagatgtctctgaggccaagatgaagggagagatcggtgccaaggaacggactggtcttaccctccagaacgcagccaaaattgacgcggagtcaaagatcatatcgatgcagagacaaggagaaggaacaaaagaagagatcaaagtgaggactgaggttaaagtgtttgagaatcagaaggaggctgatgtagctaaggccaatgccgagcttgcgatgaaaaaagctgcttggactaaggatgctcaggtggctgaggttgaagcaaccaaagcagtggctttgagagaagctgagcttcagactcaggtcgagaaaatgaacgctttgactcgaacagagaagctcaaagccgagttccttagcaaagccagtgttgagtatgaaaccaaggttcaagaagcaaattgggaattgtacaacaagcagaagcaagcggaggcagttctatatgagaagcaaaagcaagccgaggcacagaaagctgaagcagacgctacgttctactcaaagcagaaagaagcagagggacttgttgctttagccagtgctcaaggaacttatctcagaaccctcctagacgctgttcagaatgactattcttgtcttagagactttttgatgattaacaatggcacttatcaggagattgctaagactaacgcgcttgcggtcagagacttgcagcccaagattagcgtttggaaccatggtggagaacaggggattggtggtgctagtgggagtggtatgaaggatatagctggactttacaagatgctgcctccggttctcgatacagtttacgagcagactgggatgcagccgccggcttggatcggtactctaagcaagtgaccgcct

SEQ ID NO: 144599 - DNA, 895 bp, Arabidopsis thaliana landsberg
  unsure (1)..(895): unsure at all n locations
ctattcagcttcggagccgaaaggttcaggggtctggggatcatccttaagatcactgaatcttgacttcttctccgagagagcagaagaagaagacgaagttctaagagattgacctctcgtgttaaggtatgtatataacgaagttcccataatcgccacaaacgcaccgccaacgctaatgaaaccactattcgacccgaaaatgtagttgtttccaaggaggaggacacaagtcttgaactgtcctagcaccacatgcgtaatnnnnnnnnnnnnnnnnnnatatatggagcaaaatttggacttaaggaaccactcagctacgcaacctttaaatccaaaatgtaacgacaacactaatgtataagaaacttttactcaccctagagctaaggctcctgaccattgaagaaagaatccgagaagagcagaaacaagaatggcagatgtgttggttaagctccaattgaacgatagagcaccgggcggatccaagaacggaatcatcgatacaagaaacaacagagtgattggcgtcgttttccacatcaacctgaattaaaaaataaaaatgaagagatggtattgagagatgttgatacagctatatgaatgagtgtgactgaaaacaaacgaatctgaatcacatacgccaaagcagtccagttttctcgttgctgcatattagaccacaagattttgttagttgcgcttggtatgatccatgcgaatgctacacaagcaccaaacagactaaactgtaaatctgttacagtcgcaaccgcaactcccacagatacaactgtaagtgataccacctgaaaaacatcagccacaaggttacttactataccaaagtttttctctttgttaactctataaatccaattga

SEQ ID NO: 144600 - DNA, 394 bp, Arabidopsis thaliana landsberg
acgcttgatccagttgttctgcatttccgtaagtttgttctaaactcagacatcgagttgctgctttgtggccattctcgcatagtttctgaacttcttctacacagggaacaatgaagctggacgtatggtcttgaatcaaaccttcaccattgaaccgatgcttacaataggaagcagaaacccgataatgtgggatgataactggaccgtggtaacagaagatgcaagcctctcggcgcaattcgagcataccattcttataaccaaagatggtgctgagattctaaccaagtgttaaaaaaatgattctgaaaaattgatcttcttggaatgaaacccaaagccttaaggtatgtaagaatcatattcttattcaaatattgttttgctc

SEQ ID NO: 144601 - DNA, 797 bp, Arabidopsis thaliana landsberg
gcccaaaataatctcataaccattaaaaacaaatctccttcttctctccggcgtcaatggaggatctccgtcgtagatttccgactaaaaagaacggagaagaaatctctaatgtcgccgtcgatcctcctcttcgtaaagcctctgacgcgcttcctcttccgttatacctaaccaacacttttttcctctcgctcttcttcgctactgtttattttcttcttagccgatggcgtgagaagatccgtaactcgacgcctcttcacgtcgttgacttatctgagatctgtgctctaatcggtttcgttgcttcgtttatctacctccttggtttctgtggtattgatctcattttccgatcttcttccgatgatgatgtttgggttaacgatgggatgattccatgtaatcaatccctagattgtcgtgaggttcttccgattaaacctaattccgtcgatcctcctcgagaatcagagcttgattcggtggaagatgaagaaatcgttaaattagtgatcgacggaaccatcccttcgtactcattggagacgaaactcggagattgtaaaagagcagcagcgattagaagagaagcggttcagaggataaccggtaaatccttaaccggtcttccattggaaggtttcgattacaattcaattttggggcaatgctgtgagatgccagttgggtatgttcagatcccagtggggattgcagcccctttgccgcttgatggggttgagtattcagtaccaatgactacaacagaaggttgtttggtcgctagtcca

SEQ ID NO: 144602 - DNA, 2018 bp, Arabidopsis thaliana landsberg
gaatgacactaggtggaacaatggctaagaagtgcaaaattgaaggtgcaccatctctctttaaagttacttttggtttttgcaaatatataacttatggtgtgagttcctgactcataccgagaaaattaaatgaactgctaggattatataatctgaaatgcaaacttaggaagagttgcatagagagttcaagctcgtaaattacattctgtatacagaataatctacgctttattgcatgttttggtcactccttgaggatttgagggtacattgttacttgttaggatttaaaaagtcgacataagttgtatagagttattgtttgaagcaccttgtacgaacctgctatgcattgtgtgaaaattgaaggaagactacttttcatgacagcaagctacacttggctgcagtcaaaaaatttcaataacattacccatttctagcagtggttgttagatatgcgctgataaacatcctattaaacctcttgttcatgcttgatacttactcaaatctttctctattatgcagatccatcaggctttatcctttttcctctagttgttcattcttttgacttgattatatcctcaattggtattctatcaatcaagggaacacgtgatgctagtgtgaaatctccggtagaggatccaatggctgtacttcagaaaggatattctctgacaattatattagctgttataacatttggcgcggtaatgttgtcacacataaccattgattgtcttgttcctttcattctttttacaattaattctgctttttatgggctttttggttcagacttttcattagcctacactagccttgttattactgaaatttcgaacaaattctttgctatattcttctgacagcattatttatgtttgtagtcgactcgctggctgctttacactgaacaagctccatctgcatggttcaatttcgccctatgtgggttggttggcatcatcacagcctatatctttgtctggatatccaaatattatacagactataagcacgagcctgttcggacgttggctcttgctagctcgactggtcatgggactaatatcattgctggagtaagcttgggcctggaatcaactgctcttccagttttgactataagtgtagctattatttcctgcgtattggttgggcaatacctcgggtctagtggacgaaaatggtattcccactggaggtctatttggaacagccgttgctacaatgggaatgctaagcactgcagcttatgtccttactatggacatgtttggccccatagctgacaacgctggtgggattgtcgagatgagccagcaggtaagatgtcacatgattggcttgaaaggctcttatgttccatctttattctatgtagaaataataaatgtttcgtgcagccagagagtgtccgtgagatcactgatcttcttgatgctgttgggaacaccactaaagcaacaacgaaagggtttgccattggatctgctgcacttgcatcattccttctctttagtgcgtatatggacgaggtttcagcgtttgctaatgtgtctttcaaagaggtagatttcgttatgcatcgttgctgtattctcgatgttgagacaacttctcatactcatcctcggataaaatcaggttgatattgctatcccagaagtgttcgttggtggattattgggtgccatgcttattttcctctttagtgcttgggcatgcgcggcagttggtcgaactgcacaagaggttgtcaacgaagtaagaaggcaatttattgagaggcctggcataatggtgagcatatttttccttttgagtgcttcaccttttcttgtgtattggcttgtaccgttgttgactagcaaatatcttgttgcaggagtacaaggagaagccagattatagtcgctgtgtcgccatagtcgcatctgcagctttaagagaaatgataaagccaggagctttagctattgcatcacccattgtagttg

SEQ ID NO: 144603 - DNA, 922 bp, Arabidopsis thaliana landsberg
ccacgaatcaaagatggcttttgccattgcttctgctctcacttccacactcacattatccacgagcagagtccaaaatcctacccagagaagaccacatgtagcgtccacatcatccaccggtggaagattaatgagagagcgcttggtggtggttcgtgccggcaaagaagtttctagcgtctgtgaaccacttcctccggaccgtcctttatggttccctggtagctctccacctgaatggctcgatggcagcttacctggtgatttcggtttcgatcctctcggtttaggtacatatacacggaatttgtcgcattcgactcataaaactctaaccaagtgttttatagactaaccagtttttatttcatagggtctgatccggacaccctcaaatggtttgcacaagctgagcttatacatagccggtgggcaatgctggccgtgaccggtatcataataccagaatgtctcgagcggttaggtttcattgaaaatttctcatggtatgacgcagggtctcgtgagtacttcgcggattccactacgctgtttgtggctcaaatggttttaatgggctgggcagaaggtagaagatgggctgatttgattaaaccggggtctgttgacatagaaccaaagtacccgcataaagtaaatcctaaaccggatgttggttaccctggaggtttgtggttcgattttatgatgtgggggagaggttctcctgaaccggtaatggttttgaggactaaagagattaagaacggacggctcgcgatgcttgctttccttgggttctgtttccaagctacctacactagccaagatccaattgagaatctcatggctcatctggctgatcctggtcattgcaacgtcttttcggtgagttaaaattgttatgatcatttatcat

SEQ ID NO: 144604 - DNA, 2233 bp, Arabidopsis thaliana landsberg
atgaacaataggaaaatggggaagataaatgtgaaacttaacagctctgagcactgggagattgctttgatatcagcgttaacgatgttcaaggctttagtacggcggagtaagactgaaatgacagaggaaaatgaagaagaaaagattgtgagttttctcgtttcctaaaaaaattaggtaaagaaaagatattttggacacatatgaatagatgataactgatgtaagagatgtttggaagacagaacatatgcacatttccttcaattgttcaatatgttatactcttgtcctgttgataacttatgtgcaagagtctctcgttggtcagtgtgaaatgtttatgttgttagaacagattttggctctcaaacccaacacgttttcaataaaatatgcacggttagattcacccaaccctagttcaatctgccaggatctatctcttttttttttacgattttcttcaaccaaaacaatgaaataacacacaaaattattatcactagaccaaattttatttataacataaaacggccggaagctgatgcttcatgggcttggcccaaaggccggctctggatgggccagatgataacctagggtttatactccctatatatttatatttaagctcttcattcactcctctcaactccgcgcagctaaactttattggagaaaccctaatcggcgacaatgggtacgaacaatctctcctcgctttctctttgatttctccactccttcgatctcgtttctgtgttatgctattgttgtttagattctgatatatggattctggtttctcttaggtatttctcgtgactctatccacaagaggcgtgccactggaggcaagcagaagcaatggaggaagaagcgaaagtgagtctttcgtttttctcatttttagatctcttccgattcattttatgctccgctcgtcgtagattagagtttgtgaatctccgttttaaaacgcttaagagttttgtccgctgttgtgaactgttaaatctgagtgtttgcctttagtagattcagaatctgtagattactagaaatattttgccgtatcatagtatgtgattcttcatatgctatcgtttaattgttaaaacatagtaattgtcacatttctgggtgtcacggattcatgatatgttactagcttggattcattttgttgttctgatttgtgagttttatgtttgggtttgtgaaggtatgagatgggaaggcagccagccaacaccaagctctcaagcaacaagacggtcagaagaataagagttcgtggtggaaatgttaagtggcgtgcgttgaggctcgatactggtaactactcgtggggaagtgaagcaactacccgcaagaccagagtccttgatgtggtctacaatgcctccaacaatgagcttgtacgtactaagacacttgtcaagagtgctattgttcaggttgatgctgctcctttcaagcagtggtacctctcgcactatggtgttgagcttgggcggaagaagaagagtgcttcttccaccaagaaggacggagaggttagaccatttaacaattgattcatttgcttgttatgtttgagtctgttcatgtttttgtagcagtaatttgaaacttatgatcgatattatataatgttaactatataggaaggtgaagaggcagctgttgcagctcctgaggaggtcaagaagagcaaccacctcctgagaaagattgcaagccgtcaagagggtcgcagtcttgattcacacattgaggaccaatttgcaagtggacgtttgttggcttgtatctcttcaaggcctggccagtgcgggcgtgctgatgggtattcattatgtgccttcactcattatttttgttgaaacgtccttaattacgttttgctcatacgttttgcaaatgatgtgcagatacatcttggaaggtaaagagttggagttctacatgaagaagatccagaagaagaagggcaagggtgctgcttagagtctcttcttatctgccttgagcttttgtcttacaacatgttttgagttttcagtttcaattgtctgagaaactatgtttttggattagcttgtggtatttctttgaaactcccattatggtacaatgtttttgtcttggattttctttataattttaatcgataatttcactcaagttttatgcagtcaatattaagattgttctgttggtg

SEQ ID NO: 144605 - DNA, 770 bp, Arabidopsis thaliana landsberg
ggcaccaaaggtacattggcaaagtgaagcatgcagtattccacactcaaaagactggaagaaagcgtgttatcgtctcaaccgaggagaatgttgttgcttcacttgatctcagacatggggagatatgtatgaattattcatcttcatatttttgttatccatctttaaatcttgaagtatcttccactttgattgtcgtttttcttactttgtattctggtttggtgcagtttggcgacatgttctcgggacaaaagacgctatcgatggggctggtattgctttgggaaaatgtaagaattatcttctatacatgtggatcaatttatgtctggatgtatctaacactatgaataaataatgtaccagcatcttgaactctattttcctggcttcaaatgatttcagatgttatcactctttcatcagaaggaagtactttaagagcctggaaccttcctgatggtcaaatggtgtgggaaacatctctgcttaccgcacaacattcaaagtcactgttatcagtgccggtaagtaattaggagttatgctattttctttataagaaggacaactgtagttattatctgaagtcttagttgcttcatcctttccttggatgattatttatgaattaaagctatcttgcagataaatttgaaggttgacaaggactaccctattactgttttcggtggtgggtaccttcatgctgtttctgctatagatggtgaggtcctctggaaaaaggatttcacagcggaagg

SEQ ID NO: 144606 - DNA, 592 bp, Arabidopsis thaliana landsberg
ttcgagcaagtatcatgcagcctcaaaggagctgatgattgctcgttctggtgtgtctacgagatcaatttcttcggaaaaggggctctctcgtagggatttagtgctcattggtctctcttctccgttgtctatgttcttgccattgtcttctccaggtaatgctttgcttctattgttcgtcttttaatatcttgtagattcaattagatagtttcacttctacttaaaaatcttgcctttcattggttagtagagagaaaggaagaaaattgagaatctcttacagtgtttagtccattaataatcatctactttttttggttatgtaacgtttacagttttgttattgcagtcactcatgcagaagaagacgtgaaaatgagtggagaagaattgaaaatgggtacaatggtggatgatattaatgcttattcttatgcttacccattggattatccatctgagaagcttgtcttcaaatggtattgactgaatccttttgatgtaatgattccttccagttccagctgtatctcactcttttacataaaggataagcagggttgaatcaacaaagcctgaaagatct

SEQ ID NO: 144607 - DNA, 786 bp, Arabidopsis thaliana landsberg
atttcctttaagcaaacgagcttgagaagctttccgatttcaattccttttaattgacgatgccttcttcgttctccaagccggatttagatcgttcttcttcgcctccaccgatttctcctttatctcaagacagctcggaggctgagcgccggcttcgagaagcggaggagaggctacgcgatgccatggcggagcttcagcgtagacaacgctctgcggcgcgtggatctcacgcggaattgtgtgatcacgctgacgtttcttgcgtcgccaatgccattgggaatttatgtcagagctttcttctctcttatggtgttagagttgggatcgggattcttcttcgcgcttttaagctcgctaggggacagtcttattcgtctcttctcgatcttaaggtgaggaattgatgaattggaatttgtttttgtggcaatttctggagatttagagtcttacgagtctctgctttagtattccatttgatacggttgttttgaaactatggccaatgtgttattgacttatcattgtatatgcgattcactcacacatgaacaatggttgcagcaacttgtttcagagaaagatttgatagttagggaggaagcatgtcgtattggtctactttttggtggctttactggctcgtatcatgcccttagatgctgtttgaggaagtggagaaagaaagagacgccattgaattcgtaagtttattttatttatttgtgttgcctaatatttcgattgttgtatctcttttcttataatgcttctact

SEQ ID NO: 144608 - DNA, 628 bp, Arabidopsis thaliana landsberg
ccaaaaaccaataagccaagagcttttctcatttttcttcttgaaacccatggctcgattttccttcttgaatgttgtaaaggatgttgtggctattctaaatgaatcccgcaaactgtttctcaagaacaaaaagttgatgttctcagtcttggtattccctctcttactcaattgtttagtttacttcttgaacatctttgtcatcgtaccggagatcacaaacttgatccttgaagcaagtttgttgccttcgacagatccaacctccccggaatacgcagcccgccttatgagagtctttgcagattttcgccaatttgtgggttcttcatacattttcgcggctgtatcctccatcatcaacctcttttctgttctagtcatcgtccatgcatcggctattactcttaaagatgaaaacttcaatatcaaagattttcctgttttgagccttaaatcttggaagggacctcttgtgacgtatttctacattgctcttttcagtcttggctttggtttcctcttctttataatcctttgtcctatccttttgttctctataaaatccggttccgtggaaaatatcggtttcttggcggtcgaggctgttgttttattgataata

SEQ ID NO: 144609 - DNA, 656 bp, Arabidopsis thaliana landsberg
gtctataggggtgtcttcgcttcgagggacactgtgtgtacacatgaagccgcctccatctgatcaactgtggtttggcttcacaagcatgcctgatattgaattcaaaccttgtctcttctgttggtgaacacaaaatcacaaacagccatgttgctatgttcttggtcaaccggttcaaggtaagctgttgcgttttttttttgtttatgaaggaattcctaactaaccataagacaaaaaacaaattctgcagacggcgatacgagacgtcatggtgctccccaattgtgaaagcgttaccattccttggataacagctgaaaaggatgattgggtcgaacgcaatgtcgctccattcatgtggctgaatcaagactccaccagtgatcgcgaaaatttggaagctgcagaagcgaaatctaaagctgacaagccaccgacttctgaacaaatgcagaaaactgtcaacatcccgcagaagcctagaattgaggaagaatctgtgtcggctgacactgcaccatcagctaattccatagctctcctagtagagagtgacaaatccttagaagaactcaagactccactgttggaaagcagcgaaaagcatgatacaatagcgagaggaggcagtgcgggagatataattccgg

SEQ ID NO: 144610 - DNA, 1039 bp, Arabidopsis thaliana landsberg
atttactggagaagagatggtgggatcagaggttttggaggaatgtggagaaaaaataagcaagaaagaggcaaagaagcgagccgctaaactggagaagttgctccgtaaacaggaacgagaagaagccacatcatcatctctttctgtggaggaggatgaatcgtgttccagcaactacggtgacgtgactactaacgagttgcagtcggctgttgagggaaaagagctcactgatgtgagcaacttggttgaagagattgtggggtcagaggtttcgatcagaggtcgagtgcacaagaatcgcttagtcggtaccaaattgtttgtgatcttgagggaaagtggattcactgttcaatgcgtggtggaggagaccagagttggtgcaaacatgattaaatttgtcaagcagctgagtcgtgaatctgttgttgagcttatcggtgtcgtctctcaccctaagaagcctctcacaggaaccactcagcaggtttcctttttttctttgattgattcgaatagcgacatacatgaactcatcgataatgttgttgcaggttgaaatacatgtcagaaaaatgtactgcctcagcagatccttgccaaatttaccacttgttgtggaggatgctgctcgtagtgaatcagatattgaaaaatctggcaaggtagaataatgttttaagttttggagctgcttatgatgatttatatattccttcataagagagctgttgcaggatggcaaacaagctgctcgtgtccttcaggacacacgtttgaataatagggttcttgacatcagaacaccggctaatcaagccatcttccgtattcagtgccaagtccaaattgtaagctctgatttgatatgcaacatggaggattatagctaggtagtgtcaactaggatatgatttgtcattatcctaatagttcattgcatgatttaattgtttgtgtaggcgttcagagaaattcttactatcccaggggtttttttgaattcacacaccgaaattgatcgctggcagta

SEQ ID NO: 144611 - DNA, 2875 bp, Arabidopsis thaliana landsberg
  unsure (1)..(2875): unsure at all n locations
tcttcttgtttcaaatcctctgtttctctgttctcagttttcttgtttatgatcttgaagacagttacttcagatccaacttatctctaccacatatgtccaaacacaannnnnnnnnnnnnnnnnnnnnnnnnnnnnnnnnnnnnnnnaactgttctttcatctctctcctctccaaacgcagcttatgcatcgctttttgataacgcagccgctggtgaagagaacgatagcaacagagtctatggtgtttttctctgccgtggagatgtctcagccgaaatctgccgtgactgtgtcgcgtttgcagccaacgaaacgctccaaaggtgtccaagagagaaagtggcagtgatttggtacgatgagtgtatggtaagatactctaatcaaagcatcgtagggcaaatgagaattagacctggtgttttcttgacgaacaagcaaaacatcacagagaatcaagtgagcagattcaacgagtctttgcctgctctgctcatagatgttgcggtgaaagccgctttgagctcgagaaagttcgctacggagaaagccaattcacggtttttcagacaatctatagccttgtgcagtgcactccggatttgactaatcaagattgtgagagctgtttgagacaagtcattaattacttgccgagatgttgtgatcgaagcgttggcgggagagtaatcgctccgagttgtagcttcagatatgagctttatccattttacaatgaaactatagctgcggctccgatggctcctcctccttcgtcaacggtcgctgcaccaccactgaatattccttcagaaaaaggttaagaatcttgaaactcatagaacataatctagtaaaaaggttgttttgtttcatatgtttttgaaattgtgtttaggtaaaggcaagaacttgacagttatagttaccgcgatcgctgtaccggtttctgtctgtgtgttacttcttggtgctatgtgttggttactagcaagaagaaggaataataagctcagtgctgacacagaggatttaggtagaaccataacagaattgagcgagttttgctattgtctagtctaatttgttgaaactatcttgagaattttcctttcttaatgtagatgcagatggtaatacgtcaacagaaacactgcattcccagtttaaagcaattgaagctgccacatgtaattttcataatgttaacaagcttggtcatggtggatttggtgaagtttataaggtaactaagtcttgtgacttgtgatcaaatagtcatactttaacaaaacaaaaaaggtttaatgcttctgtgtaaaactcattcagggtcagcttataactggagaaacagtagcaataaagagactatctcaaggatcgacacaaggagctgaagaattcaagaacgaagttgatgtggtcgcaaagctacaacacaggaatctagctaagctcttgggatattgcttagatggagaagagaaaatacttgtctatgagtttgttcctaacaaaagcctcgactacttccttttcggtataacaaatcatcactcattcctctaaagaaaatatcggttttcggattaatcagattgttttctttttgtttgtagataatgagaagagaagagttttggattggcaaagaaggtacaagatcattgaagggatagctcgaggaatactatatttacatcgagattctcggctaacgatcattcaccgtgaccttaaagctagtaacatactcttagatgcagacatgcatccgaagatctcagatttcggtatggcgaggatctttggtgttgatcaaactcaagccaatactaaaagaatcgttggtacatagtaagttgtttcttcctcttgtgatcttgacacttcaatgagttattcaatttcccattatgattaaacaagttctctctttagtggttatatgtctcctgagtatgcgatccacgggaaatactcggtgaaatcggatgtctatagcttcggagtcttggttcttgaactcataaccggcaagaaaaacagtagcttctatgaagaagatggtcttggagatttagtgacctacgtaagtactgttttataaccaatcaaaaactctttttaagtactgttttctgaaacattataaatatctgcaggtgtggaagctatgggtggagaattcaccactggagctagtagatgaagcaatgagagggaattttcagacaaatgaagtgatcagatgcattcacattgctttgttatgtgttcaagaagattcttcagagagaccttcaatggatgacattcttgtgatgatgaacagcttcactgttactttaccgattccaaagcgatctgggtttcttcttcgaaccatgaaagactctagagatccacgctcaggaggttctgcttctgatcactctgcaacaagcaagtctttgcctttgtctgttgacgattcttccatcactatagtttatcctcgttgacttcaacaattagttccagtaatgttatgttgtaacttgtaactatgtgaaacaaagcaaaaacttatttagttatgtcctaaaagacaattacataaccgaaaaagctctaaaaatgccaatcagggagatttgagatttcctcacacaacattgccaagacagcaagcttggtaaagtacccgatttatatgaaccatcgagcttgtacagaaaaatataagtcaaaaccacaatcagaaattacaaacctctaaaacaaatgttgttgttgttatacagatgaaagagagactcgaaccaccagtgttaaccgtaacttaggcgagagtcgaggagttttgcggaagtttgtctgcgag

SEQ ID NO: 144612 - DNA, 2990 bp, Arabidopsis thaliana landsberg
atgatggaatctggcgctggtttcgtggccatggaagagaggatctctcctggaagtttcttccagtatcctctttctggattccgtgcttctcctaatcgatccccttgtcctccctctgatcgtgaaaggtttctattttcactcttctttctcaacctttttgctatttgtgaatctgtgttagcttgattgttgtggatccgtttcttcttctggacttgttgctttagcacaacttcaagtgtgtctctttgtgattggtgggtattgttgcctttgattggatcagtgtttaaaaatgattctgtcaagtttgtattttcatgaactgcttacacagatccaaattctcgatcatactctctcacctcaacatgtcgcctttttcacaattagctcacttattattggattctatacaatgtactcttaaggattttaacaagatagctatattttatcaatgttttagaaatgaacgtactgatgtatttttagaagcttagtttacatgtgactgagtactgattccaatgtgacccactcgattcacaccaatgcagcatccactgaaactttttttttttttttaaccttgtgcaggtacttgactgaattattgcaagagagacaaaagttgggtccctttttgcaagttatgccaaattgctgcagactgcttaatcatggtgagctatcttattaagctatgtgattttgaatttagtatttccttagagtgtgtgcacacgaacttaagaaatttcccacgtgaacaaagccttagtgcgcatcaccctggcttttttccagttaaaggtttacagaaattgggtaaggatagttgagtaacaaaaatgtatctacatgcaactttttattctctttgttatggccttcttaatatatatatagccaatcaaagtctatgttacttttagcatttagaaacagtttttaattgcaacttattgctaaatgatcatccttgatgagttatgttatgtgaaaatgaattaagtctatgtgtttgcaaatgataatgatcgttaagcaaatgatcaccaactaatttatactaggaggcctatttgtccgaaaatatgcatatggtgattagaagcttgtttccagacttgtttacctagcttttagttgtccatcatgcccttaagggatgtgtgaaccttaaaagacaaagatgtgtttgaagttttcatcattctaacctattagaacccgagccttttgtttcattattggcattaaagataagagactgaagatgcccctgatgtataactcttacagtttcttttatacgtttgcttaactgccaacattgctgacgtctgtgcagaaatcaggagggtctctagttttcctgatcttgatagatatgagcatggcagtccatttagatcgcttggccagccgacaaatggaaagcttgatttagagggatggtcgatgatgcaagccgaggtaagccactgctgatagttgtagtcaattaactgattcatgttgaattgtaatggtgatactaataatttttataatcaagagtgggctttaccgatattgattgcttttgctttcttcaggaaaactgtcacctccagagagcttctccatttcgcggtccttccccagtgggctggattgggatgccgggactccctaacccacccattgtgaaaaaagtgattagacttgatgtcccagtggataaatatccaagcgtatgtcttaaatctttacccaaataggttattataattggattgttctagagtttaaatccattgagcgttgcagtataattttgttgggaggattcttgggccacgtggaaactccctaaaaagagttgagctagcaacccactgcagggtgtttatcagaggacgaggatctgtgaaggatactgtcaaggtatggctccttgtttattaattctctgaaggattccattttgtctctgttttattcttacagttcaaaacttcactttatgtcatgtttttacctgttaatcagttttataaccatgttttgaatacgcacaattttcttccggcctttaggagcaatttgttttccttttgtgtataagcttacgtcttttagcatatcaagcttattgttgaagtaatgatacattttttactgcatcagcagctactactcttgtttacatttgaagatatgtaaattttggcagcctgtataagaaataaactgttaaagttttaggttcttacatcatcagaagtaaatagagaaagttttgaaattcatttttttctgactcttatatattctctgacaatctaccatgcggtgtgaaagcttatccatttagttctttacttccctgcaggaggaaaaattaaaaggtaagccagggtacgagcatctctgcgagccactacatgtactgatcgaggccgagcttccagaagacataataaactctcgattggagcatgcagtgcatttcctggaatcactcctgaagccgatggtacattcttatcacaaaagtccaaacatgtctattttgttcacatggttttgattcttctctctctacaggacgagtcaatggatcactacaagagggaacagctgaaggagttagcggctttgaatggtacactaagggaggagagtccgagtccgagcttgagcccttgtttgagccccagcatgtcccctttcaacagcaagcgtgctaagacagagatatgatcaagagaaaccactagtgcatgggtcttgtgggcaggatcatgagtttgctaagttctaacgtttggactcttgaattaatttattttgtcattaactttattctttatttttgttggttagctgagatgaccattaaccagtgggtaataaactaataatggtgtttatgaaattgtaatctccttctcaatcattgtaacctttattttaagttttgaaatttctcc

SEQ ID NO: 144613 - DNA, 549 bp, Arabidopsis thaliana landsberg
gtctccctccatcttgctatggatcgtcagccggagagggagaatgatgaactaccatctccggcgataatttccgaccgagttctggtaaatggtgttgtcacgccgttaacgttgaccgccgagggagagctacgatcgacggaatctggacggcggaaatcgacgttggcaaaagaaatcctgagtttcgtcgtggaaggtaacaaggttagagtaaagaccttggttgagaaaggaggaggaatttgctgtagaggaagtgctggagattatgcgaggaacgatttcgttttcgagcctctctctgatgaatctagaaagctttggtccgataagttccatcaacacctcgtctctctcggttagttgaattatcgaaaattgggtatcaccagagctaaaatttcgaaatgcctttcttaaatctcgatgctgattggtgattctttaggtcggccaaaagaaattgcttgtgtttgtgaatccgtttggcgggaagaaaacagcgagaaagatatttcaagaggaagtaaagccattgtttga

SEQ ID NO: 144614 - DNA, 506 bp, Arabidopsis thaliana landsberg
aatgagcacaatagagcagcagcgggtgatgaacattctgtgaatgaaagaggtgttaaagaaacatgtgcgactggttctggttcaagctaataagtgagtgccagcatcttgttggcaaaggtaaatttgactctttgattcacaagtggttgttcatgaatggtttagttattatagcatttggttacttatttcacctgttagctaagcttaagcttatctcatcaattgcgtttttcgcccacaaattctgcatcaccaattacaaaactgtcaatgcaaagcctatgtttctaatgaatgctaaattttttgttctgtttgtgtttttgcagagagaggaagatgttgtccattgtgaaattctgataatatatatatacagagtcagaagtctcaaaagtgtggagcataggaagaaggttattattgataaagaaaaagagttttccgattatcaataaataagaaaagttataatgaccaaaaggaggccttcttaa

SEQ ID NO: 144615 - DNA, 962 bp, Arabidopsis thaliana landsberg
ctggcttgatatctgaggctcacggttctaaagatgcaactgactcctcaaggagtgaaaggctttcatatcttaaagtttcaattgctggaaatgctagggaaagggtatgttcttctgtcaaaaattatattgtagactatctttgcacttcattgcttgatgggatcattttgcagcaaccatggaagaagagaattgaggaagctggtgcagagtttcatgctaatgttaaaaaaggtatggataactcgagtgtctatttttgattattgtgacactagttttagcttttgaatatctctgtttcacaaatttgtaggtacaagctgtttggttgtttgtggactgacagatatcagagacgctgaaatgagaaaggcaaggtagaatattgccttcattgtgctgatactctttaactttgtcacactattttttctcactttgaacgctggagttgatacatgtgtggcaggaggatgaaagtggcaatcgtgagagaggattatttggttgattgttttaaaaaacagaggaaacttccatttgacaagtacaaaattgaagacactagtgagagccttgtcactgttaaagtaaaaggacgaagcgctgtgcatgaagcgtctgacctccaagagcactgtcacattcttgaagatgggaacagtatctataacacaactctgagcatgtctgatctctctaccggtatcaatagttattacatactccagataatccaagaagataaaggttcagattgttacgtatttcgtaaatggggccgagttggaaatgaaaagattggtggtaacaaagtggaggaaatgtcaaagtctgatgcggttcacgaattcaaacgtctatttcttgaaaaaaccggaaacacatgggaatcttgggaacaaaaaacgaatttccagaaacaacctggaaaatttctcccgttggacatt

SEQ ID NO: 144616 - DNA, 2204 bp, Arabidopsis thaliana landsberg
gtggcaatcgttacttactgacatacatcttcatcagtgatttttgggtttgaaatttctctagatcgattttggatttagatctctttgtttctactgcttttcatcgttggatctgcgttttgcaaagggagatacagaaaggaatagctttgaattgacaaggtttctctctaatccaaccgaatctcaagcttccatggctctcaatctccgtcagaaacagactggtaattatttataatctcaagtttctgcgatgattcttctattgcttcatagattgtgttcgatctattaatttgtttttaggaatctggaaatttagagaattctggtttcttatgagttaatattgatattggatctttgatctctctctctctcggtttcagaatgtgtaatccggatgttgaatctgaaccaacctttgaatccaagtggaactgcgaacgaagaagtttacaagatcttgatttacgataggttttgtcagaacattctatctccattgacccatgtcaaggatctgcgtaagcatggagttacactcttctttctcatagacaaagatcgacaacctgttcatgatgttcccgctgtctactttgttcaaccaactgaatccaacctccagaggatcatagccgatgcttctagatctctctacgatacctttcatctgaatttctcgtcttcgatccctcgtaagtttcttgaagagctagcttctgggactcttaaatctggttctgttgagaaagtctcgaaagtgcatgatcagtatctggagtttgtgactttggaagataacttgttctcgctggctcagcaatctacctatgttcaaatgaatgacccatcagcaggggagaaagagattaatgagattatcgaaagggtcgctagtggtttgttttgtgtgttggtaacgcttggtgtggttcctgttatccgatgccctagtggtggacctgcagagatggtggcgtctttgttggatcagaaactgagggatcatcttttgtccaagaacaatctgtttactgaaggtggcggtttcatgagctcgtttcagcgtcccctcttgtgcatatttgataggaactttgagctctcggttgggattcagcatgatttcagataccggcctctcgttcatgatgttctcgggttaaagctcaaccaattgaaagtgcagggagagaaaggaccaccgaaatcgtttgagctggacagttcggacccattctggtcagcaaacagtactctggagtttccagatgtcgctgtggagatcgaaacacagttgaacaagtacaagagagacgttgaagaggttaacaagaaaaccggaggtgggagcggcgctgagtttgatgggacagatctgattggaaacatccacaccgagcatctcatgaacactgtgaagtcgctcccggagttaactgagcgaaagaaagtgattgacaaacacaccaatatcgcaacagcgctcttaggacagatcaaggagagatctattgacgctttcactaagaaagaaagcgacatgatgatgaggggcggaatcgacagaaccgaacttatggctgctctgaaaggcaaagggacaaagatggacaagctccggtttgcaatcatgtacctgatctccacagaaaccataaaccaatcggaagttgaagcagtggaggcagcattgaatgaagctgaggctgatacaagtgcgtttcagtatgtaaagaaaatcaaatcgttaaacgcatcttttgcagctacatcagcgaattcagctagcagaagcaacattgtagactgggccgagaagctttacggacagtctataagcgcagtgactgcaggagtcaagaatctgttatctagtgatcaacaattggcagtgactcgaacagtcgaagctttaacagaaggaaaaccaaacccggagatcgattcttaccgcttcctggacccaagagctccaaagtcgtctagctccggtggtagccatgtaaaaggaccgttcagagaagctatagtgttcatgatcggtggaggtaactatgttgagtatggaagtttgcaggagttgactcagagacagttaaccgttaaaaacgttatttatggagccactgagattcttaacggaagtgagttggtggagcagcttggacttttgggaaagaagatgggat

SEQ ID NO: 144617 - DNA, 2201 bp, Arabidopsis thaliana landsberg
atggtgctaataatagcgttgacatggctccgtagcacgtgcggagagctcgaggaccaactattcgaagtaggaaagcttaagatgttcgtcgacgacctcccagatatgcccagactctatggctttaactcttttcatggtatcatcaaaccagcttctcttcaaatcggcatgttctccactaaatgggtattgttcttttcctctttcaatttctttttcttgaagattcttatgggttggtgactggtgagaataatcttatttcacttgtttacgtaattacgtcttagtcgttttgggaaaaaatgattagattcgttttgcgtttactctcaagtcttcacctaaataaagtgtttttgatgatttttttaaaaaaagacataatgggctttggcccatattctgttaggcccaattagaattgttttttttcctatattatagtaagaaaagaacagaacagaacagaacagaacagagtatggttgtggcgtgacaataaatttattgtaacagaaattccacagagatttgcctgcgacgccagtgtttgcatacggtacatcacggagcaaggcaacagttcctggtccgacgattgaaaccgtatatggagtagacacatacgttacgtggcgaaatcaccttcctaaatctcacatccttccttgggaccccacaatctccccagcaactccgaaacacggtggaattcctacggttgttcacttacatggaggaatccacgaaccaacaagcgacggaaacgccgacgcgtggttcactgccggtttcagagaaacaggaccaaaatggaccaaaacgacgttacattacgagaacaagcaacaacctggtaacatgtggtaccatgaccatgccatgggtttgactcgagtcaacctccttgccggtttggtaggcgcctatattcttcgccaccacgccgttgaatctccctttcagctacctactggcgatgagttcgaccgtaccgttgatcatttttgatcgtagctttcgtaaagacgggtcaatttacatgaacgccactgggaacaacccatcgattcacccgcagtggcaaccggaatattttggcgatgtgataatcgttaatggaaaagcatggccaagattaaacgtccgacgtaggaaatacagattccgtatcataaacgcaagcaacgctaggtttttcaagtttttcttctccaacggtctagatttcatcgttgtggggtctgattcagcgtatttgtcaaagccggtgatgaccaaatcgattctcttatctccatcagaaattgtagacgttgttgttgatttctcgaaatcaccgtcgagaacggtggtgcttgctaatgacgcaccatatccttaccctagtggtgatcctgtcaacgaagaaaatagcaaggtaatgaaatttatcatcaacaatgaactagaagatgacaaatgtacaattcccaagaagctcatcaattatccgaatgctgacgtgtcaaacgccgttctcacgcgttacatctctatgtacgagtatgtgagcaactctgatgaaccaactcatttgttagtgaatggtttgccctatgaagctcccgttacagaaactccaaaatcagggactacagaggtacgttgttaattaacagtctaatctataaatttctttggaaaagtttaataataattgtaaaattaatcaggtatgggaagtgataaatttgacggaagataaccatccgttacacattcatctaggattgttcaaagtggtagagcaaacggcattactggcggcaggattggaggagttcaaggagtgtatgacgaaacaaaacgacgcggtcaagtgtcaaattagcaaatacgctcgtgggaaaaagacagcggtgacggcacacgagaggggttggaagaacgtattcaagatgatgccgggacatgttacgaggatacttgtccgcttttcttatatccacactaatgcatcttacccattcgatccgactcaggaaccgggctatgtctaccattgtcacgtcagtaggatttcaaaatatttttaaattggtaatcgttactacagaaattgtttttaaaagcaatataatgtttttgcattgcagatattggaccatgaggacaatatgatgatgaggccgcttaaggtcatcatttga

SEQ ID NO: 144618 - DNA, 884 bp, Arabidopsis thaliana landsberg
ctgtggacgtaggcatagccaaggcttgaagcctcactttgcgacgattagctaagattatagcgatgaacacatatgcgacaagaacaaacgcaaccgctgacactacaccgagtataattggcagtttactgctctttccattggttgatccacctgacccgataacaaatgtaattttttttacttgcattatatgcataactaaatgttttttttttcttttcttcataatattcatgttatgatgattactgagagctttttctaattaacaaacccataagataacaagataaaatgaatagaaagatccaaatacaaacctggactcacttcattgctccctccagttcctcctttgctagtcccaccggagcctagcacaaataaaattcaatgtgactctttttttttcactcaaacttcaaaggtgattatataatctaaatatactaaaagcttgtttgttttggtaattcgtcgagagatagagtaattcactaaaaatgcattccaagaaaacaaaccagatccggatccactgcttccagatcctcctcctccgcttccaccggatcctgatcctgaacctgaaccagaaccagttccgtttccgcctgtgctttcgcttgtacccttacttatcacatacagctcggccgcatttatcatgggcggcaaaagcgcactagaagtggaccaaagcgtcagtagggtgcttgagctggccaccacatctctcacgaccacttgcgttgcttttccaaacaaaggcacaacaggacccctaccaacttgcttaccaccaaagaaaatgttgaacgatcgtaaactcgactctagaggctccgagaaatacatagccaagtacactggaactt

SEQ ID NO: 144619 - DNA, 462 bp, Arabidopsis thaliana landsberg
aaaatgcagcattttcgcacgtcgtcctcgtagtaagaccaacacaatcacagctcaagtaagatccgacccgtatcaaaacacggggattattatccacaactctcgggtcacggccgcttcggatcttcgacccgttttgggatccacaaagacttatttgggtagaccttggagacaatattctaggacggtttttatgaagacttctcttgatagtttgattgatccacgtggctggctcgagtgggatggtaatttcgctttgaagactttgttctatgctgagtttcaaaatacgggtccgggtgcttcaacttcgggtcgggtcacatggccagggtttcgggtccttggttctgcttcagaggcttccaagtttactgttggtactttcctcgccggtggctcttggattccatctagcgtgccgttcacttctggtctctagtgaatatatgg

SEQ ID NO: 144620 - DNA, 3196 bp, Arabidopsis thaliana landsberg
gtgatgggcctcttctctctgtttaggtttctctttttccaataaaattcgtcttcttcttttctgggtaccgtcgatttcttcctacgagttcgaaattagggtttttttcttcttcttagggctgattttgaggtcgagtagtgggttcttaacgaacttattcgttgaatttctttagggttttctttgtggtctagtttcatagagagattagaagtttggttatgctattgaatgatgtttcatggacaagggttttcgagaaaccgttgtaatgttgtggcagttgtttctggaggagaggtttgcgatattaataaccagatagatggagcttctcatcaacccaaatacccttttccagatctctcttcttcagggcgtctcaaggtaaaaacacttttctaattctcgtaattgatttgctagattgttggttgaaagttggaacctttagtaagtttagacaatgttgaactaagtttgggaattgttagctggtgagagttgttgctataggttgtgttgcttgaggcctttagaaattggtagacttgatgggagaatcttggttctaagtgatttcttaatggagatgttaaagcatttggtgtatgcttttttcatgttgtagtttcaggtactgaataatcctacgccggaggagttccaggttgctgttaactcttcagcaacggattttgtgtacttgcaaggggaacatagtggagatagtgatgaagttggtcccttagtgttgggatatactgatttttctactcctgatgccttggttactctgtttggttccacattaccgacaacggtaggtgcatcattcgttgttttacgtttctcgtttttagttaaggatttccttttacgttgatgcctcatgccactaagattttcttaataaatcgctgttagtctcttgacaatgtgcttaaaaggctccatagagtatcctctacatgaatgttaaaacattttccatacctagtgagatattaatatgttttggcatcatattgttttcacaggtttaccttgagctcccaaatggtgaagaattagctcaagcactctactctaaggtacaccactcttgataagcacctttcacttttcttcttattacctctttgttgctctatttcacctaatggtgattttcttttgcagggtgttcaatatgttatttattggaaaaatgttttctcgaaatatgcagcctgccattttcgccattctctgttttcagtcatacagaggtaattgtttactcgagcatctgacatagcgacaagccttaattttagtctgatttacatctatattttatatagttttttcccctagtctacaaatttatttgacagtgatatgctctttggcaatgcagttcgtgcagcgatacatgggatgtgttccatgttgcagaagcatctttcccactctattgtacgagtgacaatgctgtccttccttctaacattctaccgtaaaatgaattatgagatgggaccttgcttgcttggagaacctgcaaagattgatgtggtttcaccggaagctgatgaactagaagaggaaaattcattagagagcctcccatcaataaagatatatgatgaagatgttactgtgaggtttcttttgtgtggaccaccatgcacagtggtgggtgttgttgaccttctcgcgcattttatgatactggcttgtttgtgcagatgttagtatttctttatgctatcttcagttacaaagctttttctctatttcaggatacatttttactgggatctttgatggatggacttaatgctctcttgcgaatagaagtgagtagttggtagtttacagttttgatatttcttcataagtgcgcatactaaaatgtatggatgggcttaattgtatatgtcttcttttagtccttttaaaagaacattatttttttatattgttccagatgcgaggaagtaagctccataaccgttctaggtatgtaatttctatagccaaatgatatgttgcgcatccctcgaataacccttaagattaatcatctatggttttgtgccttttgacttagttttaagacgtacttggttacttttcatttttttgctgatcaaaattgaaactgcagtgctccagcacctcctcttcaagcaggaacatttactcgtggtgtagtgaccatgcgttgtgatgtctcgacctgttcttcagcacacatatcaatgcttgtgtctggaaatgcgcagacctgtttcagtgatcaggcaagggattatatcttttgaaatatagcttatctctgcatacatgtgcaatgggatttattattaatctcctatgtaaatatcagcttttggaaaatcacataaaacatgaggtcgttgagaagatccaactagtccattcagtggtgaactcagaagaaacaaagcggggtttctctgagcctcgtagatctgcctcaatagcttgtggagcaagtgtgtgtgaagtttcgatgcaagtcccaacatgggctctgcaggttaataatctctttctttcctcgacttatatttgttgtagatagtaatctttagcccaattatttatctcatgcaccttgtttccaagtttctcaacaatttagtcagccaaagtagtcacaagagtttcagatgaaaagtttgttatgaaattgtaacgggtagaaataaaggcttttcatgtttcttaacgtttaactcaagctttggcatgtccaaggaccatttttcgtgctttattgctttcactctttattcatgatacttgtgcattttaagtgattacatccagatagtcatgtgatttacattctctttgggttctcaggattttttgcgtttcatgagtttccacttgctaatgcgtgactaagaaaaggttattttgctttcgacaggttttaagacagttggcgccggatgtgtcataccgcagtttagtcgttcttggagtagctagcattcaggggttgtctgttgcttcctttgagaaagatgatgcagaacgtttacttttcttctgcggacaacagatcaatgatacttcaaatcatgatgctcttttatccaaaattcctaactggttaacacctcctttgccaaccagaaaaagatccgagccatgcagagaaagtaag

SEQ ID NO: 144621 - DNA, 1414 bp, Arabidopsis thaliana landsberg
atgagccagaatgctgtagattttgccagaaggagactacaggagcacaatgacccggtcatgtgtagtaaggagctggttgaggaagctttgaagaggaagagtgctgataatgtgacggcagtggttgtgtgtcttcagccacagccaccaccgaacttggtagcgccgaggttgagagttcacagaagcttctcggcggagggtttaaaagatttacagagctacttggatggcttgggaaactaattgggggacatgaggatggtgacgaatgattgatttctctgtttttgttttgtcttttcttacaattttatagtttggggtttggaggttttgttctgttaaattctcgcaatttgagtaagttataacatgaggcggcatacaataatttattgtttggtaggatatatttttttgtcacttttgcataataataattctgcttcagtctcatttgttttgtaactagaaagttattccaattcctgcgtttaccgaatatgttgtgttcttgcagaatgacgtatgttagatatgcagtaaactcgagggtcggctttgaccacatcgccacttatcggtttgcggatgctggaaaagtcagtctagtgatgaggctgagtgagccatcgtcagttactattttatcgtgaaactctgaacaacgagattgtcccggatattcaaatgaggaacaaggcccaatagtccgatcaaagtgggctattcgtatcgcttacgaggcctatacgatggtaattgaattcacgcgcattcatcagcgcgtgatttggagttgctcaatttcagatcgcacaggctctgttaatcatctcctcctccgaaagacagagaaagagacaaatcaaattcattcatatcaaagagatagagagaaaatgtccggtgtggctattcatgcgagttcatggggcgcggctctggtgagaatctctccgtacactttctccgccatcggaatcgccatctccatcggcgtctccgttcttggtgctgcctggtataaatccttttcttcttctccccattgatttgcgaaatcatcatgcttacgaaaactattttgctctctctctttatggtttaggggaatttacattaccggaagtagtttgatcggtgccgccattgaagctcctcgaatcacttccaagaatctcatcaggttttgccttcgattcaacttcaatttcacgaaatttttgtcaatttgtgtgaaccaatgcgtatgccattagattgtagtttaggagattgaagaaagaaaggttgatctagagatttgtcacagtggctctgatttagatgctagaactatgtgaatgaacaagtgtttgttcattgtttttcagtgtaatcttctgtgaagccgtggctatatacg

SEQ ID NO: 144622 - DNA, 500 bp, Arabidopsis thaliana landsberg
ttatattcttgatccaacaaatggctgctgggatattcaggttcattgcatctacatgtagaaccatgaccatagctaataccggcggtgtccttgttctactagtggtgttcttgactggaggtttccttcttcctcgaagtgagattccggtttggtggagatgggcttattggatatcccctctttcttacgctttcaatgccatcaccgtcaatgaattgtttgctcctagatggatgaataaaatggtaattcttcttcatgttttcttttctccgtaagtcctcatcaccaacctttagcttgtagctaattaactattacttctggtgaaaaaatgcagtctggcaacagcacaacgaggttgggaacaagtgtgcttaatatttgggatgtatttgatgataagaactggtactggataggagttggaggcttgcttggttttactgtcattttcaacggcttttttacattggcacttacttatctagacc

SEQ ID NO: 144623 - DNA, 353 bp, Arabidopsis thaliana landsberg
atgaaagagaaggagaagaagaaccttatagagattgatcttagtgatttcataagagattccgttccaatgagctttagccatatggtatccgattccccaattaggtaagaactgagcaacttcgattaagttcttcttctttcttcgtttcggtttactcgaatcggagctagggttttcactcgccggcgccgcagagaaatttcttaagagattaagcgagagtctgaaagcaccaacggtttcggttctagagattgctctgttaataagtgtcatcgccatagtgtcgctctcttcctctctctctctctctcaagtgtcagccactgttgaagatcggcgactga

SEQ ID NO: 144624 - DNA, 1806 bp, Arabidopsis thaliana landsberg
atggagcaggaggaggttgaggaggagaggatgaggaataagtggccgtggatgaaggcggcgcagttaatggagtttcggatgcaagctttggtgtatagatacatagaggctggtctccgtgtgcctcatcatctcgtggtgcctatttggaacagtcttgctctcacttcttcctccaattacaactatcactcttcttctcgtaagtaatttgacattcgagttttcttttcaagaaattcttaggagtatatgcgtgatagttgagctagggtaagaaaaagacacaatttagaagattttagacaacataacgacaagtcttggacctcagaatctagagaagtttttgttctgattcaacagttgtaaagtttggggtattgttgtggaaatgcttgatgggttttattgtgcttatttaacttcctgaacatgtttttggcttttgggttctgagttggagaagttaaaagatttacatacacaacaaacttctgttgactgaatttgattttgtgcctattggggattgagttgcagtgttgagtaacaagggagtaacccatatcgacacgttggaaactgaaccaactaggtgcaggagaacagatgggaagaaatggcgctgtagcaacacggtccttctattcgagaagtactgtgaacggcacatgcatagaggtcgtaaacgttcaagaaagcttgtggaatcttcttctgaggttgcttcatcatcaaccaaacacgacaacacttatggtttggataggtataacgagagtcagagtcatcttcatgggacaatctcgggttctagtaatgcgcaggtagttaccattgcttcactgcctagtgccagatcctgtgaaaatgtcattcgtccgtctttagtgatctctgaatccacaaaaaaaagtgtgagtcacggcagaaagaacatggagatgagttatgatgactttattaatgaaaaagaggcgagtatgtgtgttggagttgttcctcttcaaggtatcatgataccatcatactcacaacagaaaaatatctatagaattcatttcttcattgctccatggattgaccaggttccattatttcattactaggtgatgagaacaaaccttcggttcaaaagttcttccctgaggtatctgataaatgcttagaagctgcaaaattctcaagcaacaggaagaatgatataattgcaagaagcagagaatggaagaatatgaatgttaatggtggtttgtttcatggtatccacttttctccagacactgttcttcaaggtattttacctttgcaaccttggcttatcgtcatttcatagggattttcagacatgaccttctgggtcttatatcttgcttcttcgttgtagaacgtggttgttttcgtttacaaggagttgaaacagacaatgaaccaggaaggtgccgaagaacagatgggaagaagtggagatgcagcaaagatgttttgtctggtcagaagtactgcgataagcacatgcatagaggtatgaagaagaagcatccagttgatactactaactcacatgaggatgccgggtttagcccgttaaccgtggaaacagctgttagatcggttgtgccttgcaaagatggagatgaccagaagcattctgtttcagtcatgggaattacactgccccgagtttctgatgagaagagcactagcagttgcagtaccgacactaccattactgacacagctttaaggggtgaagacgacgatgaggagtacttgtctttgttttcaccaggtgtttag

SEQ ID NO: 144625 - DNA, 785 bp, Arabidopsis thaliana landsberg
cagaacaagaacataaatatcttaaactcatgtctgaatgtggatgtttttcggcaacaactatgttgagaatttgtgtagtattgataatatgtttgcatatgtgttgtgcctcgagtgattgtacaagtcacgatgatcctgtgtctcaagacgaagcagagaaagcgacgaagctaaagcttggttcgatagctttacttcttgtagccggaggagtcggcgtgagtctaccgttgatcgggaaaaggattccggcgttacaaccggaaaatgatatcttcttcatggtgaaagcttttgctgcaggagtgatcctctgcacaggtttcgttcatatcttaccagacgcgttcgagagattgagctctccatgtcttgaggacactacagctgggaagttcccgtttgctggttttgtagcgatgctgtcggcgatggggactcttatgatcgacacattcgcgacagggtattacaagaggcaacattttagcaataaccatgggagcaagcaagtgaacgtagtagtagatgaagaagagcatgcgggtcatgttcacattcacacgcacgctagtcacggacacacacatggttcgaccgagttgatcagaagacgtatagtgtcgcaggtgcttgagattgggatagttgtgcattcggttattatagggatatcacttggagcttcacagagcatagacaccataaagccactcatggctgcactatctttccatcagttctttgaaggtcttggcctcggtggatgcatctccctg

SEQ ID NO: 144626 - DNA, 746 bp, Arabidopsis thaliana landsberg
tccacttgaagctattcaacaatttttatagctttcttcctctccaaaaccacaccaaaaaaaaaaaaaaaaaatttgattttcagatccaatcaaccagagatgagagataacaacaataacaacacaagagaagaagagagaagcagttcttcaaagcagcaacaaccacaagctcctatgtctttgaagatcatagattcatgtctcagactaagtgtggttcctctcagtgttgcaaccatctggttaactgtcactaaccacgaatccaacccggactacggcaatttagagtacaactccatcatgggtctcaagtaaacatatactctttactttctttcaactttttagtaagtattttataattattaattaattagttataatttgtaggtatatggttggtgtgagtgccatatctgctatttatgctctgctctctactgtttcttcatgggtcacatgtttagtctccaaagcttggctcttctttattcctgaccaggttttttaaaattatcttctcaatcatttatcaaatatctagtatgcaatttcttatgttagttaataatgtttttatatttttttgggtgtatgaaggttttagcttatgtgatgacaacatcagtagcaggagcaacagagatagtgtatctacttaacaaaggagacaaaatagtgacatggagtgaaatgtgttcttcttatccacattattgttcaaaactcacaattgc

SEQ ID NO: 144627 - DNA, 3500 bp, Arabidopsis thaliana landsberg
atgacgacgacgacgactacttcggcgaagtttgtcgattctctgggaagttctttctgcaagttccatggtacaagttcatcaatttcactcaggtcctatagattcggtttctcttttatgaaaaatgttaaacgattatcgtgtgaaggtagtagcagtagtagtagcagtaggaatgagaattggaatagaacacagaagcagaatcagtttagaccttcaaaggtagtgttgaatcgtcgaaaagacgagagattttcggatttaggggttataagtggtgagaacagtagtcgaagtggtgatgttggtggtggtagtgggagtagtagtacaatggagaagattgtagagaagttaaaaaagtatggatttgtggatgaagatcagtttcaggataaggaagttgaacaagagagaagaattgagaagagttcggtggaggaaaggttctatgtggaagaaagaagaggtggattctcggaggaatcaccatttggtgtatatggagggaatgatgaagttaagtttccttgggaaaaggtgagttctatggagaagaaggagttggtaaatggagagtggacagctaagaaggagagtagatactcgctggcggagatgactctttcggaatttgaattgaatcggttgaggaatgtgatgtttcgaacaaagagtaagatgagagttacgggtgcaggtgttactcaggctgtggttgatgcaatccaggagaagtggaaggggtcagagattgtgagacttaagattgaaggatcaagtgcactcaacatgagaaggatgcatgagatattagaggttttacttcttatgatcccccaatcagtgtttttatttacaaaggcttaatctttggagctttgaaatgatataagtcaaagaattgaaagttctttgtttctagtgtgtcaagtgtaatactaattatatcttcactgtgacagagaaaaactggtggtttggtgatttggaggtcagggacttccatcgccttgtacaattacaaaggtggcagcaacagggatggatcagggaacatgaacaagcaagtatacagaagagcagagagattgccatcttctttacctacaagtacagtggatcaaagtgttcaactagtgaatcttcctcagctagagaaggagccaactgttgtgggaaataaagacaggacatctccacaagaagtagaatatgaagatgaaataaatgaactgttagagggtcttggtcctcggtacacggactggcagggaggttatccgttacctgttgatgctgatttgcttccagggattgttcctggttacgaacctccttttagggcacttccttatggagtgagatcaactctgggaacaaaggaggcaacctctttaagaagaattgctacagttcttcctccccactttgctttaggtattggatttcctttacgactttttgtagagcccaataaggtttttgaatagcgagattttcttttgatgtacaggtcgaagtagacagctgcaagggttggcaacagccatggttaagttatggcaaaagagtttgattgccaaggttgcccttaaacgtggtgtacaactgacgaccagtgagagaatggctgaagacatcaaggtaataaggtttcacagccgagtaacatttaattgtttttatataaatgtagatatcattagaataaatgataaggtgtctatatttgatgctgaatgtttgatgtcatgatcttggtaagtgactgcagagattgacgggaggtatgctgctttcgaggaacaaggatttattggttttctacagaggaaagagttttttgtcactagaagtaggtgaagcattaatggagaaggagatgcttgtaaggactttgcaagacgaagaggaacaagcacgtctaagagcatcatcggctctggttgtcccaagtataaaggctaatcaacaacttgcaaggactttgcaagacaaagaggaacaggcacgtccatcagctctggttttaccaagtactaaagctaatcaaaaccttgtttctgccggtactcttggagaaactcttgatgcaactggtaaatggggaaaaaatctggataacgatgatcatgtggaggaaatgaaacaagaggttgagaaagtgagatctgcaaaacttgtcaggaagttggaaaggaaacttgctttcgtgagttcctgacttgaccctatacttcctacctgtcaaattatatttcacatattgagttaagagattgctcctggaattaaacggattagtacttttcaataaacttttctaggctgagaaaaagctgctgaaagctgaacgggctttagctaaggtggaggaatctctgaagccagcagagcagagaacagaccttgagggcataacagaagaagagagatttatgttccaaaagctcggattgaagatgaaagctttcttacttcttggtaaaccattttattatcaatatgtgggctgatgtagttaagtatgtttgacctgtgttctctgggatattgacttgtctgagaaacttgaattgattgctccaggtcgaagaggggtgtttgatgggactgtagagaacatgcacttgcactggaaatatcgggagctgatcaagattcttgtaaaggctaaaactttagagggtgcacagaaagtggcaatggcccttgaagccgagagtggaggtatcctggtttctgttgacaaaatttccaaaggctatgccgtaatcgtgtatagaggaaaagattataaacgtcctaccacactgaggcctaaaaacctcttgacaaagaggaaagctttggctcgttctcttgagcttcaaaaacgcgaggttcgtgataaaaatatatgcaacaacgtgtgttgatctcaaaatctgcaaacttaccattgatttctacttgttatgaccaacacctgcgtctaatcaagtttaaacctcaccggctaacactgattttgctttcttatttggatactttgcattcaacaggctcttattaaacacattgaggcgatacagacgagatcagagcagctgagagctgaaattgtatggttccatctaatctgtagcattcactaatcaaacaaagaacgcattttcttgttctgcaatgtttgctaacccgagtccctgaattcattctttcaggaacaagtggaacttgtaaaagacaagggagatgaaacattatacgacaagcttgacatggcttattcttctgacgaggaaacagaagaaacagatgtatgatgtttttgccttatacgtctctctttatttccttgaattgtcactatcatgaatgttgtgtttgatgtctttcatattccttgttctcttttggctgttgcagggagaggaagatgacgtgtatttagatacatacgaagacgagggagaagataatgaagaaggtgggattcaggccaacgg

SEQ ID NO: 144628 - DNA, 648 bp, Arabidopsis thaliana landsberg
atggtcctcaccgaaaatgccaagtgttacgtgacgacatcaatttgcagggatcggtcccgattctcaagttggataatcgattcctatctacccaaaattaccaatatgtggtacaagacttcaaattgtgtctctaacagatttggaatgtgtttatacgctgcgtttccacaattattaaggaagacaaagctgattatcaaaacaacagagacagaagaacaaaaccctttttagacgcaatgacgtgtaaagggagagtgagatgagatgttgttcgattaaaaccttctcaagatatagcctcctcaaagaccagtatcgatttgcagccaaggttgaaaaaagaaaaaaagaccacaattttgttgttttactgacaagttttcatggtcgaacatccatgactcaagagcagccggaaatgttttagatgaaagatataaaccaagttgaaacaagaattgtcttactggaacgaaacatctttgaaaataacaattggtccctcaaagtttcaaccttgaaagtcagtttaatttatctccaaaccatagccaccggatgcttcaatctgcaatatataacaacgccattgaaacacaacgtcatagtggttctactgcgacatttcgatataatgag

SEQ ID NO: 144629 - DNA, 753 bp, Arabidopsis thaliana landsberg
ctgagagcatcgtgggaaggactttttaccccgtgatctggaaatacagtgtaacacttcttacttagttttaattatgaaattgcttatttccttgagtaatgacaatatgcatttgcggtaactatttgtaggcattgttactcgaaggccccttgtcttacagttgcaaaagatcgatgatggaacccgggagtatgcagagtttcttcacctcccgaggaaaaagtttactgattttggtgggtttcggctatctcaatttgcagttcaagtttcaccttctcctgtattccattgatatttgattaatttaatcacctctatagctgctgtgaggaaggagattcaagatgagactgacagagagactggacgcagcaaggctatttctagtgttcccattcaccttagcatatactctcccaatggtaaggacaacccaaaatctctttccagttgtatgtgctttttgttcattctctaattttttatcctctttactatgtgtgcagttgtcaacttgacactgatagatcttccagggcttacaaaagttgctgttggtaagttacagtagagcaagaagttttggtctattttttctagcgatgaagcatgaggcaatagactttattctctaccatacataatttggcatgacacgacaaatttcttttggttgatgcagatggacaatctgatagtatagtgaaggacattgaaaacatggttcggtcctacattgaaaag

SEQ ID NO: 144630 - DNA, 3498 bp, Arabidopsis thaliana landsberg
atgtgggcaacttctcctgatcgcctggaacttcccccaagaccatacaatcacaattcaaactgctcagattctccttgcgtatctgaaaccagctcagacattttcagcaaacgagaagtaatacagaaactaaggcagcagctgaagagacgggatgacatgatacaggaaatgcaagaacagattctagagctgcaaaactcgtataacgcacagacggcacactcaagccatctccaggcacagctagacacactgaacagagatctgtttgaatcagaaagagaagttcaaagactgagaaaggcaattgctgatcacagcgtgggatgtggcgcggacagcaatggcaagacatctccggttggaccttggaatggcgggtttatggacagcgaaagcaattatgagtcacaagaaaagagcctaagggatggagaaagagtagagatgttgagaaaggaagtgagtgagcttaaagaagtgatagatgggaaagagtatctacttagaagctataaggagcagaagattgagctttcgcagaaggtaaaagagttgcagcagagactggactcacagctccaaaacttattgtaggtggaaaggttaggcattgtgcatacttgcgtctcttattttttttttcggttctttttcctttttcgagaaaatgaatcttagtatgtactaagaacggtggagatcaagattttcaggttctttctggctttctgctttcgtttttgaatgtcttgattctgttttttctttcaacatttggtgtaaaggtaaatagatagttgttgaagaatttaccgcgggaatagctctctactttttttttttttttattctccgtaattggtaactaacccgataattacaaacgccacgtataaggatgtgttcactagaagaattagccaattttaacacaaatgataaatagtataaacaaattttaaatttataaatagacgcaacatacattattatttttaagatacagttaaaataaaattgttagcaattatgcttattctgaaattttgggtttgaatataaataagaaatagagttttatcctaataagatttatataaataaacatataaagtcaaagtcatactttatcctctcagaggccgtctctcgggttttgctggtcttccttgctcctctcgcttttgaatggagatgtgagctttcttcattcaaagagcaaaactatctaattccatggcgttctccctcctctctccaattcctacctctgcctctctttttttcactctctccgccattaccgcttctaataatgcttcctcctcctctctctcccgtctttactctttatatcaccccaaaggaaccttacgaaccagaaccgcgacctcgtttttcggagcttctgggaacttgaggattgtttccatggcggagaataggcaattggtttgtaggattggtggcggagccggtgctgaattggatgatatggatgaaggtgaaatccagaggattggaaatgaagacgaagacgacgatgaattcatacaagtccatgctaataattcctctgctgcttcgcctgagagatgggatgttttgggtctcggccaagccatggtgagtttttgtttcctataataaatcattctagcttctagcttctagcttcttcttatccttgaagccaccaaatggttgaaatatgtgaatctggatcctaaaaatacttacttggttattgatgatgtgttttatgttttaggtagatttctctggagttgtggatgatgagtttctaaagaaacttggtttagaaaagggaacaaggaaactgattaatcacgaggagaggggtaaattattacaagcaatggatggttgtagctataaggcggcagctggaggctcattgtccaacactttagttgctctcgcaagattaggttctcaatccatctgcgaccggcctttgaatgtggcaatggctggcagtattggaggttatcctctcttttgcttttacgggtactaaactgacttactcatatggccctgctcttcatttatggctaatagtgtatgtagttcgacatagtctactttttattcccctcttaggaatagaggtatggaactatgtatagaatcgttactatacaagagtagtttgtaaggcgtcaaactagcctatcattacatttggtttggtatactcacaagtttttttttttttgtttctataggactaaactacgacgagcaaatgtaaattttctttctgctccaatcaaggacggaacaacaggaacagtgatagttctcacaactcctgatgcacaacgtactatgcttgcatatcaggtaggatttctgatctcagcaaattgctcttgcaatgtattactattcaaaatgtaagggtttccctttcttcttccacaagagtcgagcaaagtttaacttttgaagtagatgacgtgcaagatcattgtagtggtaggatcgatttgcttccataaagcaaccacattgagatagtagtagcattgttaactctgataagtttttcagttttattgatcccactaaataacaaacctaatgttatgtataatttcagggaacatcctctgtcgttaattatgattcttgtttggctagtttgatagccaagacaaatgtctttgttgtggaaggctatttgtttgagcttcctgatactataagaaccataacaaaagcctgcgaagaagcccacagaaacggggcacttgttgctgtgacagcatcagatgtgtcctgcatagagaggcattatgatgatttctggtcagtttcttctccctttacttgaatacattcttgcgtctatttgattttgggtcagttccatcggataggaacagttggaaataatacgaagagagtgattatcttctgtagcttgataagtcatagaagctttgatgcttcaagctgtgaatgtctctcgaaaaaacgaaacttgaacctagataaatgctgatggttttctgttgattcagggacattgtggggaactatgcggatattgtatttgcaaatagcgatgaagcaagagcgttttgtcacttttccgcagaggaaagtccaatttcagcgacaagatacatgagccactttgttccgtttgtttctgttaccgatggaatcaacgggtcatatattggagtaaaaggagaggccatctacattcctccgtccccatgcgtgccagttgatacatgtggtgctggagatgcatatgcttcagggatcttatacggtatcttgaggggtgtctctgacttgaaaggaatgggagatatggctgcaacgattgcagcaactgtggtgggtcaacaaggaaccaggcttagggttcaggacgcggttgagctggctcgatcacatgccttccgtctcaatggttctggtgttcgaacagatgttgggtcttga

SEQ ID NO: 144631 - DNA, 1856 bp, Arabidopsis thaliana landsberg
atgactgttggatgcaaacaagcaatcgagctcgcggttagtattctggctaaaccgaaagccaacatcttgcttccgaggccaggcttcccatgggacatggtccactctatctacaaacaccttgaggtccgaaggtatgagttcatccctgaaagagactttgagatcgatttcaacagcgttagagagatggtagacgagaacacttttgcgatatttataatcaacccccacaatcccaatgggaactactacactgaggctcatcttaagcaggtatttacgtacgtattagtactcttggagaagtatatattcacatgattggctagatgatctagacttgagatcttttagtttgtgtttacgtttatattgacatggttttttctttaaattaaaagactacatctttgacttaattttataagaaatatatatttcaaacgttgtaaacgtaaccagcaaagcaatacacatttatttcgtttacaatttgcactatattagataaaaattttacaaaatttaaattttacaatctaatagataacattattttagcaaccaaggccctaatatttacttgaaagatgaatcccagctcgctacattggcacgggaactcgggataatggtcgtttcggatgaagtatatagatggaccgtattcgggagtaatccatttgttccaatggggaaattctcctcgatagtaccagtgattacactcgggtccatatcgaaaggatggattgtcccaggatggcgaacgggctggctcgcgttacacgatctaaatggtgtctttagatccacaaaggtccggttcactttttttgttttgtttaatatcgatatacgtgatatgcatcgttttcctatatactattatatttgattaactgtaaatgaaaaaattcatttcaattaggcttatctagttttatatggacaggtcttaaaagctgcgaaagaatttctggagattacttccaaaccaccaactgtcatccaggtttggatcattattggtttactctcgtaaatgaaaaaaatacaaaaatcgataatccatttattattgtcaattgttatagtctatggccaattcactatcataatcttatgatataggcggctattcccacaatcttggagaaaactcctcaagattttttcgagaagagggggatttttctaaaagacaaagtggattttggatattctaagctcaagaacataccaactctcacctgctacatgaaacctgaatcatgcaccttcttatgggtattctatcctataatcattacatgtctagtctactataacttttcttttaatgtattagtttgaaacaaacttctcattgtggataatccgcatagcgcagaccaagctggacccattgcattttgtagacattgaagacgatcacgacttctgcaggaagcttgctaaggaagaaaatcttcgtgttttaccaggtaatataatcattatccctctctagagttttcagaagattgagatttaagttttagggaactatgatttaaggaaaaatatattcgattgtttttttttttaacttgtaatataaagaaatatagactaagacatgtaatctagtggttcgtcattgagttacaacctaacattaacacgattaaacgcatgttgttggattggtaggaattgcatttggtcagaataactggttgaggcattctatcgacatggagactccaagattggaggatgcatttgaaagattaaagagcttctgtgaacgccattccgttatagttgaagcttcttcactcaaagacgtcaatggcgtcaactaa

SEQ ID NO: 144632 - DNA, 1446 bp, Arabidopsis thaliana landsberg
tactttttaagttctctttgctgcatgagattttctcatgaaacagaagcagattgaaaattttcctcttttgttggtatgcagtatggtttggtgcatatctctgctggagatttgctgagggctgaaatcgcttctggaagtgaaaatggaagacgtgctaaagaacatatggagaaaggacaattggtccctgatgaaatagttgtaatgatggtaaaaggtcgtttatcacagacagattcagagcaaaaaggatggcttttggatggatatccaaggagtgcatcacaggcaacagctctcaagggatttggattccagcctgatctattcattgtcctggaagtaagcactgttcttaatttcaatgttccttatctctcatctaaaggctttctctagaacttgctagattttacctatacttgtgagttcaatgcaatggataaactcttacttctttgcaccagttattctgcaacagattgctgaaatgtttaattctggcaaatcagtcttaaaatccggacaactgataataaaactaggttcattagcttctgtcacattgctttgactctttatcctatgaatactctagcctcatttgattctcgcctactctgcttttgggacaggttcctgaagaaattctaattgaaagagttgttgggcgtcgattggatcctgtcacaggaaagatctaccacttgaagtattcgcctccagagacagaagagattgctgttagactcacccaacgttttgatgataccgaagagaaggcaaatcaatacttcttatatatctcttgaaagtttctcattcgataattatttctcacacatgagattgactcttagtcaaattatgtctctgaagtttttctctttcgctgtaggcaaaactgcggctgaagactcataaccaaaatgtgagtgatgtgctttctatgtacgacgatataacaattaaggcatgggatctcatccacaccctttctattttggctttgctatctcttctttaatgttttcgtgaagcaaaatcacctcatttcttattattatccagatcgagggaaaccgctcaaaggaggaagtgtttgcccagatcgattcttctctgtccgaattgcttcaagtgtttaacactgctccaagttcacttttaagttgattcgttcttggtacaaacctgatgaagtgcttacccagatcgacactactatgtccaaattgcttcaacagaggaactctgcttcaagttcacttgtaagttgaatcattcttggcaaggacctaaccagcggtaaatatcctttcttgcatttatcacactcgattgatatctcttgtatcgcaataacgggttgttttgtcgccagtaagacaatgtacctcacacctcagaaatatgcagaccttcttcttattacctgta

SEQ ID NO: 144633 - DNA, 2220 bp, Arabidopsis thaliana landsberg
agaaacatgatgaggtcgtttgtctcgtagattactcttctccttcttctctcattttcttgatctgttctctcaaccaaaaagtcatcatttcaaaaacttccggtgccaggaaacagaacaggccctgaagctttcgcttttgattccaccggaaaaggattctacaccggagtcaccggcggtaaaatcctcaaatatcttccaaagaaaggttatgtcgactttgcccagatcacaaactcttcgtaagtttccaagatcattaactttttcatttacttatatatgcttcttatgcatttgaattcaatgttatcaagagcttgatacgcaaatcagaattctttccatatacttcatgataatgatacgaaccttttatattactaaatccgtaacaacattatcttgttttggtaaataaacttgtctagttatcttatagttataaataaaaataaaaaataacattatatatcttctcatgtcacataagacaatgaagtaaaaataaactcgaaatcagatctgacatccacaaatgggaaaactttgttgtcaaatacaaacctcagagtcaatcatgtaatgatgatctaaagatttcgtgcactagagattcagaaataactgcaacctactttttttggtgggctactgcctccatgcaacctactttaaattaatttattcatcaactgagtgccctttatttctcttttcattcgacctaattttttttttttttttttaaatttcaagaattattatgtactcgtataatattcaaaatactaattgttgattaatgtatgtataggatgtataaatgtaatcatctttaatttaacaaaatagaatgtcctaaacaaacattgtaacaggctaaacacacgctagcattaatatcatccgcattgctgtcaaatacgtgtggagctatacaaatataagaatcatatttaactatgtgttaattttttatttttcatttttttgtttgtctatcaaatattaacaaatttgattcgatttacttcaggaagtcttcgttgtgcgacggagcacttggaaccactaacgtctaaaaatgtggtcgaccagccggaatagccttcaacacgaaaacaggtgatctttacgtcgcagatgctgcattgggtctccacgtcatccctcgccgtgggggtttggctaagaagatcgccgacagtgtcggcggcaagccctttttgtttcttgacgggcttgacgtagatcccactaccggcgtcgtctatttcacttccttcagctcaacatttggccctaggtacagttttatttttcccttctatacgtaaatatataaatacacttatcatataatttatgaacaaagtaaatatttatattttaatataaaaatcatcttaaatgatttttttccctttctaagttttgttttttaatcaaatcgaaagttttcttttgttgctgtgatcactcaataaaaagcttatagtgtatttctttagttagagccaaattaattttgatgctttttgttctaattacgaattacgataaaccattttttaacattttcatttgaatcggttaattaatcaaatgatattacttaattactaatattgattatgatgcatatgcagggatgtgttgaaagcagtggcaacaaaagactcgaccggtaagttcttcaaatacgatccatcaaaaaaggtcgtgactgtattgatggacggtcttagcggctcagccggatgtgccgttagctcagatggttcattcgtgctggttggtcagttcacaaaaagtaacatcaagaggtattggatcaaaggatccaaagctggtacttctgaagacttcaccaactcggtctcgaaccctgacaacatcaagaggatcggttctactggaaacttttgggttgcttcggtcgtgaactcagccaccggaccgacaaacccttcggcggttaaagtcagttctgccggtaaagtgcttcagaccattcccctaaaagacaagtttggggatactttggttagtgaagttaacgaatacaaaggacagctttatatcggagctctttttggtcctttcgccggaattcttaagctttaaagtgaacatgatattagtatgggttagaattaaagtgattgaatcgaaataaatatggttacaaagtcttgacggatcaaagtc

SEQ ID NO: 144634 - DNA, 316 bp, Arabidopsis thaliana landsberg
atgaataaatacaaaatagtatttttgattggagaggatcggccctttcttgtcgtcgtttcgaagagactaaaggcgacggagagaatcggagaagaagatgggaacggcggtgggacagtggctagaggaagcgcttgttgacctctgccgcaaaccagagaccggtttgaatttcgatcgtgatgtcatctccggtttagtctcctattgcgatcttgctcagcctgtcgatgccaaggaatatctcggcgtaaatccttccctctttagtcgccaattctcacttaatgcttgtgttattcggattcgatga

SEQ ID NO: 144635 - DNA, 2456 bp, Arabidopsis thaliana landsberg
atgtgtctctgggcctactttaaatcaaatcggacttttctcactcgattattaacgacccgacccgactcgacccggctcggaccggataattacatttgtagctatgagaagaaaaagaagaccacactactctctctatctctctttctctctatctctctctatctctctcatttcttcctgcgtcaatggcgactcaaggtcaggttatcacttgcaaaggtacctttatcctcgatcctcgcactctcactatctgtagacatgttattgaaaaaccctatctccgattattagttttctgattttcatttcattttgacgccgattcacatagctgcggtggcttacgagccgaacaagcctctggtcatcgaagatgtgcaagtggctccacctcaagctggtgaggttcgtatcaagattctctacacgtctctttgtcataccgtctcttacacttggagctgcaaggttcgttctctccattttcattcgtttgagtctgatttagtgttttgtggttgatctgaatcgatttattgttgattagtgaatcaatttgaggctgtgtcctaatgttttgacttttgattacaggatcctgaaggtctctttccttgtattctaggtcatgaggctgctgggtatgtatgttaatggtcattatcatcatcaaattcagttttaaggtcttctcaatgctaaagttcttattttgttttgtgggtataggattgttgagagtgttggtgaaggagtaactgaagttcaagctggagatcatgttatcccttgttatcaagctgagtgtcgtgaatgcaagttttgcaaatctgggaagactaacctttgtggcaaggtgagatctgctactggtgttgggattatgatgaatgaccgtaagtcgaggttctcggttaatgggaaacccatttatcactgtatgggtacttccacgtttagtcagtatactgttgttcatgatgttagcgtcgccaaaattgatcctactgctcctttggataaagtttgccttcttggatgtggtgttcccactggtaagaattgccaccttctcttactgattggtaatatgctaaggtctttcacgatgcttcagttttagagtgtcgcctgccctttctgtttattgatgtaacatcactgataagattgatctgcacagttcttcaccatcctttttattctttccgataggaacctaatttttttcactctgtgtccttctcttctttctttgcgaatttctgactttttggtgatatatatgaacattatggtccctaacagcataacatgtatatgcatcctattaggccttggagcagtttggaatactgcaaaagtagaaccagggtcaaatgttgccattttcggtcttggcactgttggacttgctgtaagctgctacctcaaactttctagtgcttccatatttcctttcttctgcaaggcagagaaccattgtggttaagtgttttaaattgtgaatgtataggttgccgagggtgcgaaaacaagctggtgcttcaaggatcattggcattgacatcgatagcaagaagtatgaaactggtaaatctcctcatctttcttcactggattggttaaccgcatataatttatgcaattcactgagttccttggttgtggaatttcagcaaagaagtttggtgttaacgaatttgtgaacccaaaggatcacgacaagccaattcaggaagtgattgtcgatctcactgatggcggtgttgactacagctttgagtgcatcgggaatgtctccgtgatgagagctgcattggagtgctgtcacaaggtaagtcatccatgtaaaatacagaagaaactgttaaaacattgtagacaagaggattttgttaagagctaaagatgattacgttgtagggatggggaacttcggtcatagttggtgttgcagcatcaggacaagagatatcaactcgtccgttccaactcgtgactggccgtgtgtggaaaggaacagcttttggtggtttcaagagtcgaacccaagtgccttggcttgtagaaaagtacatgaacaaggtaagaaaaaaaacttaaacgtaaggcaaaacgatttttgataatcttttctcttcaaacacttgactgttacgtgttattcgaaccatgcaggagataaaagtggatgaatacataacacacaacttgaccttgggagaaatcaataaggctttcgatctattgcacgaaggtacttgccttcgttgtgtcctcgataccagcaaatgactatatgggtcctctctgctttaatctatgtgttcttgtgactttcgtcttttatcggtattgacatttcctaagagcaacagactactctactcgtgtgtgtctcgtttctatcttatgcttcaataaaatatcaattaagaccgaaa

SEQ ID NO: 144636 - DNA, 930 bp, Arabidopsis thaliana landsberg
ggatgatcgacatgcaacgatgaaatcatcgtcatcgctttttcgtgaaacttcagagaaaaaatcagagagatggatgatgatgaacattggaagattttctccatttttcttgtcttccttatgtataactcttttcttcaccggtttctttgtttatcagaatccttttaaatccattgccgatcaaaatgttctttctttccaacctcaaatcggtaaggtaaaaccatagaaaataaaaatgatgatcatcaaactcttttgattttgttactttctttttttttatctccacgaacttgttcttaggatttattttgattatttgtatctttaaagtttttcaaaattatgtttatttattcccacgtacgtttttgctgttttttgttcttgaaattttgtaaaatatgagaacattttgtagtttttttttctctccaagaactcatgttacgaaaatttcgtgggattatttgtatttgtaaacttataaaacttttgattattatatttaactattcccacaatcttgctgtttttttttaaatctatcagttttgtttaattcctattatgtgttctttagtttgtgtttgaaattctattgatttgtttgtcttttgttgttgcgttttttggttagatcctgagtgtgatttgttcaagggacattgggttccagacaaaagaggatctttatacacaaactcgagctgtcctacgattcccgactcgaagaactgcataaaacaagggagacccgacagagatttcttgttctggagatggaaacccgatggatgcgatcttccgaggtttaatccaaaggcgtttctcagtatggttcgagggaagaagatgaatttcattggtgattctgtagctaggaaccatatggaatctcttctttgcttgttgtcaatg

SEQ ID NO: 144637 - DNA, 215 bp, Arabidopsis thaliana landsberg
cacgacgatcgagaaagttgtcatgtgtgatattgatcaggttaacctcatacctccaattgttttaacaaaaatatacgttcatgcatgatcttaacaaataaatgtttttttttcttcttttaggaagttgttgatttttgcagaagatttctgaccgttaacagcgatgctttctgtaacaaaaagcttgaacttgtgatcaaagatgcaaa

SEQ ID NO: 144638 - DNA, 1018 bp, Arabidopsis thaliana landsberg
atggattctttcccggggaaggttgttgattccgtacgtttctccggcgaatgttcccgggaatacggtaggaggatcttttaattctctctcttcgttgttgttagcatttcattaatggtttatttttgttaacaaaacactgggcaatcaatcaagtatctcgctaggtgtcgaaccttgggctcactaaaacactgggctattttgtaatttagatccaacaatgaagtataatgactggaatacccttatcaccgccttttcctcggaaaaaggatttaattatccaatttagggttcattcacatttcagggaagagagctctgaatctctctgcatctatggaggctacgaaagaaagagttggcttgctcgatacgatcctcccgccggcacttgcagacgccggtctcgaggattgtgctctgccgccggaatctattcaggaagcatttcgcaaagccgctaacgccgtgaagtctcgcgcagcgtcgatattcgaccacgaggaggaagacggttgtttagcggatcctattccggaaactgcagacaagattatcgttggaggagacaatgaaagggatactaaaccgtgaatagctggaaaaggcattgagaagttggctgaatcgaaacaggccggagatttggtggtggctggcgaaggagaagaagggaagagctgcgttgatggtttgaaggatctagatgttgaaggtattgagagaagcagtgagaagaaggatcagagtgatgaagatgaagaagaggagatgaaaccgatcttggttgaaggatttgtctgagagtcctcacattgtcagaagtgttcttccctcgtgtatataaataaaaagtattagacttttacagcttacaaatccgtttgcgttgcttctgttgattgtgcggtgcttaaatgtctgaactttgtctccattggcaatggtggcaaagcttatgtatcgcctgtaagacacaaaactggatgaaataggatttgggccaata

SEQ ID NO: 144639 - DNA, 472 bp, Arabidopsis thaliana landsberg
gaaaaaatgttgggaagcataagcctcatctcctgcaacttctctcgccttccacgtcttcttaaaccctccactcgacctcaaaccctaacacaatcctcaagcctccttcttcttcttcaatcacgagcttcttcttcaccacatagaattgcccttttcccgaaatacgagaagaaagtcacattcttccatatctgcaaaagctcttcaaacaacccagaagaaccagagaagactcaaattcaagatgaaggaagagactggtctagctcaattttgctttttgcgctttggggtgcgctcttgtactattgcttcaatctcgcgtcctgatcaaacacccgtacgcaatcttcaaatacttcataaagttacgattttgcaatcataatataatcttaggtttttgtattgcagacacacgacttgtactttttgaaaaagcttttgaatttgaaggtgatgatgg

SEQ ID NO: 144640 - DNA, 2219 bp, Arabidopsis thaliana landsberg
gaatgcgtggcaaaaactttggaaacatgagtcaagaagaggcaatggagcagtatcttgcacttgtctcaaaggtcatcccaggtttgacgaaagctggtcatactgtgagttgtttgatcttgagggtttgaatatcacctggatgttttaatggcttttgaggtctgagaaacttttgactttgctctctcaacaggtagggaagatgtcagaaatggaaacctctgttggcttgcctccgaattcaggatcattagaagatccgaccaacttagtcacaactggtgttgatgaatccagcaaaaatgatattccctaagagtatgatgtctttttgtcagagatttcttgtatgtttccttccagcacccagttatatggttctttttctaactgcaagctaacttgtcttagaaatagtttcaggggagaggtgaatccagtgcttaagcaggcaaggcttgaaggaggacttagggataacaaaggcaaatctattcttttgcatataagtatttttttaggtgcatctggaaaccaaaacacttaaatatatgtatacatatgtgcgcgaggactggttgatttctagtgcattgattatgcaaagacctatgatttatgaatcaagcaagggtagttatatgaatatgctcttagtagttgtctttggtttgtttccacgtaccagcctacctttggaaataagcaagctttcttacttgcaagaaagagagttgagataagtccatgtgaagccttctcccagcttatggaaccatatggagtacaaatacactccaactgcaaaacacagaatctggtatttccattagcctgtaaagctctttgtccttatgacactgcaccattgtccaatatctttccattacaacttgtaacgatatttaaaaattgaaaactattcccaaaagagtagagtttacaagactaaagatggaattaaaaaaaagaacagaaaaagatggtaccgcttttatttcatttagacaacaaagaactgagattttgggagaaacataaacatgaaaccagagtaaacaaacatccaagtatgttttggaatcaaggtacgatcttgaacgccttgtacttgtcaatccaagagataaaagagttgttggagttcctgaaaccaaggaagccatattccttactcttgttcatactatcaatcattccttcaactccaagtataacatcagcaaaccaccacacaccaacttcctcaagcttcttctcttgcaattgattctccttaaccatctcctcccacactctctctttccctttcatcatctccaccaaccccaaattcttcccttcctcaaatccatactcctcaatcccaaactgctcagctagaatcttccacagatgcttccacttgaagatatcagcattgttgcagttaaacgcctcgttcttcgcatacggatcaaccgccgcccaaatctgctgctccgcaatcaaatccgcgtcagaagccgtcatgaacccttcccaagctttcttgctcccaggaaacaacaacggagacccttcatgcttacatatcgctgcatagacacagagagtcccaacaatgttcatcaaactataaggagagaacccaaagatcatgtttggtctgtggatagaccacgtcacggtttctatcttcttgatctcttcaaacagaatatcctcttgggtataatagaaattctggatctgcaatctcggcatatcctcagtgaacggtggatcgtgacgaggtccgtcaacgttggtgaaagggccaaggtagtgctttgtccctgtctggagacaaacatgtcggagatttggcgcgtatgggataatcgcttggagaacgttacggagcattgagccatttgcttcacagttttcactttccgattcacgattggtccaggtgacgtagaagacatgtgtgacatcggttaaaggggaaagcttggatcttgtgtcttcggcgtcggagacatcgcactggatgtaatcgatcggatgatcggcgttccaggtaggacgaggacgacgagcgacgccgtagactttccatggaccaccgggtgtgtcggaaagagggagaatctccgccaagctgtttccgacgattccagtaacgccgatgatgagagcgacgctctcgaagctttgtgatggttcatcttcgtcgagtttcttct

SEQ ID NO: 144641 - DNA, 581 bp, Arabidopsis thaliana landsberg
gcatatcccgtttagccttacgacaacaacaacaccattcatcatcctctaatcattccgacaacaaccttaacaacatcaacatcaacaacaatctcgagaagctctccaccgaatattccggcgacggcagcacaacaacaacgaccacaaacagtaactctgacgttaccattgctctagccaatcaaaacatatatcgtccaatgccttatgacacaagcaacaacacattgatagtctctacgagtaatcatcaagacgatgatgaaactgccattgttgacgatcttcaaagactagttaactaccaaatatcagatggaggtaacatcaatcaccaatactttcaaattgctcaacagtttcatcatactcaacaacaaaatgctaacgcaaacgcgttacaattggtggctgcggcgactacagcgacaacgctaatgcctcaaacacaagcggcgttagctatgaacatgattcctgcaggaacgattccaaacaatgctttgtgggatatgtggaatccaatagtaccagatggaaacagagatcactatactaatattccttttaagtaa

SEQ ID NO: 144642 - DNA, 1761 bp, Arabidopsis thaliana landsberg
gtgtgattatggttatctgaattcatgtagtttgaagggattttcacgagctgtgatcgggtcatgaatgcgtgtctgaggacatgcttgaaccaaggggagcggacataccaatattgttcctggttttggttgtacttcctgtggtagcttacattttattaggaaaatggagtaacatttctgaaaaaagagtaagggctaacttgctggctcagatggcagctgaagaagctttaagagctgagaccgtggttaatgcggatagaggtgtaagatttgagagtgtggctactgagaatagggctcaaagaaccaggaccaagactgtttctgctggtggtggtgctgtaagagcagagtttgacgctggtgcgagagaaactgtagccgagcagagatctgattccgtgactgctacatgtggggttacagttgtggctcctgtcaataataatgagttacatgtatgtgcaaggtgttttggtcctgctaagacacgttgctcgagatgtaaatctgttagatactggtatatttccacgtcattattatttcagaacgtttcttagtttttctttttatctcttttatctttttatatgatgctctcttgccgatgaaagttgctgacattttgacccataaatgtcttgattgtttacgcttgtagctccgggaagtgtcaaataattcactggagggtagctcacaaagatgaatgtgtcccagtggagtcttgctcttcgtcatctgagagggtttccttcgagaaagattctgttttgtatgaccatggcatggattctacaatgtatagtaacaatactacgcaggcagcaaagggaaagacttcaaaaagctctgtggattttgctagcttgggtatctctcagaatgatattacgccacaaatcaacacgcaagggaggaaaagcgtaggaaaacaacattcttccaaggccaaccgagaatcatgtagaagagacagtgctactgtgtttgattcttctgatgaagctgcttgtgctggtggcgataacaagacgagtcacataaaacataaggtaagcactaaccagttcttgaactatttttctccctgtattaaataacagaagtaaatctgttgtgcttacttgccaaaagtcaaaactgtgcttgaatttaaacctggtgattttgcttgcagtcgagaggcaacagttatgctgcagaaacaaatcctagaaggcattctgttgacagctctgctgtgcaaatgaatggacaatcttttgtaagtggtatgcaggaaagtcacaaacacgaaaacaatttgggagtcagaagctcttttggttgtccaaacacacaatatccttcaaacggtgaggcctaataccataacataagctaataaaagttactctatattcagattgagatttgcatcttctaatgtggattgaattaaatagggaccagaactgcaacactgcccagaacaggtattaacaaatctggagaacagtcatgcacagagacaagtaagaaggggcaagtcgctgcagtatcaagtgagcgtccctgacttttgcttcgaccttagaattcttttgttgagtgtctcatgtttgtatctataatccagagactgttcggtctaaggatactggcatcagtgaagaaagcaatggcatctcctcaacgatgggaataatgaagatgatgggtttaagaaattctacaaagcatgatgatcgatataagaacctgaaa

SEQ ID NO: 144643 - DNA, 1129 bp, Arabidopsis thaliana landsberg
tccgctattagctgagccacagtcaacgatgtttccagagatgactcctgaatgtgccacggttatgcctgacctgctcgaaaagtgttttgcaaccggtagtgtgacgccaacagaagattgctgcaccgatctaaaatccgcaacctcaacgcaagtgacttgtctttgtgataactacatagcaaaccccgccgtttcaaacatcaccggaccttactccaaagcaatcacaactaaatgtggcgttttcgacaaatactcttgtgacggtactagtaaaggtacgttaccaactctttcatgttatagcaatttcaaacaagaatggtgcgttcatggtaattaatggattttggttttgtgtggtgaaggaggagaagaaaagaaaggaggaagcagcagtagcaatggtaaagacaatggcaagagtgagggaaatggaggaagagcgaactcggttgctgcatcaatggctatgtttggtttgcttgcaagtctcgtcttcgtaatgttttaatttagttatttgtattcataccaaattttatgtaatttttttcttcttcttcctttttccttgaaagaaaatccgtgaacccaaaacaattacgtacgtttttgagtctataacattttatctgcattattttagggtgttttaactttattgggccttattaacgggcttatagtggcccacggaaaaactcgccaacaaaataagccggtttgtaaactaattttattccaatttcaacattttggtttttgttcaattcgattttccgcaaataaaaaagcacgaagccggtccaaaaccggcgatgcttatccgtttagaaatgagaaggtactagaacaaaagccttattcacttccttttgttccccaaattctcgaaatcgaaacacgacttaaaacgaaaaagacgagacttttaacactcagacctaaaccaacactcttcctctttctatctctctctcgccgatcggaagcagatttttctcaaaaggatggattcaacgaagcttagtgagctaaaggtcttcatcgatcaatgcaagtctgacccttcccttctcactactccttcactctccttctttcgtgactatctcgagag

SEQ ID NO: 144644 - DNA, 251 bp, Arabidopsis thaliana landsberg
ctctccaggagaatatacagaaaaaggtttaaaagaaacactgacagttagggctatggtggcggcgaatatacacgacgccgttgtttccgatgacctgaactatgaaatctgggctccaatcgcgaaaactacactaacggagaaaggactttgggatgttgtcgagaacggagtcccaccgtatccatcgaaggttccagagttagcagcgacgattcaagccgaagagttttcgatatggagagatc

SEQ ID NO: 144645 - DNA, 1501 bp, Arabidopsis thaliana landsberg
gtcaatggcctcttcttcggatccatggatcagagagtacaatgaggctttgaaactctctgaggatattaatggcatgatgtctgaaaggaatgcctccgggttaaccgggcctgatgctcaacgtcgtgcctctgcaattcgaagaaagatcaccattttggggactcgattagacagtctgcaatcccttcttgtcaaggttcctggcaagcagcatgtgtaagccattctgattctggttgcctgttcaaactcctcatgttagacaacgctaagtttcatgttggtcttgaactatgtaattatggtttatgtgtatgcaatttgctgataaacagttcggagaaagagatgaatcgtcgcaaggatatggttgggaatttgagatcaaaaacaaatcaggtggcctctgctttgaatatgtcaaactttgcaaacagagacagcttgtttggaacagatttaaagccggatgatgcgataaatagagtctctggcatggacaaccaaggaattgttgtatttcaacggcaagttatgagaggtaagatgtggtatgtaacactgttctaggaccatagtaatgatcttggcgtctgtattaatttctctttgattgtattttatttccatgagtagaacaagacgagggacttgagaagttggaggaaacagtcatgagtaccaaacacattgctctcgctgttaacgaggagctcaccctgcagacaaggcttattgtatgtctccgctgttgttcattgcttttcttgttgattttgatttcttattctaacgaaatgggactttcttccatgcaggatgacttagattacgatgtggatatcactgactctcgcttacgggtaagtatatgcttcgaacaaattagtctcattagtcactagcttaagctggtccattgataagctaaagaacaataggaaggcaagcaagtgattttaacaatatactggtctattatgtctaagaatctctcggtcgttgctttttttttttatcataaaaagcaataattttttagtttaatgtgattcacatctcgtcttggatttgatgtagcctgtttgtgtttcttgatgattgcagcgtgttcaaaagagccttgccttgatgaacaagagcatgaaaagtggttgctcatgcatgtctatgctcttgtctgtgcttggaatcgttggtcttgctcttgtaatttggctgctggttaagtacctgtaatgccaatgtggtggcaacttgtgaaagctcatccttttctctcagcctatcctctgtgcttaatggttgttttctattccttctatcgattgattcgtgtctgtgaagcaaagaaaaataccactgcgtgtaagaaaccctcagaagtacataatctgtattacctttcgatgaaccaccaattgtaaactaagttgacatttgtctatatatggtatggctcctacttggttcaaaaaagaaaactagtggcttg

SEQ ID NO: 144646 - DNA, 1293 bp, Arabidopsis thaliana landsberg
gttttatccgaaaagagccggtactccgagaaagacggagattgtgtttgtggctccaacgggtgaagagattagctcgcggaagcagttggagcagtacctgaaggcccatcctggcaatcctgtcatctctgagtttgagtggacaactggggaaactccaaggaggtcttcaaggatcagccaaaaggttaaggctacaacgcctactcctgacaaagagcccctcctgaagaagagacgatcttctctcacgaagaaggacaataaggaggctgctgagaaaaatgaagaggctgctgtgaaggagaacatggatgttgataaggatgggaagacggaaaacgcagaggctgagaaggagaaagagaaggagggagtgacagaaattgcagaggcggagaaggagaacaacgagggtgagaagactgaggctgagaaggtaaacaaagagggtgagaaaactgaggctgggaaggagggtcaaacggaaattgcagaggctgagaaggagaaggagggtgaaaaggctgaggctgagaacaaagaggcagaagttgtgagagacaagaaagagtccatggaagtggatacctctgagttggagaagaaggctgggagtggagaaggagctgaagaaccttccaaagttgaaggcctcaaggacactgaaatgaaagaggcgcaggaagttgttactgaggctgatgtagagaagaagcctgcagaggaaaagactgagaacaagggcagcgtgacaaccgaagctaacggagaacagaatgtaaccctgggtgagcctaaccttgatgcagatgctgaagcagataagggaaaagaatccaaagaatatgatgagaagacgacagaagctgaggcgaataaggaaaatgacactcaagaatctgatgagaagaagacagaagctgcagcaaataaggagaacgaaacccaagagtctgatgtcaagaagaccgaagctgcagtagcagaggagaagagtaacgacatgaaggcagaagacacaaacagaagcttggaggcgaatcaagttcaacagcagcagggagctgcagcttccgtgagctgttaaaacctatatcgttctgtacagagcacagagcgtgaagagtttgttgtgatttcaggtgtagcattaacattatgagtggttgttgtatgtgttggtagaactaatgtctctctatgttgtagttcagtccattatcatttgacgtttgtatctttgtacctttgtactttgttgtattattaatattaggcatttagact

SEQ ID NO: 144647 - DNA, 2098 bp, Arabidopsis thaliana landsberg
atgggaagcggaagatatctagacgaccctttaacatttactagaaacccaccttcctcgtcgtctccaatcaccgaatctagctttctcgcagaatcgatctctcgctctggtagcttcgagagtgggagcttacgaggaggcgatggtgattgctttagcgacgtcgatttcgcacttgataaactcgctgggactgtacagttctacgagaggcatgtcttcttgtgctacaaaaaaccatccgtttggcctgcgaggatcgaagcgtctgagtttgatcggttaccgaggcttctctcttccgttatattggcgaggaagagtagtatgaagaaagaggtcaagtttttactctactattttctgatgccatcgattcagcttgttcgctgttaacttgcatctactgttttcaagaatatcgcttggttctcataaatctatgtctgattgtttcccaataagtctcccaaataagcaaaaagcatttgcgttcacttgttttggcttacttaaagtatctgtttaaggtcgtaatgagtcataaaaactcttgcctggtgactcttgggatttctgtatgggtcaaataaggcaaagtttctatttttggcacgattctatggctaacaacataataacttgtctattggcttcaagatgggatcttaggacttgcacctccgttctttgagctatgacagtggtgaacttaagtggaaaaggcgtctgtaatggattgcttcttttcggatagtctcatgatgatgccttcatgattgtcttttgctttgtgcctcatgtttttttttttttttttggccattgtttcgtagactcgactcacaatatgtgaggggcatgatggaacagagacatccaatggtgatgtacttatttttcctgatatgatcagatacaggtaaggggtgaagtcttcctagttggagatttcttagatttggtttcgttttttctatcaacagttgggacttttttttgacagttttgatttaacaaaaattgcaggagattgactcactttgatgtggagacctttgtggaagaggtgcttgtgaaggatggtgaatggctgcctggaaatcctgaattgctaaaaggctcatatgtctttgtatgttcccatggatcccgagaccggcgatgtggggtttgtgggccgtcgctagttagtagattcagagaagaacttgagttccatggtcttcaaggtaaagtgtcaattagcccatgttctcacataggtggtcacaaatacgctgggaatgttatcatctaccgatcaaacatcaacagggaagtcacaggacactggtgagtaaggaattacggatttatcaactagtttgaggctatattcatctttttcatgtggttttacaataattttgaatgagaagatcaagaatacatttgtaatggtgttggtttcatgaacggttgtgatcttttaattggtatcttcaaacttcagttgttattagtacattggaagttctctgcaatgtctgaatcaatcataccctgtttttgacttgaccattgaatcattcttgtgtctaggtatggtatgatgaccccagaagatgtacctattcttttgagcagcacatcaacaaaggcgagattgtagaccggctatggaggtacgtacaaagttttcttgttctgtcagttttctcgcagtttccggattagttggtaattggtagattcacacatgatgcttctctgattattaggggtgaaatgggtctatcagaagaagatcagaagaaaactcaagaagggcgatttcagctaaatggtacagtccattccgtaaagatcaatgggaaagtgagtcaagaatcatcggttcacaacgccgatgtttcctgttgccagtcacgagctgcagaacctaatggttgttgccaacaaaatgggaacagctcttcatgttgtcaagacgacactactctgatgttgtcactgggaacatcagaagataatcaacttgaaagtgaaaacaacactgagaagctgacaccaggaagaaaaattgcagaaaagactttctttagaattaata

SEQ ID NO: 144648 - DNA, 6450 bp, Arabidopsis thaliana landsberg
gtcacaaatacatcacggcgtgcaatagtcacggtgacccttgactcgaattcaattagaagcagacatgggacacctgcatctccaactgcaccactcacttttctttatggtgagtaagttacacatttttgtttctagattcttgttttggttctctctttgaatgaaacatgtatccgcatgatcttagataccgagagacctcatgttatattgaacacaacatctggtatgaggacaagaaagcacaccatccctgtctggatcaaattcatgaagccagtgtttgggtttaactcctcatttgtatcaatctcaggtggatatcttgataggttagtggtcttgtgtgtcttctaacttcttgattttgatgctaagtgatttacataagactttttgcttcttttgttttccacaaattgccagctttgaggaactgagtggaagcatatacattgtatatgtaaaagccaacaccagtacactttctattaagattcctgaaaatgttactcaggatgtcgcgggaaacaaaaatcttgcatccaatatcctaaaagtgaaacattgtaagtgtttcaaccaaattatatgtgttatcaagtactgtaattctgtttctctgcttcttctaatgtttttcatatcttgtacttaattgcagattctgtgcctatgatatcttctgtgatttcttgggtaacaacttacattttcttggtgacgtctttcgttgcgggactcctcactctttcaaccacaagcctttattctcttggcgcattcccaagaccatctccttatctgatatcagaccccacgaggaacctttttgtatgagtttttactcctttataaagctacatatatattgcctttgtttttcctgcaagttacataattaatcaaatggtattgtgtgctttgtggttctaatgcagagaactgcctgtcacattcagttttttgcactcacgagatggctaccggtgacattgcctgttgattactatgaacttgtgagagggattcagtggataatcccttattttccactcccatgggaaactaagatcaaggaacagatcatggtggccacaagtccttacattggtccacactccttcatttctaaaactcataacaacatgattaatcttaagacatcaaccaacgcggagtcagtattcggattgccactcaccgcaatggagtacagattattctttgaggtcaaaagaaacgtttttttcttccctgtattttgtattcttttgatcatgttttaatactgtatgagtgtttacagacttcaaatcttaagccagaagcagaacacgttcttggcctaccacattcaacagtgtaagtcactataatccaagtctatacttctttctatagaaaattttgtgaagattttattgcagcatttgttgcttacttttaatctaattaagaagaagccataaatattcgagtttttcgctttcctgtaggtggagagatttcaataggatcatgttttggatagctataattggaggaagtttggtactactgcatatagtcctctctctgatactgaagttcaagaaagcacacagtgagaagaagaggagttttggtgcgtttgtcttcccaagattcgagctgtttcttctcattctcgccttaccgtcaatctgcaaagctgcaaggagccttatacaaggtattcttattaccagccttgagaatatctttaaatttgaacacatacgctaaattctctctttgtcaggctattttaaacaccaaggagctgcagaagccagtgtcattgttggtatccttgtgctttgcgtggtagctattctgcttctggcattgtttctcttcctctcggtcgggataacgtttgggaagttgttacagtataaagagattcatcaagaaggccaaactttccactggtaccaagaactcatccgagtgacccttggtcctggtaaaagaggccaatggacatggaaaacagagaactctgtctatctaactaggttaggtccagttttcgaagatttaaggggtccaccaaagtacatgctcacacagatttcaggaagcaatccactcaagcaacaagatgatcggatcatcgcatcagatgatgaaaacgaagatgctgaagctccttgcatacagaaactctttggaatccttagaatttactacacatttctcgaaactgtgaagagggtgtgtttggggattattgctggtgctttccttgacaatgaaactgcgaaaactccgatagtggtcttgttgagcatcacttcctttcagctgtttttccttcttctgaagaagccattcatcaagaaaaaggtacagcttgtagagatcatctctatagcatgtcaagtcggcgtattcgcctcatgtctaatgctcttggcgaaagactttcccgaggcaagcggaaagaaactcgggatattcatggtcgtattgttcttgattggattcattatgctgatgtgcaacgaatggtactcattgtacaaacaaacaaagcggttagaccaaatcaacagatctttcttgagtggtcttaagatgtttatcattggacttgccgcgttaatcctacctcagaaaatgatcaagaacaagatccccgtggctcaactagaagcacgaagcagcagcaatggaggcacaaccccagaattcaggtatagaaattcttccggaagccgaagctcgggtagcttggacaagccatggttgaaacagattagagaaatggcaaagtctagcttcacaagagataggagcaatagtaaggttcctagtgatccttcgtgtagcaaaagcggttggagcagtagtatttggggaacaaagacaagtggaagctcttctaaggaatcatctgcagattacaaatccagacctaagggactttacaaagatttagaggccatttttgcttcaaagtaagaaaaaatggtcatcatgctctctgtatttactctctattcgacgtaaggactactttgtgatatttaataaataatggggtttagaaggtattgatatgaagtatgagggcttgataagtaaattgtaatttacattatcatctattaaaagtaatatatttacatatttcctctaaaattgattaaagaaatagttgaaattttcagaaactgtcttgtgtcaatcctgcttacatgattcctaagcctggtcttgtttggctccgagaaaattcaattcgaaggagacgaagaagctccaagcatatagacgaagctaatctacgcatcgtccagctcttatcgtgcacctaaatctcagttgttctccaagttgcttcttctttctcaagtacttggctcgatcaatttcaattttcaaaacccgattggggattttggcgtgcttggatcttcatcaattggtgtgagaatccgtctccgttcgttatccatcgatcggttttgtataatttactgttttatttccggttgattcggttttggttttggtttcaaatgatcaatggagaggaggaatcatcgagagttgattcgccaggttcgtcgttacattactcgtcttgtggtgaatcagagtttgagcggtattgtagtgcgaattcggctttgggaacgccgagtatgtgtagctctactggaccgtttcaggattccgaatttgagaattttagcttgggaccaagtctagttaagctctcttctttggatatgtcacgattaggtgatcgaggtatccatttcttcgatgagggcggctcttgtaatggtagaagtagtagtgcgcccgggttaaacaccgggaatgtgaacatcgatatgtgtggtgatttgatggatggtggagctacaattgaaaaagatagtggtatagatagagaagatggaagttccatagatgatgatgaacattctgatggtgatgactcgcttagtgattcaggtgatcattctcgtaattatgtttcacggaatttacagtttcaaaaggaggctaaagatgagaacgataatccatttctcatcaattcttccactgcctttggtacaaatgattgggatgagtttgagcttgaagccactgaacttgttgacactcaatttgacttcagcgggtttgagaagcgtgataaagggtgtactgaaagtgaagggacatccacagatttattctctgtagctttacaaaagcttccagatgtagttcaagcagaaaaaggggaagaacatgaaaatgtaactgtgagcactagacatgctccagatgtaggtgacttcagtgcaaatgttgaagatattagatctagagattttggtgacctgagcgctgaagttaaaaccttggtggttcgtcaatcactggtaacagatgagcctcttcggggcagttgtcttggcaacagtcaaactgaagatagacctgtagtcatgaattaccttcaatcttgtagcgctgatgatgtcctagatattacaccaactgagttaggtattgaagattcttcaggtggggtttgcgaccttgatgacgatgtttcttctggactacttcatgaatcatctgaggatggaaaacagtcaaatccatttggggaatgcacctcagaaccgttgttggcatctcagaactctgatatgccatcatctagagattctcatcctgtaacaaatgcctcaaaagtcacttacacacaacctaaggtcagctacttaatatatgaaacattattaacgttatttttttctgcctgtcaactctgcttgtattgtccttgggttatgtccaagtctgttagatttccatgcttctctgggaaaacagtgcatttcaatttatgatgctcctctcacatctaaacagtggaaatctgagggtttaactgttctactactgttgtgttactatcaccattataagtcaattgttcattaagaaaaacggttcctgcaatctgtaaacttagtggattctactatatctcgttttgattcttttatttttgaatgaagtacaatggccctggattactcatcttgcagaaggcaacgaatatgctgaatgacttctatgatgattttgttcatgatatggaagaaatactgctcgactctggtgaatcatctggggtaaggttttctaagaatgacaagatgttccaactacagctctctctgcctaacagggatggggggcaaactgctacaacgtctggtctagatgattcatctccaacagtttcccagcgatttaggattgatagggttgaagttgtcggtgtaaagcaaaaaaaaggtgatgtttcgctgagtgaaagattggttggggtgaaggaatacacagtgtatgtcataagggtttggagtgggaaagacaagtgggaaattgaaagaagatatcgtgatttttatagtctctaccgtcgtttgacatctttatttgctgatcaaggctggacgcttcctacaccttggacctctgtagaaagagaatccaggaaaatatttggaacatcgcccaatgctgttgctgaaaggactgtcctgattcaagattgtttaaattcagttctccagtcccgtttttttcccacacttccaaatgcgttacttaggtttttatcccctcaagatgcatatgctaattcttcggggttggattctatagtatctccaacaggctctgctgccatcgatgctgctacaaccagttcttcgtatggaaataccatctcgttcattgttgatattcgacctcacaaaacagtaaagcagttgctagaggctcagcattacatttgcgctggatgccacagatactttgatgatggagccactcttgtgcgagactttgtgaaagctcttggatggggtaagcctcggctttgcgaatatactggtcatttgttttgttcttcctgccatacaaatgacatggcagtactgccagcaacagtgttacatcattgggattttaatcgttatccagtttctcaattggcaaaatcatatctagactccatacacgagcaggtaaatttgggtctagtgatatttggtgtaatttattgtcgtttttggatactgagtgctgagatagaacactttccttgcaataactttacttcgccttgatttggttgatgtctgacaaatcttgtttggcagcctatgctttgtgtcagtgcggtcaacccttttttgtcctcaaaagtccctgcactcaaccatattatgagcatccggaaaagaataaccattatgcttccatatgtacgctgcccattccaaaagacactctacaaaggactcagttctcgcagataccttcttgagagctctgaattttttgctttgagagatctaattgatctctccaaagggccatttgcag

SEQ ID NO: 144649 - DNA, 4844 bp, Arabidopsis thaliana landsberg
  unsure (1)..(4844): unsure at all n locations
tgttttgggataggtccaagcgttagctgctgaaaccgaacagccaaaatggtgggagaggaaagcagggccaaacatgattgacattacctcagctgagcagtttctcaacgcgttaaaagatgcgggagatagattagttatcgtagatttttacggaacttggtgtggttcttgccgtgcaatgttcccaaaggtaactttcccattagctacttaacgattgtatctcttcgtgtatactcgatcatctctcattttattcagttcgcgagtcttgaaccattatgtttcttaagcttgctcaaattatcggcttgcttattctaaagctgagactcttttcttattcttttccagctctgcaaaacggcgaaagaacaccctgacatcttgttccttaaagtaaactttgacgagaacaagtctctctgcaaaagcttaaacgtcaaggtgttaccgtatttccacttctaccgcggtgctgatggccaagtcgaatccttctcatgctctcttgccaaggtcagttcttcttgtcccagctttctttaatttcaaacgtcacttgtctatcacgaaaccagagaatagttactgcattgtatagtcttgatggcgacctctaagtctaataagcgtctgcaaacatttatgcagttccagaaactgagagaggcgatagagagacacaatgtaggaagtatcagtaacatctcttcttcagcttctgagaaagttgaagattcaagtgaataatcaatgcctggttcagattgatcacagattattttgttaaatcgcttccctgtatatatgttgactgcattttccatgtggtgcatcataatttttgtacataaataaatgagtctgacttcgagttcatcgcctatcaagtatcagcttccctaaaccgagtaaaaccgggaagtgttgggtttcaaaattaacttggtgagttaacagttaacacacacatccaccgtttttagatagataagaggatgccctaataaaaccactgctttgtcttgggtaagaagaaacgttaacatgttagttgtcctacaaattcattcatctataaacgttaaagtctgtattaacgaatgaaagtaatcaaaagctacatatttattacacaaacaaaaatgcatcagttgcatctcgtctaagaaagcattttttcttcactcgaagaaaaataacaagaagttgaagccttaggctcacgagccaactcctttaacatgtcgagtttctaatccgagtaaaggatttgtatttcgtcgagaaagttgccgcttcttcaaatgtttggcatttgttaagttgcaacttgtctctcttcttcacgttgtccattgtatccttcccactggaatctttgtaggtggaataacaaacaaggaggaacagaaatcggtttgctaattggcgggttaatagttttgtaaaatggtagattaaacatgcgctctatcctgtaacatttctgagcttgagaacttgtagttgaggagaattcagtagcaaattcgttagtagcttccaccgctcgtttttcctagtattgtagctccaaatgtacatcattaatagatcatataaaagaaaattataatttcaaaaaaggctcaagttgaagtatccaacggtggtcaatttaagactataccaacgcctgtacttcaaaagtttctgcaagtattcattagcagtgacgaattcaaatttgaaaaaaaaaacttttatctgtaaattctccatccttaacggtcaaatttagtcgggcagcagacaaactctcaagtccgatcaggaaacgaaacgagaacaaaagaaaagagattggattttggtgacggcgtttccttcgccgtcgtgttcaccatgttcaagagagacgactacattcgaactaatcatgacccctttttttcaaagtggcaggtactctcgcatttcaagaaatttagagattctgggtttagggttttgctccatctttcattccgttgaaaaccctttcgagatcaacagaatttcgaatgaattctcttggaaatatctgcaatttttatttaaagatctaacttttaacgcctaccacacttttcttcaacgtttctttgttggatctctggagattctgagtaattccattgatgattcttgggtttctttcagggtttcgcccgatctatgtttctgcgtaaacccatttcagaaactgcagaattacgcaagacttttgcggactactccttaatttctcgagatttaggtccaaaggtcacatttttaatctccttcatcacattgtaacttgtatctttggttgataactaggtggcttagtctcatgtttgtcatcaatataagctctttatcttaagtaatgaagttggaaaaacacacatttttaaatgtcaaacttattatacttgaaaacagattctggttggagccaacgataaggaaaatttcagagaaggtaaagatcgtgttggtagaaacagagtccaaggagccttccagggtctgtatgagctcagtcatgaccatggcagaaaagatgatgttcttgtggctaatcttggtcaacctgaaagcattagatctaggctccggtcttatagtagatcttttgctcatcatgacttgcttaagcagggtttctctcaaacaattcttcctactactcagaacaaaagtgacaaccgaaccgaagagaagaagtctgattctgaagaagagagagaggtcagttctgatgctgctgacaaggagagtaattcgcttccatctatacttagactcagtcggtctagacctcaaccggtttcagagaaacatgatgacatagttgatgagtctgattctgcttctgcttgtggagtcttactaaaagatggtactacttgcactacaactccagtcaaaggaagaaagagatgcacagagcataaagggaagagactttctcgtgtttcccccgggatccacataccgtgtgaagttcctaccgtaagagaatgtgaagaaactgagaatatatgtggagtgattttacctgacatgatnnnnnnnnnnnnnnnnnnnnnnnnnnggagaaaacgatgcgaggatcacaagggaatgagagttaacgccttcttttttctgctgaacccaacagaacgtgataaagccgtcaatgaggacaaatccaaacctgagacaagtacaggcatgaaccaagagggttcgggtcttttatgtgaagctacaacaaagaatggattgccttgtacaagaagtgctcctgagggcagcaaaagatgttggcagcacaaagataaaacattgaaccacggatcatctgaaaatgttcagtcagcaactgcaagtcaagtaatttgtggctttaagctgtacaatggatcagcatgcgagaaatctccagtgaaaggaaggaagagatgtgaggagcacaaggggatgagaatcacatcttgaattcaaagcagtggagtataactccttttgtaactacctaaccaaaatgttatgtatcgagccggtttggtattggtaaaatctgttgatttgccgtatcatacctttaactctagataataaggttgtatgaattaactaagtaggtgcaatttaatcgaaccgaatatgcatttctgtaagaagcagcttcgatgttctccatcaatgtcttgtctctgtaataaattttgttgctatctgccataatgtagaaaacaagctcactactcgtatgtgtagttgttcagcctatcaacttctgtcttctttctcatcaactttcaacattgatacacatttgttttaagtaagcatcactctagaacttaatggacctccttcttgttttttgccacatctgcttttgtctactggttctgttgtgttgcctttgacacttgaaaatcatctgcagaaccattctaagtcatagcaatctgaggggtcctgttactttaaggtcctgaacagaaatagtatgatgtgtatgcattgtttcaacctgcaagatagaactgggaaaatttcttctgcaatttgtctttttgagttaagaaaccgatgagcatgataaatattttgaaatcctgagaatcaacaatctgtgtctcagtatttcgtaaggtaagatacattggaaagtattcaacaaaaacgtataagcaattatgtgtttacatagagaggtcctagagttttcaattgggattctgacactgtttatatggaggagtgttagcttcagtttcctctaccaaaaaatggaatgtacaatctagtataataatatgtggttttaaacaccacaaagaatcagatcatatggttgatcttagtattaggtgaaaactttcctttttcgtgtcgtcacagcttctgcctcaggttcctctcgaggcgggactcttaagtgcagcttcataatatcatacactgtgaatccgattgccacagacggtacaacctaaagaaacccgaaagaaaaagtgtttgtaacttggttgttcattgtccgaaaacaaagatagatcgatgaaactagtctcaaaccttaaggtaattgatgctaagccctgagaagagttgcttccaaccttcttctcttgcaatcttgaaaagggtttgcattgttcctcttcttgtttcttccttaacggctgaatatagtctctcaacctacagggagtttcggttataatactactcaggatcattttatgaagattcaaggatgtcttctattcgatagaagaagaaccagatcaaacctgcatttgtctccggacaacatcgagagg

SEQ ID NO: 144650 - DNA, 439 bp, Arabidopsis thaliana landsberg
atggcaaacaattgtgatgggagtttgcttcttgctcttcttactcgcgacacgtcacctcgtatgttgcttacctctcactattcatttatcattttcattctccctcaatatgcatgtacaacatttgttacgatggaccgccattgtttctctatacattcttcccgccataaataacgaactaaattgttttggagtaggaaaacaaattgttatttcatcaaaaagttaaatatctaattaatttaatgatttaaatagttattatatactttgatctagtttcctcttaagtaataataagaatggaaatttaacgcagagcatgaagaagccgaagctgttttgggtctcagccggagcaccacttctttccgttatcgtctctacacttcttgtctttgttttcagagcccagcgtcacggaatcaccgtc

SEQ ID NO: 144651 - DNA, 1072 bp, Arabidopsis thaliana landsberg
gttgatcaacaattaaacacataaaccgttaagttgacgtggctgtatctcttccgactcttaaaaatcgaaaattactattatacccctcagaaaaatggcagagcgtgtgtctctcacactcaacggaaccctcctttctcctcctcccacaacaccaacaacaacaatgtcttcttctctccgatctaccaccgccgcttctcttctcctccgctcctcctcctcctcctccagatccactctcactctctccgcttcctcctctctctccttcgtcagatctctcgtctcttctccacgtctctcttcttcttcacctctctctcaggtatatcttcactctctcccttccaatttcctttatctctcctatatctgaagctgattttgtaattccacgacctaatttgatttcagaagaaatatcgaattgcgttggtgaatcggagtttcaactccaccaccgccgctactaaatcttcatcttcagatcctgatcagttgaagaacgctagagaagacatcaaagagcttctcaacaccaaattctgccatccgattttggtttgctcactcccactaatcacttctctgattcgattgatcgattttgatattatgtgttgtgttgtgttgaatcataggttagattaggttggcatgatgctggtacgtataacaagaacattaaggaatggccacaaagaggtggagctaatggaagtttgagattcgatattgagcttaaacatgctgctaacgctggtacctataagctttataccattattacgagttagtgttatttagttgtttgctataagcattgtttgttggttgttattaggtcttgtgaatgctttaaacttgattaaggatatcaaagagaaatactctgggatcagttatgctgatttgttccagttagctagtgctactgctatagaggtgaggttaatagttcttaaaggtagtttttagttgttgtgaataggtttagtaaagttttggtgagttttaggaagctggaggaccgaaaataccgatgaaatatggaagagttaatgcc

SEQ ID NO: 144652 - DNA, 2073 bp, Arabidopsis thaliana landsberg
accagaggccgtctcactctctcgctacatggagagtctctcgattcccgccgcttcttggttttccggcggaaccattcctccgacgaaggtgagagtttctccgccgcatcatctccggcgacctcccaacaggaattcccatcgcttggccgccattaatgccgcttctcgctctggtgacaatctctctctctacattgaaccttactactcaaatgttcgctctttgtggaaaatttcatgtcttttgctttgtttttagtgagtgagctagtggaggaggatgtgttgcaaatgttcatgaaagacagagaagaaaatggagatttcatatctaaagtttctgataggctctggttaaaggagattctcgaatctattgatgttaattccaatggagcttcttcttcagctgttgaactagatgatactcgggttaagtttctttcacttgttcattagtaactgtagctagttttttttcttcagttctaagaatgcttttgacgattaaaattgctaactttgtatcgaggaatagtttgatagttatatcatcctgttgcaattgacatgagagggactacatttttatgaaatccaatattgggaagcgaatttctgaaatctcacatagtcatagcttgcatggcaacaaccttatactcggtgctgacacttgggttgggcactagtgatagctcctttattaatgtctttatgttgtatatgcaggaaagcttgatagatggcgctgatgatgatgaaagtggtttcttgaaacttaaaccgacacaagaatggattggttgggagagtgattctgcccccatgaataagaaagctctagctaaggttggtcatctatttatgaatgttcttgttctctgtattcattcattcacacgtccttctcattgcaaaactctgctgcgtttgtcctacttccttgattgcaggcactacgggatgacagcgagagaaggaagaagtttaactttctgaaatatgaagctgtatgattattcctttcagtatgttttcttaattagtctgccagtcagatctttatgattcaacaaaacactctattatgcaaaatggctgttcagtatgtaccagtagtcaatttgtgtagaatgaactttgaaattgctgcgtttgtgtctttatttttgtagctgaagcgtgaactcatgtacctgtcgattgtaattggaactggatgcagcggatactgtttactagctttatcagttcaggtaagctctgtcaaagctctaaccagtttatactatggcttctctatacgaaaatgtgtctgaaagaaatattctgacatatgacaggctgcagtcagttatgcagttggggttctattcaggttagttgtctattttaattggtttgtacataaatagaccttgacgttgtaagatatagttctgcaacatgcttgatcgagcactcgcgtattcctaaccaaatctgatcatagtgcagttgcttgtaccttcagcttttgtatggatacgctgatggtctatcacgtgaagctgttcctgatatcttcctgaaaaaaaagtctaacaagtaaagaccttgacaactttctagtctggtcacgttttcttctcacttcccatactcacattgctctgaacttgcttttgtattgtcccaattcagaatcgggatcagaagtgaagaccttgaggactttgtagtgaggacaatcaggggcagtggcatggctctctcttctccacgcttggtgataccagctttttttatggtttgtggatactctctcacaagtatttccagaacgacttgttcgactttcaggtaagctattccacgttgcgaggttttagctatgtttatccgtgatacctcaaagttatcacatgttcttagacaagtttgaacctttatattctccacaacgattgtgctttgcagatagttccagcaatggttggtttgtttgtatacaaagctgcagctctcgttcaagtgtacagagacaaccaagatcttcagttcatcttcccagatgactactaa

SEQ ID NO: 144653 - DNA, 1742 bp, Arabidopsis thaliana landsberg
  unsure (1)..(1742): unsure at all n locations
aagaagatcaatatggaagctctaatgcttatcttcacgttctgtttcatagttctctctctcatattcctcatcggaagaatcaagcgaaagctcaaccttcctccgagtcctgcatgggcgttaccagtgatcggtcacctccgtcttctcaagccaccactccaccgtgttttcctctccgtctctcaatctttaggcgacgctccgatcatctccctccgtctcggcaaccgactcctattcgttgtctcttcacactcaatcgccgaggaatgcttcacgaagaacgacgtcatactcgcgaaccgacaaaccaccatttctacaaaacacatctcatacggcaactccactgtggtctctgcttcgtacagcgaacactggagaaatctccgccgcatcggcgccgtagagattttctcggctcatagactcaatagcttttcctctattcgccgcgatgagatcaggaggcttataggtcgtctcttacggaactcttcttacgtaagtgaagtctttgttccaaaaggattagaccttaaatactaatttataatttcttttatgatattagcaaagtttttttgtaaatttttatgctattaaagttttatggaggtgtgttatttttgcaggggtttactaaggttgagatgaaatcaatgttttctgacttaacattcaacaacatcattagaatgctagccggaaagtgttactatggagacggtaaagaagatgacccggaggccaaacgcgtgcggacgcttatcgcagaggctatgagttcttctggtccnnnnnnnnnnnnnnnnnnnataccgatcctgacttggatcacatattccgagacacggataaagaagctcgctactaggcttgatgagttcttgcaaggattggtcgatgagaaacgagaaggaaaggagaagaaggagaacactatggttgatcacttgctttgtctgcaagaaacccaaccagagtactacatggaccgcatcatcaaaggaaccatgcttgtaagtaacagagaatagcttttttaagtagtcattagtacacatttggtatgaaggaactggtttatgtttttgttcttgtatatgtgcaatgtgcagtctcttatagcaggggggactgatacaacagcggtaacattggaatgggcattgtcaagcttgttgaacaatcctgaggtgctgaacaaggctagagacgagatcgatagaatgatcggggaagacaggcttttggaggaatcagacatcccaaatcttccttatctacagaacattgtgtctgaaacgttacgtctgtaccctgcagcccctatgctgcttcctcacgtagcctcgaaagattgtaaagttgggggatacgatatgccgcgtgggacgatgctattgactaatgcatgggctatacacagggatcccctgctatgggatgatccaacgagcttcaagccagagaggttcgagaaagaaggagaggctaagaagctaatgccgttcgggctaggaagaagggcatgtcctggatccggtttggctcagcggctagtgaccttgagtctcgggtctttgattcaatgttttgaatgggagaggattggagaagaagaggtcgatatgactgaaggtccaggactcacaatgccgaaagctagaccgttggaagctatgtgcagagcacgtgactttgttggtaaaatcttacccgactcctcttga

SEQ ID NO: 144654 - DNA, 746 bp, Arabidopsis thaliana landsberg
agaagaagggtttgtgaaatggagtccagtgaggatgtggagaatctgagtagagctattgagaagcttcttcatgagaagaggaagagagaagcttctggtgacgccttcattgaagacgctgatgatcagcttttcctctctagccttatctctcaggtactttaccatcgctctgttttctcctttgttgatttatctgatgttgcagccaatcaactttctgggtatatgattgaatcatgagtatttgagtgagtctgtgtaattgtttcgctgtgatgtgtctgcttcgattttgatgagatccaacaaatacaagcttatcttcatgattgtgtttagttgctgtttcatgtccacaacattatttgtattgggatgtgtccatttcaggcttgtgctaatttttttgccaataacttagttggaatcaccaaaccccaaggggaaagaagatgtcataaccggagaagaagaagaaaaagaagaagaatctgcagattcttcaccatccaaaggaaaaagcgagggccagagacaattggaagaaagtatagaagaaatagctaaagacatcaagaaggtgaagaagcagaacaaaataacccatgtacttctctcggctacgatcatcctgacattggtttggcagctctctgagtactccatgattttcatgttgaaagatagaataagccacccagtcagatccatcggaggtatgcttaatggaatgttcaaag

SEQ ID NO: 144655 - DNA, 957 bp, Arabidopsis thaliana landsberg; identical to SEQ ID NO: 61366

SEQ ID NO: 144656 - DNA, 952 bp, Arabidopsis thaliana landsberg
atgtttcgggcggttggatcggctctgaagaggaacaaagaagcgtttaatggaattgctcgaggattcaccacttcgtctcatcgagttttcacttctaacattacagctgcttctgtaacctctgcttcgtcttctcctttagctggaaactccttctatggcttgcgatctctgctcaaggtagtgtgaataatttcccaaaaaggttgatactttttcgttaaaggttgagacttttgatcagggttatgttaaacttgagatttttggttacttttagaggatcctgagattgggctctgatcaggattatgttttgtgtagggtcaaaatgcttcaatgtttaggaggatgtcaactgtagcgtcgataagctcagagagtaaagagggtttgaagcttcttgtcactggaggacctcaagctcagaaatgggttggaatttggctttttggttcggctgcttgggttttcagcatggttgtacttggcggtgtaacccgattaactcgatctggtttatcgatgactgattggaaatttactggtgaattccctcctctgtcagatgaagcttgggctaaggagtttgagaaatataagcagtcacctgaatataagcggttagtgtttcgattttggtagctaaagctgttgcttgcatttgcgttttctgtatttggacgaagtcttgatcttgaaaatgctgtttgtgttttgggatttggtgttttgtagtgtgaacaaagggatgaaccttgaagattttaagttcatatattggatggagtatgctcatcgaatgtggggaagaggattgggaatcatgtttgctttgccgttttcttattttctgcgtaaagggtatattactctacgtcttggagttcagctctctggtttatttgcgcttggtgctggacaaggtttcattggttggtggatggtt

SEQ ID NO: 144657 - DNA, 571 bp, Arabidopsis thaliana landsberg
cagctaaattgcatgaagatatccagaacattttctctcagaatcagccatcttctgttcttaaaccaccctgcaactaccactggtgacattctaaatggaatgaacaagaccgcttcagcgacaaatggaatattccgtggaacacaagcagcaagtagcggtggtaacgcactccaatatgagtttgggaagcctaagggttctctttccagaagcatgcatgatgaggtactttgagtactcgtcttttttttcttaatgcatcttgcatcatgttttggcttctgagtgcgaggaaccttgatataccccgtaacataggaagtaaacaagcttaatcagtttttcattcgtttgtgactttaaaacaacccagatctctccggaaactggagaatggtaacatttgtggagctatatatatctttgttgaccgtttgaattttgatcttgtggcaaattgaattgcagttgggtacttcttctcaggacgctgcaaaagctgttccctattcttttggaggggaaactgcaaatctccccaaaccaccatctcactcactgggaa

SEQ ID NO: 144658 - DNA, 1227 bp, Arabidopsis thaliana landsberg
cttgatgatctccctgaagttgattgccttctcataactcaaagccttgatgatcattgtcatttgaatacccttaggccactttccgagaaatctccaggcataaaggttatagcaaccccaaatgctaagcctttgctagatcctctttttagtaacgtaagtgacttgtttcaaacttcctaatctaaatcagaattgcagactatcttcaaaaaaatgtaaaatgagaaagagttatatataagagtttctgaaatattactataggtcacttatctggaacctggagatagctttgagctaaatgcaagaaacggttctaaggttcgagttaaagccacagctggacctgtccttggtccaccgtggcaacgccctgaaaacgggtaaaagaaaaaaactcttatcaagcttccagttgctctgtagatttgttctgcaacacataattaataacctggtcatggttatttcagttctgcttcttttgtgttctcaggtatctccttgtatcccctgaagatcagatatctctctactatgaaccgcattgtgtatgcaacatggaacttctgaagaatgaaagagccgacattgtaatcacaccggtcatcaaacaacttctcccacgatttactcttgtttctggtcaagaagacgctgtccagcttgccaaactcttgaaagccaagtaaataatcatctatcgtcttttcgttttagtctcaagataatgtatctacactcttgcactttgtagttatcaatcaggtttatcttggacatttaggtttgttgtgccgatgcaaaatggcgagcttgaagcaaagggacttttagcaagcctagtaaagaaagaaggaactattgaatcatttaaggtgcagctttctcttaaccaaaaagaaaataaatccaaaattccaaatcaatggtgatataatgttttggatgtttgaattgtgaatgcaggaattattgttaaaagagctcccagaagctcaagtgttggagcctatagcaggtataccgctagagatcttggttccatcttcagacatttagagagtaaactgtacatgagagtatgcacatatgtaaatatacacatgtgaaatgaaactttttagaggagatgtaatagtggagaagaggagagatattggaggtatgtctaaggacggatattttgtgtatgttgatctacttaaagatgtatttcat

SEQ ID NO: 144659 - DNA, 1511 bp, Arabidopsis thaliana landsberg; identical to SEQ ID NO: 8725
  unsure (1)..(1511): unsure at all n locations

SEQ ID NO: 144660 - DNA, 414 bp, Arabidopsis thaliana landsberg
tatctctctattgtctgcatcaggatatggtccagagatgaggaaaagaggcgcttccttgaacctttttggacttctcccgcaccgagctaccagagggaatagatcacctaaccaatgtccaccagggaaagttcttgtgattgaagatggagaagcacggtgccttgttaaggaaagagtcgaaataccatttgactctgttgtagcgaaacgcgatgtaacttacggatacggttgagtttgaaagaaattaaacaccctcctctgtaatgttcattgcctgacattcagtgtgtaaagtttcaaccttttcttacctcttagatatgaaagccacatggtgctacataactctcacaagttttgttcatagttgtgcaaataaattggatgagggagagattcatttga

SEQ ID NO: 144661 - DNA, 464 bp, Arabidopsis thaliana landsberg
gaaatttcttctttctctcatcatgtatcattgcaacctcttctcttctggcagctgctatacttccaggctgctttgaacaatcaccataggcataacctctttgtagccaccatcactgttctctggtgatatcactggtttcgattttgtagagctagacctaagaagttccttgcaagaaccggccggttttcttaaggattttgtgttgggagacaaaggaggagagattagagaaattggtcttggtgagggtatctttgatgcaattggattcaaaggcttaggaggcgatttttttagtgagttacgtcggtctaatgtcggaacttggttcgacttcggttgaagaaccggacggccgttgatctgagaaatgttttcttgggtcagattttttaattttgaggaacacattttttttttctgtctagctttgtgttcttgaaggatgatgataa

SEQ ID NO: 144662 - DNA, 295 bp, Arabidopsis thaliana landsberg
gataatgttttgtgatagttttgcatttgcccaagcgatgagttgcttcgggtgttttggtggctctgagagatcaagacattcaccaaatccatatgatgatgatacatattcccatgatagtggtgaaaccagcaatccgggaggagatgatgaagaaggagaagaggaagaggaagtagaggagctaagtcgttccaaacgatctgaagaaattttgaaatgtaaactacaaaatggactagtctgcaggcagtttccagtcaaggaaactaataaacttacacgcggagag
